United States Patent Application Publication US 2025/0074962 A1 - sequence listing, part 12

SEQ ID NO: 19761 - DNA, 2022 bp, synthetic construct
  misc_feature 1..2022: note = Description of Artificial Sequence: Synthetic coding sequence
  source 1..2022: mol_type = other DNA
atggccgaggccccagccagccctgcccccctgagccccctggaggtggagctggaccctgagtttgagccccagagccggcccaggagctgcacctggcccctgcagaggcctgagctgcaggccagccctgccaagcccagcggggagacagctgctgacagcatgatccctgaggaggaggatgatgaagatgatgaagatggcggcggccgggccggcagcgccatggccatcggcggcggcggcggcagcggcaccctgggcagcggcctgctgctggaggacagcgcccgggtgctggcccctgggggccaggaccccggcagcggccctgccacagctgctgggggcctgagcggcggcacccaggccctgctgcagccccagcagcccctgcccccaccccagcccggggctgctgggggcagcggccagcccaggaagtgcagcagcagaagaaatgcctggggcaacctgtcctatgctgacctgatcacccgggccatcgagagcagcccagacaagaggctgaccctgagccagatctatgagtggatggtgcgctgtgtgccctacttcaaggacaagggggacagcaacagcagcgctggctggaagaacagcatccgccacaacctgagcctgcacagccgcttcatgagggtgcagaatgaaggcaccgggaagagctcctggtggatcatcaacccagatggcggcaagagcggcaaggcccccaggagaagagctgtgtccatggacaacagcaacaagtacaccaagagccggggccgggccgccaagaagaaggccgccctgcagacagcccctgagagcgcagatgacagccccagccagctgagcaagtggccaggcagccccaccagccgcagcagtgatgagctggatgcctggacagacttccgcagcaggaccaacagcaatgccagcacagtgtctggccgcctgagccccatcatggccagcacagagctggatgaggtgcaggatgatgatgcccccctgagccccatgctgtacagcagcagcgccagcctgagccccagcgtgtccaagccctgcaccgtggagctgccccggctgacagacatggccggcaccatgaacctgaatgatggcctgacagagaacctgatggatgacctgctggacaacatcaccctgccccccagccagcccagccccaccggcggcctgatgcagaggagcagcagcttcccctacaccaccaagggcagcggcctgggcagccccaccagcagcttcaacagcacagtgtttggccccagcagcctgaacagcctgcggcagagccccatgcagaccatccaggagaacaagccagccaccttcagctccatgagccactacggcaaccagaccctgcaggacctgctgaccagtgacagcctgagccacagtgatgtgatgatgacccagagcgaccccctgatgagccaggccagcacagctgtgtctgcccagaacagcagaagaaatgtgatgctgagaaatgaccccatgatgagctttgctgcccagcccaaccagggcagcctggtgaaccagaacctgctgcaccaccagcaccagacccagggcgccctgggcggcagccgggccctgagcaacagcgtgagcaacatgggcctgtctgagagcagcagcctgggcagcgccaagcaccagcagcagagccctgtgtcccagagcatgcagaccctgagtgacagcctgagcggcagcagcctgtacagcaccagcgccaacctgcctgtgatgggccacgagaagttccccagcgacctggacctggacatgtttaatggcagcctggagtgtgacatggagagcatcatccgctctgagctgatggatgctgatggcctggacttcaactttgacagcctcatcagcacccagaatgtggtgggcctgaatgtgggcaacttcaccggggccaagcaggccagcagccagagctgggtgcccggctag

SEQ ID NO: 19762 - DNA, 2022 bp, synthetic construct; identical to SEQ ID NO: 19761
  misc_feature 1..2022: note = Description of Artificial Sequence: Synthetic coding sequence
  source 1..2022: mol_type = other DNA

SEQ ID NO: 19763 - DNA, 1302 bp, synthetic construct
  misc_feature 1..1302: note = Description of Artificial Sequence: Synthetic coding sequence
  source 1..1302: mol_type = other DNA
atgagggtgcagaatgaaggcaccgggaagagctcctggtggatcatcaacccagatggcggcaagagcggcaaggcccccaggagaagagctgtgtccatggacaacagcaacaagtacaccaagagccggggccgggccgccaagaagaaggccgccctgcagacagcccctgagagcgcagatgacagccccagccagctgagcaagtggccaggcagccccaccagccgcagcagtgatgagctggatgcctggacagacttccgcagcaggaccaacagcaatgccagcacagtgtctggccgcctgagccccatcatggccagcacagagctggatgaggtgcaggatgatgatgcccccctgagccccatgctgtacagcagcagcgccagcctgagccccagcgtgtccaagccctgcaccgtggagctgccccggctgacagacatggccggcaccatgaacctgaatgatggcctgacagagaacctgatggatgacctgctggacaacatcaccctgccccccagccagcccagccccaccggcggcctgatgcagaggagcagcagcttcccctacaccaccaagggcagcggcctgggcagccccaccagcagcttcaacagcacagtgtttggccccagcagcctgaacagcctgcggcagagccccatgcagaccatccaggagaacaagccagccaccttcagctccatgagccactacggcaaccagaccctgcaggacctgctgaccagtgacagcctgagccacagtgatgtgatgatgacccagagcgaccccctgatgagccaggccagcacagctgtgtctgcccagaacagcagaagaaatgtgatgctgagaaatgaccccatgatgagctttgctgcccagcccaaccagggcagcctggtgaaccagaacctgctgcaccaccagcaccagacccagggcgccctgggcggcagccgggccctgagcaacagcgtgagcaacatgggcctgtctgagagcagcagcctgggcagcgccaagcaccagcagcagagccctgtgtcccagagcatgcagaccctgagtgacagcctgagcggcagcagcctgtacagcaccagcgccaacctgcctgtgatgggccacgagaagttccccagcgacctggacctggacatgtccatgggcgcctggaatgtgacctggagccccctgtctgtggtgaacagctggatgctgatgggctggatcctgaccctcatccccagcagcccccacaggatgctgctggtgtag

SEQ ID NO: 19764 - DNA, 1362 bp, synthetic construct
  misc_feature 1..1362: note = Description of Artificial Sequence: Synthetic coding sequence
  source 1..1362: mol_type = other DNA
atgagggtgcagaatgaaggcaccgggaagagctcctggtggatcatcaacccagatggcggcaagagcggcaaggcccccaggagaagagctgtgtccatggacaacagcaacaagtacaccaagagccggggccgggccgccaagaagaaggccgccctgcagacagcccctgagagcgcagatgacagccccagccagctgagcaagtggccaggcagccccaccagccgcagcagtgatgagctggatgcctggacagacttccgcagcaggaccaacagcaatgccagcacagtgtctggccgcctgagccccatcatggccagcacagagctggatgaggtgcaggatgatgatgcccccctgagccccatgctgtacagcagcagcgccagcctgagccccagcgtgtccaagccctgcaccgtggagctgccccggctgacagacatggccggcaccatgaacctgaatgatggcctgacagagaacctgatggatgacctgctggacaacatcaccctgccccccagccagcccagccccaccggcggcctgatgcagaggagcagcagcttcccctacaccaccaagggcagcggcctgggcagccccaccagcagcttcaacagcacagtgtttggccccagcagcctgaacagcctgcggcagagccccatgcagaccatccaggagaacaagccagccaccttcagctccatgagccactacggcaaccagaccctgcaggacctgctgaccagtgacagcctgagccacagtgatgtgatgatgacccagagcgaccccctgatgagccaggccagcacagctgtgtctgcccagaacagcagaagaaatgtgatgctgagaaatgaccccatgatgagctttgctgcccagcccaaccagggcagcctggtgaaccagaacctgctgcaccaccagcaccagacccagggcgccctgggcggcagccgggccctgagcaacagcgtgagcaacatgggcctgtctgagagcagcagcctgggcagcgccaagcaccagcagcagagccctgtgtcccagagcatgcagaccctgagtgacagcctgagcggcagcagcctgtacagcaccagcgccaacctgcctgtgatgggccacgagaagttccccagcgacctggacctggacatgtttaatggcagcctggagtgtgacatggagagcatcatccgctctgagctgatggatgctgatggcctggacttcaactttgacagcctcatcagcacccagaatgtggtgggcctgaatgtgggcaacttcaccggggccaagcaggccagcagccagagctgggtgcccggctag

SEQ ID NO: 19765 - DNA, 444 bp, synthetic construct
  misc_feature 1..444: note = Description of Artificial Sequence: Synthetic coding sequence
  source 1..444: mol_type = other DNA
atgtccttccgcttcggccagcacctgatcaagcccagcgtggtgttcctgaagacagagctgagctttgccctggtgaacaggaagcctgtggtgcccggccacgtgctggtgtgccccctgcggcctgtggagcgcttccatgacctgcggccagatgaggtggccgacctcttccagaccacccagagggtgggcaccgtggtggagaagcacttccacggcaccagcctgaccttctccatgcaggacggccctgaggccggccagacagtgaagcacgtgcacgtgcacgtgctgcccaggaaggccggggacttccacagaaatgacagcatctatgaggagctgcagaagcatgacaaggaggacttccctgcctcctggaggtctgaggaggagatggctgctgaggccgccgccctgcgggtgtacttccagtag

SEQ ID NO: 19766 - DNA, 444 bp, synthetic construct; identical to SEQ ID NO: 19765
  misc_feature 1..444: note = Description of Artificial Sequence: Synthetic coding sequence
  source 1..444: mol_type = other DNA

SEQ ID NO: 19767 - DNA, 444 bp, synthetic construct; identical to SEQ ID NO: 19765
  misc_feature 1..444: note = Description of Artificial Sequence: Synthetic coding sequence
  source 1..444: mol_type = other DNA

SEQ ID NO: 19768 - DNA, 240 bp, synthetic construct
  misc_feature 1..240: note = Description of Artificial Sequence: Synthetic coding sequence
  source 1..240: mol_type = other DNA
atgtccttccgcttcggccagcacctgatcaagcccagcgtggtgttcctgaagacagagctgagctttgccctggtgaacaggaagcctgtggtgcccggccacgtgctggtgtgccccctgcggcctgtggagcgcttccatgacctgcggccagatgaggtggccgacctcttccagaccacccagagggtgggcaccgtggtggagaagcacttccacggcaccagcctgacctag

SEQ ID NO: 19769 - DNA, 444 bp, synthetic construct; identical to SEQ ID NO: 19765
  misc_feature 1..444: note = Description of Artificial Sequence: Synthetic coding sequence
  source 1..444: mol_type = other DNA

SEQ ID NO: 19770 - DNA, 1725 bp, synthetic construct
  misc_feature 1..1725: note = Description of Artificial Sequence: Synthetic coding sequence
  source 1..1725: mol_type = other DNA
atgagggaccccggggctgctgcccccctgagcagcctgggcctgtgtgccctggtgctggccctgctgggcgccctgtctgctggggccggggcccagccctaccacggggagaagggcatctctgtgcctgaccacggcttctgccagcccatcagcatccccctgtgcacagacatcgcctacaaccagaccatcctgcccaacctgctgggccacaccaaccaggaggatgctggcctggaggtgcaccagttctaccccctggtgaaggtgcagtgcagccctgagctgcgcttcttcctgtgcagcatgtatgcccctgtgtgcaccgtgctggaccaggccatccccccctgccgcagcctgtgtgagcgggcccggcagggctgtgaggccctgatgaacaagtttggcttccagtggccagagcggctgcgctgtgagaacttccctgtgcacggggccggggagatctgtgtgggccagaacaccagtgatggcagcggcggccctgggggcggccccacagcctaccccacagccccctacctgcctgacctgcccttcaccgccctgcccccaggggccagtgatggccggggccggcctgccttccccttcagctgcccccggcagctgaaggtgcccccctacctgggctaccgcttcctgggggagcgggactgtggggccccctgtgagcccggccgggccaacggcctgatgtacttcaaggaggaggagaggagatttgcccggctgtgggtgggcgtgtggagcgtgctgtgctgtgccagcaccctcttcaccgtgctgacctacctggtggacatgaggcgcttctcctacccagagcggcccatcatcttcctgagcggctgctacttcatggtggccgtggcccacgtggccggcttcctgctggaggacagagctgtgtgtgtggagcgcttcagtgatgatggctacagaacagtggcccagggcaccaagaaggagggctgcaccatcctcttcatggtgctgtacttcttcggcatggccagcagcatctggtgggtgatcctgagcctgacctggttcctggccgccggcatgaagtggggccacgaggccatcgaggccaacagccagtacttccacctggccgcctgggccgtgcctgctgtgaagaccatcaccatcctggccatgggccaggtggatggagacctgctgagcggcgtgtgctacgtgggcctgagctctgtggatgccctgcggggctttgtgctggcccccctgtttgtgtacctgttcatcggcaccagcttcctgctggccggctttgtgtccctcttccgcatccgcaccatcatgaagcatgatggcaccaagacagagaagctggagaagctgatggtgagaattggagtcttctctgtgctgtacacagtgcctgccaccatcgtgctggcctgctacttctatgagcaggccttccgggagcactgggagaggacctggctgctgcagacctgcaagagctatgctgtgccctgccccccaggccacttcccccccatgagcccagacttcaccgtcttcatgatcaagtacctgatgaccatgattgtgggcatcaccaccggcttctggatctggagcggcaagaccctgcagagctggaggcgcttctaccaccggctgagccacagcagcaaaggagaaacagctgtgtag

SEQ ID NO: 19771 - DNA, 654 bp, synthetic construct
  misc_feature 1..654: note = Description of Artificial Sequence: Synthetic coding sequence
  source 1..654: mol_type = other DNA
atgtccttccggggcggcggccggggcggcttcaacagaggaggcggcggcggcggcttcaacagaggaggcagcagcaaccacttccggggcggcggcggcggcggcggcggcggcaacttccggggcggcggccggggcggcttcggccggggcggcggccggggcggcttcaacaagggccaggaccagggccccccagagcgggtggtgctgctgggggagttcctgcacccctgtgaagatgacatcgtgtgcaagtgcaccacagatgagaacaaggtgccctacttcaatgcccctgtgtacctggagaacaaggagcagatcggcaaggtggatgagatcttcggccagctgcgggacttctacttctctgtgaagctgtctgagaacatgaaggccagcagcttcaagaagctgcagaagttctacatcgacccctacaagctgctgcccctgcagcgcttcctgcccaggcctcctggagagaagggccccccccggggcggcggccggggcggccggggcggcggccggggcggcggcggccggggcggcggccggggcggcggcttccggggcggccggggcggcggcggcggcggcttccggggcggccggggcggcggcttccggggccggggccactag

SEQ ID NO: 19772 - DNA, 1533 bp, synthetic construct
  misc_feature 1..1533: note = Description of Artificial Sequence: Synthetic coding sequence
  source 1..1533: mol_type = other DNA
atgtaccgggccctgcggctgctggcccggagccggcccctggtgcgggccccagctgctgccctggccagcgcccctggcctgggcggcgctgctgtgcccagcttctggcccccaaatgctgccaggatggccagccagaacagcttccgcatcgagtatgacacctttggagagctgaaggtgcccaatgacaagtactacggggcccagacagtgcgcagcaccatgaacttcaagattggaggagtgacagagaggatgcccacccctgtgatcaaggccttcggcatcctgaagagagctgctgctgaggtgaaccaggactatggcctggaccccaagatcgccaatgccatcatgaaggccgcagatgaggtggccgagggcaagctgaatgaccacttccccctggtggtgtggcagacaggcagcggcacccagaccaacatgaatgtgaatgaggtgatcagcaacagagccatcgagatgctgggcggggagctgggcagcaagatccctgtgcaccccaatgaccacgtgaacaagagccagagcagcaatgacaccttccccacagccatgcacatcgctgctgccatcgaggtgcatgaggtgctgctgcccggcctgcagaagctgcatgatgccctggatgccaagagcaaggagtttgcccagatcatcaagattggaagaacccacacccaggatgctgtgcccctgaccctgggccaggagttcagcggctacgtgcagcaggtgaagtatgccatgacccgcatcaaggccgccatgccccgcatctatgagctggccgccggcggcacagctgtgggcaccggcctgaacaccagaattggatttgctgagaaggtggccgccaaggtggccgccctgaccggcctgccctttgtgacagcccccaacaagtttgaggccctggccgcccatgatgccctggtggagctgagcggggccatgaacaccacagcctgcagcctgatgaagatcgccaatgacatccgcttcctgggcagcggccccaggagcggcctgggggagctgatcctgcctgaaaatgaacctggcagcagcatcatgcctgggaaggtgaaccccacccagtgtgaggccatgaccatggtggccgcccaggtgatgggcaaccacgtggccgtgacagtgggcggcagcaatggccactttgagctgaatgtgttcaagcccatgatgatcaagaatgtgctgcacagcgcccggctgctgggagatgcctctgtgtccttcacagagaactgtgtggtgggcatccaggccaacacagagcgcatcaacaagctgatgaatgaaagcctgatgctggtgacagccctgaacccccacatcggctatgacaaggccgccaagatcgccaagacagcccacaagaatggcagcaccctgaaggagacagccatcgagctgggctacctgacagctgagcagtttgatgagtgggtgaagcccaaggacatgctgggccccaagtag

SEQ ID NO: 19773 - DNA, 537 bp, synthetic construct
  misc_feature 1..537: note = Description of Artificial Sequence: Synthetic coding sequence
  source 1..537: mol_type = other DNA
atgagccccagcggccgcctgtgcctgctgaccatcgtgggcctcatcctgcccacccggggccagaccctgaaggacaccaccagcagcagcagcgctgacagcaccatcatggacatccaggtgcccacccgggccccagatgctgtgtacacagagctgcagcccaccagccccacccccacctggccagcagatgagaccccccagccccagacccagacccagcagctggagggcacagatggccccctggtgacagatcctgagacccacaagagcaccaaggccgcccaccccacagatgacaccaccaccctgtctgagcggcccagccccagcacagatgtgcagacagacccccagaccctgaagcccagcggcttccatgaagatgaccccttcttctatgatgagcacaccctgaggaagaggggcctgctggtggccgctgtgctcttcatcaccggcatcatcatcctgaccagcgggaaatgtcggcagctgagccggctgtgcaggaaccgctgcaggtag

SEQ ID NO: 19774 - DNA, 324 bp, synthetic construct
  misc_feature 1..324: note = Description of Artificial Sequence: Synthetic coding sequence
  source 1..324: mol_type = other DNA
atgcagaccctgagcaacatcccctgcttctgcctgcacggcagcctgctgcccagcacagacctggccaccctgagcgcccaccccacagatgacaccaccaccctgtctgagcggcccagccccagcacagatgtgcagacagacccccagaccctgaagcccagcggcttccatgaagatgaccccttcttctatgatgagcacaccctgaggaagaggggcctgctggtggccgctgtgctcttcatcaccggcatcatcatcctgaccagcggcaagtgccggcagctgagccggctgtgcaggaaccgctgcaggtag

SEQ ID NO: 19775 - DNA, 291 bp, synthetic construct
  misc_feature 1..291: note = Description of Artificial Sequence: Synthetic coding sequence
  source 1..291: mol_type = other DNA
atgagccccagcggccgcctgtgcctgctgaccatcgtgggcctcatcctgcccacccggggccagaccctgaaggacaccaccagcagcagcagcgctgacagcaccatcatggacatccaggtgcccacccgggccccagatgctgtgtacacagagctgcagcccaccagccccacccccacctggccagcagatggagcctacatcacagcctatggagtgacccacttcctgatgaacatgctggccgtgtcctccttcttctgcctgcacacagccccccagtag

SEQ ID NO: 19776 - DNA, 537 bp, synthetic construct; identical to SEQ ID NO: 19773
  misc_feature 1..537: note = Description of Artificial Sequence: Synthetic coding sequence
  source 1..537: mol_type = other DNA

SEQ ID NO: 19777 - DNA, 537 bp, synthetic construct; identical to SEQ ID NO: 19773
  misc_feature 1..537: note = Description of Artificial Sequence: Synthetic coding sequence
  source 1..537: mol_type = other DNA

SEQ ID NO: 19778 - DNA, 537 bp, synthetic construct; identical to SEQ ID NO: 19773
  misc_feature 1..537: note = Description of Artificial Sequence: Synthetic coding sequence
  source 1..537: mol_type = other DNA

SEQ ID NO: 19779 - DNA, 585 bp, synthetic construct
  misc_feature 1..585: note = Description of Artificial Sequence: Synthetic coding sequence
  source 1..585: mol_type = other DNA
atgagccccagcggccgcctgtgcctgctgaccatcgtgggcctcatcctgcccacccggggccagaccctgaaggacaccaccagcagcagcagcgctgacagcaccatcatggacatccaggtgcccacccgggccccagatgctgtgtacacagagctgcagcccaccagccccacccccacctggccagcagatgagaccccccagccccagacccagacccagcagctggagggcacagatggccccctggtgacagatcctgagacccacaagagcaccaaggccgcccaccccacagatgacaccaccaccctgtctgagcggcccagccccagcacagatgtgcagacagacccccagaccctgaagcccagcggcttccatgaagatgaccccttcttctatgatgagcacaccctgaggaagaggggcctgctggtggccgctgtgctcttcatcaccggcatcatcatcctgaccagcgagaactggggctgggtgggccgcacccccaggcctgggggcggcctgatgacagagggctgggtgctgaagggcccctgggccatcctcttctag

SEQ ID NO: 19780 - DNA, 1518 bp, synthetic construct
  misc_feature 1..1518: note = Description of Artificial Sequence: Synthetic coding sequence
  source 1..1518: mol_type = other DNA
atgagcaacatctgccagaggctgtgggagtacctggagccctacctgccctgcctgagcacagaagctgacaagagcacagtgattgagaaccctggggccctgtgcagcccccagagccagagacatggccactactttgtggccctgtttgactaccaggccaggacagctgaggacctgtccttccgggccggggacaagctgcaggtgctggacaccctgcacgagggctggtggtttgcccggcacctggagaagagaagagatggcagcagccagcagctgcagggctacatccccagcaactacgtggctgaagatagaagcctgcaggccgagccctggttcttcggggccatcggccgcagtgatgctgagaagcagctgctgtacagcgagaacaagacaggcagcttcctgatccgggagagcgagagccagaagggggagttcagcctgtctgtgctggatggagctgtggtgaagcactaccgcatcaagaggctggatgaaggaggcttcttcctgacccggcggcgcatcttcagcaccctgaatgaatttgtgagccactacaccaagaccagtgatggcctgtgtgtgaagctgggcaagccctgcctgaagatccaggtgcctgccccctttgacctgagctacaagacagtggaccagtgggagattgacagaaattccatccagctgctgaagaggctgggcagcggccagtttggagaggtgtgggagggcctgtggaacaacaccacccctgtggccgtgaagaccctgaagccaggctccatggaccccaatgacttcctgcgggaggcccagatcatgaagaacctgcggcaccccaagctgatccagctgtatgctgtgtgcaccctggaggaccccatctacatcatcacagagctgatgagacatggcagcctgcaggagtacctgcagaatgacaccggcagcaagatccacctgacccagcaggtggacatggccgcccaggtggccagcggcatggcctacctggagagcaggaactacatccaccgggacctggccgccagaaatgtgctggtgggggagcacaacatctacaaggtggccgactttggcctggcccgggtcttcaaggtggacaatgaagacatctatgagagcagacatgagatcaagctgcctgtgaagtggacagcccctgaggccatccgcagcaacaagttcagcatcaagagtgatgtgtggagctttggcatcctgctgtatgagatcatcacctacggcaagatgccctacagcggcatgaccggggcccaggtgatccagatgctggcccagaactaccgcctgccccagcccagcaactgcccccagcagttctacaacatcatgctggagtgctggaatgctgagcccaaggagcggcccacctttgagaccctgcgctggaagctggaggactactttgaaacagacagcagctacagtgatgccaacaacttcatcagatag

SEQ ID NO: 19781 - DNA, 1092 bp, synthetic construct
  misc_feature 1..1092: note = Description of Artificial Sequence: Synthetic coding sequence
  source 1..1092: mol_type = other DNA
atggacagcaccagcctgctgcccaacccctggatccgggtgctggatggagctgtggtgaagcactaccgcatcaagaggctggatgaaggaggcttcttcctgacccggcggcgcatcttcagcaccctgaatgaatttgtgagccactacaccaagaccagtgatggcctgtgtgtgaagctgggcaagccctgcctgaagatccaggtgcctgccccctttgacctgagctacaagacagtggaccagtgggagattgacagaaattccatccagctgctgaagaggctgggcagcggccagtttggagaggtgtgggagggcctgtggaacaacaccacccctgtggccgtgaagaccctgaagccaggctccatggaccccaatgacttcctgcgggaggcccagatcatgaagaacctgcggcaccccaagctgatccagctgtatgctgtgtgcaccctggaggaccccatctacatcatcacagagctgatgagacatggcagcctgcaggagtacctgcagaatgacaccggcagcaagatccacctgacccagcaggtggacatggccgcccaggtggccagcggcatggcctacctggagagcaggaactacatccaccgggacctggccgccagaaatgtgctggtgggggagcacaacatctacaaggtggccgactttggcctggcccgggtcttcaaggtggacaatgaagacatctatgagagcagacatgagatcaagctgcctgtgaagtggacagcccctgaggccatccgcagcaacaagttcagcatcaagagtgatgtgtggagctttggcatcctgctgtatgagatcatcacctacggcaagatgccctacagcggcatgaccggggcccaggtgatccagatgctggcccagaactaccgcctgccccagcccagcaactgcccccagcagttctacaacatcatgctggagtgctggaatgctgagcccaaggagcggcccacctttgagaccctgcgctggaagctggaggactactttgaaacagacagcagctacagtgatgccaacaacttcatcagatag

SEQ ID NO: 19782 - DNA, 1128 bp, synthetic construct
  misc_feature 1..1128: note = Description of Artificial Sequence: Synthetic coding sequence
  source 1..1128: mol_type = other DNA
atgaggtctgtggcccccagcggccccaagatgggcaacatcacagctgacaacagctccatgagctgcaccatcgaccacaccatccaccagaccctggcccctgtggtgtatgtgacagtgctggtggtgggcttccctgccaactgcctgagcctgtacttcggctacctgcagatcaaggccagaaatgagctgggcgtgtacctgtgcaacctgactgtggccgacctcttctacatctgcagcctgcccttctggctgcagtatgtgctgcagcacgacaactggagccatggagacctgagctgccaggtgtgtggcatcctgctgtatgagaacatctacatctctgtgggcttcctgtgctgcatctctgtggaccgctacctggccgtggcccaccccttccgcttccaccagttccgcaccctgaaggctgctgtgggcgtgtctgtggtgatctgggccaaggagctgctgaccagcatctacttcctgatgcatgaggaggtgattgaagatgagaaccagcaccgggtgtgctttgagcactaccccatccaggcctggcagagggccatcaactactaccgcttcctggtgggcttcctgttccccatctgcctgctgctggccagctaccagggcatcctgcgggctgtgagaagaagccacggcacccagaagagcaggaaggaccagatccagaggctggtgctgagcacagtggtgatcttcctggcctgcttcctgccctaccacgtgctgctgctggtgcgctctgtgtgggaggccagctgtgactttgccaagggcgtcttcaatgcctaccacttcagcctgctgctgaccagcttcaactgtgtggccgaccctgtgctgtactgctttgtgtctgagaccacccaccgggacctggcccggctgcggggggcctgcctggccttcctgacctgcagcaggacaggccgggcccgggaggcctaccccctgggcgcccctgaggccagcggcaagagcggggcccagggcgaggagcctgagctgctgaccaagctgcacccagccttccagacccccaacagccctggcagcggcggcttccccaccggccgcctggcctag

SEQ ID NO: 19783 - DNA, 1017 bp, synthetic construct
  misc_feature 1..1017: note = Description of Artificial Sequence: Synthetic coding sequence
  source 1..1017: mol_type = other DNA
atgggcaacatcacagctgacaacagctccatgagctgcaccatcgaccacaccatccaccagaccctggcccctgtggtgtatgtgacagtgctggtggtgggcttccctgccaactgcctgagcctgtacttcggctacctgcagatcaaggccagaaatgagctgggcgtgtacctgtgcaacctgactgtggccgacctcttctacatctgcagcctgcccttctggctgcagtatgtgctgcagcacgacaactggagccatggagacctgagctgccaggtgtgtggcatcctgctgtatgagaacatctacatctctgtgggcttcctgtgctgcatctctgtggaccgctacctggccgtggcccaccccttccgcttccaccagttccgcaccctgaaggctgctgtgggcgtgtctgtggtgatctgggccaaggagctgctgaccagcatctacttcctgatgcatgaggaggtgattgaagatgagaaccagcaccgggtgtgctttgagcactaccccatccaggcctggcagagggccatcaactactaccgcttcctggtgggcttcctgttccccatctgcctgctgctggccagctaccagggcatcctgcgggctgtgagaagaagccacggcacccagaagagcaggaaggaccagatccagaggctggtgctgagcacagtggtgatcttcctggcctgcttcctgccctaccacgtgctgctgctggtgcgctctgtgtgggaggccagctgtgactttgccaagggcgtcttcaatgcctaccacttcagcctgctgctgaccagcttcaactgtgtggccgaccctgtgctgtactgctttgtgtctgagaccacccaccgggacctggcccggctgcggggggcctgcctggccttcctgacctgcagcaggacaggccgggcccgggaggcctaccccctgggcgcccctgaggccagcggcaagagcggggcccagggcgaggagccctag

SEQ ID NO: 19784 - DNA, 1098 bp, synthetic construct
  misc_feature 1..1098: note = Description of Artificial Sequence: Synthetic coding sequence
  source 1..1098: mol_type = other DNA
atgggcaacatcacagctgacaacagctccatgagctgcaccatcgaccacaccatccaccagaccctggcccctgtggtgtatgtgacagtgctggtggtgggcttccctgccaactgcctgagcctgtacttcggctacctgcagatcaaggccagaaatgagctgggcgtgtacctgtgcaacctgactgtggccgacctcttctacatctgcagcctgcccttctggctgcagtatgtgctgcagcacgacaactggagccatggagacctgagctgccaggtgtgtggcatcctgctgtatgagaacatctacatctctgtgggcttcctgtgctgcatctctgtggaccgctacctggccgtggcccaccccttccgcttccaccagttccgcaccctgaaggctgctgtgggcgtgtctgtggtgatctgggccaaggagctgctgaccagcatctacttcctgatgcatgaggaggtgattgaagatgagaaccagcaccgggtgtgctttgagcactaccccatccaggcctggcagagggccatcaactactaccgcttcctggtgggcttcctgttccccatctgcctgctgctggccagctaccagggcatcctgcgggctgtgagaagaagccacggcacccagaagagcaggaaggaccagatccagaggctggtgctgagcacagtggtgatcttcctggcctgcttcctgccctaccacgtgctgctgctggtgcgctctgtgtgggaggccagctgtgactttgccaagggcgtcttcaatgcctaccacttcagcctgctgctgaccagcttcaactgtgtggccgaccctgtgctgtactgctttgtgtctgagaccacccaccgggacctggcccggctgcggggggcctgcctggccttcctgacctgcagcaggacaggccgggcccgggaggcctaccccctgggcgcccctgaggccagcggcaagagcggggcccagggcgaggagcctgagctgctgaccaagctgcacccagccttccagacccccaacagccctggcagcggcggcttccccaccggccgcctggcctag

SEQ ID NO: 19785 - DNA, 1098 bp, synthetic construct; identical to SEQ ID NO: 19784
  misc_feature 1..1098: note = Description of Artificial Sequence: Synthetic coding sequence
  source 1..1098: mol_type = other DNA

SEQ ID NO: 19786 - DNA, 2100 bp, synthetic construct
  misc_feature 1..2100: note = Description of Artificial Sequence: Synthetic coding sequence
  source 1..2100: mol_type = other DNA
atgaccctgcggaggaagtgcaatgaagatgatgaggtgttcttcggccccttcggccacaaggagcgctgcatcgccgccagcctggagctgaacaaccctgtgcctgagcagccccccctgcccaccagcgagagcccctttgcctggagccccctggccggggagaagtttgtggaggtgtacaaggaggcccacctgctggccctgcacatcgagagcagcagcaggaaccaggccgcccaggccgccaagccagaggaccccaggagccagggcgtggagcgcttcatccaggagagcaagctgaagatcaacctgtttgagaaggagaaggagatgaagaagagccccaccagcctgaagcgggagacctactacctgagtgacagccccctgctgggcccccctgtgggggagccccggctgctggccagcagccctgccctgcccagcagcggggcccaggcccggctgacccgggcccctggccccccccacagcgcccacgccctgccccgggagagctgcacagcccatgctgccagccaggccgccacccagaggaagccaggcaccaagctgctgctgccccgggccgcctctgtgcggggccgcagcatccctggagctgctgagaagcccaagaaggagatcccagccagccccagcaggaccaagatcccagctgagaaggagagccacagagatgtgctgcctgacaagccagcccctggagctgtgaatgtgcctgctgctggcagccacctgggccagggcaagagggccatccctgtgcccaacaagctgggcctgaagaagaccctgctgaaggcccctggcagcaccagcaacctggccaggaagagcagcagcggccctgtgtggagcggggccagcagcgcctgcaccagccctgctgtgggcaaggccaagagcagcgagtttgccagcatcccagccaacagcagccggcccctgagcaacatcagcaagagcggccgcatgggccctgccatgctgcggcctgccctgcctgctggccctgtgggcgccagctcctggcaggccaagagggtggatgtgtctgagctggccgctgagcagctgacagcccctccttctgccagccccacccagccccagaccccagagggcggcggccagtggctgaacagcagctgtgcctggagcgagagcagccagctgaacaagaccaggagcatcagaagaagagacagctgcctgaacagcaagaccaaggtgatgcccacccccaccaaccagttcaagatccccaagttcagcattggagacagcccagacagcagcacccccaagctgagccgggcccagaggccccagagctgcacctctgtgggccgggtgacagtgcacagcacccctgtgagaagaagcagcggccctgccccccagagcctgctgagcgcctggagggtgtctgccctgcccaccccagccagccgccgctgcagcggcctgccccccatgacccccaagaccatgcccagggctgtgggcagccccctgtgtgtgcctgccaggagaagaagcagcgagcccaggaagaacagcgccatgaggacagagcccacccgggagagcaacaggaagacagacagccggctggtggatgtgtccccagaccggggcagcccccccagccgggtgccccaggccctgaacttcagccctgaggagagtgacagcaccttcagcaagagcacagccacagaggtggcccgggaggaggccaagccaggaggagatgctgcccccagcgaggccctgctggtggacatcaagctggagcccctggccgtgaccccagatgctgccagccagcccctgattgacctgcccctgattgacttctgtgacaccccagaggcccacgtggccgtgggcagcgagagccggcccctgattgacctgatgaccaacaccccagacatgaacaagaatgtggccaagcccagccctgtggtgggccagctgattgacctgagcagccccctcatccagctgagccctgaggccgacaaggaaaatgtggacagccccctgctgaagttctag

SEQ ID NO: 19787 - DNA, 2220 bp, synthetic construct
  misc_feature 1..2220: note = Description of Artificial Sequence: Synthetic coding sequence
  source 1..2220: mol_type = other DNA
atggagggcggcggcggcagagatgagcccagcgcctgcagagctggagatgtgaacatggatgaccccaagaaggaggacatcctgctgctggctgatgagaagtttgattttgacctgagcctgagcagcagcagcgccaatgaagatgatgaggtgttcttcggccccttcggccacaaggagcgctgcatcgccgccagcctggagctgaacaaccctgtgcctgagcagccccccctgcccaccagcgagagcccctttgcctggagccccctggccggggagaagtttgtggaggtgtacaaggaggcccacctgctggccctgcacatcgagagcagcagcaggaaccaggccgcccaggccgccaagccagaggaccccaggagccagggcgtggagcgcttcatccaggagagcaagctgaagatcaacctgtttgagaaggagaaggagatgaagaagagccccaccagcctgaagcgggagacctactacctgagtgacagccccctgctgggcccccctgtgggggagccccggctgctggccagcagccctgccctgcccagcagcggggcccaggcccggctgacccgggcccctggccccccccacagcgcccacgccctgccccgggagagctgcacagcccatgctgccagccaggccgccacccagaggaagccaggcaccaagctgctgctgccccgggccgcctctgtgcggggccgcagcatccctggagctgctgagaagcccaagaaggagatcccagccagccccagcaggaccaagatcccagctgagaaggagagccacagagatgtgctgcctgacaagccagcccctggagctgtgaatgtgcctgctgctggcagccacctgggccagggcaagagggccatccctgtgcccaacaagctgggcctgaagaagaccctgctgaaggcccctggcagcaccagcaacctggccaggaagagcagcagcggccctgtgtggagcggggccagcagcgcctgcaccagccctgctgtgggcaaggccaagagcagcgagtttgccagcatcccagccaacagcagccggcccctgagcaacatcagcaagagcggccgcatgggccctgccatgctgcggcctgccctgcctgctggccctgtgggcgccagctcctggcaggccaagagggtggatgtgtctgagctggccgctgagcagctgacagcccctccttctgccagccccacccagccccagaccccagagggcggcggccagtggctgaacagcagctgtgcctggagcgagagcagccagctgaacaagaccaggagcatcagaagaagagacagctgcctgaacagcaagaccaaggtgatgcccacccccaccaaccagttcaagatccccaagttcagcattggagacagcccagacagcagcacccccaagctgagccgggcccagaggccccagagctgcacctctgtgggccgggtgacagtgcacagcacccctgtgagaagaagcagcggccctgccccccagagcctgctgagcgcctggagggtgtctgccctgcccaccccagccagccgccgctgcagcggcctgccccccatgacccccaagaccatgcccagggctgtgggcagccccctgtgtgtgcctgccaggagaagaagcagcgagcccaggaagaacagcgccatgaggacagagcccacccgggagagcaacaggaagacagacagccggctggtggatgtgtccccagaccggggcagcccccccagccgggtgccccaggccctgaacttcagccctgaggagagtgacagcaccttcagcaagagcacagccacagaggtggcccgggaggaggccaagccaggaggagatgctgcccccagcgaggccctgctggtggacatcaagctggagcccctggccgtgaccccagatgctgccagccagcccctgattgacctgcccctgattgacttctgtgacaccccagaggcccacgtggccgtgggcagcgagagccggcccctgattgacctgatgaccaacaccccagacatgaacaagaatgtggccaagcccagccctgtggtgggccagctgattgacctgagcagccccctcatccagctgagccctgaggccgacaaggaaaatgtggacagccccctgctgaagttctag

SEQ ID NO: 19788 - DNA, 1149 bp, synthetic construct
  misc_feature 1..1149: note = Description of Artificial Sequence: Synthetic coding sequence
  source 1..1149: mol_type = other DNA
atgggagactggagcgccctgggcaagctgctggacaaggtgcaggcctacagcacagctgggggcaaggtgtggctgtctgtgctcttcatcttccgcatcctgctgctgggcacagctgtggagagcgcctggggagatgagcagagcgccttccgctgcaacacccagcagcccggctgtgaaaatgtgtgctatgacaagagcttccccatcagccacgtgcgcttctgggtgctgcagatcatctttgtgtctgtgcccaccctgctgtacctggcccacgtgttctacgtgatgaggaaggaggagaagctgaacaagaaggaggaggagctgaaggtggcccagacagatggagtgaatgtggacatgcacctgaagcagatcgagatcaagaagttcaagtatggaattgaggagcacggcaaggtgaagatgagaggaggcctgctgcggacctacatcatcagcatcctcttcaagagcatctttgaggtggccttcctgctgatccagtggtacatctacggcttcagcctgtctgctgtgtacacctgcaagagggacccctgcccccaccaggtggactgcttcctgagccggcccacagagaagaccatcttcatcatcttcatgctggtggtgtccctggtgtccctggccctgaacatcatcgagctgttctacgtgttcttcaagggcgtgaaggacagagtgaagggcaagagtgacccctaccacgccaccagcggggccctgagccctgccaaggactgtggcagccagaagtatgcctacttcaacggctgcagcagccccacagcccccctgagccccatgagccccccaggctacaagctggtgactggagacaggaacaacagcagctgcaggaactacaacaagcaggccagcgagcagaactgggccaactacagcgctgagcagaacaggatgggccaggccggcagcaccatcagcaacagccacgcccagccctttgacttcccagatgacaaccagaacagcaagaagctggccgccggccacgagctgcagcccctggccatcgtggaccagaggcccagcagccgggccagcagccgggccagcagccggcccaggccagatgacctggagatctag

SEQ ID NO: 19789 - DNA, 1101 bp, synthetic construct
  misc_feature 1..1101: note = Description of Artificial Sequence: Synthetic coding sequence
  source 1..1101: mol_type = other DNA
atgggagactggagcgccctgggcaagctgctggacaaggtgcaggcctacagcacagctgggggcaaggtgtggctgagcgcctggggagatgagcagagcgccttccgctgcaacacccagcagcccggctgtgaaaatgtgtgctatgacaagagcttccccatcagccacgtgcgcttctgggtgctgcagatcatctttgtgtctgtgcccaccctgctgtacctggcccacgtgttctacgtgatgaggaaggaggagaagctgaacaagaaggaggaggagctgaaggtggcccagacagatggagtgaatgtggacatgcacctgaagcagatcgagatcaagaagttcaagtatggaattgaggagcacggcaaggtgaagatgagaggaggcctgctgcggacctacatcatcagcatcctcttcaagagcatctttgaggtggccttcctgctgatccagtggtacatctacggcttcagcctgtctgctgtgtacacctgcaagagggacccctgcccccaccaggtggactgcttcctgagccggcccacagagaagaccatcttcatcatcttcatgctggtggtgtccctggtgtccctggccctgaacatcatcgagctgttctacgtgttcttcaagggcgtgaaggacagagtgaagggcaagagtgacccctaccacgccaccagcggggccctgagccctgccaaggactgtggcagccagaagtatgcctacttcaacggctgcagcagccccacagcccccctgagccccatgagccccccaggctacaagctggtgactggagacaggaacaacagcagctgcaggaactacaacaagcaggccagcgagcagaactgggccaactacagcgctgagcagaacaggatgggccaggccggcagcaccatcagcaacagccacgcccagccctttgacttcccagatgacaaccagaacagcaagaagctggccgccggccacgagctgcagcccctggccatcgtggaccagaggcccagcagccgggccagcagccgggccagcagccggcccaggccagatgacctggagatctag

SEQ ID NO: 19790 - DNA, 2673 bp, synthetic construct
  misc_feature 1..2673: note = Description of Artificial Sequence: Synthetic coding sequence
  source 1..2673: mol_type = other DNA
atggacagcaacacagcccccctgggccccagctgcccccagcccccaccagccccccagccccaggcccggagccggctgaatgccacagccagcctggagcaggagaggtctgagcggccccgggcccctggcccccaggccggccctggccctggggtgagagatgctgctgccccagctgagccccaggcccagcacaccaggagccgggagcgggcagatggcaccggccccaccaagggggacatggagatcccctttgaggaggtgctggagcgggccaaggccggggaccccaaggcccagacagaggtgggcaagcactacctgcagctggccggggacacagatgaggagctgaacagctgcacagctgtggactggctggtgctggccgccaagcagggccggcgggaggccgtgaagctgctgcggcgctgcctggccgaccggcggggcatcaccagtgaaaatgaaagagaggtgcggcagctgagcagcgagacagacctggagagagctgtgaggaaggccgccctggtgatgtactggaagctgaaccccaagaagaagaagcaggtggccgtggccgagctgctggagaatgtgggccaggtgaatgaacatgatggaggagcccagcccggccctgtgcccaagagcctgcagaagcagaggaggatgctggagcggctggtgagcagcgagagcaagaactacatcgccctggatgactttgtggagatcaccaagaagtatgccaagggcgtcatccccagcagcctcttcctgcaggatgatgaagatgatgatgagctggccggcaagagccctgaggacctgcccctgcggctgaaggtggtgaagtaccccctgcacgccatcatggagatcaaggagtacctgattgacatggccagccgggccggcatgcactggctgagcaccatcatccccacccaccacatcaatgccctgatcttcttcttcatcgtgagcaacctgaccatcgacttctttgccttcttcatccccctggtgatcttctacctgtccttcatctccatggtgatctgcaccctgaaggtgttccaggacagcaaggcctgggagaacttccgcaccctgacagacctgctgctgcgctttgagcccaacctggatgtggagcaggccgaggtgaactttggctggaaccacctggagccctatgcccacttcctgctgtctgtgttcttcgtcatcttctccttccccatcgccagcaaggactgcatcccctgcagcgagctggccgtcatcaccggcttcttcaccgtgaccagctacctgagcctgagcacccatgctgagccctacacccggcgggccctggccacagaggtgacagctggcctgctgagcctgctgcccagcatgcccctgaactggccctacctgaaggtgctgggccagaccttcatcaccgtgcctgtgggccacctggtggtgctgaatgtgtctgtgccctgcctgctgtatgtgtacctgctgtacctgttcttcaggatggcccagctgaggaacttcaagggcacctactgctacctggtgccctacctggtgtgcttcatgtggtgtgagctgtctgtggtgatcctgctggagagcacaggcctgggcctgctgcgggccagcatcggctacttcctgttcctgtttgccctgcccatcctggtggccggcctggccctggtgggcgtgctgcagtttgcccgctggttcaccagcctggagctgaccaagattgctgtgacagtggccgtgtgcagcgtgcccctgctgctgcgctggtggaccaaggccagcttctctgtggtgggcatggtgaagagcctgaccaggagctccatggtgaagctgatcctggtgtggctgacagccatcgtgctcttctgctggttctacgtgtacagaagtgagggcatgaaggtgtacaacagcaccctgacctggcagcagtatggagccctgtgtggcccccgggcctggaaggagaccaacatggcccggacccagatcctgtgcagccacctggagggccaccgggtgacctggacaggccgcttcaagtatgtgcgggtgacagacatcgacaacagcgctgagagcgccatcaacatgctgcccttcttcatcggggactggatgcgctgcctgtatggagaggcctacccagcctgcagccctggcaacaccagcacagctgaggaggagctgtgccgcctgaagctgctggccaagcacccctgccacatcaagaagtttgaccgctacaagtttgagatcaccgtgggcatgcccttcagcagtggagcagatggcagccgcagccgggaggaggatgatgtgaccaaggacatcgtgctgcgggccagcagcgagttcaagtctgtgctgctgagcctgcggcagggcagcctgattgagttcagcaccatcctggagggccgcctgggcagcaagtggcctgtgtttgagctgaaggccatcagctgcctgaactgcatggcccagctgagccccacccggcggcacgtgaagattgaacatgactggaggagcacagtgcacggggctgtgaagtttgcctttgacttcttcttcttccccttcctgtctgctgcctag

SEQ ID NO: 19791 - DNA, 654 bp, synthetic construct; identical to SEQ ID NO: 19771
  misc_feature 1..654: note = Description of Artificial Sequence: Synthetic coding sequence
  source 1..654: mol_type = other DNA

SEQ ID NO: 19792 - DNA, 1590 bp, synthetic construct
  misc_feature 1..1590: note = Description of Artificial Sequence: Synthetic coding sequence
  source 1..1590: mol_type = other DNA
atgggctgtgtgttctgcaagaagctggagcctgtggccacagccaaggaggatgctggcctggagggggacttccgctcctatggagctgctgaccactacggccctgaccccaccaaggcccggcctgccagcagctttgcccacatccccaactacagcaacttcagcagccaggccatcaaccctggcttcctggacagcggcaccatccggggcgtgtctggaattggagtgaccctcttcatcgccctgtatgactatgaggccaggacagaagatgacctgaccttcaccaagggggagaagttccacatcctgaacaacacagaaggagactggtgggaggcccggagcctgagcagcggcaagacaggctgcatccccagcaactacgtggcccctgtggacagcatccaggccgaggagtggtactttgggaagattggaaggaaggatgctgagcggcagctgctgagccctggcaacccccagggcgccttcctgatccgggagagcgagaccaccaagggggcctacagcctgagcatccgggactgggaccagaccaggggggaccacgtgaagcactacaagatcaggaagctggacatgggcggctactacatcaccaccagggtgcagttcaacagcgtgcaggagctggtgcagcactacatggaggtgaatgatggcctgtgcaacctgctgattgccccctgcaccatcatgaagccccagaccctgggcctggccaaggatgcctgggagatcagccgcagcagcatcaccctggagcggcggctgggcaccggctgctttggagatgtgtggctgggcacctggaatggcagcaccaaggtggccgtgaagaccctgaagccaggcaccatgagccccaaggccttcctggaggaggcccaggtgatgaagctgctgcggcatgacaagctggtgcagctgtatgctgtggtgtctgaggagcccatctacatcgtgacagagttcatgtgccacggcagcctgctggacttcctgaagaaccctgagggccaggacctgcggctgccccagctggtggacatggccgcccaggtggccgagggcatggcctacatggagaggatgaactacatccaccgggacctgcgggccgccaacatcctggtgggggagcggctggcctgcaagattgctgactttggcctggcccggctcatcaaggatgatgagtacaacccctgccagggcagcaagttccccatcaagtggacagcccctgaggccgccctgtttggccgcttcaccatcaagagtgatgtgtggagctttggcatcctgctgacagagctgatcaccaagggccgcatcccctacccaggcatgaacaagcgggaggtgctggagcaggtggagcagggctaccacatgccctgccccccaggctgcccagccagcctgtatgaggccatggagcagacctggaggctggaccctgaggagcggcccacctttgagtacctgcagagcttcctggaggactacttcaccagcgctgagccccagtaccagcccggggaccagacctag

SEQ ID NO: 19793 - DNA, 1590 bp, synthetic construct; identical to SEQ ID NO: 19792
  misc_feature 1..1590: note = Description of Artificial Sequence: Synthetic coding sequence
  source 1..1590: mol_type = other DNA

SEQ ID NO: 19794 - DNA, 1590 bp, synthetic construct; identical to SEQ ID NO: 19792
  misc_feature 1..1590: note = Description of Artificial Sequence: Synthetic coding sequence
  source 1..1590: mol_type = other DNA

SEQ ID NO: 19795 - DNA, 1590 bp, synthetic construct; identical to SEQ ID NO: 19792
  misc_feature 1..1590: note = Description of Artificial Sequence: Synthetic coding sequence
  source 1..1590: mol_type = other DNA

SEQ ID NO: 19796 - DNA, 942 bp, synthetic construct
  misc_feature 1..942: note = Description of Artificial Sequence: Synthetic coding sequence
  source 1..942: mol_type = other DNA
atgggctgtgtgttctgcaagaagctggagcctgtggccacagccaaggaggatgctggcctggagggggacttccgctcctatggagctgctgaccactacggccctgaccccaccaaggcccggcctgccagcagctttgcccacatccccaactacagcaacttcagcagccaggccatcaaccctggcttcctggacagcggcaccatccggggcgtgtctggaattggagtgaccctcttcatcgccctgtatgactatgaggccaggacagaagatgacctgaccttcaccaagggggagaagttccacatcctgaacaacacagaaggagactggtgggaggcccggagcctgagcagcggcaagacaggctgcatccccagcaactacgtggcccctgtggacagcatccaggccgaggagtggtactttgggaagattggaaggaaggatgctgagcggcagctgctgagccctggcaacccccagggcgccttcctgatccgggagagcgagaccaccaagggggcctacagcctgagcatccgggactgggaccagaccaggggggaccacgtgaagcactacaagatcaggaagctggacatgggcggctactacatcaccaccagggtgcagttcaacagcgtgcaggagctggtgcagcactacatggaggtgaatgatggcctgtgcaacctgctgattgccccctgcaccatcatgaagccccagaccctgggcctggccaaggatgcctgggagatcagccgcagcagcatcaccctggagcggcggctgggcaccggctgctttggagatgtgtggctgggcacctggaatggcagcaccaaggtggccgtgaagaccctgaagccaggcaccatgagccccaaggccttcctggaggaggcccaggtgatgaagctgctgtag

SEQ ID NO: 19797 - DNA, 1392 bp, synthetic construct
  misc_feature 1..1392: note = Description of Artificial Sequence: Synthetic coding sequence
  source 1..1392: mol_type = other DNA
atgggctgtgtgttctgcaagaagctggagcctgtggccacagccaaggaggatgctggcctggagggggacttccgctcctatggagctgctgaccactacggccctgaccccaccaaggcccggcctgccagcagctttgcccacatccccaactacagcaacttcagcagccaggccatcaaccctggcttcctggacagcggcaccatccggggcgtgtctggaattggagtgaccctcttcatcgccctgtatgactatgaggccaggacagaagatgacctgaccttcaccaagggggagaagttccacatcctgaacaacacagagggcgcctacagcctgagcatccgggactgggaccagaccaggggggaccacgtgaagcactacaagatcaggaagctggacatgggcggctactacatcaccaccagggtgcagttcaacagcgtgcaggagctggtgcagcactacatggaggtgaatgatggcctgtgcaacctgctgattgccccctgcaccatcatgaagccccagaccctgggcctggccaaggatgcctgggagatcagccgcagcagcatcaccctggagcggcggctgggcaccggctgctttggagatgtgtggctgggcacctggaatggcagcaccaaggtggccgtgaagaccctgaagccaggcaccatgagccccaaggccttcctggaggaggcccaggtgatgaagctgctgcggcatgacaagctggtgcagctgtatgctgtggtgtctgaggagcccatctacatcgtgacagagttcatgtgccacggcagcctgctggacttcctgaagaaccctgagggccaggacctgcggctgccccagctggtggacatggccgcccaggtggccgagggcatggcctacatggagaggatgaactacatccaccgggacctgcgggccgccaacatcctggtgggggagcggctggcctgcaagattgctgactttggcctggcccggctcatcaaggatgatgagtacaacccctgccagggcagcaagttccccatcaagtggacagcccctgaggccgccctgtttggccgcttcaccatcaagagtgatgtgtggagctttggcatcctgctgacagagctgatcaccaagggccgcatcccctacccaggcatgaacaagcgggaggtgctggagcaggtggagcagggctaccacatgccctgccccccaggctgcccagccagcctgtatgaggccatggagcagacctggaggctggaccctgaggagcggcccacctttgagtacctgcagagcttcctggaggactacttcaccagcgctgagccccagtaccagcccggggaccagacctag

SEQ ID NO: 19798 - DNA, 1005 bp, synthetic construct
  misc_feature 1..1005: note = Description of Artificial Sequence: Synthetic coding sequence
  source 1..1005: mol_type = other DNA
atggagttccctggcctgggcagcctgggcaccagcgagcccctgccccagtttgtggaccctgccctggtgagcagcaccccagagagcggggtcttcttccccagcggccctgagggcctggatgctgctgccagcagcacagcccccagcacagccacagctgctgctgctgccctggcctactacagagatgctgaggcctaccgccacagccctgtgttccaggtgtaccccctgctgaactgcatggagggcatccctgggggcagcccctatgccggctgggcctacggcaagacaggcctgtacccagccagcacagtgtgccccacccgggaggacagccccccccaggccgtggaggacctggatggcaagggcagcaccagcttcctggagaccctgaagacagagcggctgagcccagacctgctgaccctgggccctgccctgcccagcagcctgcctgtgcccaacagcgcctatggaggccctgacttcagcagcaccttcttcagccccaccggcagccccctgaacagcgctgcctacagcagccccaagctgcggggcaccctgcccctgcccccctgtgaggccagagaatgtgtgaactgtggggccacagccacccccctgtggaggcgggacagaacaggccactacctgtgcaatgcctgtggcctgtaccacaagatgaatggccagaaccggcccctcatccggcccaagaagaggctgattgtgtccaagagagctggcacccagtgcaccaactgccagaccaccaccaccaccctgtggaggagaaatgccagcggggaccctgtgtgcaatgcctgtggcctgtactacaagctgcaccagcactactgcggcggcagcgcccagctgatgagggcccagagcatggccagcagaggaggagtggtgtccttcagcagctgcagccagaacagcggccagcccaagagcctgggccccaggcaccccctggcctag

SEQ ID NO: 19799 - DNA, 1242 bp, synthetic construct
  misc_feature 1..1242: note = Description of Artificial Sequence: Synthetic coding sequence
  source 1..1242: mol_type = other DNA
atggagttccctggcctgggcagcctgggcaccagcgagcccctgccccagtttgtggaccctgccctggtgagcagcaccccagagagcggggtcttcttccccagcggccctgagggcctggatgctgctgccagcagcacagcccccagcacagccacagctgctgctgctgccctggcctactacagagatgctgaggcctaccgccacagccctgtgttccaggtgtaccccctgctgaactgcatggagggcatccctgggggcagcccctatgccggctgggcctacggcaagacaggcctgtacccagccagcacagtgtgccccacccgggaggacagccccccccaggccgtggaggacctggatggcaagggcagcaccagcttcctggagaccctgaagacagagcggctgagcccagacctgctgaccctgggccctgccctgcccagcagcctgcctgtgcccaacagcgcctatggaggccctgacttcagcagcaccttcttcagccccaccggcagccccctgaacagcgctgcctacagcagccccaagctgcggggcaccctgcccctgcccccctgtgaggccagagaatgtgtgaactgtggggccacagccacccccctgtggaggcgggacagaacaggccactacctgtgcaatgcctgtggcctgtaccacaagatgaatggccagaaccggcccctcatccggcccaagaagaggctgattgtgtccaagagagctggcacccagtgcaccaactgccagaccaccaccaccaccctgtggaggagaaatgccagcggggaccctgtgtgcaatgcctgtggcctgtactacaagctgcaccaggtgaaccggcccctgaccatgaggaaggatggcatccagaccaggaacaggaaggccagcggcaagggcaagaagaagaggggcagcagcctgggcggcaccggggctgctgagggccctgctgggggcttcatggtggtggccggcggcagcggcagcggcaactgtggggaggtggccagcggcctgaccctgggccccccaggcacagcccacctgtaccagggcctgggccctgtggtgctgagcggccctgtgagccacctgatgcccttccctggccccctgctgggcagccccaccggcagcttccccaccggccccatgccacccaccaccagcaccaccgtggtggcccccctgagcagctag

SEQ ID NO: 19800 - DNA, 369 bp, synthetic construct
  misc_feature 1..369: note = Description of Artificial Sequence: Synthetic coding sequence
  source 1..369: mol_type = other DNA
tgacagaaccggcccctcatccggcccaagaagaggctcatcgtgtccaagagagctggcacccagtgcaccaactgccagaccaccaccaccaccctgtggaggagaaatgccagcggggaccctgtgtgcaatgcctgtggcctgtactacaagctgcaccaggtgaaccggcccctgaccatgaggaaggatggcatccagaccaggaacaggaaggccagcggcaagggcaagaagaagaggggcagcagcctgggcggcactggagctgctgagggccctgccctgctgtggtggctgcggagcgcccacgagggcacagagcacggcctgcagaggcggggcggcgtgctgctgctgctgtag

SEQ ID NO: 19801 - DNA, 1332 bp, synthetic construct
  misc_feature 1..1332: note = Description of Artificial Sequence: Synthetic coding sequence
  source 1..1332: mol_type = other DNA
atggaggtgacagctgaccagccccgctgggtgagccaccaccaccctgctgtgctgaatggccagcacccagacacccaccaccctggcctgagccacagctacatggatgctgcccagtaccccctgcctgaggaggtggatgtgctcttcaacattgatggccagggcaaccacgtgcccccctactacggcaacagcgtgcgggccaccgtgcagcgctacccacccacccaccacggcagccaggtgtgcaggcctcccctgctgcacggcagcctgccctggctggatggcggcaaggccctgggcagccaccacacagccagcccctggaacctgagccccttcagcaagaccagcatccaccacggcagccctggccccctgtctgtgtaccccccagccagcagcagcagcctgagcggcggccacgccagcccccacctgttcaccttcccccccaccccacccaaggatgtgtccccagaccccagcctgagcaccccaggcagcgctggcagcgcccggcaggatgagaaggagtgcctgaagtaccaggtgcccctgcctgacagcatgaagctggagagcagccacagccggggctccatgacagccctgggcggggccagcagcagcacccaccaccccatcaccacctacccaccctacgtgcctgagtacagcagcggcctcttcccccccagcagcctgctgggcggcagccccactggatttggctgcaagagccggcccaaggcccggagcagcacaggccgggagtgtgtgaactgtggggccaccagcacccccctgtggaggagagatggcaccggccactacctgtgcaatgcctgtggcctgtaccacaagatgaatggccagaaccggcccctcatcaagcccaagaggcggctgtctgctgccaggagagctggcaccagctgtgccaactgccagaccaccaccaccaccctgtggaggagaaatgccaatggagaccctgtgtgcaatgcctgtggcctgtactacaagctgcacaacatcaaccggcccctgaccatgaagaaggagggcatccagaccaggaacaggaagatgagcagcaagagcaagaagtgcaagaaggtgcatgacagcctggaggacttccccaagaacagcagcttcaacccagctgccctgagccgccacatgagcagcctgagccacatcagccccttcagccacagcagccacatgctgaccacccccacccccatgcacccccccagcagcctgagctttggcccccaccaccccagctccatggtgacagccatgggctag

SEQ ID NO: 19802 - DNA, 1335 bp, synthetic construct
  misc_feature 1..1335: note = Description of Artificial Sequence: Synthetic coding sequence
  source 1..1335: mol_type = other DNA
atggaggtgacagctgaccagccccgctgggtgagccaccaccaccctgctgtgctgaatggccagcacccagacacccaccaccctggcctgagccacagctacatggatgctgcccagtaccccctgcctgaggaggtggatgtgctcttcaacattgatggccagggcaaccacgtgcccccctactacggcaacagcgtgcgggccaccgtgcagcgctacccacccacccaccacggcagccaggtgtgcaggcctcccctgctgcacggcagcctgccctggctggatggcggcaaggccctgggcagccaccacacagccagcccctggaacctgagccccttcagcaagaccagcatccaccacggcagccctggccccctgtctgtgtaccccccagccagcagcagcagcctgagcggcggccacgccagcccccacctgttcaccttcccccccaccccacccaaggatgtgtccccagaccccagcctgagcaccccaggcagcgctggcagcgcccggcaggatgagaaggagtgcctgaagtaccaggtgcccctgcctgacagcatgaagctggagagcagccacagccggggctccatgacagccctgggcggggccagcagcagcacccaccaccccatcaccacctacccaccctacgtgcctgagtacagcagcggcctcttcccccccagcagcctgctgggcggcagccccactggatttggctgcaagagccggcccaaggcccggagcagcacagagggcagagaatgtgtgaactgtggggccaccagcacccccctgtggaggagagatggcaccggccactacctgtgcaatgcctgtggcctgtaccacaagatgaatggccagaaccggcccctcatcaagcccaagaggcggctgtctgctgcccggcgggccggcaccagctgtgccaactgccagaccaccaccaccaccctgtggaggagaaatgccaacggggaccctgtgtgcaatgcctgtggcctgtactacaagctgcacaacatcaaccggcccctgaccatgaagaaggagggcatccagaccaggaacaggaagatgagcagcaagagcaagaagtgcaagaaggtgcatgacagcctggaggacttccccaagaacagcagcttcaacccagctgccctgagccgccacatgagcagcctgagccacatcagccccttcagccacagcagccacatgctgaccacccccacccccatgcacccccccagcagcctgagctttggcccccaccaccccagctccatggtgacagccatgggctag

SEQ ID NO: 19803 - DNA, 393 bp, synthetic construct
  misc_feature 1..393: note = Description of Artificial Sequence: Synthetic coding sequence
  source 1..393: mol_type = other DNA
atggaggtgacagctgaccagccccgctgggtgagccaccaccaccctgctgtgctgaatggccagcacccagacacccaccaccctggcctgagccacagctacatggatgctgcccagtaccccctgcctgaggaggtggatgtgctcttcaacattgatggccagggcaaccacgtgcccccctactacggcaacagcgtgcgggccaccgtgcagcgctacccacccacccaccacggcagccaggtgtgcaggcctcccctgctgcacggcagcctgccctggctggatggcggcaaggccctgggcagccaccacacagccagcccctggaacctgcggccctgcctgcagtgcctgtgggccctgctgcaggccagccagtgctag

SEQ ID NO: 19804 - DNA, 798 bp, synthetic construct
  misc_feature 1..798: note = Description of Artificial Sequence: Synthetic coding sequence
  source 1..798: mol_type = other DNA
atgagaagagctgagctggccggcctgaagaccatggcctgggtgcctgctgagagcgctgtggaggagctgatgccccggctgctgcctgtggagccctgtgacctgacagagggctttgaccccagcgtgccccccaggaccccccaggagtacctgcggcgggtgcagatcgaggccgcccagtgcccagatgtggtggtggcccagattgaccccaagaagctgaagaggaagcagagcgtgaacatcagcctgagcggctgccagcctgcccctgagggctacagccccaccctgcagtggcagcagcagcaggtggcccagttcagcacagtgcggcagaatgtgaacaagcacaggagccactggaagagccagcagctggacagcaatgtgaccatgcccaagtcagaagatgaggagggctggaagaagttctgcctgggggagaagctgtgtgctgatggagctgtgggccctgccaccaatgaaagccctggcattgattatgtgcaggccaccgtgacctctgtgctggagtacctgagcaactggtttggagagcgggacttcaccccagagctgggccgctggctgtatgccctgctggcctgcctggagaagcccctgctgcctgaggcccacagcctcatccggcagctggcccggcgctgcagcgaggtgcggctgctggtggacagcaaggatgatgagcgggtgcctgccctgaacctgctgatctgcctggtgagccgctactttgaccagagggacctggctgatgagcccagctag

SEQ ID NO: 19805 - DNA, 843 bp, synthetic construct
  misc_feature 1..843: note = Description of Artificial Sequence: Synthetic coding sequence
  source 1..843: mol_type = other DNA
atgagaagagctgagctggccggcctgaagaccatggcctgggtgcctgctgagagcgctgtggaggagctgatgccccggctgctgcctgtggagccctgtgacctgacagagggctttgaccccagcgtgccccccaggaccccccaggagtacctgcggcgggtgcagatcgaggccgcccagtgcccagatgtggtggtggcccagattgaccccaagaagctgaagaggaagcagagcgtgaacatcagcctgagcggctgccagcctgcccctgagggctacagccccaccctgcagtggcagcagcagcaggtggcccagttcagcacagtgcggcagaatgtgaacaagcacaggagccactggaagagccagcagctggacagcaatgtgaccatgcccaagtcagaagatgaggagggctggaagaagttctgcctgggggagaagctgtgtgctgatggagctgtgggccctgccaccaatgaaagccctggcattgattatgtgcagatcggcttcccccccctgctgagcatcgtgtccaggatgaaccaggccaccgtgacctctgtgctggagtacctgagcaactggtttggagagcgggacttcaccccagagctgggccgctggctgtatgccctgctggcctgcctggagaagcccctgctgcctgaggcccacagcctcatccggcagctggcccggcgctgcagcgaggtgcggctgctggtggacagcaaggatgatgagcgggtgcctgccctgaacctgctgatctgcctggtgagccgctactttgaccagagggacctggctgatgagcccagctag

SEQ ID NO: 19806 - DNA, 753 bp, synthetic construct
  misc_feature 1..753: note = Description of Artificial Sequence: Synthetic coding sequence
  source 1..753: mol_type = other DNA
atgagaagagctgagctggccggcctgaagaccatggcctgggtgcctgctgagagcgctgtggaggagctgatgccccggctgctgcctgtggagccctgtgacctgacagagggctttgaccccagcgtgccccccaggaccccccaggagtacctgcggcgggtgcagatcgaggccgcccagtgcccagatgtggtggtggcccagattgaccccaagaagctgaagaggaagcagagcgtgaacatcagcctgagcggctgccagcctgcccctgagggctacagccccaccctgcagtggcagcagcagcaggtggcccagttcagcacagtgcggcagaatgtgaacaagcacaggagccactggaagagccagcagctggacagcaatgtgaccatgcccaagtcagaagatgaggagggctggaagaagttctgcctgggggagaagctgtgtgctgatggagctgtgggccctgccaccaatgaaagccctggcattgattatgtgcagatcggcttcccccccctgctgagcatcgtgtccaggatgaaccaggccaccgtgacctctgtgctggagtacctgagcaactggtttggagagcgggacttcaccccagagctgggccgctggctgtatgccctgctggcctgcctggagaagcccctgctgcctgaggcccacagcctcatccggcagctggcccggcgctgcagcgaggtgcggctgctggtggtgttctag

SEQ ID NO: 19807 - DNA, 768 bp, synthetic construct
  misc_feature 1..768: note = Description of Artificial Sequence: Synthetic coding sequence
  source 1..768: mol_type = other DNA
atggatgtgatggatggctgccagttcagccccagcgagtacttctatgatggcagctgcatccccagccctgagggggagtttggagatgaatttgtgccccgggtggccgcctttggagcccacaaggccgagctgcagggcagtgatgaagatgagcacgtgcgggcccccaccggccaccaccaggccggccactgcctgatgtgggcctgcaaggcctgcaagaggaagagcaccaccatggacaggaggaaggccgccaccatgagggagcggcggcggctgaagaaggtgaaccaggcctttgagaccctgaagcgctgcaccaccaccaaccccaaccagaggctgcccaaggtggagatcctgagaaatgccatccgctacatcgagagcctgcaggagctgctgcgggagcaggtggagaactactacagcctgcccggccagagctgcagcgagcccaccagccccaccagcaactgcagtgatggcatgcctgagtgcaacagccctgtgtggagcaggaagagcagcacctttgacagcatctactgcccagatgtgtccaatgtgtatgccacagacaagaacagcctgagcagcctggactgcctgagcaacatcgtggaccgcatcaccagcagcgagcagcccggcctgcccctgcaggacctggccagcctgagccctgtggccagcacagacagccagcctgccacccctggggccagcagcagccgcctcatctaccacgtgctgtag

SEQ ID NO: 19808 - DNA, 1725 bp, synthetic construct
  misc_feature 1..1725: note = Description of Artificial Sequence: Synthetic coding sequence
  source 1..1725: mol_type = other DNA
ctgagccccagcctgggcttccctgcccagatgaaccaccagaagggccccagccccagctttggagtgcagccctgtggcccccatgattctgcccggggcggcatgatcccccacccccagagccggggccccttccccacctgccagctgaagtctgagctggacatgctggtgggcaaatgtcgggaggagcccctggagggggacatgagcagccccaacagcacaggcatccaggaccccctgctgggcatgctggatggaagagaggacctggagcgggaggagaagcgggagcctgagagcgtgtatgaaacagactgccgctgggatggctgcagccaggagtttgacagccaggagcagctggtgcaccacatcaacagcgagcacatccacggggagaggaaggagtttgtgtgccactggggcggctgcagccgggagctgcggcccttcaaggcccagtacatgctggtggtgcacatgagaagacacactggagagaagccccacaagtgcacctttgagggctgcaggaagagctacagccggctggagaacctgaagacccacctgcggagccacactggagagaagccctacatgtgtgaacatgagggctgcagcaaggccttcagcaatgccagtgaccgggccaagcaccagaacagaacccacagcaatgagaagccctacgtgtgcaagctgcccggctgcaccaagcgctacacagaccccagcagcctgaggaagcacgtgaagacagtgcacggcccagatgcccacgtgaccaagaggcacagaggagatggccccctgccccgggcccccagcatcagcacagtggagcccaagcgggagcgggagggcggccccatccgggaggagagccggctgactgtgcctgagggcgccatgccaccccacccccagcccctcttcagccactacccccagcccagccccccccagtacctgcagagcggcccctacacccagcccccaccagactacctgcccagcgagccccggccctgcctggactttgacagccccacccacagcacaggccagctgaaggcccagctggtgtgcaactacgtgcagagccagcaggagctgctgtgggagggcggcggccgggaggatgccccagcccaggagcccagctaccagagccccaagttcctgggcggcagccaggtgagccccagccgggccaaggcccctgtgaacacctacggccctggcttcggccccaacctgcccaaccacaagagcggcagctaccccacccccagcccctgccacgagaactttgtggtgggcgccaacagagccagccacagagctgctgccccaccccggctgctgccccccctgcccacctgctacggccccctgaaggtgggcggcaccaaccccagctgtggccaccctgaggtgggccgcctgggcggcggccctgccctgtacccacctcctgagggccaggtgtgcaaccccctggacagcctggacctggacaacacccagctggactttgtggccatcctggatgagccccagggcctgagccccccacccagccatgaccagaggggcagcagcggccacaccccaccacccagcggcccccccaacatggctgtgggcaacatgtctgtgctgctgcggagcctgcccggggagacagagttcctgaacagcagcgcctag

SEQ ID NO: 19809 - DNA, 390 bp, synthetic construct
  misc_feature 1..390: note = Description of Artificial Sequence: Synthetic coding sequence
  source 1..390: mol_type = other DNA
atgttcaacagcatgaccccaccacccatcagcagctatggagagccctgctgcctgcggcccctgcccagccagggcgcccccagcgtgggcacagagggcctgagcggcccccccttctgccaccaggccaacctgatgagcggcccccacagctatggccctgcccgggagaccaacagctgcacagagggccccctcttcagcagccccaggtctgctgtgaagctgaccaagaagagggccctgagcatcagccccctgagtgatgccagcctggacctgcagaccgtcatccgcaccagccccagcagcctggtggccttcatcaacagccgctgcaccagccctgggggcagctatggccacctgagcatcggcaccatgtag

SEQ ID NO: 19810 - DNA, 3198 bp, synthetic construct
  misc_feature 1..3198: note = Description of Artificial Sequence: Synthetic coding sequence
  source 1..3198: mol_type = other DNA
atgttcaacagcatgaccccaccacccatcagcagctatggagagccctgctgcctgcggcccctgcccagccagggcgcccccagcgtgggcacagaggtgaagctgaccaagaagagggccctgagcatcagccccctgagtgatgccagcctggacctgcagaccgtcatccgcaccagccccagcagcctggtggccttcatcaacagccgctgcaccagccctgggggcagctatggccacctgagcatcggcaccatgagccccagcctgggcttccctgcccagatgaaccaccagaagggccccagccccagctttggagtgcagccctgtggcccccatgacagcgcccggggcggcatgatcccccacccccagagccggggccccttccccacctgccagctgaagtctgagctggacatgctggtgggcaagtgccgggaggagcccctggagggggacatgagcagccccaacagcacaggcatccaggaccccctgctgggcatgctggatggccgggaggacctggagcgggaggagaagcgggagcctgagagcgtgtatgaaacagactgccgctgggatggctgcagccaggagtttgacagccaggagcagctggtgcaccacatcaacagcgagcacatccatggagagaggaaggagtttgtgtgccactggggcggctgcagccgggagctgcggcccttcaaggcccagtacatgctggtggtgcacatgaggaggcacactggagagaagccccacaagtgcacctttgagggctgcaggaagagctacagccggctggagaacctgaagacccacctgcggagccacactggagagaagccctacatgtgtgagcacgagggctgcagcaaggccttcagcaatgccagtgaccgggccaagcaccagaacagaacccacagcaatgagaagccctacgtgtgcaagctgcccggctgcaccaagcgctacacagaccccagcagcctgaggaagcacgtgaagacagtgcacggcccagatgcccacgtgaccaagaggcacagaggagatggccccctgccccgggcccccagcatcagcacagtggagcccaagcgggagcgggagggcggccccatccgggaggagagccggctgactgtgcctgagggcgccatgaagccccagcccagccctggggcccagagcagctgcagcagtgaccacagccctgctggcagcgctgccaacacagacagcggcgtggagatgactggaaatgctgggggcagcacagaggacctgagcagcctggatgagggcccctgcatcgccggcaccggcctgagcaccctgcggcggctggagaacctgcggctggaccagctgcaccagctgcggcccatcggcacccggggcctgaagctgcccagcctgagccacacaggcaccaccgtgtcccggcgggtgggcccccctgtgtccctggagcggcgcagcagcagcagcagcagcatcagcagcgcctacacagtgagccgccgcagcagcctggccagccccttccccccaggcagccccccagaaaatggagccagcagcctgcccggcctgatgcctgcccagcactacctgctgcgggcccgctatgccagcgcccggggcggcggcaccagccccacagctgccagcagcctggacagaattggaggcctgcccatgccaccctggaggagcagagctgagtacccaggctacaaccccaatgctggggtgacccggcgggccagtgaccctgcccaggccgctgacaggcctgccccagcccgggtgcagcgcttcaagagcctgggctgtgtgcacaccccacccaccgtggccggcggcggccagaactttgacccctacctgcccacctctgtgtacagcccccagccccccagcatcacagaaaatgctgccatggatgcccggggcctgcaggaggagcctgaggtgggcacctccatggtgggcagcggcctgaacccctacatggacttccccccaacagacaccctgggctatggaggccctgagggcgctgctgctgagccctacggggcccggggccctggcagcctgcccctgggccctggcccccccaccaactacggccccaacccctgcccccagcaggccagctacccagaccccacccaggagacctggggcgagttccccagccacagcggcctgtacccaggccccaaggccctgggcggcacctacagccagtgcccccggctggagcactacggccaggtgcaggtgaagccagagcagggctgccctgtgggcagtgacagcacaggcctggccccctgcctgaatgcccaccccagcgagggccccccccacccccagcccctcttcagccactacccccagcccagccccccccagtacctgcagagcggcccctacacccagcccccaccagactacctgcccagcgagccccggccctgcctggactttgacagccccacccacagcacaggccagctgaaggcccagctggtgtgcaactacgtgcagagccagcaggagctgctgtgggagggcggcggcagagaagatgccccagcccaggagcccagctaccagagccccaagttcctgggcggcagccaggtgagccccagccgggccaaggcccctgtgaacacctacggccctggcttcggccccaacctgcccaaccacaagagcggcagctaccccacccccagcccctgccatgaaaattttgtggtgggcgccaacagagccagccacagagctgctgccccaccccggctgctgccccccctgcccacctgctacggccccctgaaggtgggcggcaccaaccccagctgtggccaccctgaggtgggccgcctgggcggcggccctgccctgtacccacctcctgagggccaggtgtgcaaccccctggacagcctggacctggacaacacccagctggactttgtggccatcctggatgagccccagggcctgagccccccacccagccatgaccagaggggcagcagcggccacaccccacctccttctggcccccccaacatggctgtgggcaacatgtctgtgctgctgcggagcctgcctggagaaacagagttcctgaacagcagcgcctag

SEQ ID NO: 19811 - DNA, 528 bp, synthetic construct
  misc_feature 1..528: note = Description of Artificial Sequence: Synthetic coding sequence
  source 1..528: mol_type = other DNA
atgagccccagcctgggcttccctgcccagatgaaccaccagaagggccccagccccagctttggagtgcagccctgtggcccccatgattctgcccggggcggcatgatcccccacccccagagccggggccccttccccacctgccagctgaagtctgagctggacatgctggtgggcaaatgtcgggaggagcccctggagggggacatgagcagccccaacagcacaggcatccaggaccccctgctgggcatgctggatggaagagaggacctggagcgggaggagaagcgggagcctgagagcgtgtatgaaacagactgccgctgggatggctgcagccaggagtttgacagccaggagcagctggtgcaccacatcaacagcgagcacatccacggggagaggaaggagtttgtgtgccactggggcggctgcagccgggagctgcggcccttcaaggcccagtacatgctggtggtgcacatgagaagacacactggagagaagccccacaagtgctag

SEQ ID NO: 19812 - DNA, 2937 bp, synthetic construct
  misc_feature 1..2937: note = Description of Artificial Sequence: Synthetic coding sequence
  source 1..2937: mol_type = other DNA
atgagccccagcctgggcttccctgcccagatgaaccaccagaagggccccagccccagctttggagtgcagccctgtggcccccatgattctgcccggggcggcatgatcccccacccccagagccggggccccttccccacctgccagctgaagtctgagctggacatgctggtgggcaaatgtcgggaggagcccctggagggggacatgagcagccccaacagcacaggcatccaggaccccctgctgggcatgctggatggaagagaggacctggagcgggaggagaagcgggagcctgagagcgtgtatgaaacagactgccgctgggatggctgcagccaggagtttgacagccaggagcagctggtgcaccacatcaacagcgagcacatccacggggagaggaaggagtttgtgtgccactggggcggctgcagccgggagctgcggcccttcaaggcccagtacatgctggtggtgcacatgagaagacacactggagagaagccccacaagtgcacctttgagggctgcaggaagagctacagccggctggagaacctgaagacccacctgcggagccacactggagagaagccctacatgtgtgaacatgagggctgcagcaaggccttcagcaatgccagtgaccgggccaagcaccagaacagaacccacagcaatgagaagccctacgtgtgcaagctgcccggctgcaccaagcgctacacagaccccagcagcctgaggaagcacgtgaagacagtgcacggcccagatgcccacgtgaccaagaggcacagaggagatggccccctgccccgggcccccagcatcagcacagtggagcccaagcgggagcgggagggcggccccatccgggaggagagccggctgactgtgcctgagggcgccatgaagccccagcccagccctggggcccagagcagctgcagcagtgaccacagccctgctggcagcgctgccaacacagattctggagtggagatgactggaaatgccggcggcagcacagaggacctgagcagcctggatgagggcccctgcatcgccggcaccggcctgagcaccctgcggcggctggagaacctgcggctggaccagctgcaccagctgcggcccatcggcacccggggcctgaagctgcccagcctgagccacacaggcaccaccgtgtccagaagagtgggcccccctgtgtccctggagaggaggagcagcagcagcagcagcatcagcagcgcctacacagtgtccagaagaagcagcctggccagccccttccccccaggcagccccccagaaaatggagccagcagcctgcccggcctgatgcctgcccagcactacctgctgcgggcccgctatgccagcgcccggggcggcggcaccagccccacagctgccagcagcctggaccgcatcggcggcctgcccatgccaccctggaggagcagagctgagtacccaggctacaaccccaatgctggggtgacccggcgggccagtgaccctgcccaggccgctgacaggcctgccccagcccgggtgcagcgcttcaagagcctgggctgtgtgcacaccccacccaccgtggccggcggcggccagaactttgacccctacctgcccacctctgtgtacagcccccagcccccatccatcacagaaaatgctgccatggatgcccggggcctgcaggaggagcctgaggtgggcacctccatggtgggcagcggcctgaacccctacatggacttccccccaacagacaccctgggctacggcggccctgagggcgctgctgctgagccctatggagcccggggccctggcagcctgcccctgggccctggcccccccaccaactacggccccaacccctgcccccagcaggccagctacccagaccccacccaggagacctggggcgagttccccagccacagcggcctgtacccaggccccaaggccctgggcggcacctacagccagtgcccccggctggagcactacggccaggtgcaggtgaagccagagcagggctgccctgtgggcagtgacagcacaggcctggccccctgcctgaatgcccaccccagcgagggccccccccacccccagcccctcttcagccactacccccagcccagccccccccagtacctgcagagcggcccctacacccagcccccaccagactacctgcccagcgagccccggccctgcctggactttgacagccccacccacagcacaggccagctgaaggcccagctggtgtgcaactacgtgcagagccagcaggagctgctgtgggagggcggcggccgggaggatgccccagcccaggagcccagctaccagagccccaagttcctgggcggcagccaggtgagccccagccgggccaaggcccctgtgaacacctacggccctggcttcggccccaacctgcccaaccacaagagcggcagctaccccacccccagcccctgccacgagaactttgtggtgggcgccaacagagccagccacagagctgctgccccaccccggctgctgccccccctgcccacctgctacggccccctgaaggtgggcggcaccaaccccagctgtggccaccctgaggtgggccgcctgggcggcggccctgccctgtacccacctcctgagggccaggtgtgcaaccccctggacagcctggacctggacaacacccagctggactttgtggccatcctggatgagccccagggcctgagccccccacccagccatgaccagaggggcagcagcggccacaccccaccacccagcggcccccccaacatggctgtgggcaacatgtctgtgctgctgcggagcctgcccggggagacagagttcctgaacagcagcgcctag

SEQ ID NO: 19813 - DNA, 135 bp, synthetic construct
  misc_feature 1..135: note = Description of Artificial Sequence: Synthetic coding sequence
  source 1..135: mol_type = other DNA
atgagcggcccccacagctatggccctgcccgggagaccaacagctgcacagagggccccctcttcagcagccccaggtctgctgtgaagctgaccaagaagagggccctgagcatcagccccctgagtgactag

SEQ ID NO: 19814 - DNA, 3198 bp, synthetic construct; identical to SEQ ID NO: 19810
  misc_feature 1..3198: note = Description of Artificial Sequence: Synthetic coding sequence
  source 1..3198: mol_type = other DNA

SEQ ID NO: 19815 - DNA, 1548 bp, synthetic construct
  misc_feature 1..1548: note = Description of Artificial Sequence: Synthetic coding sequence
  source 1..1548: mol_type = other DNA
atggccgagcaggtggccctgagcaggacccaggtgtgtggcatcctgcgggaggagctgttccagggagatgccttccaccagagcgacacccacatcttcatcatcatgggcgccagcggggacctggccaagaagaagatctaccccaccatctggtggctgttcagagatggcctgctgcctgagaacaccttcatcgtgggctacgcccggagccggctgactgtggccgacatcaggaagcagagcgagcccttcttcaaggccaccccagaggagaagctgaagctggaggacttctttgccaggaacagctatgtggccggccagtatgatgatgctgccagctaccagaggctgaacagccacatgaatgccctgcacctgggcagccaggccaacagactcttctacctggccctgcccccaacagtgtatgaagctgtgaccaagaacatccacgagagctgcatgagccagatcggctggaaccgcatcatcgtggagaagcccttcggccgggacctgcagagcagtgaccggctgagcaaccacatcagcagcctcttccgggaggaccagatctacagaattgaccactacctgggcaaggagatggtgcagaacctgatggtgctgcgctttgccaaccgcatcttcggccccatctggaacagagacaacatcgcctgcgtcatcctgaccttcaaggagccctttggaacagagggccggggcggctactttgatgaatttggcatcatcagagatgtgatgcagaaccacctgctgcagatgctgtgcctggtggccatggagaagccagccagcaccaacagtgatgatgtgagagatgagaaggtgaaggtgctgaagtgcatcagcgaggtgcaggccaacaacgtggtgctgggccagtatgtgggcaacccagatggagagggggaggccaccaagggctacctggatgaccccaccgtgccccggggcagcaccacagccacctttgctgctgtggtgctgtatgtggagaatgaacgctgggatggagtgcccttcatcctgcgctgtgggaaggccctgaatgaaaggaaggccgaggtgcggctgcagttccatgatgtggccggggacatcttccaccagcagtgcaagagaaatgagctggtgatccgggtgcagcccaatgaagctgtgtacaccaagatgatgaccaagaagccaggcatgttcttcaaccctgaggagagcgagctggacctgacctacggcaaccgctacaagaatgtgaagctgcctgatgcctatgagcggctcatcctggatgtgttctgtggcagccagatgcactttgtgcggagtgatgagctgcgggaggcctggaggatcttcacccccctgctgcaccagatcgagctggagaagcccaagcccatcccctacatctacggcagccggggccccacagaagcagatgagctgatgaagagggtgggcttccagtatgagggcacctacaagtgggtgaacccccacaagctgtag

SEQ ID NO: 19816 - DNA, 1686 bp, synthetic construct
  misc_feature 1..1686: note = Description of Artificial Sequence: Synthetic coding sequence
  source 1..1686: mol_type = other DNA
atggccgagcaggtggccctgagcaggacccaggtgtgtggcatcctgcgggaggagctgttccagggagatgccttccaccagagcgacacccacatcttcatcatcatgggcgccagcggggacctggccaagaagaagatctaccccaccatctggtggctgttcagagatggcctgctgcctgagaacaccttcatcgtgggctacgcccggagccggctgactgtggccgacatcaggaagcagagcgagcccttcttcaaggccaccccagaggagaagctgaagctggaggacttctttgccaggaacagctatgtggccggccagtatgatgatgctgccagctaccagaggctgaacagccacatgaatgccctgcacctgggcagccaggccaacagactcttctacctggccctgcccccaacagtgtatgaagctgtgaccaagaacatccacgagagctgcatgagccagatcggctggaaccgcatcatcgtggagaagcccttcggccgggacctgcagagcagtgaccggctgagcaaccacatcagcagcctcttccgggaggaccagatctacagaattgaccactacctgggcaaggagatggtgcagaacctgatggtgctgcgctttgccaaccgcatcttcggccccatctggaacagagacaacatcgcctgcgtcatcctgaccttcaaggagccctttggaacagagggccggggcggctactttgatgaatttggcatcatccggggccctggccggcagggcggcagcggcagcgagagctgcagcctgagcctgggcagcctggtgtggggcccccacgccctggagcccggggagcagggcggggagctgcggcgggccctggccagctctgtgcccagagatgtgatgcagaaccacctgctgcagatgctgtgcctggtggccatggagaagccagccagcaccaacagtgatgatgtgagagatgagaaggtgaaggtgctgaagtgcatcagcgaggtgcaggccaacaacgtggtgctgggccagtatgtgggcaacccagatggagagggggaggccaccaagggctacctggatgaccccaccgtgccccggggcagcaccacagccacctttgctgctgtggtgctgtatgtggagaatgaacgctgggatggagtgcccttcatcctgcgctgtgggaaggccctgaatgaaaggaaggccgaggtgcggctgcagttccatgatgtggccggggacatcttccaccagcagtgcaagagaaatgagctggtgatccgggtgcagcccaatgaagctgtgtacaccaagatgatgaccaagaagccaggcatgttcttcaaccctgaggagagcgagctggacctgacctacggcaaccgctacaagaatgtgaagctgcctgatgcctatgagcggctcatcctggatgtgttctgtggcagccagatgcactttgtgcggagtgatgagctgcgggaggcctggaggatcttcacccccctgctgcaccagatcgagctggagaagcccaagcccatcccctacatctacggcagccggggccccacagaagcagatgagctgatgaagagggtgggcttccagtatgagggcacctacaagtgggtgaacccccacaagctgtag

SEQ ID NO: 19817 - DNA, 1638 bp, synthetic construct
  misc_feature 1..1638: note = Description of Artificial Sequence: Synthetic coding sequence
  source 1..1638: mol_type = other DNA
atgggcagaagaggcagcgcccctggaaatggccgcaccctgcggggctgtgagcggggcggcagaagaagaagatctgctgacagcgtgatggccgagcaggtggccctgagcaggacccaggtgtgtggcatcctgcgggaggagctgttccagggagatgccttccaccagagcgacacccacatcttcatcatcatgggcgccagcggggacctggccaagaagaagatctaccccaccatctggtggctgttcagagatggcctgctgcctgagaacaccttcatcgtgggctacgcccggagccggctgactgtggccgacatcaggaagcagagcgagcccttcttcaaggccaccccagaggagaagctgaagctggaggacttctttgccaggaacagctatgtggccggccagtatgatgatgctgccagctaccagaggctgaacagccacatgaatgccctgcacctgggcagccaggccaacagactcttctacctggccctgcccccaacagtgtatgaagctgtgaccaagaacatccacgagagctgcatgagccagatcggctggaaccgcatcatcgtggagaagcccttcggccgggacctgcagagcagtgaccggctgagcaaccacatcagcagcctcttccgggaggaccagatctacagaattgaccactacctgggcaaggagatggtgcagaacctgatggtgctgcgctttgccaaccgcatcttcggccccatctggaacagagacaacatcgcctgcgtcatcctgaccttcaaggagccctttggaacagagggccggggcggctactttgatgaatttggcatcatcagagatgtgatgcagaaccacctgctgcagatgctgtgcctggtggccatggagaagccagccagcaccaacagtgatgatgtgagagatgagaaggtgaaggtgctgaagtgcatcagcgaggtgcaggccaacaacgtggtgctgggccagtatgtgggcaacccagatggagagggggaggccaccaagggctacctggatgaccccaccgtgccccggggcagcaccacagccacctttgctgctgtggtgctgtatgtggagaatgaacgctgggatggagtgcccttcatcctgcgctgtgggaaggccctgaatgaaaggaaggccgaggtgcggctgcagttccatgatgtggccggggacatcttccaccagcagtgcaagagaaatgagctggtgatccgggtgcagcccaatgaagctgtgtacaccaagatgatgaccaagaagccaggcatgttcttcaaccctgaggagagcgagctggacctgacctacggcaaccgctacaagaatgtgaagctgcctgatgcctatgagcggctcatcctggatgtgttctgtggcagccagatgcactttgtgcggagtgatgagctgcgggaggcctggaggatcttcacccccctgctgcaccagatcgagctggagaagcccaagcccatcccctacatctacggcagccggggccccacagaagcagatgagctgatgaagagggtgggcttccagtatgagggcacctacaagtgggtgaacccccacaagctgtag

SEQ ID NO: 19818 - DNA, 1548 bp, synthetic construct; identical to SEQ ID NO: 19815
  misc_feature 1..1548: note = Description of Artificial Sequence: Synthetic coding sequence
  source 1..1548: mol_type = other DNA

SEQ ID NO: 19819 - DNA, 771 bp, synthetic construct
  misc_feature 1..771: note = Description of Artificial Sequence: Synthetic coding sequence
  source 1..771: mol_type = other DNA
atggccgagcaggtggccctgagcaggacccaggtgtgtggcatcctgcgggaggagctgttccagggagatgccttccaccagagcgacacccacatcttcatcatcatgggcgccagcggggacctggccaagaagaagatctaccccaccatctggtggctgttcagagatggcctgctgcctgagaacaccttcatcgtgggctacgcccggagccggctgactgtggccgacatcaggaagcagagcgagcccttcttcaaggccaccccagaggagaagctgaagctggaggacttctttgccaggaacagctatgtggccggccagtatgatgatgctgccagctaccagaggctgaacagccacatgaatgccctgcacctgggcagccaggccaacagactcttctacctggccctgcccccaacagtgtatgaagctgtgaccaagaacatccacgagagctgcatgagccagatcggctggaaccgcatcatcgtggagaagcccttcggccgggacctgcagagcagtgaccggctgagcaaccacatcagcagcctcttccgggaggaccagatctacagaattgaccactacctgggcaaggagatggtgcagaacctgatggtgctgcgctttgccaaccgcatcttcggccccatctggaacagagacaacatcgcctgcgtcatcctgaccttcaaggagccctttggaacagagggccggggcggctactttgatgaatttggcatcatctag

SEQ ID NO: 19820 - DNA, 675 bp, synthetic construct
  misc_feature 1..675: note = Description of Artificial Sequence: Synthetic coding sequence
  source 1..675: mol_type = other DNA
atggcccggctgctgcaggccagctgcctgctgagcctgctgctggccggctttgtgtcccagagccggggccaggagaagagcaagatggactgccacggcggcatcagcggcaccatctatgaatatggagccctgaccattgatggagaggagtacatccccttcaagcagtatgctgggaagtatgtgctgtttgtgaatgtggccagctacctgaccggccagtacatcgagctgaatgccctgcaggaggagctggcccccttcggcctggtgatcctgggcttcccctgcaaccagtttgggaagcaggagcctggagaaaattctgagatcctgcccaccctgaagtatgtgcggcctgggggcggctttgtgcccaacttccagctgtttgagaagggagatgtgaatggagagaaggagcagaagttctacaccttcctgaagaacagctgcccccccaccagcgagctgctgggcaccagtgacaggctcttctgggagcccatgaaggtgcatgacatccgctggaactttgagaagttcctggtgggcccagatggcatccccatcatgcgctggcaccacaggaccaccgtgtccaatgtgaagatggacatcctgagctacatgaggcggcaggccgccctgggcgtgaagaggaagtag

SEQ ID NO: 19821 - DNA, 219 bp, synthetic construct
  misc_feature 1..219: note = Description of Artificial Sequence: Synthetic coding sequence
  source 1..219: mol_type = other DNA
atggcccggctgctgcaggccagctgcctgctgagcctgctgctggccggctttgtgtcccagagccggggccaggagaagagcaagatggactgccacggcggcatcagcggcaccatctatgaatatggagccctgaccattgatggagaggagtacatccccttcaagcagtatgctgggaagtatgtgctgtttgtgaatgtggccagctactag

SEQ ID NO: 19822 - DNA, 633 bp, synthetic construct
  misc_feature 1..633: note = Description of Artificial Sequence: Synthetic coding sequence
  source 1..633: mol_type = other DNA
atgccaccctacacagtggtgtacttccctgtgcggggccgctgtgccgccctgaggatgctgctggccgaccagggccagagctggaaggaggaggtggtgacagtggagacctggcaggagggcagcctgaaggccagctgcctgtatggccagctgcccaagttccaggatggagacctgaccctgtaccagagcaacaccatcctgcggcacctgggccgcaccctgggcctgtatggcaaggaccagcaggaggccgccctggtggacatggtgaatgatggagtggaggacctgcgctgcaagtacatcagcctcatctacaccaactatgaggccggcaaggatgattatgtgaaggccctgcccggccagctgaagccctttgagaccctgctgagccagaaccagggcggcaagaccttcatcgtgggggaccagatcagctttgctgactacaacctgctggacctgctgctgattcatgaggtgctggcccctggctgcctggatgccttccccctgctgagcgcctacgtgggccgcctgagcgcccggcccaagctgaaggccttcctggccagcccagaatatgtgaacctgcccatcaatggaaatggcaagcagtag

SEQ ID NO: 19823 - DNA, 2184 bp, synthetic construct
  misc_feature 1..2184: note = Description of Artificial Sequence: Synthetic coding sequence
  source 1..2184: mol_type = other DNA
atggccttccagaaggctgtgaagggcaccatcctggtgggcggcggggccctggccaccgtgctgggcctgagccagtttgcccactacagaaggaagcagatgaacctggcctacgtgaaggctgctgactgcatcagcgagcctgtgaaccgggagccccccagccgggaggcccagctgctgaccctgcagaacaccagcgagtttgacatcctggtgattggaggaggagccaccggcagcggctgtgccctggatgctgtgacccggggcctgaagacagccctggtggagagagatgacttcagcagcggcaccagcagccgcagcaccaagctgatccacggcggcgtgcgctacctgcagaaggccatcatgaagctggacatcgagcagtacaggatggtgaaggaggccctgcacgagcgggccaacctgctggagatcgccccccacctgagcgcccccctgcccatcatgctgcctgtgtacaagtggtggcagctgccctactactgggtgggcatcaagctgtatgacctggtggccggcagcaactgcctgaagagcagctatgtgctgagcaagagccgggccctggagcacttccccatgctgcagaaggacaagctggtgggcgccatcgtgtactatgatggccagcacaatgatgccaggatgaacctggccatcgccctgacagctgcccgctatggagctgccacagccaactacatggaggtggtgtccctgctgaagaagacagacccccagacaggcaaggtgcgggtgtctggggcccgctgcaaggatgtgctgaccggccaggagtttgatgtgcgggccaagtgtgtgatcaatgccaccggccccttcacagacagcgtgaggaagatggatgacaaggatgctgctgccatctgccagcccagcgctggggtgcacatcgtgatgcctggctactacagccctgagagcatgggcctgctggaccctgccaccagtgatggccgggtcatcttcttcctgccctggcagaagatgaccatcgccggcaccacagacacccccacagatgtgacccaccaccccatccccagcgaggaggacatcaacttcatcctgaatgaggtgaggaactacctgagctgtgatgtggaggtgagaagaggagatgtgctggccgcctggagcggcatccggcccctggtgacagaccccaagtctgctgacacccagagcatcagcaggaaccacgtggtggacatcagcgagagcggcctcatcaccatcgccggcggcaagtggaccacctaccgctccatggccgaggacaccatcaatgctgctgtgaagacccacaacctgaaggccggccccagcaggacagtgggcctcttcctgcagggcggcaaggactggagccccaccctgtacatccggctggtgcaggactatggcctggagagcgaggtggcccagcacctggccgccacctatggagacaaggcctttgaggtggccaagatggcctctgtgacaggcaagcgctggcccatcgtgggcgtgcggctggtgtctgagttcccctacattgaagctgaggtgaagtatggcatcaaggagtatgcctgcacagctgtggacatgatcagcaggaggacccggctggccttcctgaatgtgcaggccgctgaggaggccctgcccagaattgtggagctgatgggccgggagctgaactgggatgactacaagaagcaggagcagctggagacagccaggaagttcctgtactatgagatgggctacaagagccgctctgagcagctgacagacagaagtgagatcagcctgctgcccagcgacatcgaccgctacaagaagcgcttccacaagtttgatgctgaccagaagggcttcatcaccatcgtggatgtgcagagggtgctggagagcatcaacgtgcagatggatgagaacaccctgcacgagatcctgaatgaggtggacctgaacaagaatggccaggtggagctgaatgagttcctgcagctgatgtctgccatccagaagggccgggtgtctggcagccggctggccatcctgatgaagacagctgaggagaacctggaccggcgggtgcccatccctgtggacaggagctgtggcggcctgtag

SEQ ID NO: 19824 - DNA, 1503 bp, synthetic construct
  misc_feature 1..1503: note = Description of Artificial Sequence: Synthetic coding sequence
  source 1..1503: mol_type = other DNA
atgaacctggccatcgccctgacagctgcccgctacggggccgccacagccaactacatggaggtggtgtccctgctgaagaagacagacccccagacaggcaaggtgcgggtgtctggggcccgctgcaaggatgtgctgaccggccaggagtttgatgtgcgggccaagtgtgtgatcaatgccaccggccccttcacagattctgtgaggaagatggatgacaaggatgctgctgccatctgccagcccagcgctggggtgcacatcgtgatgcctggctactacagccctgagagcatgggcctgctggaccctgccaccagtgatggccgggtcatcttcttcctgccctggcagaagatgaccatcgccggcaccacagacacccccacagatgtgacccaccaccccatccccagcgaggaggacatcaacttcatcctgaatgaggtgaggaactacctgagctgtgatgtggaggtgagaagaggagatgtgctggccgcctggagcggcatccggcccctggtgacagaccccaagtctgctgacacccagagcatcagcagaaatcatgtggtggacatcagcgagagcggcctcatcaccatcgccggcggcaagtggaccacctaccgctccatggccgaggacaccatcaatgctgctgtgaagacccacaacctgaaggccggccccagcaggacagtgggcctcttcctgcagggcggcaaggactggagccccaccctgtacatccggctggtgcaggactatggcctggagagcgaggtggcccagcacctggccgccacctacggggacaaggcctttgaggtggccaagatggcctctgtgacaggcaagcgctggcccatcgtgggcgtgcggctggtgtctgagttcccctacatcgaggccgaggtgaagtatggcatcaaggagtatgcctgcacagctgtggacatgatcagcaggaggacccggctggccttcctgaatgtgcaggccgctgaggaggccctgccccgcatcgtggagctgatgggccgggagctgaactgggatgactacaagaagcaggagcagctggagacagccaggaagttcctgtactatgagatgggctacaagagccgctctgagcagctgacagacagaagtgagatcagcctgctgcccagcgacatcgaccgctacaagaagcgcttccacaagtttgatgctgaccagaagggcttcatcaccatcgtggatgtgcagagggtgctggagagcatcaacgtgcagatggatgagaacaccctgcacgagatcctgaatgaggtggacctgaacaagaatggccaggtggagctgaatgagttcctgcagctgatgtctgccatccagaagggccgggtgtctggcagccggctggccatcctgatgaagacagctgaggagaacctggacagaagagtgcccatccctgtggacaggagctgtggcggcctgtag

SEQ ID NO: 19825 - DNA, 2184 bp, synthetic construct; identical to SEQ ID NO: 19823
  misc_feature 1..2184: note = Description of Artificial Sequence: Synthetic coding sequence
  source 1..2184: mol_type = other DNA

SEQ ID NO: 19826 - DNA, 2184 bp, synthetic construct; identical to SEQ ID NO: 19823
  misc_feature 1..2184: note = Description of Artificial Sequence: Synthetic coding sequence
  source 1..2184: mol_type = other DNA

SEQ ID NO: 19827 - DNA, 330 bp, synthetic construct
  misc_feature 1..330: note = Description of Artificial Sequence: Synthetic coding sequence
  source 1..330: mol_type = other DNA
atggccttccagaaggctgtgaagggcaccatcctggtgggcggcggggccctggccaccgtgctgggcctgagccagtttgcccactacagaaggaagcagatgaacctggcctacgtgaaggctgctgactgcatcagcgagcctgtgaaccgggagccccccagccgggaggcccagctgctgaccctgcagaacaccagcgagtttgacatcctggtgattggaggaggagccaccggcagcggctgtgccctggatgctgtgacccggggcctgaagacagccctggtggagagagatgacttcagcagcggcaccagcagctag

SEQ ID NO: 19828 - DNA, 2184 bp, synthetic construct; identical to SEQ ID NO: 19823
  misc_feature 1..2184: note = Description of Artificial Sequence: Synthetic coding sequence
  source 1..2184: mol_type = other DNA

SEQ ID NO: 19829 - DNA, 1140 bp, synthetic construct
  misc_feature 1..1140: note = Description of Artificial Sequence: Synthetic coding sequence
  source 1..1140: mol_type = other DNA
atggccttccagaaggctgtgaagggcaccatcctggtgggcggcggggccctggccaccgtgctgggcctgagccagtttgcccactacagaaggaagcagatgaacctggcctacgtgaaggctgctgactgcatcagcgagcctgtgaaccgggagccccccagccgggaggcccagctgctgaccctgcagaacaccagcgagtttgacatcctggtgattggaggaggagccaccggcagcggctgtgccctggatgctgtgacccggggcctgaagacagccctggtggagagagatgacttcagcagcggcaccagcagccgcagcaccaagctgatccacggcggcgtgcgctacctgcagaaggccatcatgaagctggacatcgagcagtacaggatggtgaaggaggccctgcacgagcgggccaacctgctggagatcgccccccacctgagcgcccccctgcccatcatgctgcctgtgtacaagtggtggcagctgccctactactgggtgggcatcaagctgtatgacctggtggccggcagcaactgcctgaagagcagctatgtgctgagcaagagccgggccctggagcacttccccatgctgcagaaggacaagctggtgggcgccatcgtgtactatgatggccagcacaatgatgccaggatgaacctggccatcgccctgacagctgcccgctatggagctgccacagccaactacatggaggtggtgtccctgctgaagaagacagacccccagacaggcaaggtgcgggtgtctggggcccgctgcaaggatgtgctgaccggccaggagtttgatgtgcgggccaagtgtgtgatcaatgccaccggccccttcacagacagcgtgaggaagatggatgacaaggatgctgctgccatctgccagcccagcgctggggtgcacatcgtgatgcctggctactacagccctgagagcatgggcctgctggaccctgccaccagtgatggccgggtcatcttcttcctgccctggcagaagatgaccatcgccggcaccacagacacccccacagatgtgacccaccaccccatccccagcgaggaggacatcaacttcatcctgaatgaggtgtag

SEQ ID NO: 19830 - DNA, 1263 bp, synthetic construct
  misc_feature 1..1263: note = Description of Artificial Sequence: Synthetic coding sequence
  source 1..1263: mol_type = other DNA
atgagcggccggcccaggaccaccagctttgctgagagctgcaagcctgtgcagcagcccagcgccttcggctccatgaaggtgtcccgggacaaggatggcagcaaggtgaccaccgtggtggccaccccaggccagggccctgaccggccccaggaggtgtcctacacagacaccaaggtgattggaaatggcagctttggagtggtgtaccaggccaagctgtgtgacagcggggagctggtggccatcaagaaggtgctgcaggacaagcgcttcaagaaccgggagctgcagatcatgaggaagctggaccactgcaacatcgtgcggctgcgctacttcttctacagcagtggagagaagaaggatgaggtgtacctgaacctggtgctggactatgtgcctgagaccgtgtacagagtggcccggcactacagccgggccaagcagaccctgcccgtcatctacgtgaagctgtacatgtaccagctgttccgcagcctggcctacatccacagctttggcatctgccaccgggacatcaagccccagaacctgctgctggaccctgacacagctgtgctgaagctgtgtgactttggaagtgccaagcagctggtgcggggggagcccaacgtgtcctacatctgcagccgctactaccgggcccctgagctgatctttggagccacagactacaccagcagcattgatgtgtggagcgctggctgtgtgctggccgagctgctgctgggccagcccatcttccctggggacagcggcgtggaccagctggtggagatcatcaaggtgctgggcacccccacccgggagcagatccgggagatgaaccccaactacacagagttcaagttcccccagatcaaggcccacccctggaccaaggtgttccggcccaggaccccacctgaggccatcgccctgtgcagccggctgctggagtacacccccacagcccggctgacccccctggaggcctgtgcccacagcttctttgatgagctgcgggaccccaacgtgaagctgcccaacggccgggacaccccagccctcttcaacttcaccacccaggagctgagcagcaacccccccctggccaccatcctgatcccccctcatgcccgcatccaggccgccgccagcacccccaccaatgccacagctgccagtgatgccaacacaggagaccggggccagaccaacaatgctgccagcgccagcgccagcaacagcacctag

SEQ ID NO: 19831 - DNA, 1302 bp, synthetic construct
  misc_feature 1..1302: note = Description of Artificial Sequence: Synthetic coding sequence
  source 1..1302: mol_type = other DNA
atgagcggccggcccaggaccaccagctttgctgagagctgcaagcctgtgcagcagcccagcgccttcggctccatgaaggtgtcccgggacaaggatggcagcaaggtgaccaccgtggtggccaccccaggccagggccctgaccggccccaggaggtgtcctacacagacaccaaggtgattggaaatggcagctttggagtggtgtaccaggccaagctgtgtgacagcggggagctggtggccatcaagaaggtgctgcaggacaagcgcttcaagaaccgggagctgcagatcatgaggaagctggaccactgcaacatcgtgcggctgcgctacttcttctacagcagtggagagaagaaggatgaggtgtacctgaacctggtgctggactatgtgcctgagaccgtgtacagagtggcccggcactacagccgggccaagcagaccctgcccgtcatctacgtgaagctgtacatgtaccagctgttccgcagcctggcctacatccacagctttggcatctgccaccgggacatcaagccccagaacctgctgctggaccctgacacagctgtgctgaagctgtgtgactttggaagtgccaagcagctggtgcggggggagcccaacgtgtcctacatctgcagccgctactaccgggcccctgagctgatctttggagccacagactacaccagcagcattgatgtgtggagcgctggctgtgtgctggccgagctgctgctgggccagcccatcttccctggggacagcggcgtggaccagctggtggagatcatcaaggtgctgggcacccccacccgggagcagatccgggagatgaaccccaactacacagagttcaagttcccccagatcaaggcccacccctggaccaaggacagcagcggcaccggccacttcaccagcggcgtgcgggtcttccggcccaggaccccacctgaggccatcgccctgtgcagccggctgctggagtacacccccacagcccggctgacccccctggaggcctgtgcccacagcttctttgatgagctgcgggaccccaacgtgaagctgcccaacggccgggacaccccagccctcttcaacttcaccacccaggagctgagcagcaacccccccctggccaccatcctgatccccccccacgcccgcatccaggccgccgccagcacccccaccaatgccacagctgccagtgatgccaacacaggagaccggggccagaccaacaatgctgccagcgccagcgccagcaacagcacctag

SEQ ID NO: 19832 - DNA, 315 bp, synthetic construct
  misc_feature 1..315: note = Description of Artificial Sequence: Synthetic coding sequence
  source 1..315: mol_type = other DNA
atgaaccccaactacacagagttcaagttcccccagatcaaggcccacccctggaccaaggtgttccggcccaggaccccacctgaggccatcgccctgtgcagccggctgctggagtacacccccacagcccggctgacccccctggaggcctgtgcccacagcttctttgatgagctgcgggaccccaacgtgaagctgcccaacggccgggacaccccagccctcttcaacttcaccacccaggatgccaacacaggagaccggggccagaccaacaatgctgccagcgccagcgccagcaacagcacctag

SEQ ID NO: 19833 - DNA, 837 bp, synthetic construct
  misc_feature 1..837: note = Description of Artificial Sequence: Synthetic coding sequence
  source 1..837: mol_type = other DNA
atggaggagaacatggaggagggccagacccagaagggctgctttgagtgctgcatcaagtgcctgggcggcatcccctatgccagcctgattgccaccatcctgctgtatgctggggtggccctcttctgtggctgcggccacgaggccctgagcggcaccgtgaacatcctgcagacctactttgagatggccaggacagctggggacaccctggatgtgttcaccatgattgacatcttcaagtatgtgatctacggcattgctgctgccttctttgtgtatggcatcctgctgatggtggagggcttcttcaccactggagccatcaaggacctgtatggagacttcaagatcaccacctgtggccgctgtgtgtctgcctggttcatcatgctgacctacctgttcatgctggcctggctgggcgtgacagccttcaccagcctgcctgtgtacatgtacttcaacctgtggaccatctgcaggaacaccaccctggtggagggcgccaacctgtgcctggacctgcggcagtttggcatcgtgaccatcggggaggagaagaagatctgcaccgtgtctgagaacttcctgaggatgtgtgagagcacagagctgaacatgaccttccacctgttcatcgtggccctggccggggccggggccgccgtcatcgccatggtgcactacctgatggtgctgagcgccaactgggcctacgtgaaggatgcctgcaggatgcagaagtatgaggacatcaagagcaaggaggagcaggagctgcatgacatccacagcaccaggagcaaggagcggctgaatgcctacacctag

SEQ ID NO: 19834 - DNA, 837 bp, synthetic construct; identical to SEQ ID NO: 19833
  misc_feature 1..837: note = Description of Artificial Sequence: Synthetic coding sequence
  source 1..837: mol_type = other DNA

SEQ ID NO: 19835 - DNA, 33 bp, synthetic construct; identical to SEQ ID NO: 10859
  misc_feature 1..33: note = Description of Artificial Sequence: Synthetic coding sequence
  source 1..33: mol_type = other DNA

SEQ ID NO: 19836 - DNA, 804 bp, synthetic construct
  misc_feature 1..804: note = Description of Artificial Sequence: Synthetic coding sequence
  source 1..804: mol_type = other DNA
atgggctgctttgagtgctgcatcaagtgcctgggcggcatcccctatgccagcctcatcgccaccatcctgctgtatgccggcgtggccctcttctgtggctgcggccacgaggccctgtctggaacagtgaacatcctgcagacctactttgagatggccaggacagctggggacaccctggatgtgttcaccatgattgacatcttcaagtatgtgatctatggaattgctgctgccttctttgtgtatggcatcctgctgatggtggagggcttcttcaccaccggggccatcaaggacctgtatggagacttcaagatcaccacctgtggccgctgtgtgtctgcctggttcatcatgctgacctacctgttcatgctggcctggctgggcgtgacagccttcaccagcctgcctgtgtacatgtacttcaacctgtggaccatctgcaggaacaccaccctggtggagggcgccaacctgtgcctggacctgcggcagtttggaattgtgaccatcggggaggagaagaagatctgcaccgtgtctgagaacttcctgaggatgtgtgagagcacagagctgaacatgaccttccacctgttcatcgtggccctggccggggccggggctgctgtgattgccatggtgcactacctgatggtgctgagcgccaactgggcctacgtgaaggatgcctgcaggatgcagaagtatgaggacatcaagagcaaggaggagcaggagctgcatgacatccacagcaccaggagcaaggagcggctgaatgcctacacctag

SEQ ID NO: 19837 - DNA, 390 bp, synthetic construct
  misc_feature 1..390: note = Description of Artificial Sequence: Synthetic coding sequence
  source 1..390: mol_type = other DNA
atggaggagaacatggaggagggccagacccagaagggctgctttgagtgctgcatcaagtgcctgggcggcatcccctatgccagcctgattgccaccatcctgctgtatgctggggtggccctcttctgtggctgcggccacgaggccctgagcggcaccgtgaacatcctgcagacctactttgagatggccaggacagctggggacaccctggatgtgttcaccatgattgacatcttcaagtatgtgatctacggcattgctgctgccttctttgtgtatggcatcctgctgatggtggagggcttcttcaccactggagccatcaaggacctgtatggagacttcaagatcaccacctgtggccgctgtgtgtctgcctggtag

SEQ ID NO: 19838 - DNA, 816 bp, synthetic construct
  misc_feature 1..816: note = Description of Artificial Sequence: Synthetic coding sequence
  source 1..816: mol_type = other DNA
atgacagacctggagggctgctttgagtgctgcatcaagtgcctgggcggcatcccctatgccagcctcatcgccaccatcctgctgtatgccggcgtggccctcttctgtggctgcggccacgaggccctgtctggaacagtgaacatcctgcagacctactttgagatggccaggacagctggggacaccctggatgtgttcaccatgattgacatcttcaagtatgtgatctatggaattgctgctgccttctttgtgtatggcatcctgctgatggtggagggcttcttcaccaccggggccatcaaggacctgtatggagacttcaagatcaccacctgtggccgctgtgtgtctgcctggttcatcatgctgacctacctgttcatgctggcctggctgggcgtgacagccttcaccagcctgcctgtgtacatgtacttcaacctgtggaccatctgcaggaacaccaccctggtggagggcgccaacctgtgcctggacctgcggcagtttggaattgtgaccatcggggaggagaagaagatctgcaccgtgtctgagaacttcctgaggatgtgtgagagcacagagctgaacatgaccttccacctgttcatcgtggccctggccggggccggggctgctgtgattgccatggtgcactacctgatggtgctgagcgccaactgggcctacgtgaaggatgcctgcaggatgcagaagtatgaggacatcaagagcaaggaggagcaggagctgcatgacatccacagcaccaggagcaaggagcggctgaatgcctacacctag

SEQ ID NO: 19839 - DNA, 1206 bp, synthetic construct
  misc_feature 1..1206: note = Description of Artificial Sequence: Synthetic coding sequence
  source 1..1206: mol_type = other DNA
atgatgggcctgggcaatggccgccgctccatgaagagcccccccctggtgctggccgccctggtggcctgcatcatcgtgctgggcttcaactactggatcgccagcagccgctctgtggacctgcagacccgcatcatggagctggagggccgggtgcggcgggctgctgctgagagaggagctgtggagctgaagaagaatgagttccagggcgagctggagaagcagcgggagcagctggacaagatccagagcagccacaacttccagctggagagcgtgaacaagctgtaccaggatgagaaggctgtgctggtgaacaacatcaccaccggggagcggctcatccgggtgctgcaggaccagctgaagaccctgcagagaaattatggccgcctgcagcaggatgtgctgcagttccagaagaaccagaccaacctggagaggaagttctcctatgacctgagccagtgcatcaaccagatgaaggaggtgaaggagcagtgtgaggagcgcatcgaggaggtgaccaagaagggaaatgaggccgtggccagccgggacctgtctgagaacaatgaccagaggcagcagctgcaggccctgtctgagccccagccccggctgcaggccgccggcctgccccacacagaggtgccccagggcaaaggaaatgtgctgggcaacagcaagagccagaccccagcccccagcagcgaggtggtgctggacagcaagaggcaggtggagaaggaggagaccaatgagatccaggtggtgaatgaggagccccagagggaccggctgccccaggagcccggccgggagcaggtggtggaggacaggcctgtgggcggccggggctttggaggagctggggagctgggccagaccccccaggtgcaggccgccctgtctgtgtcccaggagaaccctgagatggagggccctgagcgggaccagctggtgatcccagatggccaggaggaggagcaggaggccgccggggagggcaggaaccagcagaagctgcggggggaggatgactacaacatggatgaaaatgaggccgagagcgagacagacaagcaggccgccctggccggaaatgacagaaatattgatgtgttcaacgtggaggaccagaagagggacaccatcaacctgctggaccagcgggagaagaggaaccacaccctgtag

SEQ ID NO: 19840 - DNA, 1206 bp, synthetic construct; identical to SEQ ID NO: 19839
  misc_feature 1..1206: note = Description of Artificial Sequence: Synthetic coding sequence
  source 1..1206: mol_type = other DNA

SEQ ID NO: 19841 - DNA, 243 bp, synthetic construct
  misc_feature 1..243: note = Description of Artificial Sequence: Synthetic coding sequence
  source 1..243: mol_type = other DNA
atgatgggcctgggcaatggccgccgctccatgaagagcccccccctggtgctggccgccctggtggcctgcatcatcgtgctgggcttcaactactggatcgccagcagccgctctgtggacctgcagacccgcatcatggagctggagggccgggtgcggcgggctgctgctgagagaggagctgtggagctgaagaagaatgagttccagggcgagctggagaagcagcgggagcagtag

SEQ ID NO: 19842 - DNA, 366 bp, synthetic construct
  misc_feature 1..366: note = Description of Artificial Sequence: Synthetic coding sequence
  source 1..366: mol_type = other DNA
atgatgggcctgggcaatggccgccgctccatgaagagcccccccctggtgctggccgccctggtggcctgcatcatcgtgctgggcttcaactactggatcgccagcagccgctctgtggacctgcagacccgcatcatggagctggagggccgggtgcggcgggctgctgctgagagaggagctgtggagctgaagaagaatgagttccagggcgagctggagaagcagcgggagcagctggacaagatccagagcagccacaacttccagctggagagcgtgaacaagctgtaccaggatgagaaggctgtgctggtgaacaacatcaccaccggggagcggctcatccgggtgctgcagtag

SEQ ID NO: 19843 - DNA, 279 bp, synthetic construct
  misc_feature 1..279: note = Description of Artificial Sequence: Synthetic coding sequence
  source 1..279: mol_type = other DNA
atgaagcccatccagaagctgctggccggcctcatcctgctgacctggtgtgtggagggctgcagcagccagcactggagctatggcctgcggcctgggggcaagagagatgctgagaacctgattgacagcttccaggagatcgtgaaggaggtgggccagctggccgagacccagagatttgagtgcaccacccaccagcccaggagccccctgcgggacctgaagggggccctggagagcctgattgaggaggagaccggccagaagaagatctag

SEQ ID NO: 19844 - DNA, 279 bp, synthetic construct; identical to SEQ ID NO: 19843
  misc_feature 1..279: note = Description of Artificial Sequence: Synthetic coding sequence
  source 1..279: mol_type = other DNA

SEQ ID NO: 19845 - DNA, 774 bp, synthetic construct
  misc_feature 1..774: note = Description of Artificial Sequence: Synthetic coding sequence
  source 1..774: mol_type = other DNA
atgcctgcctccatgttcagcattgacaacatcctggccgcccggccccgctgcaaggacagcgtgctgcctgtggcccacagcgctgctgcccctgtggtgtttcctgccctgcatggagacagcctgtatggagccagcggcggggccagcagtgactatggagccttctaccccaggcctgtggcccctgggggcgccggcctgcctgctgctgtgtctggcagccggctgggctacaacaactacttctacggccagctgcacgtgcaggccgcccctgtgggccctgcctgctgcggggctgtgccccccctgggcgcccagcagtgcagctgtgtgcccaccccacctggctatgagggccctggctctgtgctggtgtcccctgtgccccaccagatgctgccctacatgaatgtgggcaccctgagcaggacagagctgcagctgctgaaccagctgcactgcaggaggaagagaagacacaggaccatcttcacagatgagcagctggaggccctggagaacctcttccaggagaccaagtacccagatgtgggcacccgggagcagctggccaggaaggtgcacctgcgggaggagaaggtggaggtgtggttcaagaacagaagagccaagtggaggcggcagaagaggagcagcagcgaggagagtgaaaatgctgagaagtggaacaagaccagcagcagcaaggccagccctgagaagcgggaggaggagggcaagagtgacctggacagcgacagctag

SEQ ID NO: 19846 - DNA, 654 bp, synthetic construct
  misc_feature 1..654: note = Description of Artificial Sequence: Synthetic coding sequence
  source 1..654: mol_type = other DNA
atggcctacccaggctacggcggcggcttcggcaacttcagcatccaggtgcccggcatgcagatgggccagcctgtgcctgagactggacctgccatcctgctggatggctacagcggccctgcctacagcgacacctacagcagcgctggggacagcgtgtacacctacttctctgctgtggccggccaggatggagaggtggatgctgaggagctgcagcgctgcctgacccagagcggcatcaatggcacctacagccccttcagcctggagacctgccgcatcatgattgccatgctggaccgggaccacacaggcaagatgggcttcaatgccttcaaggagctgtgggccgccctgaatgcctggaaggagaacttcatgacagtggaccaggacggcagcggcaccgtggagcaccacgagctgcggcaggccatcggcctgatgggctaccgcctgagcccccagaccctgaccaccatcgtgaagcgctacagcaagaatggccgcatcttctttgatgattatgtggcctgctgcgtgaagctgcgggccctgacagacttcttcaggaagagggaccacctgcagcagggcagcgccaacttcatctatgatgacttcctgcagggcaccatggccatctag

SEQ ID NO: 19847 - DNA, 438 bp, synthetic construct
  misc_feature 1..438: note = Description of Artificial Sequence: Synthetic coding sequence
  source 1..438: mol_type = other DNA
atggccacctgggccctgctgctgctggccgccatgctgctgggcaaccctggcctggtgttcagccggctgagccctgagtactatgacctggcccgggcccacctgagagatgaggagaagagctgcccctgcctggcccaggagggcccccagggcgacctgctgaccaagacccaggagctgggccgggactaccgcacctgcctgaccatcgtgcagaagctgaagaagatggtggacaagcccacccagaggtctgtgtccaatgctgccaccagggtgtgcaggacaggccgcagccgctggagagatgtgtgcaggaacttcatgaggcgctaccagagccgggtgacccagggcctggtggccggggagacagcccagcagatctgtgaggacctgcggctgtgcatccccagcacaggccccctgtag

SEQ ID NO: 19848 - DNA, 393 bp, synthetic construct
  misc_feature 1..393: note = Description of Artificial Sequence: Synthetic coding sequence
  source 1..393: mol_type = other DNA
atggagggcctggtgttcagccggctgagccctgagtactatgacctggcccgggcccacctgagagatgaggagaagagctgcccctgcctggcccaggagggcccccagggcgacctgctgaccaagacccaggagctgggccgggactaccgcacctgcctgaccatcgtgcagaagctgaagaagatggtggacaagcccacccagaggtctgtgtccaatgctgccaccagggtgtgcaggacaggccgcagccgctggagagatgtgtgcaggaacttcatgaggcgctaccagagccgggtgacccagggcctggtggccggggagacagcccagcagatctgtgaggacctgcggctgtgcatccccagcacaggccccctgtag

SEQ ID NO: 19849 - DNA, 555 bp, synthetic construct
  misc_feature 1..555: note = Description of Artificial Sequence: Synthetic coding sequence
  source 1..555: mol_type = other DNA
atgagcaggacagcctacacagtgggcgccctgctgctgctgctgggcaccctgctgcctgctgctgagggcaagaagaagggcagccagggcgccatccccccaccagacaaggcccagcacaatgacagcgagcagacccagagcccccagcagcccggcagcaggaacagaggccggggccagggccggggcacagccatgcctggagaggaggtgctggagagcagccaggaggccctgcacgtgacagagaggaagtacctgaagagggactggtgcaagacccagcccctgaagcagaccatccacgaggagggctgcaacagcaggaccatcatcaaccgcttctgctacggccagtgcaacagcttctacatccccaggcacatcaggaaggaggagggcagcttccagagctgcagcttctgcaagcccaagaagttcaccaccatgatggtgaccctgaactgcccagagctgcagccccccaccaagaagaagagggtgaccagggtgaagcagtgccgctgcatcagcattgacctggactag

SEQ ID NO: 19850 - DNA, 432 bp, synthetic construct
  misc_feature 1..432: note = Description of Artificial Sequence: Synthetic coding sequence
  source 1..432: mol_type = other DNA
atgagcaggacagcctacacagtgggcgccctgctgctgctgctgggcaccctgctgcctgctgctgagggcaagaagaagggcagccagggcgccatccccccaccagacaaggccctgcacgtgacagagaggaagtacctgaagagggactggtgcaagacccagcccctgaagcagaccatccacgaggagggctgcaacagcaggaccatcatcaaccgcttctgctacggccagtgcaacagcttctacatccccaggcacatcaggaaggaggagggcagcttccagagctgcagcttctgcaagcccaagaagttcaccaccatgatggtgaccctgaactgcccagagctgcagccccccaccaagaagaagagggtgaccagggtgaagcagtgccgctgcatcagcattgacctggactag

SEQ ID NO: 19851 - DNA, 432 bp, synthetic construct; identical to SEQ ID NO: 19850
  misc_feature 1..432: note = Description of Artificial Sequence: Synthetic coding sequence
  source 1..432: mol_type = other DNA

SEQ ID NO: 19852 - DNA, 396 bp, synthetic construct
  misc_feature 1..396: note = Description of Artificial Sequence: Synthetic coding sequence
  source 1..396: mol_type = other DNA
atgaccctggaggagttctctgctggggagcagaagacagaaagtgaccctgacaacgtggtgctgtgcctgctggccgcagatgaagatgatgacagagatgtggccctgcagatccacttcaccctcatccaggccttctgctgtgaaaatgacatcaacatcctgcgggtgagcaaccctggccgcctggccgagctgctgctgctggagacagatgctggccctgctgccagcgagggcgctgagcagcccccagacctgcactgtgtgctggtgaccaacccccacagcagccagtggaaggaccctgccctgagccagctgatctgcttctgccgggagagccgctacatggaccagtgggtgcctgtgatcaacctgcctgagaggtag

SEQ ID NO: 19853 - DNA, 498 bp, synthetic construct
  misc_feature 1..498: note = Description of Artificial Sequence: Synthetic coding sequence
  source 1..498: mol_type = other DNA
atgaccctggaggagttctctgctggggagcagaagacagagaggatggacaaggtgggagatgccctggaggaggtgctgagcaaggccctgagccagaggaccatcaccgtgggcgtgtatgaagctgccaagctgctgaatgtggaccctgacaacgtggtgctgtgcctgctggccgcagatgaagatgatgacagagatgtggccctgcagatccacttcaccctcatccaggccttctgctgtgaaaatgacatcaacatcctgcgggtgagcaaccctggccgcctggccgagctgctgctgctggagacagatgctggccctgctgccagcgagggcgctgagcagcccccagacctgcactgtgtgctggtgaccaacccccacagcagccagtggaaggaccctgccctgagccagctgatctgcttctgccgggagagccgctacatggaccagtgggtgcctgtgatcaacctgcctgagaggtag

SEQ ID NO: 19854 - DNA, 3693 bp, synthetic construct
  misc_feature 1..3693: note = Description of Artificial Sequence: Synthetic coding sequence
  source 1..3693: mol_type = other DNA
atgtctgccctgtgctggggccgcggggctgctggcctgaagagggccctgcggccctgtggccggcccggcctgcccgggaaggagggcacagctgggggcgtgtgtggccccaggaggagcagcagcgccagcccccaggagcaggaccaggacaggaggaaggactggggccacgtggagctgctggaggtgctgcaggcccgggtgcggcagctgcaggccgagagcgtgtctgaggtggtggtgaacagagtggatgtggcccggctgcctgaatgtggcagcggagatggcagcctgcagccccccaggaaggtgcagatgggcgccaaggatgccacccctgtgccctgtggccgctgggccaagatcctggagaaggacaagaggacccagcagatgaggatgcagaggctgaaggccaagctgcagatgcccttccagagcggggagttcaaggccctgacccggcggctgcaggtggagccccggctgctgagcaagcagatggccggctgcctggaggactgcacccggcaggcccctgagagcccctgggaggagcagctggcccggctgctgcaggaggcccctgggaagctgagcctggatgtggagcaggcccccagcggccagcacagccaggcccagctgagcggccagcagcagaggctgctggccttcttcaagtgctgcctgctgacagaccagctgcccctggcccaccacctgctggtggtgcaccacggccagaggcagaagaggaagctgctgaccctggacatgtacaatgctgtgatgctgggctgggcccggcagggcgccttcaaggagctggtgtatgtgctcttcatggtgaaggatgctggcctgaccccagacctgctgtcctatgctgctgccctgcagtgcatgggccggcaggaccaggatgctggcaccatcgagcgctgcctggagcagatgagccaggagggcctgaagctgcaggccctcttcaccgctgtgctgctgtctgaggaggaccgggccaccgtgctgaaggctgtgcacaaggtgaagcccaccttcagcctgcccccccagctgcccccacctgtgaacaccagcaagctgctgagagatgtgtatgccaaggatggccgggtgtcctaccccaagctgcacctgcccctgaagaccctgcagtgcctgtttgagaagcagctgcacatggagctggccagccgggtgtgtgtggtgtctgtggagaagcccaccctgcccagcaaggaggtgaagcacgccaggaagaccctgaagaccctgcgggaccagtgggagaaggccctgtgccgggccctgcgggagaccaagaaccggctggagcgggaggtgtatgagggccgcttcagcctgtaccccttcctgtgcctgctggatgagcgggaggtggtgaggatgctgctgcaggtgctgcaggccctgcctgcccagggcgagagcttcaccaccctggcccgggagctgagcgcccggaccttcagccgccacgtggtgcagaggcagagggtgtctggccaggtgcaggccctgcagaaccactacaggaagtacctgtgcctgctggccagtgatgctgaggtgcctgagccctgcctgccccggcagtactgggaggagctgggcgcccctgaggccctgcgggagcagccctggcccctgcctgtgcagatggagctgggcaagctgctggccgagatgctggtgcaggccacccagatgccctgcagcctggacaagccccacaggagcagccggctggtgcctgtgctgtaccacgtgtacagcttcagaaatgtgcagcagatcggcatcctgaagccccacccagcctacgtgcagctgctggagaaggctgctgagcccaccctgacctttgaagctgtggatgtgcccatgctgtgcccccccctgccctggaccagcccccacagcggggccttcctgctgagccccaccaagctgatgaggacagtggagggcgccacccagcaccaggagctgctggagacctgccccccaacagccctgcatggagccctggatgccctgacccagctgggcaactgtgcctggagggtgaatggccgggtgctggacctggtgctgcagctgttccaggccaagggctgcccccagctgggcgtgcctgccccacccagcgaggccccccagcccccagaggcccacctgccccacagcgctgccccagccaggaaggccgagctgcggcgggagctggcccactgccagaaggtggcccgggagatgcacagcctgcgggcagaggccctgtaccgcctgagcctggcccagcacctgcgggacagagtcttctggctgccccacaacatggacttccggggccgcacctacccctgccccccccacttcaaccacctgggcagtgatgtggcccgggccctgctggagtttgcccagggccggcccctgggcccccacggcctggactggctgaagatccacctggtgaacctgaccggcctgaagaagcgggagcccctgaggaagaggctggcctttgctgaggaggtgatggatgacatcctggacagcgctgaccagcccctgaccggcaggaagtggtggatgggcgctgaggagccctggcagaccctggcctgctgcatggaggtggccaatgctgtgcgggccagtgaccctgctgcctacgtgagccacctgcctgtgcaccaggacggcagctgcaatggcctgcagcactacgccgccctgggccgggacagcgtgggcgccgcctctgtgaacctggagcccagtgatgtgccccaggatgtgtacagcggcgtggccgcccaggtggaggtgttccggcggcaggatgcccagaggggcatgagggtggcccaggtgctggagggcttcatcaccaggaaggtggtgaagcagacagtgatgacagtggtgtatggagtgaccaggtatggaggccgcctgcagatcgagaagaggctgcgggagctgagtgacttcccccaggagtttgtgtgggaggccagccactacctggtgcggcaggtgttcaagagcctgcaggagatgttttctggcacccgggccatccagcactggctgacagaaagtgcccggctcatcagccacatgggctctgtggtggagtgggtgacccccctgggcgtgcctgtgatccagccctaccgcctggacagcaaggtgaagcagattggaggcggcatccagagcatcacctacacccacaatggagacatcagcaggaagcccaacaccaggaagcagaagaatggcttcccccccaacttcatccacagcctggacagcagccacatgatgctgacagccctgcactgctacaggaagggcctgacctttgtgtctgtgcatgactgctactggacccatgctgctgatgtgtctgtgatgaaccaggtgtgccgggagcagtttgtgcggctgcacagcgagcccatcctgcaggacctgagccgcttcctggtgaagcgcttctgcagcgagccccagaagatcctggaggccagccagctgaaggagaccctgcaggccgtgcccaagccaggggcctttgacctggagcaggtgaagaggagcacctacttcttctcctag

SEQ ID NO: 19855 - DNA, 480 bp, synthetic construct
  misc_feature 1..480: note = Description of Artificial Sequence: Synthetic coding sequence
  source 1..480: mol_type = other DNA
atgaccctggaggaggtgcggggccaggacacagtgcctgagagcacagccaggatgcagggcgctgggaaggccctgcacgagctgctgctgagcgcccagaggcagggctgcctgacagctggggtgtatgagagcgccaaggtgctgaatgtggaccctgacaacgtgaccttctgtgtgctggccgccggggaggaggatgaaggagacatcgccctgcagatccacttcaccctcatccaggccttctgctgtgaaaatgacatcgacatcgtgcgggtgggagatgtgcagaggctggccgccatcgtgggcgctggggaggaggccggggcccctggggacctgcactgcatcctgatcagcaaccccaatgaagatgcctggaaggaccctgccctggagaagctgagcctcttctgtgaggagagccgctctgtgaatgactgggtgcccagcatcaccctgcctgagtag

SEQ ID NO: 19856 - DNA, 426 bp, synthetic construct
  misc_feature 1..426: note = Description of Artificial Sequence: Synthetic coding sequence
  source 1..426: mol_type = other DNA
atgcagggcgctgggaaggccctgcacgagctgctgctgagcgcccagaggcagggctgcctgacagctggggtgtatgagagcgccaaggtgctgaatgtggaccctgacaacgtgaccttctgtgtgctggccgccggggaggaggatgaaggagacatcgccctgcagatccacttcaccctcatccaggccttctgctgtgaaaatgacatcgacatcgtgcgggtgggagatgtgcagaggctggccgccatcgtgggcgctggggaggaggccggggcccctggggacctgcactgcatcctgatcagcaaccccaatgaagatgcctggaaggaccctgccctggagaagctgagcctcttctgtgaggagagccgctctgtgaatgactgggtgcccagcatcaccctgcctgagtag

SEQ ID NO: 19857 - DNA, 2085 bp, synthetic construct
  misc_feature 1..2085: note = Description of Artificial Sequence: Synthetic coding sequence
  source 1..2085: mol_type = other DNA
atgcagcctgccatccaggtgtggtttggagaggacctgcccctgagccccaggagccccctgacccccaggcatggccctggcctggccaacgtgtgccagtatgatgagtggattgctgtgagacatgaggccaccctgctgcccatgcaggaggacctgagcatctggctgagcggcctgctgggcatcaaggtgaaggccgagaagctgctggaggagctggacaatggagtgctgctgtgccagctgattgatgtgctgcagaacatggtgaagacctgcaacagcgaggagagcggcaacttccccatgaggaaggtgccctgcaagaaggatgctgccagcggcagcttctttgcccgggacaacacagccaacttcctgcactggtgccgggacattggagtggatgagacctacctgtttgaaagtgagggcctggtgctgcacaaggacccccggcaggtgtacctgtgcctgctggagatcggcagaattgtgagccgctatggagtggagccccctgtgctggtgaagctggagaaggagattgagctggaggagaccctgctgaacaccagcggccctgaggacagcatcagcatccccaagagctgctgcagacatgaggagctgcacgaggccgtgaagcacatcgccgaggaccccccctgcagctgcagccaccgcttcagcattgagtacctgtctgagggccgctaccgcctgggggacaagatcctcttcatccgcatgctgcacggcaagcacgtgatggtgcgggtgggcggcggctgggacaccctgcagggcttcctgctgaagtatgacccctgccgcatcctgcagtttgccaccctggagcagaagatcctggccttccagaagggcgtgtccaatgaatctgtgcctgacagccctgcccggaccccccagcccccagagatgaaccccctgtctgctgtgaacatgttccagaagcagaacagcaagcccagcgtgcctgtgtccatccccaagagcaaggagaagcagggccggcccccaggggccctggtgcctgccagcagcctgaagggcggcaacctgggctccatgtctgtgcgcagcaagctgcccaacagccctgctgccagcagccaccccaagctgaagagcagcaagggcatcaccaagaagccccaggcccccagcaacaatgccagcagcagcctggccagcctgaaccctgtgggcaagaacaccagcagccctgccctgcccaggacagccccctgcatcagcgagagccccaggaagtgcatcagcagccccaacacccccaaggccaaggtgatcccagcccagaacagcgctgacctgcctgagagcaccctgctgcccaacaagtgcagcggcaagacccagcccaagtacctgaagcacaaccacatcagcagccgggacaatgctgtgagccacctggccgcccacagcaacagcagcagcaagtgccccaagctgcccaaggccaacatccctgtgcggcccaagcccagcttccagagcagcgccaagatgaccaagaccagcagcaagaccatcgccaccggcctgggcacccagagccagcccagtgatggagccccccaggccaagcctgtgcctgcccagaagctgaagagcgccctgaacctgaaccagcctgtgtctgtgtcctctgtgtcccctgtgaaggccacccagaagagcaaggacaagaacatcgtgtctgccaccaagaagcagccccagaacaagagcgccttccagaagacaggccccagcagcctgaagagccctggccgcacccccctgagcatcgtgtccctgccccagagcagcaccaagacccagacagcccccaagagcgcccagacagtggccaagagccagcacagcaccaagggccccccaagaagtggcaagaccccagccagcatcaggaagccacccagctctgtgaaggatgctgacagcggggacaagaagcccacagccaagaagaaggaggatgatgaccactactttgtgatgacaggcagcaagaagcccaggaagtag

SEQ ID NO: 19858 - DNA, 2085 bp, synthetic construct; identical to SEQ ID NO: 19857
  misc_feature 1..2085: note = Description of Artificial Sequence: Synthetic coding sequence
  source 1..2085: mol_type = other DNA

SEQ ID NO: 19859 - DNA, 2085 bp, synthetic construct; identical to SEQ ID NO: 19857
  misc_feature 1..2085: note = Description of Artificial Sequence: Synthetic coding sequence
  source 1..2085: mol_type = other DNA

SEQ ID NO: 19860 - DNA, 150 bp, synthetic construct
  misc_feature 1..150: note = Description of Artificial Sequence: Synthetic coding sequence
  source 1..150: mol_type = other DNA
atgcagcctgccatccaggtgtggtttggagaggacctgcccctgagccccaggagccccctgacccccaggcatggccctggcctggccaacgtgtgccagtatgatgagtggattgctgtgagacatgaggccaccctgctgccctag

SEQ ID NO: 19861 - DNA, 1611 bp, synthetic construct
  misc_feature 1..1611: note = Description of Artificial Sequence: Synthetic coding sequence
  source 1..1611: mol_type = other DNA
atgaatgccagcctggagagcctgtacagcgcctgcagcatgcagagcgacacagtgcccctgctgcagaatggccagcacgcccggagccagccccgggccagcggccccccaagaagcatccagccccaggtgagcccccggcagagggtgcagaggagccagcctgtgcacatcctggccgtgcggcggctgcaggaggaggaccagcagttccgcaccagcagcctgcctgccatccccaaccccttccctgagctgtgtggccctggcagcccccctgtgctgaccccaggcagcctgccccccagccaggccgccgccaagcaggatgtgaaggtgttttctgaagatggcaccagcaaggtggtggagatcctggccgacatgacagcccgggacctgtgccagctgctggtgtacaagagccactgtgtggatgacaacagctggaccctggtggagcaccacccccacctgggcctggagcgctgcctggaggaccacgagctggtggtgcaggtggagagcaccatggccagcgagagcaagttcctgttcaggaagaactatgccaagtatgagttcttcaagaaccccatgaacttcttccctgagcagatggtgacctggtgccagcagagcaatggcagccagacccagctgctgcagaacttcctgaacagcagcagctgcccagagatccagggcttcctgcacgtgaaggagctgggcaagaagtcctggaagaagctgtatgtgtgcctgcggcgcagcggcctgtactgcagcaccaagggcaccagcaaggagcccaggcacctgcagctgctggccgacctggaggacagcaacatcttcagcctgattgctggcaggaagcagtacaatgcccccacagaccacggcctgtgcatcaagcccaacaaggtgagaaatgagaccaaggagctgcggctgctgtgtgccgaggatgagcagaccaggacctgctggatgacagccttccggctgctgaagtatggcatgctgctgtaccagaactaccgcatcccccagcagaggaaggccctgctgagccccttcagcacccctgtgcgctctgtgtctgagaacagcctggtggccatggacttcagcggccagacaggccgggtgattgagaacccagctgaggcccagagcgctgccctggaggagggccacgcctggaggaagaggagcaccaggatgaacatcctgggcagccagagccccctgcaccccagcaccctgagcaccgtcatccacaggacccagcactggttccacggccgcatcagccgggaggagagccaccgcatcatcaagcagcagggcctggtggatggcctcttcctgctgcgggacagccagagcaaccccaaggcctttgtgctgaccctgtgccaccaccagaagatcaagaacttccagatcctgccctgtgaagatgatggccagaccttcttcagcctggatgatggcaacaccaagttcagtgacctgatccagctggtggacttctaccagctgaacaagggcgtgctgccctgcaagctgaagcaccactgcatccgggtggccctgtag

SEQ ID NO: 19862 - DNA, 1647 bp, synthetic construct
  misc_feature 1..1647: note = Description of Artificial Sequence: Synthetic coding sequence
  source 1..1647: mol_type = other DNA
atggccctggccggctgcccagacagcttcctgcaccacccctactaccaggacaaggtggagcagacccccaggagccagcaggaccctgctggccctggcctgcctgcccagagcgaccggctggccaaccaccaggaggatgatgtggacctggaggccctggtgaatgacatgaatgccagcctggagagcctgtacagcgcctgcagcatgcagagcgacacagtgcccctgctgcagaatggccagcacgcccggagccagccccgggccagcggccccccaagaagcatccagccccaggtgagcccccggcagagggtgcagaggagccagcctgtgcacatcctggccgtgcggcggctgcaggaggaggaccagcagttccgcaccagcagcctgcctgccatccccaaccccttccctgagctgtgtggccctggcagcccccctgtgctgaccccaggcagcctgccccccagccaggccgccgccaagcaggatgtgaaggtgttttctgaagatggcaccagcaaggtggtggagatcctggccgacatgacagcccgggacctgtgccagctgctggtgtacaagagccactgtgtggatgacaacagctggaccctggtggagcaccacccccacctgggcctggagcgctgcctggaggaccacgagctggtggtgcaggtggagagcaccatggccagcgagagcaagttcctgttcaggaagaactatgccaagtatgagttcttcaagaaccccatgaacttcttccctgagcagatggtgacctggtgccagcagagcaatggcagccagacccagctgctgcaggagcccaggcacctgcagctgctggccgacctggaggacagcaacatcttcagcctgattgctggcaggaagcagtacaatgcccccacagaccacggcctgtgcatcaagcccaacaaggtgagaaatgagaccaaggagctgcggctgctgtgtgccgaggatgagcagaccaggacctgctggatgacagccttccggctgctgaagtatggcatgctgctgtaccagaactaccgcatcccccagcagaggaaggccctgctgagccccttcagcacccctgtgcgctctgtgtctgagaacagcctggtggccatggacttcagcggccagacaggccgggtgattgagaacccagctgaggcccagagcgctgccctggaggagggccacgcctggaggaagaggagcaccaggatgaacatcctgggcagccagagccccctgcaccccagcaccctgagcaccgtcatccacaggacccagcactggttccacggccgcatcagccgggaggagagccaccgcatcatcaagcagcagggcctggtggatggcctcttcctgctgcgggacagccagagcaaccccaaggcctttgtgctgaccctgtgccaccaccagaagatcaagaacttccagatcctgccctgtgaagatgatggccagaccttcttcagcctggatgatggcaacaccaagttcagtgacctgatccagctggtggacttctaccagctgaacaagggcgtgctgccctgcaagctgaagcaccactgcatccgggtggccctgtag

SEQ ID NO: 19863 - DNA, 381 bp, synthetic construct
  misc_feature 1..381: note = Description of Artificial Sequence: Synthetic coding sequence
  source 1..381: mol_type = other DNA
atgaacatcctgggcagccagagccccctgcaccccagcaccctgagcaccgtcatccacaggacccagcactggttccacggccgcatcagccgggaggagagccaccgcatcatcaagcagcagggcctggtggatggcctcttcctgctgcgggacagccagagcaaccccaaggcctttgtgctgaccctgtgccaccaccagaagatcaagaacttccagatcctgccctgtgaagatgatggccagaccttcttcagcctggatgatggcaacaccaagttcagtgacctgatccagctggtggacttctaccagctgaacaagggcgtgctgccctgcaagctgaagcaccactgcatccgggtggccctgtag

SEQ ID NO: 19864 - DNA, 1611 bp, synthetic construct; identical to SEQ ID NO: 19861
  misc_feature 1..1611: note = Description of Artificial Sequence: Synthetic coding sequence
  source 1..1611: mol_type = other DNA

SEQ ID NO: 19865 - DNA, 1785 bp, synthetic construct
  misc_feature 1..1785: note = Description of Artificial Sequence: Synthetic coding sequence
  source 1..1785: mol_type = other DNA
atggccctggccggctgcccagacagcttcctgcaccacccctactaccaggacaaggtggagcagacccccaggagccagcaggaccctgctggccctggcctgcctgcccagagcgaccggctggccaaccaccaggaggatgatgtggacctggaggccctggtgaatgacatgaatgccagcctggagagcctgtacagcgcctgcagcatgcagagcgacacagtgcccctgctgcagaatggccagcacgcccggagccagccccgggccagcggccccccaagaagcatccagccccaggtgagcccccggcagagggtgcagaggagccagcctgtgcacatcctggccgtgcggcggctgcaggaggaggaccagcagttccgcaccagcagcctgcctgccatccccaaccccttccctgagctgtgtggccctggcagcccccctgtgctgaccccaggcagcctgccccccagccaggccgccgccaagcaggatgtgaaggtgttttctgaagatggcaccagcaaggtggtggagatcctggccgacatgacagcccgggacctgtgccagctgctggtgtacaagagccactgtgtggatgacaacagctggaccctggtggagcaccacccccacctgggcctggagcgctgcctggaggaccacgagctggtggtgcaggtggagagcaccatggccagcgagagcaagttcctgttcaggaagaactatgccaagtatgagttcttcaagaaccccatgaacttcttccctgagcagatggtgacctggtgccagcagagcaatggcagccagacccagctgctgcagaacttcctgaacagcagcagctgcccagagatccagggcttcctgcacgtgaaggagctgggcaagaagtcctggaagaagctgtatgtgtgcctgcggcgcagcggcctgtactgcagcaccaagggcaccagcaaggagcccaggcacctgcagctgctggccgacctggaggacagcaacatcttcagcctgattgctggcaggaagcagtacaatgcccccacagaccacggcctgtgcatcaagcccaacaaggtgagaaatgagaccaaggagctgcggctgctgtgtgccgaggatgagcagaccaggacctgctggatgacagccttccggctgctgaagtatggcatgctgctgtaccagaactaccgcatcccccagcagaggaaggccctgctgagccccttcagcacccctgtgcgctctgtgtctgagaacagcctggtggccatggacttcagcggccagacaggccgggtgattgagaacccagctgaggcccagagcgctgccctggaggagggccacgcctggaggaagaggagcaccaggatgaacatcctgggcagccagagccccctgcaccccagcaccctgagcaccgtcatccacaggacccagcactggttccacggccgcatcagccgggaggagagccaccgcatcatcaagcagcagggcctggtggatggcctcttcctgctgcgggacagccagagcaaccccaaggcctttgtgctgaccctgtgccaccaccagaagatcaagaacttccagatcctgccctgtgaagatgatggccagaccttcttcagcctggatgatggcaacaccaagttcagtgacctgatccagctggtggacttctaccagctgaacaagggcgtgctgccctgcaagctgaagcaccactgcatccgggtggccctgtag

SEQ ID NO: 19866 - DNA, 1785 bp, synthetic construct; identical to SEQ ID NO: 19865
  misc_feature 1..1785: note = Description of Artificial Sequence: Synthetic coding sequence
  source 1..1785: mol_type = other DNA

SEQ ID NO: 19867 - DNA, 1611 bp, synthetic construct; identical to SEQ ID NO: 19861
  misc_feature 1..1611: note = Description of Artificial Sequence: Synthetic coding sequence
  source 1..1611: mol_type = other DNA

SEQ ID NO: 19868 - DNA, 1611 bp, synthetic construct; identical to SEQ ID NO: 19861
  misc_feature 1..1611: note = Description of Artificial Sequence: Synthetic coding sequence
  source 1..1611: mol_type = other DNA

SEQ ID NO: 19869 - DNA, 1767 bp, synthetic construct
  misc_feature 1..1767: note = Description of Artificial Sequence: Synthetic coding sequence
  source 1..1767: mol_type = other DNA
atgcaggccgccggccccctcttccgcagcaaggacaaggtggagcagacccccaggagccagcaggaccctgctggccctggcctgcctgcccagagcgaccggctggccaaccaccaggaggatgatgtggacctggaggccctggtgaatgacatgaatgccagcctggagagcctgtacagcgcctgcagcatgcagagcgacacagtgcccctgctgcagaatggccagcacgcccggagccagccccgggccagcggccccccaagaagcatccagccccaggtgagcccccggcagagggtgcagaggagccagcctgtgcacatcctggccgtgcggcggctgcaggaggaggaccagcagttccgcaccagcagcctgcctgccatccccaaccccttccctgagctgtgtggccctggcagcccccctgtgctgaccccaggcagcctgccccccagccaggccgccgccaagcaggatgtgaaggtgttttctgaagatggcaccagcaaggtggtggagatcctggccgacatgacagcccgggacctgtgccagctgctggtgtacaagagccactgtgtggatgacaacagctggaccctggtggagcaccacccccacctgggcctggagcgctgcctggaggaccacgagctggtggtgcaggtggagagcaccatggccagcgagagcaagttcctgttcaggaagaactatgccaagtatgagttcttcaagaaccccatgaacttcttccctgagcagatggtgacctggtgccagcagagcaatggcagccagacccagctgctgcagaacttcctgaacagcagcagctgcccagagatccagggcttcctgcacgtgaaggagctgggcaagaagtcctggaagaagctgtatgtgtgcctgcggcgcagcggcctgtactgcagcaccaagggcaccagcaaggagcccaggcacctgcagctgctggccgacctggaggacagcaacatcttcagcctgattgctggcaggaagcagtacaatgcccccacagaccacggcctgtgcatcaagcccaacaaggtgagaaatgagaccaaggagctgcggctgctgtgtgccgaggatgagcagaccaggacctgctggatgacagccttccggctgctgaagtatggcatgctgctgtaccagaactaccgcatcccccagcagaggaaggccctgctgagccccttcagcacccctgtgcgctctgtgtctgagaacagcctggtggccatggacttcagcggccagacaggccgggtgattgagaacccagctgaggcccagagcgctgccctggaggagggccacgcctggaggaagaggagcaccaggatgaacatcctgggcagccagagccccctgcaccccagcaccctgagcaccgtcatccacaggacccagcactggttccacggccgcatcagccgggaggagagccaccgcatcatcaagcagcagggcctggtggatggcctcttcctgctgcgggacagccagagcaaccccaaggcctttgtgctgaccctgtgccaccaccagaagatcaagaacttccagatcctgccctgtgaagatgatggccagaccttcttcagcctggatgatggcaacaccaagttcagtgacctgatccagctggtggacttctaccagctgaacaagggcgtgctgccctgcaagctgaagcaccactgcatccgggtggccctgtag

SEQ ID NO: 19870 - DNA, 1611 bp, synthetic construct; identical to SEQ ID NO: 19861
  misc_feature 1..1611: note = Description of Artificial Sequence: Synthetic coding sequence
  source 1..1611: mol_type = other DNA

SEQ ID NO: 19871 - DNA, 1611 bp, synthetic construct; identical to SEQ ID NO: 19861
  misc_feature 1..1611: note = Description of Artificial Sequence: Synthetic coding sequence
  source 1..1611: mol_type = other DNA

SEQ ID NO: 19872 - DNA, 345 bp, synthetic construct
  misc_feature 1..345: note = Description of Artificial Sequence: Synthetic coding sequence
  source 1..345: mol_type = other DNA
atgcaggccgccggccccctcttccgcagcaaggacaaggtggagcagacccccaggagccagcaggaccctgctggccctggcctgcctgcccagagcgaccggctggccaaccaccaggaggatgatgtggacctggaggccctggtgaatgacatgaatgccagcctggagagcctgtacagcgcctgcagcatgcagagcgacacagtgcccctgctgcagaatggccagcacgcccggagccagccccgggccagcggccccccaagaagcatccagccccaggtgagcccccggcagagggtgcagaggagccagcctgtgcacatcctggccgtgtag

SEQ ID NO: 19873 - DNA, 1767 bp, synthetic construct; identical to SEQ ID NO: 19869
  misc_feature 1..1767: note = Description of Artificial Sequence: Synthetic coding sequence
  source 1..1767: mol_type = other DNA

SEQ ID NO: 19874 - DNA, 531 bp, synthetic construct
  misc_feature 1..531: note = Description of Artificial Sequence: Synthetic coding sequence
  source 1..531: mol_type = other DNA
atggaggccatcgccaagtatgacttcaaggccacagcagatgatgagctgtccttcaagagaggagacatcctgaaggtgctgaatgaagaatgtgaccagaactggtacaaggccgagctgaatggcaaggatggcttcatccccaagaactacatcgagatgaagccccacccctttggaaatgatgtgcagcacttcaaggtgctgagagatggagctgggaagtacttcctgtgggtggtgaagttcaacagcctgaatgagctggtggactaccacaggagcacctctgtgtccaggaaccagcagatcttcctgcgggacatcgagcaggtgccccagcagcccacctacgtgcaggccctgtttgattttgacccccaggaggatggagagctgggcttcagaagaggagacttcatccacgtgatggacaacagcgaccccaactggtggaagggggcctgccacggccagacaggcatgttccccaggaactacgtgacccctgtgaacagaaatgtgtag

SEQ ID NO: 19875 - DNA, 654 bp, synthetic construct
  misc_feature 1..654: note = Description of Artificial Sequence: Synthetic coding sequence
  source 1..654: mol_type = other DNA
atggaggccatcgccaagtatgacttcaaggccacagcagatgatgagctgtccttcaagagaggagacatcctgaaggtgctgaatgaagaatgtgaccagaactggtacaaggccgagctgaatggcaaggatggcttcatccccaagaactacatcgagatgaagccccacccctggttcttcggcaagatcccccgggccaaggccgaggagatgctgagcaagcagagacatgatggagccttcctgatccgggagagcgagagcgcccctggggacttcagcctgtctgtgaagtttggaaatgatgtgcagcacttcaaggtgctgagagatggagctgggaagtacttcctgtgggtggtgaagttcaacagcctgaatgagctggtggactaccacaggagcacctctgtgtccaggaaccagcagatcttcctgcgggacatcgagcaggtgccccagcagcccacctacgtgcaggccctgtttgattttgacccccaggaggatggagagctgggcttccggcggggggacttcatccacgtgatggacaacagcgaccccaactggtggaagggggcctgccacggccagacaggcatgttccccagaaattatgtgacccctgtgaacagaaatgtgtag

SEQ ID NO: 19876 - DNA, 654 bp, synthetic construct; identical to SEQ ID NO: 19875
  misc_feature 1..654: note = Description of Artificial Sequence: Synthetic coding sequence
  source 1..654: mol_type = other DNA

SEQ ID NO: 19877 - DNA, 654 bp, synthetic construct; identical to SEQ ID NO: 19875
  misc_feature 1..654: note = Description of Artificial Sequence: Synthetic coding sequence
  source 1..654: mol_type = other DNA

SEQ ID NO: 19878 - DNA, 222 bp, synthetic construct
  misc_feature 1..222: note = Description of Artificial Sequence: Synthetic coding sequence
  source 1..222: mol_type = other DNA
atgcctgccctgcacatcgaggacctgcctgagaaggagaagctgaagatggaggtggagcagctgaggaaggaggtgaagctgcagaggcagcaggtgtccaaatgttctgaggagatcaagaactacatcgaggagaggtctggagaggaccccctggtgaagggcatccctgaggacaagaaccccttcaaggagaagggcagctgtgtgatctcctag

SEQ ID NO: 19879 - DNA, 432 bp, synthetic construct
  misc_feature 1..432: note = Description of Artificial Sequence: Synthetic coding sequence
  source 1..432: mol_type = other DNA
atgagcggccggggcaagacaggaggcaaggcccgggccaaggccaagagccgcagcagccgggccggcctgcagtttcctgtgggccgggtgcaccggctgctgaggaagggccactatgcagagcgggtgggcgctggggcccctgtgtacctggccgctgtgctggagtacctgacagctgagatcctggagctggccggaaatgctgcccgggacaacaagaagacccgcatcatccccaggcacctgcagctggccatcagaaatgatgaggagctgaacaagctgctgggcggcgtgaccatcgcccagggcggcgtgctgcccaacatccaggccgtgctgctgcccaagaagaccagcgccaccgtgggccccaaggcccccagcggcggcaagaaggccacccaggccagccaggagtactag

SEQ ID NO: 19880 - DNA, 432 bp, synthetic construct; identical to SEQ ID NO: 19879
  misc_feature 1..432: note = Description of Artificial Sequence: Synthetic coding sequence
  source 1..432: mol_type = other DNA

SEQ ID NO: 19881 - DNA, 276 bp, synthetic construct
  misc_feature 1..276: note = Description of Artificial Sequence: Synthetic coding sequence
  source 1..276: mol_type = other DNA
atgtgcccctgccccctgcaccggggccggggccccccagctgtgtgtgcctgcagcgctggccgcctgggcctgcggagcagcgctgcccagctgacagctgcccggctgaaggccctgggagatgagctgcaccagaggaccatgtggaggcggcgggcccggagcagaagagccccagcccctggggccctgcccacctactggccctggctgtgtgccgccgcccaggtggccgccctggccgcctggctgctgggcagaagaaacctgtag

SEQ ID NO: 19882 - DNA, 618 bp, synthetic construct
  misc_feature 1..618: note = Description of Artificial Sequence: Synthetic coding sequence
  source 1..618: mol_type = other DNA
atgacagagcggcgggtgcccttcagcctgctgcggggccccagctgggaccccttccgggactggtacccccacagccggctgtttgaccaggccttcggcctgccccggctgcctgaggagtggagccagtggctgggcggcagctcctggccaggctacgtgcggcccctgcccccagctgccatcgagagccctgctgtggccgccccagcctacagccgggccctgagccggcagctgagcagtggagtgtctgagatccgccacacagctgaccgctggagggtgtccctggatgtgaaccactttgccccagatgagctgactgtgaagaccaaggatggagtggtggagatcaccgggaagcatgaggagcggcaggatgaacatggctacatcagccgctgcttcaccaggaagtacaccctgcccccaggagtggaccccacccaggtgagcagcagcctgagccctgagggcaccctgactgtggaggcccccatgcccaagctggccacccagagcaatgagatcaccatccctgtgacctttgagagccgggcccagctgggcggccctgaggccgccaagagtgatgaaacagctgccaagtag

SEQ ID NO: 19883 - DNA, 513 bp, synthetic construct
  misc_feature 1..513: note = Description of Artificial Sequence: Synthetic coding sequence
  source 1..513: mol_type = other DNA
atgacagagcggcgggtgcccttcagcctgctgcggggccccagctggccaggctacgtgcggcccctgcccccagctgccatcgagagccctgctgtggccgccccagcctacagccgggccctgagccggcagctgagcagcggcgtgtctgagatccgccacacagctgaccgctggagggtgtccctggatgtgaaccactttgccccagatgagctgactgtgaagaccaaggatggagtggtggagatcaccgggaagcatgaggagcggcaggatgagcacggctacatcagccgctgcttcaccaggaagtacaccctgcccccaggagtggaccccacccaggtgagcagcagcctgagccctgagggcaccctgactgtggaggcccccatgcccaagctggccacccagagcaatgagatcaccatccctgtgacctttgagagccgggcccagctgggcggccctgaggccgccaagagtgatgaaacagctgccaagtag

SEQ ID NO: 19884 - DNA, 1926 bp, synthetic construct
  misc_feature 1..1926: note = Description of Artificial Sequence: Synthetic coding sequence
  source 1..1926: mol_type = other DNA
atggccacagccaagggcatcgccatcggcatcgacctgggcaccacctacagctgtgtgggcgtcttccagcacggcaaggtggagatcatcgccaatgaccagggcaacagaaccacccccagctatgtggccttcacagacacagagcggctgattggagatgctgccaagaaccaggtggccatgaacccccagaacacagtgtttgatgccaagaggctcatcggcaggaagttcaatgaccctgtggtgcaggccgacatgaagctgtggcccttccaggtgatcaatgaaggaggcaagcccaaggtgctggtgtcctacaagggggagaacaaggccttctacccagaggagatcagctccatggtgctgaccaagctgaaggagacagctgaggccttcctgggccaccctgtgaccaatgctgtgatcaccgtgcctgcctacttcaatgacagccagaggcaggccaccaaggatgctggggtgattgctggcctgaatgtgctgcgcatcatcaatgagcccacagctgctgccatcgcctacggcctggacaagggcggccagggcgagcggcacgtgctgatctttgacctgggcggcggcacctttgatgtgtccatcctgaccattgatgatggcatctttgaggtgaaggccacagctggggacacccacctgggcggagaagattttgacaaccggctggtgagccactttgtggaggagttcaagaggaagcacaagaaggacatcagccagaacaagagagctgtgcggcggctgaggacagcctgtgagcgggccaagaggaccctgagcagcagcacccaggccaacctggagattgacagcctgtatgagggcatcgacttctacaccagcatcacccgggccaggtttgaggagctgtgtgccgacctcttccggggcaccctggagcctgtggagaaggccctgagagatgccaagatggacaaggccaagatccatgacatcgtgctggtgggcggcagcacccgcatccccaaggtgcagaggctgctgcaggactacttcaacggccgggacctgaacaagagcatcaacccagatgaggccgtggcctatggagctgctgtgcaggccgccatcctgatgggagacaagtctgagaaggtgcaggacctgctgctgctggatgtggcccccctgagcctgggcctggagacagctgggggcgtgatgacagccctgatcaagaggaacagcaccatccccaccaagcagacccagatcttcaccacctacagcgacaaccagcccggggtgctgatccaggtgtatgaaggagagcgggccatgaccaaggacaacaacctgctgggccgctttgacctgaccggcatccccccagccccccggggcgtgccccagatcgaggtgacctttgatattgatgccaacggcatcctgaatgtgacagccatggacaagagcacaggcaaggtgaacaagatcaccatcaccaatgacaagggccgcctgagcaaggaggagattgaaagaatggtgctggatgctgagaagtacaaggccgaggatgaggtgcagcgggagaagattgctgccaagaatgccctggagagctatgccttcaacatgaagtctgtggtgtctgatgagggcctgaagggcaagatcagcgagagtgacaagaacaagatcctggacaagtgcaatgagctgctgtcctggctggaggtgaaccagctggccgagaaggatgaatttgaccacaagaggaaggagctgaagcagatgtgcaaccccatcatcaccaagctgtaccagggcggctgcaccggccctgcctgtggcaccggctacgtgcccggccgcccagccaccggccccaccatcgaggaggtggactag

SEQ ID NO: 19885 - DNA, 1599 bp, synthetic construct
  misc_feature 1..1599: note = Description of Artificial Sequence: Synthetic coding sequence
  source 1..1599: mol_type = other DNA
atggccacagccaagggcatcgccatcggcatcgacctgggcaccacctacagctgtgtgggcgtcttccagcacggcaaggtggagatcatcgccaatgaccagggcaacagaaccacccccagctatgtggccttcacagacacagagcggctgattggagatgctgccaagaaccaggtggccatgaacccccagaacacagtgtttgatgccaagaggctcatcggcaggaagttcaatgaccctgtggtgcaggccgacatgaagctgtggcccttccaggtgatcaatgaaggaggcaagcccaaggtgctggtgtcctacaagggggagaacaaggccttctacccagaggagatcagctccatggtgctgaccaagctgaaggagacagctgaggccttcctgggccaccctgtgaccaatgctgtgatcaccgtgcctgcctacttcaatgacagccagaggcaggccaccaaggatgctggggtgattgctggcctgaatgtgctgcgcatcatcaatgagcccacagctgctgccatcgcctacggcctggacaagggcggccagggcgagcggcacgtgctgatctttgacctgggcggcggcacctttgatgtgtccatcctgaccattgatgatggcatctttgaggtgaaggccacagctggggacacccacctgggcggagaagattttgacaaccggctggtgagccactttgtggaggagttcaagaggaagcacaagaaggacatcagccagaacaagagagctgtgcggcggctgaggacagcctgtgagcgggccaagaggaccctgagcagcagcacccaggccaacctggagattgacagcctgtatgagggcatcgacttctacaccagcatcacccgggccaggtttgaggagctgtgtgccgacctcttccggggcaccctggagcctgtggagaaggccctgagagatgccaagatggacaaggccaagatccatgacatcgtgctggtgggcggcagcacccgcatccccaaggtgcagaggctgctgcaggactacttcaacggccgggacctgaacaagagcatcaacccagatgaggccgtggcctatggagctgctgtgcaggccgccatcctgatgggagacaagtctgagaaggtgcaggacctgctgctgctggatgtggcccccctgagcctgggcctggagacagctgggggcgtgatgacagccctgatcaagaggaacagcaccatccccaccaagcagacccagatcttcaccacctacagcgacaaccagcccggggtgctgatccaggtgtatgaaggagagcgggccatgaccaaggacaacaacctgctgggccgctttgacctgaccggcatccccccagccccccggggcgtgccccagatcgaggtgacctttgatattgatgccaacggcatcctgaatgtgacagccatggacaagagcacaggcaaggtgaacaagatcaccatcaccaatgacaagggccgcctgagcaaggaggagattgaaagaatggtgctggatgctgagaagtacaaggccgaggatgtgtag

SEQ ID NO: 19886 - DNA, 1926 bp, synthetic construct; identical to SEQ ID NO: 19884
  misc_feature 1..1926: note = Description of Artificial Sequence: Synthetic coding sequence
  source 1..1926: mol_type = other DNA

SEQ ID NO: 19887 - DNA, 699 bp, synthetic construct
  misc_feature 1..699: note = Description of Artificial Sequence: Synthetic coding sequence
  source 1..699: mol_type = other DNA
gccaagggcatcgccatcggcatcgacctgggcaccacctacagctgtgtgggcgtcttccagcacggcaaggtggagatcatcgccaatgaccagggcaacagaaccacccccagctatgtggccttcacagacacagagcggctgattggagatgctggggtgattgctggcctgaatgtgctgcgcatcatcaatgagcccacagctgctgccatcgcctacggcctggacaagggcggccagggcgagcggcacgtgctgatctttgacctgggcggcggcacctttgatgtgtccatcctgaccattgatgatggcatctttgaggtgaaggccacagctggggacacccacctgggcggagaagattttgacaaccggctggtgagccactttgtggaggagttcaagaggaagcacaagaaggacatcagccagaacaagagagctgtgcggcggctgaggacagcctgtgagcgggccaagaggaccctgagcagcagcacccaggccaacctggagattgacagcctgtatgagggcatcgacttctacaccagcatcacccgggccaggtttgaggagctgtgtgccgacctcttccggggcaccctggagcctgtggagaagggggcccccccagccagcccccgctgcagcggctgcttccgcaccacctccatggatgtgatctag

SEQ ID NO: 19888 - DNA, 1074 bp, synthetic construct
  misc_feature 1..1074: note = Description of Artificial Sequence: Synthetic coding sequence
  source 1..1074: mol_type = other DNA
atgaaggagaacaaggagaacagcagccccagcgtgaccagcgccaacctggaccacaccaagccctgctggtactgggacaagaaggacctggcccacacccccagccagctggagggcctggaccctgccacagaggcccgctaccgccgggagggcgcccgcttcatctttgatgtgggcacccggctgggcctgcactatgacaccctggccaccggcatcatctacttccaccgcttctacatgttccacagcttcaagcagttccccaggtatgtgactggagcctgctgcctcttcctggccggcaaggtggaggagacccccaagaagtgcaaggacatcatcaagacagcccggagcctgctgaatgatgtgcagtttggccagtttggagatgaccccaaggaggaggtgatggtgctggagcgcatcctgctgcagaccatcaagtttgacctgcaggtggagcacccctaccagttcctgctgaagtatgccaagcagctgaagggggacaagaacaagatccagaagctggtgcagatggcctggacctttgtgaatgacaggaccagcctgtgcaccaccctgagcctgcagtgggagcctgagatcatcgctgtggccgtgatgtacctggccggccgcctgtgcaagtttgagatccaggagtggaccagcaagcccatgtaccgccgctggtgggagcagtttgtgcaggatgtgcctgtggatgtgctggaggacatctgccaccagatcctggacctgtacagccagggcaagcagcagatgccccaccacaccccccaccagctgcagcagccccccagcctgcagcccaccccccaggtgccccaggtgcagcagagccagcccagccagagcagcgagcccagccagccccagcagaaggaccccccactcatcctgctgcagggctgggcctgccggcagcctgccacccacctgctgcccagccccctggaggacagcctgctgtgcccccggcccttcccccacccagcctgcctgcagctgggcggctggggcggccagcccggctag

SEQ ID NO: 19889 - DNA, 2565 bp, synthetic construct
  misc_feature 1..2565: note = Description of Artificial Sequence: Synthetic coding sequence
  source 1..2565: mol_type = other DNA
atgccaccctgcagcggaggagatggcagcaccccacctggccccagcctgcgggaccgggactgcccagcccagagcgctgagtacccccgggaccggctggacccccggcccggcagccccagcgaggccagcagcccccccttcctgcggagccgggcccctgtgaactggtaccaggagaaggcccaggtgttcctgtggcacctgatggtgtctggcagcaccaccctgctgtgcctgtggaagcagcccttccacgtgtctgccttccctgtgacagccagcctggccttccggcagagccagggcgccggccagcacctgtacaaggacctgcagcccttcatcctgctgcggctgctgatgcctgaggagacccagacccaggaccagcccatggaggaggaggaggtggagacctttgccttccaggccgagatcgcccagctgatgagcctcatcatcaacaccttctacagcaacaaggagatcttcctgcgggagctgatcagcaacagcagtgatgccctggacaagatccgctatgagagcctgacagaccccagcaagctggacagcggcaaggagctgcacatcaacctgatccccaacaagcaggacaggaccctgaccatcgtggacaccggcatcggcatgaccaaggctgacctgatcaacaacctgggcaccatcgccaagagcggcaccaaggccttcatggaggccctgcaggccggggctgacatctccatgattggccagtttggagtgggcttctacagcgcctacctggtggccgagaaggtgaccgtcatcaccaagcacaatgatgatgagcagtatgcctgggagagcagcgctgggggcagcttcaccgtgaggacagacaccggggagcccatgggccggggcaccaaggtgatcctgcacctgaaggaggaccagacagagtacctggaggagcggcgcatcaaggagatcgtgaagaagcacagccagttcatcggctaccccatcaccctgtttgtggagaaggagcgggacaaggaggtgtctgatgatgaagctgaggagaaggaggacaaggaggaggagaaggagaaggaggagaaggagagcgaggacaagccagaaattgaagatgtgggcagtgatgaggaggaggagaagaaggatggagacaagaagaagaagaagaagatcaaggagaagtacatcgaccaggaggagctgaacaagaccaagcccatctggaccagaaatccagatgacatcaccaatgaggagtatggagagttctacaagagcctgaccaatgactgggaggaccacctggccgtgaagcacttctctgtggagggccagctggagttccgggccctgctgtttgtgccccggcgggccccctttgacctgtttgaaaataggaagaagaagaacaacatcaagctgtatgtgcggcgggtcttcatcatggacaactgtgaggagctgatccctgagtacctgaacttcatccggggcgtggtggacagcgaggacctgcccctgaacatcagccgggagatgctgcagcagagcaagatcctgaaggtgatcaggaagaacctggtgaagaagtgcctggagctgttcacagagctggccgaggacaaggagaactacaagaagttctatgagcagttcagcaagaacatcaagctgggcatccacgaggacagccagaacaggaagaagctgtctgagctgctgcgctactacaccagcgccagcggagatgagatggtgtccctgaaggactactgcaccaggatgaaggagaaccagaagcacatctactacatcactggagagaccaaggaccaggtggccaacagcgcctttgtggagcggctgaggaagcacggcctggaggtgatctacatgattgagcccattgatgagtactgtgtgcagcagctgaaggagtttgagggcaagaccctggtgtctgtgaccaaggagggcctggagctgcctgaagatgaggaggagaagaagaagcaggaggagaagaagaccaagtttgagaacctgtgcaagatcatgaaggacatcctggagaagaaggtggagaaggtggtggtgagcaaccggctggtgaccagcccctgctgcatcgtgaccagcacctacggctggacagccaacatggagcgcatcatgaaggcccaggccctgcgggacaacagcaccatgggctacatggccgccaagaagcacctggagatcaacccagaccacagcatcatcgagaccctgcggcagaaggccgaggccgacaagaatgacaagtctgtgaaggacctggtgatcctgctgtatgaaacagccctgctgagcagcggcttcagcctggaggacccccagacccacgccaaccgcatctacaggatgatcaagctgggcctgggcattgatgaagatgaccccacagcagatgacaccagcgctgctgtgacagaggagatgccacccctggagggagatgatgacaccagcaggatggaggaggtggactag

SEQ ID NO: 19890 - DNA, 1242 bp, synthetic construct
  misc_feature 1..1242: note = Description of Artificial Sequence: Synthetic coding sequence
  source 1..1242: mol_type = other DNA
atgggccggggcaccaaggtgatcctgcacctgaaggaggaccagacagagtacctggaggagcggcgcatcaaggagatcgtgaagaagcacagccagttcatcggctaccccatcaccctgtttgtggagaaggagcgggacaaggaggtgtctgatgatgaggccgaggagaaggaggacaaggaggaggagaaggagaaggaggagaaggagagcgaggacaagccagaaattgaagatgtgggcagtgatgaggaggaggagaagaaggatggagacaagaagaagaagaagaagatcaaggagaagtacatcgaccaggaggagctgaacaagaccaagcccatctggaccaggaacccagatgacatcaccaatgaggagtatggagagttctacaagagcctgaccaatgactgggaggaccacctggccgtgaagcacttctctgtggagggccagctggagttccgggccctgctgtttgtgccccggcgggccccctttgacctgtttgagaacaggaagaagaagaacaacatcaagctgtatgtgagaagagtcttcatcatggacaactgtgaggagctgatccctgagtacctgaacttcatccggggcgtggtggacagcgaggacctgcccctgaacatcagccgggagatgctgcagcagagcaagatcctgaaggtgatcaggaagaacctggtgaagaagtgcctggagctgttcacagagctggccgaggacaaggagaactacaagaagttctatgagcagttcagcaagaacatcaagctgggcatccacgaggacagccagaacaggaagaagctgtctgagctgctgcgctactacaccagcgccagcggagatgagatggtgtccctgaaggactactgcaccaggatgaaggagaaccagaagcacatctactacatcaccggggagaccaaggaccaggtggccaacagcgcctttgtggagcggctgaggaagcacggcctggaggtgatctacatgattgagcccattgatgagtactgtgtgcagcagctgaaggagtttgagggcaagaccctggtgtctgtgaccaaggagggcctggagctgcctgaagatgaggaggagaagaagaagcaggaggagaagaagaccaagtttgagaacctgtgcaagatcatgaaggacatcctggagaagaaggtggagaaggtgtgtgagtacagcatctcctag

SEQ ID NO: 19891 - DNA, 2412 bp, synthetic construct
  misc_feature 1..2412: note = Description of Artificial Sequence: Synthetic coding sequence
  source 1..2412: mol_type = other DNA
atgagggccctgtgggtgctgggcctgtgctgcgtgctgctgaccttcggctctgtgcgggcagatgatgaggtggatgtggatggcaccgtggaggaggacctgggcaagagccgggagggcagcaggacagatgatgaggtggtgcagcgggaggaggaggccatccagctggatggcctgaatgccagccagatccgggagctgcgggagaagtctgagaagtttgccttccaggccgaggtgaacaggatgatgaagctgatcatcaacagcctgtacaagaacaaggagatcttcctgcgggagctgatcagcaatgccagtgatgccctggacaagatccgcctcatcagcctgacagatgaaaatgccctgtctggaaatgaggagctgactgtgaagatcaagtgtgacaaggagaagaacctgctgcacgtgacagacaccggggtgggcatgacccgggaggagctggtgaagaacctgggcaccatcgccaagagcggcaccagcgagttcctgaacaagatgacagaggcccaggaggatggccagagcaccagcgagctgattggccagtttggagtgggcttctacagcgccttcctggtggccgacaaggtgattgtgaccagcaagcacaacaatgacacccagcacatctgggagagtgacagcaatgagttctctgtgattgctgacccccggggcaacaccctgggccggggcaccaccatcaccctggtgctgaaggaggaggccagtgactacctggagctggacaccatcaagaacctggtgaagaagtacagccagttcatcaacttccccatctacgtgtggagcagcaagacagagaccgtggaggagcccatggaggaggaggaggccgccaaggaggagaaggaggagagtgatgatgaggccgctgtggaggaggaggaggaggagaagaagcccaagaccaagaaggtggagaagacagtgtgggactgggagctgatgaatgacatcaagcccatctggcagaggcccagcaaggaggtggaggaggatgagtacaaggccttctacaagagcttcagcaaggagagtgatgaccccatggcctacatccacttcaccgctgagggggaggtgaccttcaagagcatcctgtttgtgcccaccagcgccccccggggcctgtttgatgaatatggcagcaagaagagtgactacatcaagctgtatgtgcggcgggtcttcatcacagatgacttccatgacatgatgcccaagtacctgaactttgtgaagggcgtggtggacagtgatgacctgcccctgaatgtgtcccgggagaccctgcagcagcacaagctgctgaaggtgatcaggaagaagctggtgaggaagaccctggacatgatcaagaagattgctgatgacaagtacaatgacaccttctggaaggagtttggcaccaacatcaagctgggcgtgattgaggaccacagcaacagaacccggctggccaagctgctgcgcttccagagcagccaccaccccacagacatcaccagcctggaccagtatgtggagaggatgaaggagaagcaggacaagatctacttcatggccggcagcagcaggaaggaggccgagagcagcccctttgtggagcggctgctgaagaagggctatgaagtcatctacctgacagagcctgtggatgagtactgcatccaggccctgcctgagtttgatggcaagcgcttccagaatgtggccaaggagggcgtgaagtttgatgaaagtgagaagaccaaggagagccgggaggccgtggagaaggagtttgagcccctgctgaactggatgaaggacaaggccctgaaggacaagattgagaaggctgtggtgtcccagaggctgacagagagcccctgtgccctggtggccagccagtatggctggagcggcaacatggagcgcatcatgaaggcccaggcctaccagacaggcaaggacatcagcaccaactactatgccagccagaagaagacctttgagatcaaccccaggcaccccctcatccgggacatgctgcggcgcatcaaggaggatgaagatgacaagacagtgctggacctggccgtggtgctgtttgaaacagccaccctgcggagcggctacctgctgcctgacaccaaggcctatggagacagaattgaaagaatgctgcggctgagcctgaacattgatcctgatgccaaggtggaggaggagcctgaggaggagcctgaggagacagctgaggacaccacagaggacacagagcaggatgaagatgaggagatggatgtgggcacagatgaggaggaggagacagccaaggagagcacagctgagaaggatgagctgtag

SEQ ID NO: 19892 - DNA, 1662 bp, synthetic construct
  misc_feature 1..1662: note = Description of Artificial Sequence: Synthetic coding sequence
  source 1..1662: mol_type = other DNA
atgagggccctgtgggtgctgggcctgtgctgcgtgctgctgaccttcggctctgtgcgggcagatgatgaggtggatgtggatggcaccgtggaggaggacctgggcaagagccgggagggcagcaggacagatgatgaggccgccaaggaggagaaggaggagagtgatgatgaggccgctgtggaggaggaggaggaggagaagaagcccaagaccaagaaggtggagaagacagtgtgggactgggagctgatgaatgacatcaagcccatctggcagaggcccagcaaggaggtggaggaggatgagtacaaggccttctacaagagcttcagcaaggagagtgatgaccccatggcctacatccacttcaccgctgagggggaggtgaccttcaagagcatcctgtttgtgcccaccagcgccccccggggcctgtttgatgaatatggcagcaagaagagtgactacatcaagctgtatgtgcggcgggtcttcatcacagatgacttccatgacatgatgcccaagtacctgaactttgtgaagggcgtggtggacagtgatgacctgcccctgaatgtgtcccgggagaccctgcagcagcacaagctgctgaaggtgatcaggaagaagctggtgaggaagaccctggacatgatcaagaagattgctgatgacaagtacaatgacaccttctggaaggagtttggcaccaacatcaagctgggcgtgattgaggaccacagcaacagaacccggctggccaagctgctgcgcttccagagcagccaccaccccacagacatcaccagcctggaccagtatgtggagaggatgaaggagaagcaggacaagatctacttcatggccggcagcagcaggaaggaggccgagagcagcccctttgtggagcggctgctgaagaagggctatgaagtcatctacctgacagagcctgtggatgagtactgcatccaggccctgcctgagtttgatggcaagcgcttccagaatgtggccaaggagggcgtgaagtttgatgaaagtgagaagaccaaggagagccgggaggccgtggagaaggagtttgagcccctgctgaactggatgaaggacaaggccctgaaggacaagattgagaaggctgtggtgtcccagaggctgacagagagcccctgtgccctggtggccagccagtatggctggagcggcaacatggagcgcatcatgaaggcccaggcctaccagacaggcaaggacatcagcaccaactactatgccagccagaagaagacctttgagatcaaccccaggcaccccctcatccgggacatgctgcggcgcatcaaggaggatgaagatgacaagacagtgctggacctggccgtggtgctgtttgaaacagccaccctgcggagcggctacctgctgcctgacaccaaggcctatggagacagaattgaaagaatgctgcggctgagcctgaacattgatcctgatgccaaggtggaggaggagcctgaggaggagcctgaggagacagctgaggacaccacagaggacacagagcaggatgaagatgaggagatggatgtgggcacagatgaggaggaggagacagccaaggagagcacagctgagaaggatgagctgtag

SEQ ID NO: 19893 - DNA, 948 bp, synthetic construct
  misc_feature 1..948: note = Description of Artificial Sequence: Synthetic coding sequence
  source 1..948: mol_type = other DNA
atgagggccctgtgggtgctgggcctgtgctgcgtgctgctgaccttcggctctgtgcgggcagatgatgaggtggatgtggatggcaccgtggaggaggacctgggcaagagccgggagggcagcaggacagatgatgaggtggtgcagcgggaggaggaggccatccagctggatggcctgaatgccagccagatccgggagctgcgggagaagtctgagaagtttgccttccaggccgaggtgaacaggatgatgaagctgatcatcaacagcctgtacaagaacaaggagatcttcctgcgggagctgatcagcaatgccagtgatgccctggacaagatccgcctcatcagcctgacagatgaaaatgccctgtctggaaatgaggagctgactgtgaagatcaagtgtgacaaggagaagaacctgctgcacgtgacagacaccggggtgggcatgacccgggaggagctggtgaagaacctgggcaccatcgccaagagcggcaccagcgagttcctgaacaagatgacagaggcccaggaggatggccagagcaccagcgagctgattggccagtttggagtgggcttctacagcgccttcctggtggccgacaaggtgattgtgaccagcaagcacaacaatgacacccagcacatctgggagagtgacagcaatgagttctctgtgattgctgacccccggggcaacaccctgggccggggcaccaccatcaccctggtgctgaaggaggaggccagtgactacctggagctggacaccatcaagaacctggtgaagaagtacagccagttcatcaacttccccatctacgtgtggagcagcaagacagagaccgtggaggagcccatggaggaggaggaggccgccaaggaggagaaggaggagagtgatgatgaggccgccgccaggagaagatag

SEQ ID NO: 19894 - DNA, 483 bp, synthetic construct
  misc_feature 1..483: note = Description of Artificial Sequence: Synthetic coding sequence
  source 1..483: mol_type = other DNA
atgtctgaggtgcggcccctgagccgggacatcctgatggagaccctgctgtatgagcagctgctggagccccccaccatggaggtgctgggcatgacagattctgaggaggacctggaccccatggaggactttgacagcctggagtgcatggagggcagtgatgccctggccctgcggctggcctgcattggagatgagatggatgtgtccctgcgggccccccggctggcccagctgtctgaggtggccatgcacagcctgggcctggccttcatctatgaccagacagaggacatcagagatgtgctgcggagcttcatggatggcttcaccaccctgaaggagaacatcatgaggttctggaggagccccaaccctggctcctgggtgtcctgtgagcaggtgctgctggccctgctgctgctgctggccctgctgctgcccctgctgagcggcggcctgcacctgctgctgaagtag

SEQ ID NO: 19895 - DNA, 564 bp, synthetic construct
  misc_feature 1..564: note = Description of Artificial Sequence: Synthetic coding sequence
  source 1..564: mol_type = other DNA
atggagcggccccagcctgacagcatgccccaggacctgtctgaggccctgaaggaggccaccaaggaggtgcacacccaggctgaaaatgctgagttcatgaggaacttccagaagggccaggtgaccagagatggcttcaagctggtgatggccagcctgtaccacatctacgtggccctggaggaggagattgaaagaaacaaggagagccctgtgtttgcccctgtgtacttccctgaggagctgcacaggaaggccgccctggagcaggacctggccttctggtacggcccccgctggcaggaggtgatcccctacaccccagccatgcagcgctacgtgaagaggctgcacgaggtgggccgcacagagcctgagctgctggtggcccacgcctacacccgctacctgggggacctgagcggcggccaggtgctgaagaagatcgcccagaaggccctggacctgcccagcagcggggagggcctggccttcttcaccttccccaacatcgccagcgccaccaagttcaagcagctgtaccgcagcaggatgaactag

SEQ ID NO: 19896 - DNA, 1581 bp, synthetic construct
  misc_feature 1..1581: note = Description of Artificial Sequence: Synthetic coding sequence
  source 1..1581: mol_type = other DNA
ctgggcggccgcagcagctgtgaggaccccggctgccccagagatgaggagcgggcccccaggatgggctgcatgaagagcaagttcctgcaggtgggcggcaacaccttcagcaagacagagaccagcgccagcccccactgccctgtgtatgtgcctgaccccaccagcaccatcaagccaggccccaacagccacaacagcaacaccccaggcatccgggaggccggcagcgaggacatcatcgtggtggccctgtatgactatgaggccatccaccacgaggacctgtccttccagaagggggaccagatggtggtgctggaggagagcggggagtggtggaaggcccggagcctggccaccaggaaggagggctacatccccagcaactacgtggcccgggtggacagcctggagacagaggagtggttcttcaagggcatcagcaggaaggatgctgagcggcagctgctggcccctggcaacatgctgggcagcttcatgatccgggacagcgagaccaccaagggcagctacagcctgtctgtgcgggactatgacccccggcagggcgacacagtgaagcactacaagatccgcaccctggacaatggaggcttctacatcagccccaggagcaccttcagcaccctgcaggagctggtggaccactacaagaagggaaatgatggcctgtgccagaagctgtctgtgccctgcatgagcagcaagccccagaagccctgggagaaggatgcctgggagatcccccgggagagcctgaagctggagaagaagctgggcgccggccagtttggagaggtgtggatggccacctacaacaagcacaccaaggtggccgtgaagaccatgaagccaggctccatgtctgtggaggccttcctggccgaggccaacgtgatgaagaccctgcagcacgacaagctggtgaagctgcatgctgtggtgaccaaggagcccatctacatcatcacagagttcatggccaagggcagcctgctggacttcctgaagagtgatgagggcagcaagcagcccctgcccaagctgattgacttcagcgcccagattgctgagggcatggccttcatcgagcagaggaactacatccaccgggacctgcgggccgccaacatcctggtgtctgccagcctggtgtgcaagattgctgactttggcctggcccgggtgattgaagataatgagtacacagcccgggagggcgccaagttccccatcaagtggacagcccctgaggccatcaactttggcagcttcaccatcaagagtgatgtgtggagctttggcatcctgctgatggagatcgtgacctacggccgcatcccctacccaggcatgagcaaccctgaggtgatccgggccctggagcggggctacaggatgcccaggcctgagaactgcccagaggagctgtacaacatcatgatgcgctgctggaagaacagacctgaggagcggcccacctttgagtacatccagagcgtgctggatgacttctacacagccacagagagccagtaccagcagcagccctag

SEQ ID NO: 19897 - DNA, 1578 bp, synthetic construct
  misc_feature 1..1578: note = Description of Artificial Sequence: Synthetic coding sequence
  source 1..1578: mol_type = other DNA
ctgggcggccgcagcagctgtgaggaccccggctgccccagagatgaggagcgggcccccaggatgggctgcatgaagagcaagttcctgcaggtgggcggcaacaccttcagcaagacagagaccagcgccagcccccactgccctgtgtatgtgcctgaccccaccagcaccatcaagccaggccccaacagccacaacagcaacaccccaggcatccgggagggcagcgaggacatcatcgtggtggccctgtatgactatgaggccatccaccacgaggacctgtccttccagaagggggaccagatggtggtgctggaggagagcggggagtggtggaaggcccggagcctggccaccaggaaggagggctacatccccagcaactacgtggcccgggtggacagcctggagacagaggagtggttcttcaagggcatcagcaggaaggatgctgagcggcagctgctggcccctggcaacatgctgggcagcttcatgatccgggacagcgagaccaccaagggcagctacagcctgtctgtgcgggactatgacccccggcagggcgacacagtgaagcactacaagatccgcaccctggacaatggaggcttctacatcagccccaggagcaccttcagcaccctgcaggagctggtggaccactacaagaagggaaatgatggcctgtgccagaagctgtctgtgccctgcatgagcagcaagccccagaagccctgggagaaggatgcctgggagatcccccgggagagcctgaagctggagaagaagctgggcgccggccagtttggagaggtgtggatggccacctacaacaagcacaccaaggtggccgtgaagaccatgaagccaggctccatgtctgtggaggccttcctggccgaggccaacgtgatgaagaccctgcagcacgacaagctggtgaagctgcatgctgtggtgaccaaggagcccatctacatcatcacagagttcatggccaagggcagcctgctggacttcctgaagagtgatgagggcagcaagcagcccctgcccaagctgattgacttcagcgcccagattgctgagggcatggccttcatcgagcagaggaactacatccaccgggacctgcgggccgccaacatcctggtgtctgccagcctggtgtgcaagattgctgactttggcctggcccgggtgattgaggacaatgagtacacagcccgggagggcgccaagttccccatcaagtggacagcccctgaggccatcaactttggcagcttcaccatcaagagtgatgtgtggagctttggcatcctgctgatggagatcgtgacctacggccgcatcccctacccaggcatgagcaaccctgaggtgatccgggccctggagcggggctacaggatgcccaggcctgagaactgcccagaggagctgtacaacatcatgatgcgctgctggaagaacagacctgaggagcggcccacctttgagtacatccagagcgtgctggatgacttctacacagccacagagagccagtaccagcagcagccctag

SEQ ID NO: 19898 - DNA, 1515 bp, synthetic construct
  misc_feature 1..1515: note = Description of Artificial Sequence: Synthetic coding sequence
  source 1..1515: mol_type = other DNA
atgggctgcatgaagagcaagttcctgcaggtgggcggcaacaccttcagcaagacagagaccagcgccagcccccactgccctgtgtatgtgcctgaccccaccagcaccatcaagccaggccccaacagccacaacagcaacaccccaggcatccgggagggcagcgaggacatcatcgtggtggccctgtatgactatgaggccatccaccacgaggacctgtccttccagaagggggaccagatggtggtgctggaggagagcggggagtggtggaaggcccggagcctggccaccaggaaggagggctacatccccagcaactacgtggcccgggtggacagcctggagacagaggagtggttcttcaagggcatcagcaggaaggatgctgagcggcagctgctggcccctggcaacatgctgggcagcttcatgatccgggacagcgagaccaccaagggcagctacagcctgtctgtgcgggactatgacccccggcagggcgacacagtgaagcactacaagatccgcaccctggacaatggaggcttctacatcagccccaggagcaccttcagcaccctgcaggagctggtggaccactacaagaagggaaatgatggcctgtgccagaagctgtctgtgccctgcatgagcagcaagccccagaagccctgggagaaggatgcctgggagatcccccgggagagcctgaagctggagaagaagctgggcgccggccagtttggagaggtgtggatggccacctacaacaagcacaccaaggtggccgtgaagaccatgaagccaggctccatgtctgtggaggccttcctggccgaggccaacgtgatgaagaccctgcagcacgacaagctggtgaagctgcatgctgtggtgaccaaggagcccatctacatcatcacagagttcatggccaagggcagcctgctggacttcctgaagagtgatgagggcagcaagcagcccctgcccaagctgattgacttcagcgcccagattgctgagggcatggccttcatcgagcagaggaactacatccaccgggacctgcgggccgccaacatcctggtgtctgccagcctggtgtgcaagattgctgactttggcctggcccgggtgattgaagataatgagtacacagcccgggagggcgccaagttccccatcaagtggacagcccctgaggccatcaactttggcagcttcaccatcaagagtgatgtgtggagctttggcatcctgctgatggagatcgtgacctacggccgcatcccctacccaggcatgagcaaccctgaggtgatccgggccctggagcggggctacaggatgcccaggcctgagaactgcccagaggagctgtacaacatcatgatgcgctgctggaagaacagacctgaggagcggcccacctttgagtacatccagagcgtgctggatgacttctacacagccacagagagccagtaccagcagcagccctag

SEQ ID NO: 19899 - DNA, 1518 bp, synthetic construct
  misc_feature 1..1518: note = Description of Artificial Sequence: Synthetic coding sequence
  source 1..1518: mol_type = other DNA
atgggctgcatgaagagcaagttcctgcaggtgggcggcaacaccttcagcaagacagagaccagcgccagcccccactgccctgtgtatgtgcctgaccccaccagcaccatcaagccaggccccaacagccacaacagcaacaccccaggcatccgggaggccggcagcgaggacatcatcgtggtggccctgtatgactatgaggccatccaccacgaggacctgtccttccagaagggggaccagatggtggtgctggaggagagcggggagtggtggaaggcccggagcctggccaccaggaaggagggctacatccccagcaactacgtggcccgggtggacagcctggagacagaggagtggttcttcaagggcatcagcaggaaggatgctgagcggcagctgctggcccctggcaacatgctgggcagcttcatgatccgggacagcgagaccaccaagggcagctacagcctgtctgtgcgggactatgacccccggcagggcgacacagtgaagcactacaagatccgcaccctggacaatggaggcttctacatcagccccaggagcaccttcagcaccctgcaggagctggtggaccactacaagaagggaaatgatggcctgtgccagaagctgtctgtgccctgcatgagcagcaagccccagaagccctgggagaaggatgcctgggagatcccccgggagagcctgaagctggagaagaagctgggcgccggccagtttggagaggtgtggatggccacctacaacaagcacaccaaggtggccgtgaagaccatgaagccaggctccatgtctgtggaggccttcctggccgaggccaacgtgatgaagaccctgcagcacgacaagctggtgaagctgcatgctgtggtgaccaaggagcccatctacatcatcacagagttcatggccaagggcagcctgctggacttcctgaagagtgatgagggcagcaagcagcccctgcccaagctgattgacttcagcgcccagattgctgagggcatggccttcatcgagcagaggaactacatccaccgggacctgcgggccgccaacatcctggtgtctgccagcctggtgtgcaagattgctgactttggcctggcccgggtgattgaggacaatgagtacacagcccgggagggcgccaagttccccatcaagtggacagcccctgaggccatcaactttggcagcttcaccatcaagagtgatgtgtggagctttggcatcctgctgatggagatcgtgacctacggccgcatcccctacccaggcatgagcaaccctgaggtgatccgggccctggagcggggctacaggatgcccaggcctgagaactgcccagaggagctgtacaacatcatgatgcgctgctggaagaacagacctgaggagcggcccacctttgagtacatccagagcgtgctggatgacttctacacagccacagagagccagtaccagcagcagccctag

SEQ ID NO: 19900 - DNA, 1521 bp, synthetic construct
  misc_feature 1..1521: note = Description of Artificial Sequence: Synthetic coding sequence
  source 1..1521: mol_type = other DNA
atgatgggctgcatgaagagcaagttcctgcaggtgggcggcaacaccttcagcaagacagagaccagcgccagcccccactgccctgtgtatgtgcctgaccccaccagcaccatcaagccaggccccaacagccacaacagcaacaccccaggcatccgggaggccggcagcgaggacatcatcgtggtggccctgtatgactatgaggccatccaccacgaggacctgtccttccagaagggggaccagatggtggtgctggaggagagcggggagtggtggaaggcccggagcctggccaccaggaaggagggctacatccccagcaactacgtggcccgggtggacagcctggagacagaggagtggttcttcaagggcatcagcaggaaggatgctgagcggcagctgctggcccctggcaacatgctgggcagcttcatgatccgggacagcgagaccaccaagggcagctacagcctgtctgtgcgggactatgacccccggcagggcgacacagtgaagcactacaagatccgcaccctggacaatggaggcttctacatcagccccaggagcaccttcagcaccctgcaggagctggtggaccactacaagaagggaaatgatggcctgtgccagaagctgtctgtgccctgcatgagcagcaagccccagaagccctgggagaaggatgcctgggagatcccccgggagagcctgaagctggagaagaagctgggcgccggccagtttggagaggtgtggatggccacctacaacaagcacaccaaggtggccgtgaagaccatgaagccaggctccatgtctgtggaggccttcctggccgaggccaacgtgatgaagaccctgcagcacgacaagctggtgaagctgcatgctgtggtgaccaaggagcccatctacatcatcacagagttcatggccaagggcagcctgctggacttcctgaagagtgatgagggcagcaagcagcccctgcccaagctgattgacttcagcgcccagattgctgagggcatggccttcatcgagcagaggaactacatccaccgggacctgcgggccgccaacatcctggtgtctgccagcctggtgtgcaagattgctgactttggcctggcccgggtgattgaagataatgagtacacagcccgggagggcgccaagttccccatcaagtggacagcccctgaggccatcaactttggcagcttcaccatcaagagtgatgtgtggagctttggcatcctgctgatggagatcgtgacctacggccgcatcccctacccaggcatgagcaaccctgaggtgatccgggccctggagcggggctacaggatgcccaggcctgagaactgcccagaggagctgtacaacatcatgatgcgctgctggaagaacagacctgaggagcggcccacctttgagtacatccagagcgtgctggatgacttctacacagccacagagagccagtaccagcagcagccctag

SEQ ID NO: 19901 - DNA, 1518 bp, synthetic construct; identical to SEQ ID NO: 19899
  misc_feature 1..1518: note = Description of Artificial Sequence: Synthetic coding sequence
  source 1..1518: mol_type = other DNA

SEQ ID NO: 19902 - DNA, 1632 bp, synthetic construct
  misc_feature 1..1632: note = Description of Artificial Sequence: Synthetic coding sequence
  source 1..1632: mol_type = other DNA
atgctgctgcggagcaagccagccctgcccccacccctgatgctgctgctgctgggccccctgggccccctgagccctggggccctgcccaggcctgcccaggcccaggatgtggtggacctggacttcttcacccaggagcccctgcacctggtgagccccagcttcctgtctgtgaccattgatgccaacctggccacagacccccgcttcctgatcctgctgggcagccccaagctgcggaccctggcccggggcctgagccctgcctacctgcgctttggaggcaccaagacagacttcctgatctttgaccccaagaaggagagcacctttgaggagaggagctactggcagagccaggtgaaccaggacatctgcaagtatggcagcatccccccagatgtggaggagaagctgcggctggagtggccctaccaggagcagctgctgctgcgggagcactaccagaagaagttcaagaacagcacctacagccgcagctctgtggatgtgctgtacacctttgccaactgcagcggcctggacctgatcttcggcctgaatgccctgctgaggacagctgacctgcagtggaacagcagcaatgcccagctgctgctggactactgcagcagcaagggctacaacatctcctgggagctgggcaatgagcccaacagcttcctgaagaaggctgacatcttcatcaatggcagccagctgggggaggacttcatccagctgcacaagctgctgaggaagagcaccttcaagaatgccaagctgtatggcccagatgtgggccagcccaggaggaagacagccaagatgctgaagagcttcctgaaggccggcggggaggtgattgacagcgtgacctggcaccactactacctgaatggaagaacagccaccaaggaggacttcctgaacccagatgtgctggacatcttcatcagctctgtgcagaaggtgttccaggtggtggagagcaccaggcctgggaagaaggtgtggctgggggagaccagcagcgcctacggcggcggggcccccctgctgagtgacacctttgctgctggcttcatgtggctggacaagctgggcctgagcgccaggatgggcatcgaggtggtgatgaggcaggtgttcttcggggccggcaactaccacctggtggatgagaactttgaccccctgcctgactactggctgagcctgctcttcaagaagctggtgggcaccaaggtgctgatggcctctgtgcagggcagcaagaggaggaagctgcgggtgtacctgcactgcaccaacacagacaacccccgctacaaggagggggacctgaccctgtatgccatcaacctgcacaacgtgaccaagtacctgcggctgccctaccccttcagcaacaagcaggtggacaagtacctgctgcggcccctgggcccccacggcctgctgagcaagtctgtgcagctgaatggcctgaccctgaagatggtggatgaccagaccctgccccccctgatggagaagcccctgcggcccggcagcagcctgggcctgcctgccttctcctacagcttcttcgtcatcagaaatgccaaggtggccgcctgcatctag

SEQ ID NO: 19903 - DNA, 1632 bp, synthetic construct; identical to SEQ ID NO: 19902
  misc_feature 1..1632: note = Description of Artificial Sequence: Synthetic coding sequence
  source 1..1632: mol_type = other DNA

SEQ ID NO: 19904 - DNA, 294 bp, synthetic construct
  misc_feature 1..294: note = Description of Artificial Sequence: Synthetic coding sequence
  source 1..294: mol_type = other DNA
atgctgctgctgctgggccccctgggccccctgagccctggggccctgcccaggcctgcccaggcccaggatgtggtggacctggacttcttcacccaggagcccctgcacctggtgagccccagcttcctgtctgtgaccaggcctgggaagaaggtgtggctgggggagaccagcagcgcctacggcggcggggcccccctgctgagtgacacctttgctgctggcttcatgtggctggacaagctgggcctgagcgccaggatgggcatcgaggtggtgatgaggcagtag

SEQ ID NO: 19905 - DNA, 1410 bp, synthetic construct
  misc_feature 1..1410: note = Description of Artificial Sequence: Synthetic coding sequence
  source 1..1410: mol_type = other DNA
atgctgctgcggagcaagccagccctgcccccacccctgatgctgctgctgctgggccccctgggccccctgagccctggggccctgcccaggcctgcccaggcccaggatgtggtggacctggacttcttcacccaggagcccctgcacctggtgagccccagcttcctgtctgtgaccattgatgccaacctggccacagacccccgcttcctgatcctgctgggcagccccaagctgcggaccctggcccggggcctgagccctgcctacctgcgctttggaggcaccaagacagacttcctgatctttgaccccaagaaggagagcacctttgaggagaggagctactggcagagccaggtgaaccaggacatctgcaagtatggcagcatccccccagatgtggaggagaagctgcggctggagtggccctaccaggagcagctgctgctgcgggagcactaccagaagaagttcaagaacagcacctacagccgcagctctgtggatgtgctgtacacctttgccaactgcagcggcctggacctgatcttcggcctgaatgccctgctgaggacagctgacctgcagtggaacagcagcaatgcccagctgctgctggactactgcagcagcaagggctacaacatctcctgggagctgggcaatgagcccaacagcttcctgaagaaggctgacatcttcatcaatggcagccagctgggggaggacttcatccagctgcacaagctgctgaggaagagcaccttcaagaatgccaagctgtatggcccagatgtgggccagcccaggaggaagacagccaagatgctgaagagcttcctgaaggccggcggggaggtgattgacagcgtgacctggcaccactactacctgaatggaagaacagccaccaaggaggacttcctgaacccagatgtgctggacatcttcatcagctctgtgcagaaggtgttccaggactactggctgagcctgctcttcaagaagctggtgggcaccaaggtgctgatggcctctgtgcagggcagcaagaggaggaagctgcgggtgtacctgcactgcaccaacacagacaacccccgctacaaggagggggacctgaccctgtatgccatcaacctgcacaacgtgaccaagtacctgcggctgccctaccccttcagcaacaagcaggtggacaagtacctgctgcggcccctgggcccccacggcctgctgagcaagtctgtgcagctgaatggcctgaccctgaagatggtggatgaccagaccctgccccccctgatggagaagcccctgcggcccggcagcagcctgggcctgcctgccttctcctacagcttcttcgtcatcagaaatgccaaggtggccgcctgcatctag

SEQ ID NO: 19906 - DNA, 1458 bp, synthetic construct
  misc_feature 1..1458: note = Description of Artificial Sequence: Synthetic coding sequence
  source 1..1458: mol_type = other DNA
atgctgctgcggagcaagccagccctgcccccacccctgatgctgctgctgctgggccccctgggccccctgagccctggggccctgcccaggcctgcccaggcccaggatgtggtggacctggacttcttcacccaggagcccctgcacctggtgagccccagcttcctgtctgtgaccattgatgccaacctggccacagacccccgcttcctgatcctgctgggcagccccaagctgcggaccctggcccggggcctgagccctgcctacctgcgctttggaggcaccaagacagacttcctgatctttgaccccaagaaggagagcacctttgaggagaggagctactggcagagccaggtgaaccaggacatctgcaagtatggcagcatccccccagatgtggaggagaagctgcggctggagtggccctaccaggagcagctgctgctgcgggagcactaccagaagaagttcaagaacagcacctacagcaagcccaacagcttcctgaagaaggctgacatcttcatcaatggcagccagctgggggaggacttcatccagctgcacaagctgctgaggaagagcaccttcaagaatgccaagctgtatggcccagatgtgggccagcccaggaggaagacagccaagatgctgaagagcttcctgaaggccggcggggaggtgattgacagcgtgacctggcaccactactacctgaatggaagaacagccaccaaggaggacttcctgaacccagatgtgctggacatcttcatcagctctgtgcagaaggtgttccaggtggtggagagcaccaggcctgggaagaaggtgtggctgggggagaccagcagcgcctacggcggcggggcccccctgctgagtgacacctttgctgctggcttcatgtggctggacaagctgggcctgagcgccaggatgggcatcgaggtggtgatgaggcaggtgttcttcggggccggcaactaccacctggtggatgagaactttgaccccctgcctgactactggctgagcctgctcttcaagaagctggtgggcaccaaggtgctgatggcctctgtgcagggcagcaagaggaggaagctgcgggtgtacctgcactgcaccaacacagacaacccccgctacaaggagggggacctgaccctgtatgccatcaacctgcacaacgtgaccaagtacctgcggctgccctaccccttcagcaacaagcaggtggacaagtacctgctgcggcccctgggcccccacggcctgctgagcaagtctgtgcagctgaatggcctgaccctgaagatggtggatgaccagaccctgccccccctgatggagaagcccctgcggcccggcagcagcctgggcctgcctgccttctcctacagcttcttcgtcatcagaaatgccaaggtggccgcctgcatctag

SEQ ID NO: 19907 - DNA, 1062 bp, synthetic construct
  misc_feature 1..1062: note = Description of Artificial Sequence: Synthetic coding sequence
  source 1..1062: mol_type = other DNA
atggagaagaccctggagaccgtgcccctggagaggaagaagcgggagaaggagcagttcaggaagctgttcatcggcggcctgagctttgagaccacagaggagagcctgaggaactactatgagcagtggggcaagctgacagactgtgtggtgatgagggaccctgccagcaagaggagccggggcttcggctttgtgaccttcagctccatggccgaggtggatgctgccatggccgcccggccccacagcattgatggccgggtggtggagcccaagagagctgtggcccgggaggagagcggcaagccaggggcccacgtgacagtgaagaagctgtttgtgggcggcatcaaggaggacacagaggagcaccacctgcgggactactttgaggagtatggcaagattgacaccatcgagatcatcacagaccggcagagcggcaagaagaggggctttggatttgtgacctttgatgaccatgaccctgtggacaagatcgtgctgcagaagtaccacaccatcaatggccacaatgctgaggtgaggaaggccctgagccggcaggagatgcaggaggtgcagagcagccgcagcggccggggcggcaactttggatttggagacagccggggcggcggcggcaactttggacctggccctggcagcaacttccggggcggcagtgatggctacggcagcggccggggctttggagatggctacaacggctatggaggcggccctgggggcggcaactttggaggcagccctggctacggcggcggccggggcggctatggaggcggcggccctggctacggcaaccagggcggcggctatggaggcggctatgacaactacggcggcggcaactacggcagcggcaactacaatgactttggaaactacaaccagcagcccagcaactacggccccatgaagagcggcaactttggaggcagcaggaacatgggcggcccctatggaggcggcaactacggccctgggggcagcggcggcagcggcggctatggaggccgcagccgctactag

SEQ ID NO: 19908 - DNA, 1026 bp, synthetic construct
  misc_feature 1..1026: note = Description of Artificial Sequence: Synthetic coding sequence
  source 1..1026: mol_type = other DNA
atggagcgggagaaggagcagttcaggaagctgttcatcggcggcctgagctttgagaccacagaggagagcctgaggaactactatgagcagtggggcaagctgacagactgtgtggtgatgagggaccctgccagcaagaggagccggggcttcggctttgtgaccttcagctccatggccgaggtggatgctgccatggccgcccggccccacagcattgatggccgggtggtggagcccaagagagctgtggcccgggaggagagcggcaagccaggggcccacgtgacagtgaagaagctgtttgtgggcggcatcaaggaggacacagaggagcaccacctgcgggactactttgaggagtatggcaagattgacaccatcgagatcatcacagaccggcagagcggcaagaagaggggctttggatttgtgacctttgatgaccatgaccctgtggacaagatcgtgctgcagaagtaccacaccatcaatggccacaatgctgaggtgaggaaggccctgagccggcaggagatgcaggaggtgcagagcagccgcagcggccggggcggcaactttggatttggagacagccggggcggcggcggcaactttggacctggccctggcagcaacttccggggcggcagtgatggctacggcagcggccggggctttggagatggctacaacggctatggaggcggccctgggggcggcaactttggaggcagccctggctacggcggcggccggggcggctatggaggcggcggccctggctacggcaaccagggcggcggctatggaggcggctatgacaactacggcggcggcaactacggcagcggcaactacaatgactttggaaactacaaccagcagcccagcaactacggccccatgaagagcggcaactttggaggcagcaggaacatgggcggcccctatggaggcggcaactacggccctgggggcagcggcggcagcggcggctatggaggccgcagccgctactag

SEQ ID NO: 19909 - DNA, 1062 bp, synthetic construct; identical to SEQ ID NO: 19907
  misc_feature 1..1062: note = Description of Artificial Sequence: Synthetic coding sequence
  source 1..1062: mol_type = other DNA

SEQ ID NO: 19910 - DNA, 750 bp, synthetic construct
  misc_feature 1..750: note = Description of Artificial Sequence: Synthetic coding sequence
  source 1..750: mol_type = other DNA
atggagcgggagaaggagcagttcaggaagctgttcatcggcggcctgagctttgagaccacagaggagagcctgaggaactactatgagcagtggggcaagctgacagactgtgtggtgatgagggaccctgccagcaagaggagccggggcttcggctttgtgaccttcagctccatggccgaggtggatgctgccatggccgcccggccccacagcattgatggccgggtggtggagcccaagagagctgtggcccgggaggagagcggcaagccaggggcccacgtgacagtgaagaagctgtttgtgggcggcatcaaggaggacacagaggagcaccacctgcgggactactttgaggagtatggcaagattgacaccatcgagatcatcacagaccggcagagcggcaagaagaggggctttggatttgtgacctttgatgaccatgaccctgtggacaagatcgtgctgcagaagtaccacaccatcaatggccacaatgctgaggtgaggaaggccctgagccggcaggagatgcaggaggacctggaggtggccatcctggaggtggcccctgtgatggaggaggaggaggaggacatggtggtggaggacctggacatggccaccagggtgggcgccacagaggtggtgatgaccaccatggaggaggagatcatggaggtggagatcaccatgatcctggagatcatcaccagcaacctgctgaccaccgtgcagtag

SEQ ID NO: 19911 - DNA, 846 bp, synthetic construct
  misc_feature 1..846: note = Description of Artificial Sequence: Synthetic coding sequence
  source 1..846: mol_type = other DNA
atgtctgaggagcagtttggaggagatggagctgctggaaatggaggcggccggcgggccggggagcaggagggcgccatggtggccgccacccagggcgctgctgcccgggaggccgagcccggccctggagctgagccccggctggaggcccccaagggagctgagagcgagggcgccaagattgatgccagcaagaatgaagaagatgagggcaagatgttcatcggcggcctgtcctgggacaccaccaagaaggacctgaaggactacttcagcaagtttggagaggtggtggactgcaccctgaagctggaccccatcaccggccgcagccggggctttggatttgtgctcttcaaggagagcgagagcgtggacaaggtgatggaccagaaggagcacaagctgaatggcaaggtgattgaccccaagagggccaaggccatgaagaccaaggagcctgtgaagaagatctttgtgggcggcctgagcccagacaccccagaggagaagatccgggagtactttggaggctttggagaggtggagagcattgagctgcccatggacaacaagaccaacaagagaagaggcttctgcttcatcaccttcaaggaggaggagcctgtgaagaagatcatggagaagaagtaccacaacgtgggcctgagcaaatgtgagatcaaggtggccatgagcaaggagcagtaccagcagcagcagcagtggggcagccggggcggctttgctggccgggcccggggccggggcggggaccagcagagcggctacggcaaggtgtcccggcggggcggccaccagaacagctacaagccctactag

SEQ ID NO: 19912 - DNA, 1068 bp, synthetic construct
  misc_feature 1..1068: note = Description of Artificial Sequence: Synthetic coding sequence
  source 1..1068: mol_type = other DNA
atgtctgaggagcagtttggaggagatggagctgctgctgctgccacagctgctgtgggcggcagcgctggggagcaggagggcgccatggtggccgccacccagggcgctgctgctgctgctggcagcggggccggcactggaggcggcacagccagcggcggcacagagggcggcagcgctgagagcgagggcgccaagattgatgccagcaagaatgaagaagatgagggccacagcaacagcagccccaggcacagcgaggccgccacagcccagcgggaggagtggaagatgtttattggaggcctgtcctgggacaccaccaagaaggacctgaaggactacttcagcaagtttggagaggtggtggactgcaccctgaagctggaccccatcaccggccgcagccggggcttcggctttgtgctcttcaaggagagcgagagcgtggacaaggtgatggaccagaaggagcacaagctgaatggcaaggtgattgaccccaagagggccaaggccatgaagaccaaggagcctgtgaagaagatctttgtgggcggcctgagcccagacaccccagaggagaagatccgggagtactttggaggctttggagaggtggagagcattgagctgcccatggacaacaagaccaacaagaggcggggcttctgcttcatcaccttcaaggaggaggagcctgtgaagaagatcatggagaagaagtaccacaacgtgggcctgagcaaatgtgagatcaaggtggccatgagcaaggagcagtaccagcagcagcagcagtggggcagcagaggaggctttgctggccgggcccggggccggggcggcggccccagccagaactggaaccagggctacagcaactactggaaccagggctacggcaactacggctacaacagccagggctacggcggctatggaggctatgactacacaggctacaacaactactacggctatggagactacagcaaccagcagagcggctacggcaaggtgtcccggcggggcggccaccagaacagctacaagccctactag

SEQ ID NO: 19913 - DNA, 1011 bp, synthetic construct
  misc_feature 1..1011: note = Description of Artificial Sequence: Synthetic coding sequence
  source 1..1011: mol_type = other DNA
atgtctgaggagcagtttggaggagatggagctgctgctgctgccacagctgctgtgggcggcagcgctggggagcaggagggcgccatggtggccgccacccagggcgctgctgctgctgctggcagcggggccggcactggaggcggcacagccagcggcggcacagagggcggcagcgctgagagcgagggcgccaagattgatgccagcaagaatgaagaagatgagggcaagatgttcatcggcggcctgtcctgggacaccaccaagaaggacctgaaggactacttcagcaagtttggagaggtggtggactgcaccctgaagctggaccccatcaccggccgcagccggggctttggatttgtgctcttcaaggagagcgagagcgtggacaaggtgatggaccagaaggagcacaagctgaatggcaaggtgattgaccccaagagggccaaggccatgaagaccaaggagcctgtgaagaagatctttgtgggcggcctgagcccagacaccccagaggagaagatccgggagtactttggaggctttggagaggtggagagcattgagctgcccatggacaacaagaccaacaagagaagaggcttctgcttcatcaccttcaaggaggaggagcctgtgaagaagatcatggagaagaagtaccacaacgtgggcctgagcaaatgtgagatcaaggtggccatgagcaaggagcagtaccagcagcagcagcagtggggcagccggggcggctttgctggccgggcccggggccggggcggcggccccagccagaactggaaccagggctacagcaactactggaaccagggctacggcaactacggctacaacagccagggctatggaggctacggcggctatgactacacaggctacaacaactactacggctacggggactacagcaaccagcagagcggctacggcaaggtgtccagaagaggaggccaccagaacagctacaagccctactag

SEQ ID NO: 19914 - DNA, 921 bp, synthetic construct
  misc_feature 1..921: note = Description of Artificial Sequence: Synthetic coding sequence
  source 1..921: mol_type = other DNA
atgtctgaggagcagtttggaggagatggagctgctgctgctgccacagctgctgtgggcggcagcgctggggagcaggagggcgccatggtggccgccacccagggcgctgctgctgctgctggcagcggggccggcactggaggcggcacagccagcggcggcacagagggcggcagcgctgagagcgagggcgccaagattgatgccagcaagaatgaagaagatgagggccacagcaacagcagccccaggcacagcgaggccgccacagcccagcgggaggagtggaagatgtttattggaggcctgtcctgggacaccaccaagaaggacctgaaggactacttcagcaagtttggagaggtggtggactgcaccctgaagctggaccccatcaccggccgcagccggggcttcggctttgtgctcttcaaggagagcgagagcgtggacaaggtgatggaccagaaggagcacaagctgaatggcaaggtgattgaccccaagagggccaaggccatgaagaccaaggagcctgtgaagaagatctttgtgggcggcctgagcccagacaccccagaggagaagatccgggagtactttggaggctttggagaggtggagagcattgagctgcccatggacaacaagaccaacaagaggcggggcttctgcttcatcaccttcaaggaggaggagcctgtgaagaagatcatggagaagaagtaccacaacgtgggcctgagcaaatgtgagatcaaggtggccatgagcaaggagcagtaccagcagcagcagcagtggggcagcagaggaggctttgctggccgggcccggggccggggcggggaccagcagagcggctacggcaaggtgtccagaagaggaggccaccagaacagctacaagccctactag

SEQ ID NO: 19915 - DNA, 468 bp, synthetic construct
  misc_feature 1..468: note = Description of Artificial Sequence: Synthetic coding sequence
  source 1..468: mol_type = other DNA
atgtctgaggagcagtttggaggagatggagctgctgctgctgccacagctgctgtgggcggcagcgctggggagcaggagggcgccatggtggccgccacccagggcgctgctgctgctgctggcagcggggccggcactggaggcggcacagccagcggcggcacagagggcggcagcgctgagagcgagggcgccaagattgatgccagcaagaatgaagaagatgagggcaagatgttcatcggcggcctgtcctgggacaccaccaagaaggacctgaaggactacttcagcaagtttggagaggtggtggactgcaccctgaagctggaccccatcaccggccgcagccggggctttggatttgtgctcttcaaggagagcgagagcgtggacaaggtgatggaccagaaggagcacaagctgaatggcaaggtgattgaccccaagagggccaaggcctag

SEQ ID NO: 19916 - DNA, 666 bp, synthetic construct
  misc_feature 1..666: note = Description of Artificial Sequence: Synthetic coding sequence
  source 1..666: mol_type = other DNA
atgtctgaggagcagtttggaggagatggagctgctgctgctgccacagctgctgtgggcggcagcgctggggagcaggagggcgccatggtggccgccacccagggcgctgctgctgctgctggcagcggggccggcactggaggcggcacagccagcggcggcacagagggcggcagcgctgagagcgagggcgccaagattgatgccagcaagaatgaagaagatgagggccacagcaacagcagccccaggcacagcgaggccgccacagcccagcgggaggagtggaagatgtttattggaggcctgtcctgggacaccaccaagaaggacctgaaggactacttcagcaagtttggagaggtggtggactgcaccctgaagctggaccccatcaccggccgcagccggggcttcggctttgtgctcttcaaggagagcgagagcgtggacaaggtgatggaccagaaggagcacaagctgaatggcaaggtgattgaccccaagagggccaaggccatgaagaccaaggagcctgtgaagaagatctttgtgggcggcctgagcccagacaccccagaggagaagatccgggagtactttggaggctttggagaggtggagagcattgagctgcccatggacaacaagaccaacaagtag

SEQ ID NO: 19917 - DNA, 633 bp, synthetic construct
  misc_feature 1..633: note = Description of Artificial Sequence: Synthetic coding sequence
  source 1..633: mol_type = other DNA
tgaaagatgtttattggaggcctgtcctgggacaccaccaagaaggacctgaaggactacttcagcaagtttggagaggtggtggactgcaccctgaagctggaccccatcaccggccgcagccggggcttcggctttgtgctcttcaaggagagcgagagcgtggacaaggtgatggaccagaaggagcacaagctgaatggcaaggtgattgaccccaagagggccaaggccatgaagaccaaggagcctgtgaagaagatctttgtgggcggcctgagcccagacaccccagaggagaagatccgggagtactttggaggctttggagaggtggagagcattgagctgcccatggacaacaagaccaacaagaggcggggcttctgcttcatcaccttcaaggaggaggagcctgtgaagaagatcatggagaagaagtaccacaacgtgggcctgagcaaatgtgagatcaaggtggccatgagcaaggagcagtaccagcagcagcagcagtggggcagcagaggaggctttgctggccgggcccggggccggggcggggaccagcagagcggctacggcaaggtgtccagaagaggaggccaccagaacagctacaagccctactag

SEQ ID NO: 19918 - DNA, 606 bp, synthetic construct
  misc_feature 1..606: note = Description of Artificial Sequence: Synthetic coding sequence
  source 1..606: mol_type = other DNA
atggaccagaaggagcacaagctgaatggcaaggtgattgaccccaagagggccaaggccatgaagaccaaggagcctgtgaagaagatctttgtgggcggcctgagcccagacaccccagaggagaagatccgggagtactttggaggctttggagaggtggagagcattgagctgcccatggacaacaagaccaacaagaggcggggcttctgcttcatcaccttcaaggaggaggagcctgtgaagaagatcatggagaagaagtaccacaacgtgggcctgagcaaatgtgagatcaaggtggccatgagcaaggagcagtaccagcagcagcagcagtggggcagcagaggaggctttgctggccgggcccggggccggggcggcggccccagccagaactggaaccagggctacagcaactactggaaccagggctacggcaactacggctacaacagccagggctacggcggctatggaggctatgactacacaggctacaacaactactacggctatggagactacagcaaccagcagagcggctacggcaaggtgtcccggcggggcggccaccagaacagctacaagccctactag

SEQ ID NO: 19919 - DNA, 912 bp, synthetic construct
  misc_feature 1..912: note = Description of Artificial Sequence: Synthetic coding sequence
  source 1..912: mol_type = other DNA
atgtctgaggagcagtttggaggagatggagctgctgctgctgccacagctgctgccagcggcggcacagaaggaggcagcgctgagagcgagggcgccaagattgatgccagcaagaatgaggaggatgagggcaagatgtttattggaggcctgtcctgggacaccaccaagaaggacctgaaggactacttcagcaagtttggagaggtggtggactgcaccctgaagctggaccccatcaccggccgcagccggggcttcggctttgtgctcttcaaggagagcgagagcgtggacaaggtgatggaccagaaggagcacaagctgaatggcaaggtgattgaccccaagagggccaaggccatgaagaccaaggagcctgtgaagaagatctttgtgggcggcctgagcccagacaccccagaggagaagatccgggagtactttggaggctttggagaggtggagagcattgagctgcccatggacaacaagaccaacaagaggcggggcttctgcttcatcaccttcaaggaggaggagcctgtgaagaagatcatggagaagaagtaccacaacgtgggcctgagcaaatgtgagatcaaggtggccatgagcaaggagcagtaccagcagcagcagcagtggggcagcagaggaggctttgctggccgggcccggggccggggcggcggccccagccagaactggaaccagggctacagcaactactggaaccagggctacggcaactacggctacaacagccagggctacggcggctatggaggctatgactacacaggctacaacaactactacggctatggagactacagcaaccagcagagcggctacggcaaggtgtcccggcggggcggccaccagaacagctacaagccctactag

SEQ ID NO: 19920 - DNA, 1974 bp, synthetic construct
  misc_feature 1..1974: note = Description of Artificial Sequence: Synthetic coding sequence
  source 1..1974: mol_type = other DNA
atgccccgctacacagtgcacgtgcggggggagtggctggccgtgccctgccaggatgcccagctgactgtgggctggctgggccgggaggccgtgcggcgctacatcaagaacaagccagacaatggaggcttcacctctgtggatgatgcccacttcctggtgcggcgctgcaagggcctgggcctgctggacaatgaagatcggctggaggtggccctggagaacaatgaatttgtggaggtggtgattgaaggagatgccatgagcccagacttcatccccagccagcctgagggcgtgtacctgtacagcaagtaccgggagcctgagaagtacatcgagctggatggagaccggctgaccacagaggacctggtgaacctgggcaagggccgctacaagatcaagctgacccccacagctgagaagagggtgcagaagagccgggaggtgattgacagcatcatcaaggagaagacagtggtgtatggcatcaccaccggctttgggaagtttgccaggacagtcatccccatcaacaagctgcaggagctgcaggtgaacctggtgcgcagccacagcagcggcgtgggcaagcccctgagccctgagcgctgcaggatgctgctggccctgcgcatcaacgtgctggccaagggctacagcggcatcagcctggagaccctgaagcaggtgattgagatgtttaatgccagctgcctgccctacgtgcctgagaagggcaccgtgggcgccagcggggacctggcccccctgagccacctggccctgggcctggtgggggagggcaagatgtggagccccaagagcggctgggcagatgccaagtatgtgctggaggcccacggcctgaagcctgtgatcctgaagcccaaggagggcctggccctgatcaatggcacccagatgatcaccagcctgggctgtgaggccgtggagcgggccagcgccatcgcccggcaggccgacatcgtggccgccctgaccctggaggtgctgaagggcaccaccaaggcctttgacacagacatccacgccctgcggccccaccggggccagatcgaggtggccttccgcttccgcagcctgctggacagcgaccaccaccccagcgagattgctgagagccaccgcttctgtgacagagtgcaggatgcctacaccctgcgctgctgcccccaggtgcacggcgtggtgaatgacaccatcgcctttgtgaagaacatcatcaccacagagctgaacagcgccacagacaaccccatggtgtttgccaacagaggagagaccgtgtctgggggcaacttccatggagagtacccagccaaggccctggactacctggccatcggcatccacgagctggccgccatcagcgagaggagaattgagcggctgtgcaaccccagcctgtctgagctgcctgccttcctggtggccgagggcggcctgaacagcggcttcatgattgcccactgcacagctgctgccctggtgtctgagaacaaggccctgtgccaccccagctctgtggacagcctgagcaccagcgctgccacagaagatcatgtgtccatgggcggctgggccgccaggaaggccctgcgggtcatcgagcacgtggagcaggtgctggccatcgagctgctggccgcctgccagggcatcgagttcctgcggcccctgaagaccaccacccccctggagaaggtgtatgacctggtgcgctctgtggtgcggccctggatcaaggaccgcttcatggccccagacatcgaggccgcccaccggctgctgctggagcagaaggtgtgggaggtggccgccccctacatcgagaagtacaggatggagcacatccctgagagccggcccctgagccccacagccttcagcctgcagttcctgcacaagaagagcaccaagatccctgagagcgaggacctgtag

SEQ ID NO: 19921 - DNA, 1776 bp, synthetic construct
  misc_feature 1..1776: note = Description of Artificial Sequence: Synthetic coding sequence
  source 1..1776: mol_type = other DNA
atgccccgctacacagtgcacgtgcggggggagtggctggccgtgccctgccaggatgcccagctgactgtgggctggctgggccgggaggccgtgcggcgctacatcaagaacaagccagacaatggaggcttcacctctgtggatgatgcccacttcctggtgcggcgctgcaagggcctgggcctgctggacaatgaagatcggctggaggtggccctggagaacaatgaatttgtggaggtggtgattgaaggagatgccatgagcccagacttcatccccagccagcctgagggcgtgtacctgtacagcaagtaccgggagcctgagaagtacatcgagctggatggagaccggctgaccacagaggacctggtgaacctgggcaagggccgctacaagatcaagctgacccccacagctgagaagagggtgcagaagagccgggaggtgattgacagcatcatcaaggagaagacagtggtgtatggcatcaccaccggctttgggaagtttgccaggacagtcatccccatcaacaagctgcaggagctgcaggtgaacctggtgcgcagccacagcagcggcgtgggcaagcccctgagccctgagcgctgcaggatgctgctggccctgcgcatcaacgtgctggccaagggctacagcggcatcagcctggagaccctgaagcaggtgattgagatgtttaatgccagctgcctgccctacgtgcctgagaagggcaccgtgggcgccagcggggacctggcccccctgagccacctggccctgggcctggtgggggagggcaagatgtggagccccaagagcggctgggcagatgccaagtatgtgctggaggcccacggcctgaagcctgtgatcctgaagcccaaggagggcctggccctgatcaatggcacccagatgatcaccagcctgggctgtgaggccgtggagcgggccagcgccatcgcccggcaggccgacatcgtggccgccctgaccctggaggtgctgaagggcaccaccaaggcctttgacacagacatccacgccctgcggccccaccggggccagatcgaggtggccttccgcttccgcagcctgctggacagcgaccaccaccccagcgagattgctgagagccaccgcttctgtgacagagtgcaggatgcctacaccctgcgctgctgcccccaggtgcacggcgtggtgaatgacaccatcgcctttgtgaagaacatcatcaccacagagctgaacagcgccacagacaaccccatggtgtttgccaacagaggagagaccgtgtctgggggcaacttccatggagagtacccagccaaggccctggactacctggccatcggcatccacgagctggccgccatcagcgagaggagaattgagcggctgtgcaaccccagcctgtctgagctgcctgccttcctggtggccgagggcggcctgaacagcggcttcatgattgcccactgcacagctgctgccctggtgtctgagaacaaggccctgtgccaccccagctctgtggacagcctgagcaccagcgctgccacagaagatcatgtgtccatgggcggctgggccgccaggaaggccctgcgggtcatcgagcacgtggagcaggtgctggccatcgagctgctggccgcctgccagggcatcgagttcctgcggcccctgaagaccaccacccccctggagaaggtgtatgacctggtgcgctctgtggtgcgctttgggaagtag

SEQ ID NO: 19922 - DNA, 1350 bp, synthetic construct
  misc_feature 1..1350: note = Description of Artificial Sequence: Synthetic coding sequence
  source 1..1350: mol_type = other DNA
atgctgctggccctgcgcatcaacgtgctggccaagggctacagcggcatcagcctggagaccctgaagcaggtgattgagatgtttaatgccagctgcctgccctacgtgcctgagaagggcaccgtgggcgccagcggggacctggcccccctgagccacctggccctgggcctggtgggggagggcaagatgtggagccccaagagcggctgggcagatgccaagtatgtgctggaggcccacggcctgaagcctgtgatcctgaagcccaaggagggcctggccctgatcaatggcacccagatgatcaccagcctgggctgtgaggccgtggagcgggccagcgccatcgcccggcaggccgacatcgtggccgccctgaccctggaggtgctgaagggcaccaccaaggcctttgacacagacatccacgccctgcggccccaccggggccagatcgaggtggccttccgcttccgcagcctgctggacagcgaccaccaccccagcgagattgctgagagccaccgcttctgtgacagagtgcaggatgcctacaccctgcgctgctgcccccaggtgcacggcgtggtgaatgacaccatcgcctttgtgaagaacatcatcaccacagagctgaacagcgccacagacaaccccatggtgtttgccaacagaggagagaccgtgtctgggggcaacttccatggagagtacccagccaaggccctggactacctggccatcggcatccacgagctggccgccatcagcgagaggagaattgagcggctgtgcaaccccagcctgtctgagctgcctgccttcctggtggccgagggcggcctgaacagcggcttcatgattgcccactgcacagctgctgccctggtgtctgagaacaaggccctgtgccaccccagctctgtggacagcctgagcaccagcgctgccacagaagatcatgtgtccatgggcggctgggccgccaggaaggccctgcgggtcatcgagcacgtggagcaggtgctggccatcgagctgctggccgcctgccagggcatcgagttcctgcggcccctgaagaccaccacccccctggagaaggtgtatgacctggtgcgctctgtggtgcggccctggatcaaggaccgcttcatggccccagacatcgaggccgcccaccggctgctgctggagcagaaggtgtgggaggtggccgccccctacatcgagaagtacaggatggagcacatccctgagagccggcccctgagccccacagccttcagcctgcagttcctgcacaagaagagcaccaagatccctgagagcgaggacctgtag

SEQ ID NO: 19923 - DNA, 1260 bp, synthetic construct
  misc_feature 1..1260: note = Description of Artificial Sequence: Synthetic coding sequence
  source 1..1260: mol_type = other DNA
atggccggctttggagccatggagaagttcctggtggagtacaagtctgctgtggagaagaagctggccgagtacaagtgcaacaccaacacagccatcgagctgaagctggtgcgcttccctgaggacctggagaatgacatccgcaccttcttccctgagtacacccaccagctgtttggagatgatgaaacagccttcggctacaagggcctgaagatcctgctgtactacatcgccggcagcctgagcaccatgttccgggtggagtatgccagcaaggtggatgaaaattttgactgtgtggaggctgatgatgtggagggcaagatccggcagatcatccccccaggcttctgcaccaacaccaatgacttcctgagcctgctggagaaggaggtggacttcaagcccttcggcaccctgctgcacacctacagcgtgctgagccccactggaggagagaacttcaccttccagatctacaaggctgacatgacctgccggggcttccgggagtaccacgagcggctgcagaccttcctgatgtggttcatcgagacagccagcttcattgatgtggatgatgagcgctggcactacttcctggtgtttgagaagtacaacaaggatggagccaccctgtttgccaccgtgggctacatgacagtgtacaactactacgtgtacccagacaagacccggccccgggtgtcccagatgctgatcctgacccccttccagggccagggccacggggcccagctgctggagaccgtgcaccgctactacacagagttccccaccgtgctggacatcacagctgaggaccccagcaagagctatgtgaagctgcgggactttgtgctggtgaagctgtgccaggacctgccctgcttcagccgggagaagctgatgcagggcttcaatgaagacatggccatcgaggcccagcagaagttcaagatcaacaagcagcacgccaggagagtgtatgagatcctgcggctgctggtgacagacatgtctgatgctgagcagtaccgcagctaccgcctggacatcaagagaagactcatcagcccctacaagaagaagcagagggacctggccaagatgaggaagtgcctgcggcctgaggagctgaccaaccagatgaaccagatcgagatctccatgcagcacgagcagctggaggagagcttccaggagctggtggaggactaccgccgggtgattgagcggctggcccaggagtag

SEQ ID NO: 19924 - DNA, 1005 bp, synthetic construct
  misc_feature 1..1005: note = Description of Artificial Sequence: Synthetic coding sequence
  source 1..1005: mol_type = other DNA
atgttccgggtggagtatgccagcaaggtggatgagaactttgactgtgtggaggctgatgatgtggagggcaagatccggcagatcatccccccaggcttctgcaccaacaccaatgacttcctgagcctgctggagaaggaggtggacttcaagcccttcggcaccctgctgcacacctacagcgtgctgagccccactggaggagagaacttcaccttccagatctacaaggctgacatgacctgccggggcttccgggagtaccacgagcggctgcagaccttcctgatgtggttcattgaaacagccagcttcattgatgtggatgatgagcgctggcactacttcctggtgtttgagaagtacaacaaggatggagccaccctgtttgccaccgtgggctacatgacagtgtacaactactacgtgtacccagacaagacccggccccgggtgtcccagatgctgatcctgacccccttccagggccagggccatggagcccagctgctggagaccgtgcaccgctactacacagagttccccaccgtgctggacatcacagctgaggaccccagcaagagctatgtgaagctgcgggactttgtgctggtgaagctgtgccaggacctgccctgcttcagccgggagaagctgatgcagggcttcaatgaagacatggccatcgaggcccagcagaagttcaagatcaacaagcagcacgcccggcgggtgtatgagatcctgcggctgctggtgacagacatgtctgatgctgagcagtaccgcagctaccgcctggacatcaagaggaggctcatcagcccctacaagaagaagcagagggacctggccaagatgaggaagtgcctgcggcctgaggagctgaccaaccagatgaaccagatcgagatctccatgcagcacgagcagctggaggagagcttccaggagctggtggaggactacagaagagtcatcgagcggctggcccaggagtag

SEQ ID NO: 19925 - DNA, 870 bp, synthetic construct
  misc_feature 1..870: note = Description of Artificial Sequence: Synthetic coding sequence
  source 1..870: mol_type = other DNA
atgacagtgtccttccacaagtacggggagtacttccctggcactggagacctgcgggacattggagctgggaagggcaagtactatgctgtgaactaccccctgagagatggcattgatgatgagagctatgaggccatcttcaagcctgtgatgagcaaggtgatggagatgttccagcccagcgctgtggtgctgcagtgtggcagtgacagcctgagcggggaccggctgggctgcttcaacctgaccatcaagggccacgccaagtgtgtggagtttgtgaagagcttcaacctgcccatgctgatgctgggcggcggcggctacaccatcagaaatgtggcccgctgctggacctatgaaacagctgtggccctggacacagagatccccaatgagctgccctacaatgactactttgagtacttcggccctgacttcaagctgcacatcagccccagcaacatgaccaaccagaacaccaatgagtacctggagaagatcaagcagaggctgtttgagaacctgaggatgctgccccacgcccctggggtgcagatgcaggccatcccagaagatgccatccctgaggagagcggagatgaagatgaagatgatcctgacaagaggatcagcatctgcagcagtgacaagagaattgcctgtgaggaggagttcagtgacagcgaggaggagggggagggcggcaggaagaacagcagcaacttcaagaaggccaagagggtgaagacagaagatgagaaggagaaggaccctgaggagaagaaggaggtgacagaggaggagaagaccaaggaggagaagccagaggccaagggcgtgaaggaggaggtgaagctggcctag

SEQ ID NO: 19926 - DNA, 1449 bp, synthetic construct
  misc_feature 1..1449: note = Description of Artificial Sequence: Synthetic coding sequence
  source 1..1449: mol_type = other DNA
atggcccagacccagggcaccaggaggaaggtgtgctactactatgatggagatgtgggcaactactactacggccagggccaccccatgaagccccaccgcatccgcatgacccacaacctgctgctgaactacggcctgtacaggaagatggagatctaccggccccacaaggccaatgctgaggagatgaccaagtaccacagtgatgactacatcaagttcctgcggagcatccggccagacaacatgtctgagtacagcaagcagatgcagcgcttcaacgtgggggaggactgccctgtgtttgatggcctgtttgagttctgccagctgagcactggaggctctgtggccagcgctgtgaagctgaacaagcagcagacagacattgctgtgaactgggccggcggcctgcaccacgccaagaagtctgaggccagcggcttctgctacgtgaatgacatcgtgctggccatcctggagctgctgaagtaccaccagagggtgctgtacattgatattgacatccaccacggagatggagtggaggaggccttctacaccacagacagagtgatgacagtgtccttccacaagtatggagagtacttccctggcaccggggacctgcgggacatcggggccggcaagggcaagtactatgctgtgaactaccccctgagagatggcattgatgatgagagctatgaggccatcttcaagcctgtgatgagcaaggtgatggagatgttccagcccagcgctgtggtgctgcagtgtggcagtgacagcctgagcggggaccggctgggctgcttcaacctgaccatcaagggccacgccaagtgtgtggagtttgtgaagagcttcaacctgcccatgctgatgctgggcggcggcggctacaccatcagaaatgtggcccgctgctggacctatgaaacagctgtggccctggacacagagatccccaatgagctgccctacaatgactactttgagtactttggaccagacttcaagctgcacatcagccccagcaacatgaccaaccagaacaccaatgagtacctggagaagatcaagcagaggctgtttgagaacctgaggatgctgccccacgcccctggggtgcagatgcaggccatcccagaagatgccatccctgaggagagcggagatgaagatgaagatgatcctgacaagaggatcagcatctgcagcagtgacaagagaattgcctgtgaggaggagttcagtgacagcgaggaggagggggagggcggcaggaagaacagcagcaacttcaagaaggccaagagggtgaagacagaagatgagaaggagaaggaccctgaggagaagaaggaggtgacagaggaggagaagaccaaggaggagaagccagaggccaagggcgtgaaggaggaggtgaagctggcctag

SEQ ID NO: 19927 - DNA, 636 bp, synthetic construct
  misc_feature 1..636: note = Description of Artificial Sequence: Synthetic coding sequence
  source 1..636: mol_type = other DNA
atggcccagacccagggcaccaggaggaaggtgtgctactactatgatggagatgtgggcaactactactacggccagggccaccccatgaagccccaccgcatccgcatgacccacaacctgctgctgaactacggcctgtacaggaagatggagatctaccggccccacaaggccaatgctgaggagatgaccaagtaccacagtgatgactacatcaagttcctgcggagcatccggccagacaacatgtctgagtacagcaagcagatgcagaggagcagcgctgtgaagctgaacaagcagcagacagacattgctgtgaactgggccggcggcctgcaccacgccaagaagtctgaggccagcggcttctgctacgtgaatgacatcgtgctggccatcctggagctgctgaagtaccaccagagggtgctgtacatcgacatcgacatccaccacggagatggagtggaggaggccttctacaccacagacagagtgatgacagtgtccttccacaagtacggggagtacttccctggcactggagacctgcgggacattggagctgggaagggcaagtactatgctgtgaactaccccctgagagatggcattgatgatgagagctag

SEQ ID NO: 19928 - DNA, 1044 bp, synthetic construct
  misc_feature 1..1044: note = Description of Artificial Sequence: Synthetic coding sequence
  source 1..1044: mol_type = other DNA
atgctgcacaccacccagctgtaccagcacgtgcctgagacccgctggcccatcgtgtacagcccccgctacaacatcaccttcatgggcctggagaagctgcacccctttgatgctgggaagtggggcaaggtgatcaacttcctgaaggaggagaagctgctgagtgacagcatgctggtggaggcccgggaggccagcgaggaggacctgctggtggtgcacacccggcgctacctgaatgagctgaagtggagctttgctgtggccaccatcacagagatcccccctgtgatcttcctgcccaacttcctggtgcagaggaaggtgctgcggcccctgcggacccagacaggaggcaccatcatggccggcaagctggccgtggagcggggctgggccatcaacgtgggcggcggcttccaccactgcagcagtgacagaggaggcggcttctgtgcctatgctgacatcaccctggccatcaagttcctgtttgagcgggtggagggcatcagccgggccaccatcatcgacctggatgcccaccagggcaatggccacgagcgggacttcatggatgacaagagggtgtacatcatggatgtgtacaacagacacatctacccaggggacagatttgccaagcaggccatccggaggaaggtggagctggagtggggcacagaagatgatgagtacctggacaaggtggagaggaacatcaagaagagcctgcaggagcacctgcctgatgtggtggtgtacaatgccggcacagacatcctggagggggaccggctgggcggcctgagcatcagccctgctggcatcgtgaagagagatgagctggtgttcaggatggtgcggggccggcgggtgcccatcctgatggtgaccagcggcggctaccagaagaggacagcccgcatcatcgctgacagcatcctgaacctgtttggcctgggcctgattggccctgagagccccagcgtgtctgcccagaacagcgacacccccctgctgcccccagctgtgccctag

SEQ ID NO: 19929 - DNA, 711 bp, synthetic construct
  misc_feature 1..711: note = Description of Artificial Sequence: Synthetic coding sequence
  source 1..711: mol_type = other DNA
atgggcctggagaagctgcacccctttgatgctgggaagtggggcaaggtgatcaacttcctgaaggaggagaagctgctgagtgacagcatgctggtggaggcccgggaggccagcgaggaggacctgctggtggtgcacacccggcgctacctgaatgagctgaagtggagctttgctgtggccaccatcacagagatcccccctgtgatcttcctgcccaacttcctggtgcagaggaaggtgctgcggcccctgcggacccagacaggaggcaccatcatgggcgtggccagcaccacagccccagccaccgtggccggggcctctgtgcccatgaggaccagccgcagccccagcagcttctgcctgtctgtgtggagggccagccctggcctgcccagcctcatcctgatgcccatccgggccatgggcatgtctgagacctcctggaccacctctgtgtgcacctcctggatgagcaccacagccaccagcacccagggcacagccctgcccagccggcccagcggcggccgctggagctggagcggggcccagaggatgatgagcacctggatccgctggaggggcaccagcaggaaccccagccgcagcacctgccccacctggtggtacaccatgcaggcccccaccagcagccggggcacagccctgggcggctgccccagcgcccagagggccagctag

SEQ ID NO: 19930 - DNA, 960 bp, synthetic construct
  misc_feature 1..960: note = Description of Artificial Sequence: Synthetic coding sequence
  source 1..960: mol_type = other DNA
atgggcctggagaagctgcacccctttgatgctgggaagtggggcaaggtgatcaacttcctgaaggaggagaagctgctgagtgacagcatgctggtggaggcccgggaggccagcgaggaggacctgctggtggtgcacacccggcgctacctgaatgagctgaagtggagctttgctgtggccaccatcacagagatcccccctgtgatcttcctgcccaacttcctggtgcagaggaaggtgctgcggcccctgcggacccagacaggaggcaccatcatggccggcaagctggccgtggagcggggctgggccatcaacgtgggcggcggcttccaccactgcagcagtgacagaggaggcggcttctgtgcctatgctgacatcaccctggccatcaagttcctgtttgagcgggtggagggcatcagccgggccaccatcatcgacctggatgcccaccagggcaatggccacgagcgggacttcatggatgacaagagggtgtacatcatggatgtgtacaacagacacatctacccaggggacagatttgccaagcaggccatccggaggaaggtggagctggagtggggcacagaagatgatgagtacctggacaaggtggagaggaacatcaagaagagcctgcaggagcacctgcctgatgtggtggtgtacaatgccggcacagacatcctggagggggaccggctgggcggcctgagcatcagccctgctggcatcgtgaagagagatgagctggtgttcaggatggtgcggggccggcgggtgcccatcctgatggtgaccagcggcggctaccagaagaggacagcccgcatcatcgctgacagcatcctgaacctgtttggcctgggcctgattggccctgagagccccagcgtgtctgcccagaacagcgacacccccctgctgcccccagctgtgccctag

SEQ ID NO: 19931 - DNA, 468 bp, synthetic construct
  misc_feature 1..468: note = Description of Artificial Sequence: Synthetic coding sequence
  source 1..468: mol_type = other DNA
atggatgacaagagggtgtacatcatggatgtgtacaacagacacatctacccaggggacagatttgccaagcaggccatccggaggaaggtggagctggagtggggcacagaagatgatgagtacctggacaaggtggagaggaacatcaagaagagcctgcaggagcacctgcctgatgtggtggtgtacaatgccggcacagacatcctggagggggaccggctgggcggcctgagcatcagccctgctggcatcgtgaagagagatgagctggtgttcaggatggtgcggggccggcgggtgcccatcctgatggtgaccagcggcggctaccagaagaggacagcccgcatcatcgctgacagcatcctgaacctgtttggcctgggcctgattggccctgagagccccagcgtgtctgcccagaacagcgacacccccctgctgcccccagctgtgccctag

SEQ ID NO: 19932 - DNA, 891 bp, synthetic construct
  misc_feature 1..891: note = Description of Artificial Sequence: Synthetic coding sequence
  source 1..891: mol_type = other DNA
atgggcctggagaagctgcacccctttgatgctgggaagtggggcaaggtgatcaacttcctgaaggaggagaagctgctgagtgacagcatgctggtggaggcccgggaggccagcgaggaggacctgctggtggtgcacacccggcgctacctgaatgagctgaagaggaaggtgctgcggcccctgcggacccagacaggaggcaccatcatggccggcaagctggccgtggagcggggctgggccatcaacgtgggcggcggcttccaccactgcagcagtgaccggggcggcggcttctgtgcctatgctgacatcaccctggccatcaagttcctgtttgagcgggtggagggcatcagccgggccaccatcatcgacctggatgcccaccagggcaatggacatgagcgggacttcatggatgacaagagggtgtacatcatggatgtgtacaacagacacatctacccaggggacagatttgccaagcaggccatccggaggaaggtggagctggagtggggcacagaagatgatgagtacctggacaaggtggagaggaacatcaagaagagcctgcaggagcacctgcctgatgtggtggtgtacaatgccggcacagacatcctggagggggaccggctgggcggcctgagcatcagccctgctggcatcgtgaagagagatgagctggtgttcaggatggtgcggggcagaagagtgcccatcctgatggtgaccagcggcggctaccagaagaggacagcccgcatcatcgctgacagcatcctgaacctgtttggcctgggcctcatcggccctgagagccccagcgtgtctgcccagaacagcgacacccccctgctgcccccagctgtgccctag

SEQ ID NO: 19933 - DNA, 1377 bp, synthetic construct
  misc_feature 1..1377: note = Description of Artificial Sequence: Synthetic coding sequence
  source 1..1377: mol_type = other DNA
atgaagccccaccgcatccgcatgacccacaacctgctgctgaactacggcctgtacaggaagatggagatctaccggccccacaaggccacagctgaggagatgaccaagtaccacagtgatgagtacatcaagttcctgcggagcatccggccagacaacatgtctgagtacagcaagcagatgcagcgcttcaacgtgggggaggactgccctgtgtttgatggcctgtttgagttctgccagctgagcactggaggctctgtggccggggctgtgaagctgaaccggcagcagacagacatggctgtgaactgggccggcggcctgcaccacgccaagaagtctgaggccagcggcttctgctacgtgaatgacatcgtgctggccatcctggagctgctgaagtaccaccagagggtgctgtacatcgacatcgacatccaccacggagatggagtggaggaggccttctacaccacagacagagtgatgacagtgtccttccacaagtacggggagtacttccctggcactggagacctgcgggacattggagctgggaagggcaagtactatgctgtgaacttccccatgagagatggcattgatgatgagagctatggccagatcttcaagcccatcatcagcaaggtgatggagatgtaccagcccagcgctgtggtgctgcagtgtggggctgacagcctgagcggggaccggctgggctgcttcaacctgactgtgaagggccacgccaagtgtgtggaggtggtgaagaccttcaacctgcccctgctgatgctgggcggcggcggctacaccatcagaaatgtggcccgctgctggacctatgaaacagctgtggccctggactgtgagatccccaatgagctgccctacaatgactactttgagtacttcggccctgacttcaagctgcacatcagccccagcaacatgaccaaccagaacaccccagagtacatggagaagatcaagcagaggctgtttgagaacctgaggatgctgccccacgcccctggggtgcagatgcaggccatcccagaagatgctgtgcatgaggacagcggagatgaagatggagaggaccctgacaagaggatcagcatccgggccagtgacaagagaattgcctgtgatgaggagttcagtgacagtgaagatgaaggagagggcggcagaagaaatgtggccgaccacaagaagggggccaagaaggccagaattgaggaggacaagaaggagacagaggacaagaagacagatgtgaaggaggaggacaagagcaaggacaacagcggggagaagacagacaccaagggcaccaagtctgagcagctgagcaacccctag

SEQ ID NO: 19934 - DNA, 1749 bp, synthetic construct
  misc_feature 1..1749: note = Description of Artificial Sequence: Synthetic coding sequence
  source 1..1749: mol_type = other DNA
atgaggagccccccctgtggcctgctgcgctggtttggaggccccctgctggcctcctggtgccgctgccacctgcgcttccgggccttcggcaccagcgctggctggtaccgggccttccctgcccccccacccctgctgcccccagcctgccccagcccccgggactaccggccccacgtgtccctgagccccttcctgagccggcccagcagaggaggcagcagcagcagcagcagcagcagaagaagaagccctgtggccgctgtggccggggagcccatggcctacagccagggcggcggcaagaagaaggtgtgctactactatgatggagacatcggcaactactactacggccagggccaccccatgaagccccaccgcatccgcatgacccacaacctgctgctgaactacggcctgtacaggaagatggagatctaccggccccacaaggccacagctgaggagatgaccaagtaccacagtgatgagtacatcaagttcctgcggagcatccggccagacaacatgtctgagtacagcaagcagatgcagcgcttcaacgtgggggaggactgccctgtgtttgatggcctgtttgagttctgccagctgagcactggaggctctgtggccggggctgtgaagctgaaccggcagcagacagacatggctgtgaactgggccggcggcctgcaccacgccaagaagtctgaggccagcggcttctgctacgtgaatgacatcgtgctggccatcctggagctgctgaagtaccaccagagggtgctgtacatcgacatcgacatccaccacggagatggagtggaggaggccttctacaccacagacagagtgatgacagtgtccttccacaagtacggggagtacttccctggcactggagacctgcgggacattggagctgggaagggcaagtactatgctgtgaacttccccatgagagatggcattgatgatgagagctatggccagatcttcaagcccatcatcagcaaggtgatggagatgtaccagcccagcgctgtggtgctgcagtgtggggctgacagcctgagcggggaccggctgggctgcttcaacctgactgtgaagggccacgccaagtgtgtggaggtggtgaagaccttcaacctgcccctgctgatgctgggcggcggcggctacaccatcagaaatgtggcccgctgctggacctatgaaacagctgtggccctggactgtgagatccccaatgagctgccctacaatgactactttgagtacttcggccctgacttcaagctgcacatcagccccagcaacatgaccaaccagaacaccccagagtacatggagaagatcaagcagaggctgtttgagaacctgaggatgctgccccacgcccctggggtgcagatgcaggccatcccagaagatgctgtgcatgaggacagcggagatgaagatggagaggaccctgacaagaggatcagcatccgggccagtgacaagagaattgcctgtgatgaggagttcagtgacagtgaagatgaaggagagggcggcagaagaaatgtggccgaccacaagaagggggccaagaaggccagaattgaggaggacaagaaggagacagaggacaagaagacagatgtgaaggaggaggacaagagcaaggacaacagcggggagaagacagacaccaagggcaccaagtctgagcagctgagcaacccctag

SEQ ID NO: 19935 - DNA, 1467 bp, synthetic construct
  misc_feature 1..1467: note = Description of Artificial Sequence: Synthetic coding sequence
  source 1..1467: mol_type = other DNA
atggcctacagccagggcggcggcaagaagaaggtgtgctactactatgatggagacatcggcaactactactacggccagggccaccccatgaagccccaccgcatccgcatgacccacaacctgctgctgaactacggcctgtacaggaagatggagatctaccggccccacaaggccacagctgaggagatgaccaagtaccacagtgatgagtacatcaagttcctgcggagcatccggccagacaacatgtctgagtacagcaagcagatgcagcgcttcaacgtgggggaggactgccctgtgtttgatggcctgtttgagttctgccagctgagcactggaggctctgtggccggggctgtgaagctgaaccggcagcagacagacatggctgtgaactgggccggcggcctgcaccacgccaagaagtctgaggccagcggcttctgctacgtgaatgacatcgtgctggccatcctggagctgctgaagtaccaccagagggtgctgtacatcgacatcgacatccaccacggagatggagtggaggaggccttctacaccacagacagagtgatgacagtgtccttccacaagtacggggagtacttccctggcactggagacctgcgggacattggagctgggaagggcaagtactatgctgtgaacttccccatgagagatggcattgatgatgagagctatggccagatcttcaagcccatcatcagcaaggtgatggagatgtaccagcccagcgctgtggtgctgcagtgtggggctgacagcctgagcggggaccggctgggctgcttcaacctgactgtgaagggccacgccaagtgtgtggaggtggtgaagaccttcaacctgcccctgctgatgctgggcggcggcggctacaccatcagaaatgtggcccgctgctggacctatgaaacagctgtggccctggactgtgagatccccaatgagctgccctacaatgactactttgagtacttcggccctgacttcaagctgcacatcagccccagcaacatgaccaaccagaacaccccagagtacatggagaagatcaagcagaggctgtttgagaacctgaggatgctgccccacgcccctggggtgcagatgcaggccatcccagaagatgctgtgcatgaggacagcggagatgaagatggagaggaccctgacaagaggatcagcatccgggccagtgacaagagaattgcctgtgatgaggagttcagtgacagtgaagatgaaggagagggcggcagaagaaatgtggccgaccacaagaagggggccaagaaggccagaattgaggaggacaagaaggagacagaggacaagaagacagatgtgaaggaggaggacaagagcaaggacaacagcggggagaagacagacaccaagggcaccaagtctgagcagctgagcaacccctag

SEQ ID NO: 19936 - DNA, 1377 bp, synthetic construct; identical to SEQ ID NO: 19933
  misc_feature 1..1377: note = Description of Artificial Sequence: Synthetic coding sequence
  source 1..1377: mol_type = other DNA

SEQ ID NO: 19937 - DNA, 1287 bp, synthetic construct
  misc_feature 1..1287: note = Description of Artificial Sequence: Synthetic coding sequence
  source 1..1287: mol_type = other DNA
atggccaagacagtggcctacttctatgaccctgatgtgggcaacttccactacggggccggccaccccatgaagccccaccggctggccctgacccacagcctggtgctgcactacggcctgtacaagaagatgattgtgttcaagccctaccaggccagccagcacgacatgtgccgcttccacagcgaggactacatcgacttcctgcagagggtgagccccaccaacatgcagggcttcaccaagagcctgaatgccttcaacgtgggagatgactgccctgtgtttcctggcctgtttgagttctgcagccgctacaccggggccagcctgcagggcgccacccagctgaacaacaagatctgtgacatcgccatcaactgggccggcggcctgcaccacgccaagaagtttgaggccagcggcttctgctacgtgaatgacatcgtcatcggcatcctggagctgctgaagtaccacccccgggtgctgtacattgatattgacatccaccacggagatggagtgcaggaggccttctacctgacagacagagtgatgacagtgtccttccacaagtatggcaactacttcttccctggcactggagacatgtatgaggtgggcgctgagagcggccgctactactgcctgaatgtgcccctgagagatggcattgatgaccagagctacaagcacctgttccagcccgtcatcaaccaggtggtggacttctaccagcccacctgcatcgtgctgcagtgtggggctgacagcctgggctgtgaccggctgggctgcttcaacctgagcatccggggccacggggagtgtgtggagtatgtgaagagcttcaacatccccctgctggtgctgggcggcggcggctacacagtgagaaatgtggcccgctgctggacctatgagaccagcctgctggtggaggaggccatcagcgaggagctgccctacagcgagtactttgagtactttgccccagacttcaccctgcacccagatgtgtccaccagaattgagaaccagaacagccggcagtacctggaccagatccggcagaccatctttgagaacctgaagatgctgaaccacgcccccagcgtgcagatccatgatgtgcctgctgacctgctgacctatgacagaacagatgaagcagatgctgaggagcggggccctgaggagaactacagcaggcctgaggccccaaatgagttctatgatggagaccatgacaatgacaaggagagtgatgtggagatctag

SEQ ID NO: 19938 - DNA, 3255 bp, synthetic construct
  misc_feature 1..3255: note = Description of Artificial Sequence: Synthetic coding sequence
  source 1..3255: mol_type = other DNA
atgagcagccagagccacccagatggcctgagcggccgggaccagcctgtggagctgctgaacccagcccgggtgaaccacatgcccagcacagtggatgtggccacagccctgcccctgcaggtggcccccagcgctgtgcccatggacctgcggctggaccaccagttcagcctgcctgtggccgagcccgccctgcgggagcagcagctgcagcaggagctgctggccctgaagcagaagcagcagatccagaggcagatcctgattgctgagttccagaggcagcacgagcagctgagccggcagcacgaggcccagctgcacgagcacatcaagcagcagcaggagatgctggccatgaagcaccagcaggagctgctggagcaccagaggaagctggagcggcaccggcaggagcaggagctggagaagcagcaccgggagcagaagctgcagcagctgaagaacaaggagaagggcaaggagagcgctgtggccagcacagaggtgaagatgaagctgcaggagtttgtgctgaacaagaagaaggccctggcccacaggaacctgaaccactgcatcagcagtgacccccgctactggtacggcaagacccagcacagcagcctggaccagagcagccccccccagagcggcgtgtccaccagctacaaccaccctgtgctgggcatgtatgatgccaaggatgacttccccctgaggaagacagccagcgagcccaacctgaagctgcggagccggctgaagcagaaggtggccgagaggaggagcagccccctgctgcggaggaaggatggccctgtggtgacagccctgaagaagaggcccctggatgtgacagacagcgcctgcagcagcgcccctggcagcggccccagcagccccaacaacagcagcggctctgtgtctgcagaaaatggcatcgccccagctgtgcccagcatcccagctgagaccagcctggcccaccggctggtggcccgggagggcagcgctgcccccctgcccctgtacaccagccccagcctgcccaacatcaccctgggcctgcctgccaccggccccagcgctggaacagctggccagcaggatgctgagcggctgaccctgcctgccctgcagcagaggctgagcctcttccctggcacccacctgaccccctacctgagcaccagccccctggagagagatggaggagctgcccacagccccctgctgcagcacatggtgctgctggagcagcccccagcccaggcccccctggtgacaggcctgggcgccctgcccctgcacgcccagagcctggtgggcgctgacagagtgagccccagcatccacaagctgcggcagcaccggcccctgggccgcacccagagcgcccccctgccccagaatgcccaggccctgcagcacctggtgatccagcagcagcaccagcagttcctggagaagcacaagcagcagttccagcagcagcagctgcagatgaacaagatcatccccaagcccagcgagcccgcccggcagcctgagagccaccctgaggagacagaggaggagctgcgggagcaccaggccctgctggatgagccctacctggaccggctgcccggccagaaggaggcccacgcccaggccggcgtgcaggtgaagcaggagcccattgaaagtgatgaggaggaggccgagcccccccgggaggtggagcccggccagaggcagcccagcgagcaggagctgctcttccggcagcaggccctgctgctggagcagcagaggatccaccagctgaggaactaccaggcctccatggaggccgccggcatccctgtgtcctttggaggccaccggcccctgagccgggcccagagcagccctgccagcgccaccttccctgtgtctgtgcaggagccccccaccaagccccgcttcaccaccggcctggtgtatgacaccctgatgctgaagcaccagtgcacctgtggcagcagcagcagccaccctgagcacgccggccgcatccagagcatctggagccggctgcaggagaccggcctgcggggcaaatgtgagtgcatccggggcaggaaggccaccctggaggagctgcagacagtgcacagcgaggcccacaccctgctgtatggcaccaaccccctgaaccggcagaagctggacagcaagaagctgctgggcagcctggcctctgtgtttgtgcggctgccctgtggcggcgtgggcgtggacagcgacaccatctggaatgaggtgcacagcgctggggccgcccggctggccgtgggctgtgtggtggagctggtgttcaaggtggccactggagagctgaagaatggatttgctgtggtgcggcccccaggccaccacgccgaggagagcacccccatgggcttctgctacttcaacagcgtggccgtggccgccaagctgctgcagcagaggctgtctgtgtccaagatcctgattgtggactgggatgtgcaccacggcaatggcacccagcaggccttctacagcgaccccagcgtgctgtacatgagcctgcacagatatgatgatggcaacttcttccctggcagcggggccccagatgaggtgggcaccggccctggggtgggcttcaacgtgaacatggccttcaccggcggcctggacccccccatgggagatgctgagtacctggccgccttcagaacagtggtgatgcccatcgccagcgagtttgccccagatgtggtgctggtgagcagcggctttgatgctgtggagggccaccccacccccctgggcggctacaacctgagcgcccgctgcttcggctacctgaccaagcagctgatgggcctggccggcggccgcatcgtgctggccctggagggcggccatgacctgacagccatctgtgatgccagcgaggcctgtgtgtctgccctgctgggcaatgagctggaccccctgcctgagaaggtgctgcagcagaggcccaatgccaatgctgtgcgctccatggagaaggtgatggagatccacagcaagtactggcgctgcctgcagaggaccaccagcacagctggccgcagcctgattgaggcccagacctgtgaaaatgaggaggccgagaccgtgacagccatggccagcctgtctgtgggcgtgaagccagctgagaagaggccagatgaggagcccatggaggaggagccccccctgtag

SEQ ID NO: 19939 - DNA, 1941 bp, synthetic construct
  misc_feature 1..1941: note = Description of Artificial Sequence: Synthetic coding sequence
  source 1..1941: mol_type = other DNA
atgctggccatgaagcaccagcaggagctgctggagcaccagaggaagctggagcggcaccggcaggagcaggagctggagaagcagcaccgggagcagaagctgcagcagctgaagaacaaggagaagggcaaggagagcgctgtggccagcacagaggtgaagatgaagctgcaggagtttgtgctgaacaagaagaaggccctggcccacaggaacctgaaccactgcatcagcagtgacccccgctactggtacggcaagacccagcacagcagcctggaccagagcagccccccccagagcggcgtgtccaccagctacaaccaccctgtgctgggcatgtatgatgccaaggatgacttccccctgaggaagacagccagcgagcccaacctgaagctgcggagccggctgaagcagaaggtggccgagcggcgcagcagccccctgctgcggaggaaggatggccctgtggtgacagccctgaagaagaggcccctggatgtgacagattctgcctgcagcagcgcccctggcagcggccccagcagccccaacaacagcagcggctctgtgtctgcagaaaatggaattgccccagctgtgcccagcatcccagctgagaccagcctggcccaccggctggtggcccgggagggcagcgctgcccccctgcccctgtacaccagccccagcctgcccaacatcaccctgggcctgcctgccaccggccccagcgctggaacagctggccagcaggatgctgagcggctgaccctgcctgccctgcagcagaggctgagcctcttccctggcacccacctgaccccctacctgagcaccagccccctggagagagatggaggagctgcccacagccccctgctgcagcacatggtgctgctggagcagcccccagcccaggcccccctggtgacaggcctgggcgccctgcccctgcacgcccagagcctggtgggcgctgacagagtgagccccagcatccacaagctgcggcagcaccggcccctgggccgcacccagagcgcccccctgccccagaatgcccaggccctgcagcacctggtgatccagcagcagcaccagcagttcctggagaagcacaagcagcagttccagcagcagcagctgcagatgaacaagatcatccccaagcccagcgagcccgcccggcagcctgagagccaccctgaggagacagaggaggagctgcgggagcaccaggccctgctggatgagccctacctggaccggctgcccggccagaaggaggcccacgcccaggccggcgtgcaggtgaagcaggagcccatcgagagtgatgaggaggaggccgagcccccccgggaggtggagcccggccagaggcagcccagcgagcaggagctgctcttccggcagcaggccctgctgctggagcagcagaggatccaccagctgaggaactaccaggcctccatggaggccgccggcatccctgtgtcctttggaggccaccggcccctgagccgggcccagagcagccctgccagcgccaccttccctgtgtctgtgcaggagccccccaccaagccccgcttcaccaccggcctggtgtatgacaccctgatgctgaagcaccagtgcacctgtggcagcagcagcagccaccctgagcacgccggccgcatccagagcatctggagccggctgcaggagaccggcctgcggggcaaatgtgagtgcatccggggcaggaaggccaccctggaggagctgcagacagtgcacagcgaggcccacaccctgctgtatggcaccaaccccctgaaccggcagaagctggacagcaagaagctgctgggcagcctggcctctgtgtttgtgcggctgccctgtggcggcgtgggcgtgtctgtgcccctgatgtgcaagtag

SEQ ID NO: 19940 - DNA, 2919 bp, synthetic construct
  misc_feature 1..2919: note = Description of Artificial Sequence: Synthetic coding sequence
  source 1..2919: mol_type = other DNA
atgctggccatgaagcaccagcaggagctgctggagcaccagaggaagctggagcggcaccggcaggagcaggagctggagaagcagcaccgggagcagaagctgcagcagctgaagaacaaggagaagggcaaggagagcgctgtggccagcacagaggtgaagatgaagctgcaggagtttgtgctgaacaagaagaaggccctggcccacaggaacctgaaccactgcatcagcagtgacccccgctactggtacggcaagacccagcacagcagcctggaccagagcagccccccccagagcggcgtgtccaccagctacaaccaccctgtgctgggcatgtatgatgccaaggatgacttccccctgaggaagacagccagcgagcccaacctgaagctgcggagccggctgaagcagaaggtggccgagcggcgcagcagccccctgctgcggaggaaggatggccctgtggtgacagccctgaagaagaggcccctggatgtgacagattctgcctgcagcagcgcccctggcagcggccccagcagccccaacaacagcagcggctctgtgtctgcagaaaatggaattgccccagctgtgcccagcatcccagctgagaccagcctggcccaccggctggtggcccgggagggcagcgctgcccccctgcccctgtacaccagccccagcctgcccaacatcaccctgggcctgcctgccaccggccccagcgctggaacagctggccagcaggatgctgagcggctgaccctgcctgccctgcagcagaggctgagcctcttccctggcacccacctgaccccctacctgagcaccagccccctggagagagatggaggagctgcccacagccccctgctgcagcacatggtgctgctggagcagcccccagcccaggcccccctggtgacagactggtacctgagcggcctgggcgccctgcccctgcacgcccagagcctggtgggcgctgacagagtgagccccagcatccacaagctgcggcagcaccggcccctgggccgcacccagagcgcccccctgccccagaatgcccaggccctgcagcacctggtgatccagcagcagcaccagcagttcctggagaagcacaagcagcagttccagcagcagcagctgcagatgaacaagatcatccccaagcccagcgagcccgcccggcagcctgagagccaccctgaggagacagaggaggagctgcgggagcaccaggccctgctggatgagccctacctggaccggctgcccggccagaaggaggcccacgcccaggccggcgtgcaggtgaagcaggagcccattgaaagtgatgaggaggaggccgagcccccccgggaggtggagcccggccagaggcagcccagcgagcaggagctgctcttccggcagcaggccctgctgctggagcagcagaggatccaccagctgaggaactaccaggcctccatggaggccgccggcatccctgtgtcctttggaggccaccggcccctgagccgggcccagagcagccctgccagcgccaccttccctgtgtctgtgcaggagccccccaccaagccccgcttcaccaccggcctggtgtatgacaccctgatgctgaagcaccagtgcacctgtggcagcagcagcagccaccctgagcacgccggccgcatccagagcatctggagccggctgcaggagaccggcctgcggggcaaatgtgagtgcatccggggcaggaaggccaccctggaggagctgcagacagtgcacagcgaggcccacaccctgctgtatggcaccaaccccctgaaccggcagaagctggacagcaagaagctgctgggcagcctggcctctgtgtttgtgcggctgccctgtggcggcgtgggcgtggacagcgacaccatctggaatgaggtgcacagcgctggggccgcccggctggccgtgggctgtgtggtggagctggtgttcaaggtggccactggagagctgaagaatggatttgctgtggtgcggcccccaggccaccacgccgaggagagcacccccatgggcttctgctacttcaacagcgtggccgtggccgccaagctgctgcagcagaggctgtctgtgtccaagatcctgattgtggactgggatgtgcaccacggcaatggcacccagcaggccttctacagcgaccccagcgtgctgtacatgagcctgcacagatatgatgatggcaacttcttccctggcagcggggccccagatgaggtgggcaccggccctggggtgggcttcaacgtgaacatggccttcaccggcggcctggacccccccatgggagatgctgagtacctggccgccttcagaacagtggtgatgcccatcgccagcgagtttgccccagatgtggtgctggtgagcagcggctttgatgctgtggagggccaccccacccccctgggcggctacaacctgagcgcccgctgcttcggctacctgaccaagcagctgatgggcctggccggcggccgcatcgtgctggccctggagggcggccatgacctgacagccatctgtgatgccagcgaggcctgtgtgtctgccctgctgggcaatgagctggaccccctgcctgagaaggtgctgcagcagaggcccaatgccaatgctgtgcgctccatggagaaggtgatggagatccacagcaagtactggcgctgcctgcagaggaccaccagcacagctggccgcagcctgattgaggcccagacctgtgaaaatgaggaggccgagaccgtgacagccatggccagcctgtctgtgggcgtgaagccagctgagaagaggccagatgaggagcccatggaggaggagccccccctgtag

SEQ ID NO: 19941 - DNA, 2214 bp, synthetic construct
  misc_feature 1..2214: note = Description of Artificial Sequence: Synthetic coding sequence
  source 1..2214: mol_type = other DNA
atggatgtggccacagccctgcccctgcaggtggcccccagcgctgtgcccatggacctgcggctggaccaccagttcagcctgcctgtggccgagcccgccctgcgggagcagcagctgcagcaggagctgctggccctgaagcagaagcagcagatccagaggcagatcctgattgctgagttccagaggcagcacgagcagctgagccggcagcacgaggcccagctgcacgagcacatcaagcagcagcaggagatgctggccatgaagcaccagcaggagctgctggagcaccagaggaagctggagcggcaccggcaggagcaggagctggagaagcagcaccgggagcagaagctgcagcagctgaagaacaaggagaagggcaaggagagcgctgtggccagcacagaggtgaagatgaagctgcaggagtttgtgctgaacaagaagaaggccctggcccacaggaacctgaaccactgcatcagcagtgacccccgctactggtacggcaagacccagcacagcagcctggaccagagcagccccccccagagcggcgtgtccaccagctacaaccaccctgtgctgggcatgtatgatgccaaggatgacttccccctgaggaagacagccagcgagcccaacctgaagctgcggagccggctgaagcagaaggtggccgagcggcgcagcagccccctgctgcggaggaaggatggccctgtggtgacagccctgaagaagaggcccctggatgtgacagattctgcctgcagcagcgcccctggcagcggccccagcagccccaacaacagcagcggctctgtgtctgcagaaaatggaattgccccagctgtgcccagcatcccagctgagaccagcctggcccaccggctggtggcccgggagggcagcgctgcccccctgcccctgtacaccagccccagcctgcccaacatcaccctgggcctgcctgccaccggccccagcgctggaacagctggccagcaggatgctgagcggctgaccctgcctgccctgcagcagaggctgagcctcttccctggcacccacctgaccccctacctgagcaccagccccctggagagagatggaggagctgcccacagccccctgctgcagcacatggtgctgctggagcagcccccagcccaggcccccctggtgacagactggtacctgagcggcctgggcgccctgcccctgcacgcccagagcctggtgggcgctgacagagtgagccccagcatccacaagctgcggcagcaccggcccctgggccgcacccagagcgcccccctgccccagaatgcccaggccctgcagcacctggtgatccagcagcagcaccagcagttcctggagaagcacaagcagcagttccagcagcagcagctgcagatgaacaagatcatccccaagcccagcgagcccgcccggcagcctgagagccaccctgaggagacagaggaggagctgcgggagcaccaggccctgctggatgagccctacctggaccggctgcccggccagaaggaggcccacgcccaggccggcgtgcaggtgaagcaggagcccattgaaagtgatgaggaggaggccgagcccccccgggaggtggagcccggccagaggcagcccagcgagcaggagctgctcttccggcagcaggccctgctgctggagcagcagaggatccaccagctgaggaactaccaggcctccatggaggccgccggcatccctgtgtcctttggaggccaccggcccctgagccgggcccagagcagccctgccagcgccaccttccctgtgtctgtgcaggagccccccaccaagccccgcttcaccaccggcctggtgtatgacaccctgatgctgaagcaccagtgcacctgtggcagcagcagcagccaccctgagcacgccggccgcatccagagcatctggagccggctgcaggagaccggcctgcggggcaaatgtgagtgcatccggggcaggaaggccaccctggaggagctgcagacagtgcacagcgaggcccacaccctgctgtatggcaccaaccccctgaaccggcagaagctggacagcaagaagctgctgggcagcctggcctctgtgtttgtgcggctgccctgtggcggcgtgggcgtgtctgtgcccctgatgtgcaagtag

SEQ ID NO: 19942 - DNA, 2007 bp, synthetic construct
  misc_feature 1..2007: note = Description of Artificial Sequence: Synthetic coding sequence
  source 1..2007: mol_type = other DNA
atggtgctgctggagcagcccccagcccaggcccccctggtgacaggcctgggcgccctgcccctgcacgcccagagcctggtgggcgctgacagagtgagccccagcatccacaagctgcggcagcaccggcccctgggccgcacccagagcgcccccctgccccagaatgcccaggccctgcagcacctggtgatccagcagcagcaccagcagttcctggagaagcacaagcagcagttccagcagcagcagctgcagatgaacaagatcatccccaagcccagcgagcccgcccggcagcctgagagccaccctgaggagacagaggaggagctgcgggagcaccaggccctgctggatgagccctacctggaccggctgcccggccagaaggaggcccacgcccaggccggcgtgcaggtgaagcaggagcccattgaaagtgatgaggaggaggccgagcccccccgggaggtggagcccggccagaggcagcccagcgagcaggagctgctcttccggcagcaggccctgctgctggagcagcagaggatccaccagctgaggaactaccaggcctccatggaggccgccggcatccctgtgtcctttggaggccaccggcccctgagccgggcccagagcagccctgccagcgccaccttccctgtgtctgtgcaggagccccccaccaagccccgcttcaccaccggcctggtgtatgacaccctgatgctgaagcaccagtgcacctgtggcagcagcagcagccaccctgagcacgccggccgcatccagagcatctggagccggctgcaggagaccggcctgcggggcaaatgtgagtgcatccggggcaggaaggccaccctggaggagctgcagacagtgcacagcgaggcccacaccctgctgtatggcaccaaccccctgaaccggcagaagctggacagcaagaagctgctgggcagcctggcctctgtgtttgtgcggctgccctgtggcggcgtgggcgtggacagcgacaccatctggaatgaggtgcacagcgctggggccgcccggctggccgtgggctgtgtggtggagctggtgttcaaggtggccactggagagctgaagaatggatttgctgtggtgcggcccccaggccaccacgccgaggagagcacccccatgggcttctgctacttcaacagcgtggccgtggccgccaagctgctgcagcagaggctgtctgtgtccaagatcctgattgtggactgggatgtgcaccacggcaatggcacccagcaggccttctacagcgaccccagcgtgctgtacatgagcctgcacagatatgatgatggcaacttcttccctggcagcggggccccagatgaggtgggcaccggccctggggtgggcttcaacgtgaacatggccttcaccggcggcctggacccccccatgggagatgctgagtacctggccgccttcagaacagtggtgatgcccatcgccagcgagtttgccccagatgtggtgctggtgagcagcggctttgatgctgtggagggccaccccacccccctgggcggctacaacctgagcgcccgctgcttcggctacctgaccaagcagctgatgggcctggccggcggccgcatcgtgctggccctggagggcggccatgacctgacagccatctgtgatgccagcgaggcctgtgtgtctgccctgctgggcaatgagctggaccccctgcctgagaaggtgctgcagcagaggcccaatgccaatgctgtgcgctccatggagaaggtgatggagatccacagcaagtactggcgctgcctgcagaggaccaccagcacagctggccgcagcctgattgaggcccagacctgtgaaaatgaggaggccgagaccgtgacagccatggccagcctgtctgtgggcgtgaagccagctgagaagaggccagatgaggagcccatggaggaggagccccccctgtag

SEQ ID NO: 19943 - DNA, 90 bp, synthetic construct
  misc_feature 1..90: note = Description of Artificial Sequence: Synthetic coding sequence
  source 1..90: mol_type = other DNA
atgagcagccagagccacccagatggcctgagcggccgggaccagcctgtggagctgctgaacccagcccgggtgaaccacatgccctag

SEQ ID NO: 19944 - DNA, 3648 bp, synthetic construct
  misc_feature 1..3648: note = Description of Artificial Sequence: Synthetic coding sequence
  source 1..3648: mol_type = other DNA
atgaccagcacaggccaggacagcaccaccacccggcagaggaggagccggcagaacccccagagccccccccaggacagctctgtgaccagcaagaggaacatcaagaagggagctgtgcccaggagcatccccaacctggccgaggtgaagaagaagggcaagatgaagaagctgggccaggccatggaggaggacctgattgtgggcctgcagggcatggacctgaacctggaggccgaggccctggccggcaccggcctggtgctggatgagcagctgaatgagttccactgcctgtgggatgacagcttccctgagggccctgagcggctgcacgccatcaaggagcagctgatccaggagggcctgctggacagatgtgtgtccttccaggccaggtttgctgagaaggaggagctgatgctggtgcacagcctggagtacatcgacctgatggagaccacccagtacatgaatgaaggagagctgcgggtgctggccgacacctatgattctgtgtacctgcaccccaacagctacagctgtgcctgcctggccagcggctctgtgctgcggctggtggatgctgtgctgggcgctgagatcagaaatggcatggccatcatccggcccccaggccaccacgcccagcacagcctgatggatggctactgcatgttcaaccacgtggccgtggccgcccgctatgcccagcagaagcaccgcatcagaagagtgctgattgtggactgggatgtgcaccacggccagggcacccagttcacctttgaccaggaccccagcgtgctgtacttcagcatccacagatatgagcagggccgcttctggccccacctgaaggccagcaactggagcaccactggatttggccagggccagggctacaccatcaacgtgccctggaaccaggtgggcatgagagatgctgactacatcgccgccttcctgcacgtgctgctgcctgtggccctggagttccagccccagctggtgctggtggccgccggctttgatgccctgcagggcgaccccaagggggagatggccgccaccccagctggctttgcccagctgacccacctgctgatgggcctggccggcggcaagctgatcctgagcctggagggcggctacaacctgcgggccctggccgagggcgtgtctgccagcctgcacaccctgctgggggacccctgccccatgctggagagccctggggccccctgccgcagcgcccaggcctctgtgtcctgtgccctggaggccctggagcccttctgggaggtgctggtgcgcagcacagagaccgtggagcgggacaacatggaggaggacaacgtggaggagagcgaggaggagggcccctgggagccccctgtgctgcccatcctgacctggcctgtgctgcagagcaggacaggcctggtgtatgaccagaacatgatgaaccactgcaacctgtgggacagccaccaccctgaggtgccccagaggatcctgcgcatcatgtgccgcctggaggagctgggcctggccggccgctgcctgaccctgacccccaggcctgccacagaggccgagctgctgacctgccacagcgcagaatatgtgggccacctgcgggccacagagaagatgaagacccgggagctgcaccgggagagcagcaactttgacagcatctacatctgccccagcacctttgcctgtgcccagctggccactggagctgcctgccgcctggtggaggccgtgctgtctggagaggtgctgaatggagctgctgtggtgcggcccccaggccaccacgccgagcaggatgctgcctgtggcttctgcttcttcaacagcgtggccgtggccgcccggcatgcccagaccatcagcggccacgccctgcgcatcctgattgtggactgggatgtgcaccacggcaatggcacccagcacatgtttgaagatgaccccagcgtgctgtatgtgtccctgcacagatatgaccacggcaccttcttccccatgggagatgagggcgccagcagccagatcggccgggctgctggcaccggcttcaccgtgaatgtggcctggaatggccccaggatgggagatgctgactacctggccgcctggcaccggctggtgctgcccatcgcctatgagttcaaccctgagctggtgctggtgtctgctggctttgatgctgcccggggggaccccctgggcggctgccaggtgtccccagagggctacgcccacctgacccacctgctgatgggcctggccagcggccgcatcatcctgatcctggagggcggctacaacctgaccagcatcagcgagagcatggccgcctgcaccaggagcctgctgggggaccccccacccctgctgaccctgcccaggcctcccctgagcggggccctggccagcatcacagagaccatccaggtgcaccggcgctactggaggagcctgcgggtgatgaaggtggaggaccgggagggccccagcagcagcaagctggtgaccaagaaggccccccagcctgccaagccccggctggccgagaggatgaccacccgggagaagaaggtgctggaggccggcatgggcaaggtgaccagcgccagctttggagaggagagcaccccaggccagaccaacagcgagacagctgtggtggccctgacccaggaccagcccagcgaggccgccactggaggagccaccctggcccagaccatcagcgaggccgccatcggcggggccatgctgggccagaccaccagcgaggaggccgtgggcggggccaccccagaccagaccaccagcgaggagaccgtgggcggggccatcctggaccagaccaccagtgaagatgctgtgggcggggccaccctgggccagaccaccagcgaggaggccgtgggcggggccaccctggcccagaccaccagcgaggccgccatggagggcgccaccctggaccagaccaccagcgaggaggcccctgggggcacagagctgatccagacccccctggccagcagcacagaccaccagaccccacccaccagccctgtgcagggcaccaccccccagatcagccccagcaccctcatcggcagcctgcggaccctggagctgggcagcgagagccagggcgccagcgagagccaggcccctggagaggagaacctgctgggggaggccgccggcggccaggacatggctgacagcatgctgatgcagggcagccggggcctgacagaccaggccatcttctatgctgtgacccccctgccctggtgcccccacctggtggccgtgtgccccatcccagctgctggcctggatgtgacccagccctgtggggactgtggcaccatccaggagaactgggtgtgcctgagctgctaccaggtgtactgcggccgctacatcaatggccacatgctgcagcaccacggcaacagcggccaccccctggtgctgagctacatcgacctgagcgcctggtgctactactgccaggcctacgtgcaccaccaggccctgctggatgtgaagaacatcgcccaccagaacaagtttggagaggacatgccccacccccactag

SEQ ID NO: 19945 - DNA, 633 bp, synthetic construct
  misc_feature 1..633: note = Description of Artificial Sequence: Synthetic coding sequence
  source 1..633: mol_type = other DNA
atgaccagcacaggccaggacagcaccaccacccggcagaggaggagccggcagaacccccagagccccccccaggacagctctgtgaccagcaagaggaacatcaagaagggagctgtgcccaggagcatccccaacctggccgaggtgaagaagaagggcaagatgaagaagctgggccaggccatggaggaggacctgattgtgggcctgcagggcatggacctgaacctggaggccgaggccctggccggcaccggcctggtgctggatgagcagctgaatgagttccactgcctgtgggatgacagcttccctgagggccctgagcggctgcacgccatcaaggagcagctgatccaggagggcctgctggacagatgtgtgtccttccaggccaggtttgctgagaaggaggagctgatgctggtgcacagcctggagtacatcgacctgatggagaccacccagtacatgaatgaaggagagctgcgggtgctggccgacacctatgattctgtgtacctgcaccccaacagctacagctgtgcctgcctggccagcggctctgtgctgcggctggtggatgctgtgctgggcgctgagatcagaaatggcatggccatcatctag

SEQ ID NO: 19946 - DNA, 3648 bp, synthetic construct; identical to SEQ ID NO: 19944
  misc_feature 1..3648: note = Description of Artificial Sequence: Synthetic coding sequence
  source 1..3648: mol_type = other DNA

SEQ ID NO: 19947 - DNA, 633 bp, synthetic construct; identical to SEQ ID NO: 19945
  misc_feature 1..633: note = Description of Artificial Sequence: Synthetic coding sequence
  source 1..633: mol_type = other DNA

SEQ ID NO: 19948 - DNA, 891 bp, synthetic construct
  misc_feature 1..891: note = Description of Artificial Sequence: Synthetic coding sequence
  source 1..891: mol_type = other DNA
atgaagaagctgggccaggccatggaggaggacctgattgtgggcctgcagggcatggacctgaacctggaggccgaggccctggccggcaccggcctggtgctggatgagcagctgaatgagttccactgcctgtgggatgacagcttccctgagggccctgagcggctgcacgccatcaaggagcagctgatccaggagggcctgctggacagatgtgtgtccttccaggccaggtttgctgagaaggaggagctgatgctggtgcacagcctggagtacatcgacctgatggagaccacccagtacatgaatgaaggagagctgcgggtgctggccgacacctatgacagcgtgtacctgcaccccaacagctacagctgtgcctgcctggccagcggctctgtgctgcggctggtggatgctgtgctgggcgctgagatcagaaatggcatggccatcatccggcccccaggccaccacgcccagcacagcctgatggatggctactgcatgttcaaccacgtggccgtggccgcccgctatgcccagcagaagcaccgcatccggcgggtgctgattgtggactgggatgtgcaccacggccagggcacccagttcacctttgaccaggaccccagcgtgctgtacttcagcatccacagatatgagcagggccgcttctggccccacctgaaggccagcaactggagcaccaccggcttcggccagggccagggctacaccatcaacgtgccctggaaccaggtgggcatgagagatgctgactacatcgccgccttcctgcacgtgctgctgcctgtggccctggaggtgctgggcatctggggcgtgctgggcggcggcgtggccctgaaggtgcggctgtag

SEQ ID NO: 19949 - DNA, 429 bp, synthetic construct
  misc_feature 1..429: note = Description of Artificial Sequence: Synthetic coding sequence
  source 1..429: mol_type = other DNA
atgaccagcacaggccaggacagcaccaccacccggcagaggaggagccggcagaacccccagagccccccccaggacagctctgtgaccagcaagaggaacatcaagaagggagctgtgcccaggagcatccccaacctggccgaggtgaagaagaagggcaagatgaagaagctgggccaggccatggaggaggacctgattgtgggcctgcagggcatggacctgaacctggaggccgaggccctggccggcaccggcctggtgctggatgagcagctgaatgagttccactgcctgtgggatgacagcttccctgagggccctgagcggctgcacgccatcaaggagcagctgatccaggagggcctgctggacagatgtgtgtccttccaggccaggtttgctgagaaggaggagctgatgtag

SEQ ID NO: 19950 - DNA, 810 bp, synthetic construct
  misc_feature 1..810: note = Description of Artificial Sequence: Synthetic coding sequence
  source 1..810: mol_type = other DNA
atgaccagcacaggccaggacagcaccaccacccggcagaggaggagccggcagaacccccagagccccccccaggacagctctgtgaccagcaagaggaacatcaagaagggagctgtgcccaggagcatccccaacctggccgaggtgaagaagaagggcaagatgaagaagctgggccaggccatggaggaggacctgattgtgggcctgcagggcatggacctgaacctggaggccgaggccctggccggcaccggcctggtgctggatgagcagctgaatgagttccactgcctgtgggatgacagcttccctgagggccctgagcggctgcacgccatcaaggagcagctgatccaggagggcctgctggacagatgtgtgtccttccaggccaggtttgctgagaaggaggagctgatgctggtgcacagcctggagtacatcgacctgatggagaccacccagtacatgaatgaaggagagctgcgggtgctggccgacacctatgattctgtgtacctgcaccccaacagctacagctgtgcctgcctggccagcggctctgtgctgcggctggtggatgctgtgctgggcgctgagatcagaaatggcatggccatcatccggcccccaggccaccacgcccagcacagcctgatggatggctactgcatgttcaaccacgtggccgtggccgcccgctatgcccagcagaagcaccgcatcagaagagtgctgattgtggactgggatgtgcaccacggccagggcacccagttcacctttgaccaggaccccaggtag

SEQ ID NO: 19951 - DNA, 2454 bp, synthetic construct
  misc_feature 1..2454: note = Description of Artificial Sequence: Synthetic coding sequence
  source 1..2454: mol_type = other DNA
atgaccagcacaggccaggacagcaccaccacccggcagaggaggagccggcagaacccccagagccccccccaggacagctctgtgaccagcaagaggaacatcaagaagggagctgtgcccaggagcatccccaacctggccgaggtgaagaagaagggcaagatgaagaagctgggccaggccatggaggaggacctgattgtgggcctgcagggcatggacctgaacctggaggccgaggccctggccggcaccggcctggtgctggatgagcagctgaatgagttccactgcctgtgggatgacagcttccctgagggccctgagcggctgcacgccatcaaggagcagctgatccaggagggcctgctggacagatgtgtgtccttccaggccaggtttgctgagaaggaggagctgatgctggtgcacagcctggagtacatcgacctgatggagaccacccagtacatgaatgaaggagagctgcgggtgctggccgacacctatgattctgtgtacctgcaccccaacagctacagctgtgcctgcctggccagcggctctgtgctgcggctggtggatgctgtgctgggcgctgagatcagaaatggcatggccatcatccggcccccaggccaccacgcccagcacagcctgatggatggctactgcatgttcaaccacgtggccgtggccgcccgctatgcccagcagaagcaccgcatcagaagagtgctgattgtggactgggatgtgcaccacggccagggcacccagttcacctttgaccaggaccccagcgtgctgtacttcagcatccacagatatgagcagggccgcttctggccccacctgaaggccagcaactggagcaccactggatttggccagggccagggctacaccatcaacgtgccctggaaccaggtgggcatgagagatgctgactacatcgccgccttcctgcacgtgctgctgcctgtggccctggagttccagccccagctggtgctggtggccgccggctttgatgccctgcagggcgaccccaagggggagatggccgccaccccagctggctttgcccagctgacccacctgctgatgggcctggccggcggcaagctgatcctgagcctggagggcggctacaacctgcgggccctggccgagggcgtgtctgccagcctgcacaccctgctgggggacccctgccccatgctggagagccctggggccccctgccgcagcgcccaggcctctgtgtcctgtgccctggaggccctggagcccttctgggaggtgctggtgcgcagcacagagaccgtggagcgggacaacatggaggaggacaacgtggaggagagcgaggaggagggcccctgggagccccctgtgctgcccatcctgacctggcctgtgctgcagagcaggacaggcctggtgtatgaccagaacatgatgaaccactgcaacctgtgggacagccaccaccctgaggtgccccagaggatcctgcgcatcatgtgccgcctggaggagctgggcctggccggccgctgcctgaccctgacccccaggcctgccacagaggccgagctgctgacctgccacagcgcagaatatgtgggccacctgcgggccacagagaagatgaagacccgggagctgcaccgggagagcagcaactttgacagcatctacatctgccccagcacctttgcctgtgcccagctggccactggagctgcctgccgcctggtggaggccgtgctgtctggagaggtgctgaatggagctgctgtggtgcggcccccaggccaccacgccgagcaggatgctgcctgtggcttctgcttcttcaacagcgtggccgtggccgcccggcatgcccagaccatcagcggccacgccctgcgcatcctgattgtggactgggatgtgcaccacggcaatggcacccagcacatgtttgaagatgaccccagcgtgctgtatgtgtccctgcacagatatgaccacggcaccttcttccccatgggagatgagggcgccagcagccagatcggccgggctgctggcaccggcttcaccgtgaatgtggcctggaatggccccaggatgggagatgctgactacctggccgcctggcaccggctggtgctgcccatcgcctatgagttcaaccctgagctggtgctggtgtctgctggctttgatgctgcccggggggaccccctgggcggctgccaggtgtccccagagggctacgcccacctgaccctgcccatcgcctgcctgcggggcaccaccaccccagcccagaaggagcggggggccgcccagtggccccaggagggcgctgacatcatgaggatcaccctggccggcggggagctgaccggccgccacggcaaggtggcctacgtgatcaagtacaagctgtag

SEQ ID NO: 19952 - DNA, 156 bp, synthetic construct
  misc_feature 1..156: note = Description of Artificial Sequence: Synthetic coding sequence
  source 1..156: mol_type = other DNA
atgaccagcacaggccaggacagcaccaccacccggcagaggaggagccggcagaacccccagagccccccccaggacagctctgtgaccagcaagaggaacatcaagaagggagctgtgcccaggagcatccccaacctggccgaggtgaagtag

SEQ ID NO: 19953 - DNA, 516 bp, synthetic construct
  misc_feature 1..516: note = Description of Artificial Sequence: Synthetic coding sequence
  source 1..516: mol_type = other DNA
atgaccagcacaggccaggacagcaccaccacccggcagaggaggagccggcagaacccccagagccccccccaggacagctctgtgaccagcaagaggaacatcaagaagggagctgtgcccaggagcatccccaacctggccgaggtgaagaagaagggcaagatgaagaagctgggccaggccatggaggaggacctgattgtgggcctgcagggcatggacctgaacctggaggccgaggccctggccggcaccggcctggtgctggatgagcagctgaatgagttccactgcctgtgggatgacagcttccctgagggccctgagcggctgcacgccatcaaggagcagctgatccaggagggcctgctggacagatgtgtgtccttccaggccaggtttgctgagaaggaggagctgatgctggtgcacagcctggagtacatcgacctgatggagaccacccagtacatgaatgaaggagagctgcgggtgctggccgacacctactag

SEQ ID NO: 19954 - DNA, 486 bp, synthetic construct
  misc_feature 1..486: note = Description of Artificial Sequence: Synthetic coding sequence
  source 1..486: mol_type = other DNA
atgaccagcacaggccaggacagcaccaccacccggcagaggaggagccggcagaacccccagagccccccccaggacagctctgtgaccagcaagaggaacatcaagaagggagctgtgcccaggagcatccccaacctggccgaggtgaagaagaagggcaagatgaagaagctgggccaggccatggaggaggacctgattgtgggcctgcagggcatggacctgaacctggaggccgaggccctggccggcaccggcctggtgctggatgagcagctgaatgagttccactgcctgtgggatgacagcttccctgagggccctgagcggctgcacgccatcaaggagcagctgatccaggagggcctgctggacagatgtgtgtccttccaggccaggtttgctgagaaggaggagctgatgctggtgcacagcctggagtacatcgacctgatggagaccacccagtacatgaatgaatag

SEQ ID NO: 19955 - DNA, 504 bp, synthetic construct
  misc_feature 1..504: note = Description of Artificial Sequence: Synthetic coding sequence
  source 1..504: mol_type = other DNA
atgaccagcacaggccaggacagcaccaccacccggcagaggaggagccggcagaacccccagagccccccccaggacagctctgtgaccagcaagaggaacatcaagaagggagctgtgcccaggagcatccccaacctggccgaggtgaagaagaagggcaagatgaagaagctgggccaggccatggaggaggacctgattgtgggcctgcagggcatggacctgaacctggaggccgaggccctggccggcaccggcctggtgctggatgagcagctgaatgagttccactgcctgtgggatgacagcttccctgagggccctgagcggctgcacgccatcaaggagcagctgatccaggagggcctgctggacagatgtgtgtccttccaggccaggtttgctgagaaggaggagctgatgctggtgcacagcctggagtacatcgacctgatggagaccacccagtacatgaatgaaggagagctgcgggtgctgtag

SEQ ID NO: 19956 - DNA, 3690 bp, synthetic construct
  misc_feature 1..3690: note = Description of Artificial Sequence: Synthetic coding sequence
  source 1..3690: mol_type = other DNA
atgtctggggccaacagaggccggggccaggccagcagcaccatgaccagcacaggccaggacagcaccaccacccggcagaggaggagccggcagaacccccagagccccccccaggacagctctgtgaccagcaagaggaacatcaagaagggagctgtgcccaggagcatccccaacctggccgaggtgaagaagaagggcaagatgaagaagctgggccaggccatggaggaggacctgattgtgggcctgcagggcatggacctgaacctggaggccgaggccctggccggcaccggcctggtgctggatgagcagctgaatgagttccactgcctgtgggatgacagcttccctgagggccctgagcggctgcacgccatcaaggagcagctgatccaggagggcctgctggacagatgtgtgtccttccaggccaggtttgctgagaaggaggagctgatgctggtgcacagcctggagtacatcgacctgatggagaccacccagtacatgaatgaaggagagctgcgggtgctggccgacacctatgattctgtgtacctgcaccccaacagctacagctgtgcctgcctggccagcggctctgtgctgcggctggtggatgctgtgctgggcgctgagatcagaaatggcatggccatcatccggcccccaggccaccacgcccagcacagcctgatggatggctactgcatgttcaaccacgtggccgtggccgcccgctatgcccagcagaagcaccgcatcagaagagtgctgattgtggactgggatgtgcaccacggccagggcacccagttcacctttgaccaggaccccagcgtgctgtacttcagcatccacagatatgagcagggccgcttctggccccacctgaaggccagcaactggagcaccactggatttggccagggccagggctacaccatcaacgtgccctggaaccaggtgggcatgagagatgctgactacatcgccgccttcctgcacgtgctgctgcctgtggccctggagttccagccccagctggtgctggtggccgccggctttgatgccctgcagggcgaccccaagggggagatggccgccaccccagctggctttgcccagctgacccacctgctgatgggcctggccggcggcaagctgatcctgagcctggagggcggctacaacctgcgggccctggccgagggcgtgtctgccagcctgcacaccctgctgggggacccctgccccatgctggagagccctggggccccctgccgcagcgcccaggcctctgtgtcctgtgccctggaggccctggagcccttctgggaggtgctggtgcgcagcacagagaccgtggagcgggacaacatggaggaggacaacgtggaggagagcgaggaggagggcccctgggagccccctgtgctgcccatcctgacctggcctgtgctgcagagcaggacaggcctggtgtatgaccagaacatgatgaaccactgcaacctgtgggacagccaccaccctgaggtgccccagaggatcctgcgcatcatgtgccgcctggaggagctgggcctggccggccgctgcctgaccctgacccccaggcctgccacagaggccgagctgctgacctgccacagcgcagaatatgtgggccacctgcgggccacagagaagatgaagacccgggagctgcaccgggagagcagcaactttgacagcatctacatctgccccagcacctttgcctgtgcccagctggccactggagctgcctgccgcctggtggaggccgtgctgtctggagaggtgctgaatggagctgctgtggtgcggcccccaggccaccacgccgagcaggatgctgcctgtggcttctgcttcttcaacagcgtggccgtggccgcccggcatgcccagaccatcagcggccacgccctgcgcatcctgattgtggactgggatgtgcaccacggcaatggcacccagcacatgtttgaagatgaccccagcgtgctgtatgtgtccctgcacagatatgaccacggcaccttcttccccatgggagatgagggcgccagcagccagatcggccgggctgctggcaccggcttcaccgtgaatgtggcctggaatggccccaggatgggagatgctgactacctggccgcctggcaccggctggtgctgcccatcgcctatgagttcaaccctgagctggtgctggtgtctgctggctttgatgctgcccggggggaccccctgggcggctgccaggtgtccccagagggctacgcccacctgacccacctgctgatgggcctggccagcggccgcatcatcctgatcctggagggcggctacaacctgaccagcatcagcgagagcatggccgcctgcaccaggagcctgctgggggaccccccacccctgctgaccctgcccaggcctcccctgagcggggccctggccagcatcacagagaccatccaggtgcaccggcgctactggaggagcctgcgggtgatgaaggtggaggaccgggagggccccagcagcagcaagctggtgaccaagaaggccccccagcctgccaagccccggctggccgagaggatgaccacccgggagaagaaggtgctggaggccggcatgggcaaggtgaccagcgccagctttggagaggagagcaccccaggccagaccaacagcgagacagctgtggtggccctgacccaggaccagcccagcgaggccgccactggaggagccaccctggcccagaccatcagcgaggccgccatcggcggggccatgctgggccagaccaccagcgaggaggccgtgggcggggccaccccagaccagaccaccagcgaggagaccgtgggcggggccatcctggaccagaccaccagtgaagatgctgtgggcggggccaccctgggccagaccaccagcgaggaggccgtgggcggggccaccctggcccagaccaccagcgaggccgccatggagggcgccaccctggaccagaccaccagcgaggaggcccctgggggcacagagctgatccagacccccctggccagcagcacagaccaccagaccccacccaccagccctgtgcagggcaccaccccccagatcagccccagcaccctcatcggcagcctgcggaccctggagctgggcagcgagagccagggcgccagcgagagccaggcccctggagaggagaacctgctgggggaggccgccggcggccaggacatggctgacagcatgctgatgcagggcagccggggcctgacagaccaggccatcttctatgctgtgacccccctgccctggtgcccccacctggtggccgtgtgccccatcccagctgctggcctggatgtgacccagccctgtggggactgtggcaccatccaggagaactgggtgtgcctgagctgctaccaggtgtactgcggccgctacatcaatggccacatgctgcagcaccacggcaacagcggccaccccctggtgctgagctacatcgacctgagcgcctggtgctactactgccaggcctacgtgcaccaccaggccctgctggatgtgaagaacatcgcccaccagaacaagtttggagaggacatgccccacccccactag

SEQ ID NO: 19957 - DNA, 2976 bp, synthetic construct
  misc_feature 1..2976: note = Description of Artificial Sequence: Synthetic coding sequence
  source 1..2976: mol_type = other DNA
atgcacagccctggagcagatggcacccaggtgtcccctggggcccactactgcagccccactggagctggctgcccccggccctgtgccgacaccccaggcccccagccccagcccatggacctgcgggtgggccagaggcctcctgtggagcccccacctgagcccaccctgctggccctgcagaggccccagaggctgcaccaccacctgttcctggccggcctgcagcagcagaggtctgtggagcccatgaggctgtccatggacacccccatgcctgagctgcaggtgggcccccaggagcaggagctgcggcagctgctgcacaaggacaagagcaagaggtctgctgtggccagctctgtggtgaagcagaagctggccgaggtgatcctgaagaagcagcaggccgccctggagaggacagtgcaccccaacagccctggcatcccctaccgcaccctggagcccctggagacagaaggagccaccaggtccatgctgagcagcttcctgccccctgtgcccagcctgcccagcgaccccccagagcacttccccctgaggaagacagtgtctgagcccaacctgaagctgcgctacaagcccaagaagagcctggagaggaggaagaaccccctgctgaggaaggagagcgccccacccagcctgcggcggcggcctgctgagaccctgggggacagcagccccagcagcagcagcaccccagccagcggctgcagcagccccaatgacagcgagcacggccccaaccccatcctgggcagcgaggccctgctgggccagaggctgcggctgcaggagacctctgtggccccctttgccctgcccaccgtgtccctgctgcctgccatcaccctgggcctgcctgccccagcccgggctgacagcgacaggaggacccaccccaccctgggcccccggggccccatcctgggcagcccccacacccccctcttcctgccccacggcctggagcctgaggccggcggcaccctgcccagccggctgcagcccatcctgctgctggaccccagcggcagccacgcccccctgctgactgtgcccggcctgggccccctgcccttccactttgcccagagcctgatgaccacagagcggctgagcggcagcggcctgcactggcccctgagcaggaccaggtctgagcccctgcccccatctgccacagcccctcctcctcctggccccatgcagccccggctggagcagctgaagacccacgtgcaggtgatcaagaggtctgccaagcccagcgagaagccccggctgcggcagatccccagcgctgaggacctggagacagatggcggcggccctggccaggtggtggatgatggcctggagcaccgggagctgggccacggccagcctgaggcccggggccctgcccccctgcagcagcacccccaggtgctgctgtgggagcagcagaggctggccggccgcctgccccggggcagcactggagacacagtgctgctgcccctggcccagggcggccaccggcccctgagccgggcccagagcagccctgctgccccagccagcctgagcgcccctgagcccgccagccaggcccgggtgctgagcagcagcgagaccccagcccggaccctgcccttcaccaccggcctcatctatgattctgtgatgctgaagcaccagtgcagctgtggggacaacagccgccaccctgagcacgccggccgcatccagagcatctggagccggctgcaggagcggggcctgcggagccagtgtgagtgcctgcggggcaggaaggccagcctggaggagctgcagagcgtgcacagcgagcggcacgtgctgctgtatggcaccaaccccctgagccggctgaagctggacaacgggaagctggccggcctgctggcccagaggatgtttgtgatgctgccctgtggcggcgtgggcgtggacacagacaccatctggaatgagctgcacagcagcaatgctgcccgctgggccgccggctctgtgacagacctggccttcaaggtggccagccgggagctgaagaatggatttgctgtggtgcggcccccaggccaccacgccgaccacagcacagccatgggcttctgcttcttcaacagcgtggccatcgcctgccggcagctgcagcagcagagcaaggccagcaagatcctgattgtggactgggatgtgcaccacggcaatggcacccagcagaccttctaccaggaccccagcgtgctgtacatcagcctgcacagacatgatgatggcaacttcttccctggcagcggggctgtggatgaggtgggcgccggcagcggggagggcttcaacgtgaatgtggcctgggccggcggcctggacccccccatgggagaccctgagtacctggccgccttcagaattgtggtgatgcccatcgcccgggagttctccccagacctggtgctggtgtctgctggctttgatgctgctgagggccacccagcccccctgggcggctaccacgtgtctgccaagtgcttcggctacatgacccagcagctgatgaacctggccggcggcgctgtggtgctggccctggagggcggccatgacctgacagccatctgtgatgccagcgaggcctgtgtggccgccctgctgggcaacagagtggaccccctgtctgaggagggctggaagcagaagcccaacctgaatgccatccgcagcctggaggccgtcatccgggtgcacagcaagtactggggctgcatgcagaggctggccagctgcccagacagctgggtgccccgggtgcctggagctgacaaggaggaggtggaggccgtgacagccctggccagcctgtctgtgggcatcctggctgaagatcggcccagcgagcagctggtggaggaggaggagcccatgaacctgtag

SEQ ID NO: 19958 - DNA, 2865 bp, synthetic construct
  misc_feature 1..2865: note = Description of Artificial Sequence: Synthetic coding sequence
  source 1..2865: mol_type = other DNA
atgcacagccctggagcagatggcacccaggtgtcccctggggcccactactgcagccccactggagctggctgcccccggccctgtgccgacaccccaggcccccagccccagcccatggacctgcgggtgggccagaggcctcctgtggagcccccacctgagcccaccctgctggccctgcagaggccccagaggctgcaccaccacctgttcctggccggcctgcagcagcagaggtctgtggagcccatgaggctgtccatggacacccccatgcctgagctgcaggtgggcccccaggagcaggagctgcggcagctgctgcacaaggacaagagcaagaggtctgctgtggccagctctgtggtgaagcagaagctggccgaggtgatcctgaagaagcagcaggccgccctggagaggacagtgcaccccaacagccctggcatcccctaccgcaccctggagcccctggagacagaaggagccaccaggtccatgctgagcagcttcctgccccctgtgcccagcctgcccagcgaccccccagagcacttccccctgaggaagacagtgtctgagcccaacctgaagctgcgctacaagcccaagaagagcctggagaggaggaagaaccccctgctgaggaaggagagcgccccacccagcctgcggcggcggcctgctgagaccctgggggacagcagccccagcagcagcagcaccccagccagcggctgcagcagccccaatgacagcgagcacggccccaaccccatcctgggcagcgaggccgacagcgacaggaggacccaccccaccctgggcccccggggccccatcctgggcagcccccacacccccctcttcctgccccacggcctggagcctgaggccggcggcaccctgcccagccggctgcagcccatcctgctgctggaccccagcggcagccacgcccccctgctgactgtgcccggcctgggccccctgcccttccactttgcccagagcctgatgaccacagagcggctgagcggcagcggcctgcactggcccctgagcaggaccaggtctgagcccctgccccccagcgccacagcccctcctcctcctggccccatgcagccccggctggagcagctgaagacccacgtgcaggtgatcaagaggtctgccaagcccagcgagaagccccggctgcggcagatccccagcgctgaggacctggagacagatggcggcggccctggccaggtggtggatgatggcctggagcaccgggagctgggccacggccagcctgaggcccggggccctgcccccctgcagcagcacccccaggtgctgctgtgggagcagcagaggctggccggccgcctgccccggggcagcactggagacacagtgctgctgcccctggcccagggcggccaccggcccctgagccgggcccagagcagccctgctgccccagccagcctgagcgcccctgagcccgccagccaggcccgggtgctgagcagcagcgagaccccagcccggaccctgcccttcaccaccggcctcatctatgacagcgtgatgctgaagcaccagtgcagctgtggggacaacagccgccaccctgagcacgccggccgcatccagagcatctggagccggctgcaggagcggggcctgcggagccagtgtgaatgtctgcggggcaggaaggccagcctggaggagctgcagagcgtgcacagcgagagacatgtgctgctgtatggcaccaaccccctgagccggctgaagctggacaatggcaagctggccggcctgctggcccagaggatgtttgtgatgctgccctgtggcggcgtgggcgtggacacagacaccatctggaatgagctgcacagcagcaatgctgcccgctgggccgccggctctgtgacagacctggccttcaaggtggccagccgggagctgaagaatggatttgctgtggtgcggcccccaggccaccacgccgaccacagcacagccatgggcttctgcttcttcaacagcgtggccatcgcctgccggcagctgcagcagcagagcaaggccagcaagatcctgattgtggactgggatgtgcaccacggcaatggcacccagcagaccttctaccaggaccccagcgtgctgtacatcagcctgcacagacatgatgatggcaacttcttccctggcagcggggctgtggatgaggtgggcgccggcagcggggagggcttcaacgtgaatgtggcctgggccggcggcctggacccccccatgggagaccctgagtacctggccgccttccgcatcgtggtgatgcccatcgcccgggagttctccccagacctggtgctggtgtctgctggctttgatgctgctgagggccacccagcccccctgggcggctaccacgtgtctgccaagtgcttcggctacatgacccagcagctgatgaacctggccggcggcgctgtggtgctggccctggagggcggccatgacctgacagccatctgtgatgccagcgaggcctgtgtggccgccctgctgggcaacagagtggaccccctgtctgaggagggctggaagcagaagcccaacctgaatgccatccgcagcctggaggccgtcatccgggtgcacagcaagtactggggctgcatgcagaggctggccagctgcccagacagctgggtgccccgggtgcctggagctgacaaggaggaggtggaggccgtgacagccctggccagcctgtctgtgggcatcctggccgaggaccggcccagcgagcagctggtggaggaggaggagcccatgaacctgtag

SEQ ID NO: 19959 - DNA, 3045 bp, synthetic construct
  misc_feature 1..3045: note = Description of Artificial Sequence: Synthetic coding sequence
  source 1..3045: mol_type = other DNA
atgtctgacctgaggaagcgggagctgggcgccctcttcaccagccggggcaccggcggcgtggagtgggatggcacccaggtgtcccctggggcccactactgcagccccaccggggccggctgcccccggccctgtgccgacaccccaggcccccagccccagcccatggacctgcgggtgggccagaggcctcctgtggagcccccacctgagcccaccctgctggccctgcagaggccccagaggctgcaccaccacctgttcctggccggcctgcagcagcagaggtctgtggagcccatgaggctgtccatggacacccccatgcctgagctgcaggtgggcccccaggagcaggagctgcggcagctgctgcacaaggacaagagcaagaggtctgctgtggccagctctgtggtgaagcagaagctggccgaggtgatcctgaagaagcagcaggccgccctggagaggacagtgcaccccaacagccctggcatcccctaccgcaccctggagcccctggagacagagggcgccaccaggtccatgctgagcagcttcctgccccctgtgcccagcctgcccagcgaccccccagagcacttccccctgaggaagacagtgtctgagcccaacctgaagctgcgctacaagcccaagaagagcctggagaggaggaagaaccccctgctgaggaaggagagcgccccacccagcctgcggcggcggcctgctgagaccctgggggacagcagccccagcagcagcagcaccccagccagcggctgcagcagccccaatgattctgaacatggccccaaccccatcctgggcagcgaggccctgctgggccagaggctgcggctgcaggagacctctgtggccccctttgccctgcccaccgtgtccctgctgcctgccatcaccctgggcctgcctgccccagcccgggctgacagcgacaggaggacccaccccaccctgggcccccggggccccatcctgggcagcccccacacccccctcttcctgccccacggcctggagcctgaggccggcggcaccctgcccagccggctgcagcccatcctgctgctggaccccagcggcagccacgcccccctgctgactgtgcccggcctgggccccctgcccttccactttgcccagagcctgatgaccacagagcggctgagcggcagcggcctgcactggcccctgagcaggaccaggtctgagcccctgccccccagcgccacagcccctcctcctcctggccccatgcagccccggctggagcagctgaagacccacgtgcaggtgatcaagaggtctgccaagcccagcgagaagccccggctgcggcagatccccagcgctgaggacctggagacagatggcggcggccctggccaggtggtggatgatggcctggagcaccgggagctgggccacggccagcctgaggcccggggccctgcccccctgcagcagcacccccaggtgctgctgtgggagcagcagaggctggccggccgcctgccccggggcagcactggagacacagtgctgctgcccctggcccagggcggccaccggcccctgagccgggcccagagcagccctgctgccccagccagcctgagcgcccctgagcccgccagccaggcccgggtgctgagcagcagcgagaccccagcccggaccctgcccttcaccaccggcctcatctatgacagcgtgatgctgaagcaccagtgcagctgtggggacaacagccgccaccctgagcacgccggccgcatccagagcatctggagccggctgcaggagcggggcctgcggagccagtgtgaatgtctgcggggcaggaaggccagcctggaggagctgcagagcgtgcacagcgagagacatgtgctgctgtatggcaccaaccccctgagccggctgaagctggacaatggcaagctggccggcctgctggcccagaggatgtttgtgatgctgccctgtggcggcgtgggcgtggacacagacaccatctggaatgagctgcacagcagcaatgctgcccgctgggccgccggctctgtgacagacctggccttcaaggtggccagccgggagctgaagaatggatttgctgtggtgcggcccccaggccaccacgccgaccacagcacagccatgggcttctgcttcttcaacagcgtggccatcgcctgccggcagctgcagcagcagagcaaggccagcaagatcctgattgtggactgggatgtgcaccacggcaatggcacccagcagaccttctaccaggaccccagcgtgctgtacatcagcctgcacagacatgatgatggcaacttcttccctggcagcggggctgtggatgaggtgggcgccggcagcggggagggcttcaacgtgaatgtggcctgggccggcggcctggacccccccatgggagaccctgagtacctggccgccttccgcatcgtggtgatgcccatcgcccgggagttctccccagacctggtgctggtgtctgctggctttgatgctgctgagggccacccagcccccctgggcggctaccacgtgtctgccaagtgcttcggctacatgacccagcagctgatgaacctggccggcggcgctgtggtgctggccctggagggcggccatgacctgacagccatctgtgatgccagcgaggcctgtgtggccgccctgctgggcaacagagtggaccccctgtctgaggagggctggaagcagaagcccaacctgaatgccatccgcagcctggaggccgtcatccgggtgcacatgggcgccctgaccctgagccagatccctggccacggcagcagccagcagcaggccggcggggccttctcctggccaggccacccctgcagagctgctgtggtgatggtgaacacaggagctgcctgcagcgcctggccccctgtgcagaccccaggctgcctggagtgccagggcctgaccaagaagaagtggaggcagtag

SEQ ID NO: 19960 - DNA, 402 bp, synthetic construct
  misc_feature 1..402: note = Description of Artificial Sequence: Synthetic coding sequence
  source 1..402: mol_type = other DNA
atgcacagccctggggccggctgcccccggccctgtgccgacaccccaggcccccagccccagcccatggacctgcgggtgggccagaggcctcctgtggagcccccacctgagcccaccctgctggccctgcagaggccccagaggctgcaccaccacctgttcctggccggcctgcagcagcagaggtctgtggagcccatgaggctgtccatggacacccccatgcctgagctgcaggtgggcccccaggagcaggagctgcggcagctgctgcacaaggacaagagcaagaggtctgctgtggccagctctgtggtgaagcagaagctggccgaggtgatcctgaagaagcagcaggccgccctggagaggacagtgcaccccaacagccctggatag

SEQ ID NO: 19961 - DNA, 2859 bp, synthetic construct
  misc_feature 1..2859: note = Description of Artificial Sequence: Synthetic coding sequence
  source 1..2859: mol_type = other DNA
atggacctgcgggtgggccagaggcctcctgtggagcccccacctgagcccaccctgctggccctgcagaggccccagaggctgcaccaccacctgttcctggccggcctgcagcagcagaggtctgtggagcccatgaggctgtccatggacacccccatgcctgagctgcaggtgggcccccaggagcaggagctgcggcagctgctgcacaaggacaagagcaagaggtctgctgtggccagctctgtggtgaagcagaagctggccgaggtgatcctgaagaagcagcaggccgccctggagaggacagtgcaccccaacagccctggcatcccctaccgcaccctggagcccctggagacagagggcgccaccaggtccatgctgagcagcttcctgccccctgtgcccagcctgcccagcgaccccccagagcacttccccctgaggaagacagtgtctgagcccaacctgaagctgcgctacaagcccaagaagagcctggagaggaggaagaaccccctgctgaggaaggagagcgccccacccagcctgcggcggcggcctgctgagaccctgggggacagcagccccagcagcagcagcaccccagccagcggctgcagcagccccaatgattctgaacatggccccaaccccatcctgggcagcgaggccctgctgggccagaggctgcggctgcaggagacctctgtggccccctttgccctgcccaccgtgtccctgctgcctgccatcaccctgggcctgcctgccccagcccgggctgacagcgacaggaggacccaccccaccctgggcccccggggccccatcctgggcagcccccacacccccctcttcctgccccacggcctggagcctgaggccggcggcaccctgcccagccggctgcagcccatcctgctgctggaccccagcggcagccacgcccccctgctgactgtgcccggcctgggccccctgcccttccactttgcccagagcctgatgaccacagagcggctgagcggcagcggcctgcactggcccctgagcaggaccaggtctgagcccctgccccccagcgccacagcccctcctcctcctggccccatgcagccccggctggagcagctgaagacccacgtgcaggtgatcaagaggtctgccaagcccagcgagaagccccggctgcggcagatccccagcgctgaggacctggagacagatggcggcggccctggccaggtggtggatgatggcctggagcaccgggagctgggccacggccagcctgaggcccggggccctgcccccctgcagcagcacccccaggtgctgctgtgggagcagcagaggctggccggccgcctgccccggggcagcactggagacacagtgctgctgcccctggcccagggcggccaccggcccctgagccgggcccagagcagccctgctgccccagccagcctgagcgcccctgagcccgccagccaggcccgggtgctgagcagcagcgagaccccagcccggaccctgcccttcaccaccggcctcatctatgacagcgtgatgctgaagcaccagtgcagctgtggggacaacagccgccaccctgagcacgccggccgcatccagagcatctggagccggctgcaggagcggggcctgcggagccagtgtgaatgtctgcggggcaggaaggccagcctggaggagctgcagagcgtgcacagcgagagacatgtgctgctgtatggcaccaaccccctgagccggctgaagctggacaatggcaagctggccggcctgctggcccagaggatgtttgtgatgctgccctgtggcggcgtgggcgtggacacagacaccatctggaatgagctgcacagcagcaatgctgcccgctgggccgccggctctgtgacagacctggccttcaaggtggccagccgggagctgaagaatggatttgctgtggtgcggcccccaggccaccacgccgaccacagcacagccatgggcttctgcttcttcaacagcgtggccatcgcctgccggcagctgcagcagcagagcaaggccagcaagatcctgattgtggactgggatgtgcaccacggcaatggcacccagcagaccttctaccaggaccccagcgtgctgtacatcagcctgcacagacatgatgatggcaacttcttccctggcagcggggctgtggatgaggtgggcgccggcagcggggagggcttcaacgtgaatgtggcctgggccggcggcctggacccccccatgggagaccctgagtacctggccgccttccgcatcgtggtgatgcccatcgcccgggagttctccccagacctggtgctggtgtctgctggctttgatgctgctgagggccacccagcccccctgggcggctaccacgtgtctgccaagtgcttcggctacatgacccagcagctgatgaacctggccggcggcgctgtggtgctggccctggagggcggccatgacctgacagccatctgtgatgccagcgaggcctgtgtggccgccctgctgggcaacagagtggaccccctgtctgaggagggctggaagcagaagcccaacctgaatgccatccgcagcctggaggccgtcatccgggtgcacagcaagtactggggctgcatgcagaggctggccagctgcccagacagctgggtgccccgggtgcctggagctgacaaggaggaggtggaggccgtgacagccctggccagcctgtctgtgggcatcctggccgaggaccggcccagcgagcagctggtggaggaggaggagcccatgaacctgtag

SEQ ID NO: 19962 - DNA, 2925 bp, synthetic construct
  misc_feature 1..2925: note = Description of Artificial Sequence: Synthetic coding sequence
  source 1..2925: mol_type = other DNA
atgcacagccctggggccggctgcccccggccctgtgccgacaccccaggcccccagccccagcccatggacctgcgggtgggccagaggcctcctgtggagcccccacctgagcccaccctgctggccctgcagaggccccagaggctgcaccaccacctgttcctggccggcctgcagcagcagaggtctgtggagcccatgaggctgtccatggacacccccatgcctgagctgcaggtgggcccccaggagcaggagctgcggcagctgctgcacaaggacaagagcaagaggtctgctgtggccagctctgtggtgaagcagaagctggccgaggtgatcctgaagaagcagcaggccgccctggagaggacagtgcaccccaacagccctggcatcccctaccgcaccctggagcccctggagacagagggcgccaccaggtccatgctgagcagcttcctgccccctgtgcccagcctgcccagcgaccccccagagcacttccccctgaggaagacagtgtctgagcccaacctgaagctgcgctacaagcccaagaagagcctggagaggaggaagaaccccctgctgaggaaggagagcgccccacccagcctgcggcggcggcctgctgagaccctgggggacagcagccccagcagcagcagcaccccagccagcggctgcagcagccccaatgattctgaacatggccccaaccccatcctgggcagcgaggccctgctgggccagaggctgcggctgcaggagacctctgtggccccctttgccctgcccaccgtgtccctgctgcctgccatcaccctgggcctgcctgccccagcccgggctgacagcgacaggaggacccaccccaccctgggcccccggggccccatcctgggcagcccccacacccccctcttcctgccccacggcctggagcctgaggccggcggcaccctgcccagccggctgcagcccatcctgctgctggaccccagcggcagccacgcccccctgctgactgtgcccggcctgggccccctgcccttccactttgcccagagcctgatgaccacagagcggctgagcggcagcggcctgcactggcccctgagcaggaccaggtctgagcccctgccccccagcgccacagcccctcctcctcctggccccatgcagccccggctggagcagctgaagacccacgtgcaggtgatcaagaggtctgccaagcccagcgagaagccccggctgcggcagatccccagcgctgaggacctggagacagatggcggcggccctggccaggtggtggatgatggcctggagcaccgggagctgggccacggccagcctgaggcccggggccctgcccccctgcagcagcacccccaggtgctgctgtgggagcagcagaggctggccggccgcctgccccggggcagcactggagacacagtgctgctgcccctggcccagggcggccaccggcccctgagccgggcccagagcagccctgctgccccagccagcctgagcgcccctgagcccgccagccaggcccgggtgctgagcagcagcgagaccccagcccggaccctgcccttcaccaccggcctcatctatgacagcgtgatgctgaagcaccagtgcagctgtggggacaacagccgccaccctgagcacgccggccgcatccagagcatctggagccggctgcaggagcggggcctgcggagccagtgtgaatgtctgcggggcaggaaggccagcctggaggagctgcagagcgtgcacagcgagagacatgtgctgctgtatggcaccaaccccctgagccggctgaagctggacaatggcaagctggccggcctgctggcccagaggatgtttgtgatgctgccctgtggcggcgtgggcgtggacacagacaccatctggaatgagctgcacagcagcaatgctgcccgctgggccgccggctctgtgacagacctggccttcaaggtggccagccgggagctgaagaatggatttgctgtggtgcggcccccaggccaccacgccgaccacagcacagccatgggcttctgcttcttcaacagcgtggccatcgcctgccggcagctgcagcagcagagcaaggccagcaagatcctgattgtggactgggatgtgcaccacggcaatggcacccagcagaccttctaccaggaccccagcgtgctgtacatcagcctgcacagacatgatgatggcaacttcttccctggcagcggggctgtggatgaggtgggcgccggcagcggggagggcttcaacgtgaatgtggcctgggccggcggcctggacccccccatgggagaccctgagtacctggccgccttccgcatcgtggtgatgcccatcgcccgggagttctccccagacctggtgctggtgtctgctggctttgatgctgctgagggccacccagcccccctgggcggctaccacgtgtctgccaagtgcttcggctacatgacccagcagctgatgaacctggccggcggcgctgtggtgctggccctggagggcggccatgacctgacagccatctgtgatgccagcgaggcctgtgtggccgccctgctgggcaacagagtggaccccctgtctgaggagggctggaagcagaagcccaacctgaatgccatccgcagcctggaggccgtcatccgggtgcacagcaagtactggggctgcatgcagaggctggccagctgcccagacagctgggtgccccgggtgcctggagctgacaaggaggaggtggaggccgtgacagccctggccagcctgtctgtgggcatcctggccgaggaccggcccagcgagcagctggtggaggaggaggagcccatgaacctgtag

SEQ ID NO: 19963 - DNA, 819 bp, synthetic construct
  misc_feature 1..819: note = Description of Artificial Sequence: Synthetic coding sequence
  source 1..819: mol_type = other DNA
atggaggagcctgaggagcctgctgacagcggccagagcctggtgcctgtgtacatctacagcccagaatatgtgtccatgtgtgacagcctggccaagatccccaagagggcctccatggtgcacagcctgattgaggcctatgccctgcacaagcagatgagaattgtgaagcccaaggtggcctccatggaggagatggccaccttccacacagatgcctacctgcagcacctgcagaaggtgtcccaggagggagatgatgaccacccagacagcattgaatatggcctgggctatgactgcccagccacagagggcatctttgattatgctgctgccatcggcggggccaccatcacagctgcccagtgcctgattgatggcatgtgcaaggtggccatcaactggagcggcggctggcaccacgccaagaaggatgaggccagcggcttctgctacctgaatgatgctgtgctgggcatcctgcggctgcggaggaagtttgagcgcatcctgtatgtggacctggacctgcaccacggagatggagtggaggatgccttctccttcaccagcaaggtgatgacagtgtccctgcacaagttcagccctggcttcttccctgggaagagtgatgtgtctgatgtgggcctgggcaagggccgctactacagcgtgaatgtgcccatccaggacggcatccaggatgagaagtactaccagatctgtgagagcgtgaggaccagctgccccaagagcaggcctgtggaggccgctgctgctgcctgcctgccccacctgcacagcctggtgtag

SEQ ID NO: 19964 - DNA, 1134 bp, synthetic construct
  misc_feature 1..1134: note = Description of Artificial Sequence: Synthetic coding sequence
  source 1..1134: mol_type = other DNA
atggaggagcctgaggagcctgctgacagcggccagagcctggtgcctgtgtacatctacagcccagaatatgtgtccatgtgtgacagcctggccaagatccccaagagggcctccatggtgcacagcctgattgaggcctatgccctgcacaagcagatgagaattgtgaagcccaaggtggcctccatggaggagatggccaccttccacacagatgcctacctgcagcacctgcagaaggtgtcccaggagggagatgatgaccacccagacagcattgaatatggcctgggctatgactgcccagccacagagggcatctttgattatgctgctgccatcggcggggccaccatcacagctgcccagtgcctgattgatggcatgtgcaaggtggccatcaactggagcggcggctggcaccacgccaagaaggatgaggccagcggcttctgctacctgaatgatgctgtgctgggcatcctgcggctgcggaggaagtttgagcgcatcctgtatgtggacctggacctgcaccacggagatggagtggaggatgccttctccttcaccagcaaggtgatgacagtgtccctgcacaagttcagccctggcttcttccctggcactggagatgtgtctgatgtgggcctgggcaagggccgctactacagcgtgaatgtgcccatccaggacggcatccaggatgagaagtactaccagatctgtgagagcgtgctgaaggaggtgtaccaggccttcaaccccaaggctgtggtgctgcagctgggcgctgacaccatcgccggggaccccatgtgcagcttcaacatgacccctgtgggcatcggcaagtgcctgaagtacatcctgcagtggcagctggccaccctcatcctgggcggcggcggctacaacctggccaacacagcccgctgctggacctacctgactggagtcatcctgggcaagaccctgagcagcgagatcccagaccacgagttcttcaccgcctacggccctgactatgtgctggagatcacccccagctgcaggccagacagaaatgagccccaccgcatccagcagatcctgaactacatcaagggcaacctgaagcacgtggtgtag

SEQ ID NO: 19965 - DNA, 861 bp, synthetic construct
  misc_feature 1..861: note = Description of Artificial Sequence: Synthetic coding sequence
  source 1..861: mol_type = other DNA
atggaggagcctgaggagcctgctgacagcggccagagcctggtgcctgtgtacatctacagcccagaatatgtgtccatgtgtgacagcctggccaagatccccaagagggcctccatggtgcacagcctgattgaggcctatgccctgcacaagcagatgagagatgaggccagcggcttctgctacctgaatgatgctgtgctgggcatcctgcggctgcggaggaagtttgagcgcatcctgtatgtggacctggacctgcaccacggagatggagtggaggatgccttctccttcaccagcaaggtgatgacagtgtccctgcacaagttcagccctggcttcttccctggcactggagatgtgtctgatgtgggcctgggcaagggccgctactacagcgtgaatgtgcccatccaggacggcatccaggatgagaagtactaccagatctgtgagagcgtgctgaaggaggtgtaccaggccttcaaccccaaggctgtggtgctgcagctgggcgctgacaccatcgccggggaccccatgtgcagcttcaacatgacccctgtgggcatcggcaagtgcctgaagtacatcctgcagtggcagctggccaccctcatcctgggcggcggcggctacaacctggccaacacagcccgctgctggacctacctgactggagtcatcctgggcaagaccctgagcagcgagatcccagaccacgagttcttcaccgcctacggccctgactatgtgctggagatcacccccagctgcaggccagacagaaatgagccccaccgcatccagcagatcctgaactacatcaagggcaacctgaagcacgtggtgtag

SEQ ID NO: 19966 - DNA, 549 bp, synthetic construct
  misc_feature 1..549: note = Description of Artificial Sequence: Synthetic coding sequence
  source 1..549: mol_type = other DNA
atgacagtgtccctgcacaagttcagccctggcttcttccctggcactggagatgtgtctgatgtgggcctgggcaagggccgctactacagcgtgaatgtgcccatccaggacggcatccaggatgagaagtactaccagatctgtgagagcgtgctgaaggaggtgtaccaggccttcaaccccaaggctgtggtgctgcagctgggcgctgacaccatcgccggggaccccatgtgcagcttcaacatgacccctgtgggcatcggcaagtgcctgaagtacatcctgcagtggcagctggccaccctcatcctgggcggcggcggctacaacctggccaacacagcccgctgctggacctacctgactggagtcatcctgggcaagaccctgagcagcgagatcccagaccacgagttcttcaccgcctacggccctgactatgtgctggagatcacccccagctgcaggccagacagaaatgagccccaccgcatccagcagatcctgaactacatcaagggcaacctgaagcacgtggtgtag

SEQ ID NO: 19967 - DNA, 441 bp, synthetic construct
  misc_feature 1..441: note = Description of Artificial Sequence: Synthetic coding sequence
  source 1..441: mol_type = other DNA
atggaggagcctgaggagcctgctgacagcggccagagcctggtgcctgtgtacatctacagcccagaatatgtgtccatgtgtgacagcctggccaagatccccaagagggcctccatggtgcacagcctgattgaggcctatgccctgcacaagcagatgagaattgtgaagcccaaggtggcctccatggaggagatggccaccttccacacagatgcctacctgcagcacctgcagaaggtgtcccaggagggagatgatgaccacccagacagcattgaatatggcctgggctatgactgcccagccacagagggcatctttgattatgctgctgccatcggcggggccaccatcacagctgcccagtgcctgattgatggcatgtgcaaggtggccatcaactggagcggcggctggcaccacgccaagaagtag

SEQ ID NO: 19968 - DNA, 477 bp, synthetic construct
  misc_feature 1..477: note = Description of Artificial Sequence: Synthetic coding sequence
  source 1..477: mol_type = other DNA
atggaggagcctgaggagcctgctgacagcggccagagcctggtgcctgtgtacatctacagcccagaatatgtgtccatgtgtgacagcctggccaagatccccaagagggcctccatggtgcacagcctgattgaggcctatgccctgcacaagcagatgagaattgtgaagcccaaggtggcctccatggaggagatggccaccttccacacagatgcctacctgcagcacctgcagaaggtgtcccaggagggagatgatgaccacccagacagcattgaatatggcctgggctatgactgcccagccacagagggcatctttgattatgctgctgccatcggcggggccaccatcacagctgcccagtgcctgattgatggcatgtgcaaggtggccatcaactggagcggcggctggcaccacgccaagaaggagacctgtgtgtatgtggccctgtacaaggccttctag

SEQ ID NO: 19969 - DNA, 420 bp, synthetic construct
  misc_feature 1..420: note = Description of Artificial Sequence: Synthetic coding sequence
  source 1..420: mol_type = other DNA
atggaggagcctgaggagcctgctgacagcggccagagcctggtgcctgtgtacatctacagcccagaatatgtgtccatgtgtgacagcctggccaagatccccaagagggcctccatggtgcacagcctgattgaggcctatgccctgcacaagcagatgagagatgaggccagcggcttctgctacctgaatgatgctgtgctgggcatcctgcggctgcggaggaagtttgagcgcatcctgtatgtggacctggacctgcaccacggagatggcactggagatgtgtctgatgtgggcctgggcaagggccgctactacagcgtgaatgtgcccatccaggacggcatccaggatgagaagtactaccagatctgtgaaagatatgagcccccagcccccaaccctggcctgtag

SEQ ID NO: 19970 - DNA, 771 bp, synthetic construct
  misc_feature 1..771: note = Description of Artificial Sequence: Synthetic coding sequence
  source 1..771: mol_type = other DNA
atggaggagcctgaggagcctgctgacagcggccagagcctggtgcctgtgtacatctacagcccagaatatgtgtccatgtgtgacagcctggccaagatccccaagagggcctccatggtgcacagcctgattgaggcctatgccctgcacaagcagatgagaattgtgaagcccaaggtggcctccatggaggagatggccaccttccacacagatgcctacctgcagcacctgcagaaggtgtcccaggagggagatgatgaccacccagacagcattgaatatggcctgggctatgactgcccagccacagagggcatctttgattatgctgctgccatcggcggggccaccatcacagctgcccagtgcctgattgatggcatgtgcaaggtggccatcaactggagcggcggctggcaccacgccaagaaggatgaggccagcggcttctgctacctgaatgatgctgtgctgggcatcctgcggctgcggaggaagtttgagcgcatcctgtatgtggacctggacctgcaccacggagatggagtggaggatgccttctccttcaccagcaaggtgatgacagtgtccctgcacaagttcagccctggcttcttccctggcactggagatgtgtctgatgtgggcctgggcaagggccgctactacagcgtgaatgtgcccatccaggacggcatccaggatgagaagtactaccagatctgtgaaagatatgagcccccagcccccaaccctggcctgtag

SEQ ID NO: 19971 - DNA, 831 bp, synthetic construct
  misc_feature 1..831: note = Description of Artificial Sequence: Synthetic coding sequence
  source 1..831: mol_type = other DNA
atggccggccctgctgccctgtctgctgctgctgctgctgccctggccgccgccctgctgctgctgcggagagaagatcctggccctggagctggccccagcatggccgagacagaggccctgagcaagctgcgggaggacttcaggatgcagaacaagagcgtcttcatcctgggcgccagcggggagaccggccgggtgctgctgaaggagatcctggagcagggcctcttcagcaaggtgaccctcatcggccgcaggaagctgacctttgatgaggaggcctacaagaatgtgaaccaggaggtggtggactttgagaagctggatgattatgccagcgccttccagggccatgatgtgggcttctgctgcctgggcaccacccggggcaaggccggggctgagggctttgtgcgggtggaccgggactatgtgctgaagtctgctgagctggccaaggccggcggctgcaagcacttcaacctgctgagcagcaaaggagctgacaagagcagcaacttcctgtacctgcaggtgaagggggaggtggaggccaaggtggaggagctgaagtttgaccgctacagcgtcttccggcctggggtgctgctgtgtgaccggcaggagagcaggcctggagagtggctggtgaggaagttcttcggcagcctgcctgacagctgggccagcggccacagcgtgcctgtggtgacagtggtgcgggccatgctgaacaacgtggtgcggccccgggacaagcagatggagctgctggagaacaaggccatccatgacctgggcaaggcccacggcagcctgaagccctag

SEQ ID NO: 19972 - DNA, 729 bp, synthetic construct
  misc_feature 1..729: note = Description of Artificial Sequence: Synthetic coding sequence
  source 1..729: mol_type = other DNA
atggccgagacagaggccctgagcaagctgcgggaggacttcaggatgcagaacaagagcgtcttcatcctgggcgccagcggggagaccggccgggtgctgctgaaggagatcctggagcagggcctcttcagcaaggtgaccctcatcggccgcaggaagctgacctttgatgaggaggcctacaagaatgtgaaccaggaggtggtggactttgagaagctggatgattatgccagcgccttccagggccatgatgtgggcttctgctgcctgggcaccacccggggcaaggccggggctgagggctttgtgcgggtggaccgggactatgtgctgaagtctgctgagctggccaaggccggcggctgcaagcacttcaacctgctgagcagcaaaggagctgacaagagcagcaacttcctgtacctgcaggtgaagggggaggtggaggccaaggtggaggagctgaagtttgaccgctacagcgtcttccggcctggggtgctgctgtgtgaccggcaggagagcaggcctggagagtggctggtgaggaagttcttcggcagcctgcctgacagctgggccagcggccacagcgtgcctgtggtgacagtggtgcgggccatgctgaacaacgtggtgcggccccgggacaagcagatggagctgctggagaacaaggccatccatgacctgggcaaggcccacggcagcctgaagccctag

SEQ ID NO: 19973 - DNA, 729 bp, synthetic construct; identical to SEQ ID NO: 19972
  misc_feature 1..729: note = Description of Artificial Sequence: Synthetic coding sequence
  source 1..729: mol_type = other DNA

SEQ ID NO: 19974 - DNA, 729 bp, synthetic construct; identical to SEQ ID NO: 19972
  misc_feature 1..729: note = Description of Artificial Sequence: Synthetic coding sequence
  source 1..729: mol_type = other DNA

SEQ ID NO: 19975 - DNA, 402 bp, synthetic construct
  misc_feature 1..402: note = Description of Artificial Sequence: Synthetic coding sequence
  source 1..402: mol_type = other DNA
atggccgagacagaggccctgagcaagctgcgggaggacttcaggatgcagaacaagagcgtcttcatcctgggcgccagcggggagaccggccgggtgctgctgaaggagatcctggagcagggcctcttcagcaaggtgaccctcatcggccgcaggaagctgacctttgatgaggaggcctacaagaatgtgaaccaggaggtggtggactttgagaagctggatgattatgccagcgccttccagggccatgatgtgggcttctgctgcctgggcaccacccggggcaaggccggggctgtgaggaaggcctatgccctcttccccttctgctggcctgtgatcagccgcatcctcttcctgctgaccctcttcctgtgtgcctgctgcaatgcctag

SEQ ID NO: 19976 - DNA, 402 bp, synthetic construct; identical to SEQ ID NO: 19975
  misc_feature 1..402: note = Description of Artificial Sequence: Synthetic coding sequence
  source 1..402: mol_type = other DNA

SEQ ID NO: 19977 - DNA, 402 bp, synthetic construct; identical to SEQ ID NO: 19975
  misc_feature 1..402: note = Description of Artificial Sequence: Synthetic coding sequence
  source 1..402: mol_type = other DNA

SEQ ID NO: 19978 - DNA, 1080 bp, synthetic construct
  misc_feature 1..1080: note = Description of Artificial Sequence: Synthetic coding sequence
  source 1..1080: mol_type = other DNA
atggccgagcacggggcccacttcaccgctgcctctgtggctgatgaccagcccagcatctttgaggtggtggcccaggacagcctgatgacagctgtgcggcctgccctgcagcacgtggtgaaggtgctggccgagagcaaccccacccactacggcttcctgtggcgctggtttgatgagatcttcaccctgctggacctgctgctgcagcagcactacctgagcaggaccagcgccagcttcagcgagaacttctacggcctgaagagaattgtgatgggagacacccacaagagccagaggctggccagcgctggcctgcccaagcagcagctgtggaagagcatcatgttcctggtgctgctgccctacctgaaggtgaagctggagaagctggtgagcagcctgcgggaggaggatgagtacagcatccacccccccagcagccgctggaagcgcttctaccgggccttcctggccgcctacccctttgtgaacatggcctgggagggctggttcctggtgcagcagctgcgctacatcctgggcaaggcccagcaccacagccccctgctgcggctggccggcgtgcagctgggccgcctgactgtgcaggacatccaggccctggagcacaagccagccaaggcctccatgatgcagcagcctgcccggtctgtgtctgagaagatcaacagcgccctgaagaaggctgtgggcggcgtggccctgagcctgagcacaggcctgtctgtgggcgtcttcttcctgcagttcctggactggtggtacagcagcgagaaccaggagaccatcaagagcctgacagccctgcccaccccacctcctcctgtgcacctggactacaacagcgacagccccctgctgcccaagatgaagacagtgtgccccctgtgcaggaagaccagggtgaatgacacagtgctggccaccagcggctacgtgttctgctaccgctgtgtgttccactacgtgcgcagccaccaggcctgccccatcaccggctaccccacagaggtgcagcacctgatcaagctgtacagccctgagaactag

SEQ ID NO: 19979 - DNA, 1374 bp, synthetic construct
  misc_feature 1..1374: note = Description of Artificial Sequence: Synthetic coding sequence
  source 1..1374: mol_type = other DNA
atggtgtccaagctgaccagcctgcagcaggagctgctgagcgccctgctgagcagtggagtgaccaaggaggtgctggtgcaggccctggaggagctgctgcccagccccaactttggagtgaagctggagaccctgcccctgagccctggcagcggggctgagccagacaccaagcctgtgttccacaccctgaccaatggacatgccaagggccgcctgtctggagatgagggctctgaagatggagatgattatgacaccccacccatcctgaaggagctgcaggccctgaacacagaggaggccgctgagcagagagctgaggtggacaggatgctgtctgaggacccctggagggctgccaagatgatcaagggctacatgcagcagcacaacatcccccagcgggaggtggtggatgtgacaggcctgaaccagagccacctgagccagcacctgaacaagggcacccccatgaagacccagaagagagctgccctgtacacctggtacgtgaggaagcagcgggagatcctgcggcagttcagccagcagagccacggccctggccagagtgatgatgcctgcagcgagcccaccaacaagaagatgagaagaaaccgcttcaagtggggccctgccagccagcagatcctgtaccaggcctatgaccggcagaagaaccccagcaaggaggagcgggaggccctggtggaggagtgcaacagagctgagtgcctgcagaggggcgtgagccccagcaaggcccacggcctgggcagcaacctggtgacagaggtgcgggtgtacaactggtttgccaacagaaggaaggaggaggccttccggcagaagctggccatggatgcctacagcagcaaccagacccacagcctgaaccccctgctgagccacggcagcccccaccaccagcccagcagcagcccccccaacaagctgagcggcgtgcgctacagccagcagggcaacaatgagatcaccagcagcagcaccatcagccaccacggcaacagcgccatggtgaccagccagagcgtgctgcagcaggtgtccccagccagcctggaccccggccacaacctgctgagcccagatggcaagatgatctctgtgtctgggggcggcctgccccctgtgtccaccctgaccaacatccacagcctgagccaccacaacccccagcagagccagaacctgatcatgacccccctgtctggagtgatggccatcgcccagatgagcagcaccagcctggtgatgcccacccaccacctgctgcgggcccagcagcagggcccctgcttcccccaccaccaccccctgggcagctgccacggcaaggcccagtag

SEQ ID NO: 19980 - DNA, 1338 bp, synthetic construct
  misc_feature 1..1338: note = Description of Artificial Sequence: Synthetic coding sequence
  source 1..1338: mol_type = other DNA
atgctgtctgaggacccctggagggctgccaagatgatcaagggctacatgcagcagcacaacatcccccagcgggaggtggtggatgtgacaggcctgaaccagagccacctgagccagcacctgaacaagggcacccccatgaagacccagaagagagctgccctgtacacctggtacgtgaggaagcagcgggagatcctgcggcagttcaaccagacagtgcagagcagcggcaacatgacagacaagagcagccaggaccagctgctcttcctgtttcctgagttcagccagcagagccacggccctggccagagtgatgatgcctgcagcgagcccaccaacaagaagatgagaagaaaccgcttcaagtggggccctgccagccagcagatcctgtaccaggcctatgaccggcagaagaaccccagcaaggaggagcgggaggccctggtggaggagtgcaacagagctgagtgcctgcagaggggcgtgagccccagcaaggcccacggcctgggcagcaacctggtgacagaggtgcgggtgtacaactggtttgccaacagaaggaaggaggaggccttccggcagaagctggccatggatgcctacagcagcaaccagacccacagcctgaaccccctgctgagccacggcagcccccaccaccagcccagcagcagcccccccaacaagctgagcggcgtgcgctacagccagcagggcaacaatgagatcaccagcagcagcaccatcagccaccacggcaacagcgccatggtgaccagccagagcgtgctgcagcaggtgtccccagccagcctggaccccggccacaacctgctgagcccagatggcaagatgatctctgtgtctgggggcggcctgccccctgtgtccaccctgaccaacatccacagcctgagccaccacaacccccagcagagccagaacctgatcatgacccccctgtctggagtgatggccatcgcccagagcctgaacaccagccaggcccagagcgtgcctgtgatcaacagcgtggccggcagcctggccgccctgcagcctgtgcagttcagccagcagctgcacagcccccaccagcagcccctgatgcagcagagccctggcagccacatggcccagcagcccttcatggctgctgtgacccagctgcagaacagccacatgtatgcccacaagcaggagcccccccagtacagccacaccagccgcttccccagcgccatggtggtgacagacaccagcagcatcagcaccctgaccaacatgagcagcagcaagcagtgccccctgcaggcctggtag

SEQ ID NO: 19981 - DNA, 1278 bp, synthetic construct
  misc_feature 1..1278: note = Description of Artificial Sequence: Synthetic coding sequence
  source 1..1278: mol_type = other DNA
atggtgtccaagctgaccagcctgcagcaggagctgctgagcgccctgctgagcagtggagtgaccaaggaggtgctggtgcaggccctggaggagctgctgcccagccccaactttggagtgaagctggagaccctgcccctgagccctggcagcggggctgagccagacaccaagcctgtgttccacaccctgaccaatggacatgccaagggccgcctgtctggagatgagggctctgaagatggagatgattatgacaccccacccatcctgaaggagctgcaggccctgaacacagaggaggccgctgagcagagagctgaggtggacaggatgctgtctgaggacccctggagggctgccaagatgatcaagggctacatgcagcagcacaacatcccccagcgggaggtggtggatgtgacaggcctgaaccagagccacctgagccagcacctgaacaagggcacccccatgaagacccagaagagagctgccctgtacacctggtacgtgaggaagcagcgggagatcctgcggcagttcaaccagacagtgcagagcagcggcaacatgacagacaagagcagccaggaccagctgctcttcctgtttcctgagttcagccagcagagccacggccctggccagagtgatgatgcctgcagcgagcccaccaacaagaagatgagaagaaaccgcttcaagtggggccctgccagccagcagatcctgtaccaggcctatgaccggcagaagaaccccagcaaggaggagcgggaggccctggtggaggagtgcaacagagctgagtgcctgcagaggggcgtgagccccagcaaggcccacggcctgggcagcaacctggtgacagaggtgcgggtgtacaactggtttgccaacagaaggaaggaggaggccttccggcagaagctggccatggatgcctacagcagcaaccagacccacagcctgaaccccctgctgagccacggcagcccccaccaccagcccagcagcagcccccccaacaagctgagcggcgtgcgctacagccagcagggcaacaatgagatcaccagcagcagcaccatcagccaccacggcaacagcgccatggtgaccagccagagcgtgctgcagcaggtgtccccagccagcctggaccccggccacaacctgctgagcccagatggcaagatggacctgagcctgcggaggagatttgcccccagccagcacctggatgagtacccccagcccctgcccccatag

SEQ ID NO: 19982 - DNA, 1596 bp, synthetic construct
  misc_feature 1..1596: note = Description of Artificial Sequence: Synthetic coding sequence
  source 1..1596: mol_type = other DNA
atggtgtccaagctgaccagcctgcagcaggagctgctgagcgccctgctgagcagtggagtgaccaaggaggtgctggtgcaggccctggaggagctgctgcccagccccaactttggagtgaagctggagaccctgcccctgagccctggcagcggggctgagccagacaccaagcctgtgttccacaccctgaccaatggacatgccaagggccgcctgtctggagatgagggctctgaagatggagatgattatgacaccccacccatcctgaaggagctgcaggccctgaacacagaggaggccgctgagcagagagctgaggtggacaggatgctgtctgaggacccctggagggctgccaagatgatcaagggctacatgcagcagcacaacatcccccagcgggaggtggtggatgtgacaggcctgaaccagagccacctgagccagcacctgaacaagggcacccccatgaagacccagaagagagctgccctgtacacctggtacgtgaggaagcagcgggagatcctgcggcagttcagccagcagagccacggccctggccagagtgatgatgcctgcagcgagcccaccaacaagaagatgagaagaaaccgcttcaagtggggccctgccagccagcagatcctgtaccaggcctatgaccggcagaagaaccccagcaaggaggagcgggaggccctggtggaggagtgcaacagagctgagtgcctgcagaggggcgtgagccccagcaaggcccacggcctgggcagcaacctggtgacagaggtgcgggtgtacaactggtttgccaacagaaggaaggaggaggccttccggcagaagctggccatggatgcctacagcagcaaccagacccacagcctgaaccccctgctgagccacggcagcccccaccaccagcccagcagcagcccccccaacaagctgagcggcgtgcgctacagccagcagggcaacaatgagatcaccagcagcagcaccatcagccaccacggcaacagcgccatggtgaccagccagagcgtgctgcagcaggtgtccccagccagcctggaccccggccacaacctgctgagcccagatggcaagatgatctctgtgtctgggggcggcctgccccctgtgtccaccctgaccaacatccacagcctgagccaccacaacccccagcagagccagaacctgatcatgacccccctgtctggagtgatggccatcgcccagagcctgaacaccagccaggcccagagcgtgcctgtgatcaacagcgtggccggcagcctggccgccctgcagcctgtgcagttcagccagcagctgcacagcccccaccagcagcccctgatgcagcagagccctggcagccacatggcccagcagcccttcatggctgctgtgacccagctgcagaacagccacatgtatgcccacaagcaggagcccccccagtacagccacaccagccgcttccccagcgccatggtggtgacagacaccagcagcatcagcaccctgaccaacatgagcagcagcaagcagtgccccctgcaggcctggtag

SEQ ID NO: 19983 - DNA, 843 bp, synthetic construct
  misc_feature 1..843: note = Description of Artificial Sequence: Synthetic coding sequence
  source 1..843: mol_type = other DNA
atgaagttccgggccaagatcgtggatggagcctgcctgaaccacttcacccgcatcagcaacatgattgccaagctggccaagacctgcaccctgcgcatcagcccagacaagctgaacttcatcctgtgtgacaagctggccaatggaggagtgtccatgtggtgtgagctggagcaggagaacttcttcaatgagttccagatggagggcgtgtctgcagaaaataatgagatctacctggagctgaccagcgagaacctgagccgggccctgaagacagcccagaatgcccgggccctgaagatcaagctgaccaacaagcacttcccctgcctgactgtgtctgtggagctgctgtccatgagcagcagcagccgcatcgtgacccatgacatccccatcaaggtgatccccaggaagctgtggaaggacctgcaggagcctgtggtgcctgaccctgatgtgtccatctacctgcctgtgctgaagaccatgaagtctgtggtggagaagatgaagaacatcagcaaccacctggtgattgaggccaacctggatggagagctgaacctgaagattgaaacagagctggtgtgtgtgaccacccacttcaaggacctgggcaacccccccctggccagcgagagcacccatgaggacagaaatgtggagcacatggccgaggtgcacatcgacatcaggaagctgctgcagttcctggccggccagcaggtgaaccccaccaaggccctgtgcaacatcgtgaacaacaagatggtgcactttgacctgctgcatgaagatgtgtccctgcagtacttcatcccagccctgtcctag

SEQ ID NO: 19984 - DNA, 780 bp, synthetic construct
  misc_feature 1..780: note = Description of Artificial Sequence: Synthetic coding sequence
  source 1..780: mol_type = other DNA
atgattgccaagctggccaagacctgcaccctgcgcatcagcccagacaagctgaacttcatcctgtgtgacaagctggccaacggcggcgtgtccatgtggtgtgagctggagcaggagaacttcttcaatgagttccagatggagggcgtgtctgctgagaacaatgagatctacctggagctgaccagcgagaacctgagccgggccctgaagacagcccagaatgcccgggccctgaagatcaagctgaccaacaagcacttcccctgcctgactgtgtctgtggagctgctgtccatgagcagcagcagcagaattgtgacccatgacatccccatcaaggtgatccccaggaagctgtggaaggacctgcaggagcctgtggtgcctgaccctgatgtgtccatctacctgcctgtgctgaagaccatgaagtctgtggtggagaagatgaagaacatcagcaaccacctggtgattgaggccaacctggatggagagctgaacctgaagattgaaacagagctggtgtgtgtgaccacccacttcaaggacctgggcaacccccccctggccagcgagagcacccatgaagatagaaatgtggagcacatggccgaggtgcacatcgacatcaggaagctgctgcagttcctggccggccagcaggtgaaccccaccaaggccctgtgcaacatcgtgaacaacaagatggtgcactttgacctgctgcatgaagatgtgtccctgcagtacttcatcccagccctgtcctag

SEQ ID NO: 19985 - DNA, 843 bp, synthetic construct; identical to SEQ ID NO: 19983
  misc_feature 1..843: note = Description of Artificial Sequence: Synthetic coding sequence
  source 1..843: mol_type = other DNA

SEQ ID NO: 19986 - DNA, 780 bp, synthetic construct; identical to SEQ ID NO: 19984
  misc_feature 1..780: note = Description of Artificial Sequence: Synthetic coding sequence
  source 1..780: mol_type = other DNA

SEQ ID NO: 19987 - DNA, 2130 bp, synthetic construct
  misc_feature 1..2130: note = Description of Artificial Sequence: Synthetic coding sequence
  source 1..2130: mol_type = other DNA
atgtccttccccaaggcccccctgaagcgcttcaatgaccccagcggctgtgcccccagccctggggcctatgatgtgaagaccctggaggtgctgaagggccctgtgtccttccagaagagccagcgcttcaagcagcagaaggagagcaagcagaacctgaatgtggacaaggacaccaccctgcctgccagcgccaggaaggtgaagagcagcgagagcaagatccgggtgctgctgcaggagcggggggcccaggaccggcgcatccaggacctggagacagagctggagaagatggaggcccggctgaatgctgccctgcgggagaagaccagcctgagcgccaacaatgccaccctggagaagcagctgattgagctgaccaggaccaatgagctgctgaagagcaagttctctgaaaatggaaaccagaagaacctgcgcatcctgagcctggagctgatgaagctgaggaacaagcgggagaccaagatgaggggcatgatggccaagcaggagggcatggagatgaagctgcaggtgacccagaggagcctggaggagagccagggcaagatcgcccagctggagggcaagctggtgtccattgagaaggagaagattgatgagaagtcagaaacagagaagctgctggagtacatcgaggagatcagctgtgccagtgaccaggtggagaagtacaagctggacatcgcccagctggaggagaacctgaaggagaagaatgatgagatcctgagcctgaagcagagcctggaggagaacatcgtcatcctgagcaagcaggtggaggacctgaatgtgaagtgccagctgctggagaaggagaaggaggaccacgtgaacagaaaccgggagcacaatgaaaacctgaatgctgagatgcagaacctgaagcagaagttcatcctggagcagcaggagcgggagaagctgcagcagaaggagctgcagattgacagcctgctgcagcaggagaaggagctgagcagcagcctgcaccagaagctgtgcagcttccaggaggagatggtgaaggagaagaacctgtttgaggaggagctgaagcagaccctggatgagctggacaagctgcagcagaaggaggagcaggccgagcggctggtgaagcagctggaggaggaggccaagagcagagctgaggagctgaagctgctggaggagaagctgaagggcaaggaggccgagctggagaagagcagcgctgcccacacccaggccaccctgctgctgcaggagaagtatgacagcatggtgcagagcctggaggatgtgacagcccagtttgagagctacaaggccctgacagccagcgagattgaggacctgaagctggagaacagcagcctgcaggagaaggccgccaaggccggcaagaatgcagaagatgtgcagcaccagatcctggccacagagagcagcaaccaggagtatgtgaggatgctgctggacctgcagaccaagagcgccctgaaggagacagagatcaaggagatcaccgtgtccttcctgcagaagatcacagacctgcagaaccagctgaagcagcaggaggaggacttcaggaagcagctggaggatgaggagggcaggaaggccgagaaggagaacaccacagctgagctgacagaggagatcaacaagtggaggctgctgtatgaggagctgtacaacaagaccaagcccttccagctgcagctggatgcctttgaggtggagaagcaggccctgctgaatgagcacggggccgcccaggagcagctgaacaagatccgggacagctatgccaagctgctgggccaccagaacctgaagcagaagatcaagcacgtggtgaagctgaaggatgagaacagccagctgaagtctgaggtgtccaagctgcgctgccagctggccaagaagaagcagagcgagaccaagctgcaggaggagctgaacaaggtgctgggcatcaagcactttgaccccagcaaggccttccaccacgagagcaaggagaactttgccctgaagacccccctgaaggagggcaacaccaactgctaccgggcccccatggagtgccaggagagctggaagtag

SEQ ID NO: 19988 - DNA, 2175 bp, synthetic construct
  misc_feature 1..2175: note = Description of Artificial Sequence: Synthetic coding sequence
  source 1..2175: mol_type = other DNA
atgtccttccccaaggcccccctgaagcgcttcaatgaccccagcggctgtgcccccagccctggggcctatgatgtgaagaccctggaggtgctgaagggccctgtgtccttccagaagagccagcgcttcaagcagcagaaggagagcaagcagaacctgaatgtggacaaggacaccaccctgcctgccagcgccaggaaggtgaagagcagcgagagcaaggagagccagaagaatgacaaggacctgaagatcctggagaaggagatccgggtgctgctgcaggagcggggggcccaggaccggcgcatccaggacctggagacagagctggagaagatggaggcccggctgaatgctgccctgcgggagaagaccagcctgagcgccaacaatgccaccctggagaagcagctgattgagctgaccaggaccaatgagctgctgaagagcaagttctctgaaaatggaaaccagaagaacctgcgcatcctgagcctggagctgatgaagctgaggaacaagcgggagaccaagatgaggggcatgatggccaagcaggagggcatggagatgaagctgcaggtgacccagaggagcctggaggagagccagggcaagatcgcccagctggagggcaagctggtgtccattgagaaggagaagattgatgagaagtcagaaacagagaagctgctggagtacatcgaggagatcagctgtgccagtgaccaggtggagaagtacaagctggacatcgcccagctggaggagaacctgaaggagaagaatgatgagatcctgagcctgaagcagagcctggaggagaacatcgtcatcctgagcaagcaggtggaggacctgaatgtgaagtgccagctgctggagaaggagaaggaggaccacgtgaacagaaaccgggagcacaatgaaaacctgaatgctgagatgcagaacctgaagcagaagttcatcctggagcagcaggagcgggagaagctgcagcagaaggagctgcagattgacagcctgctgcagcaggagaaggagctgagcagcagcctgcaccagaagctgtgcagcttccaggaggagatggtgaaggagaagaacctgtttgaggaggagctgaagcagaccctggatgagctggacaagctgcagcagaaggaggagcaggccgagcggctggtgaagcagctggaggaggaggccaagagcagagctgaggagctgaagctgctggaggagaagctgaagggcaaggaggccgagctggagaagagcagcgctgcccacacccaggccaccctgctgctgcaggagaagtatgacagcatggtgcagagcctggaggatgtgacagcccagtttgagagctacaaggccctgacagccagcgagattgaggacctgaagctggagaacagcagcctgcaggagaaggccgccaaggccggcaagaatgcagaagatgtgcagcaccagatcctggccacagagagcagcaaccaggagtatgtgaggatgctgctggacctgcagaccaagagcgccctgaaggagacagagatcaaggagatcaccgtgtccttcctgcagaagatcacagacctgcagaaccagctgaagcagcaggaggaggacttcaggaagcagctggaggatgaggagggcaggaaggccgagaaggagaacaccacagctgagctgacagaggagatcaacaagtggaggctgctgtatgaggagctgtacaacaagaccaagcccttccagctgcagctggatgcctttgaggtggagaagcaggccctgctgaatgaacatggagctgcccaggagcagctgaacaagatccgggacagctatgccaagctgctgggccaccagaacctgaagcagaagatcaagcacgtggtgaagctgaaggatgagaacagccagctgaagtctgaggtgtccaagctgcgctgccagctggccaagaagaagcagagcgagaccaagctgcaggaggagctgaacaaggtgctgggcatcaagcactttgaccccagcaaggccttccaccacgagagcaaagaaaattttgccctgaagacccccctgaaggagggcaacaccaactgctaccgggcccccatggagtgccaggagagctggaagtag

SEQ ID NO: 19989 - DNA, 2178 bp, synthetic construct
  misc_feature 1..2178: note = Description of Artificial Sequence: Synthetic coding sequence
  source 1..2178: mol_type = other DNA
atgtccttccccaaggcccccctgaagcgcttcaatgaccccagcggctgtgcccccagccctggggcctatgatgtgaagaccctggaggtgctgaagggccctgtgtccttccagaagagccagcgcttcaagcagcagaaggagagcaagcagaacctgaatgtggacaaggacaccaccctgcctgccagcgccaggaaggtgaagagcagcgagagcaagaaggagagccagaagaatgacaaggacctgaagatcctggagaaggagatccgggtgctgctgcaggagcggggggcccaggaccggcgcatccaggacctggagacagagctggagaagatggaggcccggctgaatgctgccctgcgggagaagaccagcctgagcgccaacaatgccaccctggagaagcagctgattgagctgaccaggaccaatgagctgctgaagagcaagttctctgaaaatggaaaccagaagaacctgcgcatcctgagcctggagctgatgaagctgaggaacaagcgggagaccaagatgaggggcatgatggccaagcaggagggcatggagatgaagctgcaggtgacccagaggagcctggaggagagccagggcaagatcgcccagctggagggcaagctggtgtccattgagaaggagaagattgatgagaagtcagaaacagagaagctgctggagtacatcgaggagatcagctgtgccagtgaccaggtggagaagtacaagctggacatcgcccagctggaggagaacctgaaggagaagaatgatgagatcctgagcctgaagcagagcctggaggagaacatcgtcatcctgagcaagcaggtggaggacctgaatgtgaagtgccagctgctggagaaggagaaggaggaccacgtgaacagaaaccgggagcacaatgaaaacctgaatgctgagatgcagaacctgaagcagaagttcatcctggagcagcaggagcgggagaagctgcagcagaaggagctgcagattgacagcctgctgcagcaggagaaggagctgagcagcagcctgcaccagaagctgtgcagcttccaggaggagatggtgaaggagaagaacctgtttgaggaggagctgaagcagaccctggatgagctggacaagctgcagcagaaggaggagcaggccgagcggctggtgaagcagctggaggaggaggccaagagcagagctgaggagctgaagctgctggaggagaagctgaagggcaaggaggccgagctggagaagagcagcgctgcccacacccaggccaccctgctgctgcaggagaagtatgacagcatggtgcagagcctggaggatgtgacagcccagtttgagagctacaaggccctgacagccagcgagattgaggacctgaagctggagaacagcagcctgcaggagaaggccgccaaggccggcaagaatgcagaagatgtgcagcaccagatcctggccacagagagcagcaaccaggagtatgtgaggatgctgctggacctgcagaccaagagcgccctgaaggagacagagatcaaggagatcaccgtgtccttcctgcagaagatcacagacctgcagaaccagctgaagcagcaggaggaggacttcaggaagcagctggaggatgaggagggcaggaaggccgagaaggagaacaccacagctgagctgacagaggagatcaacaagtggaggctgctgtatgaggagctgtacaacaagaccaagcccttccagctgcagctggatgcctttgaggtggagaagcaggccctgctgaatgagcacggggccgcccaggagcagctgaacaagatccgggacagctatgccaagctgctgggccaccagaacctgaagcagaagatcaagcacgtggtgaagctgaaggatgagaacagccagctgaagtctgaggtgtccaagctgcgctgccagctggccaagaagaagcagagcgagaccaagctgcaggaggagctgaacaaggtgctgggcatcaagcactttgaccccagcaaggccttccaccacgagagcaaggagaactttgccctgaagacccccctgaaggagggcaacaccaactgctaccgggcccccatggagtgccaggagagctggaagtag

SEQ ID NO: 19990 - DNA, 2106 bp, synthetic construct
  misc_feature 1..2106: note = Description of Artificial Sequence: Synthetic coding sequence
  source 1..2106: mol_type = other DNA
atgtccttccccaaggcccccctgaagcgcttcaatgaccccagcggctgtgcccccagccctggggcctatgatgtgaagaccctggaggtgctgaagggccctgtgtccttccagaagagccagcgcttcaagcagcagaaggagagcaagcagaacctgaatgtggacaaggacaccaccctgcctgccagcgccaggaaggtgaagagcagcgagagcaagaaggagagccagaagaatgacaaggacctgaagatcctggagaaggagatccgggtgctgctgcaggagcggggggcccaggaccggcgcatccaggacctggagacagagctggagaagcagctgattgagctgaccaggaccaatgagctgctgaagagcaagttctctgaaaatggaaaccagaagaacctgcgcatcctgagcctggagctgatgaagctgaggaacaagcgggagaccaagatgaggggcatgatggccaagcaggagggcatggagatgaagctgcaggtgacccagaggagcctggaggagagccagggcaagatcgcccagctggagggcaagctggtgtccattgagaaggagaagattgatgagaagtcagaaacagagaagctgctggagtacatcgaggagatcagctgtgccagtgaccaggtggagaagtacaagctggacatcgcccagctggaggagaacctgaaggagaagaatgatgagatcctgagcctgaagcagagcctggaggagaacatcgtcatcctgagcaagcaggtggaggacctgaatgtgaagtgccagctgctggagaaggagaaggaggaccacgtgaacagaaaccgggagcacaatgaaaacctgaatgctgagatgcagaacctgaagcagaagttcatcctggagcagcaggagcgggagaagctgcagcagaaggagctgcagattgacagcctgctgcagcaggagaaggagctgagcagcagcctgcaccagaagctgtgcagcttccaggaggagatggtgaaggagaagaacctgtttgaggaggagctgaagcagaccctggatgagctggacaagctgcagcagaaggaggagcaggccgagcggctggtgaagcagctggaggaggaggccaagagcagagctgaggagctgaagctgctggaggagaagctgaagggcaaggaggccgagctggagaagagcagcgctgcccacacccaggccaccctgctgctgcaggagaagtatgacagcatggtgcagagcctggaggatgtgacagcccagtttgagagctacaaggccctgacagccagcgagattgaggacctgaagctggagaacagcagcctgcaggagaaggccgccaaggccggcaagaatgcagaagatgtgcagcaccagatcctggccacagagagcagcaaccaggagtatgtgaggatgctgctggacctgcagaccaagagcgccctgaaggagacagagatcaaggagatcaccgtgtccttcctgcagaagatcacagacctgcagaaccagctgaagcagcaggaggaggacttcaggaagcagctggaggatgaggagggcaggaaggccgagaaggagaacaccacagctgagctgacagaggagatcaacaagtggaggctgctgtatgaggagctgtacaacaagaccaagcccttccagctgcagctggatgcctttgaggtggagaagcaggccctgctgaatgagcacggggccgcccaggagcagctgaacaagatccgggacagctatgccaagctgctgggccaccagaacctgaagcagaagatcaagcacgtggtgaagctgaaggatgagaacagccagctgaagtctgaggtgtccaagctgcgctgccagctggccaagaagaagcagagcgagaccaagctgcaggaggagctgaacaaggtgctgggcatcaagcactttgaccccagcaaggccttccaccacgagagcaaggagaactttgccctgaagacccccctgaaggagggcaacaccaactgctaccgggcccccatggagtgccaggagagctggaagtag

SEQ ID NO: 19991 - DNA, 1917 bp, synthetic construct
  misc_feature 1..1917: note = Description of Artificial Sequence: Synthetic coding sequence
  source 1..1917: mol_type = other DNA
atgaccctgctgatccgggtgctgctgcaggagcggggggcccaggaccggcgcatccaggacctggagacagagctggagaagatggaggcccggctgaatgctgccctgcgggagaagaccagcctgagcgccaacaatgccaccctggagaagcagctgattgagctgaccaggaccaatgagctgctgaagagcaagttctctgaaaatggaaaccagaagaacctgcgcatcctgagcctggagctgatgaagctgaggaacaagcgggagaccaagatgaggggcatgatggccaagcaggagggcatggagatgaagctgcaggtgacccagaggagcctggaggagagccagggcaagatcgcccagctggagggcaagctggtgtccattgagaaggagaagattgatgagaagtcagaaacagagaagctgctggagtacatcgaggagatcagctgtgccagtgaccaggtggagaagtacaagctggacatcgcccagctggaggagaacctgaaggagaagaatgatgagatcctgagcctgaagcagagcctggaggagaacatcgtcatcctgagcaagcaggtggaggacctgaatgtgaagtgccagctgctggagaaggagaaggaggaccacgtgaacagaaaccgggagcacaatgaaaacctgaatgctgagatgcagaacctgaagcagaagttcatcctggagcagcaggagcgggagaagctgcagcagaaggagctgcagattgacagcctgctgcagcaggagaaggagctgagcagcagcctgcaccagaagctgtgcagcttccaggaggagatggtgaaggagaagaacctgtttgaggaggagctgaagcagaccctggatgagctggacaagctgcagcagaaggaggagcaggccgagcggctggtgaagcagctggaggaggaggccaagagcagagctgaggagctgaagctgctggaggagaagctgaagggcaaggaggccgagctggagaagagcagcgctgcccacacccaggccaccctgctgctgcaggagaagtatgacagcatggtgcagagcctggaggatgtgacagcccagtttgagagctacaaggccctgacagccagcgagattgaggacctgaagctggagaacagcagcctgcaggagaaggccgccaaggccggcaagaatgcagaagatgtgcagcaccagatcctggccacagagagcagcaaccaggagtatgtgaggatgctgctggacctgcagaccaagagcgccctgaaggagacagagatcaaggagatcaccgtgtccttcctgcagaagatcacagacctgcagaaccagctgaagcagcaggaggaggacttcaggaagcagctggaggatgaggagggcaggaaggccgagaaggagaacaccacagctgagctgacagaggagatcaacaagtggaggctgctgtatgaggagctgtacaacaagaccaagcccttccagctgcagctggatgcctttgaggtggagaagcaggccctgctgaatgaacatggagctgcccaggagcagctgaacaagatccgggacagctatgccaagctgctgggccaccagaacctgaagcagaagatcaagcacgtggtgaagctgaaggatgagaacagccagctgaagtctgaggtgtccaagctgcgctgccagctggccaagaagaagcagagcgagaccaagctgcaggaggagctgaacaaggtgctgggcatcaagcactttgaccccagcaaggccttccaccacgagagcaaagaaaattttgccctgaagacccccctgaaggagggcaacaccaactgctaccgggcccccatggagtgccaggagagctggaagtag

SEQ ID NO: 19992 - DNA, 996 bp, synthetic construct
  misc_feature 1..996: note = Description of Artificial Sequence: Synthetic coding sequence
  source 1..996: mol_type = other DNA
atgtccttccccaaggcccccctgaagcgcttcaatgaccccagcggctgtgcccccagccctggggcctatgatgtgaagaccctggaggtgctgaagggccctgtgtccttccagaagagccagcgcttcaagcagcagaaggagagcaagcagaacctgaatgtggacaaggacaccaccctgcctgccagcgccaggaaggtgaagagcagcgagagcaagatccgggtgctgctgcaggagcggggggcccaggaccggcgcatccaggacctggagacagagctggagaagatggaggcccggctgaatgctgccctgcgggagaagaccagcctgagcgccaacaatgccaccctggagaagcagctgattgagctgaccaggaccaatgagctgctgaagagcaagttctctgaaaatggaaaccagaagaacctgcgcatcctgagcctggagctgatgaagctgaggaacaagcgggagaccaagatgaggggcatgatggccaagcaggagggcatggagatgaagctgcaggtgacccagaggagcctggaggagagccagggcaagatcgcccagctggagggcaagctggtgtccattgagaaggagaagattgatgagaagtcagaaacagagaagctgctggagtacatcgaggagatcagctgtgccagtgaccaggtggagaagtacaagctggacatcgcccagctggaggagaacctgaaggagaagaatgatgagatcctgagcctgaagcagagcctggaggagaacatcgtcatcctgagcaagcaggtggaggacctgaatgtgaagtgccagctgctggagaaggagaaggaggaccacgtgaacagaaaccgggagcacaatgaaaacctgaatgctgagatgcagaacctgaagcagaagttcatcctggagcagcaggagcgggagaagctgcagcagaagaagaagcagatgaggaggaagaagtag

SEQ ID NO: 19993 - DNA, 537 bp, synthetic construct
  misc_feature 1..537: note = Description of Artificial Sequence: Synthetic coding sequence
  source 1..537: mol_type = other DNA
atgcacgtgaatggcaaggtggccctggtgactggagctgcccagggcatcggccgggcctttgctgaggccctgctgctgaagggggccaaggtggccctggtggactggaacctggaggccggcgtgcagtgcaaggccgccctggatgagcagtttgagccccagaagaccctcttcatccagtgtgatgtggccgaccagcagcagctgcgggacaccttcaggaaggtggtggaccacttcggccgcctggacatcctggtgaacaatgctggggtgaacaatgagaagaactgggagaagaccctgcagatcaacctggtgtctgtcatcagcggcacctacctgggcctggactacatgagcaagcagaatggaggagagggcggcatcatcatcaacatgagcagcctggccggcctgatgcctgtggcccagcagcctgtgtactgtgccagcaagcacggcatcgtgggcttcaccaggtctgctgcccccaccatcgactgccagtggattgacaacacccactag

SEQ ID NO: 19994 - DNA, 801 bp, synthetic construct
  misc_feature 1..801: note = Description of Artificial Sequence: Synthetic coding sequence
  source 1..801: mol_type = other DNA
atgcacgtgaatggcaaggtggccctggtgactggagctgcccagggcatcggccgggcctttgctgaggccctgctgctgaagggggccaaggtggccctggtggactggaacctggaggccggcgtgcagtgcaaggccgccctggatgagcagtttgagccccagaagaccctcttcatccagtgtgatgtggccgaccagcagcagctgcgggacaccttcaggaaggtggtggaccacttcggccgcctggacatcctggtgaacaatgctggggtgaacaatgagaagaactgggagaagaccctgcagatcaacctggtgtctgtcatcagcggcacctacctgggcctggactacatgagcaagcagaatggaggagagggcggcatcatcatcaacatgagcagcctggccggcctgatgcctgtggcccagcagcctgtgtactgtgccagcaagcacggcatcgtgggcttcaccaggtctgctgccctggccgccaacctgatgaacagcggcgtgcggctgaatgccatctgccccggctttgtgaacacagccatcctggagagcattgagaaggaggagaacatgggccagtacatcgagtacaaggaccacatcaaggacatgatcaagtactacggcatcctggacccccccctgattgccaacggcctcatcaccctgattgaagatgatgccctgaatggagccatcatgaagatcaccaccagcaagggcatccacttccaggactatgacaccacccccttccaggccaagacccagtag

SEQ ID NO: 19995 - DNA, 438 bp, synthetic construct
  misc_feature 1..438: note = Description of Artificial Sequence: Synthetic coding sequence
  source 1..438: mol_type = other DNA
atgagcaagcagaatggaggagagggcggcatcatcatcaacatgagcagcctggccggcctgatgcctgtggcccagcagcctgtgtactgtgccagcaagcatggaattgtgggcttcaccaggtctgctgccctggccgccaacctgatgaacagcggcgtgcggctgaatgccatctgccccggctttgtgaacacagccatcctggagagcattgagaaggaggagaacatgggccagtacatcgagtacaaggaccacatcaaggacatgatcaagtactacggcatcctggaccccccactcatcgccaacggcctcatcaccctgattgaagatgatgccctgaatggagccatcatgaagatcaccaccagcaagggcatccacttccaggactatgacaccacccccttccaggccaagacccagtag

SEQ ID NO: 19996 - DNA, 438 bp, synthetic construct; identical to SEQ ID NO: 19995
  misc_feature 1..438: note = Description of Artificial Sequence: Synthetic coding sequence
  source 1..438: mol_type = other DNA

SEQ ID NO: 19997 - DNA, 432 bp, synthetic construct
  misc_feature 1..432: note = Description of Artificial Sequence: Synthetic coding sequence
  source 1..432: mol_type = other DNA
atgcacgtgaatggcaaggtggccctggtgactggagctgcccagggcatcggccgggcctttgctgaggccctgctgctgaagggggccaaggtggccctggtggactggaacctggaggccggcgtgcagtgcaaggccgccctggatgagcagtttgagccccagaagaccctcttcatccagtgtgatgtggccgaccagcagcagctgcgggacaccttcaggaaggtggtggaccacttcggccgcctggacatcctggtgaacaatgctggggtgaacaatgagaagaactgggagaagaccctgcagatcaacctggtgtctgtcatcagcggcacctacctgggcctggactacatgagcaagcagaatggaggagagggcggcatcatcatcaacatgagcagcctggccgcccaccactag

SEQ ID NO: 19998 - DNA, 2202 bp, synthetic construct
  misc_feature 1..2202: note = Description of Artificial Sequence: Synthetic coding sequence
  source 1..2202: mol_type = other DNA
atgaccttccctgaggccgacatcctgctgaagagcggggagtgtgccggccagaccatgctggacaccatggaggcccctggccacagccggcagctgctgctgcagctgaacaaccagaggaccaagggcttcctgtgtgatgtgatcatcgtggtgcagaatgccctcttccgggcccacaagaatgtgctggccgccagcagcgcctacctgaagagcctggtggtgcatgacaacctgctgaacctggaccatgacatggtgtccccagctgtgttccggctggtgctggacttcatctacacaggccgcctggctgatggagctgaggccgctgctgctgctgctgtggcccctggagctgagcccagcctgggcgctgtgctggccgccgccagctacctgcagatcccagacctggtggccctgtgcaagaagaggctgaagagacatggcaagtactgccacctgcggggcggcggcggcggcggcggcggctacgccccctacggccggcccggccggggcctgcgggccgccacccctgtgatccaggcctgctaccccagccctgtgggccccccacctcctcctgctgctgagcccccatctggccctgaggccgctgtgaacacccactgtgccgagctgtatgccagcggccctggccctgctgctgccctgtgtgccagcgagcggcgctgcagccccctgtgtggcctggacctgagcaagaagagccccccaggcagcgctgcccctgagcggcccctggccgagcgggagctgccccccaggccagacagccccccatctgctggccctgctgcctacaaggagccccccctggccctgcccagcctgccccccctgcccttccagaagctggaggaggccgccccacccagcgaccccttccggggcggcagcggcagccctggccctgagcccccaggccgcccagatggccccagcctgctgtaccgctggatgaagcatgagcccggcctgggcagctatggagatgagctgggccgggagcggggcagccccagcgagcgctgtgaggagagaggaggagatgctgctgtgtccccaggcggcccccccctgggcctggcccccccaccccgctacccaggcagcctggatggccctggagctggaggagatggagatgactacaagagcagcagcgaggagaccggcagcagcgaggaccccagccccccaggcggccacctggagggctacccctgcccccacctggcctacggggagcctgagagctttggagacaacctgtatgtgtgcatcccctgtgggaagggcttccccagcagcgagcagctgaatgcccacgtggaggcccacgtggaggaggaggaggccctgtatggccgggcagaggccgctgaggtggccgccggggccgccggcctgggccccccatttggaggcggcggggacaaggtggccggggcccctgggggcctgggggagctgctgcggccctaccgctgtgccagctgtgacaagagctacaaggaccctgccaccctgcggcagcacgagaagacccactggctgacccggccctacccctgcaccatctgtgggaagaagttcacccagaggggcaccatgaccaggcacatgaggagccacctgggcctgaagccctttgcctgtgatgcctgtggcatgaggttcacccggcagtaccgcctgacagagcacatgaggatccacagcggggagaagccctatgagtgccaggtgtgtggcggcaagtttgcccagcagaggaacctgatcagccacatgaagatgcatgctgtgggcggcgctgctggagctgctggggccctggccggcctgggcggcctgcccggggtgcccggcccagatggcaagggcaagctggacttccctgagggcgtgtttgctgtggcccggctgacagctgagcagctgagcctgaagcagcaggacaaggctgctgctgctgagctgctggcccagaccacccacttcctgcatgaccccaaggtggccctggagagcctgtaccccctggccaagttcaccgctgagctgggcctgagcccagacaaggctgctgaggtgctgagccagggcgcccacctggccgccggcccagatggccgcaccatcgaccgcttcagccccacctag

SEQ ID NO: 19999 - DNA, 2145 bp, synthetic construct
  misc_feature 1..2145: note = Description of Artificial Sequence: Synthetic coding sequence
  source 1..2145: mol_type = other DNA
atgctggacaccatggaggcccctggccacagccggcagctgctgctgcagctgaacaaccagaggaccaagggcttcctgtgtgatgtgatcatcgtggtgcagaatgccctcttccgggcccacaagaatgtgctggccgccagcagcgcctacctgaagagcctggtggtgcatgacaacctgctgaacctggaccatgacatggtgtccccagctgtgttccggctggtgctggacttcatctacacaggccgcctggctgatggagctgaggccgctgctgctgctgctgtggcccctggagctgagcccagcctgggcgctgtgctggccgccgccagctacctgcagatcccagacctggtggccctgtgcaagaagaggctgaagagacatggcaagtactgccacctgcggggcggcggcggcggcggcggcggctacgccccctacggccggcccggccggggcctgcgggccgccacccctgtgatccaggcctgctaccccagccctgtgggccccccacctcctcctgctgctgagccccccagcggccctgaggccgctgtgaacacccactgtgccgagctgtatgccagcggccctggccctgctgctgccctgtgtgccagcgagcggcgctgcagccccctgtgtggcctggacctgagcaagaagagccccccaggcagcgctgcccctgagcggcccctggccgagcgggagctgccccccaggccagacagcccccccagcgctggccctgctgcctacaaggagccccccctggccctgcccagcctgccccccctgcccttccagaagctggaggaggccgcccccccaagtgaccccttccggggcggcagcggcagccctggccctgagcccccaggccgcccagatggccccagcctgctgtaccgctggatgaagcatgagcccggcctgggcagctatggagatgagctgggccgggagcggggcagccccagcgagcgctgtgaggagagaggaggagatgctgctgtgtcccctgggggcccccccctgggcctggcccccccaccccgctacccaggcagcctggatggccctggagctggaggagatggagatgactacaagagcagcagcgaggagaccggcagcagcgaggaccccagccccccaggcggccacctggagggctacccctgcccccacctggcctatggagagcctgagagctttggagacaacctgtatgtgtgcatcccctgtgggaagggcttccccagcagcgagcagctgaatgcccacgtggaggcccacgtggaggaggaggaggccctgtatggccgggcagaggccgctgaggtggccgccggggctgctggcctgggccccccatttggaggcggcggggacaaggtggccggggcccctgggggcctgggggagctgctgcggccctaccgctgtgccagctgtgacaagagctacaaggaccctgccaccctgcggcagcacgagaagacccactggctgacccggccctacccctgcaccatctgtgggaagaagttcacccagaggggcaccatgaccaggcacatgaggagccacctgggcctgaagccctttgcctgtgatgcctgtggcatgaggttcacccggcagtaccgcctgacagagcacatgaggatccacagcggggagaagccctatgagtgccaggtgtgtggcggcaagtttgcccagcagaggaacctgatcagccacatgaagatgcatgctgtgggcggggccgccggggctgctggggccctggccggcctgggcggcctgcccggggtgcccggcccagatggcaagggcaagctggacttccctgagggcgtgtttgctgtggcccggctgacagctgagcagctgagcctgaagcagcaggacaaggctgctgctgctgagctgctggcccagaccacccacttcctgcatgaccccaaggtggccctggagagcctgtaccccctggccaagttcaccgctgagctgggcctgagcccagacaaggctgctgaggtgctgagccagggcgcccacctggccgccggcccagatggccgcaccatcgaccgcttcagccccacctag

SEQ ID NO: 20000 - DNA, 2208 bp, synthetic construct
  misc_feature 1..2208: note = Description of Artificial Sequence: Synthetic coding sequence
  source 1..2208: mol_type = other DNA
atggagggcgctgggggcgccaatgacaagaagaagatcagcagcgagaggaggaaggagaagagcagagatgctgcccggagcagaagaagcaaggagagcgaggtgttctatgagctggcccaccagctgcccctgccccacaacgtgagcagccacctggacaaggcctctgtgatgaggctgaccatctcctacctgcgggtgaggaagctgctggatgctggggacctggacattgaagatgacatgaaggcccagatgaactgcttctacctgaaggccctggatggctttgtgatggtgctgacagatgatggagacatgatctacatcagtgacaacgtgaacaagtacatgggcctgacccagtttgagctgaccggccacagcgtgtttgacttcacccacccctgtgaccacgaggagatgagggagatgctgacccacagaaatggcctggtgaagaagggcaaggagcagaacacccagaggagcttcttcctgaggatgaagtgcaccctgaccagccggggccgcaccatgaacatcaagagcgccacctggaaggtgctgcactgcaccggccacatccacgtgtatgacaccaacagcaaccagccccagtgtggctacaagaagccacccatgacctgcctggtgctgatctgtgagcccatcccccaccccagcaacatcgagatccccctggacagcaagaccttcctgagccgccacagcctggacatgaagttctcctactgtgatgagcgcatcacagagctgatgggctatgagcctgaggagctgctgggccgcagcatctatgagtactaccacgccctggacagcgaccacctgaccaagacccaccacgacatgttcaccaagggccaggtgaccaccggccagtacaggatgctggccaagaggggcggctacgtgtgggtggagacccaggccaccgtcatctacaacaccaagaacagccagccccagtgcatcgtgtgtgtgaactacgtggtgtctggcatcatccagcacgacctgatcttcagcctgcagcagacagaatgtgtgctgaagcctgtggagagcagtgacatgaagatgacccagctgttcaccaaggtggagagcgaggacaccagcagcctgtttgacaagctgaagaaggagccagatgccctgaccctgctggccccagctgctggggacaccatcatcagcctggactttggcagcaatgacacagaaacagatgaccagcagctggaggaggtgcccctgtacaatgatgtgatgctgcccagccccaatgagaagctgcagaacatcaacctggccatgagccccctgcccacagctgagacccccaagcccctgcggagcagcgctgaccctgccctgaaccaggaggtggccctgaagctggagcccaaccctgagagcctggagctgtccttcaccatgccccagatccaggaccagacccccagccccagtgatggcagcacccggcagagcagccctgagcccaacagccccagcgagtactgcttctacgtggacagcgacatggtgaatgagttcaagctggagctggtggagaagctgtttgctgaggacacagaggccaagaaccccttcagcacccaggacacagacctggacctggagatgctggccccctacatccccatggatgatgacttccagctgcggagctttgaccagctgagccccctggagagcagcagcgccagccctgagagcgccagcccccagagcacagtgaccgtcttccagcagacccagatccaggagcccacagccaatgccaccaccaccacagccaccacagatgagctgaagacagtgaccaaggacaggatggaggacatcaagatcctgattgccagccccagccccacccacatccacaaggagaccaccagcgccaccagcagcccctacagagacacccagagcaggacagccagccccaacagagctgggaagggcgtgattgagcagacagagaagagccaccccaggagccccaacgtgctgtctgtggccctgagccagaggaccaccgtgcctgaggaggagctgaaccccaagatcctggccctgcagaatgcccagaggaagaggaagatggagcatgatggcagcctcttccaggccgtgggcatcatctag

SEQ ID NO: 20001 - DNA, 2481 bp, synthetic construct
  misc_feature 1..2481: note = Description of Artificial Sequence: Synthetic coding sequence
  source 1..2481: mol_type = other DNA
atggagggcgctgggggcgccaatgacaagaagaagatcagcagcgagaggaggaaggagaagagcagagatgctgcccggagcagaagaagcaaggagagcgaggtgttctatgagctggcccaccagctgcccctgccccacaacgtgagcagccacctggacaaggcctctgtgatgaggctgaccatctcctacctgcgggtgaggaagctgctggatgctggggacctggacattgaagatgacatgaaggcccagatgaactgcttctacctgaaggccctggatggctttgtgatggtgctgacagatgatggagacatgatctacatcagtgacaacgtgaacaagtacatgggcctgacccagtttgagctgaccggccacagcgtgtttgacttcacccacccctgtgaccacgaggagatgagggagatgctgacccacagaaatggcctggtgaagaagggcaaggagcagaacacccagaggagcttcttcctgaggatgaagtgcaccctgaccagccggggccgcaccatgaacatcaagagcgccacctggaaggtgctgcactgcaccggccacatccacgtgtatgacaccaacagcaaccagccccagtgtggctacaagaagccacccatgacctgcctggtgctgatctgtgagcccatcccccaccccagcaacatcgagatccccctggacagcaagaccttcctgagccgccacagcctggacatgaagttctcctactgtgatgagcgcatcacagagctgatgggctatgagcctgaggagctgctgggccgcagcatctatgagtactaccacgccctggacagcgaccacctgaccaagacccaccacgacatgttcaccaagggccaggtgaccaccggccagtacaggatgctggccaagaggggcggctacgtgtgggtggagacccaggccaccgtcatctacaacaccaagaacagccagccccagtgcatcgtgtgtgtgaactacgtggtgtctggcatcatccagcacgacctgatcttcagcctgcagcagacagaatgtgtgctgaagcctgtggagagcagtgacatgaagatgacccagctgttcaccaaggtggagagcgaggacaccagcagcctgtttgacaagctgaagaaggagccagatgccctgaccctgctggccccagctgctggggacaccatcatcagcctggactttggcagcaatgacacagaaacagatgaccagcagctggaggaggtgcccctgtacaatgatgtgatgctgcccagccccaatgagaagctgcagaacatcaacctggccatgagccccctgcccacagctgagacccccaagcccctgcggagcagcgctgaccctgccctgaaccaggaggtggccctgaagctggagcccaaccctgagagcctggagctgtccttcaccatgccccagatccaggaccagacccccagccccagtgatggcagcacccggcagagcagccctgagcccaacagccccagcgagtactgcttctacgtggacagcgacatggtgaatgagttcaagctggagctggtggagaagctgtttgctgaggacacagaggccaagaaccccttcagcacccaggacacagacctggacctggagatgctggccccctacatccccatggatgatgacttccagctgcggagctttgaccagctgagccccctggagagcagcagcgccagccctgagagcgccagcccccagagcacagtgaccgtcttccagcagacccagatccaggagcccacagccaatgccaccaccaccacagccaccacagatgagctgaagacagtgaccaaggacaggatggaggacatcaagatcctgattgccagccccagccccacccacatccacaaggagaccaccagcgccaccagcagcccctacagagacacccagagcaggacagccagccccaacagagctgggaagggcgtgattgagcagacagagaagagccaccccaggagccccaacgtgctgtctgtggccctgagccagaggaccaccgtgcctgaggaggagctgaaccccaagatcctggccctgcagaatgcccagaggaagaggaagatggagcatgatggcagcctcttccaggccgtgggcatcggcaccctgctgcagcagccagatgaccatgctgccaccaccagcctgtcctggaagagggtgaagggctgcaagagcagcgagcagaatggcatggagcagaagaccatcatcctgatccccagcgacctggcctgccgcctgctgggccagagcatggatgagagcggcctgccccagctgaccagctatgactgtgaggtgaatgcccccatccagggcagcaggaacctgctgcagggcgaggagctgctgcgggccctggaccaggtgaactag

SEQ ID NO: 20002 - DNA, 2304 bp, synthetic construct
  misc_feature 1..2304: note = Description of Artificial Sequence: Synthetic coding sequence
  source 1..2304: mol_type = other DNA
atgaggctgaccatctcctacctgcgggtgaggaagctgctggatgctggggacctggacattgaagatgacatgaaggcccagatgaactgcttctacctgaaggccctggatggctttgtgatggtgctgacagatgatggagacatgatctacatcagtgacaacgtgaacaagtacatgggcctgacccagtttgagctgaccggccacagcgtgtttgacttcacccacccctgtgaccacgaggagatgagggagatgctgacccacagaaatggcctggtgaagaagggcaaggagcagaacacccagaggagcttcttcctgaggatgaagtgcaccctgaccagccggggccgcaccatgaacatcaagagcgccacctggaaggtgctgcactgcaccggccacatccacgtgtatgacaccaacagcaaccagccccagtgtggctacaagaagccacccatgacctgcctggtgctgatctgtgagcccatcccccaccccagcaacatcgagatccccctggacagcaagaccttcctgagccgccacagcctggacatgaagttctcctactgtgatgagcgcatcacagagctgatgggctatgagcctgaggagctgctgggccgcagcatctatgagtactaccacgccctggacagcgaccacctgaccaagacccaccacgacatgttcaccaagggccaggtgaccaccggccagtacaggatgctggccaagagaggaggctacgtgtgggtggagacccaggccaccgtcatctacaacaccaagaacagccagccccagtgcatcgtgtgtgtgaactacgtggtgtctggcatcatccagcacgacctgatcttcagcctgcagcagacagaatgtgtgctgaagcctgtggagagcagtgacatgaagatgacccagctgttcaccaaggtggagagcgaggacaccagcagcctgtttgacaagctgaagaaggagccagatgccctgaccctgctggccccagctgctggggacaccatcatcagcctggactttggcagcaatgacacagaaacagatgaccagcagctggaggaggtgcccctgtacaatgatgtgatgctgcccagccccaatgagaagctgcagaacatcaacctggccatgagccccctgcccacagctgagacccccaagcccctgcggagcagcgctgaccctgccctgaaccaggaggtggccctgaagctggagcccaaccctgagagcctggagctgtccttcaccatgccccagatccaggaccagacccccagccccagtgatggcagcacccggcagagcagccctgagcccaacagccccagcgagtactgcttctacgtggacagcgacatggtgaatgagttcaagctggagctggtggagaagctgtttgctgaggacacagaggccaagaaccccttcagcacccaggacacagacctggacctggagatgctggccccctacatccccatggatgatgacttccagctgcggagctttgaccagctgagccccctggagagcagcagcgccagccctgagagcgccagcccccagagcacagtgacagtgttccagcagacccagatccaggagcccacagccaatgccaccaccaccacagccaccacagatgagctgaagacagtgaccaaggacaggatggaggacatcaagatcctgattgccagccccagccccacccacatccacaaggagaccaccagcgccaccagcagcccctacagagacacccagagcaggacagccagccccaacagagctggaaaaggagtcatcgagcagacagagaagagccaccccaggagccccaacgtgctgtctgtggccctgagccagaggaccaccgtgcctgaggaggagctgaaccccaagatcctggccctgcagaatgcccagaggaagaggaagatggagcatgatggcagcctcttccaggccgtgggcatcggcaccctgctgcagcagccagatgaccacgccgccaccaccagcctgtcctggaagagggtgaagggctgcaagagcagcgagcagaatggcatggagcagaagaccatcatcctgatccccagcgacctggcctgccgcctgctgggccagagcatggatgaaagtggcctgccccagctgaccagctatgactgtgaggtgaatgcccccatccagggcagcaggaacctgctgcagggcgaggagctgctgcgggccctggaccaggtgaactag

SEQ ID NO: 20003 - DNA, 2484 bp, synthetic construct
  misc_feature 1..2484: note = Description of Artificial Sequence: Synthetic coding sequence
  source 1..2484: mol_type = other DNA
atggagggcgctgggggcgccaatgacaagaagaaccgcatcagcagcgagaggaggaaggagaagagcagagatgctgcccggagccgccgcagcaaggagagcgaggtgttctatgagctggcccaccagctgcccctgccccacaacgtgagcagccacctggacaaggcctctgtgatgaggctgaccatctcctacctgcgggtgaggaagctgctggatgctggggacctggacattgaagatgacatgaaggcccagatgaactgcttctacctgaaggccctggatggctttgtgatggtgctgacagatgatggagacatgatctacatcagtgacaacgtgaacaagtacatgggcctgacccagtttgagctgaccggccacagcgtgtttgacttcacccacccctgtgaccacgaggagatgagggagatgctgacccacagaaatggcctggtgaagaagggcaaggagcagaacacccagaggagcttcttcctgaggatgaagtgcaccctgaccagccggggccgcaccatgaacatcaagagcgccacctggaaggtgctgcactgcaccggccacatccacgtgtatgacaccaacagcaaccagccccagtgtggctacaagaagccacccatgacctgcctggtgctgatctgtgagcccatcccccaccccagcaacatcgagatccccctggacagcaagaccttcctgagccgccacagcctggacatgaagttctcctactgtgatgagcgcatcacagagctgatgggctatgagcctgaggagctgctgggccgcagcatctatgagtactaccacgccctggacagcgaccacctgaccaagacccaccacgacatgttcaccaagggccaggtgaccaccggccagtacaggatgctggccaagagaggaggctacgtgtgggtggagacccaggccaccgtcatctacaacaccaagaacagccagccccagtgcatcgtgtgtgtgaactacgtggtgtctggcatcatccagcacgacctgatcttcagcctgcagcagacagaatgtgtgctgaagcctgtggagagcagtgacatgaagatgacccagctgttcaccaaggtggagagcgaggacaccagcagcctgtttgacaagctgaagaaggagccagatgccctgaccctgctggccccagctgctggggacaccatcatcagcctggactttggcagcaatgacacagaaacagatgaccagcagctggaggaggtgcccctgtacaatgatgtgatgctgcccagccccaatgagaagctgcagaacatcaacctggccatgagccccctgcccacagctgagacccccaagcccctgcggagcagcgctgaccctgccctgaaccaggaggtggccctgaagctggagcccaaccctgagagcctggagctgtccttcaccatgccccagatccaggaccagacccccagccccagtgatggcagcacccggcagagcagccctgagcccaacagccccagcgagtactgcttctacgtggacagcgacatggtgaatgagttcaagctggagctggtggagaagctgtttgctgaggacacagaggccaagaaccccttcagcacccaggacacagacctggacctggagatgctggccccctacatccccatggatgatgacttccagctgcggagctttgaccagctgagccccctggagagcagcagcgccagccctgagagcgccagcccccagagcacagtgacagtgttccagcagacccagatccaggagcccacagccaatgccaccaccaccacagccaccacagatgagctgaagacagtgaccaaggacaggatggaggacatcaagatcctgattgccagccccagccccacccacatccacaaggagaccaccagcgccaccagcagcccctacagagacacccagagcaggacagccagccccaacagagctggaaaaggagtcatcgagcagacagagaagagccaccccaggagccccaacgtgctgtctgtggccctgagccagaggaccaccgtgcctgaggaggagctgaaccccaagatcctggccctgcagaatgcccagaggaagaggaagatggagcatgatggcagcctcttccaggccgtgggcatcggcaccctgctgcagcagccagatgaccacgccgccaccaccagcctgtcctggaagagggtgaagggctgcaagagcagcgagcagaatggcatggagcagaagaccatcatcctgatccccagcgacctggcctgccgcctgctgggccagagcatggatgaaagtggcctgccccagctgaccagctatgactgtgaggtgaatgcccccatccagggcagcaggaacctgctgcagggcgaggagctgctgcgggccctggaccaggtgaactag

SEQ ID NO: 20004 - DNA, 2553 bp, synthetic construct
  misc_feature 1..2553: note = Description of Artificial Sequence: Synthetic coding sequence
  source 1..2553: mol_type = other DNA
atgagcagccagtgccgcagcctggagaacaagtttgtgttcctgaaggagggcctgggcaacagcaagccagaggagctggaggagatcagaattgaaaatggccgcatcagcagcgagaggaggaaggagaagagcagagatgctgcccggagcagaagaagcaaggagagcgaggtgttctatgagctggcccaccagctgcccctgccccacaacgtgagcagccacctggacaaggcctctgtgatgaggctgaccatctcctacctgcgggtgaggaagctgctggatgctggggacctggacattgaagatgacatgaaggcccagatgaactgcttctacctgaaggccctggatggctttgtgatggtgctgacagatgatggagacatgatctacatcagtgacaacgtgaacaagtacatgggcctgacccagtttgagctgaccggccacagcgtgtttgacttcacccacccctgtgaccacgaggagatgagggagatgctgacccacagaaatggcctggtgaagaagggcaaggagcagaacacccagaggagcttcttcctgaggatgaagtgcaccctgaccagccggggccgcaccatgaacatcaagagcgccacctggaaggtgctgcactgcaccggccacatccacgtgtatgacaccaacagcaaccagccccagtgtggctacaagaagccacccatgacctgcctggtgctgatctgtgagcccatcccccaccccagcaacatcgagatccccctggacagcaagaccttcctgagccgccacagcctggacatgaagttctcctactgtgatgagcgcatcacagagctgatgggctatgagcctgaggagctgctgggccgcagcatctatgagtactaccacgccctggacagcgaccacctgaccaagacccaccacgacatgttcaccaagggccaggtgaccaccggccagtacaggatgctggccaagaggggcggctacgtgtgggtggagacccaggccaccgtcatctacaacaccaagaacagccagccccagtgcatcgtgtgtgtgaactacgtggtgtctggcatcatccagcacgacctgatcttcagcctgcagcagacagaatgtgtgctgaagcctgtggagagcagtgacatgaagatgacccagctgttcaccaaggtggagagcgaggacaccagcagcctgtttgacaagctgaagaaggagccagatgccctgaccctgctggccccagctgctggggacaccatcatcagcctggactttggcagcaatgacacagaaacagatgaccagcagctggaggaggtgcccctgtacaatgatgtgatgctgcccagccccaatgagaagctgcagaacatcaacctggccatgagccccctgcccacagctgagacccccaagcccctgcggagcagcgctgaccctgccctgaaccaggaggtggccctgaagctggagcccaaccctgagagcctggagctgtccttcaccatgccccagatccaggaccagacccccagccccagtgatggcagcacccggcagagcagccctgagcccaacagccccagcgagtactgcttctacgtggacagcgacatggtgaatgagttcaagctggagctggtggagaagctgtttgctgaggacacagaggccaagaaccccttcagcacccaggacacagacctggacctggagatgctggccccctacatccccatggatgatgacttccagctgcggagctttgaccagctgagccccctggagagcagcagcgccagccctgagagcgccagcccccagagcacagtgaccgtcttccagcagacccagatccaggagcccacagccaatgccaccaccaccacagccaccacagatgagctgaagacagtgaccaaggacaggatggaggacatcaagatcctgattgccagccccagccccacccacatccacaaggagaccaccagcgccaccagcagcccctacagagacacccagagcaggacagccagccccaacagagctgggaagggcgtgattgagcagacagagaagagccaccccaggagccccaacgtgctgtctgtggccctgagccagaggaccaccgtgcctgaggaggagctgaaccccaagatcctggccctgcagaatgcccagaggaagaggaagatggagcatgatggcagcctcttccaggccgtgggcatcggcaccctgctgcagcagccagatgaccatgctgccaccaccagcctgtcctggaagagggtgaagggctgcaagagcagcgagcagaatggcatggagcagaagaccatcatcctgatccccagcgacctggcctgccgcctgctgggccagagcatggatgagagcggcctgccccagctgaccagctatgactgtgaggtgaatgcccccatccagggcagcaggaacctgctgcagggcgaggagctgctgcgggccctggaccaggtgaactag

SEQ ID NO: 20005 - DNA, 1734 bp, synthetic construct
  misc_feature 1..1734: note = Description of Artificial Sequence: Synthetic coding sequence
  source 1..1734: mol_type = other DNA
atgaagttctcctactgtgatgagcgcatcacagagctgatgggctatgagcctgaggagctgctgggccgcagcatctatgagtactaccacgccctggacagcgaccacctgaccaagacccaccacgacatgttcaccaagggccaggtgaccaccggccagtacaggatgctggccaagagaggaggctacgtgtgggtggagacccaggccaccgtcatctacaacaccaagaacagccagccccagtgcatcgtgtgtgtgaactacgtggtgtctggcatcatccagcacgacctgatcttcagcctgcagcagacagaatgtgtgctgaagcctgtggagagcagtgacatgaagatgacccagctgttcaccaaggtggagagcgaggacaccagcagcctgtttgacaagctgaagaaggagccagatgccctgaccctgctggccccagctgctggggacaccatcatcagcctggactttggcagcaatgacacagaaacagatgaccagcagctggaggaggtgcccctgtacaatgatgtgatgctgcccagccccaatgagaagctgcagaacatcaacctggccatgagccccctgcccacagctgagacccccaagcccctgcggagcagcgctgaccctgccctgaaccaggaggtggccctgaagctggagcccaaccctgagagcctggagctgtccttcaccatgccccagatccaggaccagacccccagccccagtgatggcagcacccggcagagcagccctgagcccaacagccccagcgagtactgcttctacgtggacagcgacatggtgaatgagttcaagctggagctggtggagaagctgtttgctgaggacacagaggccaagaaccccttcagcacccaggacacagacctggacctggagatgctggccccctacatccccatggatgatgacttccagctgcggagctttgaccagctgagccccctggagagcagcagcgccagccctgagagcgccagcccccagagcacagtgacagtgttccagcagacccagatccaggagcccacagccaatgccaccaccaccacagccaccacagatgagctgaagacagtgaccaaggacaggatggaggacatcaagatcctgattgccagccccagccccacccacatccacaaggagaccaccagcgccaccagcagcccctacagagacacccagagcaggacagccagccccaacagagctggaaaaggagtcatcgagcagacagagaagagccaccccaggagccccaacgtgctgtctgtggccctgagccagaggaccaccgtgcctgaggaggagctgaaccccaagatcctggccctgcagaatgcccagaggaagaggaagatggagcatgatggcagcctcttccaggccgtgggcatcggcaccctgctgcagcagccagatgaccacgccgccaccaccagcctgtcctggaagagggtgaagggctgcaagagcagcgagcagaatggcatggagcagaagaccatcatcctgatccccagcgacctggcctgccgcctgctgggccagagcatggatgaaagtggcctgccccagctgaccagctatgactgtgaggtgaatgcccccatccagggcagcaggaacctgctgcagggcgaggagctgctgcgggccctggaccaggtgaactag

SEQ ID NO: 20006 - DNA, 2304 bp, synthetic construct; identical to SEQ ID NO: 20002
  misc_feature 1..2304: note = Description of Artificial Sequence: Synthetic coding sequence
  source 1..2304: mol_type = other DNA

SEQ ID NO: 20007 - DNA, 1296 bp, synthetic construct
  misc_feature 1..1296: note = Description of Artificial Sequence: Synthetic coding sequence
  source 1..1296: mol_type = other DNA
atggaggacatccagaccaatgctgagctgaagagcacccaggagcagagcgtgcctgctgagagcgctgctgtgctgaatgactacagcctgaccaagagccatgagatggagaatgtggacagcggggagggccctgccaatgaagatgaagatattggagatgacagcatgaaggtgaaggatgagtacagcgagagagatgaaaatgtgctgaagtctgagcccatgggaaatgctgaggagcctgagatcccctacagctacagccgggagtacaatgaatatgagaacatcaagctggagcggcacgtggtgtcctttgacagcagccggcccaccagcggcaagatgaactgtgatgtgtgtggcctgagctgcatctccttcaacgtgctgatggtgcacaagaggagccacactggagagcggcccttccagtgcaaccagtgtggggccagcttcacccagaagggcaacctgctgcggcacatcaagctgcacactggagagaagcccttcaagtgccacctgtgcaactatgcctgccagaggagagatgccctgaccggccacctgcggacccacagcggggagaagaggcactgctttgatgtgaactacaacagcagctacatgtatgagaaggagagcgagctgatccagaccaggatgatggaccaggccatcaacaatgccatctcctacctgggcgctgaggccctgcggcccctggtgcagaccccaccagcccccaccagcgagatggtgcctgtgatcagctccatgtaccccatcgccctgaccagggctgagatgagcaatggagccccccaggagctggagaagaagagcatccacctgcctgagaagtctgtgcccagcgagcggggcctgagccccaacaacagcggccatgacagcacagacacagacagcaaccacgaggagcggcagaaccacatctaccagcagaaccacatggtgctgagccgggccagaaatggcatgcccctgctgaaggaggtgcccaggagctatgagctgctgaagcccccacccatctgcccccgggacagcgtgaaggtgatcaacaaggagggggaggtgatggatgtgtaccgctgtgaccactgccgggtgctcttcctggactatgtgatgttcaccatccacatgggctgccacggcttccgggacccctttgagtgcaacatgtgtggctaccgcagccatgacagatatgagttcagcagccacatcgcccggggggagcaccgggccctgctgaagtag

SEQ ID NO: 20008 - DNA, 1245 bp, synthetic construct
  misc_feature 1..1245: note = Description of Artificial Sequence: Synthetic coding sequence
  source 1..1245: mol_type = other DNA
atggaggacatccagaccaatgctgagctgaagagcacccaggagcagagcgtgcctgctgagagcgctgctgtgctgaatgactacagcctgaccaagagccatgagatggagaatgtggacagcggggagggccctgccaatgaagatgaagatattggagatgacagcatgaaggtgaaggatgagtacagcgagagagatgaaaatgtgctgaagtctgagcccatgggaaatgctgaggagcctgagatcccctacagctacagccgggagtacaatgaatatgagaacatcaagctggagcggcacgtggtgtcctttgacagcagccggcccaccagcggcaagatgaactgtgatgtgtgtggcctgagctgcatctccttcaacgtgctgatggtgcacaagaggagccacacagccagcgctgaggcccggcacatcaaggccgagatgggcagcgagcgggccctggtgctggaccggctggccagcaatgtggccaagaggaagagctccatgccccagaagttcatcggggagaagaggcactgctttgatgtgaactacaacagcagctacatgtatgagaaggagagcgagctgatccagaccaggatgatggaccaggccatcaacaatgccatctcctacctgggcgctgaggccctgcggcccctggtgcagaccccaccagcccccaccagcgagatggtgcctgtgatcagctccatgtaccccatcgccctgaccagggctgagatgagcaatggagccccccaggagctggagaagaagagcatccacctgcctgagaagtctgtgcccagcgagcggggcctgagccccaacaacagcggccatgacagcacagacacagacagcaaccacgaggagcggcagaaccacatctaccagcagaaccacatggtgctgagccgggccagaaatggcatgcccctgctgaaggaggtgcccaggagctatgagctgctgaagcccccacccatctgcccccgggacagcgtgaaggtgatcaacaaggagggggaggtgatggatgtgtaccgctgtgaccactgccgggtgctcttcctggactatgtgatgttcaccatccacatgggctgccacggcttccgggacccctttgagtgcaacatgtgtggctaccgcagccatgacagatatgagttcagcagccacatcgcccggggggagcaccgggccctgctgaagtag

SEQ ID NO: 20009 - DNA, 1413 bp, synthetic construct
  misc_feature 1..1413: note = Description of Artificial Sequence: Synthetic coding sequence
  source 1..1413: mol_type = other DNA
atggaggacatccagaccaatgctgagctgaagagcacccaggagcagagcgtgcctgctgagagcgctgctgtgctgaatgactacagcctgaccaagagccatgagatggagaatgtggacagcggggagggccctgccaatgaagatgaagatattggagatgacagcatgaaggtgaaggatgagtacagcgagagagatgaaaatgtgctgaagtctgagcccatgggaaatgctgaggagcctgagatcccctacagctacagccgggagtacaatgaatatgagaacatcaagctggagcggcacgtggtgtcctttgacagcagccggcccaccagcggcaagatgaactgtgatgtgtgtggcctgagctgcatctccttcaacgtgctgatggtgcacaagaggagccacactggagagcggcccttccagtgcaaccagtgtggggccagcttcacccagaagggcaacctgctgcggcacatcaagctgcacactggagagaagcccttcaagtgccacctgtgcaactatgcctgccagaggagagatgccctgaccggccacctgcggacccacagcgtggagaagccctacaagtgtgagttctgtggccgcagctacaagcagaggagcagcctggaggagcacaaggagcgctgcaggaccttcctgcagagcacagatcctggggacaccggggagaagaggcactgctttgatgtgaactacaacagcagctacatgtatgagaaggagagcgagctgatccagaccaggatgatggaccaggccatcaacaatgccatctcctacctgggcgctgaggccctgcggcccctggtgcagaccccaccagcccccaccagcgagatggtgcctgtgatcagctccatgtaccccatcgccctgaccagggctgagatgagcaatggagccccccaggagctggagaagaagagcatccacctgcctgagaagtctgtgcccagcgagcggggcctgagccccaacaacagcggccatgacagcacagacacagacagcaaccacgaggagcggcagaaccacatctaccagcagaaccacatggtgctgagccgggccagaaatggcatgcccctgctgaaggaggtgcccaggagctatgagctgctgaagcccccacccatctgcccccgggacagcgtgaaggtgatcaacaaggagggggaggtgatggatgtgtaccgctgtgaccactgccgggtgctcttcctggactatgtgatgttcaccatccacatgggctgccacggcttccgggacccctttgagtgcaacatgtgtggctaccgcagccatgacagatatgagttcagcagccacatcgcccggggggagcaccgggccctgctgaagtag

SEQ ID NO: 20010 - DNA, 1413 bp, synthetic construct
  misc_feature 1..1413: note = Description of Artificial Sequence: Synthetic coding sequence
  source 1..1413: mol_type = other DNA
atggaggacatccagaccaatgctgagctgaagagcacccaggagcagagcgtgcctgctgagagcgctgctgtgctgaatgactacagcctgaccaagagccatgagatggagaatgtggacagcggggagggccctgccaatgaagatgaagatattggagatgacagcatgaaggtgaaggatgagtacagcgagagagatgaaaatgtgctgaagtctgagcccatgggaaatgctgaggagcctgagatcccctacagctacagccgggagtacaatgaatatgagaacatcaagctggagcggcacgtggtgtcctttgacagcagccggcccaccagcggcaagatgaactgtgatgtgtgtggcctgagctgcatctccttcaacgtgctgatggtgcacaagaggagccacactggagagcggcccttccagtgcaaccagtgtggggccagcttcacccagaagggcaacctgctgcggcacatcaagctgcacactggagagaagcccttcaagtgccacctgtgcaactatgcctgccagaggagagatgccctgaccggccacctgcggacccacagcgccagcgctgaggcccggcacatcaaggccgagatgggcagcgagcgggccctggtgctggaccggctggccagcaatgtggccaagaggaagagctccatgccccagaagttcatcggggagaagaggcactgctttgatgtgaactacaacagcagctacatgtatgagaaggagagcgagctgatccagaccaggatgatggaccaggccatcaacaatgccatctcctacctgggcgctgaggccctgcggcccctggtgcagaccccaccagcccccaccagcgagatggtgcctgtgatcagctccatgtaccccatcgccctgaccagggctgagatgagcaatggagccccccaggagctggagaagaagagcatccacctgcctgagaagtctgtgcccagcgagcggggcctgagccccaacaacagcggccatgacagcacagacacagacagcaaccacgaggagcggcagaaccacatctaccagcagaaccacatggtgctgagccgggccagaaatggcatgcccctgctgaaggaggtgcccaggagctatgagctgctgaagcccccacccatctgcccccgggacagcgtgaaggtgatcaacaaggagggggaggtgatggatgtgtaccgctgtgaccactgccgggtgctcttcctggactatgtgatgttcaccatccacatgggctgccacggcttccgggacccctttgagtgcaacatgtgtggctaccgcagccatgacagatatgagttcagcagccacatcgcccggggggagcaccgggccctgctgaagtag

SEQ ID NO: 20011 - DNA, 1101 bp, synthetic construct
  misc_feature 1..1101: note = Description of Artificial Sequence: Synthetic coding sequence
  source 1..1101: mol_type = other DNA
atggaggacatccagaccaatgctgagctgaagagcacccaggagcagagcgtgcctgctgagagcgctgctgtgctgaatgactacagcctgaccaagagccatgagatggagaatgtggacagcggggagggccctgccaatgaagatgaagatattggagtggagaagccctacaagtgtgagttctgtggccgcagctacaagcagaggagcagcctggaggagcacaaggagcgctgcaggaccttcctgcagagcacagaccccggggacacagccagcgctgaggcccggcacatcaaggccgagatgggcagcgagcgggccctggtgctggaccggctggccagcaatgtggccaagaggaagagctccatgccccagaagttcatcggggagaagaggcactgctttgatgtgaactacaacagcagctacatgtatgagaaggagagcgagctgatccagaccaggatgatggaccaggccatcaacaatgccatctcctacctgggcgctgaggccctgcggcccctggtgcagaccccaccagcccccaccagcgagatggtgcctgtgatcagctccatgtaccccatcgccctgaccagggctgagatgagcaatggagccccccaggagctggagaagaagagcatccacctgcctgagaagtctgtgcccagcgagcggggcctgagccccaacaacagcggccatgacagcacagacacagacagcaaccacgaggagcggcagaaccacatctaccagcagaaccacatggtgctgagccgggccagaaatggcatgcccctgctgaaggaggtgcccaggagctatgagctgctgaagcccccacccatctgcccccgggacagcgtgaaggtgatcaacaaggagggggaggtgatggatgtgtaccgctgtgaccactgccgggtgctcttcctggactatgtgatgttcaccatccacatgggctgccacggcttccgggacccctttgagtgcaacatgtgtggctaccgcagccatgacagatatgagttcagcagccacatcgcccggggggagcaccgggccctgctgaagtag

SEQ ID NO: 20012 - DNA, 1128 bp, synthetic construct
  misc_feature 1..1128: note = Description of Artificial Sequence: Synthetic coding sequence
  source 1..1128: mol_type = other DNA
atggaggacatccagaccaatgctgagctgaagagcacccaggagcagagcgtgcctgctgagagcgctgctgtgctgaatgactacagcctgaccaagagccatgagatggagaatgtggacagcggggagggccctgccaatgaagatgaagatattggagatgacagcatgaaggtgaaggatgagtacagcgagagagatgaaaatgtgctgaagtctgagcccatgggaaatgctgaggagcctgagatcccctacagctacagccgggagtacaatgaatatgagaacatcaagctggagcggcacgtggtgtcctttgacagcagccggcccaccagcggcaagatgaactgtgatgtgtgtggcctgagctgcatctccttcaacgtgctgatggtgcacaagaggagccacactggagagaagaggcactgctttgatgtgaactacaacagcagctacatgtatgagaaggagagcgagctgatccagaccaggatgatggaccaggccatcaacaatgccatctcctacctgggcgctgaggccctgcggcccctggtgcagaccccaccagcccccaccagcgagatggtgcctgtgatcagctccatgtaccccatcgccctgaccagggctgagatgagcaatggagccccccaggagctggagaagaagagcatccacctgcctgagaagtctgtgcccagcgagcggggcctgagccccaacaacagcggccatgacagcacagacacagacagcaaccacgaggagcggcagaaccacatctaccagcagaaccacatggtgctgagccgggccagaaatggcatgcccctgctgaaggaggtgcccaggagctatgagctgctgaagcccccacccatctgcccccgggacagcgtgaaggtgatcaacaaggagggggaggtgatggatgtgtaccgctgtgaccactgccgggtgctcttcctggactatgtgatgttcaccatccacatgggctgccacggcttccgggacccctttgagtgcaacatgtgtggctaccgcagccatgacagatatgagttcagcagccacatcgcccggggggagcaccgggccctgctgaagtag

SEQ ID NO: 20013 - DNA, 867 bp, synthetic construct
  misc_feature 1..867: note = Description of Artificial Sequence: Synthetic coding sequence
  source 1..867: mol_type = other DNA
atggaggacatccagaccaatgctgagctgaagagcacccaggagcagagcgtgcctgctgagagcgctgctgtgctgaatgactacagcctgaccaagagccatgagatggagaatgtggacagcggggagggccctgccaatgaagatgaagatattggaggagagaagaggcactgctttgatgtgaactacaacagcagctacatgtatgagaaggagagcgagctgatccagaccaggatgatggaccaggccatcaacaatgccatctcctacctgggcgctgaggccctgcggcccctggtgcagaccccaccagcccccaccagcgagatggtgcctgtgatcagctccatgtaccccatcgccctgaccagggctgagatgagcaatggagccccccaggagctggagaagaagagcatccacctgcctgagaagtctgtgcccagcgagcggggcctgagccccaacaacagcggccatgacagcacagacacagacagcaaccacgaggagcggcagaaccacatctaccagcagaaccacatggtgctgagccgggccagaaatggcatgcccctgctgaaggaggtgcccaggagctatgagctgctgaagcccccacccatctgcccccgggacagcgtgaaggtgatcaacaaggagggggaggtgatggatgtgtaccgctgtgaccactgccgggtgctcttcctggactatgtgatgttcaccatccacatgggctgccacggcttccgggacccctttgagtgcaacatgtgtggctaccgcagccatgacagatatgagttcagcagccacatcgcccggggggagcaccgggccctgctgaagtag

SEQ ID NO: 20014 - DNA, 1269 bp, synthetic construct
  misc_feature 1..1269: note = Description of Artificial Sequence: Synthetic coding sequence
  source 1..1269: mol_type = other DNA
atggaggacatccagaccaatgctgagctgaagagcacccaggagcagagcgtgcctgctgagagcgctgctgtgctgaatgactacagcctgaccaagagccatgagatggagaatgtggacagcggggagggccctgccaatgaagatgaagatattggaggagagcggcccttccagtgcaaccagtgtggggccagcttcacccagaagggcaacctgctgcggcacatcaagctgcacactggagagaagcccttcaagtgccacctgtgcaactatgcctgccagaggagagatgccctgaccggccacctgcggacccacagcgtggagaagccctacaagtgtgagttctgtggccgcagctacaagcagaggagcagcctggaggagcacaaggagcgctgcaggaccttcctgcagagcacagaccccggggacacagccagcgctgaggcccggcacatcaaggccgagatgggcagcgagcgggccctggtgctggaccggctggccagcaatgtggccaagaggaagagctccatgccccagaagttcatcggggagaagaggcactgctttgatgtgaactacaacagcagctacatgtatgagaaggagagcgagctgatccagaccaggatgatggaccaggccatcaacaatgccatctcctacctgggcgctgaggccctgcggcccctggtgcagaccccaccagcccccaccagcgagatggtgcctgtgatcagctccatgtaccccatcgccctgaccagggctgagatgagcaatggagccccccaggagctggagaagaagagcatccacctgcctgagaagtctgtgcccagcgagcggggcctgagccccaacaacagcggccatgacagcacagacacagacagcaaccacgaggagcggcagaaccacatctaccagcagaaccacatggtgctgagccgggccagaaatggcatgcccctgctgaaggaggtgcccaggagctatgagctgctgaagcccccacccatctgcccccgggacagcgtgaaggtgatcaacaaggagggggaggtgatggatgtgtaccgctgtgaccactgccgggtgctcttcctggactatgtgatgttcaccatccacatgggctgccacggcttccgggacccctttgagtgcaacatgtgtggctaccgcagccatgacagatatgagttcagcagccacatcgcccggggggagcaccgggccctgctgaagtag

SEQ ID NO: 20015 - DNA, 984 bp, synthetic construct
  misc_feature 1..984: note = Description of Artificial Sequence: Synthetic coding sequence
  source 1..984: mol_type = other DNA
atggaggacatccagaccaatgctgagctgaagagcacccaggagcagagcgtgcctgctgagagcgctgctgtgctgaatgactacagcctgaccaagagccatgagatggagaatgtggacagcggggagggccctgccaatgaagatgaagatattggagccagcgctgaggcccggcacatcaaggccgagatgggcagcgagcgggccctggtgctggaccggctggccagcaatgtggccaagaggaagagctccatgccccagaagttcatcggggagaagaggcactgctttgatgtgaactacaacagcagctacatgtatgagaaggagagcgagctgatccagaccaggatgatggaccaggccatcaacaatgccatctcctacctgggcgctgaggccctgcggcccctggtgcagaccccaccagcccccaccagcgagatggtgcctgtgatcagctccatgtaccccatcgccctgaccagggctgagatgagcaatggagccccccaggagctggagaagaagagcatccacctgcctgagaagtctgtgcccagcgagcggggcctgagccccaacaacagcggccatgacagcacagacacagacagcaaccacgaggagcggcagaaccacatctaccagcagaaccacatggtgctgagccgggccagaaatggcatgcccctgctgaaggaggtgcccaggagctatgagctgctgaagcccccacccatctgcccccgggacagcgtgaaggtgatcaacaaggagggggaggtgatggatgtgtaccgctgtgaccactgccgggtgctcttcctggactatgtgatgttcaccatccacatgggctgccacggcttccgggacccctttgagtgcaacatgtgtggctaccgcagccatgacagatatgagttcagcagccacatcgcccggggggagcaccgggccctgctgaagtag

SEQ ID NO: 20016 - DNA, 1392 bp, synthetic construct
  misc_feature 1..1392: note = Description of Artificial Sequence: Synthetic coding sequence
  source 1..1392: mol_type = other DNA
tgacaggagcagagcgtgcctgcagatgacagcatgaaggtgaaggatgagtacagcgagagagatgaaaatgtgctgaagtctgagcccatgggaaatgctgaggagcctgagatcccctacagctacagccgggagtacaatgaatatgagaacatcaagctggagcggcacgtggtgtcctttgacagcagccggcccaccagcggcaagatgaactgtgatgtgtgtggcctgagctgcatctccttcaacgtgctgatggtgcacaagaggagccacactggagagcggcccttccagtgcaaccagtgtggggccagcttcacccagaagggcaacctgctgcggcacatcaagctgcacactggagagaagcccttcaagtgccacctgtgcaactatgcctgccagaggagagatgccctgaccggccacctgcggacccacagcgtggagaagccctacaagtgtgagttctgtggccgcagctacaagcagaggagcagcctggaggagcacaaggagcgctgcaggaccttcctgcagagcacagatcctggggacacagccagcgctgaggcccggcacatcaaggccgagatgggcagcgagcgggccctggtgctggaccggctggccagcaatgtggccaagaggaagagctccatgccccagaagttcatcggggagaagaggcactgctttgatgtgaactacaacagcagctacatgtatgagaaggagagcgagctgatccagaccaggatgatggaccaggccatcaacaatgccatctcctacctgggcgctgaggccctgcggcccctggtgcagaccccaccagcccccaccagcgagatggtgcctgtgatcagctccatgtaccccatcgccctgaccagggctgagatgagcaatggagccccccaggagctggagaagaagagcatccacctgcctgagaagtctgtgcccagcgagcggggcctgagccccaacaacagcggccatgacagcacagacacagacagcaaccacgaggagcggcagaaccacatctaccagcagaaccacatggtgctgagccgggccagaaatggcatgcccctgctgaaggaggtgcccaggagctatgagctgctgaagcccccacccatctgcccccgggacagcgtgaaggtgatcaacaaggagggggaggtgatggatgtgtaccgctgtgaccactgccgggtgctcttcctggactatgtgatgttcaccatccacatgggctgccacggcttccgggacccctttgagtgcaacatgtgtggctaccgcagccatgacagatatgagttcagcagccacatcgcccggggggagcaccgggccctgctgaagtag

SEQ ID NO: 20017 - DNA, 1275 bp, synthetic construct
  misc_feature 1..1275: note = Description of Artificial Sequence: Synthetic coding sequence
  source 1..1275: mol_type = other DNA
tgacaggagcagagcgtgcctgcagatgacagcatgaaggtgaaggatgagtacagcgagagagatgaaaatgtgctgaagtctgagcccatgggaaatgctgaggagcctgagatcccctacagctacagccgggagtacaatgaatatgagaacatcaagctggagcggcacgtggtgtcctttgacagcagccggcccaccagcggcaagatgaactgtgatgtgtgtggcctgagctgcatctccttcaacgtgctgatggtgcacaagaggagccacactggagagcggcccttccagtgcaaccagtgtggggccagcttcacccagaagggcaacctgctgcggcacatcaagctgcacactggagagaagcccttcaagtgccacctgtgcaactatgcctgccagaggagagatgccctgaccggccacctgcggacccacagcgccagcgctgaggcccggcacatcaaggccgagatgggcagcgagcgggccctggtgctggaccggctggccagcaatgtggccaagaggaagagctccatgccccagaagttcatcggggagaagaggcactgctttgatgtgaactacaacagcagctacatgtatgagaaggagagcgagctgatccagaccaggatgatggaccaggccatcaacaatgccatctcctacctgggcgctgaggccctgcggcccctggtgcagaccccaccagcccccaccagcgagatggtgcctgtgatcagctccatgtaccccatcgccctgaccagggctgagatgagcaatggagccccccaggagctggagaagaagagcatccacctgcctgagaagtctgtgcccagcgagcggggcctgagccccaacaacagcggccatgacagcacagacacagacagcaaccacgaggagcggcagaaccacatctaccagcagaaccacatggtgctgagccgggccagaaatggcatgcccctgctgaaggaggtgcccaggagctatgagctgctgaagcccccacccatctgcccccgggacagcgtgaaggtgatcaacaaggagggggaggtgatggatgtgtaccgctgtgaccactgccgggtgctcttcctggactatgtgatgttcaccatccacatgggctgccacggcttccgggacccctttgagtgcaacatgtgtggctaccgcagccatgacagatatgagttcagcagccacatcgcccggggggagcaccgggccctgctgaagtag

SEQ ID NO: 20018 - DNA, 1362 bp, synthetic construct
  misc_feature 1..1362: note = Description of Artificial Sequence: Synthetic coding sequence
  source 1..1362: mol_type = other DNA
atggaggacatccagaccaatgctgagctgaagagcacccaggagcagagcgtgcctgctgagagcgctgctgtgctgaatgactacagcctgaccaagagccatgagatggagaatgtggacagcggggagggccctgccaatgaagatgaagatattggagatgacagcatgaaggtgaaggatgagtacagcgagagagatgaaaatgtgctgaagtctgagcccatgggaaatgctgaggagcctgagatcccctacagctacagccgggagtacaatgaatatgagaacatcaagctggagcggcacgtggtgtcctttgacagcagccggcccaccagcggcaagatgaactgtgatgtgtgtggcctgagctgcatctccttcaacgtgctgatggtgcacaagaggagccacacagtggagaagccctacaagtgtgagttctgtggccgcagctacaagcagaggagcagcctggaggagcacaaggagcgctgcaggaccttcctgcagagcacagatcctggggacacagccagcgctgaggcccggcacatcaaggccgagatgggcagcgagcgggccctggtgctggaccggctggccagcaatgtggccaagaggaagagctccatgccccagaagttcatcggggagaagaggcactgctttgatgtgaactacaacagcagctacatgtatgagaaggagagcgagctgatccagaccaggatgatggaccaggccatcaacaatgccatctcctacctgggcgctgaggccctgcggcccctggtgcagaccccaccagcccccaccagcgagatggtgcctgtgatcagctccatgtaccccatcgccctgaccagggctgagatgagcaatggagccccccaggagctggagaagaagagcatccacctgcctgagaagtctgtgcccagcgagcggggcctgagccccaacaacagcggccatgacagcacagacacagacagcaaccacgaggagcggcagaaccacatctaccagcagaaccacatggtgctgagccgggccagaaatggcatgcccctgctgaaggaggtgcccaggagctatgagctgctgaagcccccacccatctgcccccgggacagcgtgaaggtgatcaacaaggagggggaggtgatggatgtgtaccgctgtgaccactgccgggtgctcttcctggactatgtgatgttcaccatccacatgggctgccacggcttccgggacccctttgagtgcaacatgtgtggctaccgcagccatgacagatatgagttcagcagccacatcgcccggggggagcaccgggccctgctgaagtag

SEQ ID NO: 20019 - DNA, 1530 bp, synthetic construct
  misc_feature 1..1530: note = Description of Artificial Sequence: Synthetic coding sequence
  source 1..1530: mol_type = other DNA
atggaggacatccagaccaatgctgagctgaagagcacccaggagcagagcgtgcctgctgagagcgctgctgtgctgaatgactacagcctgaccaagagccatgagatggagaatgtggacagcggggagggccctgccaatgaagatgaagatattggagatgacagcatgaaggtgaaggatgagtacagcgagagagatgaaaatgtgctgaagtctgagcccatgggaaatgctgaggagcctgagatcccctacagctacagccgggagtacaatgaatatgagaacatcaagctggagcggcacgtggtgtcctttgacagcagccggcccaccagcggcaagatgaactgtgatgtgtgtggcctgagctgcatctccttcaacgtgctgatggtgcacaagaggagccacactggagagcggcccttccagtgcaaccagtgtggggccagcttcacccagaagggcaacctgctgcggcacatcaagctgcacactggagagaagcccttcaagtgccacctgtgcaactatgcctgccagaggagagatgccctgaccggccacctgcggacccacagcgtggagaagccctacaagtgtgagttctgtggccgcagctacaagcagaggagcagcctggaggagcacaaggagcgctgcaggaccttcctgcagagcacagatcctggggacacagccagcgctgaggcccggcacatcaaggccgagatgggcagcgagcgggccctggtgctggaccggctggccagcaatgtggccaagaggaagagctccatgccccagaagttcatcggggagaagaggcactgctttgatgtgaactacaacagcagctacatgtatgagaaggagagcgagctgatccagaccaggatgatggaccaggccatcaacaatgccatctcctacctgggcgctgaggccctgcggcccctggtgcagaccccaccagcccccaccagcgagatggtgcctgtgatcagctccatgtaccccatcgccctgaccagggctgagatgagcaatggagccccccaggagctggagaagaagagcatccacctgcctgagaagtctgtgcccagcgagcggggcctgagccccaacaacagcggccatgacagcacagacacagacagcaaccacgaggagcggcagaaccacatctaccagcagaaccacatggtgctgagccgggccagaaatggcatgcccctgctgaaggaggtgcccaggagctatgagctgctgaagcccccacccatctgcccccgggacagcgtgaaggtgatcaacaaggagggggaggtgatggatgtgtaccgctgtgaccactgccgggtgctcttcctggactatgtgatgttcaccatccacatgggctgccacggcttccgggacccctttgagtgcaacatgtgtggctaccgcagccatgacagatatgagttcagcagccacatcgcccggggggagcaccgggccctgctgaagtag

SEQ ID NO: 20020 - DNA, 1428 bp, synthetic construct
  misc_feature 1..1428: note = Description of Artificial Sequence: Synthetic coding sequence
  source 1..1428: mol_type = other DNA
atggaggacatccagaccaatgctgagctgaagagcacccaggagcagagcgtgcctgcagatgacagcatgaaggtgaaggatgagtacagcgagagagatgaaaatgtgctgaagtctgagcccatgggaaatgctgaggagcctgagatcccctacagctacagccgggagtacaatgaatatgagaacatcaagctggagcggcacgtggtgtcctttgacagcagccggcccaccagcggcaagatgaactgtgatgtgtgtggcctgagctgcatctccttcaacgtgctgatggtgcacaagaggagccacactggagagcggcccttccagtgcaaccagtgtggggccagcttcacccagaagggcaacctgctgcggcacatcaagctgcacactggagagaagcccttcaagtgccacctgtgcaactatgcctgccagaggagagatgccctgaccggccacctgcggacccacagcgtggagaagccctacaagtgtgagttctgtggccgcagctacaagcagaggagcagcctggaggagcacaaggagcgctgcaggaccttcctgcagagcacagatcctggggacacagccagcgctgaggcccggcacatcaaggccgagatgggcagcgagcgggccctggtgctggaccggctggccagcaatgtggccaagaggaagagctccatgccccagaagttcatcggggagaagaggcactgctttgatgtgaactacaacagcagctacatgtatgagaaggagagcgagctgatccagaccaggatgatggaccaggccatcaacaatgccatctcctacctgggcgctgaggccctgcggcccctggtgcagaccccaccagcccccaccagcgagatggtgcctgtgatcagctccatgtaccccatcgccctgaccagggctgagatgagcaatggagccccccaggagctggagaagaagagcatccacctgcctgagaagtctgtgcccagcgagcggggcctgagccccaacaacagcggccatgacagcacagacacagacagcaaccacgaggagcggcagaaccacatctaccagcagaaccacatggtgctgagccgggccagaaatggcatgcccctgctgaaggaggtgcccaggagctatgagctgctgaagcccccacccatctgcccccgggacagcgtgaaggtgatcaacaaggagggggaggtgatggatgtgtaccgctgtgaccactgccgggtgctcttcctggactatgtgatgttcaccatccacatgggctgccacggcttccgggacccctttgagtgcaacatgtgtggctaccgcagccatgacagatatgagttcagcagccacatcgcccggggggagcaccgggccctgctgaagtag

SEQ ID NO: 20021 - DNA, 450 bp, synthetic construct
  misc_feature 1..450: note = Description of Artificial Sequence: Synthetic coding sequence
  source 1..450: mol_type = other DNA
atgaaggtggccagcggcagcacagccacagctgctgctggccccagctgtgccctgaaggccggcaagacagccagcggggccggggaggtggtgcgctgcctgtctgagcagagcgtggccatcagccgctgtgccggcggggccggggcccggctgcctgccctgctggatgagcagcaggtgaatgtgctgctgtatgacatgaatggctgctacagccggctgaaggagctggtgcccaccctgccccagaacaggaaggtgtccaaggtggagatcctgcagcacgtgattgactacatccgggacctgcagctggagctgaacagcgagagcgaggtgggcacccctgggggccggggcctgcctgtgcgggcccccctgagcaccctgaatggagagatcagcgccctgacagctgaggtgcgcagcagaagtgaccactag

SEQ ID NO: 20022 - DNA, 468 bp, synthetic construct
  misc_feature 1..468: note = Description of Artificial Sequence: Synthetic coding sequence
  source 1..468: mol_type = other DNA
atgaaggtggccagcggcagcacagccacagctgctgctggccccagctgtgccctgaaggccggcaagacagccagcggggccggggaggtggtgcgctgcctgtctgagcagagcgtggccatcagccgctgtgccggcggggccggggcccggctgcctgccctgctggatgagcagcaggtgaatgtgctgctgtatgacatgaatggctgctacagccggctgaaggagctggtgcccaccctgccccagaacaggaaggtgtccaaggtggagatcctgcagcacgtgattgactacatccgggacctgcagctggagctgaacagcgagagcgaggtgggcacccctgggggccggggcctgcctgtgcgggcccccctgagcaccctgaatggagagatcagcgccctgacagctgaggccgcctgtgtgcctgcagatgaccgcatcctgtgcaggtag

SEQ ID NO: 20023 - DNA, 738 bp, synthetic construct
  misc_feature 1..738: note = Description of Artificial Sequence: Synthetic coding sequence
  source 1..738: mol_type = other DNA
atggctgctggcatgtacctggagcactacctggacagcattgagaacctgccctttgagctgcagaggaacttccagctgatgagggacctggaccagaggacagaggacctgaaggccgagattgacaagctggccacagagtacatgagcagcgcccggagcctgagcagcgaggagaagctggccctgctgaagcagatccaggaggcctacggcaagtgcaaggagtttggagatgacaaggtgcagctggccatgcagacctatgagatggtggacaagcacatccggcggctggacacagacctggccaggtttgaagctgacctgaaggagaagcagatcgagagcagtgactatgacagcagcagcagcaaaggaagaacccagaaggagaagaaggccgcccgggcccggagcaagggcaagaacagtgatgaggaggcccccaagacagcccagaagaagctgaagctggtgaggaccagcccagaatatggcatgcccagcgtgaccttcggctctgtgcaccccagtgatgtgctggacatgcctgtggaccccaatgagcccacctactgcctgtgccaccaggtgtcctatggagagatgattggctgtgacaacccagactgcagcattgagtggttccactttgcctgtgtgggcctgaccaccaagccccggggcaagtggttctgcccccgctgcagccaggagaggaagaagaagtag

SEQ ID NO: 20024 - DNA, 840 bp, synthetic construct
  misc_feature 1..840: note = Description of Artificial Sequence: Synthetic coding sequence
  source 1..840: mol_type = other DNA
atgctgagccctgccaacggggagcagctgcacctggtgaactacgtggaggactacctggacagcattgagagcctgccctttgacctgcagagaaatgtgtccctgatgagagaaattgatgccaagtaccaggagatcctgaaggagctggatgaatgttatgagcgcttcagccgggagacagatggagcccagaagaggaggatgctgcactgtgtgcagagggccctgatccgcagccaggagctgggagatgagaagatccagatcgtgtcccagatggtggagctggtggagaacagaacccggcaggtggacagccacgtggagctgtttgaggcccagcaggagctgggggacacagctggcaacagcggcaaggccggggctgaccggcccaagggggaggccgccgcccaggccgacaagcccaacagcaagaggagccggcggcagaggaacaatgaaaatcgggagaatgccagcagcaaccacgaccatgatgatggagccagcggcacccccaaggagaagaaggccaagaccagcaagaagaagaagaggagcaaggccaaggccgagcgggaggccagccctgctgacctgcccatcgaccccaatgagcccacctactgcctgtgcaaccaggtgtcctatggagagatgattggctgtgacaatgatgagtgccccatcgagtggttccacttcagctgtgtgggcctgaaccacaagcccaagggcaagtggtactgccccaagtgcagaggagaaaatgagaagaccatggacaaggccctggagaagagcaagaaggagcgggcctacaacagatag

SEQ ID NO: 20025 - DNA, 708 bp, synthetic construct
  misc_feature 1..708: note = Description of Artificial Sequence: Synthetic coding sequence
  source 1..708: mol_type = other DNA
atggagatcctgaaggagctggatgaatgttatgagcgcttcagccgggagacagatggagcccagaagaggaggatgctgcactgtgtgcagagggccctgatccgcagccaggagctgggagatgagaagatccagatcgtgtcccagatggtggagctggtggagaacagaacccggcaggtggacagccacgtggagctgtttgaggcccagcaggagctgggggacacagctggcaacagcggcaaggccggggctgaccggcccaagggggaggccgccgcccaggccgacaagcccaacagcaagaggagccggcggcagaggaacaatgaaaatcgggagaatgccagcagcaaccacgaccatgatgatggagccagcggcacccccaaggagaagaaggccaagaccagcaagaagaagaagaggagcaaggccaaggccgagcgggaggccagccctgctgacctgcccatcgaccccaatgagcccacctactgcctgtgcaaccaggtgtcctatggagagatgattggctgtgacaatgatgagtgccccatcgagtggttccacttcagctgtgtgggcctgaaccacaagcccaagggcaagtggtactgccccaagtgcagaggagaaaatgagaagaccatggacaaggccctggagaagagcaagaaggagcgggcctacaacagatag

SEQ ID NO: 20026 - DNA, 1269 bp, synthetic construct
  misc_feature 1..1269: note = Description of Artificial Sequence: Synthetic coding sequence
  source 1..1269: mol_type = other DNA
atgagctttgtggagtgcccctaccacagccctgctgagcggctggtggccgaggctgatgagggcggccccagcgccatcaccggcatgggcctgtgcttccgctgcctgctcttctccttcagcggccgctctggagtggagggcggccgggtggacctgaatgtgtttggcagcctgggcctgcagccctggattggcagcagccgctgctggggcggcccctgcagcagcgccctgcgctgtggctggttcagctcctggcccccacccagcaagagcgccatccccatcggcggcggcagcagaggagctggccgggtgagccgctggcccccaccccactggctggaggcctggagggtgagccccctgcccctgagccccctgagccctgccaccttcggccggggcttcatcgctgtggccgtcatccctggcctgtgggcccggggccggggctgcagcagtgaccggctgcccaggcctgctggccctgcccggcggcagttccaggccgccagcctgctgacccggggctggggccgggcctggccctggaagcagatcctgaaggagctggatgagtgctatgagcgcttcagccgggagacagatggagcccagaagaggaggatgctgcactgtgtgcagagggccctgatccgcagccaggagctgggagatgagaagatccagatcgtgtcccagatggtggagctggtggagaacagaacccggcaggtggacagccacgtggagctgtttgaggcccagcaggagctgggggacacagctggcaacagcggcaaggccggggctgaccggcccaagggggaggccgccgcccaggccgacaagcccaacagcaagaggagccggcggcagagaaataatgaaaatagagaaaatgccagcagcaaccacgaccatgatgatggagccagcggcacccccaaggagaagaaggccaagaccagcaagaagaagaagaggagcaaggccaaggccgagcgggaggccagccctgctgacctgcccatcgaccccaatgagcccacctactgcctgtgcaaccaggtgtcctatggagagatgattggctgtgacaatgatgaatgtcccatcgagtggttccacttcagctgtgtgggcctgaaccacaagcccaagggcaagtggtactgccccaagtgccgcggggagaatgagaagaccatggacaaggccctggagaagagcaagaaggagcgggcctacaacagatag

SEQ ID NO: 20027 - DNA, 633 bp, synthetic construct
  misc_feature 1..633: note = Description of Artificial Sequence: Synthetic coding sequence
  source 1..633: mol_type = other DNA
atgctgcactgtgtgcagagggccctgatccgcagccaggagctgggagatgagaagatccagatcgtgtcccagatggtggagctggtggagaacagaacccggcaggtggacagccacgtggagctgtttgaggcccagcaggagctgggggacacagctggcaacagcggcaaggccggggctgaccggcccaagggggaggccgccgcccaggccgacaagcccaacagcaagaggagccggcggcagagaaataatgaaaatagagaaaatgccagcagcaaccacgaccatgatgatggagccagcggcacccccaaggagaagaaggccaagaccagcaagaagaagaagaggagcaaggccaaggccgagcgggaggccagccctgctgacctgcccatcgaccccaatgagcccacctactgcctgtgcaaccaggtgtcctatggagagatgattggctgtgacaatgatgaatgtcccatcgagtggttccacttcagctgtgtgggcctgaaccacaagcccaagggcaagtggtactgccccaagtgccgcggggagaatgagaagaccatggacaaggccctggagaagagcaagaaggagcgggcctacaacagatag

SEQ ID NO: 20028 - DNA, 747 bp, synthetic construct
  misc_feature 1..747: note = Description of Artificial Sequence: Synthetic coding sequence
  source 1..747: mol_type = other DNA
atggctgctggcatgtacctggagcactacctggacagcattgagaacctgccctttgagctgcagaggaacttccagctgatgagggacctggaccagaggacagaggacctgaaggccgagattgacaagctggccacagagtacatgagcagcgcccggagcctgagcagcgaggagaagctggccctgctgaagcagatccaggaggcctacggcaagtgcaaggagtttggagatgacaaggtgcagctggccatgcagacctatgagatggtggacaagcacatccggcggctggacacagacctggccaggtttgaagctgacctgaaggagaagcagatcgagagcagtgactatgacagcagcagcagcaagggcaagaagagcaggacccagaaggagaagaaggccgcccgggcccggagcaagggcaagaacagtgatgaggaggcccccaagacagcccagaagaagctgaagctggtgaggaccagcccagaatatggcatgcccagcgtgacctttggatctgtgcaccccagtgatgtgctggacatgcctgtggaccccaatgagcccacctactgcctgtgccaccaggtgtcctatggagagatgattggctgtgacaacccagactgcagcattgagtggttccactttgcctgtgtgggcctgaccaccaagccccggggcaagtggttctgcccccgctgcagccaggagaggaagaagaagtag

SEQ ID NO: 20029 - DNA, 750 bp, synthetic construct
  misc_feature 1..750: note = Description of Artificial Sequence: Synthetic coding sequence
  source 1..750: mol_type = other DNA
atggctgctggcatgtacctggagcactacctggacagcattgagaacctgccctttgagctgcagaggaacttccagctgatgagggacctggaccagaggacagaggacctgaaggccgagattgacaagctggccacagagtacatgagcagcgcccggagcctgagcagcgaggagaagctggccctgctgaagcagatccaggaggcctacggcaagtgcaaggagtttggagatgacaaggtgcagctggccatgcagacctatgagatggtggacaagcacatccggcggctggacacagacctggccaggtttgaagctgacctgaaggagaagcagatcgagagcagtgactatgacagcagcagcagcaagggcaagaagaagggccgcacccagaaggagaagaaggccgcccgggcccggagcaagggcaagaacagtgatgaggaggcccccaagacagcccagaagaagctgaagctggtgaggaccagcccagaatatggcatgcccagcgtgaccttcggctctgtgcaccccagtgatgtgctggacatgcctgtggaccccaatgagcccacctactgcctgtgccaccaggtgtcctatggagagatgattggctgtgacaacccagactgcagcattgagtggttccactttgcctgtgtgggcctgaccaccaagccccggggcaagtggttctgcccccgctgcagccaggagaggaagaagaagtag

SEQ ID NO: 20030 - DNA, 741 bp, synthetic construct
  misc_feature 1..741: note = Description of Artificial Sequence: Synthetic coding sequence
  source 1..741: mol_type = other DNA
atggctgctggcatgtacctggagcactacctggacagcattgagaacctgccctttgagctgcagaggaacttccagctgatgagggacctggaccagaggacagaggacctgaaggccgagattgacaagctggccacagagtacatgagcagcgcccggagcctgagcagcgaggagaagctggccctgctgaagcagatccaggaggcctacggcaagtgcaaggagtttggagatgacaaggtgcagctggccatgcagacctatgagatggtggacaagcacatccggcggctggacacagacctggccaggtttgaagctgacctgaaggagaagcagatcgagagcagtgactatgacagcagcagcagcaaggagggccgcacccagaaggagaagaaggccgcccgggcccggagcaagggcaagaacagtgatgaggaggcccccaagacagcccagaagaagctgaagctggtgaggaccagcccagaatatggcatgcccagcgtgacctttggatctgtgcaccccagtgatgtgctggacatgcctgtggaccccaatgagcccacctactgcctgtgccaccaggtgtcctatggagagatgattggctgtgacaacccagactgcagcattgagtggttccactttgcctgtgtgggcctgaccaccaagccccggggcaagtggttctgcccccgctgcagccaggagaggaagaagaagtag

SEQ ID NO: 20031 - DNA, 540 bp, synthetic construct
  misc_feature 1..540: note = Description of Artificial Sequence: Synthetic coding sequence
  source 1..540: mol_type = other DNA
atggctgctggcatgtacctggagcactacctggacagcattgagaacctgccctttgagctgcagaggaacttccagctgatgagggacctggaccagaggacagaggacctgaaggccgagattgacaagctggccacagagtacatgagcagcgcccggagcctgagcagcgaggagaagctggccctgctgaagcagatccaggaggcctacggcaagtgcaaggagtttggagatgacaaggtgcagctggccatgcagacctatgagatggtggacaagcacatccggcggctggacacagacctggccaggtttgaagctgacctgaaggagaagcagatcgagagcagtgactatgacagcagcagcagcaagggcaagaagaagggccgcacccagaaggagaagaaggccgcccgggcccggagcaagggcaagaacagtgatgaggaggcccccaagacagcccagaagaagctgaagctggtgaggacagtgcccctgagcggcagcatcctgcctgtgtggggctag

SEQ ID NO: 20032 - DNA, 678 bp, synthetic construct
  misc_feature 1..678: note = Description of Artificial Sequence: Synthetic coding sequence
  source 1..678: mol_type = other DNA
atggctgctggcatgtacctggagcactacctggacaacctgaaggccgagattgacaagctggccacagagtacatgagcagcgcccggagcctgagcagcgaggagaagctggccctgctgaagcagatccaggaggcctacggcaagtgcaaggagtttggagatgacaaggtgcagctggccatgcagacctatgagatggtggacaagcacatccggcggctggacacagacctggccaggtttgaagctgacctgaaggagaagcagatcgagagcagtgactatgacagcagcagcagcaagggcaagaagaagggccgcacccagaaggagaagaaggccgcccgggcccggagcaagggcaagaacagtgatgaggaggcccccaagacagcccagaagaagctgaagctggtgaggaccagcccagaatatggcatgcccagcgtgaccttcggctctgtgcaccccagtgatgtgctggacatgcctgtggaccccaatgagcccacctactgcctgtgccaccaggtgtcctatggagagatgattggctgtgacaacccagactgcagcattgagtggttccactttgcctgtgtgggcctgaccaccaagccccggggcaagtggttctgcccccgctgcagccaggagaggaagaagaagtag

SEQ ID NO: 20033 - DNA, 3729 bp, synthetic construct
  misc_feature 1..3729: note = Description of Artificial Sequence: Synthetic coding sequence
  source 1..3729: mol_type = other DNA
atggccagccccccagagagtgatggcttcagtgatgtgaggaaggtgggctacctgaggaagcccaagtccatgcacaagcgcttctttgtgctgcgggccgccagcgaggccggcggccctgcccggctggagtactatgaaaatgagaagaagtggaggcacaagagcagcgcccccaagaggagcatccccctggagagctgcttcaacatcaacaagagagctgacagcaagaacaagcacctggtggccctgtacaccagagatgagcactttgccatcgctgctgacagcgaggccgagcaggacagctggtaccaggccctgctgcagctgcacaacagagccaagggccaccatgatggagctgctgccctgggcgccggcggcggcggcggcagctgcagcggcagcagcggcctgggggaggccggggaggacctgtcctatggagatgtgcccccaggccctgccttcaaggaggtgtggcaggtgatcctgaagcccaagggcctgggccagaccaagaacctgattggcatctaccgcctgtgcctgaccagcaagaccatcagctttgtgaagctgaacagcgaggccgctgctgtggtgctgcagctgatgaacatccgccgctgtggccacagcgagaacttcttcttcatcgaggtgggccgctctgctgtgactggacctggagagttctggatgcaggtggatgattctgtggtggcccagaacatgcatgagaccatcctggaggccatgagggccatgtctgatgagttccggcccaggagcaagagccagagcagcagcaactgcagcaaccccatctctgtgcccctgcggcggcaccacctgaacaaccccccacccagccaggtgggcctgaccaggaggagcaggacagagagcatcacagccaccagccctgcctccatggtgggcggcaagccaggcagcttccgggtgcgggccagcagtgatggagagggcaccatgagcaggcctgcctctgtggatggcagccctgtgagccccagcaccaacagaactcatgcccaccgccaccggggcagcgcccggctgcacccccccctgaaccacagccgcagcatccccatgcctgccagccgctgcagccccagcgccaccagccctgtgtccctgagcagcagcagcaccagcggccacggcagcaccagtgactgcctcttcccccggcgcagcagcgcctctgtgtctggcagccccagtgatggcggcttcatcagcagtgatgaatatggcagcagcccctgtgacttccgcagcagcttccgctctgtgaccccagacagcctgggccacaccccaccagcccggggggaggaggagctgagcaactacatctgcatgggcggcaagggccccagcaccctgacagcccccaacggccactacatcctgagccggggcggcaatggccaccgctgcaccccaggcaccggcctgggcaccagccctgccctggccggagatgaagctgccagcgctgctgacctggacaaccgcttcaggaagaggacccacagcgctggcaccagccccaccatcacccaccagaagacccccagccagagctctgtggccagcattgaggagtacacagagatgatgcctgcctacccacctgggggcggcagcggcggccgcctgcccggccaccgccacagcgcctttgtgcccaccaggagctacccagaggagggcctggagatgcaccccctggagcggcggggcggccaccacaggccagacagcagcaccctgcacacagatgatggctacatgcccatgagccctggggtggcccctgtgcccagcggcaggaaaggaagtggggactacatgcccatgagccccaagtctgtgtctgccccccagcagatcatcaaccccatcagaagacacccccagagggtggaccccaacggctacatgatgatgagccccagcggcggctgcagcccagacattggaggcggccccagcagcagcagcagcagcagcaatgctgtgcccagcggcaccagctatggcaagctgtggaccaatggagtgggcggccaccacagccacgtgctgccccaccccaagccccctgtggagagcagcggcggcaagctgctgccctgcacaggagactacatgaacatgagccctgtgggggacagcaacaccagcagccccagcgactgctactacggccctgaggacccccagcacaagcctgtgctgagctactacagcctgcccaggagcttcaagcacacccagaggcctggagagcctgaggagggcgcccggcaccagcacctgcggctgagcaccagcagcggccgcctgctgtatgctgccacagcagatgacagcagcagcagcaccagcagtgacagcctgggcggcggctactgtggggcccggctggagcccagcctgccccacccccaccaccaggtgctgcagccccacctgcccaggaaggtggacacagctgcccagaccaacagccggctggcccggcccacccggctgagcctgggggaccccaaggccagcaccctgccccgggcccgggagcagcagcagcagcagcagcccctgctgcaccccccagagcccaagagccctggagaatatgtgaacattgaatttggaagtgaccagagcggctacctgagcggccctgtggccttccacagcagccccagcgtgcgctgccccagccagctgcagcctgccccccgggaggaggagaccggcacagaggagtacatgaagatggacctgggccctggccggcgggccgcctggcaggagagcactggagtggagatgggccgcctgggccctgcccctcctggggccgccagcatctgccggcccaccagggctgtgcccagcagcagaggagactacatgaccatgcagatgagctgcccccggcagagctatgtggacaccagccctgctgcccctgtgtcctatgctgacatgaggactggaattgctgctgaggaggtgtccctgccccgggccaccatggctgctgccagcagcagcagcgctgccagcgccagccccaccggcccccagggcgctgctgagctggccgcccacagcagcctgctgggcggcccccagggccctgggggcatgtctgccttcaccagggtgaacctgagccccaacagaaaccagagcgccaaggtgatccgggctgacccccagggctgcagaagaagacacagcagcgagaccttcagcagcaccccatctgccaccagggtgggcaacacagtgccctttggagctggagctgctgtgggcggcggcggcggcagcagcagcagcagtgaagatgtgaagaggcacagcagcgccagctttgaaaatgtgtggctgcggcctggagagctgggcggggcccccaaggagcccgccaagctgtgtggggccgccggcggcctggagaatggcctgaactacatcgacctggacctggtgaaggacttcaagcagtgcccccaggagtgcaccccagagccccagcccccacctcctcctccaccccaccagcccctgggcagcggggagagcagcagcacccggcgcagcagcgaggacctgagcgcctatgccagcatctccttccagaagcagccagaagatcggcagtag

SEQ ID NO: 20034 - DNA, 588 bp, synthetic construct
  misc_feature 1..588: note = Description of Artificial Sequence: Synthetic coding sequence
  source 1..588: mol_type = other DNA
atgggcaagatcagcagcctgcccacccagctgttcaagtgctgcttctgtgacttcctgaaggtgaagatgcacaccatgagcagcagccacctgttctacctggccctgtgcctgctgaccttcaccagcagcgccacagctggccctgagaccctgtgtggggctgagctggtggatgccctgcagtttgtgtgtggggaccggggcttctacttcaacaagcccaccggctacggcagcagcagccggcgggccccccagacaggaattgtggatgagtgctgcttccgcagctgtgacctgcggcggctggagatgtactgtgcccccctgaagccagccaagagcgcccggtctgtgcgggcccagaggcacacagacatgcccaagacccagaagtaccagccccccagcaccaacaagaacaccaagagccagaggaggaagggctggcccaagacccaccctggaggagagcagaaggagggcacagaggccagcctgcagatccggggcaagaagaaggagcagaggcgggagatcggcagcagaaatgctgagtgccggggcaagaagggcaagtag

SEQ ID NO: 20035 - DNA, 462 bp, synthetic construct
  misc_feature 1..462: note = Description of Artificial Sequence: Synthetic coding sequence
  source 1..462: mol_type = other DNA
atgggcaagatcagcagcctgcccacccagctgttcaagtgctgcttctgtgacttcctgaaggtgaagatgcacaccatgagcagcagccacctgttctacctggccctgtgcctgctgaccttcaccagcagcgccacagctggccctgagaccctgtgtggggctgagctggtggatgccctgcagtttgtgtgtggggaccggggcttctacttcaacaagcccaccggctacggcagcagcagccggcgggccccccagacaggaattgtggatgagtgctgcttccgcagctgtgacctgcggcggctggagatgtactgtgcccccctgaagccagccaagagcgcccggtctgtgcgggcccagaggcacacagacatgcccaagacccagaaggaggtgcacctgaagaatgccagccggggcagcgctggcaacaagaactacaggatgtag

SEQ ID NO: 20036 - DNA, 477 bp, synthetic construct
  misc_feature 1..477: note = Description of Artificial Sequence: Synthetic coding sequence
  source 1..477: mol_type = other DNA
atgggcaagatcagcagcctgcccacccagctgttcaagtgctgcttctgtgacttcctgaaggtgaagatgcacaccatgagcagcagccacctgttctacctggccctgtgcctgctgaccttcaccagcagcgccacagctggccctgagaccctgtgtggggctgagctggtggatgccctgcagtttgtgtgtggggaccggggcttctacttcaacaagcccaccggctacggcagcagcagccggcgggccccccagacaggaattgtggatgagtgctgcttccgcagctgtgacctgcggcggctggagatgtactgtgcccccctgaagccagccaagagcgcccggtctgtgcgggcccagaggcacacagacatgcccaagacccagaagtaccagccccccagcaccaacaagaacaccaagagccagaggaggaagggcagcacctttgaggagaggaagtag

SEQ ID NO: 20037 - DNA, 420 bp, synthetic construct
  misc_feature 1..420: note = Description of Artificial Sequence: Synthetic coding sequence
  source 1..420: mol_type = other DNA
ctgaaggtgaagatgcacaccatgagcagcagccacctgttctacctggccctgtgcctgctgaccttcaccagcagcgccacagctggccctgagaccctgtgtggggctgagctggtggatgccctgcagtttgtgtgtggggaccggggcttctacttcaacaagcccaccggctacggcagcagcagcagaagagccccccagacaggcatcgtggatgagtgctgcttccgcagctgtgacctgcggcggctggagatgtactgtgcccccctgaagccagccaagagcgcccggtctgtgcgggcccagaggcacacagacatgcccaagacccagaagtaccagccccccagcaccaacaagaacaccaagagccagaggaggaagggcagcacctttgaggagaggaagtag

SEQ ID NO: 20038 - DNA, 414 bp, synthetic construct
  misc_feature 1..414: note = Description of Artificial Sequence: Synthetic coding sequence
  source 1..414: mol_type = other DNA
atgatcacccccaccgtgaagatgcacaccatgagcagcagccacctgttctacctggccctgtgcctgctgaccttcaccagcagcgccacagctggccctgagaccctgtgtggggctgagctggtggatgccctgcagtttgtgtgtggggaccggggcttctacttcaacaagcccaccggctacggcagcagcagccggcgggccccccagacaggaattgtggatgagtgctgcttccgcagctgtgacctgcggcggctggagatgtactgtgcccccctgaagccagccaagagcgcccggtctgtgcgggcccagaggcacacagacatgcccaagacccagaaggaggtgcacctgaagaatgccagccggggcagcgctggcaacaagaactacaggatgtag

SEQ ID NO: 20039 - DNA, 477 bp, synthetic construct; identical to SEQ ID NO: 20036
  misc_feature 1..477: note = Description of Artificial Sequence: Synthetic coding sequence
  source 1..477: mol_type = other DNA

SEQ ID NO: 20040 - DNA, 4104 bp, synthetic construct
  misc_feature 1..4104: note = Description of Artificial Sequence: Synthetic coding sequence
  source 1..4104: mol_type = other DNA
atgaagagcggcagcggcggcggcagccccaccagcctgtggggcctgctcttcctgtctgctgccctgagcctgtggcccaccagcggggagatctgtggccctggcatcgacatcagaaatgactaccagcagctgaagaggctggagaactgcaccgtgattgagggctacctgcacatcctgctgatcagcaaggccgaggactaccgcagctaccgcttccccaagctgaccgtcatcacagagtacctgctgctcttccgggtggccggcctggagagcctgggggacctcttccccaacctgaccgtcatccggggctggaagctgttctacaactatgccctggtgatctttgagatgaccaacctgaaggacatcggcctgtacaacctgaggaacatcaccaggggggccatcagaattgagaagaatgctgacctgtgctacctgagcacagtggactggagcctcatcctggatgctgtgagcaacaactacatcgtgggcaacaagccacccaaggaatgtggggacctgtgccccggcaccatggaggagaagcccatgtgtgagaagaccaccatcaacaatgagtacaactaccgctgctggaccaccaaccgctgccagaagatgtgccccagcacctgtgggaagagggcctgcacagagaacaatgaatgctgccaccctgagtgcctgggcagctgcagcgccccagacaatgacacagcctgtgtggcctgccgccactactactatgccggcgtgtgtgtgcctgcctgcccccccaacacctacagatttgagggctggaggtgtgtggaccgggacttctgtgccaacatcctgtctgctgagagcagtgacagcgagggcttcgtcatccatgatggagagtgcatgcaggagtgccccagcggcttcatcagaaatggcagccagagcatgtactgcatcccctgtgagggcccctgccccaaggtgtgtgaggaggagaagaagaccaagaccattgattctgtgaccagcgcccagatgctgcagggctgcaccatcttcaagggcaacctgctgatcaacatcagaagaggcaacaacatcgccagcgagctggagaacttcatgggcctgattgaggtggtgacaggctacgtgaagatccgccacagccacgccctggtgtccctgtccttcctgaagaacctgcggctcatcctgggggaggagcagctggagggcaactacagcttctacgtgctggacaaccagaacctgcagcagctgtgggactgggaccacaggaacctgaccatcaaggccggcaagatgtactttgccttcaaccccaagctgtgtgtgtctgagatctacaggatggaggaggtgacaggcaccaagggccggcagagcaagggggacatcaacaccaggaacaacggggagcgggccagctgtgagagtgatgtgctgcacttcaccagcaccaccaccagcaagaaccgcatcatcatcacctggcaccgctaccggcccccagactacagagacctgatctccttcaccgtgtactacaaggaggcccccttcaagaatgtgacagaatatgatggccaggatgcctgtggcagcaacagctggaacatggtggatgtggacctgccccccaacaaggatgtggagcccggcatcctgctgcacggcctgaagccctggacccagtatgctgtgtatgtgaaggctgtgaccctgaccatggtggagaatgaccacatccggggggccaagtctgagatcctgtacatccgcaccaatgcctctgtgcccagcatccccctggatgtgctgagcgccagcaacagcagcagccagctgattgtgaagtggaacccccccagcctgcccaacggcaacctgagctactacatcgtgcgctggcagaggcagccccaggacggctacctgtaccgccacaactactgcagcaaggacaagatccccatcagaaaatatgcagatggcaccatcgacatcgaggaggtgacagagaaccccaagacagaggtgtgtggcggggagaagggcccctgctgtgcctgccccaagacagaagctgagaagcaggccgagaaggaggaggccgagtacaggaaggtgtttgagaacttcctgcacaacagcatctttgtgcccaggcctgagaggaagagaagagatgtgatgcaggtggccaacaccaccatgagcagccgcagcaggaacaccacagctgctgacacctacaacatcacagatcctgaggagctggagacagagtaccccttctttgagagccgggtggacaacaaggagaggacagtcatcagcaacctgcggcccttcaccctgtacagaattgacatccacagctgcaaccacgaggccgagaagctgggctgcagcgccagcaactttgtgtttgcccggaccatgcctgctgagggcgcagatgacatccctggccctgtgacctgggagcccaggccagaaaattccatcttcctgaagtggccagagcctgagaaccccaacggcctcatcctgatgtatgagatcaagtatggcagccaggtggaggaccagcgggagtgtgtgtcccggcaggagtacagaaaatatggaggagccaagctgaaccggctgaaccctggcaactacacagcccgcatccaggccaccagcctgtctggaaatggctcctggacagatcctgtgttcttctacgtgcaggccaagacaggctatgagaacttcatccacctgatcatcgccctgcctgtggccgtgctgctgattgtgggcggcctggtgatcatgctgtatgtgttccacaggaagaggaacaacagccggctgggcaatggagtgctgtatgcctctgtgaaccctgagtacttctctgctgctgatgtgtatgtgcctgatgagtgggaggtggcccgggagaagatcaccatgagccgggagctgggccagggcagctttggcatggtgtatgagggcgtggccaagggcgtggtgaaggatgagcctgagaccagggtggccatcaagacagtgaatgaggccgcctccatgagggagagaattgagttcctgaatgaggcctctgtgatgaaggagttcaactgccaccacgtggtgcggctgctgggcgtggtgtcccagggccagcccaccctggtgatcatggagctgatgaccaggggggacctgaagagctacctgcggagcctgcggcctgagatggagaacaaccctgtgctggccccacccagcctgagcaagatgatccagatggccggggagattgctgatggcatggcctacctgaatgccaacaagtttgtgcaccgggacctggccgccaggaactgcatggtggccgaggacttcaccgtgaagattggagactttggcatgacccgggacatctatgaaacagactactacaggaagggcggcaagggcctgctgcctgtgcgctggatgagccctgagagcctgaaggatggagtcttcaccacctacagtgatgtgtggagctttggagtggtgctgtgggagatcgccaccctggccgagcagccctaccagggcctgagcaatgagcaggtgctgcgctttgtgatggagggcggcctgctggacaagccagacaactgcccagacatgctgtttgagctgatgaggatgtgctggcagtacaaccccaagatgaggcccagcttcctggagatcatcagcagcatcaaggaggagatggagcccggcttccgggaggtgtccttctactacagcgaggagaacaagctgcctgagcctgaggagctggacctggagcctgagaacatggagagcgtgcccctggaccccagcgccagcagcagcagcctgcccctgcctgacagacattctggccacaaggccgagaatggacctggccctggggtgctggtgctgcgggccagctttgatgagcggcagccctatgcccacatgaatggaggcaggaagaatgaaagagccctgcccctgccccagagcagcacctgctag

SEQ ID NO: 20041 - DNA, 543 bp, synthetic construct
  misc_feature 1..543: note = Description of Artificial Sequence: Synthetic coding sequence
  source 1..543: mol_type = other DNA
atgggcatccccatgggcaagtccatgctggtgctgctgaccttcctggcctttgccagctgctgcatcgccgcctaccggcccagcgagaccctgtgtggcggggagctggtggacaccctgcagtttgtgtgtggggaccggggcttctacttcagcaggcctgccagccgggtgtccagaagaagccggggcatcgtggaggagtgctgcttccgcagctgtgacctggccctgctggagacctactgtgccaccccagccaagtcagaaagagatgtgtccaccccacccaccgtgctgcctgacaacttcccccgctaccctgtgggcaagttcttccagtatgacacctggaagcagagcacccagaggctgcggcggggcctgcctgccctgctgcgggcccggcggggccacgtgctggccaaggagctggaggccttccgggaggccaagaggcaccggcccctgattgccctgcccacccaggaccctgcccacggcggggcccctcctgagatggccagcaacaggaagtag

SEQ ID NO: 20042 - DNA, 543 bp, synthetic construct; identical to SEQ ID NO: 20041
  misc_feature 1..543: note = Description of Artificial Sequence: Synthetic coding sequence
  source 1..543: mol_type = other DNA

SEQ ID NO: 20043 - DNA, 552 bp, synthetic construct
  misc_feature 1..552: note = Description of Artificial Sequence: Synthetic coding sequence
  source 1..552: mol_type = other DNA
atgggcatccccatgggcaagtccatgctggtgctgctgaccttcctggcctttgccagctgctgcatcgccgcctaccggcccagcgagaccctgtgtggcggggagctggtggacaccctgcagtttgtgtgtggggaccggggcttctacttccggctgcccggccggcctgccagccgggtgagccgccgcagccggggcatcgtggaggagtgctgcttccgcagctgtgacctggccctgctggagacctactgtgccaccccagccaagtcagaaagagatgtgtccaccccacccaccgtgctgcctgacaacttcccccgctaccctgtgggcaagttcttccagtatgacacctggaagcagagcacccagaggctgcggcggggcctgcctgccctgctgcgggcccggcggggccacgtgctggccaaggagctggaggccttccgggaggccaagaggcaccggcccctcatcgccctgcccacccaggaccctgcccatggaggagcccctcctgagatggccagcaacaggaagtag

SEQ ID NO: 20044 - DNA, 552 bp, synthetic construct; identical to SEQ ID NO: 20043
  misc_feature 1..552: note = Description of Artificial Sequence: Synthetic coding sequence
  source 1..552: mol_type = other DNA

SEQ ID NO: 20045 - DNA, 543 bp, synthetic construct; identical to SEQ ID NO: 20041
  misc_feature 1..543: note = Description of Artificial Sequence: Synthetic coding sequence
  source 1..543: mol_type = other DNA

SEQ ID NO: 20046 - DNA, 552 bp, synthetic construct; identical to SEQ ID NO: 20043
  misc_feature 1..552: note = Description of Artificial Sequence: Synthetic coding sequence
  source 1..552: mol_type = other DNA

SEQ ID NO: 20047 - DNA, 543 bp, synthetic construct; identical to SEQ ID NO: 20041
  misc_feature 1..543: note = Description of Artificial Sequence: Synthetic coding sequence
  source 1..543: mol_type = other DNA

SEQ ID NO: 20048 - DNA, 552 bp, synthetic construct; identical to SEQ ID NO: 20043
  misc_feature 1..552: note = Description of Artificial Sequence: Synthetic coding sequence
  source 1..552: mol_type = other DNA

SEQ ID NO: 20049 - DNA, 543 bp, synthetic construct; identical to SEQ ID NO: 20041
  misc_feature 1..543: note = Description of Artificial Sequence: Synthetic coding sequence
  source 1..543: mol_type = other DNA

SEQ ID NO: 20050 - DNA, 543 bp, synthetic construct; identical to SEQ ID NO: 20041
  misc_feature 1..543: note = Description of Artificial Sequence: Synthetic coding sequence
  source 1..543: mol_type = other DNA

SEQ ID NO: 20051 - DNA, 711 bp, synthetic construct
  misc_feature 1..711: note = Description of Artificial Sequence: Synthetic coding sequence
  source 1..711: mol_type = other DNA
atggtgtccccagacccccagatcatcgtggtggcccctgagacagagctggcctccatgcaggtgcagaggacagaagatggagtgaccatcatccagatcttctgggtgggcaggaagggggagctgctgcggaggacccctgtgtcctctgccatgcagacccccatgggcatccccatgggcaagtccatgctggtgctgctgaccttcctggcctttgccagctgctgcatcgccgcctaccggcccagcgagaccctgtgtggcggggagctggtggacaccctgcagtttgtgtgtggggaccggggcttctacttcagcaggcctgccagccgggtgtccagaagaagccggggcatcgtggaggagtgctgcttccgcagctgtgacctggccctgctggagacctactgtgccaccccagccaagtcagaaagagatgtgtccaccccacccaccgtgctgcctgacaacttcccccgctaccctgtgggcaagttcttccagtatgacacctggaagcagagcacccagaggctgcggcggggcctgcctgccctgctgcgggcccggcggggccacgtgctggccaaggagctggaggccttccgggaggccaagaggcaccggcccctgattgccctgcccacccaggaccctgcccacggcggggcccctcctgagatggccagcaacaggaagtag

SEQ ID NO: 20052 - DNA, 876 bp, synthetic construct
  misc_feature 1..876: note = Description of Artificial Sequence: Synthetic coding sequence
  source 1..876: mol_type = other DNA
atgcagagggcccggcccaccctgtgggccgccgccctgaccctgctggtgctgctgcggggcccccctgtggcccgggccggggccagcagcgctggcctgggccctgtggtgcgctgtgagccctgtgatgcccgggccctggcccagtgtgcccctcctcctgctgtgtgtgccgagctggtgcgggagcccggctgcggctgctgcctgacctgtgccctgtctgagggccagccctgtggcatctacacagagcgctgtggcagcggcctgcgctgccagcccagcccagatgaggcccggcccctgcaggccctgctggatggccggggcctgtgtgtgaatgccagcgctgtgtcccggctgcgggcctacctgctgcctgcccccccagcccctggaaatgccagcgagagcgaggaggacagatctgctggctctgtggagagccccagcgtgagcagcacccaccgggtgtctgaccccaagttccaccccctgcacagcaagatcatcatcatcaagaagggccacgccaaggacagccagcgctacaaggtggactatgagagccagagcacagacacccagaacttcagcagcgagagcaagcgggagacagaatatggcccctgccggcgggagatggaggacaccctgaaccacctgaagttcctgaatgtgctgagcccccggggcgtgcacatccccaactgtgacaagaagggcttctacaagaagaagcagtgccggcccagcaaaggaaggaagaggggcttctgctggtgtgtggacaagtatggccagcccctgcccggctacaccaccaagggcaaggaggatgtgcactgctacagcatgcagagcaagtag

SEQ ID NO: 20053 - DNA, 894 bp, synthetic construct
  misc_feature 1..894: note = Description of Artificial Sequence: Synthetic coding sequence
  source 1..894: mol_type = other DNA
atgcagagggcccggcccaccctgtgggccgccgccctgaccctgctggtgctgctgcggggcccccctgtggcccgggccggggccagcagcgctggcctgggccctgtggtgcgctgtgagccctgtgatgcccgggccctggcccagtgtgcccctcctcctgctgtgtgtgccgagctggtgcgggagcccggctgcggctgctgcctgacctgtgccctgtctgagggccagccctgtggcatctacacagagcgctgtggcagcggcctgcgctgccagcccagcccagatgaggcccggcccctgcaggccctgctggatggccggggcctgtgtgtgaatgccagcgctgtgtcccggctgcgggcctacctgctgcctgcccccccagcccctggagagcccccagcccctggaaatgccagcgagagcgaggaggacagatctgctggctctgtggagagccccagcgtgagcagcacccaccgggtgtctgaccccaagttccaccccctgcacagcaagatcatcatcatcaagaagggccacgccaaggacagccagcgctacaaggtggactatgagagccagagcacagacacccagaacttcagcagcgagagcaagcgggagacagaatatggcccctgccggcgggagatggaggacaccctgaaccacctgaagttcctgaatgtgctgagcccccggggcgtgcacatccccaactgtgacaagaagggcttctacaagaagaagcagtgccggcccagcaaaggaaggaagaggggcttctgctggtgtgtggacaagtatggccagcccctgcccggctacaccaccaagggcaaggaggatgtgcactgctacagcatgcagagcaagtag

SEQ ID NO: 20054 - DNA, 585 bp, synthetic construct
  misc_feature 1..585: note = Description of Artificial Sequence: Synthetic coding sequence
  source 1..585: mol_type = other DNA
atgcagagggcccggcccctgcaggccctgctggatggccggggcctgtgtgtgaatgccagcgctgtgtcccggctgcgggcctacctgctgcctgcccccccagcccctggaaatgccagcgagagtgaagaagatagatctgctggctctgtggagagccccagcgtgagcagcacccaccgggtgtctgaccccaagttccaccccctgcacagcaagatcatcatcatcaagaagggccacgccaaggacagccagcgctacaaggtggactatgagagccagagcacagacacccagaacttcagcagcgagagcaagcgggagacagaatatggcccctgcagaagagagatggaggacaccctgaaccacctgaagttcctgaatgtgctgagcccccggggcgtgcacatccccaactgtgacaagaagggcttctacaagaagaagcagtgccggcccagcaagggcaggaagaggggcttctgctggtgtgtggacaagtatggccagcccctgcccggctacaccaccaagggcaaggaggatgtgcactgctacagcatgcagagcaagtag

SEQ ID NO: 20055 - DNA, 462 bp, synthetic construct
  misc_feature 1..462: note = Description of Artificial Sequence: Synthetic coding sequence
  source 1..462: mol_type = other DNA
tgaagtgaggaggacagatctgctggctctgtggagagccccagcgtgagcagcacccaccgggtgtctgaccccaagttccaccccctgcacagcaagatcatcatcatcaagaagggccacgccaaggacagccagcgctacaaggtggactatgagagccagagcacagacacccagaacttcagcagcgagagcaagcgggagacagaatatggcccctgccggcgggagatggaggacaccctgaaccacctgaagttcctgaatgtgctgagcccccggggcgtgcacatccccaactgtgacaagaagggcttctacaagaagaagcagtgccggcccagcaaaggaaggaagaggggcttctgctggtgtgtggacaagtatggccagcccctgcccggctacaccaccaagggcaaggaggatgtgcactgctacagcatgcagagcaagtag

SEQ ID NO: 20056 - DNA, 432 bp, synthetic construct
  misc_feature 1..432: note = Description of Artificial Sequence: Synthetic coding sequence
  source 1..432: mol_type = other DNA
tgagaaagccccagcgtgagcagcacccaccgggtgtctgaccccaagttccaccccctgcacagcaagatcatcatcatcaagaagggccacgccaaggacagccagcgctacaaggtggactatgagagccagagcacagacacccagaacttcagcagcgagagcaagcgggagacagaatatggcccctgccggcgggagatggaggacaccctgaaccacctgaagttcctgaatgtgctgagcccccggggcgtgcacatccccaactgtgacaagaagggcttctacaagaagaagcagtgccggcccagcaaaggaaggaagaggggcttctgctggtgtgtggacaagtatggccagcccctgcccggctacaccaccaagggcaaggaggatgtgcactgctacagcatgcagagcaagtag

SEQ ID NO: 20057 - DNA, 792 bp, synthetic construct
  misc_feature 1..792: note = Description of Artificial Sequence: Synthetic coding sequence
  source 1..792: mol_type = other DNA
atgcagagggcccggcccaccctgtgggccgcctgtgagccctgtgatgcccgggccctggcccagtgtgcccctcctcctgctgtgtgtgccgagctggtgcgggagcccggctgcggctgctgcctgacctgtgccctgtctgagggccagccctgtggcatctacacagagcgctgtggcagcggcctgcgctgccagcccagcccagatgaggcccggcccctgcaggccctgctggatggccggggcctgtgtgtgaatgccagcgctgtgtcccggctgcgggcctacctgctgcctgcccccccagcccctggaaatgccagcgagagcgaggaggacagatctgctggctctgtggagagccccagcgtgagcagcacccaccgggtgtctgaccccaagttccaccccctgcacagcaagatcatcatcatcaagaagggccacgccaaggacagccagcgctacaaggtggactatgagagccagagcacagacacccagaacttcagcagcgagagcaagcgggagacagaatatggcccctgccggcgggagatggaggacaccctgaaccacctgaagttcctgaatgtgctgagcccccggggcgtgcacatccccaactgtgacaagaagggcttctacaagaagaagcagtgccggcccagcaaaggaaggaagaggggcttctgctggtgtgtggacaagtatggccagcccctgcccggctacaccaccaagggcaaggaggatgtgcactgctacagcatgcagagcaagtag

SEQ ID NO: 20058 - DNA, 834 bp, synthetic construct
  misc_feature 1..834: note = Description of Artificial Sequence: Synthetic coding sequence
  source 1..834: mol_type = other DNA
atgagggccctgcggctgggcgctgaggaccagcccctgcctgcctggatcccccagctgcgggctgtgtactgccggcccatcccagcccggcctgcctgccaggccgcctgccccggctgcagaagacatgctgctggggccacccacgccctgggccgctgtgccgacagcgctggagctgcccccagggctgctgggggcgccggctggagggagctgggcggcctgggcagcagaggagccctgcgggctgtgcgccacctgcaccgggccctgctggatggccggggcctgtgtgtgaatgccagcgctgtgtcccggctgcgggcctacctgctgcctgcccccccagcccctggaaatgccagcgagagcgaggaggacagatctgctggctctgtggagagccccagcgtgagcagcacccaccgggtgtctgaccccaagttccaccccctgcacagcaagatcatcatcatcaagaagggccacgccaaggacagccagcgctacaaggtggactatgagagccagagcacagacacccagaacttcagcagcgagagcaagcgggagacagaatatggcccctgccggcgggagatggaggacaccctgaaccacctgaagttcctgaatgtgctgagcccccggggcgtgcacatccccaactgtgacaagaagggcttctacaagaagaagcagtgccggcccagcaaaggaaggaagaggggcttctgctggtgtgtggacaagtatggccagcccctgcccggctacaccaccaagggcaaggaggatgtgcactgctacagcatgcagagcaagtag

SEQ ID NO: 20059 - DNA, 570 bp, synthetic construct
  misc_feature 1..570: note = Description of Artificial Sequence: Synthetic coding sequence
  source 1..570: mol_type = other DNA
atgcagagggcccggcccaccctgtgggccgccgccctgaccctgctggatggccggggcctgtgtgcctacctgctgcctgcccccccagcccctggaaatgccagcgagagcgaggaggacagatctgctggctctgtggagagccccagcgtgagcagcacccaccgggtgtctgaccccaagttccaccccctgcacagcaagatcatcatcatcaagaagggccacgccaaggacagccagcgctacaaggtggactatgagagccagagcacagacacccagaacttcagcagcgagagcaagcgggagacagaatatggcccctgccggcgggagatggaggacaccctgaaccacctgaagttcctgaatgtgctgagcccccggggcgtgcacatccccaactgtgacaagaagggcttctacaagaagaagcagtgccggcccagcaaaggaaggaagaggggcttctgctggtgtgtggacaagtatggccagcccctgcccggctacaccaccaagggcaaggaggatgtgcactgctacagcatgcagagcaagtag

SEQ ID NO: 20060 - DNA, 807 bp, synthetic construct
  misc_feature 1..807: note = Description of Artificial Sequence: Synthetic coding sequence
  source 1..807: mol_type = other DNA
atgcagagggcccggcccaccctgtgggccgccgccctgaccctgctggtgctgctgcggggcccccctgtggcccgggccggggccagcagcgctggcctgggccctgtggtgagaagagagcccggctgcggctgctgcctgacctgtgccctgtctgagggccagccctgtggcatctacacagagcgctgtggcagcggcctgcgctgccagcccagcccagatgaggcccggcccctgcaggccctgctggatggccggggcctgtgtgtgaatgccagcgctgtgtcccggctgcgggcctacctgctgcctgcccccccagcccctggaaatgccagcgagagtgaagaagatagatctgctggctctgtggagagccccagcgtgagcagcacccaccgggtgtctgaccccaagttccaccccctgcacagcaagatcatcatcatcaagaagggccacgccaaggacagccagcgctacaaggtggactatgagagccagagcacagacacccagaacttcagcagcgagagcaagcgggagacagaatatggcccctgcagaagagagatggaggacaccctgaaccacctgaagttcctgaatgtgctgagcccccggggcgtgcacatccccaactgtgacaagaagggcttctacaagaagaagcagtgccggcccagcaagggcaggaagaggggcttctgctggtgtgtggacaagtatggccagcccctgcccggctacaccaccaagggcaaggaggatgtgcactgctacagcatgcagagcaagtag

SEQ ID NO: 20061 - DNA, 978 bp, synthetic construct
  misc_feature 1..978: note = Description of Artificial Sequence: Synthetic coding sequence
  source 1..978: mol_type = other DNA
atgctgccccgggtgggctgcccagccctgcccctgcccccaccacccctgctgcccctgctgctgctgctgctgggcgccagcggcggcggcggcggggcccgggcagaggtgctcttccgctgccccccctgcaccccagagcggctggccgcctgtggccccccacctgtggcccccccagctgctgtggccgctgtggccggcggggccaggatgccctgtgccgagctggtgcgggagcccggctgcggctgctgcagcgtgtgtgcccggctggagggggaggcctgtggggtgtacaccccccgctgtggccagggcctgcgctgctacccccaccctggcagcgagctgcccctgcaggccctggtgatgggagagggcacctgtgagaagagaagagatgctgaatatggagccagccctgagcaggtggccgacaatggagatgaccacagcgagggcggcctggtggagaaccacgtggacagcaccatgaacatgctgggcggcggcggcagcgctggcaggaagcccctgaagagcggcatgaaggagctggccgtgttccgggagaaggtgacagagcagcaccggcagatgggcaagggcggcaagcaccacctgggcctggaggagcccaagaagctgcggcccccaccagcccggaccccctgccagcaggagctggaccaggtgctggagcgcatcagcaccatgaggctgcctgatgagcggggccccctggagcacctgtacagcctgcacatccccaactgtgacaagcacggcctgtacaacctgaagcagtgcaagatgagcctgaatggccagagaggagagtgctggtgtgtgaaccccaacacaggcaagctgatccagggcgcccccaccatccggggggaccctgagtgccacctgttctacaatgagcagcaggaggcccggggcgtgcacacccagaggatgcagtag

SEQ ID NO: 20062 - DNA, 3099 bp, synthetic construct
  misc_feature 1..3099: note = Description of Artificial Sequence: Synthetic coding sequence
  source 1..3099: mol_type = other DNA
atggcctgggaggcccggcgggagcccggcccccggcgggctgctgtgcgggagaccgtgatgctgctgctgtgcctgggcgtgcccaccggccggccctacaacgtggacacagagagcgccctgctgtaccagggcccccacaacaccctgtttggctacagcgtggtgctgcacagccatggagccaaccgctggctgctggtgggcgcccccacagccaactggctggccaatgccagcgtcatcaaccctggggccatctaccgctgcagaattggcaagaaccctggccagacctgtgagcagctgcagctgggcagccccaacggggagccctgtgggaagacctgcctggaggagcgggacaaccagtggctgggcgtgaccctgagccggcagcctggagaaaatggcagcatcgtgacctgtggccaccgctggaagaacatcttctacatcaagaatgaaaacaagctgcccaccggcggctgctacggcgtgcccccagacctgaggacagagctgagcaagagaattgccccctgctaccaggactatgtgaagaagtttggagaaaattttgccagctgccaggccggcatcagcagcttctacaccaaggacctgattgtgatgggcgcccctggcagcagctactggacaggcagcctgtttgtgtacaacatcaccaccaacaagtacaaggccttcctggacaagcagaaccaggtgaagtttggcagctacctgggctacagcgtgggcgccggccacttccgcagccagcacaccacagaggtggtgggcggggccccccagcacgagcagatcggcaaggcctacatcttcagcattgatgagaaggagctgaacatcctgcacgagatgaagggcaagaagctgggcagctactttggagcctctgtgtgtgctgtggacctgaatgctgatggcttcagtgacctgctggtgggcgcccccatgcagagcaccatccgggaggagggccgggtgtttgtgtacatcaacagcggcagcggggctgtgatgaatgccatggagaccaacctggtgggcagtgacaagtatgctgccaggtttggagagagcatcgtgaacctgggggacatcgacaatgatggctttgaagatgtggccatcggggccccccaggaggatgacctgcagggcgccatctacatctacaacggccgggcagatggcatcagcagcaccttcagccagagaattgagggcctgcagatcagcaagagcctgtccatgtttggccagagcatcagcggccagattgatgctgacaacaacggctacgtggatgtggccgtgggcgccttcagaagtgacagcgctgtgctgctgcggaccaggcctgtggtgattgtggatgccagcctgagccaccctgagagcgtgaacagaaccaagtttgactgtgtggagaatggctggcccagcgtgtgcatcgacctgaccctgtgcttctcctacaagggcaaggaggtgcccggctacatcgtgctcttctacaacatgagcctggatgtgaacaggaaggccgagagccccccacgcttctacttcagcagcaatggcaccagtgatgtgatcaccggcagcatccaggtgagcagccgggaggccaactgcaggacccaccaggccttcatgaggaaggatgtgcgggacatcctgacccccatccagattgaagctgcctaccacctgggcccccacgtgatcagcaagaggagcacagaggagttcccccccctgcagcccatcctgcagcagaagaaggagaaggacatcatgaagaagaccatcaactttgcccgcttctgtgcccacgagaactgcagcgctgacctgcaggtgtctgccaagattggcttcctgaagccccatgagaacaagacctacctggccgtgggctccatgaagaccctgatgctgaatgtgtccctcttcaatgctggagatgatgcctatgagaccaccctgcacgtgaagctgcctgtgggcctgtacttcatcaagatcctggagctggaggagaagcagatcaactgtgaggtgacagacaacagcggcgtggtgcagctggactgcagcatcggctacatctacgtggaccacctgagcagaattgacatctccttcctgctggatgtgagcagcctgagcagagctgaggaggacctgagcatcaccgtgcacgccacctgtgaaaatgaggaggagatggacaacctgaagcacagccgggtgacagtggccatccccctgaagtatgaggtgaagctgactgtgcacggctttgtgaaccccaccagctttgtgtatggcagcaatgatgaaaatgaacctgagacctgcatggtggagaagatgaacctgaccttccacgtgatcaacacaggcaacagcatggccccaaatgtgtctgtggagatcatggtgcccaacagcttcagcccccagacagacaagctgttcaacatcctggatgtgcagaccaccactggagagtgccactttgagaactaccagagggtgtgtgccctggagcagcagaagagcgccatgcagaccctgaagggcatcgtgcgcttcctgagcaagacagacaagaggctgctgtactgcatcaaggctgacccccactgcctgaacttcctgtgcaactttgggaagatggagagcggcaaggaggcctctgtgcacatccagctggagggccggcccagcatcctggagatggatgagaccagcgccctgaagtttgagatccgggccaccggcttccctgagcccaacccccgggtgattgagctgaacaaggatgaaaatgtggcccacgtgctgctggagggcctgcaccaccagaggcccaagcgctacttcaccatcgtcatcatcagcagcagcctgctgctgggcctcatcgtgctgctgctgatctcctatgtgatgtggaaggccggcttcttcaagaggcagtacaagagcatcctgcaggaggagaacagaagagacagctggagctacatcaacagcaagagcaatgatgactag

SEQ ID NO: 20063 - DNA, 1854 bp, synthetic construct
  misc_feature 1..1854: note = Description of Artificial Sequence: Synthetic coding sequence
  source 1..1854: mol_type = other DNA
atggcctgggaggcccggcgggagcccggcccccggcgggctgctgtgcgggagaccgtgatgctgctgctgtgcctgggcgtgcccaccggccggccctacaacgtggacacagagagcgccctgctgtaccagggcccccacaacaccctgtttggctacagcgtggtgctgcacagccatggagccaaccgctggctgctggtgggcgcccccacagccaactggctggccaatgccagcgtcatcaaccctggggccatctaccgctgcagaattggcaagaaccctggccagacctgtgagcagctgcagctgggcagccccaacggggagccctgtgggaagacctgcctggaggagcgggacaaccagtggctgggcgtgaccctgagccggcagcctggagaaaatggcagcatcgtgacctgtggccaccgctggaagaacatcttctacatcaagaatgaaaacaagctgcccaccggcggctgctacggcgtgcccccagacctgaggacagagctgagcaagagaattgccccctgctaccaggactatgtgaagaagtttggagaaaattttgccagctgccaggccggcatcagcagcttctacaccaaggacctgattgtgatgggcgcccctggcagcagctactggacaggcagcctgtttgtgtacaacatcaccaccaacaagtacaaggccttcctggacaagcagaaccaggtgaagtttggcagctacctgggctacagcgtgggcgccggccacttccgcagccagcacaccacagaggtggtgggcggggccccccagcacgagcagatcggcaaggcctacatcttcagcattgatgagaaggagctgaacatcctgcacgagatgaagggcaagaagctgggcagctactttggagcctctgtgtgtgctgtggacctgaatgctgatggcttcagtgacctgctggtgggcgcccccatgcagagcaccatccgggaggagggccgggtgtttgtgtacatcaacagcggcagcggggctgtgatgaatgccatggagaccaacctggtgggcagtgacaagtatgctgccaggtttggagagagcatcgtgaacctgggggacatcgacaatgatggctttgaagatgtggccatcggggccccccaggaggatgacctgcagggcgccatctacatctacaacggccgggcagatggcatcagcagcaccttcagccagagaattgagggcctgcagatcagcaagagcctgtccatgtttggccagagcatcagcggccagattgatgctgacaacaacggctacgtggatgtggccgtgggcgccttcagaagtgacagcgctgtgctgctgcggaccaggcctgtggtgattgtggatgccagcctgagccaccctgagagcgtgaacagaaccaagtttgactgtgtggagaatggctggcccagcgtgtgcatcgacctgaccctgtgcttctcctacaagggcaaggaggtgcccggctacatcgtgctcttctacaacatgagcctggatgtgaacaggaaggccgagagccccccacgcttctacttcagcagcaatggcaccagtgatgtgatcaccggcagcatccaggtgagcagccgggaggccaactgcaggacccaccaggccttcatgaggaaggatgtgcgggacatcctgacccccatccagattgaagctgcctaccacctgggcccccacgtgatcagcaagaggagcacagaggagttcccccccctgcagcccatcctgcagcagaagaaggagaaggacatcatgaagaagaccaagaagtag

SEQ ID NO: 20064 - DNA, 3150 bp, synthetic construct
  misc_feature 1..3150: note = Description of Artificial Sequence: Synthetic coding sequence
  source 1..3150: mol_type = other DNA
atgggcagcaggaccccagagagccccctgcatgctgtgcagctgcgctggggccccaggagaagaccacccctgctgcccctgctgctgctgctgctgcccccaccaccccgggtgggcggcttcaacctggatgctgaggccccagctgtgctgagcggccccccaggcagcttcttcggcttctctgtggagttctacagacctggaacagatggagtgtctgtgctggtgggcgcccccaaggccaacaccagccagcccggggtgctgcagggcggcgctgtgtacctgtgcccctggggcgccagccccacccagtgcacccccattgaatttgacagcaagggcagccggctgctggagagcagcctgagcagcagcgagggggaggagcctgtggagtacaagagcctgcagtggtttggagccaccgtgcgggcccacggcagcagcatcctggcctgtgcccccctgtacagctggaggacagagaaggagcccctgagtgaccctgtgggcacctgctacctgagcacagacaacttcacccgcatcctggagtatgccccctgccgcagtgacttctcctgggccgccggccagggctactgccagggcggcttctctgctgagttcaccaagacaggccgggtggtgctgggcggccctggcagctacttctggcagggccagatcctgagcgccacccaggagcagattgctgagagctactacccagagtacctgatcaacctggtgcagggccagctgcagacccggcaggccagcagcatctatgatgacagctacctgggctacagcgtggccgtgggggagttctctggagatgacacagaagattttgtggccggcgtgcccaagggcaacctgacctacggctacgtgaccatcctgaatggaagtgacatccgcagcctgtacaacttcagcggggagcagatggccagctacttcggctatgctgtggccgccacagatgtgaatggagatggcctggatgacctgctggtgggcgcccccctgctgatggacaggaccccagatggccggccccaggaggtgggccgggtgtatgtgtacctgcagcaccctgctggcatcgagcccacccccaccctgaccctgaccggccatgatgaatttggccgcttcggcagcagcctgacccccctgggggacctggaccaggacggctacaatgatgtggccatcggggccccctttggaggagagacccagcagggcgtggtgtttgtgtttcctgggggccctgggggcctgggcagcaagcccagccaggtgctgcagcccctgtgggccgccagccacaccccagacttcttcggcagcgccctgcggggcggccgggacctggatggaaatggctacccagacctgattgtgggcagctttggagtggacaaggctgtggtgtaccggggccggcccatcgtgtctgccagcgccagcctgaccatcttccctgccatgttcaaccctgaggagaggagctgcagcctggagggcaaccctgtggcctgcatcaacctgtccttctgcctgaatgccagcggcaagcacgtggccgacagcatcggcttcaccgtggagctgcagctggactggcagaagcagaagggcggcgtgcggcgggccctcttcctggccagccggcaggccaccctgacccagaccctgctgatccagaatggagcccgggaggactgccgggagatgaagatctacctgagaaatgaaagtgagttccgggacaagctgagccccatccacatcgccctgaacttcagcctggacccccaggcccctgtggacagccacggcctgcggcctgccctgcactaccagagcaagagcagaattgaggacaaggcccagatcctgctggactgtggggaggacaacatctgtgtgcctgacctgcagctggaggtgtttggagagcagaaccacgtgtacctgggggacaagaatgccctgaacctgaccttccacgcccagaatgtgggggagggcggggcctatgaagctgagctgcgggtgacagcccctcctgaggccgagtacagcggcctggtgcgccaccctggcaacttcagcagcctgagctgtgactactttgctgtgaaccagagccggctgctggtgtgtgacctgggcaaccccatgaaggccggggccagcctgtggggcggcctgcgcttcaccgtgccccacctgcgggacaccaagaagaccatccagtttgacttccagatcctgagcaagaacctgaacaacagccagagtgatgtggtgtccttccggctgtctgtggaggcccaggcccaggtgaccctgaatggagtgtccaagccagaggccgtgctcttccctgtgtctgactggcacccccgggaccagccccagaaggaggaggacctgggccctgctgtgcaccacgtgtatgagctgatcaaccagggccccagcagcatcagccagggcgtgctggagctgagctgcccccaggccctggagggccagcagctgctgtatgtgaccagggtgacaggcctgaactgcaccaccaaccaccccatcaaccccaagggcctggagctggaccctgagggcagcctgcaccaccagcagaagcgggaggcccccagccgcagcagcgccagcagcggcccccagatcctgaagtgcccagaggccgagtgcttccggctgcgctgtgagctgggccccctgcaccagcaggagagccagagcctgcagctgcacttccgggtgtgggccaagaccttcctgcagcgggagcaccagcccttcagcctgcagtgtgaggccgtgtacaaggccctgaagatgccctaccgcatcctgccccggcagctgccccagaaggagcggcaggtggccacagctgtgcagtggaccaaggccgagggcagctatggagtgcccctgtggatcatcatcctggccatcctgtttggcctgctgctgctgggcctgctgatctacatcctgtacaagctgggcttcttcaagaggagcctgccctacggcacagccatggagaaggcccagctgaagcccccagccaccagtgatgcctag

SEQ ID NO: 20065 - DNA, 3393 bp, synthetic construct
  misc_feature 1..3393: note = Description of Artificial Sequence: Synthetic coding sequence
  source 1..3393: mol_type = other DNA
atggctgctgctggccagctgtgcctgctgtacctgtctgctggcctgctgagccggctgggcgccgccttcaacctggacacccgggaggacaacgtcatcagaaaatatggagaccccggcagcctgtttggcttcagcctggccatgcactggcagctgcagcctgaggacaagaggctgctgctggtgggcgcccccagggctgaggccctgcccctgcagagggccaacagaactggaggcctgtacagctgtgacatcacagcccggggcccctgcaccagaattgaatttgacaatgatgctgaccccaccagcgagagcaaagaagaccagtggatgggcgtgacagtgcagagccagggccctgggggcaaggtggtgacctgtgcccacagatatgagaagaggcagcacgtgaacaccaagcaggagagccgggacatcttcggccgctgctacgtgctgagccagaacctgagaattgaagatgacatggatggaggagactggagcttctgtgatggccgcctgcggggccacgagaagtttggcagctgccagcagggcgtggccgccaccttcaccaaggacttccactacatcgtgtttggagcccctggcacctacaactggaagggcatcgtgcgggtggagcagaagaacaacaccttctttgacatgaacatctttgaagatggcccctatgaggtgggcggggagacagaacatgatgagagcctggtgcctgtgcctgccaacagctacctgggcctgctcttcctgacctctgtgtcctacacagatcctgaccagtttgtgtacaagacccggcccccccgggagcagcctgacaccttcccagatgtgatgatgaacagctacctgggcttcagcctggacagcgggaaaggaattgtgtccaaggatgagatcacctttgtgtctggggccccccgggccaaccacagcggggctgtggtgctgctgaagagggacatgaagagcgcccacctgctgcctgagcacatctttgatggagagggcctggccagcagctttggctatgatgtggccgtggtggacctgaacaaggatggctggcaggacatcgtcatcggggccccccagtactttgacagagatggagaggtgggcggcgctgtgtatgtgtacatgaaccagcagggccgctggaacaacgtgaagcccatccggctgaatggcaccaaggacagcatgtttggaattgctgtgaagaacattggagacatcaaccaggacggctacccagacattgctgtgggcgccccctatgatgacctgggcaaggtgttcatctaccacggcagcgccaacggcatcaacaccaagcccacccaggtgctgaagggcatcagcccctacttcggctacagcattgctggcaacatggacctggacagaaattcctacccagatgtggccgtgggcagcctgagtgacagcgtgaccatcttccgcagcaggcctgtgatcaacatccagaagaccatcaccgtgacccccaacagaattgacctgcggcagaagacagcctgtggggcccccagcggcatctgcctgcaggtgaagagctgctttgagtacacagccaacccagctggctacaaccccagcatcagcatcgtgggcaccctggaggccgagaaggagaggaggaagagcggcctgagcagccgggtgcagttcaggaaccagggcagcgagcccaagtacacccaggagctgaccctgaagaggcagaagcagaaggtgtgcatggaggagaccctgtggctgcaggacaacatccgggacaagctgcggcccatccccatcacagcctctgtggagatccaggagcccagcagcagaagaagagtgaacagcctgcctgaggtgctgcccatcctgaacagtgatgagcccaagacagcccacattgatgtgcacttcctgaaggagggctgtggagatgacaacgtgtgcaacagcaacctgaagctggagtacaagttctgcacccgggagggcaaccaggacaagttctcctacctgcccatccagaagggcgtgcctgagctggtgctgaaggaccagaaggacatcgccctggagatcaccgtgaccaacagccccagcaaccccaggaaccccaccaaggatggagatgatgcccacgaggccaagctgattgccaccttcccagacaccctgacctacagcgcctaccgggagctgcgggccttccctgagaagcagctgagctgtgtggccaaccagaatggcagccaggccgactgtgagctgggcaaccccttcaagaggaacagcaatgtgaccttctacctggtgctgagcaccacagaggtgacctttgacaccccagacctggacatcaacctgaagctggagaccaccagcaaccaggacaacctggcccccatcacagccaaggccaaggtggtgattgagctgctgctgtctgtgtctggagtggccaagcccagccaggtgtactttggaggcaccgtggtgggggagcaggccatgaagtcagaagatgaggtgggcagcctgattgaatatgagttccgggtcatcaacctgggcaagcccctgaccaacctgggcacagccaccctgaacatccagtggcccaaggagatcagcaatggcaagtggctgctgtacctggtgaaggtggagagcaagggcctggagaaggtgacctgtgagccccagaaggagatcaacagcctgaacctgacagagagccacaacagcaggaagaagcgggagatcacagagaagcagattgatgacaacaggaagttcagcctgtttgctgagaggaagtaccagaccctgaactgcagcgtgaatgtgaactgtgtgaacatccgctgccccctgcggggcctggacagcaaggccagcctcatcctgcggagccggctgtggaacagcaccttcctggaggagtacagcaagctgaactacctggacatcctgatgagggccttcattgatgtgacagctgctgctgagaacatccggctgcccaatgccggcacccaggtgcgggtgacagtgttccccagcaagacagtggcccagtacagcggcgtgccctggtggatcatcctggtggccatcctggccggcatcctgatgctggccctgctggtgttcatcctgtggaagtgtggcttcttcaagaggagccgctatgatgattctgtgccccgctaccacgctgtgcgcatcaggaaggaggagcgggagatcaaggatgagaagtacatcgacaacctggagaagaagcagtggatcaccaagtggaatgaaaatgaaagctacagctag

SEQ ID NO: 20066 - DNA, 3222 bp, synthetic construct
  misc_feature 1..3222: note = Description of Artificial Sequence: Synthetic coding sequence
  source 1..3222: mol_type = other DNA
atggctgctgctggccagctgtgcctgctgtacctgtctgctggcctgctgagccggctgggcgccgccttcaacctggacacccgggaggacaacgtcatcagaaaatatggagaccccggcagcctgtttggcttcagcctggccatgcactggcagctgcagcctgaggacaagaggctgctgctggtgggcgcccccagggctgaggccctgcccctgcagagggccaacagaactggaggcctgtacagctgtgacatcacagcccggggcccctgcaccagaattgaatttgacaatgatgctgaccccaccagcgagagcaaagaagaccagtggatgggcgtgacagtgcagagccagggccctgggggcaaggtggtgacctgtgcccacagatatgagaagaggcagcacgtgaacaccaagcaggagagccgggacatcttcggccgctgctacgtgctgagccagaacctgagaattgaagatgacatggatggaggagactggagcttctgtgatggccgcctgcggggccacgagaagtttggcagctgccagcagggcgtggccgccaccttcaccaaggacttccactacatcgtgtttggagcccctggcacctacaactggaagggcatcgtgcgggtggagcagaagaacaacaccttctttgacatgaacatctttgaagatggcccctatgaggtgggcggggagacagaacatgatgagagcctggtgcctgtgcctgccaacagctacctgggcttcagcctggacagcggcaagggcatcgtgtccaaggatgagatcacctttgtgtctggggccccccgggccaaccacagcggggctgtggtgctgctgaagagggacatgaagagcgcccacctgctgcctgagcacatctttgatggagagggcctggccagcagctttggctatgatgtggccgtggtggacctgaacaaggatggctggcaggacatcgtgattggagccccccagtactttgacagagatggagaggtgggcggcgctgtgtatgtgtacatgaaccagcagggccgctggaacaacgtgaagcccatccggctgaatggcaccaaggacagcatgtttggaattgctgtgaagaacatcggggacatcaaccaggacggctacccagacattgctgtgggcgccccctatgatgacctgggcaaggtgttcatctaccacggcagcgccaacggcatcaacaccaagcccacccaggtgctgaagggcatcagcccctacttcggctacagcattgctggcaacatggacctggacaggaacagctacccagatgtggccgtgggcagcctgagtgacagcgtgaccatcttccgcagcaggcctgtgatcaacatccagaagaccatcaccgtgacccccaacagaattgacctgcggcagaagacagcctgtggggcccccagcggcatctgcctgcaggtgaagagctgctttgagtacacagccaacccagctggctacaaccccagcatcagcatcgtgggcaccctggaggccgagaaggagaggaggaagagcggcctgagcagccgggtgcagttcaggaaccagggcagcgagcccaagtacacccaggagctgaccctgaagaggcagaagcagaaggtgtgcatggaggagaccctgtggctgcaggacaacatccgggacaagctgcggcccatccccatcacagcctctgtggagatccaggagcccagcagcagaagaagagtgaacagcctgcctgaggtgctgcccatcctgaacagtgatgagcccaagacagcccacattgatgtgcacttcctgaaggagggctgtggagatgacaacgtgtgcaacagcaacctgaagctggagtacaagttctgcacccgggagggcaaccaggacaagttctcctacctgcccatccagaagggcgtgcctgagctggtgctgaaggaccagaaggacatcgccctggagatcaccgtgaccaacagccccagcaaccccaggaaccccaccaaggatggagatgatgcccacgaggccaagctgattgccaccttcccagacaccctgacctacagcgcctaccgggagctgcgggccttccctgagaagcagctgagctgtgtggccaaccagaatggcagccaggccgactgtgagctgggcaaccccttcaagaggaacagcaatgtgaccttctacctggtgctgagcaccacagaggtgacctttgacaccccagacctggacatcaacctgaagctggagaccaccagcaaccaggacaacctggcccccatcacagccaaggccaaggtggtgattgagctgctgctgtctgtgtctggagtggccaagcccagccaggtgtactttggaggcaccgtggtgggggagcaggccatgaagtcagaagatgaggtgggcagcctcatcgagtatgagttccgggtcatcaacctgggcaagcccctgaccaacctgggcacagccaccctgaacatccagtggcccaaggagatcagcaatggcaagtggctgctgtacctggtgaaggtggagagcaagggcctggagaaggtgacctgtgagccccagaaggagatcaacagcctgaacctgacagagagccacaacagcaggaagaagcgggagatcacagagaagcagattgatgacaacaggaagttcagcctgtttgctgagaggaagtaccagaccctgaactgcagcgtgaatgtgaactgtgtgaacatccgctgccccctgcggggcctggacagcaaggccagcctcatcctgcggagccggctgtggaacagcaccttcctggaggagtacagcaagctgaactacctggacatcctgatgagggccttcattgatgtgacagctgctgctgagaacatccggctgcccaatgccggcacccaggtgcgggtgaccgtcttccccagcaagacagtggcccagtacagcggcgtgccctggtggatcatcctggtggccatcctggccggcatcctgatgctggccctgctggtgttcatcctgtggaagtgtggcttcttcaagaggaacaagaaggaccactatgatgccacctaccacaaggccgagatccacgcccagcccagcgacaaggagcggctgaccagtgatgcctag

SEQ ID NO: 20067 - DNA, 3207 bp, synthetic construct
  misc_feature 1..3207: note = Description of Artificial Sequence: Synthetic coding sequence
  source 1..3207: mol_type = other DNA
atggctgctgctggccagctgtgcctgctgtacctgtctgctggcctgctgagccggctgggcgccgccttcaacctggacacccgggaggacaacgtcatcagaaaatatggagaccccggcagcctgtttggcttcagcctggccatgcactggcagctgcagcctgaggacaagaggctgctgctggtgggcgcccccagggctgaggccctgcccctgcagagggccaacagaactggaggcctgtacagctgtgacatcacagcccggggcccctgcaccagaattgaatttgacaatgatgctgaccccaccagcgagagcaaagaagaccagtggatgggcgtgacagtgcagagccagggccctgggggcaaggtggtgacctgtgcccacagatatgagaagaggcagcacgtgaacaccaagcaggagagccgggacatcttcggccgctgctacgtgctgagccagaacctgagaattgaagatgacatggatggaggagactggagcttctgtgatggccgcctgcggggccacgagaagtttggcagctgccagcagggcgtggccgccaccttcaccaaggacttccactacatcgtgtttggagcccctggcacctacaactggaagggcctgctcttcctgacctctgtgtcctacacagatcctgaccagtttgtgtacaagacccggcccccccgggagcagcctgacaccttcccagatgtgatgatgaacagctacctgggcttcagcctggacagcgggaaaggaattgtgtccaaggatgagatcacctttgtgtctggggccccccgggccaaccacagcggggctgtggtgctgctgaagagggacatgaagagcgcccacctgctgcctgagcacatctttgatggagagggcctggccagcagctttggctatgatgtggccgtggtggacctgaacaaggatggctggcaggacatcgtcatcggggccccccagtactttgacagagatggagaggtgggcggcgctgtgtatgtgtacatgaaccagcagggccgctggaacaacgtgaagcccatccggctgaatggcaccaaggacagcatgtttggaattgctgtgaagaacattggagacatcaaccaggacggctacccagacattgctgtgggcgccccctatgatgacctgggcaaggtgttcatctaccacggcagcgccaacggcatcaacaccaagcccacccaggtgctgaagggcatcagcccctacttcggctacagcattgctggcaacatggacctggacagaaattcctacccagatgtggccgtgggcagcctgagtgacagcgtgaccatcttccgcagcaggcctgtgatcaacatccagaagaccatcaccgtgacccccaacagaattgacctgcggcagaagacagcctgtggggcccccagcggcatctgcctgcaggtgaagagctgctttgagtacacagccaacccagctggctacaaccccagcatcagcatcgtgggcaccctggaggccgagaaggagaggaggaagagcggcctgagcagccgggtgcagttcaggaaccagggcagcgagcccaagtacacccaggagctgaccctgaagaggcagaagcagaaggtgtgcatggaggagaccctgtggctgcaggacaacatccgggacaagctgcggcccatccccatcacagcctctgtggagatccaggagcccagcagcagaagaagagtgaacagcctgcctgaggtgctgcccatcctgaacagtgatgagcccaagacagcccacattgatgtgcacttcctgaaggagggctgtggagatgacaacgtgtgcaacagcaacctgaagctggagtacaagttctgcacccgggagggcaaccaggacaagttctcctacctgcccatccagaagggcgtgcctgagctggtgctgaaggaccagaaggacatcgccctggagatcaccgtgaccaacagccccagcaaccccaggaaccccaccaaggatggagatgatgcccacgaggccaagctgattgccaccttcccagacaccctgacctacagcgcctaccgggagctgcgggccttccctgagaagcagctgagctgtgtggccaaccagaatggcagccaggccgactgtgagctgggcaaccccttcaagaggaacagcaatgtgaccttctacctggtgctgagcaccacagaggtgacctttgacaccccagacctggacatcaacctgaagctggagaccaccagcaaccaggacaacctggcccccatcacagccaaggccaaggtggtgattgagctgctgctgtctgtgtctggagtggccaagcccagccaggtgtactttggaggcaccgtggtgggggagcaggccatgaagtcagaagatgaggtgggcagcctgattgaatatgagttccgggtcatcaacctgggcaagcccctgaccaacctgggcacagccaccctgaacatccagtggcccaaggagatcagcaatggcaagtggctgctgtacctggtgaaggtggagagcaagggcctggagaaggtgacctgtgagccccagaaggagatcaacagcctgaacctgacagagagccacaacagcaggaagaagcgggagatcacagagaagcagattgatgacaacaggaagttcagcctgtttgctgagaggaagtaccagaccctgaactgcagcgtgaatgtgaactgtgtgaacatccgctgccccctgcggggcctggacagcaaggccagcctcatcctgcggagccggctgtggaacagcaccttcctggaggagtacagcaagctgaactacctggacatcctgatgagggccttcattgatgtgacagctgctgctgagaacatccggctgcccaatgccggcacccaggtgcgggtgacagtgttccccagcaagacagtggcccagtacagcggcgtgccctggtggatcatcctggtggccatcctggccggcatcctgatgctggccctgctggtgttcatcctgtggaagtgtggcttcttcaagaggaacaagaaggaccactatgatgccacctaccacaaggccgagatccacgcccagcccagcgacaaggagcggctgaccagtgatgcctag

SEQ ID NO: 20068 - DNA, 3339 bp, synthetic construct
  misc_feature 1..3339: note = Description of Artificial Sequence: Synthetic coding sequence
  source 1..3339: mol_type = other DNA
atggctgctgctggccagctgtgcctgctgtacctgtctgctggcctgctgagccggctgggcgccgccttcaacctggacacccgggaggacaacgtcatcagaaaatatggagaccccggcagcctgtttggcttcagcctggccatgcactggcagctgcagcctgaggacaagaggctgctgctggtgggcgcccccagggctgaggccctgcccctgcagagggccaacagaactggaggcctgtacagctgtgacatcacagcccggggcccctgcaccagaattgaatttgacaatgatgctgaccccaccagcgagagcaaagaagaccagtggatgggcgtgacagtgcagagccagggccctgggggcaaggtggtgacctgtgcccacagatatgagaagaggcagcacgtgaacaccaagcaggagagccgggacatcttcggccgctgctacgtgctgagccagaacctgagaattgaagatgacatggatggaggagactggagcttctgtgatggccgcctgcggggccacgagaagtttggcagctgccagcagggcgtggccgccaccttcaccaaggacttccactacatcgtgtttggagcccctggcacctacaactggaagggcatcgtgcgggtggagcagaagaacaacaccttctttgacatgaacatctttgaagatggcccctatgaggtgggcggggagacagaacatgatgagagcctggtgcctgtgcctgccaacagctacctgggcctgctcttcctgacctctgtgtcctacacagatcctgaccagtttgtgtacaagacccggcccccccgggagcagcctgacaccttcccagatgtgatgatgaacagctacctgggcttcagcctggacagcgggaaaggaattgtgtccaaggatgagatcacctttgtgtctggggccccccgggccaaccacagcggggctgtggtgctgctgaagagggacatgaagagcgcccacctgctgcctgagcacatctttgatggagagggcctggccagcagctttggctatgatgtggccgtggtggacctgaacaaggatggctggcaggacatcgtcatcggggccccccagtactttgacagagatggagaggtgggcggcgctgtgtatgtgtacatgaaccagcagggccgctggaacaacgtgaagcccatccggctgaatggcaccaaggacagcatgtttggaattgctgtgaagaacattggagacatcaaccaggacggctacccagacattgctgtgggcgccccctatgatgacctgggcaaggtgttcatctaccacggcagcgccaacggcatcaacaccaagcccacccaggtgctgaagggcatcagcccctacttcggctacagcattgctggcaacatggacctggacagaaattcctacccagatgtggccgtgggcagcctgagtgacagcgtgaccatcttccgcagcaggcctgtgatcaacatccagaagaccatcaccgtgacccccaacagaattgacctgcggcagaagacagcctgtggggcccccagcggcatctgcctgcaggtgaagagctgctttgagtacacagccaacccagctggctacaaccccagcatcagcatcgtgggcaccctggaggccgagaaggagaggaggaagagcggcctgagcagccgggtgcagttcaggaaccagggcagcgagcccaagtacacccaggagctgaccctgaagaggcagaagcagaaggtgtgcatggaggagaccctgtggctgcaggacaacatccgggacaagctgcggcccatccccatcacagcctctgtggagatccaggagcccagcagcagaagaagagtgaacagcctgcctgaggtgctgcccatcctgaacagtgatgagcccaagacagcccacattgatgtgcacttcctgaaggagggctgtggagatgacaacgtgtgcaacagcaacctgaagctggagtacaagttctgcacccgggagggcaaccaggacaagttctcctacctgcccatccagaagggcgtgcctgagctggtgctgaaggaccagaaggacatcgccctggagatcaccgtgaccaacagccccagcaaccccaggaaccccaccaaggatggagatgatgcccacgaggccaagctgattgccaccttcccagacaccctgacctacagcgcctaccgggagctgcgggccttccctgagaagcagctgagctgtgtggccaaccagaatggcagccaggccgactgtgagctgggcaaccccttcaagaggaacagcaatgtgaccttctacctggtgctgagcaccacagaggtgacctttgacaccccagacctggacatcaacctgaagctggagaccaccagcaaccaggacaacctggcccccatcacagccaaggccaaggtggtgattgagctgctgctgtctgtgtctggagtggccaagcccagccaggtgtactttggaggcaccgtggtgggggagcaggccatgaagtcagaagatgaggtgggcagcctgattgaatatgagttccgggtcatcaacctgggcaagcccctgaccaacctgggcacagccaccctgaacatccagtggcccaaggagatcagcaatggcaagtggctgctgtacctggtgaaggtggagagcaagggcctggagaaggtgacctgtgagccccagaaggagatcaacagcctgaacctgacagagagccacaacagcaggaagaagcgggagatcacagagaagcagattgatgacaacaggaagttcagcctgtttgctgagaggaagtaccagaccctgaactgcagcgtgaatgtgaactgtgtgaacatccgctgccccctgcggggcctggacagcaaggccagcctcatcctgcggagccggctgtggaacagcaccttcctggaggagtacagcaagctgaactacctggacatcctgatgagggccttcattgatgtgacagctgctgctgagaacatccggctgcccaatgccggcacccaggtgcgggtgacagtgttccccagcaagacagtggcccagtacagcggcgtgccctggtggatcatcctggtggccatcctggccggcatcctgatgctggccctgctggtgttcatcctgtggaagtgtggcttcttcaagaggaacaagaaggaccactatgatgccacctaccacaaggccgagatccacgcccagcccagcgacaaggagcggctgaccagtgatgcctag

SEQ ID NO: 20069 - DNA, 3276 bp, synthetic construct
  misc_feature 1..3276: note = Description of Artificial Sequence: Synthetic coding sequence
  source 1..3276: mol_type = other DNA
atggctgctgctggccagctgtgcctgctgtacctgtctgctggcctgctgagccggctgggcgccgccttcaacctggacacccgggaggacaacgtcatcagaaaatatggagaccccggcagcctgtttggcttcagcctggccatgcactggcagctgcagcctgaggacaagaggctgctgctggtgggcgcccccagggctgaggccctgcccctgcagagggccaacagaactggaggcctgtacagctgtgacatcacagcccggggcccctgcaccagaattgaatttgacaatgatgctgaccccaccagcgagagcaaagaagaccagtggatgggcgtgacagtgcagagccagggccctgggggcaaggtggtgacctgtgcccacagatatgagaagaggcagcacgtgaacaccaagcaggagagccgggacatcttcggccgctgctacgtgctgagccagaacctgagaattgaagatgacatggatggaggagactggagcttctgtgatggccgcctgcggggccacgagaagtttggcagctgccagcagggcgtggccgccaccttcaccaaggacttccactacatcgtgtttggagcccctggcacctacaactggaagggcatcgtgcgggtggagcagaagaacaacaccttctttgacatgaacatctttgaagatggcccctatgaggtgggcggggagacagaacatgatgagagcctggtgcctgtgcctgccaacagctacctgggcttcagcctggacagcggcaagggcatcgtgtccaaggatgagatcacctttgtgtctggggccccccgggccaaccacagcggggctgtggtgctgctgaagagggacatgaagagcgcccacctgctgcctgagcacatctttgatggagagggcctggccagcagctttggctatgatgtggccgtggtggacctgaacaaggatggctggcaggacatcgtgattggagccccccagtactttgacagagatggagaggtgggcggcgctgtgtatgtgtacatgaaccagcagggccgctggaacaacgtgaagcccatccggctgaatggcaccaaggacagcatgtttggaattgctgtgaagaacatcggggacatcaaccaggacggctacccagacattgctgtgggcgccccctatgatgacctgggcaaggtgttcatctaccacggcagcgccaacggcatcaacaccaagcccacccaggtgctgaagggcatcagcccctacttcggctacagcattgctggcaacatggacctggacaggaacagctacccagatgtggccgtgggcagcctgagtgacagcgtgaccatcttccgcagcaggcctgtgatcaacatccagaagaccatcaccgtgacccccaacagaattgacctgcggcagaagacagcctgtggggcccccagcggcatctgcctgcaggtgaagagctgctttgagtacacagccaacccagctggctacaaccccagcatcagcatcgtgggcaccctggaggccgagaaggagaggaggaagagcggcctgagcagccgggtgcagttcaggaaccagggcagcgagcccaagtacacccaggagctgaccctgaagaggcagaagcagaaggtgtgcatggaggagaccctgtggctgcaggacaacatccgggacaagctgcggcccatccccatcacagcctctgtggagatccaggagcccagcagcagaagaagagtgaacagcctgcctgaggtgctgcccatcctgaacagtgatgagcccaagacagcccacattgatgtgcacttcctgaaggagggctgtggagatgacaacgtgtgcaacagcaacctgaagctggagtacaagttctgcacccgggagggcaaccaggacaagttctcctacctgcccatccagaagggcgtgcctgagctggtgctgaaggaccagaaggacatcgccctggagatcaccgtgaccaacagccccagcaaccccaggaaccccaccaaggatggagatgatgcccacgaggccaagctgattgccaccttcccagacaccctgacctacagcgcctaccgggagctgcgggccttccctgagaagcagctgagctgtgtggccaaccagaatggcagccaggccgactgtgagctgggcaaccccttcaagaggaacagcaatgtgaccttctacctggtgctgagcaccacagaggtgacctttgacaccccagacctggacatcaacctgaagctggagaccaccagcaaccaggacaacctggcccccatcacagccaaggccaaggtggtgattgagctgctgctgtctgtgtctggagtggccaagcccagccaggtgtactttggaggcaccgtggtgggggagcaggccatgaagtcagaagatgaggtgggcagcctcatcgagtatgagttccgggtcatcaacctgggcaagcccctgaccaacctgggcacagccaccctgaacatccagtggcccaaggagatcagcaatggcaagtggctgctgtacctggtgaaggtggagagcaagggcctggagaaggtgacctgtgagccccagaaggagatcaacagcctgaacctgacagagagccacaacagcaggaagaagcgggagatcacagagaagcagattgatgacaacaggaagttcagcctgtttgctgagaggaagtaccagaccctgaactgcagcgtgaatgtgaactgtgtgaacatccgctgccccctgcggggcctggacagcaaggccagcctcatcctgcggagccggctgtggaacagcaccttcctggaggagtacagcaagctgaactacctggacatcctgatgagggccttcattgatgtgacagctgctgctgagaacatccggctgcccaatgccggcacccaggtgcgggtgaccgtcttccccagcaagacagtggcccagtacagcggcgtgccctggtggatcatcctggtggccatcctggccggcatcctgatgctggccctgctggtgttcatcctgtggaagtgtggcttcttcaagaggagccgctatgatgacagcgtgccccgctaccacgctgtgcgcatcaggaaggaggagcgggagatcaaggatgagaagtacatcgacaacctggagaagaagcagtggatcaccaagtggaatgaaaatgaaagctacagctag

SEQ ID NO: 20070 - DNA, 2865 bp, synthetic construct
  misc_feature 1..2865: note = Description of Artificial Sequence: Synthetic coding sequence
  source 1..2865: mol_type = other DNA
atgggcgtgacagtgcagagccagggccctgggggcaaggtggtgacctgtgcccacagatatgagaagaggcagcacgtgaacaccaagcaggagagccgggacatcttcggccgctgctacgtgctgagccagaacctgagaattgaagatgacatggatggaggagactggagcttctgtgatggccgcctgcggggccacgagaagtttggcagctgccagcagggcgtggccgccaccttcaccaaggacttccactacatcgtgtttggagcccctggcacctacaactggaagggcctgctcttcctgacctctgtgtcctacacagatcctgaccagtttgtgtacaagacccggcccccccgggagcagcctgacaccttcccagatgtgatgatgaacagctacctgggcttcagcctggacagcgggaaaggaattgtgtccaaggatgagatcacctttgtgtctggggccccccgggccaaccacagcggggctgtggtgctgctgaagagggacatgaagagcgcccacctgctgcctgagcacatctttgatggagagggcctggccagcagctttggctatgatgtggccgtggtggacctgaacaaggatggctggcaggacatcgtcatcggggccccccagtactttgacagagatggagaggtgggcggcgctgtgtatgtgtacatgaaccagcagggccgctggaacaacgtgaagcccatccggctgaatggcaccaaggacagcatgtttggaattgctgtgaagaacattggagacatcaaccaggacggctacccagacattgctgtgggcgccccctatgatgacctgggcaaggtgttcatctaccacggcagcgccaacggcatcaacaccaagcccacccaggtgctgaagggcatcagcccctacttcggctacagcattgctggcaacatggacctggacagaaattcctacccagatgtggccgtgggcagcctgagtgacagcgtgaccatcttccgcagcaggcctgtgatcaacatccagaagaccatcaccgtgacccccaacagaattgacctgcggcagaagacagcctgtggggcccccagcggcatctgcctgcaggtgaagagctgctttgagtacacagccaacccagctggctacaaccccagcatcagcatcgtgggcaccctggaggccgagaaggagaggaggaagagcggcctgagcagccgggtgcagttcaggaaccagggcagcgagcccaagtacacccaggagctgaccctgaagaggcagaagcagaaggtgtgcatggaggagaccctgtggctgcaggacaacatccgggacaagctgcggcccatccccatcacagcctctgtggagatccaggagcccagcagcagaagaagagtgaacagcctgcctgaggtgctgcccatcctgaacagtgatgagcccaagacagcccacattgatgtgcacttcctgaaggagggctgtggagatgacaacgtgtgcaacagcaacctgaagctggagtacaagttctgcacccgggagggcaaccaggacaagttctcctacctgcccatccagaagggcgtgcctgagctggtgctgaaggaccagaaggacatcgccctggagatcaccgtgaccaacagccccagcaaccccaggaaccccaccaaggatggagatgatgcccacgaggccaagctgattgccaccttcccagacaccctgacctacagcgcctaccgggagctgcgggccttccctgagaagcagctgagctgtgtggccaaccagaatggcagccaggccgactgtgagctgggcaaccccttcaagaggaacagcaatgtgaccttctacctggtgctgagcaccacagaggtgacctttgacaccccagacctggacatcaacctgaagctggagaccaccagcaaccaggacaacctggcccccatcacagccaaggccaaggtggtgattgagctgctgctgtctgtgtctggagtggccaagcccagccaggtgtactttggaggcaccgtggtgggggagcaggccatgaagtcagaagatgaggtgggcagcctgattgaatatgagttccgggtcatcaacctgggcaagcccctgaccaacctgggcacagccaccctgaacatccagtggcccaaggagatcagcaatggcaagtggctgctgtacctggtgaaggtggagagcaagggcctggagaaggtgacctgtgagccccagaaggagatcaacagcctgaacctgacagagagccacaacagcaggaagaagcgggagatcacagagaagcagattgatgacaacaggaagttcagcctgtttgctgagaggaagtaccagaccctgaactgcagcgtgaatgtgaactgtgtgaacatccgctgccccctgcggggcctggacagcaaggccagcctcatcctgcggagccggctgtggaacagcaccttcctggaggagtacagcaagctgaactacctggacatcctgatgagggccttcattgatgtgacagctgctgctgagaacatccggctgcccaatgccggcacccaggtgcgggtgacagtgttccccagcaagacagtggcccagtacagcggcgtgccctggtggatcatcctggtggccatcctggccggcatcctgatgctggccctgctggtgttcatcctgtggaagtgtggcttcttcaagaggaacaagaaggaccactatgatgccacctaccacaaggccgagatccacgcccagcccagcgacaaggagcggctgaccagtgatgcctag

SEQ ID NO: 20071 - DNA, 3393 bp, synthetic construct; identical to SEQ ID NO: 20065
  misc_feature 1..3393: note = Description of Artificial Sequence: Synthetic coding sequence
  source 1..3393: mol_type = other DNA

SEQ ID NO: 20072 - DNA, 3261 bp, synthetic construct
  misc_feature 1..3261: note = Description of Artificial Sequence: Synthetic coding sequence
  source 1..3261: mol_type = other DNA
atggctgctgctggccagctgtgcctgctgtacctgtctgctggcctgctgagccggctgggcgccgccttcaacctggacacccgggaggacaacgtcatcagaaaatatggagaccccggcagcctgtttggcttcagcctggccatgcactggcagctgcagcctgaggacaagaggctgctgctggtgggcgcccccagggctgaggccctgcccctgcagagggccaacagaactggaggcctgtacagctgtgacatcacagcccggggcccctgcaccagaattgaatttgacaatgatgctgaccccaccagcgagagcaaagaagaccagtggatgggcgtgacagtgcagagccagggccctgggggcaaggtggtgacctgtgcccacagatatgagaagaggcagcacgtgaacaccaagcaggagagccgggacatcttcggccgctgctacgtgctgagccagaacctgagaattgaagatgacatggatggaggagactggagcttctgtgatggccgcctgcggggccacgagaagtttggcagctgccagcagggcgtggccgccaccttcaccaaggacttccactacatcgtgtttggagcccctggcacctacaactggaagggcctgctcttcctgacctctgtgtcctacacagatcctgaccagtttgtgtacaagacccggcccccccgggagcagcctgacaccttcccagatgtgatgatgaacagctacctgggcttcagcctggacagcgggaaaggaattgtgtccaaggatgagatcacctttgtgtctggggccccccgggccaaccacagcggggctgtggtgctgctgaagagggacatgaagagcgcccacctgctgcctgagcacatctttgatggagagggcctggccagcagctttggctatgatgtggccgtggtggacctgaacaaggatggctggcaggacatcgtcatcggggccccccagtactttgacagagatggagaggtgggcggcgctgtgtatgtgtacatgaaccagcagggccgctggaacaacgtgaagcccatccggctgaatggcaccaaggacagcatgtttggaattgctgtgaagaacattggagacatcaaccaggacggctacccagacattgctgtgggcgccccctatgatgacctgggcaaggtgttcatctaccacggcagcgccaacggcatcaacaccaagcccacccaggtgctgaagggcatcagcccctacttcggctacagcattgctggcaacatggacctggacagaaattcctacccagatgtggccgtgggcagcctgagtgacagcgtgaccatcttccgcagcaggcctgtgatcaacatccagaagaccatcaccgtgacccccaacagaattgacctgcggcagaagacagcctgtggggcccccagcggcatctgcctgcaggtgaagagctgctttgagtacacagccaacccagctggctacaaccccagcatcagcatcgtgggcaccctggaggccgagaaggagaggaggaagagcggcctgagcagccgggtgcagttcaggaaccagggcagcgagcccaagtacacccaggagctgaccctgaagaggcagaagcagaaggtgtgcatggaggagaccctgtggctgcaggacaacatccgggacaagctgcggcccatccccatcacagcctctgtggagatccaggagcccagcagcagaagaagagtgaacagcctgcctgaggtgctgcccatcctgaacagtgatgagcccaagacagcccacattgatgtgcacttcctgaaggagggctgtggagatgacaacgtgtgcaacagcaacctgaagctggagtacaagttctgcacccgggagggcaaccaggacaagttctcctacctgcccatccagaagggcgtgcctgagctggtgctgaaggaccagaaggacatcgccctggagatcaccgtgaccaacagccccagcaaccccaggaaccccaccaaggatggagatgatgcccacgaggccaagctgattgccaccttcccagacaccctgacctacagcgcctaccgggagctgcgggccttccctgagaagcagctgagctgtgtggccaaccagaatggcagccaggccgactgtgagctgggcaaccccttcaagaggaacagcaatgtgaccttctacctggtgctgagcaccacagaggtgacctttgacaccccagacctggacatcaacctgaagctggagaccaccagcaaccaggacaacctggcccccatcacagccaaggccaaggtggtgattgagctgctgctgtctgtgtctggagtggccaagcccagccaggtgtactttggaggcaccgtggtgggggagcaggccatgaagtcagaagatgaggtgggcagcctgattgaatatgagttccgggtcatcaacctgggcaagcccctgaccaacctgggcacagccaccctgaacatccagtggcccaaggagatcagcaatggcaagtggctgctgtacctggtgaaggtggagagcaagggcctggagaaggtgacctgtgagccccagaaggagatcaacagcctgaacctgacagagagccacaacagcaggaagaagcgggagatcacagagaagcagattgatgacaacaggaagttcagcctgtttgctgagaggaagtaccagaccctgaactgcagcgtgaatgtgaactgtgtgaacatccgctgccccctgcggggcctggacagcaaggccagcctcatcctgcggagccggctgtggaacagcaccttcctggaggagtacagcaagctgaactacctggacatcctgatgagggccttcattgatgtgacagctgctgctgagaacatccggctgcccaatgccggcacccaggtgcgggtgacagtgttccccagcaagacagtggcccagtacagcggcgtgccctggtggatcatcctggtggccatcctggccggcatcctgatgctggccctgctggtgttcatcctgtggaagtgtggcttcttcaagaggagccgctatgatgattctgtgccccgctaccacgctgtgcgcatcaggaaggaggagcgggagatcaaggatgagaagtacatcgacaacctggagaagaagcagtggatcaccaagtggaatgaaaatgaaagctacagctag

SEQ ID NO: 20073 - DNA, 3414 bp, synthetic construct
  misc_feature 1..3414: note = Description of Artificial Sequence: Synthetic coding sequence
  source 1..3414: mol_type = other DNA
atggccggggcccggagccgggacccctggggcgccagcggcatctgctacctgtttggcagcctgctggtggagctgctcttcagcagagctgtggccttcaacctggatgtgatgggcgccctgaggaaggagggggagcccggcagcctgtttggcttctctgtggccctgcaccggcagctgcagccccggccccagagctggctgctggtgggcgccccccaggccctggccctgcccggccagcaggccaacagaactggaggcctgtttgcctgccccctgagcctggaggagacagactgctacagagtggacatcgaccagggcgctgacatgcagaaggagagcaaggagaaccagtggctgggcgtgtctgtgcgcagccagggccctgggggcaagatcgtgacctgtgcccacagatatgaggcccggcagagggtggaccagatcctggagacccgggacatgattggccgctgctttgtgctgagccaggacctggccatcagagatgagctggatggaggagagtggaagttctgtgagggccggccccagggccacgagcagtttggcttctgccagcagggcacagctgctgccttctccccagacagccactacctgctgtttggagcccctggcacctacaactggaagggcctgctgtttgtgaccaacatcgacagcagtgaccctgaccagctggtgtacaagaccctggaccctgctgaccggctgcccggccctgctggggacctggccctgaacagctacctgggcttcagcattgattctgggaagggcctggtgcgggcagaggagctgagctttgtggccggggccccccgggccaaccacaagggagctgtggtgatcctgaggaaggacagcgccagccggctggtgcctgaggtgatgctgagcggggagcggctgaccagcggcttcggctacagcctggccgtggccgacctgaacagtgatggctggccagacctgattgtgggcgccccctacttctttgagcggcaggaggagctgggcggcgctgtgtatgtgtacctgaaccagggcggccactgggccggcatcagccccctgcggctgtgtggcagcccagacagcatgtttggcatcagcctggccgtgctgggggacctgaaccaggacggcttcccagacattgctgtgggcgccccctttgatggagatggcaaggtgttcatctaccacggcagcagcctgggcgtggtggccaagcccagccaggtgctggagggggaggccgtgggcatcaagagctttggctacagcctgagcggcagcctggacatggatggcaaccagtacccagacctgctggtgggcagcctggccgacacagctgtgctcttccgggcccggcccatcctgcacgtgtcccatgaggtgtccatcgcccccaggagcattgacctggagcagcccaactgtgccggcggccacagcgtgtgtgtggacctgcgggtgtgcttctcctacatcgctgtgcccagcagctacagccccaccgtggccctggactatgtgctggatgctgacacagaccggcggctgcggggccaggtgccccgggtgaccttcctgagcaggaacctggaggagcccaagcaccaggccagcggcaccgtgtggctgaagcaccagcacgacagagtgtgtggagatgccatgttccagctgcaggagaatgtgaaggacaagctgcgggccatcgtggtgaccctgagctacagcctgcagaccccccggctgcggcggcaggcccctggccagggcctgccccctgtggcccccatcctgaatgcccaccagcccagcacccagagagctgagatccacttcctgaagcagggctgtggggaggacaagatctgccagagcaacctgcagctggtgcgggcccgcttctgcaccagggtgtctgacacagagttccagcccctgcccatggatgtggatggcaccacagccctgtttgccctgagcggccagcctgtgattggcctggagctgatggtgaccaacctgcccagcgaccctgcccagccccaggctgatggagatgatgcccacgaggcccagctgctggtgatgctgcctgacagcctgcactacagcggcgtgcgggccctggaccctgctgagaagcccctgtgcctgagcaatgaaaatgccagccacgtggagtgtgagctgggcaaccccatgaagagaggagcccaggtgaccttctacctgatcctgagcaccagcggcatcagcattgagaccacagagctggaggtggagctgctgctggccaccatcagcgagcaggagctgcaccctgtgtctgcccgggcccgggtcttcatcgagctgcccctgagcattgctggcatggccatcccccagcagctgttcttctctggagtggtgcggggggagcgggccatgcagagcgagagagatgtgggcagcaaggtgaagtatgaggtgacagtgagcaaccagggccagagcctgcggaccctgggcagcgccttcctgaacatcatgtggccccatgaaattgccaacgggaagtggctgctgtaccccatgcaggtggagctggagggcggccagggccctggccagaagggcctgtgcagcccccggcccaacatcctgcacctggatgtggacagccgggacagaagaagaagagagctggagcccccagagcagcaggagcccggggagcggcaggagcccagcatgtcctggtggcctgtgtcctctgctgagaagaagaagaacatcaccctggactgtgcccggggcacagccaactgtgtggtgttcagctgccccctgtacagctttgacagagctgctgtgctgcacgtgtggggccgcctgtggaacagcaccttcctggaggagtacagcgctgtgaagagcctggaggtgattgtgcgggccaacatcaccgtgaagagcagcatcaagaacctgatgctgagagatgccagcaccgtcatccctgtgatggtgtacctggaccccatggctgtggtggccgagggcgtgccctggtgggtgatcctgctggccgtgctggccggcctgctggtgctggccctgctggtgctgctgctgtggaagatgggcttcttcaagagggccaagcaccctgaggccaccgtgccccagtaccacgctgtgaagatcccccgggaggaccggcagcagttcaaggaggagaagacaggcaccatcctgaggaacaactggggcagcccccggcgggagggcccagatgcccaccccatcctggccgcagatggccaccctgagctgggcccagatggccaccctggccctggaacagcctag

SEQ ID NO: 20074 - DNA, 3489 bp, synthetic construct
  misc_feature 1..3489: note = Description of Artificial Sequence: Synthetic coding sequence
  source 1..3489: mol_type = other DNA
atggccggggcccggagccgggacccctggggcgccagcggcatctgctacctgtttggcagcctgctggtggagctgctcttcagcagagctgtggccttcaacctggatgtgatgggcgccctgaggaaggagggggagcccggcagcctgtttggcttctctgtggccctgcaccggcagctgcagccccggccccagagctggctgctggtgggcgccccccaggccctggccctgcccggccagcaggccaacagaactggaggcctgtttgcctgccccctgagcctggaggagacagactgctacagagtggacatcgaccagggcgctgacatgcagaaggagagcaaggagaaccagtggctgggcgtgtctgtgcgcagccagggccctgggggcaagatcgtgacctgtgcccacagatatgaggcccggcagagggtggaccagatcctggagacccgggacatgattggccgctgctttgtgctgagccaggacctggccatcagagatgagctggatggaggagagtggaagttctgtgagggccggccccagggccacgagcagtttggcttctgccagcagggcacagctgctgccttctccccagacagccactacctgctgtttggagcccctggcacctacaactggaagggcacagcccgggtggagctgtgtgcccagggcagcgctgacctggcccacctggatgatggcccctatgaggccggcggggagaaggagcaggaccccaggctcatccctgtgcctgccaacagctacttcggcctgctgtttgtgaccaacatcgacagcagtgaccctgaccagctggtgtacaagaccctggaccctgctgaccggctgcccggccctgctggggacctggccctgaacagctacctgggcttcagcattgattctgggaagggcctggtgcgggcagaggagctgagctttgtggccggggccccccgggccaaccacaagggagctgtggtgatcctgaggaaggacagcgccagccggctggtgcctgaggtgatgctgagcggggagcggctgaccagcggcttcggctacagcctggccgtggccgacctgaacagtgatggctggccagacctgattgtgggcgccccctacttctttgagcggcaggaggagctgggcggcgctgtgtatgtgtacctgaaccagggcggccactgggccggcatcagccccctgcggctgtgtggcagcccagacagcatgtttggcatcagcctggccgtgctgggggacctgaaccaggacggcttcccagacattgctgtgggcgccccctttgatggagatggcaaggtgttcatctaccacggcagcagcctgggcgtggtggccaagcccagccaggtgctggagggggaggccgtgggcatcaagagctttggctacagcctgagcggcagcctggacatggatggcaaccagtacccagacctgctggtgggcagcctggccgacacagctgtgctcttccgggcccggcccatcctgcacgtgtcccatgaggtgtccatcgcccccaggagcattgacctggagcagcccaactgtgccggcggccacagcgtgtgtgtggacctgcgggtgtgcttctcctacatcgctgtgcccagcagctacagccccaccgtggccctggactatgtgctggatgctgacacagaccggcggctgcggggccaggtgccccgggtgaccttcctgagcaggaacctggaggagcccaagcaccaggccagcggcaccgtgtggctgaagcaccagcacgacagagtgtgtggagatgccatgttccagctgcaggagaatgtgaaggacaagctgcgggccatcgtggtgaccctgagctacagcctgcagaccccccggctgcggcggcaggcccctggccagggcctgccccctgtggcccccatcctgaatgcccaccagcccagcacccagagagctgagatccacttcctgaagcagggctgtggggaggacaagatctgccagagcaacctgcagctggtgcgggcccgcttctgcaccagggtgtctgacacagagttccagcccctgcccatggatgtggatggcaccacagccctgtttgccctgagcggccagcctgtgattggcctggagctgatggtgaccaacctgcccagcgaccctgcccagccccaggctgatggagatgatgcccacgaggcccagctgctggtgatgctgcctgacagcctgcactacagcggcgtgcgggccctggaccctgctgagaagcccctgtgcctgagcaatgaaaatgccagccacgtggagtgtgagctgggcaaccccatgaagagaggagcccaggtgaccttctacctgatcctgagcaccagcggcatcagcattgagaccacagagctggaggtggagctgctgctggccaccatcagcgagcaggagctgcaccctgtgtctgcccgggcccgggtcttcatcgagctgcccctgagcattgctggcatggccatcccccagcagctgttcttctctggagtggtgcggggggagcgggccatgcagagcgagagagatgtgggcagcaaggtgaagtatgaggtgacagtgagcaaccagggccagagcctgcggaccctgggcagcgccttcctgaacatcatgtggccccatgaaattgccaacgggaagtggctgctgtaccccatgcaggtggagctggagggcggccagggccctggccagaagggcctgtgcagcccccggcccaacatcctgcacctggatgtggacagccgggacagaagaagaagagagctggagcccccagagcagcaggagcccggggagcggcaggagcccagcatgtcctggtggcctgtgtcctctgctgagaagaagaagaacatcaccctggactgtgcccggggcacagccaactgtgtggtgttcagctgccccctgtacagctttgacagagctgctgtgctgcacgtgtggggccgcctgtggaacagcaccttcctggaggagtacagcgctgtgaagagcctggaggtgattgtgcgggccaacatcaccgtgaagagcagcatcaagaacctgatgctgagagatgccagcaccgtcatccctgtgatggtgtacctggaccccatggctgtggtggccgagggcgtgccctggtgggtgatcctgctggccgtgctggccggcctgctggtgctggccctgctggtgctgctgctgtggaagtgtggcttcttccacaggagcagccagagcagcagcttccccaccaactaccaccgggcctgcctggccgtgcagcccagcgccatggaggtgggcggccctggcaccgtgggctgggacagcagcaatggccgcagcacccccaggcctccctgccccagcaccatgaggtag

SEQ ID NO: 20075 - DNA, 2976 bp, synthetic construct
  misc_feature 1..2976: note = Description of Artificial Sequence: Synthetic coding sequence
  source 1..2976: mol_type = other DNA
atggccggggcccggagccgggacccctggggcgccagcggcatctgctacctgtttggcagcctgctggtggagctgctcttcagcagagctgtggccttcaacctggatgtgatgggcgccctgaggaaggagggggagcccggcagcctgtttggcttctctgtggccctgcaccggcagctgcagccccggccccagagctggctgctggtgggcgccccccaggccctggccctgcccggccagcaggccaacagaactggaggcctgtttgcctgccccctgagcctggaggagacagactgctacagagtggacatcgaccagggcgctgacatgcagaaggagagcaaggagaaccagtggctgggcgtgtctgtgcgcagccagggccctgggggcaagatcgtgacctgtgcccacagatatgaggcccggcagagggtggaccagatcctggagacccgggacatgattggccgctgctttgtgctgagccaggacctggccatcagagatgagctggatggaggagagtggaagttctgtgagggccggccccagggccacgagcagtttggcttctgccagcagggcacagctgctgccttctccccagacagccactacctgctgtttggagcccctggcacctacaactggaagggcacagcccgggtggagctgtgtgcccagggcagcgctgacctggcccacctggatgatggcccctatgaggccggcggggagaaggagcaggaccccaggctcatccctgtgcctgccaacagctacttcggcctgctgtttgtgaccaacatcgacagcagtgaccctgaccagctggtgtacaagaccctggaccctgctgaccggctgcccggccctgctggggacctggccctgaacagctacctgggcttcagcattgattctgggaagggcctggtgcgggcagaggagctgagctttgtggccggggccccccgggccaaccacaagggagctgtggtgatcctgaggaaggacagcgccagccggctggtgcctgaggtgatgctgagcggggagcggctgaccagcggcttcggctacagcctggccgtggccgacctgaacagtgatggctggccagacctgattgtgggcgccccctacttctttgagcggcaggaggagctgggcggcgctgtgtatgtgtacctgaaccagggcggccactgggccggcatcagccccctgcggctgtgtggcagcccagacagcatgtttggcatcagcctggccgtgctgggggacctgaaccaggacggcttcccagacattgctgtgggcgccccctttgatggagatggcaaggtgttcatctaccacggcagcagcctgggcgtggtggccaagcccagccaggtgctggagggggaggccgtgggcatcaagagctttggctacagcctgagcggcagcctggacatggatggcaaccagtacccagacctgctggtgggcagcctggccgacacagctgtgctcttccgggcccggcccatcctgcacgtgtcccatgaggtgtccatcgcccccaggagcattgacctggagcagcccaactgtgccggcggccacagcgtgtgtgtggacctgcgggtgtgcttctcctacatcgctgtgcccagcagctacagccccaccgtggccctggactatgtgctggatgctgacacagaccggcggctgcggggccaggtgccccgggtgaccttcctgagcaggaacctggaggagcccaagcaccaggccctggaccctgctgagaagcccctgtgcctgagcaatgaaaatgccagccacgtggagtgtgagctgggcaaccccatgaagagaggagcccaggtgaccttctacctgatcctgagcaccagcggcatcagcattgagaccacagagctggaggtggagctgctgctggccaccatcagcgagcaggagctgcaccctgtgtctgcccgggcccgggtcttcatcgagctgcccctgagcattgctggcatggccatcccccagcagctgttcttcagcggcgtggtgcggggggagcgggccatgcagagcgagagagatgtgggcagcaaggtgaagtatgaggtgacagtgagcaaccagggccagagcctgcggaccctgggcagcgccttcctgaacatcatgtggccccatgagatcgccaacgggaagtggctgctgtaccccatgcaggtggagctggagggcggccagggccctggccagaagggcctgtgcagcccccggcccaacatcctgcacctggatgtggacagccgggacagaagaagaagagagctggagcccccagagcagcaggagcctggagagcggcaggagcccagcatgtcctggtggcctgtgagcagcgctgagaagaagaagaacatcaccctggactgtgcccggggcacagccaactgtgtggtgttcagctgccccctgtacagctttgacagagctgctgtgctgcacgtgtggggccgcctgtggaacagcaccttcctggaggagtacagcgctgtgaagagcctggaggtgattgtgcgggccaacatcaccgtgaagagcagcatcaagaacctgatgctgagagatgccagcaccgtcatccctgtgatggtgtacctggaccccatggctgtggtggccgagggcgtgccctggtgggtgatcctgctggccgtgctggccggcctgctggtgctggccctgctggtgctgctgctgtggaagtgtggcttcttccacaggagcagccagagcagcagcttccccaccaactaccaccgggcctgcctggccgtgcagcccagcgccatggaggtgggcggccctggcaccgtgggctgggacagcagcaatggccgcagcaccccccggcccccctgccccagcaccatgaggtag

SEQ ID NO: 20076 - DNA, 3357 bp, synthetic construct
  misc_feature 1..3357: note = Description of Artificial Sequence: Synthetic coding sequence
  source 1..3357: mol_type = other DNA
atggccggggcccggagccgggacccctggggcgccagcggcatctgctacctgtttggcagcctgctggtggagctgctcttcagcagagctgtggccttcaacctggatgtgatgggcgccctgaggaaggagggggagcccggcagcctgtttggcttctctgtggccctgcaccggcagctgcagccccggccccagagctggctgctggtgggcgccccccaggccctggccctgcccggccagcaggccaacagaactggaggcctgtttgcctgccccctgagcctggaggagacagactgctacagagtggacatcgaccagggcgctgacatgcagaaggagagcaaggagaaccagtggctgggcgtgtctgtgcgcagccagggccctgggggcaagatcgtgacctgtgcccacagatatgaggcccggcagagggtggaccagatcctggagacccgggacatgattggccgctgctttgtgctgagccaggacctggccatcagagatgagctggatggaggagagtggaagttctgtgagggccggccccagggccacgagcagtttggcttctgccagcagggcacagctgctgccttctccccagacagccactacctgctgtttggagcccctggcacctacaactggaagggcctgctgtttgtgaccaacatcgacagcagtgaccctgaccagctggtgtacaagaccctggaccctgctgaccggctgcccggccctgctggggacctggccctgaacagctacctgggcttcagcattgattctgggaagggcctggtgcgggcagaggagctgagctttgtggccggggccccccgggccaaccacaagggagctgtggtgatcctgaggaaggacagcgccagccggctggtgcctgaggtgatgctgagcggggagcggctgaccagcggcttcggctacagcctggccgtggccgacctgaacagtgatggctggccagacctgattgtgggcgccccctacttctttgagcggcaggaggagctgggcggcgctgtgtatgtgtacctgaaccagggcggccactgggccggcatcagccccctgcggctgtgtggcagcccagacagcatgtttggcatcagcctggccgtgctgggggacctgaaccaggacggcttcccagacattgctgtgggcgccccctttgatggagatggcaaggtgttcatctaccacggcagcagcctgggcgtggtggccaagcccagccaggtgctggagggggaggccgtgggcatcaagagctttggctacagcctgagcggcagcctggacatggatggcaaccagtacccagacctgctggtgggcagcctggccgacacagctgtgctcttccgggcccggcccatcctgcacgtgtcccatgaggtgtccatcgcccccaggagcattgacctggagcagcccaactgtgccggcggccacagcgtgtgtgtggacctgcgggtgtgcttctcctacatcgctgtgcccagcagctacagccccaccgtggccctggactatgtgctggatgctgacacagaccggcggctgcggggccaggtgccccgggtgaccttcctgagcaggaacctggaggagcccaagcaccaggccagcggcaccgtgtggctgaagcaccagcacgacagagtgtgtggagatgccatgttccagctgcaggagaatgtgaaggacaagctgcgggccatcgtggtgaccctgagctacagcctgcagaccccccggctgcggcggcaggcccctggccagggcctgccccctgtggcccccatcctgaatgcccaccagcccagcacccagagagctgagatccacttcctgaagcagggctgtggggaggacaagatctgccagagcaacctgcagctggtgcgggcccgcttctgcaccagggtgtctgacacagagttccagcccctgcccatggatgtggatggcaccacagccctgtttgccctgagcggccagcctgtgattggcctggagctgatggtgaccaacctgcccagcgaccctgcccagccccaggctgatggagatgatgcccacgaggcccagctgctggtgatgctgcctgacagcctgcactacagcggcgtgcgggccctggaccctgctgagaagcccctgtgcctgagcaatgaaaatgccagccacgtggagtgtgagctgggcaaccccatgaagagaggagcccaggtgaccttctacctgatcctgagcaccagcggcatcagcattgagaccacagagctggaggtggagctgctgctggccaccatcagcgagcaggagctgcaccctgtgtctgcccgggcccgggtcttcatcgagctgcccctgagcattgctggcatggccatcccccagcagctgttcttctctggagtggtgcggggggagcgggccatgcagagcgagagagatgtgggcagcaaggtgaagtatgaggtgacagtgagcaaccagggccagagcctgcggaccctgggcagcgccttcctgaacatcatgtggccccatgaaattgccaacgggaagtggctgctgtaccccatgcaggtggagctggagggcggccagggccctggccagaagggcctgtgcagcccccggcccaacatcctgcacctggatgtggacagccgggacagaagaagaagagagctggagcccccagagcagcaggagcccggggagcggcaggagcccagcatgtcctggtggcctgtgtcctctgctgagaagaagaagaacatcaccctggactgtgcccggggcacagccaactgtgtggtgttcagctgccccctgtacagctttgacagagctgctgtgctgcacgtgtggggccgcctgtggaacagcaccttcctggaggagtacagcgctgtgaagagcctggaggtgattgtgcgggccaacatcaccgtgaagagcagcatcaagaacctgatgctgagagatgccagcaccgtcatccctgtgatggtgtacctggaccccatggctgtggtggccgagggcgtgccctggtgggtgatcctgctggccgtgctggccggcctgctggtgctggccctgctggtgctgctgctgtggaagtgtggcttcttccacaggagcagccagagcagcagcttccccaccaactaccaccgggcctgcctggccgtgcagcccagcgccatggaggtgggcggccctggcaccgtgggctgggacagcagcaatggccgcagcacccccaggcctccctgccccagcaccatgaggtag

SEQ ID NO: 20077 - DNA, 3369 bp, synthetic construct
  misc_feature 1..3369: note = Description of Artificial Sequence: Synthetic coding sequence
  source 1..3369: mol_type = other DNA
atggccggggcccggagccgggacccctggggcgccagcggcatctgctacctgtttggcagcctgctggtggagctgctcttcagcagagctgtggccttcaacctggatgtgatgggcgccctgaggaaggagggggagcccggcagcctgtttggcttctctgtggccctgcaccggcagctgcagccccggccccagagctggctgctggtgggcgccccccaggccctggccctgcccggccagcaggccaacagaactggaggcctgtttgcctgccccctgagcctggaggagacagactgctacagagtggacatcgaccagggcgctgacatgcagaaggagagcaaggagaaccagtggctgggcgtgtctgtgcgcagccagggccctgggggcaagatcgtgacctgtgcccacagatatgaggcccggcagagggtggaccagatcctggagacccgggacatgattggccgctgctttgtgctgagccaggacctggccatcagagatgagctggatggaggagagtggaagttctgtgagggccggccccagggccacgagcagtttggcttctgccagcagggcacagctgctgccttctccccagacagccactacctgctgtttggagcccctggcacctacaactggaagggcacagcccgggtggagctgtgtgcccagggcagcgctgacctggcccacctggatgatggcccctatgaggccggcggggagaaggagcaggaccccaggctcatccctgtgcctgccaacagctacttcggcttcagcattgattctgggaagggcctggtgcgggcagaggagctgagctttgtggccggggccccccgggccaaccacaagggagctgtggtgatcctgaggaaggacagcgccagccggctggtgcctgaggtgatgctgagcggggagcggctgaccagcggcttcggctacagcctggccgtggccgacctgaacagtgatggctggccagacctgattgtgggcgccccctacttctttgagcggcaggaggagctgggcggcgctgtgtatgtgtacctgaaccagggcggccactgggccggcatcagccccctgcggctgtgtggcagcccagacagcatgtttggcatcagcctggccgtgctgggggacctgaaccaggacggcttcccagacattgctgtgggcgccccctttgatggagatggcaaggtgttcatctaccacggcagcagcctgggcgtggtggccaagcccagccaggtgctggagggggaggccgtgggcatcaagagctttggctacagcctgagcggcagcctggacatggatggcaaccagtacccagacctgctggtgggcagcctggccgacacagctgtgctcttccgggcccggcccatcctgcacgtgtcccatgaggtgtccatcgcccccaggagcattgacctggagcagcccaactgtgccggcggccacagcgtgtgtgtggacctgcgggtgtgcttctcctacatcgctgtgcccagcagctacagccccaccgtggccctggactatgtgctggatgctgacacagaccggcggctgcggggccaggtgccccgggtgaccttcctgagcaggaacctggaggagcccaagcaccaggccagcggcaccgtgtggctgaagcaccagcacgacagagtgtgtggagatgccatgttccagctgcaggagaatgtgaaggacaagctgcgggccatcgtggtgaccctgagctacagcctgcagaccccccggctgcggcggcaggcccctggccagggcctgccccctgtggcccccatcctgaatgcccaccagcccagcacccagagagctgagatccacttcctgaagcagggctgtggggaggacaagatctgccagagcaacctgcagctggtgcgggcccgcttctgcaccagggtgtctgacacagagttccagcccctgcccatggatgtggatggcaccacagccctgtttgccctgagcggccagcctgtgattggcctggagctgatggtgaccaacctgcccagcgaccctgcccagccccaggctgatggagatgatgcccacgaggcccagctgctggtgatgctgcctgacagcctgcactacagcggcgtgcgggccctggaccctgctgagaagcccctgtgcctgagcaatgaaaatgccagccacgtggagtgtgagctgggcaaccccatgaagagaggagcccaggtgaccttctacctgatcctgagcaccagcggcatcagcattgagaccacagagctggaggtggagctgctgctggccaccatcagcgagcaggagctgcaccctgtgtctgcccgggcccgggtcttcatcgagctgcccctgagcattgctggcatggccatcccccagcagctgttcttctctggagtggtgcggggggagcgggccatgcagagcgagagagatgtgggcagcaaggtgaagtatgaggtgacagtgagcaaccagggccagagcctgcggaccctgggcagcgccttcctgaacatcatgtggccccatgaaattgccaacgggaagtggctgctgtaccccatgcaggtggagctggagggcggccagggccctggccagaagggcctgtgcagcccccggcccaacatcctgcacctggatgtggacagccgggacagaagaagaagagagctggagcccccagagcagcaggagcccggggagcggcaggagcccagcatgtcctggtggcctgtgtcctctgctgagaagaagaagaacatcaccctggactgtgcccggggcacagccaactgtgtggtgttcagctgccccctgtacagctttgacagagctgctgtgctgcacgtgtggggccgcctgtggaacagcaccttcctggaggagtacagcgctgtgaagagcctggaggtgattgtgcgggccaacatcaccgtgaagagcagcatcaagaacctgatgctgagagatgccagcaccgtcatccctgtgatggtgtacctggaccccatggctgtggtggccgagggcgtgccctggtgggtgatcctgctggccgtgctggccggcctgctggtgctggccctgctggtgctgctgctgtggaagtgtggcttcttccacaggagcagccagagcagcagcttccccaccaactaccaccgggcctgcctggccgtgcagcccagcgccatggaggtgggcggccctggcaccgtgggctgggacagcagcaatggccgcagcacccccaggcctccctgccccagcaccatgaggtag

SEQ ID NO: 20078 - DNA, 3135 bp, synthetic construct
  misc_feature 1..3135: note = Description of Artificial Sequence: Synthetic coding sequence
  source 1..3135: mol_type = other DNA
atggccccctttgccacccccatggtgcaggccctgaccaccacccgcatccagaggcaggccgagggcttccagtgctggagagaatgtggcaccaggaggagcccctttgagggcaaggagacctgtgcccacagatatgaggcccggcagagggtggaccagatcctggagacccgggacatgattggccgctgctttgtgctgagccaggacctggccatcagagatgagctggatggaggagagtggaagttctgtgagggccggccccagggccacgagcagtttggcttctgccagcagggcacagctgctgccttctccccagacagccactacctgctgtttggagcccctggcacctacaactggaagggcacagcccgggtggagctgtgtgcccagggcagcgctgacctggcccacctggatgatggcccctatgaagctggaggagagaaggagcaggaccccaggctcatccctgtgcctgccaacagctacttcggcttcagcattgacagcggcaagggcctggtgcgggcagaggagctgagctttgtggccggggccccccgggccaaccacaagggagctgtggtgatcctgaggaaggacagcgccagccggctggtgcctgaggtgatgctgtctggagagcggctgaccagcggcttcggctacagcctggccgtggccgacctgaacagtgatggctggccagacctgattgtgggcgccccctacttctttgagcggcaggaggagctgggcggcgctgtgtatgtgtacctgaaccagggcggccactgggccggcatcagccccctgcggctgtgtggcagcccagacagcatgtttggcatcagcctggccgtgctgggggacctgaaccaggacggcttcccagacattgctgtgggcgccccctttgatggagatggcaaggtgttcatctaccacggcagcagcctgggcgtggtggccaagcccagccaggtgctggagggggaggccgtgggcatcaagagctttggctacagcctgagcggcagcctggacatggatggcaaccagtacccagacctgctggtgggcagcctggccgacacagctgtgctcttccgggcccggcccatcctgcacgtgtcccatgaggtgtccatcgcccccaggagcattgacctggagcagcccaactgtgccggcggccacagcgtgtgtgtggacctgcgggtgtgcttctcctacatcgctgtgcccagcagctacagccccaccgtggccctggactatgtgctggatgctgacacagaccggcggctgcggggccaggtgccccgggtgaccttcctgagcaggaacctggaggagcccaagcaccaggccagcggcaccgtgtggctgaagcaccagcacgacagagtgtgtggagatgccatgttccagctgcaggagaatgtgaaggacaagctgcgggccatcgtggtgaccctgagctacagcctgcagaccccccggctgcggcggcaggcccctggccagggcctgccccctgtggcccccatcctgaatgcccaccagcccagcacccagagagctgagatccacttcctgaagcagggctgtggggaggacaagatctgccagagcaacctgcagctggtgcgggcccgcttctgcaccagggtgtctgacacagagttccagcccctgcccatggatgtggatggcaccacagccctgtttgccctgagcggccagcccgtcatcggcctggagctgatggtgaccaacctgcccagcgaccctgcccagccccaggctgatggagatgatgcccacgaggcccagctgctggtgatgctgcctgacagcctgcactacagcggcgtgcgggccctggaccctgctgagaagcccctgtgcctgagcaatgaaaatgccagccacgtggagtgtgagctgggcaaccccatgaagagaggagcccaggtgaccttctacctgatcctgagcaccagcggcatcagcattgagaccacagagctggaggtggagctgctgctggccaccatcagcgagcaggagctgcaccctgtgtctgcccgggcccgggtcttcatcgagctgcccctgagcattgctggcatggccatcccccagcagctgttcttcagcggcgtggtgcggggggagcgggccatgcagagcgagagagatgtgggcagcaaggtgaagtatgaggtgacagtgagcaaccagggccagagcctgcggaccctgggcagcgccttcctgaacatcatgtggccccatgagatcgccaacgggaagtggctgctgtaccccatgcaggtggagctggagggcggccagggccctggccagaagggcctgtgcagcccccggcccaacatcctgcacctggatgtggacagccgggacagaagaagaagagagctggagcccccagagcagcaggagcctggagagcggcaggagcccagcatgtcctggtggcctgtgagcagcgctgagaagaagaagaacatcaccctggactgtgcccggggcacagccaactgtgtggtgttcagctgccccctgtacagctttgacagagctgctgtgctgcacgtgtggggccgcctgtggaacagcaccttcctggaggagtacagcgctgtgaagagcctggaggtgattgtgcgggccaacatcaccgtgaagagcagcatcaagaacctgatgctgagagatgccagcaccgtcatccctgtgatggtgtacctggaccccatggctgtggtggccgagggcgtgccctggtgggtgatcctgctggccgtgctggccggcctgctggtgctggccctgctggtgctgctgctgtggaagatgggcttcttcaagagggccaagcaccctgaggccaccgtgccccagtaccacgctgtgaagatccccagagaagatcggcagcagttcaaggaggagaagacaggcaccatcctgaggaacaactggggcagcccccggcgggagggcccagatgcccaccccatcctggccgcagatggccaccctgagctgggcccagatggccaccctggccctggaacagcctag

SEQ ID NO: 20079 - DNA, 3426 bp, synthetic construct
  misc_feature 1..3426: note = Description of Artificial Sequence: Synthetic coding sequence
  source 1..3426: mol_type = other DNA
atggccggggcccggagccgggacccctggggcgccagcggcatctgctacctgtttggcagcctgctggtggagctgctcttcagcagagctgtggccttcaacctggatgtgatgggcgccctgaggaaggagggggagcccggcagcctgtttggcttctctgtggccctgcaccggcagctgcagccccggccccagagctggctgctggtgggcgccccccaggccctggccctgcccggccagcaggccaacagaactggaggcctgtttgcctgccccctgagcctggaggagacagactgctacagagtggacatcgaccagggcgctgacatgcagaaggagagcaaggagaaccagtggctgggcgtgtctgtgcgcagccagggccctgggggcaagatcgtgacctgtgcccacagatatgaggcccggcagagggtggaccagatcctggagacccgggacatgattggccgctgctttgtgctgagccaggacctggccatcagagatgagctggatggaggagagtggaagttctgtgagggccggccccagggccacgagcagtttggcttctgccagcagggcacagctgctgccttctccccagacagccactacctgctgtttggagcccctggcacctacaactggaagggcacagcccgggtggagctgtgtgcccagggcagcgctgacctggcccacctggatgatggcccctatgaggccggcggggagaaggagcaggaccccaggctcatccctgtgcctgccaacagctacttcggcttcagcattgattctgggaagggcctggtgcgggcagaggagctgagctttgtggccggggccccccgggccaaccacaagggagctgtggtgatcctgaggaaggacagcgccagccggctggtgcctgaggtgatgctgagcggggagcggctgaccagcggcttcggctacagcctggccgtggccgacctgaacagtgatggctggccagacctgattgtgggcgccccctacttctttgagcggcaggaggagctgggcggcgctgtgtatgtgtacctgaaccagggcggccactgggccggcatcagccccctgcggctgtgtggcagcccagacagcatgtttggcatcagcctggccgtgctgggggacctgaaccaggacggcttcccagacattgctgtgggcgccccctttgatggagatggcaaggtgttcatctaccacggcagcagcctgggcgtggtggccaagcccagccaggtgctggagggggaggccgtgggcatcaagagctttggctacagcctgagcggcagcctggacatggatggcaaccagtacccagacctgctggtgggcagcctggccgacacagctgtgctcttccgggcccggcccatcctgcacgtgtcccatgaggtgtccatcgcccccaggagcattgacctggagcagcccaactgtgccggcggccacagcgtgtgtgtggacctgcgggtgtgcttctcctacatcgctgtgcccagcagctacagccccaccgtggccctggactatgtgctggatgctgacacagaccggcggctgcggggccaggtgccccgggtgaccttcctgagcaggaacctggaggagcccaagcaccaggccagcggcaccgtgtggctgaagcaccagcacgacagagtgtgtggagatgccatgttccagctgcaggagaatgtgaaggacaagctgcgggccatcgtggtgaccctgagctacagcctgcagaccccccggctgcggcggcaggcccctggccagggcctgccccctgtggcccccatcctgaatgcccaccagcccagcacccagagagctgagatccacttcctgaagcagggctgtggggaggacaagatctgccagagcaacctgcagctggtgcgggcccgcttctgcaccagggtgtctgacacagagttccagcccctgcccatggatgtggatggcaccacagccctgtttgccctgagcggccagcctgtgattggcctggagctgatggtgaccaacctgcccagcgaccctgcccagccccaggctgatggagatgatgcccacgaggcccagctgctggtgatgctgcctgacagcctgcactacagcggcgtgcgggccctggaccctgctgagaagcccctgtgcctgagcaatgaaaatgccagccacgtggagtgtgagctgggcaaccccatgaagagaggagcccaggtgaccttctacctgatcctgagcaccagcggcatcagcattgagaccacagagctggaggtggagctgctgctggccaccatcagcgagcaggagctgcaccctgtgtctgcccgggcccgggtcttcatcgagctgcccctgagcattgctggcatggccatcccccagcagctgttcttctctggagtggtgcggggggagcgggccatgcagagcgagagagatgtgggcagcaaggtgaagtatgaggtgacagtgagcaaccagggccagagcctgcggaccctgggcagcgccttcctgaacatcatgtggccccatgaaattgccaacgggaagtggctgctgtaccccatgcaggtggagctggagggcggccagggccctggccagaagggcctgtgcagcccccggcccaacatcctgcacctggatgtggacagccgggacagaagaagaagagagctggagcccccagagcagcaggagcccggggagcggcaggagcccagcatgtcctggtggcctgtgtcctctgctgagaagaagaagaacatcaccctggactgtgcccggggcacagccaactgtgtggtgttcagctgccccctgtacagctttgacagagctgctgtgctgcacgtgtggggccgcctgtggaacagcaccttcctggaggagtacagcgctgtgaagagcctggaggtgattgtgcgggccaacatcaccgtgaagagcagcatcaagaacctgatgctgagagatgccagcaccgtcatccctgtgatggtgtacctggaccccatggctgtggtggccgagggcgtgccctggtgggtgatcctgctggccgtgctggccggcctgctggtgctggccctgctggtgctgctgctgtggaagatgggcttcttcaagagggccaagcaccctgaggccaccgtgccccagtaccacgctgtgaagatcccccgggaggaccggcagcagttcaaggaggagaagacaggcaccatcctgaggaacaactggggcagcccccggcgggagggcccagatgcccaccccatcctggccgcagatggccaccctgagctgggcccagatggccaccctggccctggaacagcctag

SEQ ID NO: 20080 - DNA, 3546 bp, synthetic construct
  misc_feature 1..3546: note = Description of Artificial Sequence: Synthetic coding sequence
  source 1..3546: mol_type = other DNA
atggccggggcccggagccgggacccctggggcgccagcggcatctgctacctgtttggcagcctgctggtggagctgctcttcagcagagctgtggccttcaacctggatgtgatgggcgccctgaggaaggagggggagcccggcagcctgtttggcttctctgtggccctgcaccggcagctgcagccccggccccagagctggctgctggtgggcgccccccaggccctggccctgcccggccagcaggccaacagaactggaggcctgtttgcctgccccctgagcctggaggagacagactgctacagagtggacatcgaccagggcgctgacatgcagaaggagagcaaggagaaccagtggctgggcgtgtctgtgcgcagccagggccctgggggcaagatcgtgacctgtgcccacagatatgaggcccggcagagggtggaccagatcctggagacccgggacatgattggccgctgctttgtgctgagccaggacctggccatcagagatgagctggatggaggagagtggaagttctgtgagggccggccccagggccacgagcagtttggcttctgccagcagggcacagctgctgccttctccccagacagccactacctgctgtttggagcccctggcacctacaactggaagggcacagcccgggtggagctgtgtgcccagggcagcgctgacctggcccacctggatgatggcccctatgaggccggcggggagaaggagcaggaccccaggctcatccctgtgcctgccaacagctacttcggcctgctgtttgtgaccaacatcgacagcagtgaccctgaccagctggtgtacaagaccctggaccctgctgaccggctgcccggccctgctggggacctggccctgaacagctacctgggcttcagcattgattctgggaagggcctggtgcgggcagaggagctgagctttgtggccggggccccccgggccaaccacaagggagctgtggtgatcctgaggaaggacagcgccagccggctggtgcctgaggtgatgctgagcggggagcggctgaccagcggcttcggctacagcctggccgtggccgacctgaacagtgatggctggccagacctgattgtgggcgccccctacttctttgagcggcaggaggagctgggcggcgctgtgtatgtgtacctgaaccagggcggccactgggccggcatcagccccctgcggctgtgtggcagcccagacagcatgtttggcatcagcctggccgtgctgggggacctgaaccaggacggcttcccagacattgctgtgggcgccccctttgatggagatggcaaggtgttcatctaccacggcagcagcctgggcgtggtggccaagcccagccaggtgctggagggggaggccgtgggcatcaagagctttggctacagcctgagcggcagcctggacatggatggcaaccagtacccagacctgctggtgggcagcctggccgacacagctgtgctcttccgggcccggcccatcctgcacgtgtcccatgaggtgtccatcgcccccaggagcattgacctggagcagcccaactgtgccggcggccacagcgtgtgtgtggacctgcgggtgtgcttctcctacatcgctgtgcccagcagctacagccccaccgtggccctggactatgtgctggatgctgacacagaccggcggctgcggggccaggtgccccgggtgaccttcctgagcaggaacctggaggagcccaagcaccaggccagcggcaccgtgtggctgaagcaccagcacgacagagtgtgtggagatgccatgttccagctgcaggagaatgtgaaggacaagctgcgggccatcgtggtgaccctgagctacagcctgcagaccccccggctgcggcggcaggcccctggccagggcctgccccctgtggcccccatcctgaatgcccaccagcccagcacccagagagctgagatccacttcctgaagcagggctgtggggaggacaagatctgccagagcaacctgcagctggtgcgggcccgcttctgcaccagggtgtctgacacagagttccagcccctgcccatggatgtggatggcaccacagccctgtttgccctgagcggccagcctgtgattggcctggagctgatggtgaccaacctgcccagcgaccctgcccagccccaggctgatggagatgatgcccacgaggcccagctgctggtgatgctgcctgacagcctgcactacagcggcgtgcgggccctggaccctgctgagaagcccctgtgcctgagcaatgaaaatgccagccacgtggagtgtgagctgggcaaccccatgaagagaggagcccaggtgaccttctacctgatcctgagcaccagcggcatcagcattgagaccacagagctggaggtggagctgctgctggccaccatcagcgagcaggagctgcaccctgtgtctgcccgggcccgggtcttcatcgagctgcccctgagcattgctggcatggccatcccccagcagctgttcttctctggagtggtgcggggggagcgggccatgcagagcgagagagatgtgggcagcaaggtgaagtatgaggtgacagtgagcaaccagggccagagcctgcggaccctgggcagcgccttcctgaacatcatgtggccccatgaaattgccaacgggaagtggctgctgtaccccatgcaggtggagctggagggcggccagggccctggccagaagggcctgtgcagcccccggcccaacatcctgcacctggatgtggacagccgggacagaagaagaagagagctggagcccccagagcagcaggagcccggggagcggcaggagcccagcatgtcctggtggcctgtgtcctctgctgagaagaagaagaacatcaccctggactgtgcccggggcacagccaactgtgtggtgttcagctgccccctgtacagctttgacagagctgctgtgctgcacgtgtggggccgcctgtggaacagcaccttcctggaggagtacagcgctgtgaagagcctggaggtgattgtgcgggccaacatcaccgtgaagagcagcatcaagaacctgatgctgagagatgccagcaccgtcatccctgtgatggtgtacctggaccccatggctgtggtggccgagggcgtgccctggtgggtgatcctgctggccgtgctggccggcctgctggtgctggccctgctggtgctgctgctgtggaagatgggcttcttcaagagggccaagcaccctgaggccaccgtgccccagtaccacgctgtgaagatcccccgggaggaccggcagcagttcaaggaggagaagacaggcaccatcctgaggaacaactggggcagcccccggcgggagggcccagatgcccaccccatcctggccgcagatggccaccctgagctgggcccagatggccaccctggccctggaacagcctag

SEQ ID NO: 20081 - DNA, 3147 bp, synthetic construct
  misc_feature 1..3147: note = Description of Artificial Sequence: Synthetic coding sequence
  source 1..3147: mol_type = other DNA
atggccttccccccccggcggcggctgcggctgggcccccggggcctgcccctgctgctgagcggcctgctgctgcccctgtgccgggccttcaacctggatgtggacagccctgctgagtacagcggccctgagggcagctactttggatttgctgtggacttctttgtgcccagcgccagcagcaggatgttcctgctggtgggcgcccccaaggccaacaccacccagcccggcatcgtggagggcggccaggtgctgaagtgtgactggagcagcacccggcgctgccagcccatcgagtttgatgccactggaaacagagattatgccaaggatgaccccctggagttcaagagccaccagtggtttggagcctctgtgcgcagcaagcaggacaagatcctggcctgtgcccccctgtaccactggaggacagagatgaagcaggagcgggagcctgtgggcacctgcttcctgcaggacggcaccaagacagtggagtatgccccctgccgcagccaggacattgatgctgatggccagggcttctgccagggcggcttcagcattgacttcaccaaggctgacagagtgctgctgggcggccctggcagcttctactggcagggccagctgatcagtgaccaggtggccgagatcgtgtccaaatatgaccccaacgtgtacagcatcaagtacaacaaccagctggccaccaggacagcccaggccatctttgatgacagctacctgggctacagcgtggccgtgggggacttcaatggagatggcattgatgactttgtgtctggagtgccccgggccgcccggaccctgggcatggtgtacatctatgatggcaagaacatgagcagcctgtacaacttcaccggggagcagatggccgcctacttcggcttctctgtggccgccacagacatcaatggagatgattatgcagatgtgttcatcggggcccccctcttcatggaccggggcagtgatggcaagctgcaggaggtgggccaggtgtctgtgtccctgcagagggccagcggggacttccagaccaccaagctgaatggatttgaggtgtttgcccgcttcggcagcgccatcgcccccctgggggacctggaccaggacggcttcaatgacatcgccatcgccgccccctatggaggagaggacaagaagggcatcgtgtacatcttcaacggccgcagcacaggcctgaatgctgtgcccagccagatcctggagggccagtgggccgcccgctccatgcctccttcctttggctacagcatgaagggggccacagacatcgacaagaatggctacccagacctgattgtgggcgcctttggagtggaccgggccatcctgtaccgggcccggcctgtgatcaccgtgaatgccggcctggaggtgtaccccagcatcctgaaccaggacaacaagacctgcagcctgcccggcacagccctgaaggtgtcctgcttcaacgtgcgcttctgcctgaaggcagatggcaagggcgtgctgcccaggaagctgaacttccaggtggagctgctgctggacaagctgaagcagaagggggccatcagaagagccctcttcctgtacagccgcagccccagccacagcaagaacatgaccatcagccggggcggcctgatgcagtgtgaggagctgattgcctacctgagagatgagagcgagttccgggacaagctgacccccatcaccatcttcatggagtaccgcctggactacagaacagctgctgacaccaccggcctgcagcccatcctgaaccagttcaccccagccaacatcagccggcaggcccacatcctgctggactgtggggaggacaacgtgtgcaagcccaagctggaggtgtctgtggacagcgaccagaagaagatctacatcggagatgacaaccccctgaccctcatcgtgaaggcccagaaccagggcgagggcgcctatgaagctgagctgattgtgtccatccccctgcaggccgacttcatcggcgtggtgaggaacaatgaggccctggcccggctgagctgtgccttcaagacagagaaccagacccggcaggtggtgtgtgacctgggcaaccccatgaaggccggcacccagctgctggccggcctgcgcttctctgtgcaccagcagagcgagatggacacctctgtgaagtttgacctgcagatccagagcagcaacctgtttgacaaggtgtcccctgtggtgagccacaaggtggacctggccgtgctggccgctgtggagatccggggcgtgagcagcccagaccacgtgttcctgcccatccccaactgggagcacaaggagaaccctgagacagaggaggatgtgggccctgtggtgcagcacatctatgagctgagaaataatggccccagcagcttcagcaaggccatgctgcacctgcagtggccctacaagtacaacaacaacaccctgctgtacatcctgcactatgacattgatggccccatgaactgcaccagtgacatggagatcaaccccctgcgcatcaagatcagcagcctgcagaccacagagaagaatgacacagtggccggccagggcgagcgggaccacctgatcaccaagagggacctggccctgtctgagggggacatccacaccctgggctgcggcgtggcccagtgcctgaagatcgtgtgccaggtgggccgcctggaccggggcaagagcgccatcctgtatgtgaagagcctgctgtggacagagaccttcatgaacaaggagaaccagaaccacagctacagcctgaagagcagcgccagcttcaacgtgattgagttcccctacaagaacctgcccatcgaggacatcaccaacagcaccctggtgaccaccaacgtgacctggggcatccagcctgcccccatgcctgtgcctgtgtgggtgatcatcctggccgtgctggccggcctgctgctgctggccgtgctggtgtttgtgatgtacaggatgggcttcttcaagagggtgcggcccccccaggaggagcaggagcgggagcagctgcagccccatgaaaatggagagggcaacagcgagacctag

SEQ ID NO: 20082 - DNA, 3039 bp, synthetic construct
  misc_feature 1..3039: note = Description of Artificial Sequence: Synthetic coding sequence
  source 1..3039: mol_type = other DNA
atggccttccccccccggcggcggctgcggctgggcccccggggcctgcccctgctgctgagcggcctgctgctgcccctgtgccgggccttcaacctggatgtggacagccctgctgagtacagcggccctgagggcagctactttggatttgctgtggacttctttgtgcccagcgccagcagcaggatgttcctgctggtgggcgcccccaaggccaacaccacccagcccggcatcgtggagggcggccaggtgctgaagtgtgactggagcagcacccggcgctgccagcccatcgagtttgatgccactggaaacagagattatgccaaggatgaccccctggagttcaagagccaccagtggtttggagcctctgtgcgcagcaagcaggacaagatcctggcctgtgcccccctgtaccactggaggacagagatgaagcaggagcgggagcctgtgggcacctgcttcctgcaggacggcaccaagacagtggagtatgccccctgccgcagccggcagctgatcagtgaccaggtggccgagatcgtgtccaaatatgaccccaacgtgtacagcatcaagtacaacaaccagctggccaccaggacagcccaggccatctttgatgacagctacctgggctacagcgtggccgtgggggacttcaatggagatggcattgatgactttgtgtctggagtgccccgggccgcccggaccctgggcatggtgtacatctatgatggcaagaacatgagcagcctgtacaacttcaccggggagcagatggccgcctacttcggcttctctgtggccgccacagacatcaatggagatgattatgcagatgtgttcatcggggcccccctcttcatggaccggggcagtgatggcaagctgcaggaggtgggccaggtgtctgtgtccctgcagagggccagcggggacttccagaccaccaagctgaatggatttgaggtgtttgcccgcttcggcagcgccatcgcccccctgggggacctggaccaggacggcttcaatgacatcgccatcgccgccccctatggaggagaggacaagaagggcatcgtgtacatcttcaacggccgcagcacaggcctgaatgctgtgcccagccagatcctggagggccagtgggccgcccgctccatgcctccttcctttggctacagcatgaagggggccacagacatcgacaagaatggctacccagacctgattgtgggcgcctttggagtggaccgggccatcctgtaccgggcccggcctgtgatcaccgtgaatgccggcctggaggtgtaccccagcatcctgaaccaggacaacaagacctgcagcctgcccggcacagccctgaaggtgtcctgcttcaacgtgcgcttctgcctgaaggcagatggcaagggcgtgctgcccaggaagctgaacttccaggtggagctgctgctggacaagctgaagcagaagggggccatcagaagagccctcttcctgtacagccgcagccccagccacagcaagaacatgaccatcagccggggcggcctgatgcagtgtgaggagctgattgcctacctgagagatgagagcgagttccgggacaagctgacccccatcaccatcttcatggagtaccgcctggactacagaacagctgctgacaccaccggcctgcagcccatcctgaaccagttcaccccagccaacatcagccggcaggcccacatcctgctggactgtggggaggacaacgtgtgcaagcccaagctggaggtgtctgtggacagcgaccagaagaagatctacatcggagatgacaaccccctgaccctcatcgtgaaggcccagaaccagggcgagggcgcctatgaagctgagctgattgtgtccatccccctgcaggccgacttcatcggcgtggtgaggaacaatgaggccctggcccggctgagctgtgccttcaagacagagaaccagacccggcaggtggtgtgtgacctgggcaaccccatgaaggccggcacccagctgctggccggcctgcgcttctctgtgcaccagcagagcgagatggacacctctgtgaagtttgacctgcagatccagagcagcaacctgtttgacaaggtgtcccctgtggtgagccacaaggtggacctggccgtgctggccgctgtggagatccggggcgtgagcagcccagaccacgtgttcctgcccatccccaactgggagcacaaggagaaccctgagacagaggaggatgtgggccctgtggtgcagcacatctatgagctgagaaataatggccccagcagcttcagcaaggccatgctgcacctgcagtggccctacaagtacaacaacaacaccctgctgtacatcctgcactatgacattgatggccccatgaactgcaccagtgacatggagatcaaccccctgcgcatcaagatcagcagcctgcagaccacagagaagaatgacacagtggccggccagggcgagcgggaccacctgatcaccaagagggacctggccctgtctgagggggacatccacaccctgggctgcggcgtggcccagtgcctgaagatcgtgtgccaggtgggccgcctggaccggggcaagagcgccatcctgtatgtgaagagcctgctgtggacagagaccttcatgaacaaggagaaccagaaccacagctacagcctgaagagcagcgccagcttcaacgtgattgagttcccctacaagaacctgcccatcgaggacatcaccaacagcaccctggtgaccaccaacgtgacctggggcatccagcctgcccccatgcctgtgcctgtgtgggtgatcatcctggccgtgctggccggcctgctgctgctggccgtgctggtgtttgtgatgtacaggatgggcttcttcaagagggtgcggcccccccaggaggagcaggagcgggagcagctgcagccccatgaaaatggagagggcaacagcgagacctag

SEQ ID NO: 20083 - DNA, 3009 bp, synthetic construct
  misc_feature 1..3009: note = Description of Artificial Sequence: Synthetic coding sequence
  source 1..3009: mol_type = other DNA
atgctgctgggcaccctgctgctgatcctgtacatcctgatgctgtgcaggatgttcctgctggtgggcgcccccaaggccaacaccacccagcccggcatcgtggagggcggccaggtgctgaagtgtgactggagcagcacccggcgctgccagcccatcgagtttgatgccactggaaacagagattatgccaaggatgaccccctggagttcaagagccaccagtggtttggagcctctgtgcgcagcaagcaggacaagatcctggcctgtgcccccctgtaccactggaggacagagatgaagcaggagcgggagcctgtgggcacctgcttcctgcaggacggcaccaagacagtggagtatgccccctgccgcagccaggacattgatgctgatggccagggcttctgccagggcggcttcagcattgacttcaccaaggctgacagagtgctgctgggcggccctggcagcttctactggcagggccagctgatcagtgaccaggtggccgagatcgtgtccaaatatgaccccaacgtgtacagcatcaagtacaacaaccagctggccaccaggacagcccaggccatctttgatgacagctacctgggctacagcgtggccgtgggggacttcaatggagatggcattgatgactttgtgtctggagtgccccgggccgcccggaccctgggcatggtgtacatctatgatggcaagaacatgagcagcctgtacaacttcaccggggagcagatggccgcctacttcggcttctctgtggccgccacagacatcaatggagatgattatgcagatgtgttcatcggggcccccctcttcatggaccggggcagtgatggcaagctgcaggaggtgggccaggtgtctgtgtccctgcagagggccagcggggacttccagaccaccaagctgaatggatttgaggtgtttgcccgcttcggcagcgccatcgcccccctgggggacctggaccaggacggcttcaatgacatcgccatcgccgccccctatggaggagaggacaagaagggcatcgtgtacatcttcaacggccgcagcacaggcctgaatgctgtgcccagccagatcctggagggccagtgggccgcccgctccatgcctccttcctttggctacagcatgaagggggccacagacatcgacaagaatggctacccagacctgattgtgggcgcctttggagtggaccgggccatcctgtaccgggcccggcctgtgatcaccgtgaatgccggcctggaggtgtaccccagcatcctgaaccaggacaacaagacctgcagcctgcccggcacagccctgaaggtgtcctgcttcaacgtgcgcttctgcctgaaggcagatggcaagggcgtgctgcccaggaagctgaacttccaggtggagctgctgctggacaagctgaagcagaagggggccatcagaagagccctcttcctgtacagccgcagccccagccacagcaagaacatgaccatcagccggggcggcctgatgcagtgtgaggagctgattgcctacctgagagatgagagcgagttccgggacaagctgacccccatcaccatcttcatggagtaccgcctggactacagaacagctgctgacaccaccggcctgcagcccatcctgaaccagttcaccccagccaacatcagccggcaggcccacatcctgctggactgtggggaggacaacgtgtgcaagcccaagctggaggtgtctgtggacagcgaccagaagaagatctacatcggagatgacaaccccctgaccctcatcgtgaaggcccagaaccagggcgagggcgcctatgaagctgagctgattgtgtccatccccctgcaggccgacttcatcggcgtggtgaggaacaatgaggccctggcccggctgagctgtgccttcaagacagagaaccagacccggcaggtggtgtgtgacctgggcaaccccatgaaggccggcacccagctgctggccggcctgcgcttctctgtgcaccagcagagcgagatggacacctctgtgaagtttgacctgcagatccagagcagcaacctgtttgacaaggtgtcccctgtggtgagccacaaggtggacctggccgtgctggccgctgtggagatccggggcgtgagcagcccagaccacgtgttcctgcccatccccaactgggagcacaaggagaaccctgagacagaggaggatgtgggccctgtggtgcagcacatctatgagctgagaaataatggccccagcagcttcagcaaggccatgctgcacctgcagtggccctacaagtacaacaacaacaccctgctgtacatcctgcactatgacattgatggccccatgaactgcaccagtgacatggagatcaaccccctgcgcatcaagatcagcagcctgcagaccacagagaagaatgacacagtggccggccagggcgagcgggaccacctgatcaccaagagggacctggccctgtctgagggggacatccacaccctgggctgcggcgtggcccagtgcctgaagatcgtgtgccaggtgggccgcctggaccggggcaagagcgccatcctgtatgtgaagagcctgctgtggacagagaccttcatgaacaaggagaaccagaaccacagctacagcctgaagagcagcgccagcttcaacgtgattgagttcccctacaagaacctgcccatcgaggacatcaccaacagcaccctggtgaccaccaacgtgacctggggcatccagcctgcccccatgcctgtgcctgtgtgggtgatcatcctggccgtgctggccggcctgctgctgctggccgtgctggtgtttgtgatgtacaggatgggcttcttcaagagggtgcggcccccccaggaggagcaggagcgggagcagctgcagccccatgaaaatggagagggcaacagcgagacctag

SEQ ID NO: 20084 - DNA, 1449 bp, synthetic construct
  misc_feature 1..1449: note = Description of Artificial Sequence: Synthetic coding sequence
  source 1..1449: mol_type = other DNA
atggccttccccccccggcggcggctgcggctgggcccccggggcctgcccctgctgctgagcggcctgctgctgcccctgtgccgggccttcaacctggatgtggacagccctgctgagtacagcggccctgagggcagctactttggatttgctgtggacttctttgtgcccagcgccagcagcaggatgttcctgctggtgggcgcccccaaggccaacaccacccagcccggcatcgtggagggcggccaggtgctgaagtgtgactggagcagcacccggcgctgccagcccatcgagtttgatgccactggaaacagagattatgccaaggatgaccccctggagttcaagagccaccagtggtttggagcctctgtgcgcagcaagcaggacaagatcctggcctgtgcccccctgtaccactggaggacagagatgaagcaggagcgggagcctgtgggcacctgcttcctgcaggacggcaccaagacagtggagtatgccccctgccgcagccaggacattgatgctgatggccagggcttctgccagggcggcttcagcattgacttcaccaaggctgacagagtgctgctgggcggccctggcagcttctactggcagggccagctgatcagtgaccaggtggccgagatcgtgtccaaatatgaccccaacgtgtacagcatcaagtacaacaaccagctggccaccaggacagcccaggccatctttgatgacagctacctgggctacagcgtggccgtgggggacttcaatggagatggcattgatgactttgtgtctggagtgccccgggccgcccggaccctgggcatggtgtacatctatgatggcaagaacatgagcagcctgtacaacttcaccggggagcagatggccgcctacttcggcttctctgtggccgccacagacatcaatggagatgattatgcagatgtgttcatcggggcccccctcttcatggaccggggcagtgatggcaagctgcaggaggtgggccaggtgtctgtgtccctgcagagggccagcggggacttccagaccaccaagctgaatggatttgaggtgtttgcccgcttcggcagcgccatcgcccccctgggggacctggaccaggacggcttcaatgacatcgccatcgccgccccctatggaggagaggacaagaagggcatcgtgtacatcttcaacggccgcagcacaggcctgaatgctgtgcccagccagatcctggagggccagtgggccgcccgctccatgcctccttcctttggctacagcatgaagggggccacagacatcgacaagaatggctacccagacctgattgtgggcgcctttggagtggaccgggccatcctgtaccgggcccggcctgtgatccccatctttgtgcagctgcaccacgtggtgcactag

SEQ ID NO: 20085 - DNA, 2397 bp, synthetic construct
  misc_feature 1..2397: note = Description of Artificial Sequence: Synthetic coding sequence
  source 1..2397: mol_type = other DNA
atgaacctgcagcccatcttctggattggcctcatcagctctgtgtgctgcgtgtttgcccagacagatgagaaccgctgcctgaaggccaatgccaagagctgtggggagtgcatccaggccggccccaactgtggctggtgcaccaacagcaccttcctgcaggagggcatgcccaccagcgcccgctgtgatgacctggaggccctgaagaagaagggctgccccccagatgacatcgagaacccccggggcagcaaggacatcaagaagaacaagaatgtgaccaacagaagcaagggcacagctgagaagctgaagccagaggacatcacccagatccagccccagcagctggtgctgcggctgcggtctggagagccccagaccttcaccctgaagttcaagagagctgaggactaccccatcgacctgtactacctgatggacctgagctacagcatgaaggatgacctggagaatgtgaagagcctgggcacagacctgatgaatgagatgaggcgcatcaccagtgacttccgcatcggcttcggcagctttgtggagaagacagtgatgccctacatcagcaccaccccagccaagctgaggaacccctgcaccagcgagcagaactgcaccagccccttctcctacaagaatgtgctgagcctgaccaacaagggggaggtgttcaatgagctggtgggcaagcagaggatcagcggcaacctggacagccctgagggcggctttgatgccatcatgcaggtggccgtgtgtggcagcctgattggctggagaaatgtgacccggctgctggtgttcagcacagatgctggcttccactttgctggagatggcaagctgggcggcatcgtgctgcccaatgatggccagtgccacctggagaacaacatgtacaccatgagccactactatgactaccccagcatcgcccacctggtgcagaagctgtctgagaacaacatccagaccatctttgctgtgacagaggagttccagcctgtgtacaaggagctgaagaacctgatccccaagtctgctgtgggcaccctgagcgccaacagcagcaatgtcatccagctgatcattgatgcctacaacagcctgagcagcgaggtgatcctggagaatggcaagctgtctgagggcgtgaccatctcctacaagagctactgcaagaatggagtgaatggcaccggggagaatggaaggaagtgcagcaacatcagcattggagatgaggtgcagtttgagatcagcatcaccagcaacaagtgccccaagaaggacagcgacagcttcaagatccggcccctgggcttcacagaggaggtggaggtgatcctgcagtacatctgtgaatgtgagtgccagagcgagggcatccctgagagccccaagtgccacgagggcaatggcacctttgaatgtggggcctgccgctgcaatgaaggccgggtgggccgccactgtgaatgttccacagatgaggtgaacagcgaggacatggatgcctactgcaggaaagaaaacagcagcgagatctgcagcaacaacggggagtgtgtgtgtggccagtgtgtgtgcaggaagagggacaacaccaatgagatctacagcggcaagttctgtgaatgtgacaacttcaactgtgacaggagcaatggcctcatctgtggcggcaatggagtgtgcaagtgccgggtgtgtgagtgcaaccccaactacacaggcagcgcctgtgactgcagcctggacaccagcacctgtgaggccagcaatggccagatctgcaatggccggggcatctgtgaatgtggggtgtgcaagtgcacagaccccaagttccagggccagacctgtgagatgtgccagacctgcctgggcgtgtgtgccgagcacaaggaatgtgtgcagtgccgggccttcaacaagggggagaagaaggacacctgcacccaggagtgcagctacttcaacatcaccaaggtggagagccgggacaagctgccccagcctgtgcagcctgaccctgtgagccactgcaaggagaaggatgtggatgactgctggttctacttcacctacagcgtgaatggaaataatgaggtgatggtgcacgtggtggagaaccctgagtgccccactggaccagacatcatccccatcgtggccggcgtggtggccggcatcgtgctgattggcctggccctgctgctgatctggaagctgctgatgatcatccatgaccggcgggagtttgccaagtttgagaaggagaagatgaatgccaagtgggacacaggagagaaccccatctacaagtctgctgtgaccaccgtggtgaaccccaagtatgagggcaagtag

SEQ ID NO: 20086 - DNA, 2478 bp, synthetic construct
  misc_feature 1..2478: note = Description of Artificial Sequence: Synthetic coding sequence
  source 1..2478: mol_type = other DNA
atgaacctgcagcccatcttctggattggcctcatcagctctgtgtgctgcgtgtttgcccagacagatgagaaccgctgcctgaaggccaatgccaagagctgtggggagtgcatccaggccggccccaactgtggctggtgcaccaacagcaccttcctgcaggagggcatgcccaccagcgcccgctgtgatgacctggaggccctgaagaagaagggctgccccccagatgacatcgagaacccccggggcagcaaggacatcaagaagaacaagaatgtgaccaacagaagcaagggcacagctgagaagctgaagccagaggacatcacccagatccagccccagcagctggtgctgcggctgcggtctggagagccccagaccttcaccctgaagttcaagagagctgaggactaccccatcgacctgtactacctgatggacctgagctacagcatgaaggatgacctggagaatgtgaagagcctgggcacagacctgatgaatgagatgaggcgcatcaccagtgacttccgcatcggcttcggcagctttgtggagaagacagtgatgccctacatcagcaccaccccagccaagctgaggaacccctgcaccagcgagcagaactgcaccagccccttctcctacaagaatgtgctgagcctgaccaacaagggggaggtgttcaatgagctggtgggcaagcagaggatcagcggcaacctggacagccctgagggcggctttgatgccatcatgcaggtggccgtgtgtggcagcctgattggctggagaaatgtgacccggctgctggtgttcagcacagatgctggcttccactttgctggagatggcaagctgggcggcatcgtgctgcccaatgatggccagtgccacctggagaacaacatgtacaccatgagccactactatgactaccccagcatcgcccacctggtgcagaagctgtctgagaacaacatccagaccatctttgctgtgacagaggagttccagcctgtgtacaaggagctgaagaacctgatccccaagtctgctgtgggcaccctgagcgccaacagcagcaatgtcatccagctgatcattgatgcctacaacagcctgagcagcgaggtgatcctggagaatggcaagctgtctgagggcgtgaccatctcctacaagagctactgcaagaatggagtgaatggcaccggggagaatggaaggaagtgcagcaacatcagcattggagatgaggtgcagtttgagatcagcatcaccagcaacaagtgccccaagaaggacagcgacagcttcaagatccggcccctgggcttcacagaggaggtggaggtgatcctgcagtacatctgtgaatgtgagtgccagagcgagggcatccctgagagccccaagtgccacgagggcaatggcacctttgaatgtggggcctgccgctgcaatgaaggccgggtgggccgccactgtgaatgttccacagatgaggtgaacagcgaggacatggatgcctactgcaggaaagaaaacagcagcgagatctgcagcaacaacggggagtgtgtgtgtggccagtgtgtgtgcaggaagagggacaacaccaatgagatctacagcggcaagttctgtgaatgtgacaacttcaactgtgacaggagcaatggcctcatctgtggcggcaatggagtgtgcaagtgccgggtgtgtgagtgcaaccccaactacacaggcagcgcctgtgactgcagcctggacaccagcacctgtgaggccagcaatggccagatctgcaatggccggggcatctgtgaatgtggggtgtgcaagtgcacagaccccaagttccagggccagacctgtgagatgtgccagacctgcctgggcgtgtgtgccgagcacaaggaatgtgtgcagtgccgggccttcaacaagggggagaagaaggacacctgcacccaggagtgcagctacttcaacatcaccaaggtggagagccgggacaagctgccccagcctgtgcagcctgaccctgtgagccactgcaaggagaaggatgtggatgactgctggttctacttcacctacagcgtgaatggaaataatgaggtgatggtgcacgtggtggagaaccctgagtgccccactggaccagacatcatccccatcgtggccggcgtggtggccggcatcgtgctgattggcctggccctgctgctgatctggaagctgctgatgatcatccatgaccggcgggagtttgccaagtttgagaaggagaagatgaatgccaagtgggacaccagcctgtctgtggcccagcccggggtgcagtggtgtgacatcagcagcctgcagcccctgaccagccgcttccagcagttcagctgcctgagcctgcccagcacctgggactacagagtgaagatcctcttcatccgggtgccctag

SEQ ID NO: 20087 - DNA, 2397 bp, synthetic construct; identical to SEQ ID NO: 20085
  misc_feature 1..2397: note = Description of Artificial Sequence: Synthetic coding sequence
  source 1..2397: mol_type = other DNA

SEQ ID NO: 20088 - DNA, 150 bp, synthetic construct
  misc_feature 1..150: note = Description of Artificial Sequence: Synthetic coding sequence
  source 1..150: mol_type = other DNA
atgaacctgcagcccatcttctggattggcctcatcagctctgtgtgctgcgtgtttgcccagacagatgagaaccgctgcctgaaggccaatgccaagagctgtggggagtgcatccaggccggccccaactgtggctggtgcacctag

SEQ ID NO: 20089 - DNA, 270 bp, synthetic construct
  misc_feature 1..270: note = Description of Artificial Sequence: Synthetic coding sequence
  source 1..270: mol_type = other DNA
atgaacctgcagcccatcttctggattggcctcatcagctctgtgtgctgcgtgtttgcccagacagatgagaaccgctgcctgaaggccaatgccaagagctgtggggagtgcatccaggccggccccaactgtggctggtgcaccaacagcaccttcctgcaggagggcatgcccaccagcgcccgctgtgatgacctggaggccctgaagaagaagggctgccccccagatgacatcgagaacccccggggcagcaaggacatctag

SEQ ID NO: 20090 - DNA, 2406 bp, synthetic construct
  misc_feature 1..2406: note = Description of Artificial Sequence: Synthetic coding sequence
  source 1..2406: mol_type = other DNA
atgaacctgcagcccatcttctggattggcctcatcagctctgtgtgctgcgtgtttgcccagacagatgagaaccgctgcctgaaggccaatgccaagagctgtggggagtgcatccaggccggccccaactgtggctggtgcaccaacagcaccttcctgcaggagggcatgcccaccagcgcccgctgtgatgacctggaggccctgaagaagaagggctgccccccagatgacatcgagaacccccggggcagcaaggacatcaagaagaacaagaatgtgaccaacagaagcaagggcacagctgagaagctgaagccagaggacatcacccagatccagccccagcagctggtgctgcggctgcggtctggagagccccagaccttcaccctgaagttcaagagagctgaggactaccccatcgacctgtactacctgatggacctgagctacagcatgaaggatgacctggagaatgtgaagagcctgggcacagacctgatgaatgagatgaggcgcatcaccagtgacttccgcatcggcttcggcagctttgtggagaagacagtgatgccctacatcagcaccaccccagccaagctgaggaacccctgcaccagcgagcagaactgcaccagccccttctcctacaagaatgtgctgagcctgaccaacaagggggaggtgttcaatgagctggtgggcaagcagaggatcagcggcaacctggacagccctgagggcggctttgatgccatcatgcaggtggccgtgtgtggcagcctgattggctggagaaatgtgacccggctgctggtgttcagcacagatgctggcttccactttgctggagatggcaagctgggcggcatcgtgctgcccaatgatggccagtgccacctggagaacaacatgtacaccatgagccactactatgactaccccagcatcgcccacctggtgcagaagctgtctgagaacaacatccagaccatctttgctgtgacagaggagttccagcctgtgtacaaggagctgaagaacctgatccccaagtctgctgtgggcaccctgagcgccaacagcagcaatgtcatccagctgatcattgatgcctacaacagcctgagcagcgaggtgatcctggagaatggcaagctgtctgagggcgtgaccatctcctacaagagctactgcaagaatggagtgaatggcaccggggagaatggaaggaagtgcagcaacatcagcattggagatgaggtgcagtttgagatcagcatcaccagcaacaagtgccccaagaaggacagcgacagcttcaagatccggcccctgggcttcacagaggaggtggaggtgatcctgcagtacatctgtgaatgtgagtgccagagcgagggcatccctgagagccccaagtgccacgagggcaatggcacctttgaatgtggggcctgccgctgcaatgaaggccgggtgggccgccactgtgaatgttccacagatgaggtgaacagcgaggacatggatgcctactgcaggaaagaaaacagcagcgagatctgcagcaacaacggggagtgtgtgtgtggccagtgtgtgtgcaggaagagggacaacaccaatgagatctacagcggcaagttctgtgaatgtgacaacttcaactgtgacaggagcaatggcctcatctgtggcggcaatggagtgtgcaagtgccgggtgtgtgagtgcaaccccaactacacaggcagcgcctgtgactgcagcctggacaccagcacctgtgaggccagcaatggccagatctgcaatggccggggcatctgtgaatgtggggtgtgcaagtgcacagaccccaagttccagggccagacctgtgagatgtgccagacctgcctgggcgtgtgtgccgagcacaaggaatgtgtgcagtgccgggccttcaacaagggggagaagaaggacacctgcacccaggagtgcagctacttcaacatcaccaaggtggagagccgggacaagctgccccagcctgtgcagcctgaccctgtgagccactgcaaggagaaggatgtggatgactgctggttctacttcacctacagcgtgaatggaaataatgaggtgatggtgcacgtggtggagaaccctgagtgccccactggaccagacatcatccccatcgtggccggcgtggtggccggcatcgtgctgattggcctggccctgctgctgatctggaagctgctgatgatcatccatgaccggcgggagtttgccaagtttgagaaggagaagatgaatgccaagtgggacacccaggagaaccccatctacaagagccccatcaacaacttcaagaaccccaactacggcaggaaggccggcctgtag

SEQ ID NO: 20091 - DNA, 411 bp, synthetic construct
  misc_feature 1..411: note = Description of Artificial Sequence: Synthetic coding sequence
  source 1..411: mol_type = other DNA
atgaacctgcagcccatcttctggattggcctcatcagctctgtgtgctgcgtgtttgcccagacagatgagaaccgctgcctgaaggccaatgccaagagctgtggggagtgcatccaggccggccccaactgtggctggtgcaccaacagcaccttcctgcaggagggcatgcccaccagcgcccgctgtgatgacctggaggccctgaagaagaagggctgccccccagatgacatcgagaacccccggggcagcaaggacatcaagaagaacaagaatgtgaccaacagaagcaagggcacagctgagaagctgaagccagaggacatcacccagatccagccccagcagctggtgctgcggctgcggtctggagagccccagaccttcaccctgaagttcaagtag

SEQ ID NO: 20092 - DNA, 378 bp, synthetic construct
  misc_feature 1..378: note = Description of Artificial Sequence: Synthetic coding sequence
  source 1..378: mol_type = other DNA
atgaacctgcagcccatcttctggattggcctcatcagctctgtgtgctgcgtgtttgcccagacagatgagaaccgctgcctgaaggccaatgccaagagctgtggggagtgcatccaggccggccccaactgtggctggtgcaccaacagcaccttcctgcaggagggcatgcccaccagcgcccgctgtgatgacctggaggccctgaagaagaagggctgccccccagatgacatcgagaacccccggggcagcaaggacatcaagaagaacaagaatgtgaccaacagaagcaagggcacagctgagaagctgaagccagaggacatcacccagatccagccccagcagctggtgctgcggctgcggagctag

SEQ ID NO: 20093 - DNA, 492 bp, synthetic construct
  misc_feature 1..492: note = Description of Artificial Sequence: Synthetic coding sequence
  source 1..492: mol_type = other DNA
atgaacctgcagcccatcttctggattggcctcatcagctctgtgtgctgcgtgtttgcccagacagatgagaaccgctgcctgaaggccaatgccaagagctgtggggagtgcatccaggccggccccaactgtggctggtgcaccaacagcaccttcctgcaggagggcatgcccaccagcgcccgctgtgatgacctggaggccctgaagaagaagggctgccccccagatgacatcgagaacccccggggcagcaaggacatcaagaagaacaagaatgtgaccaacagaagcaagggcacagctgagaagctgaagccagaggacatcacccagatccagccccagcagctggtgctgcggctgcggtctggagagccccagaccttcaccctgaagttcaagagagctgaggactaccccatcgacctgtactacctgatggacctgagctacagcatgaaggatgacctggagaatgtgaagtag

SEQ ID NO: 20094 - DNA, 459 bp, synthetic construct
  misc_feature 1..459: note = Description of Artificial Sequence: Synthetic coding sequence
  source 1..459: mol_type = other DNA
atgaacctgcagcccatcttctggattggcctcatcagctctgtgtgctgcgtgtttgcccagacagatgagaaccgctgcctgaaggccaatgccaagagctgtggggagtgcatccaggccggccccaactgtggctggtgcaccaacagcgtgtccaagaccttcctgcaggagggcatgcccaccagcgcccgctgtgatgacctggaggccctgaagaagaagggctgccccccagatgacatcgagaacccccggggcagcaaggacatcaagaagaacaagaatgtgaccaacagaagcaaaggaacagctgagaagctgaagccagaggacatcacccagatccagccccagcagctggtgctgcggctgcggagcggggagccccagaccttcaccctgaagttcaagagagctgaggactaccccatcgacctgtactacctgatgtag

SEQ ID NO: 20095 - DNA, 315 bp, synthetic construct
  misc_feature 1..315: note = Description of Artificial Sequence: Synthetic coding sequence
  source 1..315: mol_type = other DNA
atgaacctgcagcccatcttctggattggcctcatcagctctgtgtgctgcgtgtttgcccagacagatgagaaccgctgcctgaaggccaatgccaagagctgtggggagtgcatccaggccggccccaactgtggctggtgcaccaacagcaccttcctgcaggagggcatgcccaccagcgcccgctgtgatgacctggaggccctgaagaagaagggctgccccccagatgacatcgagaacccccggggcagcaaggacatcaagaagaacaagaatgtgaccaacagaagcaagggcacagctgagtag

SEQ ID NO: 20096 - DNA, 432 bp, synthetic construct
  misc_feature 1..432: note = Description of Artificial Sequence: Synthetic coding sequence
  source 1..432: mol_type = other DNA
atgaacctgcagcccatcttctggattggcctcatcagctctgtgtgctgcgtgtttgcccagacagatgagaaccgctgcctgaaggccaatgccaagagctgtggggagtgcatccaggccggccccaactgtggctggtgcaccaacagcaccttcctgcaggagggcatgcccaccagcgcccgctgtgatgacctggaggccctgaagaagaagggctgccccccagatgacatcgagaacccccggggcagcaaggacatcaagaagaacaagaatgtgaccaacagaagcaagggcacagctgagaagctgaagccagaggacatcacccagatccagccccagcagctggtgctgcggctgcggtctggagagccccagaccttcaccctgaagttcaagagagctgaggactaccccatctag

SEQ ID NO: 20097 - DNA, 2310 bp, synthetic construct
  misc_feature 1..2310: note = Description of Artificial Sequence: Synthetic coding sequence
  source 1..2310: mol_type = other DNA
atgctgggcctgcggccccccctgctggccctggtgggcctgctgagcctgggctgtgtgctgagccaggagtgcaccaagttcaaggtgagcagctgcagagaatgtattgaaagtggccctggctgcacctggtgccagaagctgaacttcaccggccctggggaccctgacagcatccgctgtgacacccggccccagctgctgatgaggggctgtgccgcagatgacatcatggaccccaccagcctggccgagacccaggaggaccacaacggcggccagaagcagctgagcccccagaaggtgaccctgtacctgcggcccggccaggccgccgccttcaacgtgaccttccggcgggccaagggctaccccatcgacctgtactacctgatggacctgagctacagcatgctggatgacctgagaaatgtgaagaagctgggcggggacctgctgcgggccctgaatgagatcacagaaagtggccgcatcggcttcggcagctttgtggacaagacagtgctgccctttgtgaacacccacccagacaagctgaggaacccctgccccaacaaggagaaggagtgccagcccccatttgccttccgccacgtgctgaagctgaccaacaacagcaaccagttccagacagaggtgggcaagcagctgatcagcggcaacctggatgcccctgagggcggcctggatgccatgatgcaggtggccgcctgcccagaggagatcggctggagaaatgtgacccggctgctggtgtttgccacagatgatggcttccactttgctggagatggcaagctgggcgccatcctgaccccaaatgatggccgctgccacctggaggacaacctgtacaagaggagcaatgaatttgactaccccagcgtgggccagctggcccacaagctggccgagaacaacatccagcccatctttgctgtgaccagcaggatggtgaagacctatgagaagctgacagagatcatccccaagtctgctgtgggggagctgtctgaggacagcagcaatgtggtgcagctgatcaagaatgcctacaacaagctgagcagcagggtcttcctggaccacaatgccctgcctgacaccctgaaggtgacctatgacagcttctgcagcaatggagtgacccacaggaaccagcccaggggggactgtgatggagtgcagatcaacgtgcccatcaccttccaggtgaaggtgacagccacagagtgcatccaggagcagagctttgtgatccgggccctgggcttcacagacatcgtgacagtgcaggtgctgccccagtgtgagtgccgctgccgggaccagagccgggacaggagcctgtgccacggcaagggcttcctggagtgtggcatctgccgctgtgacaccggctacatcggcaagaactgtgagtgccagacccagggccgcagcagccaggagctggagggcagctgcaggaaggacaacaacagcatcatctgcagcggcctgggggactgtgtgtgtggccagtgcctgtgccacaccagtgatgtgcctgggaagctgatctacggccagtactgtgaatgtgacaccatcaactgtgagcgctacaacggccaggtgtgtggcggccctggccggggcctgtgcttctgtgggaaatgtcgctgccaccctggctttgagggcagcgcctgccagtgtgagaggaccacagagggctgcctgaacccccggcgggtggagtgcagcggccggggccgctgccgctgcaatgtgtgtgagtgccacagcggctaccagctgcccctgtgccaggagtgccccggctgccccagcccctgtgggaagtacatcagctgtgccgagtgcctgaagtttgagaagggcccctttgggaagaactgcagcgctgcctgccccggcctgcagctgagcaacaaccctgtgaagggccgcacctgcaaggagcgggacagcgagggctgctgggtggcctacaccctggagcagcaggacggcatggaccgctacctgatctacgtggatgagagccgggagtgtgtggccggccccaacattgctgccatcgtgggcggcaccgtggccggcatcgtgctgattggcatcctgctgctggtgatctggaaggccctgatccacctgagtgacctgcgggagtaccgccgctttgagaaggagaagctgaagagccagtggaacaatgacaaccccctcttcaagagcgccaccaccaccgtgatgaaccccaagtttgctgagagctag

SEQ ID NO: 20098 - DNA, 969 bp, synthetic construct
  misc_feature 1..969: note = Description of Artificial Sequence: Synthetic coding sequence
  source 1..969: mol_type = other DNA
ggccgcctgggcaaggacctggccactggagtgctgagccaggagtgcaccaagttcaaggtgagcagctgccgggagtgcatcgagagcggccctggctgcacctggtgccagaagctgaacttcaccggccctggggaccctgacagcatccgctgtgacacccggccccagctgctgatgaggggctgtgccgcagatgacatcatggaccccaccagcctggccgagacccaggaggaccacaatggaggccagaagcagctgagcccccagaaggtgaccctgtacctgcggcccggccaggccgccgccttcaacgtgaccttcagaagagccaagggctaccccatcgacctgtactacctgatggacctgagctacagcatgctggatgacctgagaaatgtgaagaagctgggcggggacctgctgcgggccctgaatgagatcacagagagcggcagaattggatttggcagctttgtggacaagacagtgctgccctttgtgaacacccacccagacaagctgaggaacccctgccccaacaaggagaaggagtgccagcccccatttgccttcagacatgtgctgaagctgaccaacaacagcaaccagttccagacagaggtgggcaagcagctgatcagcggcaacctggatgcccctgagggcggcctggatgccatgatgcaggtggccgcctgcccagaggagatcggctggagaaatgtgacccggctgctggtgtttgccacagatgatggcttccactttgctggagatggcaagctgggcgccatcctgaccccaaatgatggccgctgccacctggaggacaacctgtacaagaggagcaatgaatttgactaccccagcgtgggccagctggcccacaagctggccgagaacaacatccagcccatctttgctgtgaccagcaggatggtgaagacctatgaatag

SEQ ID NO: 20099 - DNA, 2310 bp, synthetic construct; identical to SEQ ID NO: 20097
  misc_feature 1..2310: note = Description of Artificial Sequence: Synthetic coding sequence
  source 1..2310: mol_type = other DNA

SEQ ID NO: 20100 - DNA, 2310 bp, synthetic construct; identical to SEQ ID NO: 20097
  misc_feature 1..2310: note = Description of Artificial Sequence: Synthetic coding sequence
  source 1..2310: mol_type = other DNA

SEQ ID NO: 20101 - DNA, 2310 bp, synthetic construct; identical to SEQ ID NO: 20097
  misc_feature 1..2310: note = Description of Artificial Sequence: Synthetic coding sequence
  source 1..2310: mol_type = other DNA

SEQ ID NO: 20102 - DNA, 2310 bp, synthetic construct; identical to SEQ ID NO: 20097
  misc_feature 1..2310: note = Description of Artificial Sequence: Synthetic coding sequence
  source 1..2310: mol_type = other DNA

SEQ ID NO: 20103 - DNA, 363 bp, synthetic construct
  misc_feature 1..363: note = Description of Artificial Sequence: Synthetic coding sequence
  source 1..363: mol_type = other DNA
atgctgggcctgcggccccccctgctggccctggtgggcctgctgagcctgggctgtgtgctgagccaggagtgcaccaagttcaaggtgagcagctgcagagaatgtattgaaagtggccctggctgcacctggtgccagaagctgaacttcaccggccctggggaccctgacagcatccgctgtgacacccggccccagctgctgatgaggggctgtgccgcagatgacatcatggaccccaccagcctggccgagacccaggaggaccacaacggcggccagaagcagctgagcccccagaaggtgaccctgtacctgcggcccggccaggccgccgccttcaacgtgaccttcagatag

SEQ ID NO: 20104 - DNA, 213 bp, synthetic construct
  misc_feature 1..213: note = Description of Artificial Sequence: Synthetic coding sequence
  source 1..213: mol_type = other DNA
atgctgggcctgcggccccccctgctggccctggtgggcctgctgagcctgggctgtgtgctgagccaggagtgcaccaagttcaaggtgagcagctgcagagaatgtattgaaagtggccctggctgcacctggtgccagaagctgaacttcaccggccctggggaccctgacagcatccgctgtgacacccggccccagctgctgatgtag

SEQ ID NO: 20105 - DNA, 150 bp, synthetic construct
  misc_feature 1..150: note = Description of Artificial Sequence: Synthetic coding sequence
  source 1..150: mol_type = other DNA
atgctgggcctgcggccccccctgctggccctggtgggcctgctgagcctgggctgtgtgctgagccaggagtgcaccaagttcaaggtgagcagctgcagagaatgtattgaaagtggccctggctgcacctggtgccagaagctgtag

SEQ ID NO: 20106 - DNA, 483 bp, synthetic construct
  misc_feature 1..483: note = Description of Artificial Sequence: Synthetic coding sequence
  source 1..483: mol_type = other DNA
atgctgggcctgcggccccccctgctggccctggtgggcctgctgagcctgggctgtgtgctgagccaggagtgcaccaagttcaaggtgagcagctgcagagaatgtattgaaagtggccctggctgcacctggtgccagaagctgaacttcaccggccctggggaccctgacagcatccgctgtgacacccggccccagctgctgatgaggggctgtgccgcagatgacatcatggaccccaccagcctggccgagacccaggaggaccacaacggcggccagaagcagctgagcccccagaaggtgaccctgtacctgcggcccggccaggccgccgccttcaacgtgaccttccggcgggccaagggctaccccatcgacctgtactacctgatggacctgagctacagcatgctggatgacctgagaaatgtgaagaagctgggcggggacctgctgcgggccctgaatgagatctag

SEQ ID NO: 20107 - DNA, 501 bp, synthetic construct
  misc_feature 1..501: note = Description of Artificial Sequence: Synthetic coding sequence
  source 1..501: mol_type = other DNA
atgctgggcctgcggccccccctgctggccctggtgggcctgctgagcctgggctgtgtgctgagccaggagtgcaccaagttcaaggtgagcagctgcagagaatgtattgaaagtggccctggctgcacctggtgccagaagctgaacttcaccggccctggggaccctgacagcatccgctgtgacacccggccccagctgctgatgaggggctgtgccgcagatgacatcatggaccccaccagcctggccgagacccaggaggaccacaacggcggccagaagcagctgagcccccagaaggtgaccctgtacctgcggcccggccaggccgccgccttcaacgtgaccttccggcgggccaagggctaccccatcgacctgtactacctgatggacctgagctacagcatgctggatgacctgagaaatgtgaagaagctgggcggggacctgctgcgggccctgaatgagatcacagaaagtggccgcatctag

SEQ ID NO: 20108 - DNA, 1137 bp, synthetic construct
  misc_feature 1..1137: note = Description of Artificial Sequence: Synthetic coding sequence
  source 1..1137: mol_type = other DNA
atgctgggcctgcggccccccctgctggccctggtgggcctgctgagcctgggctgtgtgctgagccaggagtgcaccaagttcaaggtgagcagctgcagagaatgtattgaaagtggccctggctgcacctggtgccagaagctgaacttcaccggccctggggaccctgacagcatccgctgtgacacccggccccagctgctgatgaggggctgtgccgcagatgacatcatggaccccaccagcctggccgagacccaggaggaccacaacggcggccagaagcagctgagcccccagaaggtgaccctgtacctgcggcccggcttcggcagctttgtggacaagacagtgctgccctttgtgaacacccacccagacaagctgaggaacccctgccccaacaaggagaaggagtgccagcccccatttgccttcagacatgtgctgaagctgaccaacaacagcaaccagttccagacagaggtgggcaagcagctgatcagcggcaacctggatgcccctgagggcggcctggatgccatgatgcaggtggccgcctgcccagaggagatcggctggagaaatgtgacccggctgctggtgtttgccacagatgatggcttccactttgctggagatggcaagctgggcgccatcctgaccccaaatgatggccgctgccacctggaggacaacctgtacaagaggagcaatgaatttgactaccccagcgtgggccagctggcccacaagctggccgagaacaacatccagcccatctttgctgtgaccagcaggatggtgaagacctatgagaagctgacagagatcatccccaagtctgctgtgggggagctgtctgaggacagcagcaatgtggtgcagctgatcaagaatgcctacaacaagctgagcagcagggtcttcctggaccacaatgccctgcctgacaccctgaaggtgacctatgacagcttctgcagcaatggagtgacccacaggaaccagcccaggggggactgtgatggagtgcagatcaacgtgcccatcaccttccaggtgaaggtgacagccacagagtgcatccaggagcagagctttgtgattggccgctgggccagcaggacatag

SEQ ID NO: 20109 - DNA, 2367 bp, synthetic construct
  misc_feature 1..2367: note = Description of Artificial Sequence: Synthetic coding sequence
  source 1..2367: mol_type = other DNA
atgagggcccggccccggccccggcccctgtgggccaccgtgctggccctgggcgccctggccggcgtgggcgtgggcggccccaacatctgcaccacccggggcgtgagcagctgccagcagtgcctggccgtgagccccatgtgtgcctggtgcagtgatgaggccctgcccctgggcagcccccgctgtgacctgaaggagaacctgctgaaggacaactgtgcccctgagagcattgagttccctgtgtctgaggcccgggtgctggaggaccggcccctgagtgacaagggcagcggggacagcagccaggtgacccaggtgagcccccagagaattgccctgcggctgcggccagatgacagcaagaacttcagcatccaggtgcggcaggtggaggactaccctgtggacatctactacctgatggacctgagctacagcatgaaggatgacctgtggagcatccagaacctgggcaccaagctggccacccagatgaggaagctgaccagcaacctgagaattggatttggagcctttgtggacaagcctgtgagcccctacatgtacatcagccccccagaggccctggagaacccctgctatgacatgaagaccacctgcctgcccatgtttggctacaagcacgtgctgaccctgacagaccaggtgacccgcttcaatgaggaggtgaagaagcagagcgtgtccaggaacagagatgcccctgagggcggctttgatgccatcatgcaggccaccgtgtgtgatgagaagattggctggagaaatgatgccagccacctgctggtgttcaccacagatgccaagacccacatcgccctggatggccgcctggccggcatcgtgcagcccaatgatggccagtgccacgtgggcagtgacaaccactacagcgccagcaccaccatggactaccccagcctgggcctgatgacagagaagctgagccagaagaacatcaacctgatctttgctgtgacagaaaatgtggtgaacctgtaccagaactacagcgagctgatccctggcaccaccgtgggcgtgctgtccatggacagcagcaatgtgctgcagctgattgtggatgcctacggcaagatccgcagcaaggtggagctggaggtgcgggacctgcctgaggagctgagcctgtccttcaatgccacctgcctgaacaatgaagtcatccctggcctgaagagctgcatgggcctgaagattggagacacagtgtccttcagcattgaggccaaggtgcggggctgcccccaggagaaggagaagagcttcaccatcaagcctgtgggcttcaaggacagcctcatcgtgcaggtgacctttgactgtgactgtgcctgccaggcccaggccgagcccaacagccaccgctgcaacaatggaaatggcacctttgaatgtggggtgtgccgctgtggccctggctggctgggcagccagtgtgagtgcagcgaggaggactaccggcccagccagcaggatgaatgtagcccccgggagggccagcctgtgtgcagccagagaggagagtgcctgtgtggccagtgtgtgtgccacagcagtgactttgggaagatcaccgggaagtactgtgaatgtgatgacttcagctgtgtgcgctacaagggggagatgtgcagcggccacggccagtgcagctgtggggactgcctgtgtgacagcgactggacaggctactactgcaactgcaccaccaggacagacacctgcatgagcagcaatggcctgctgtgcagcggccggggcaaatgtgaatgtggcagctgtgtgtgcatccagcccggcagctatggagacacctgtgagaagtgccccacctgcccagatgcctgcaccttcaagaaggaatgtgtggagtgcaagaagtttgacagaggagccctgcatgatgagaacacctgcaaccgctactgcagagatgaaattgaatctgtgaaggagctgaaggacaccgggaaggatgctgtgaactgcacctacaagaatgaagatgactgtgtggtgcgcttccagtactatgaggacagcagcggcaagagcatcctgtatgtggtggaggagcctgagtgccccaagggccctgacatcctggtggtgctgctgtctgtgatgggcgccatcctgctgattggcctggccgccctgctgatctggaagctgctgatcaccatccatgacaggaaggagtttgccaagtttgaggaggagcgggcccgggccaagtgggacacagccaacaaccccctgtacaaggaggccaccagcaccttcaccaacatcacctaccggggcacctag

SEQ ID NO: 20110 - DNA, 2256 bp, synthetic construct
  misc_feature 1..2256: note = Description of Artificial Sequence: Synthetic coding sequence
  source 1..2256: mol_type = other DNA
atgtgtgcctggtgcagtgatgaggccctgcccctgggcagcccccgctgtgacctgaaggagaacctgctgaaggacaactgtgcccctgagagcattgagttccctgtgtctgaggcccgggtgctggaggaccggcccctgagtgacaagggcagcggggacagcagccaggtgacccaggtgagcccccagagaattgccctgcggctgcggccagatgacagcaagaacttcagcatccaggtgcggcaggtggaggactaccctgtggacatctactacctgatggacctgagctacagcatgaaggatgacctgtggagcatccagaacctgggcaccaagctggccacccagatgaggaagctgaccagcaacctgcgcatcggctttggagcctttgtggacaagcctgtgagcccctacatgtacatcagccccccagaggccctggagaacccctgctatgacatgaagaccacctgcctgcccatgtttggctacaagcacgtgctgaccctgacagaccaggtgacccgcttcaatgaggaggtgaagaagcagagcgtgtccaggaacagagatgcccctgagggcggctttgatgccatcatgcaggccaccgtgtgtgatgagaagattggctggagaaatgatgccagccacctgctggtgttcaccacagatgccaagacccacatcgccctggatggccgcctggccggcatcgtgcagcccaatgatggccagtgccacgtgggcagtgacaaccactacagcgccagcaccaccatggactaccccagcctgggcctgatgacagagaagctgagccagaagaacatcaacctgatctttgctgtgacagaaaatgtggtgaacctgtaccagaactacagcgagctgatccctggcaccaccgtgggcgtgctgtccatggacagcagcaatgtgctgcagctgattgtggatgcctacggcaagatccgcagcaaggtggagctggaggtgcgggacctgcctgaggagctgagcctgtccttcaatgccacctgcctgaacaatgaggtgattcctggcctgaagagctgcatgggcctgaagatcggggacacagtgtccttcagcattgaggccaaggtgcggggctgcccccaggagaaggagaagagcttcaccatcaagcctgtgggcttcaaggacagcctgattgtgcaggtgacctttgactgtgactgtgcctgccaggcccaggccgagcccaacagccaccgctgcaacaatggaaatggcacctttgaatgtggggtgtgccgctgtggccctggctggctgggcagccagtgtgaatgttctgaggaggactaccggcccagccagcaggatgagtgcagcccccgggagggccagcctgtgtgcagccagagaggagaatgtctgtgtggccagtgtgtgtgccacagcagtgactttgggaagatcaccgggaagtactgtgaatgtgatgacttcagctgtgtgcgctacaagggggagatgtgcagcggccacggccagtgcagctgtggggactgcctgtgtgacagcgactggacaggctactactgcaactgcaccaccaggacagacacctgcatgagcagcaatggcctgctgtgcagcggccggggcaaatgtgaatgtggcagctgtgtgtgcatccagcccggcagctatggagacacctgtgagaagtgccccacctgcccagatgcctgcaccttcaagaaggaatgtgtggagtgcaagaagtttgacagaggagccctgcatgatgagaacacctgcaaccgctactgcagagatgaaattgagagcgtgaaggagctgaaggacaccgggaaggatgctgtgaactgcacctacaagaatgaagatgactgtgtggtgcgcttccagtactatgaggacagcagcggcaagagcatcctgtatgtggtggaggagccagaatgtcccaagggccctgacatcctggtggtgctgctgtctgtgatgggcgccatcctgctgattggcctggccgccctgctgatctggaagctgctgatcaccatccatgacaggaaggagtttgccaagtttgaggaggagcgggcccgggccaagtgggacacagagatcctgctgtactactgcagcttcatcctggtgcaccagagcctggagagcctgaggacagagttcaccagcaagcagaaggatggcaactag

SEQ ID NO: 20111 - DNA, 2367 bp, synthetic construct; identical to SEQ ID NO: 20109
  misc_feature 1..2367: note = Description of Artificial Sequence: Synthetic coding sequence
  source 1..2367: mol_type = other DNA

SEQ ID NO: 20112 - DNA, 1359 bp, synthetic construct
  misc_feature 1..1359: note = Description of Artificial Sequence: Synthetic coding sequence
  source 1..1359: mol_type = other DNA
atggatgacatcttcacccagtgccgggagggcaatgctgtggccgtgcggctgtggctggacaacacagaaaatgacctgaaccagggagatgaccacggcttcagccccctgcactgggcctgccgggagggccgctctgctgtggtggagatgctgatcatgagaggagcccgcatcaacgtgatgaacagaggagatgacacccccctgcacctggccgccagccacggccaccgggacatcgtgcagaagctgctgcagtacaaggctgacatcaatgctgtgaatgaacatggaaatgtgcccctgcactacgcctgcttctggggccaggaccaggtggccgaggacctggtggccaacggggccctggtgtccatctgcaacaagtacggggagatgcctgtggacaaggccaaggcccccctgcgggagctgctgcgggagcgggcagagaagatgggccagaacctgaaccgcatcccctacaaggacaccttctggaagggcaccaccaggacccggcccagaaatggcaccctgaacaagcacagcggcatcgacttcaagcagctgaacttcctgaccaagctgaatgaaaaccacagcggggagctgtggaagggccgctggcagggcaatgacatcgtggtgaaggtgctgaaggtgcgggactggagcaccaggaagagccgggacttcaatgaggagtgcccccggctgcgcatcttcagccaccccaacgtgctgcctgtgctgggcgcctgccagagccccccagccccccaccccaccctcatcacccactggatgccctacggcagcctgtacaacgtgctgcacgagggcaccaactttgtggtggaccagagccaggccgtgaagtttgccctggacatggcccggggcatggccttcctgcacaccctggagcccctcatccccaggcatgccctgaacagccgctctgtgatgattgatgaggacatgacagcccgcatctccatggctgatgtgaagttctccttccagtgccccggccgcatgtatgccccagcctgggtggcccctgaggccctgcagaagaagccagaggacaccaacagaagatctgctgacatgtggagctttgctgtgctgctgtgggagctggtgacccgggaggtgccctttgctgacctgagcaacatggagatcggcatgaaggtggccctggagggcctgcggcccaccatccccccaggcatcagcccccacgtgtgcaagctgatgaagatctgcatgaatgaagatcctgccaagaggcccaagtttgacatgattgtgcccatcctggagaagatgcaggacaagtag

SEQ ID NO: 20113 - DNA, 1359 bp, synthetic construct; identical to SEQ ID NO: 20112
  misc_feature 1..1359: note = Description of Artificial Sequence: Synthetic coding sequence
  source 1..1359: mol_type = other DNA

SEQ ID NO: 20114 - DNA, 1359 bp, synthetic construct; identical to SEQ ID NO: 20112
  misc_feature 1..1359: note = Description of Artificial Sequence: Synthetic coding sequence
  source 1..1359: mol_type = other DNA

SEQ ID NO: 20115 - DNA, 957 bp, synthetic construct
  misc_feature 1..957: note = Description of Artificial Sequence: Synthetic coding sequence
  source 1..957: mol_type = other DNA
atgcctgtggacaaggccaaggcccccctgcgggagctgctgcgggagcgggcagagaagatgggccagaacctgaaccgcatcccctacaaggacaccttctggaagggcaccaccaggacccggcccagaaatggcaccctgaacaagcacagcggcatcgacttcaagcagctgaacttcctgaccaagctgaatgaaaaccacagcggggagctgtggaagggccgctggcagggcaatgacatcgtggtgaaggtgctgaaggtgcgggactggagcaccaggaagagccgggacttcaatgaggagtgcccccggctgcgcatcttcagccaccccaacgtgctgcctgtgctgggcgcctgccagagccccccagccccccaccccaccctcatcacccactggatgccctacggcagcctgtacaacgtgctgcacgagggcaccaactttgtggtggaccagagccaggccgtgaagtttgccctggacatggcccggggcatggccttcctgcacaccctggagcccctcatccccaggcatgccctgaacagccgctctgtgatgattgatgaggacatgacagcccgcatctccatggctgatgtgaagttctccttccagtgccccggccgcatgtatgccccagcctgggtggcccctgaggccctgcagaagaagccagaggacaccaacagaagatctgctgacatgtggagctttgctgtgctgctgtgggagctggtgacccgggaggtgccctttgctgacctgagcaacatggagatcggcatgaaggtggccctggagggcctgcggcccaccatccccccaggcatcagcccccacgtgtgcaagctgatgaagatctgcatgaatgaagatcctgccaagaggcccaagtttgacatgattgtgcccatcctggagaagatgcaggacaagtag

SEQ ID NO: 20116 - DNA, 978 bp, synthetic construct
  misc_feature 1..978: note = Description of Artificial Sequence: Synthetic coding sequence
  source 1..978: mol_type = other DNA
atgcccatcaccaggatgaggatgaggccctggctggagatgcagatcaacagcaaccagatccctggcctcatctggatcaacaaggaggagatgatcttccagatcccctggaagcatgctgccaagcacggctgggacatcaacaaggatgcctgcctcttccgctcctgggccatccacacaggccgctacaaggccggggagaaggagccagaccccaagacctggaaggccaacttccgctgtgccatgaacagcctgcctgacatcgaggaggtgaaggaccagagcagaaataaaggcagcagcgctgtgcgggtgtacaggatgctgccccccctgaccaagaaccagaggaaggagaggaagagcaagagcagcagagatgccaagagcaaggccaagaggaagagctgtggggacagcagcccagacaccttcagtgatggcctgagcagcagcaccctgcctgatgaccacagcagctacacagtgcccggctacatgcaggacctggaggtggagcaggccctgaccccagccctgagcccctgtgctgtgagcagcaccctgcctgactggcacatccctgtggaggtggtgcctgacagcaccagtgacctgtacaacttccaggtgagccccatgcccagcaccagcgaggccaccacagatgaagatgaggagggcaagctgcctgaggacatcatgaagctgctggagcagagcgagtggcagcccaccaacgtggatggcaagggctacctgctgaatgaacctggggtgcagcccacctctgtgtatggagacttcagctgcaaggaggagcctgagattgacagccctggaggagacatcggcctgagcctgcagagggtcttcacagacctgaagaacatggatgccacctggctggacagcctgctgacccctgtgcggctgcccagcatccaggccatcccctgtgccccctag

SEQ ID NO: 20117 - DNA, 978 bp, synthetic construct; identical to SEQ ID NO: 20116
  misc_feature 1..978: note = Description of Artificial Sequence: Synthetic coding sequence
  source 1..978: mol_type = other DNA

SEQ ID NO: 20118 - DNA, 579 bp, synthetic construct
  misc_feature 1..579: note = Description of Artificial Sequence: Synthetic coding sequence
  source 1..579: mol_type = other DNA
atgcccatcaccaggatgaggatgaggccctggctggagatgcagatcaacagcaaccagatccctggcctcatctggatcaacaaggaggagatgatcttccagatcccctggaagcatgctgccaagcacggctgggacatcaacaaggatgcctgcctcttccgctcctgggccatccacacaggccgctacaaggccggggagaaggagccagaccccaagacctggaaggccaacttccgctgtgccatgaacagcctgcctgacatcgaggaggtgaaggaccagagcagaaataaaggcagcagcgctgtgcgggtgtacaggatgctgccccccctgaccaagaaccagaggaaggagaggaagagcaagagcagcagagatgccaagagcaaggccaagaggaagagctgtggggacagcagcccagacaccttcagtgatggcctgagcagcagcaccctgcctgatgaccacagcagctacacagtgcccggctacatgcaggacctggaggtggagcaggccctgaccccagccctgagcccctgtgctgtgagcagcaccctgtag

SEQ ID NO: 20119 - DNA, 1356 bp, synthetic construct
  misc_feature 1..1356: note = Description of Artificial Sequence: Synthetic coding sequence
  source 1..1356: mol_type = other DNA
atgaacctggagggcggcggccggggcggggagtttggcatgtctgctgtgtcctgtggaaatggcaagctgcggcagtggctgattgaccagattgacagcggcaagtacccaggcctggtgtgggagaatgaggagaagagcatcttccgcatcccctggaagcatgctgggaagcaggactacaaccgggaggaggatgctgccctcttcaaggcctgggccctcttcaagggcaagttccgggagggcatcgacaagccagacccccccacctggaagacccggctgcgctgtgccctgaacaagagcaatgactttgaggagctggtggagaggagccagctggacatcagtgacccctacaaggtgtacagaattgtgcctgagggcgccaagaagggggccaagcagctgaccctggaggacccccagatgtccatgagccacccctacaccatgaccaccccctaccccagcctgcctgcccagcaggtgcacaactacatgatgccacccctggaccgctcctggagggactatgtgcctgaccagccccaccctgagatcccctaccagtgccccatgaccttcggcccccggggccaccactggcagggccctgcctgtgaaaatggctgccaggtgacaggcaccttctacgcctgtgcccctcctgagagccaggcccctggggtgcccacagagcccagcatccgctctgctgaggccctggccttcagtgactgccgcctgcacatctgcctgtactaccgggagatcctggtgaaggagctgaccaccagcagccctgagggctgccgcatcagccacggccacacctatgatgccagcaacctggaccaggtgctcttcccctacccagaggacaatggccagaggaagaacatcgagaagctgctgagccacctggagcggggcgtggtgctgtggatggccccagatggcctgtatgccaagaggctgtgccagagccgcatctactgggatggccccctggccctgtgcaatgaccggcccaacaagctggagcgggaccagacctgcaagctgtttgacacccagcagttcctgtctgagctgcaggcctttgcccaccacggccgcagcctgccccgcttccaggtgaccctgtgctttggagaggagttcccagacccccagaggcagaggaagctgatcacagcccacgtggagcccctgctggcccggcagctgtactactttgcccagcagaacagcggccacttcctgcggggctatgacctgcctgagcacatcagcaaccctgaggactaccacaggagcatccgccacagcagcatccaggagtag

SEQ ID NO: 20120 - DNA, 1443 bp, synthetic construct
  misc_feature 1..1443: note = Description of Artificial Sequence: Synthetic coding sequence
  source 1..1443: mol_type = other DNA
ctgggccccacagctgccctgagcagcgagagccgggcccgggccgcccaggccggcggcggcccccgggcccgggcccggacccggggcatgaacctggagggcggcggccggggcggggagtttggcatgtctgctgtgtcctgtggaaatggcaagctgcggcagtggctgattgaccagattgacagcggcaagtacccaggcctggtgtgggagaatgaggagaagagcatcttccgcatcccctggaagcatgctgggaagcaggactacaaccgggaggaggatgctgccctcttcaaggcctgggccctcttcaagggcaagttccgggagggcatcgacaagccagacccccccacctggaagacccggctgcgctgtgccctgaacaagagcaatgactttgaggagctggtggagaggagccagctggacatcagtgacccctacaaggtgtacagaattgtgcctgagggcgccaagaagggggccaagcagctgaccctggaggacccccagatgtccatgagccacccctacaccatgaccaccccctaccccagcctgcctgcccaggtgcacaactacatgatgccacccctggaccgctcctggagggactatgtgcctgaccagccccaccctgagatcccctaccagtgccccatgaccttcggcccccggggccaccactggcagggccctgcctgtgaaaatggctgccaggtgacaggcaccttctacgcctgtgcccctcctgagagccaggcccctggggtgcccacagagcccagcatccgctctgctgaggccctggccttcagtgactgccgcctgcacatctgcctgtactaccgggagatcctggtgaaggagctgaccaccagcagccctgagggctgccgcatcagccacggccacacctatgatgccagcaacctggaccaggtgctcttcccctacccagaagataatggccagaggaagaacatcgagaagctgctgagccacctggagcggggcgtggtgctgtggatggccccagatggcctgtatgccaagaggctgtgccagagccgcatctactgggatggccccctggccctgtgcaatgaccggcccaacaagctggagcgggaccagacctgcaagctgtttgacacccagcagttcctgtctgagctgcaggcctttgcccaccacggccgcagcctgccccgcttccaggtgaccctgtgcttcggggaggagttcccagacccccagaggcagaggaagctgatcacagcccacgtggagcccctgctggcccggcagctgtactactttgcccagcagaacagcggccacttcctgcggggctatgacctgcctgagcacatcagcaaccctgaggactaccacaggagcatccgccacagcagcatccaggagtag

SEQ ID NO: 20121 - DNA, 1497 bp, synthetic construct
  misc_feature 1..1497: note = Description of Artificial Sequence: Synthetic coding sequence
  source 1..1497: mol_type = other DNA
atgaaccagagcatccctgtggcccccaccccaccaagaagagtgcggctgaagccctggctggtggcccaggtgaacagctgccagtacccaggcctgcagtgggtgaatggagagaagaagctgttctgcatcccctggaggcatgccaccaggcatggccccagccaggatggagacaacaccatcttcaaggcctgggccaaggagaccgggaagtacacagaaggagtggatgaagctgaccctgccaagtggaaggccaacctgcgctgtgccctgaacaagagccgggacttccgcctcatctatgatggcccccgggacatgccaccccagccctacaagatctatgaggtgtgcagcaatggacctgcccccacagacagccagcccccagaggactacagctttggagctggggaggaggaggaggaggaggaggagctgcagaggatgctgcccagcctgagcctgacagaagatgtgaagtggccacccaccctgcagccccccaccctgcggccccccaccctgcagccccccaccctgcagccccctgtggtgctgggccccccagccccagaccccagccccctggcccctcctcctggcaacccagctggcttccgggagctgctgtctgaggtgctggagcccggccccctgcctgccagcctgcccccagctggggagcagctgctgcctgacctgctgatcagcccccacatgctgcccctgacagacctggagatcaagttccagtaccggggccggcccccccgggccctgaccatcagcaacccccacggctgccgcctcttctacagccagctggaggccacccaggagcaggtggagctgtttggccccatcagcctggagcaggtgcgcttccccagccctgaggacatccccagcgacaagcagcgcttctacaccaaccagctgctggatgtgctggaccggggcctcatcctgcagctgcagggccaggacctgtatgccatccggctgtgccagtgcaaggtgttctggagcggcccctgtgccagcgcccatgacagctgccccaaccccatccagcgggaggtgaagaccaagctgttcagcctggagcacttcctgaatgaactcatcctcttccagaagggccagaccaacaccccacctccatttgagatcttcttctgctttggagaggagtggccagacaggaagccccgggagaagaagctgatcaccgtgcaggtggtgcctgtggccgcccggctgctgctggagatgttttctggagagctgtcctggagcgctgacagcatccggctgcagatcagcaacccagacctgaaggacaggatggtggagcagttcaaggagctgcaccacatctggcagagccagcagaggctgcagcctgtggcccaggcccctcctggagctggcctgggcgtgggccagggcccctggcccatgcaccctgctggcatgcagtag

SEQ ID NO: 20122 - DNA, 1545 bp, synthetic construct
  misc_feature 1..1545: note = Description of Artificial Sequence: Synthetic coding sequence
  source 1..1545: mol_type = other DNA
atgaaccagagcatccctgtggcccccaccccaccaagaagagtgcggctgaagccctggctggtggcccaggtgaacagctgccagtacccaggcctgcagtgggtgaatggagagaagaagctgttctgcatcccctggaggcatgccaccaggcatggccccagccaggatggagacaacaccatcttcaaggcctgggccaaggagaccgggaagtacacagaaggagtggatgaagctgaccctgccaagtggaaggccaacctgcgctgtgccctgaacaagagccgggacttccgcctcatctatgatggcccccgggacatgccaccccagccctacaagatctatgaggtgtgcagcaatggacctgcccccacagacagccagcccccagaggactacagctttggagctggggaggaggaggaggaggaggaggagctgcagaggatgctgcccagcctgagcctgacagatgctgtgcagagcggcccccacatgaccccctacagcctgctgaaggaggatgtgaagtggccacccaccctgcagccccccaccctgcggccccccaccctgcagccccccaccctgcagccccctgtggtgctgggccccccagccccagaccccagccccctggcccctcctcctggcaacccagctggcttccgggagctgctgtctgaggtgctggagcccggccccctgcctgccagcctgcccccagctggggagcagctgctgcctgacctgctgatcagcccccacatgctgcccctgacagacctggagatcaagttccagtaccggggccggcccccccgggccctgaccatcagcaacccccacggctgccgcctcttctacagccagctggaggccacccaggagcaggtggagctgtttggccccatcagcctggagcaggtgcgcttccccagccctgaggacatccccagcgacaagcagcgcttctacaccaaccagctgctggatgtgctggaccggggcctcatcctgcagctgcagggccaggacctgtatgccatccggctgtgccagtgcaaggtgttctggagcggcccctgtgccagcgcccatgacagctgccccaaccccatccagcgggaggtgaagaccaagctgttcagcctggagcacttcctgaatgaactcatcctcttccagaagggccagaccaacaccccacctccatttgagatcttcttctgctttggagaggagtggccagacaggaagccccgggagaagaagctgatcaccgtgcaggtggtgcctgtggccgcccggctgctgctggagatgttttctggagagctgtcctggagcgctgacagcatccggctgcagatcagcaacccagacctgaaggacaggatggtggagcagttcaaggagctgcaccacatctggcagagccagcagaggctgcagcctgtggcccaggcccctcctggagctggcctgggcgtgggccagggcccctggcccatgcaccctgctggcatgcagtag

SEQ ID NO: 20123 - DNA, 1497 bp, synthetic construct; identical to SEQ ID NO: 20121
  misc_feature 1..1497: note = Description of Artificial Sequence: Synthetic coding sequence
  source 1..1497: mol_type = other DNA

SEQ ID NO: 20124 - DNA, 1467 bp, synthetic construct
  misc_feature 1..1467: note = Description of Artificial Sequence: Synthetic coding sequence
  source 1..1467: mol_type = other DNA
atgaaccagagcatccctgtggcccccaccccaccaagaagagtgcggctgaagccctggctggtggcccaggtgaacagctgccagtacccaggcctgcagtgggtgaatggagagaagaagctgttctgcatcccctggaggcatgccaccaggcatggccccagccaggatggagacaacaccatcttcaaggcctgggccaaggagaccgggaagtacacagaaggagtggatgaagctgaccctgccaagtggaaggccaacctgcgctgtgccctgaacaagagccgggacttccgcctcatctatgatggcccccgggacatgccaccccagccctacaagatctatgaggtgtgcagcaatggacctgcccccacagacagccagcccccagaggactacagctttggagctggggaggaggaggaggaggaggaggagctgcagaggatgctgcccagcctgagcctgacagaagatgtgaagtggccacccaccctgcagccccccaccctgcagccccctgtggtgctgggccccccagccccagaccccagccccctggcccctcctcctggcaacccagctggcttccgggagctgctgtctgaggtgctggagcccggccccctgcctgccagcctgcccccagctggggagcagctgctgcctgacctgctgatcagcccccacatgctgcccctgacagacctggagatcaagttccagtaccggggccggcccccccgggccctgaccatcagcaacccccacggctgccgcctcttctacagccagctggaggccacccaggagcaggtggagctgtttggccccatcagcctggagcaggtgcgcttccccagccctgaggacatccccagcgacaagcagcgcttctacaccaaccagctgctggatgtgctggaccggggcctcatcctgcagctgcagggccaggacctgtatgccatccggctgtgccagtgcaaggtgttctggagcggcccctgtgccagcgcccatgacagctgccccaaccccatccagcgggaggtgaagaccaagctgttcagcctggagcacttcctgaatgaactcatcctcttccagaagggccagaccaacaccccacctccatttgagatcttcttctgctttggagaggagtggccagacaggaagccccgggagaagaagctgatcaccgtgcaggtggtgcctgtggccgcccggctgctgctggagatgttttctggagagctgtcctggagcgctgacagcatccggctgcagatcagcaacccagacctgaaggacaggatggtggagcagttcaaggagctgcaccacatctggcagagccagcagaggctgcagcctgtggcccaggcccctcctggagctggcctgggcgtgggccagggcccctggcccatgcaccctgctggcatgcagtag

SEQ ID NO: 20125 - DNA, 684 bp, synthetic construct
  misc_feature 1..684: note = Description of Artificial Sequence: Synthetic coding sequence
  source 1..684: mol_type = other DNA
atgaaccagagcatccctgtggcccccaccccaccaagaagagtgcggctgaagccctggctggtggcccaggtgaacagctgccagtacccaggcctgcagtgggtgaatggagagaagaagctgttctgcatcccctggaggcatgccaccaggcatggccccagccaggatggagacaacaccatcttcaaggcctgggccaaggagaccgggaagtacacagaaggagtggatgaagctgaccctgccaagtggaaggccaacctgcgctgtgccctgaacaagagccgggacttccgcctcatctatgatggcccccgggacatgccaccccagccctacaagatctatgaggtgtgcagcaatggacctgcccccacagacagccagcccccagaggactacagctttggagctggggaggaggaggaggaggaggaggagaggatgagcagcggccggcccctgtgcagccggcccctgtgtggccgcctgctgtgcagccggcccctgtgcagccggccctggtgctgggtgcccctgctgcagaccccagccccctggctgctgcccctggccaccctgctggccagcggcagcttcagcctgcgctcctggagcctgggcccctgcctgcctgcctgccccctgcaggccaacagcagctgccagacctgctag

SEQ ID NO: 20126 - DNA, 474 bp, synthetic construct
  misc_feature 1..474: note = Description of Artificial Sequence: Synthetic coding sequence
  source 1..474: mol_type = other DNA
atgaaccagagcatccctgtggcccccaccccaccaagaagagtgcggctgaagccctggctggtggcccaggtgaacagctgccagtacccaggcctgcagtgggtgaatggagagaagaagctgttctgcatcccctggaggcatgccaccaggcatggccccagccaggatggagacaacaccatcttcaaggcctgggccaaggagaccgggaagtacacagaaggagtggatgaagctgaccctgccaagtggaaggccaacctgcgctgtgccctgaacaagagccgggacttccgcctcatctatgatggcccccgggacatgccaccccagccctacaagatctatgaggtgtgcagcaatggacctgcccccacagacagccagcccccagaggactacagctttggagctggggaggaggaggaggaggaggaggagatgcagtgcagcctggcccccacctag

SEQ ID NO: 20127 - DNA, 321 bp, synthetic construct
  misc_feature 1..321: note = Description of Artificial Sequence: Synthetic coding sequence
  source 1..321: mol_type = other DNA
atgaaccagagcatccctgtggcccccaccccaccaagaagagtgcggctgaagccctggctggtggcccaggtgaacagctgccagtacccaggcctgcagtgggtgaatggagagaagaagctgttctgcatcccctggaggcatgccaccaggcatggccccagccaggatggagacaacaccatcttcaaggcctgggccaaggagaccgggaagtacacagaaggagtggatgaagctgaccctgccaagtggaaggccaacctgcgctgtgccctgaacaagagccgggacttccgcctcatctatgatggatag

SEQ ID NO: 20128 - DNA, 180 bp, synthetic construct
  misc_feature 1..180: note = Description of Artificial Sequence: Synthetic coding sequence
  source 1..180: mol_type = other DNA
atgaaccagagcatccctgtggcccccaccccaccaagaagagtgcggctgaagccctggctggtggcccaggtgaacagctgccagtacccaggcctgcagtgggtgaatggagagaagaagctgttctgcatcccctggaggcatgccaccaggcatggccccagccaggacggctag

SEQ ID NO: 20129 - DNA, 1497 bp, synthetic construct; identical to SEQ ID NO: 20121
  misc_feature 1..1497: note = Description of Artificial Sequence: Synthetic coding sequence
  source 1..1497: mol_type = other DNA

SEQ ID NO: 20130 - DNA, 426 bp, synthetic construct
  misc_feature 1..426: note = Description of Artificial Sequence: Synthetic coding sequence
  source 1..426: mol_type = other DNA
atgaaccagagcatccctgtggcccccaccccaccaagaagagtgcggctgaagccctggctggtggcccaggtgaacagctgccagtacccaggcctgcagtgggtgaatggagagaagaagctgttctgcatcccctggaggcatgccaccaggcatggccccagccaggatggagacaacaccatcttcaaggcctgggccaaggagaccgggaagtacacagaaggagtggatgaagctgaccctgccaagtggaaggccaacctgcgctgtgccctgaacaagagccgggacttccgcctcatctatgatggcccccgggacatgccaccccagccctacaagatctatgaggtgtgcagcaatggacctgcccccacagacagccagcccccagaggactacagctttggagctggatag

SEQ ID NO: 20131 - DNA, 459 bp, synthetic construct
  misc_feature 1..459: note = Description of Artificial Sequence: Synthetic coding sequence
  source 1..459: mol_type = other DNA
atgaaccagagcatccctgtggcccccaccccaccaagaagagtgcggctgaagccctggctggtggcccaggtgaacagctgccagtacccaggcctgcagtgggtgaatggagagaagaagctgttctgcatcccctggaggcatgccaccaggcatggccccagccaggatggagacaacaccatcttcaaggcctgggccaaggagaccgggaagtacacagaaggagtggatgaagctgaccctgccaagtggaaggccaacctgcgctgtgccctgaacaagagccgggacttccgcctcatctatgatggcccccgggacatgccaccccagccctacaagatctatgaggtgtgcagcaatggacctgcccccacagacagccagcccccagaggactacagctttggagctggggaggaggaggaggaggaggaggaggtgtctgtgtag

SEQ ID NO: 20132 - DNA, 1239 bp, synthetic construct
  misc_feature 1..1239: note = Description of Artificial Sequence: Synthetic coding sequence
  source 1..1239: mol_type = other DNA
atgaaccagagcatccctgtggcccccaccccaccaagaagagtgcggctgaagccctggctggtggcccaggtgaacagctgccagtacccaggcctgcagtgggtgaatggagagaagaagctgttctgcatcccctggaggcatgccaccaggcatggccccagccaggatggagacaacaccatcttcaaggcctgggccaaggagaccgggaagtacacagaaggagtggatgaagctgaccctgccaagtggaaggccaacctgcgctgtgccctgaacaagagccgggacttccgcctcatctatgatggcccccgggacatgccaccccagccctacaagatctatgaggtgtgcagcaatggacctgcccccacagacagccagcccccagaggactacagctttggagctggggaggaggaggaggaggaggaggagctgcagaggatgctgcccagcctgagcctgactgtgacagacctggagatcaagttccagtaccggggccggcccccccgggccctgaccatcagcaacccccacggctgccgcctcttctacagccagctggaggccacccaggagcaggtggagctgtttggccccatcagcctggagcaggtgcgcttccccagccctgaggacatccccagcgacaagcagcgcttctacaccaaccagctgctggatgtgctggaccggggcctcatcctgcagctgcagggccaggacctgtatgccatccggctgtgccagtgcaaggtgttctggagcggcccctgtgccagcgcccatgacagctgccccaaccccatccagcgggaggtgaagaccaagctgttcagcctggagcacttcctgaatgaactcatcctcttccagaagggccagaccaacaccccacctccatttgagatcttcttctgctttggagaggagtggccagacaggaagccccgggagaagaagctgatcaccgtgcaggtggtgcctgtggccgcccggctgctgctggagatgttttctggagagctgtcctggagcgctgacagcatccggctgcagatcagcaacccagacctgaaggacaggatggtggagcagttcaaggagctgcaccacatctggcagagccagcagaggctgcagcctgtggcccaggcccctcctggagctggcctgggcgtgggccagggcccctggcccatgcaccctgctggcatgcagtag

SEQ ID NO: 20133 - DNA, 570 bp, synthetic construct
  misc_feature 1..570: note = Description of Artificial Sequence: Synthetic coding sequence
  source 1..570: mol_type = other DNA
atggccagcccctttgccctgctgatggtgctggtggtgctgagctgcaagagcagctgcagcctgggctgtgacctgcctgagacccacagcctggacaacagaaggaccctgatgctgctggcccagatgagccgcatcagccccagcagctgcctgatggacagacatgactttggcttcccccaggaggagtttgatggcaaccagttccagaaggccccagccatctctgtgctgcacgagctgatccagcagatcttcaacctcttcaccaccaaggacagcagcgctgcctgggatgaggacctgctggacaagttctgcacagagctgtaccagcagctgaatgacctggaggcctgtgtgatgcaggaggagcgggtgggggagacccccctgatgaatgctgacagcatcctggccgtgaagaagtacttccgccgcatcaccctgtacctgacagagaagaagtacagcccctgtgcctgggaggtggtgcgggcagagatcatgaggagcctgagcctgagcaccaacctgcaggagcggctgcggaggaaggagtag

SEQ ID NO: 20134 - DNA, 516 bp, synthetic construct
  misc_feature 1..516: note = Description of Artificial Sequence: Synthetic coding sequence
  source 1..516: mol_type = other DNA
atgctggtgaacttcatcctgcgctgtggcctgctgctggtgaccctgagcctggccatcgccaagcacaagcagagcagcttcaccaagagctgctacccccggggcaccctgagccaggccgtggatgccctgtacatcaaggccgcctggctgaaggccaccatccctgaggaccgcatcaagaacatccggctgctgaagaagaagaccaagaagcagttcatgaagaactgccagttccaggagcagctgctgtccttcttcatggaggatgtgtttggccagctgcagctgcagggctgcaagaagatccgctttgtggaggacttccacagcctgcggcagaagctgagccactgcatcagctgtgccagcagcgcccgggagatgaagagcatcaccaggatgaagaggatcttctaccgcatcggcaacaagggcatctacaaggccatcagcgagctggacatcctgctgtcctggatcaagaagctgctggagagcagccagtag

SEQ ID NO: 20135 - DNA, 543 bp, synthetic construct
  misc_feature 1..543: note = Description of Artificial Sequence: Synthetic coding sequence
  source 1..543: mol_type = other DNA
atggccctggccgacctgtatgaggagggcggcggcggcggcggggagggggaggacaatgctgacagcaaggagaccatctgccggcccagcggcaggaagagcagcaagatgcaggccttccgcatctgggatgtgaaccagaagaccttctacctgaggaacaaccagctggtggccggctacctgcagggccccaacgtgaacctggaggagaagattgatgtggtgcccatcgagccccacgccctcttcctgggcatccatggaggcaagatgtgcctgagctgtgtgaagtctggagatgagacccggctgcagctggaggccgtgaacatcacagacctgtctgagaacaggaagcaggacaagagatttgccttcatccgcagtgacagcggccccaccaccagctttgaatctgctgcctgccccggctggttcctgtgcacagccatggaggccgaccagcctgtgtccctgaccaacatgccagatgagggcgtgatggtgaccaagttctacttccaggaggatgaatag

SEQ ID NO: 20136 - DNA, 480 bp, synthetic construct
  misc_feature 1..480: note = Description of Artificial Sequence: Synthetic coding sequence
  source 1..480: mol_type = other DNA
atggccctggagaccatctgccggcccagcggcaggaagagcagcaagatgcaggccttccgcatctgggatgtgaaccagaagaccttctacctgaggaacaaccagctggtggccggctacctgcagggccccaacgtgaacctggaggagaagattgatgtggtgcccatcgagccccacgccctcttcctgggcatccacggcggcaagatgtgcctgagctgtgtgaagtctggagatgagacccggctgcagctggaggccgtgaacatcacagacctgtctgaaaataggaagcaggacaagagatttgccttcatccgcagtgacagcggccccaccaccagctttgagagcgctgcctgccccggctggttcctgtgcacagccatggaggccgaccagcctgtgtccctgaccaacatgccagatgaaggagtgatggtgaccaagttctacttccaggaggatgaatag

SEQ ID NO: 20137 - DNA, 534 bp, synthetic construct
  misc_feature 1..534: note = Description of Artificial Sequence: Synthetic coding sequence
  source 1..534: mol_type = other DNA
atggagatctgccggggcctgcggagccacctgatcaccctgctgctcttcctgttccacagcgagaccatctgccggcccagcggcaggaagagcagcaagatgcaggccttccgcatctgggatgtgaaccagaagaccttctacctgaggaacaaccagctggtggccggctacctgcagggccccaacgtgaacctggaggagaagattgatgtggtgcccatcgagccccacgccctcttcctgggcatccacggcggcaagatgtgcctgagctgtgtgaagtctggagatgagacccggctgcagctggaggccgtgaacatcacagacctgtctgaaaataggaagcaggacaagagatttgccttcatccgcagtgacagcggccccaccaccagctttgagagcgctgcctgccccggctggttcctgtgcacagccatggaggccgaccagcctgtgtccctgaccaacatgccagatgaaggagtgatggtgaccaagttctacttccaggaggatgaatag

SEQ ID NO: 20138 - DNA, 432 bp, synthetic construct
  misc_feature 1..432: note = Description of Artificial Sequence: Synthetic coding sequence
  source 1..432: mol_type = other DNA
atgcaggccttccgcatctgggatgtgaaccagaagaccttctacctgaggaacaaccagctggtggccggctacctgcagggccccaacgtgaacctggaggagaagattgatgtggtgcccatcgagccccacgccctcttcctgggcatccacggcggcaagatgtgcctgagctgtgtgaagtctggagatgagacccggctgcagctggaggccgtgaacatcacagacctgtctgaaaataggaagcaggacaagagatttgccttcatccgcagtgacagcggccccaccaccagctttgagagcgctgcctgccccggctggttcctgtgcacagccatggaggccgaccagcctgtgtccctgaccaacatgccagatgaaggagtgatggtgaccaagttctacttccaggaggatgaatag

SEQ ID NO: 20139 - DNA, 1470 bp, synthetic construct
  misc_feature 1..1470: note = Description of Artificial Sequence: Synthetic coding sequence
  source 1..1470: mol_type = other DNA
atggagcccggcctggagcacgccctgcggaggacccccagctggagcagcctgggcggcagcgagcaccaggagatgtccttcctggagcaggagaacagcagctcctggcccagccctgctgtgaccagcagcagcgagcgcatccggggcaagagaagagccaaggccctgcgctggacccggcagaagtctgtggaggagggggagcccccaggccagggcgagggccccaggagcaggcctgctgctgagagcacaggcctggaggccaccttccccaagaccacccccctggcccaggccgaccctgctggggtgggcaccccacccaccggctgggactgcctgcccagcgactgcacagccagcgctgctggcagcagcacagatgatgtggagctggccacagagttccctgccacagaggcctgggagtgtgagctggagggcctgctggaggagaggcctgccctgtgcctgagcccccaggcccccttccccaagctgggctgggatgatgagctgaggaagccaggggcccagatctacatgaggttcatgcaggagcacacctgctatgatgccatggccaccagcagcaagctggtgatctttgacaccatgctggagatcaagaaggccttctttgccctggtggccaacggggtgcgggccgcccccctgtgggacagcaagaagcagagctttgtgggcatgctgaccatcacagacttcatcctggtgctgcaccgctactaccgcagccccctggtgcagatctatgaaattgagcagcacaagattgagacctggagggagatctacctgcagggctgcttcaagcccctggtgtccatcagccccaatgacagcctgtttgaggccgtgtacaccctcatcaagaaccgcatccaccggctgcctgtgctggaccctgtgtctggaaatgtgctgcacatcctgacccacaagaggctgctgaagttcctgcacatcttcggcagcctgctgccccggcccagcttcctgtaccgcaccatccaggacctgggcatcggcaccttccgggacctggccgtggtgctggagacagcccccatcctgacagccctggacatctttgtggaccggcgggtgtctgccctgcctgtggtgaatgaatgtggccaggtggtgggcctgtacagcagatttgatgtgatccacctggccgcccagcagacctacaaccacctggacatgtctgtgggggaggccctgcggcagaggaccctgtgcctggagggcgtgctgagctgccagccccatgagagcctgggggaggtgattgacagaattgcccgggagcaggtgcaccggctggtgctggtggatgagacccagcacctgctgggcgtggtgtccctgagtgacatcctgcaggccctggtgctgagccctgctggcattgatgccctgggcgcctag

SEQ ID NO: 20140 - DNA, 1710 bp, synthetic construct
  misc_feature 1..1710: note = Description of Artificial Sequence: Synthetic coding sequence
  source 1..1710: mol_type = other DNA
atgaaggtgctgctgcggctcatctgcttcatcgccctgctgatcagcagcctggaggccgacaagtgcaaggagcgggaggagaagatcatcctggtgtcctctgccaatgaaattgatgtgcggccctgccccctgaaccccaatgagcacaagggcaccatcacctggtacaaggatgacagcaagacccctgtgtccacagagcaggccagccgcatccaccagcacaaggagaagctgtggtttgtgcctgccaaggtggaggacagcggccactactactgtgtggtgaggaacagcagctactgcctgcgcatcaagatcagcgccaagtttgtggagaatgagcccaacctgtgctacaatgcccaggccatcttcaagcagaagctgcctgtggccggagatggcggcctggtgtgcccctacatggagttcttcaagaatgaaaataatgagctgcccaagctgcagtggtacaaggactgcaagcccctgctgctggacaacatccacttctctggagtgaaggacaggctcatcgtgatgaatgtggccgagaagcaccggggcaactacacctgccacgccagctacacctacctgggcaagcagtaccccatcaccagggtgattgagttcatcaccctggaggagaacaagcccaccaggcctgtgattgtgtccccagccaatgagaccatggaggtggacctgggcagccagatccagctgatctgcaatgtgacaggccagctgagtgacatcgcctactggaagtggaatggatctgtgattgatgaagatgatcctgtgctgggggaggactactacagcgtggagaacccagccaacaagaggaggagcaccctcatcaccgtgctgaacatcagcgagattgagagccgcttctacaagcaccccttcacctgctttgccaagaacacccacggcattgatgctgcctacatccagctgatctaccctgtgaccaacttccagaagcacatgattggcatctgtgtgaccctgaccgtcatcatcgtgtgcagcgtcttcatctacaagatcttcaagattgatattgtgctgtggtacagagacagctgctatgacttcctgcccatcaaggccagtgatggcaagacctatgatgcctacatcctgtaccccaagacagtgggggagggcagcaccagtgactgtgacatctttgtgttcaaggtgctgcctgaggtgctggagaagcagtgtggctacaagctgttcatctacggcagagatgattatgtgggggaggacatcgtggaggtgatcaatgaaaatgtgaagaagagccggcggctcatcatcatcctggtgcgggagaccagcggcttctcctggctgggcggcagcagcgaggagcagatcgccatgtacaatgccctggtgcaggacggcatcaaggtggtgctgctggagctggagaagatccaggactatgagaagatgcctgagagcatcaagttcatcaagcagaagcacggggccatccgctggagcggggacttcacccagggcccccagagcgccaagacccgcttctggaagaatgtgcgctaccacatgcctgtgcagaggaggagccccagcagcaagcaccagctgctgagccctgccaccaaggagaagctgcagcgggaggcccacgtgcccctgggctag

SEQ ID NO: 20141 - DNA, 549 bp, synthetic construct
  misc_feature 1..549: note = Description of Artificial Sequence: Synthetic coding sequence
  source 1..549: mol_type = other DNA
atgaaggtgctgctgcggctcatctgcttcatcgccctgctgatcagcagcctggaggccgacaagtgcaaggagcgggaggagaagatcatcctggtgtcctctgccaatgaaattgatgtgcggccctgccccctgaaccccaatgagcacaagggcaccatcacctggtacaaggatgacagcaagacccctgtgtccacagagcaggccagccgcatccaccagcacaaggagaagctgtggtttgtgcctgccaaggtggaggacagcggccactactactgtgtggtgaggaacagcagctactgcctgcgcatcaagatcagcgccaagtttgtggagaatgagcccaacctgtgctacaatgcccaggccatcttcaagcagaagctgcctgtggccggagatggcggcctggtgtgcccctacatggagttcttcaagaatgaaaataatgagctgcccaagctgcagtggtacaaggactgcaagcccctgctgctggacaacatccacttctctggagtgaaggacaggctcatctag

SEQ ID NO: 20142 - DNA, 345 bp, synthetic construct
  misc_feature 1..345: note = Description of Artificial Sequence: Synthetic coding sequence
  source 1..345: mol_type = other DNA
atgaaggtgctgctgcggctcatctgcttcatcgccctgctgatcagcagcctggaggccgacaagtgcaaggagcgggaggagaagatcatcctggtgtcctctgccaatgaaattgatgtgcggccctgccccctgaaccccaatgagcacaagggcaccatcacctggtacaaggatgacagcaagacccctgtgtccacagagcaggccagccgcatccaccagcacaaggagaagctgtggtttgtgcctgccaaggtggaggacagcggccactactactgtgtggtgaggaacagcagctactgcctgcgcatcaagatcagcgccaagtttgtgtag

SEQ ID NO: 20143 - DNA, 321 bp, synthetic construct
  misc_feature 1..321: note = Description of Artificial Sequence: Synthetic coding sequence
  source 1..321: mol_type = other DNA
atgaaggtgctgctgcggctcatctgcttcatcgccctgctgatcagcagcctggaggccgacaagtgcaaggagcgggaggagaagatcatcctggtgtcctctgccaatgaaattgatgtgcggccctgccccctgaaccccaatgagcacaagggcaccatcacctggtacaaggatgacagcaagacccctgtgtccacagagcaggccagccgcatccaccagcacaaggagaagctgtggtttgtgcctgccaaggtggaggacagcggccactactactgtgtggtgaggaacagcagctactgcctgaggtag

SEQ ID NO: 20144 - DNA, 243 bp, synthetic construct
  misc_feature 1..243: note = Description of Artificial Sequence: Synthetic coding sequence
  source 1..243: mol_type = other DNA
atgaaggtgctgctgcggctcatctgcttcatcgccctgctgatcagcagcctggaggccgacaagtgcaaggagcgggaggagaagatcatcctggtgtcctctgccaatgaaattgatgtgcggccctgccccctgaaccccaatgagcacaagggcaccatcacctggtacaaggatgacagcaagacccctgtgtccacagagcaggccagccgcatccaccagcacaaggagaagtag

SEQ ID NO: 20145 - DNA, 810 bp, synthetic construct
  misc_feature 1..810: note = Description of Artificial Sequence: Synthetic coding sequence
  source 1..810: mol_type = other DNA
atggccgaggtgcctgagctggccagcgagatgatggcctactacagcggaaatgaagatgacctcttctttgaagcagatggccccaagcagatgaagtgcagcttccaggacctggacctgtgccccctggatggcggcatccagctgcgcatcagtgaccaccactacagcaagggcttccggcaggccgcctctgtggtggtggccatggacaagctgaggaagatgctggtgccctgcccccagaccttccaggagaatgacctgagcaccttcttccccttcatctttgaggaggagcccatcttctttgacacctgggacaatgaggcctacgtgcatgatgcccctgtgcgcagcctgaactgcaccctgcgggacagccagcagaagagcctggtgatgagcggcccctatgagctgaaggccctgcacctgcagggccaggacatggagcagcaggtggtgttctccatgagctttgtgcagggcgaggagagcaatgacaagatccctgtggccctgggcctgaaggagaagaacctgtacctgagctgtgtgctgaaggatgacaagcccaccctgcagctggagagcgtggaccccaagaactaccccaagaagaagatggagaagagatttgtgttcaacaagattgagatcaacaacaagctggagtttgagagcgcccagttccccaactggtacatcagcaccagccaggccgagaacatgcctgtgttcctgggcggcaccaagggcggccaggacatcacagacttcaccatgcagtttgtgagcagctag

SEQ ID NO: 20146 - DNA, 336 bp, synthetic construct
  misc_feature 1..336: note = Description of Artificial Sequence: Synthetic coding sequence
  source 1..336: mol_type = other DNA
atggccgaggtgcctgagctggccagcgagatgatggcctactacagcggaaatgaagatgacctcttctttgaagcagatggccccaagcagatgaagtgcagcttccaggacctggacctgtgccccctggatggcggcatccagctgcgcatcagtgaccaccactacagcaagggcttccggcaggccgcctctgtggtggtggccatggacaagctgaggaagatgctggtgccctgcccccagaccttccaggagaatgacctgagcaccttcttccccttcatctttgaggaggagcccatcttctttgacacctgggacaatgaatag

SEQ ID NO: 20147 - DNA, 432 bp, synthetic construct
  misc_feature 1..432: note = Description of Artificial Sequence: Synthetic coding sequence
  source 1..432: mol_type = other DNA
atggccgaggtgcctgagctggccagcgagatgatggcctactacagcggaaatgaagatgacctcttctttgaagcagatggccccaagcagatgaagtgcagcttccaggacctggacctgtgccccctggatggcggcatccagctgcgcatcagtgaccaccactacagcaagggcttccggcaggccgcctctgtggtggtggccatggacaagctgaggaagatgctggtgccctgcccccagaccttccaggagaatgacctgagcaccttcttccccttcatctttgaggaggagcccatcttctttgacacctgggacaatgaggcctacgtgcatgatgcccctgtgcgcagcctgaactgcaccctgcgggacagccagcagaagagcctggtgatgagcggcccctatgagctgaagtag

SEQ ID NO: 20148 - DNA, 378 bp, synthetic construct
  misc_feature 1..378: note = Description of Artificial Sequence: Synthetic coding sequence
  source 1..378: mol_type = other DNA
atggccgaggtgcctgagctggccagcgagatgatggcctactacagcggaaatgaagatgacctcttctttgaagcagatggccccaagcagatgaagtgcagcttccaggacctggacctgtgccccctggatggcggcatccagctgcgcatcagtgaccaccactacagcaagggcttccggcaggccgcctctgtggtggtggccatggacaagctgaggaagatgctggtgccctgcccccagaccttccaggagaatgacctgagcaccttcttccccttcatctttgaggaggagcccatcttctttgacacctgggacaatgaggcctacgtgcatgatgcccctgtgcgcagcctgaactgcacctag

SEQ ID NO: 20149 - DNA, 762 bp, synthetic construct
  misc_feature 1..762: note = Description of Artificial Sequence: Synthetic coding sequence
  source 1..762: mol_type = other DNA
atgtggcccccaggcagcgccagccagcccccacccagccctgctgctgccaccggcctgcaccctgctgcccggcctgtgtccctgcagtgccgcctgtccatgtgcccagcccggagcctgctgctggtggccaccctggtgctgctggaccacctgagcctggccaggaacctgcctgtggccaccccagaccccggcatgttcccctgcctgcaccacagccagaacctgctgcgggctgtgagcaacatgctgcagaaggcccggcagaccctggagttctacccctgcaccagcgaggagattgaccacgaggacatcaccaaggacaagaccagcacagtggaggcctgcctgcccctggagctgaccaagaatgaaagctgcctgaacagccgggagaccagcttcatcaccaacggcagctgcctggccagcaggaagaccagcttcatgatggccctgtgcctgagcagcatctatgaggacctgaagatgtaccaggtggagttcaagaccatgaatgccaagctgctgatggaccccaagaggcagatcttcctggaccagaacatgctggccgtgattgatgagctgatgcaggccctgaacttcaacagcgagaccgtgccccagaagagcagcctggaggagccagacttctacaagaccaagatcaagctgtgcatcctgctgcacgccttccgcatccgggctgtgaccatcgacagagtgatgagctacctgaatgccagctag

SEQ ID NO: 20150 - DNA, 720 bp, synthetic construct
  misc_feature 1..720: note = Description of Artificial Sequence: Synthetic coding sequence
  source 1..720: mol_type = other DNA
atgtggcccccaggcagcgccagccagcccccacccagccctgctgctgccaccggcctgcaccctgctgcccggcctgtgtccctgcagtgccgcctgtccatgtgcccagcccggagcctgctgctggtggccaccctggtgctgctggaccacctgagcctggccaggaacctgcctgtggccaccccagaccccggcatgttcccctgcctgcaccacagccagaacctgctgcgggctgtgagcaacatgctgcagaaggcccggcagaccctggagttctacccctgcaccagcgaggagattgaccacgaggacatcaccaaggacaagaccagcacagtggaggcctgcctgcccctggagctgaccaagaatggcagctgcctggccagcaggaagaccagcttcatgatggccctgtgcctgagcagcatctatgaggacctgaagatgtaccaggtggagttcaagaccatgaatgccaagctgctgatggaccccaagaggcagatcttcctggaccagaacatgctggccgtgattgatgagctgatgcaggccctgaacttcaacagcgagaccgtgccccagaagagcagcctggaggagccagacttctacaagaccaagatcaagctgtgcatcctgctgcacgccttccgcatccgggctgtgaccatcgacagagtgatgagctacctgaatgccagctag

SEQ ID NO: 20151 - DNA, 648 bp, synthetic construct
  misc_feature 1..648: note = Description of Artificial Sequence: Synthetic coding sequence
  source 1..648: mol_type = other DNA
atgtggcccccaggcagcgccagccagcccccacccagccctgctgctgccaccggcctgcaccctgctgcccggcctgtgtccctgcagtgccgcctgtccatgtgcccagcccggagcctgctgctggtggccaccctggtgctgctggaccacctgagcctggccaggaacctgcctgtggccaccccagaccccggcatgttcccctgcctgcaccacagccagaacctgctgcgggctgtgagcaacatgctgcagaagaatgaaagctgcctgaacagccgggagaccagcttcatcaccaacggcagctgcctggccagcaggaagaccagcttcatgatggccctgtgcctgagcagcatctatgaggacctgaagatgtaccaggtggagttcaagaccatgaatgccaagctgctgatggaccccaagaggcagatcttcctggaccagaacatgctggccgtgattgatgagctgatgcaggccctgaacttcaacagcgagaccgtgccccagaagagcagcctggaggagccagacttctacaagaccaagatcaagctgtgcatcctgctgcacgccttccgcatccgggctgtgaccatcgacagagtgatgagctacctgaatgccagctag

SEQ ID NO: 20152 - DNA, 489 bp, synthetic construct
  misc_feature 1..489: note = Description of Artificial Sequence: Synthetic coding sequence
  source 1..489: mol_type = other DNA
atgaggatcagcaagccccacctgcggagcatcagcatccagtgctacctgtgcctgctgctgaacagccacttcctgacagaagctggcatccacgtgttcatcctgggctgcttctctgctggcctgcccaagacagaggccaactgggtgaatgtcatcagtgacctgaagaagattgaagatctcatccagagcatgcacattgatgccaccctgtacacagaaagtgatgtgcaccccagctgcaaggtgacagccatgaagtgcttcctgctggagctgcaggtgatcagcctggagagcggagatgccagcatccatgacacagtggagaacctgatcatcctggccaacaacagcctgagcagcaatggaaatgtgacagaaagtggctgcaaggaatgtgaggagctggaggagaagaacatcaaggagttcctgcagagctttgtgcacatcgtgcagatgttcatcaacaccagctag

SEQ ID NO: 20153 - DNA, 489 bp, synthetic construct; identical to SEQ ID NO: 20152
  misc_feature 1..489: note = Description of Artificial Sequence: Synthetic coding sequence
  source 1..489: mol_type = other DNA

SEQ ID NO: 20154 - DNA, 408 bp, synthetic construct
  misc_feature 1..408: note = Description of Artificial Sequence: Synthetic coding sequence
  source 1..408: mol_type = other DNA
atggtgctgggcaccatcgacctgtgcagctgcttctctgctggcctgcccaagacagaggccaactgggtgaatgtcatcagtgacctgaagaagattgaggacctgatccagagcatgcacattgatgccaccctgtacacagaaagtgatgtgcaccccagctgcaaggtgacagccatgaagtgcttcctgctggagctgcaggtgatcagcctggagagcggagatgccagcatccatgacacagtggagaacctgatcatcctggccaacaacagcctgagcagcaatggaaatgtgacagagagcggctgcaaggaatgtgaggagctggaggagaagaacatcaaggagttcctgcagagctttgtgcacatcgtgcagatgttcatcaacaccagctag

SEQ ID NO: 20155 - DNA, 408 bp, synthetic construct; identical to SEQ ID NO: 20154
  misc_feature 1..408: note = Description of Artificial Sequence: Synthetic coding sequence
  source 1..408: mol_type = other DNA

SEQ ID NO: 20156 - DNA, 408 bp, synthetic construct; identical to SEQ ID NO: 20154
  misc_feature 1..408: note = Description of Artificial Sequence: Synthetic coding sequence
  source 1..408: mol_type = other DNA

SEQ ID NO: 20157 - DNA, 489 bp, synthetic construct; identical to SEQ ID NO: 20152
  misc_feature 1..489: note = Description of Artificial Sequence: Synthetic coding sequence
  source 1..489: mol_type = other DNA

SEQ ID NO: 20158 - DNA, 582 bp, synthetic construct
  misc_feature 1..582: note = Description of Artificial Sequence: Synthetic coding sequence
  source 1..582: mol_type = other DNA
atggctgctgagcctgtggaggacaactgcatcaactttgtggccatgaagttcatcgacaacaccctgtacttcatcgccgaggatgatgagaacctggagagtgactactttgggaagctggagagcaagctgagcgtcatccggaacctgaatgaccaggtgctcttcatcgaccagggcaaccggcccctgtttgaggacatgacagacagcgactgccgggacaatgcccccaggaccatcttcatcatctccatgtacaaggacagccagccccggggcatggctgtgaccatctctgtgaagtgtgagaagatcagcaccctgagctgtgagaacaagatcatctccttcaaggagatgaaccccccagacaacatcaaggacaccaagagtgacatcatcttcttccagaggtctgtgcccggccatgacaacaagatgcagtttgagagcagcagctatgagggctacttcctggcctgtgagaaggagcgggacctcttcaagctgatcctgaagaaggaggatgagctgggggacaggagcatcatgttcaccgtgcagaatgaagattag

SEQ ID NO: 20159 - DNA, 570 bp, synthetic construct
  misc_feature 1..570: note = Description of Artificial Sequence: Synthetic coding sequence
  source 1..570: mol_type = other DNA
atggctgctgagcctgtggaggacaactgcatcaactttgtggccatgaagttcatcgacaacaccctgtacttcatcgagaacctggagagtgactactttgggaagctggagagcaagctgagcgtcatccggaacctgaatgaccaggtgctcttcatcgaccagggcaaccggcccctgtttgaggacatgacagacagcgactgccgggacaatgcccccaggaccatcttcatcatctccatgtacaaggacagccagccccggggcatggctgtgaccatctctgtgaagtgtgagaagatcagcaccctgagctgtgagaacaagatcatctccttcaaggagatgaaccccccagacaacatcaaggacaccaagagtgacatcatcttcttccagaggtctgtgcccggccatgacaacaagatgcagtttgagagcagcagctatgagggctacttcctggcctgtgagaaggagcgggacctcttcaagctgatcctgaagaaggaggatgagctgggggacaggagcatcatgttcaccgtgcagaatgaagattag

SEQ ID NO: 20160 - DNA, 582 bp, synthetic construct; identical to SEQ ID NO: 20158
  misc_feature 1..582: note = Description of Artificial Sequence: Synthetic coding sequence
  source 1..582: mol_type = other DNA

SEQ ID NO: 20161 - DNA, 1782 bp, synthetic construct
  misc_feature 1..1782: note = Description of Artificial Sequence: Synthetic coding sequence
  source 1..1782: mol_type = other DNA
atggagaccccacccctgcccccagcctgcaccaagcagggccaccagaagcccctggacagcaaggatgacaacacagagaagcactgccctgtgacagtgaacccctggcacatgaagaaggccttcaaggtgatgaatgagctgcggagccagaacctgctgtgtgatgtgaccatcgtggccgaggacatggagatcagcgcccaccgggtggtgctggccgcctgcagcccctacttccacgccatgttcaccggggagatgtctgagagccgggccaagagggtgcgcatcaaggaggtggatggctggaccctgaggatgctgattgattatgtgtacacagctgagatccaggtgacagaggagaatgtgcaggtgctgctgcctgctgctggcctgctgcagctgcaggatgtgaagaagacctgctgtgagttcctggagagccagctgcaccctgtgaactgcctgggcatccgggcctttgctgacatgcacgcctgcacagacctgctgaacaaggccaacacctatgcagagcagcactttgctgatgtggtgctgtctgaggagttcctgaacctgggcatcgagcaggtgtgcagcctcatcagcagtgacaagctgaccatcagcagcgaggagaaggtgtttgaggccgtcatcgcctgggtgaaccacgacaaggatgtgcggcaggagttcatggcccggctgatggagcacgtgcggctgcccctgctgccccgggagtacctggtgcagagggtggaggaggaggccctggtgaagaacagcagcgcctgcaaggactacctgattgaggccatgaagtaccacctgctgcccacagagcagaggatcctgatgaagtctgtgaggacccggctgcggacccccatgaacctgcccaagctgatggtggtggtgggcggccaggcccccaaggccatccgctctgtggagtgctatgacttcaaggaggagcgctggcaccaggtggccgagctgcccagccgccgctgccgggccggcatggtgtacatggccggcctggtgtttgctgtgggcggcttcaacggcagcctgcgggtgaggacagtggacagctatgaccctgtgaaggaccagtggacctctgtggccaacatgagggacagaagaagcaccctgggcgctgctgtgctgaatggcctgctgtatgctgtgggcggctttgatggcagcacaggcctgagctctgtggaggcctacaacatcaagagcaatgagtggttccacgtggcccccatgaacacccggcgcagctctgtgggcgtgggcgtggtgggcggcctgctgtatgctgtgggcggctatgatggagccagccggcagtgcctgagcacagtggagtgctacaatgccaccaccaatgagtggacctacatcgccgagatgagcaccaggagaagtggagctggggtgggcgtgctgaacaacctgctgtatgctgtgggcggccatgatggccccctggtgaggaagtctgtggaggtgtatgaccccaccaccaatgcctggaggcaggtggccgacatgaacatgtgcagaagaaatgctggggtgtgtgctgtgaatggcctgctgtatgtggtgggcggagatgatggcagctgcaacctggcctctgtggagtactacaaccccaccacagacaagtggacagtggtgagcagctgcatgagcacaggccgctcctatgctggggtgacagtgattgacaagcccctgtag

SEQ ID NO: 20162 - DNA, 1131 bp, synthetic construct
  misc_feature 1..1131: note = Description of Artificial Sequence: Synthetic coding sequence
  source 1..1131: mol_type = other DNA
atgaaggaaaatgtggccagcgccaccgtcttcaccctgctgctcttcctgaacacctgcctgctgaatggccagctgcccccaggcaagccagagatcttcaagtgccgcagccccaacaaggagaccttcacctgctggtggaggcctggaacagatggcggcctgcccaccaactacagcctgacctaccaccgggagggggagaccctgatgcatgagtgcccagactacatcaccggcggccccaacagctgccactttgggaagcagtacacctccatgtggaggacctacatcatgatggtgaatgccaccaaccagatgggcagcagcttcagtgatgagctgtatgtggatgtgacctacatcgtgcagcctgacccccccctggagctggccgtggaggtgaagcagcctgaggacaggaagccctacctgtggatcaagtggagcccccccaccctgattgacctgaagacaggctggttcaccctgctgtatgagatccggctgaagccagagaaggctgctgagtgggagatccactttgctggccagcagacagagttcaagatcctgagcctgcaccctggccagaagtacctggtgcaggtgcgctgcaagccagaccacggctactggagcgcctggagccctgccaccttcatccagatccccagcgacttcaccatgaatgacaccaccgtgtggatctctgtggccgtgctgtctgctgtgatctgcctgatcatcgtgtgggccgtggccctgaagggctacagcatggtgacctgcatcttcccccctgtgcccggccccaagatcaagggctttgatgcccacctgctggagaagggcaagtctgaggagctgctgagcgccctgggctgccaggacttcccccccaccagtgactatgaggacctgctggtggagtacctggaggtggatgacagcgaggaccagcacctgatgtctgtgcacagcaaggagcaccccagccagggcgaccccctgatgctgggcgccagccactacaagaacctgaagagctaccggcccaggaagatcagcagccagggccgcctggccgtgttcaccaaggccaccctgaccaccgtgcagtag

SEQ ID NO: 20163 - DNA, 414 bp, synthetic construct
  misc_feature 1..414: note = Description of Artificial Sequence: Synthetic coding sequence
  source 1..414: mol_type = other DNA
atgggcctgaccagccagctgctgcccccactcttcttcctgctggcctgtgccggcaactttgtgcacggccacaagtgtgacatcaccctgcaggagatcatcaagaccctgaacagcctgacagagcagaagaacaccacagagaaggagaccttctgccgggccgccaccgtgctgcggcagttctacagccaccacgagaaggacacccgctgcctgggcgccacagcccagcagttccaccgccacaagcagctgatccgcttcctgaagaggctggacaggaacctgtggggcctggccggcctgaacagctgccctgtgaaggaggccaaccagagcaccctggagaacttcctggagcggctgaagaccatcatgagggagaagtacagcaagtgcagcagctag

SEQ ID NO: 20164 - DNA, 639 bp, synthetic construct
  misc_feature 1..639: note = Description of Artificial Sequence: Synthetic coding sequence
  source 1..639: mol_type = other DNA
atgaacagcttcagcaccagcgcctttggacctgtggccttcagcctgggcctgctgctggtgctgcctgctgccttccctgcccctgtgcccccaggagaggacagcaaggatgtggccgccccccaccggcagcccctgaccagcagcgagagaattgacaagcagatccgctacatcctggatggcatcagcgccctgaggaaggagacctgcaacaagagcaacatgtgtgagagcagcaaggaggccctggccgagaacaacctgaacctgcccaagatggccgagaaggatggctgcttccagagcggcttcaatgaggagacctgcctggtgaagatcatcaccggcctgctggagtttgaggtgtacctggagtacctgcagaacagatttgagagcagcgaggagcaggcccgggctgtgcagatgagcaccaaggtgctgatccagttcctgcagaagaaggccaagaacctggatgccatcaccaccccagaccccaccaccaatgccagcctgctgaccaagctgcaggcccagaaccagtggctgcaggacatgaccacccacctgatcctgcgctccttcaaggagttcctgcagagcagcctgcgggccctgcggcagatgtag

SEQ ID NO: 20165 - DNA, 369 bp, synthetic construct
  misc_feature 1..369: note = Description of Artificial Sequence: Synthetic coding sequence
  source 1..369: mol_type = other DNA
atgtgtgagagcagcaaggaggccctggccgagaacaacctgaacctgcccaagatggccgagaaggatggctgcttccagagcggcttcaatgaggagacctgcctggtgaagatcatcaccggcctgctggagtttgaggtgtacctggagtacctgcagaacagatttgagagcagcgaggagcaggcccgggctgtgcagatgagcaccaaggtgctgatccagttcctgcagaagaaggtgggcgtgagcagcttcccccagctgggcgtgggggaggaccggctgaaggacagcgtgctggacaacagcggcatgcagtgccacttccagaagaggcggctgcacgtgaacaagagggtgtag

SEQ ID NO: 20166 - DNA, 639 bp, synthetic construct; identical to SEQ ID NO: 20164
  misc_feature 1..639: note = Description of Artificial Sequence: Synthetic coding sequence
  source 1..639: mol_type = other DNA

SEQ ID NO: 20167 - DNA, 597 bp, synthetic construct
  misc_feature 1..597: note = Description of Artificial Sequence: Synthetic coding sequence
  source 1..597: mol_type = other DNA
atgaacagcttcagcaccagcgcctttggacctgtggccttcagcctgggcctgctgctggtgctgcctgctgccttccctgcccctgtgcccccaggagaggacagcaaggatgtggccgccccccaccggcagcccctgaccagcagcgagagaattgacaagcagatccgctacatcctggatggcatcagcgccctgaggaaggagacctgcaacaagagcaacatgtgtgagagcagcaaggaggccctggccgagaacaacctgaacctgcccaagatggccgagaaggatggctgcttccagagcggcttcaatgaggagacctgcctggtgaagatcatcaccggcctgctggagtttgaggtgtacctggagtacctgcagaacagatttgagagcagcgaggagcaggcccgggctgtgcagatgagcaccaaggtgctgatccagttcctgcagaagaaggtgggcgtgagcagcttcccccagctgggcgtgggggaggaccggctgaaggacagcgtgctggacaacagcggcatgcagtgccacttccagaagaggcggctgcacgtgaacaagagggtgtag

SEQ ID NO: 20168 - DNA, 759 bp, synthetic construct
  misc_feature 1..759: note = Description of Artificial Sequence: Synthetic coding sequence
  source 1..759: mol_type = other DNA
atgaacagcttcagcaccagcaagtgcaggaagagcctggccctggagctgcctgctgctgtggagccctgtgtgcgggagggctgtgtggcccagggcggcctggccggcggccagcagcagaggcaggcccccagctgtgctgtgagcagccccctgcggagcctgcccagcggcaccggggcctttggacctgtggccttcagcctgggcctgctgctggtgctgcctgctgccttccctgcccctgtgcccccaggagaggacagcaaggatgtggccgccccccaccggcagcccctgaccagcagcgagagaattgacaagcagatccgctacatcctggatggcatcagcgccctgaggaaggagacctgcaacaagagcaacatgtgtgagagcagcaaggaggccctggccgagaacaacctgaacctgcccaagatggccgagaaggatggctgcttccagagcggcttcaatgaggagacctgcctggtgaagatcatcaccggcctgctggagtttgaggtgtacctggagtacctgcagaacagatttgagagcagcgaggagcaggcccgggctgtgcagatgagcaccaaggtgctgatccagttcctgcagaagaaggtgggcgtgagcagcttcccccagctgggcgtgggggaggaccggctgaaggacagcgtgctggacaacagcggcatgcagtgccacttccagaagaggcggctgcacgtgaacaagagggtgtag

SEQ ID NO: 20169 - DNA, 459 bp, synthetic construct
  misc_feature 1..459: note = Description of Artificial Sequence: Synthetic coding sequence
  source 1..459: mol_type = other DNA
atgaacagcttcagcaccagcgcctttggacctgtggccttcagcctgggcctgctgctggtgctgcctgctgccttccctgcccctgtgcccccaggagaggacagcaaggatgtggccgccccccaccggcagcccctgaccagcagcgagagaattgacaagcagatccgctacatcctggatggcatcagcgccctgaggaaggagacctgcaacaagagcaacatgtgtgagagcagcaaggaggccctggccgagaacaacctgaacctgcccaagatggccgagaaggatggctgcttccagagcggcttcaatgaggagacctgcctggtgaagatcatcaccggcctgctggagtttgaggtgtacctggagtacctgcagaacagatttgagagcagcgaggagcaggcccgggctgtgcagatgagcaccaaggtgctgatccagtag

SEQ ID NO: 20170 - DNA, 300 bp, synthetic construct
  misc_feature 1..300: note = Description of Artificial Sequence: Synthetic coding sequence
  source 1..300: mol_type = other DNA
atgaccagcaagctggccgtggccctgctggccgccttcctgatctctgctgccctgtgtgagggcgctgtgctgcccaggtctgccaaggagctgcgctgccagtgcatcaagacctacagcaagcccttccaccccaagttcatcaaggagctgcgggtgattgaaagtggcccccactgtgccaacacagagatcatcgtgaagctgagtgatggccgggagctgtgcctggaccccaaggagaactgggtgcagagggtggtggagaagttcctgaagagagctgagaacagctag

SEQ ID NO: 20171 - DNA, 2139 bp, synthetic construct
  misc_feature 1..2139: note = Description of Artificial Sequence: Synthetic coding sequence
  source 1..2139: mol_type = other DNA
atggccggcggccctggccctggagagcctgctgcccctggggcccagcacttcctgtatgaggtgcccccctgggtgatgtgccgcttctacaaggtgatggatgccctggagcctgctgactggtgccagtttgctgccctgattgtgcgggaccagacagagctgcggctgtgtgagaggagcggccagaggacagcctctgtgctgtggccctggatcaacagaaatgcccgggtggccgacctggtgcacatcctgacccacctgcagctgctgcgggcccgggacatcatcacagcctggcaccccccagcccccctgcccagccctggcaccacagccccccggcccagcagcatcccagccccagctgaggccgaggcctggagccccaggaagctgcccagcagcgccagcaccttcctgagccctgccttccctggcagccagacccacagcggccctgagctgggcctggtgcccagccctgccagcctgtggcccccaccacccagccctgcccccagcagcaccaagccaggccctgagagctctgtgtccctgctgcagggcgcccggcccttccccttctgctggcccctgtgtgagatcagccggggcacccacaacttcagcgaggagctgaagatcggggagggcggcttcggctgtgtgtacagagctgtgatgaggaacacagtgtatgctgtgaagaggctgaaggaaaatgctgacctggagtggacagctgtgaagcagagcttcctgacagaggtggagcagctgagccgcttccgccaccccaacatcgtggactttgctggctactgtgcccagaatggcttctactgcctggtgtatggcttcctgcccaacggcagcctggaggaccggctgcactgccagacccaggcctgcccccccctgtcctggccccagaggctggacatcctgctgggcacagcccgggccatccagttcctgcaccaggacagccccagcctcatccacggggacatcaagagcagcaatgtgctgctggatgagcggctgacccccaagctgggggactttggcctggcccgcttcagcagatttgctggcagcagccccagccagagctccatggtggcccggacccagacagtgcggggcaccctggcctacctgcctgaggagtacatcaagacaggccgcctggccgtggacacagacaccttctcctttggagtggtggtgctggagaccctggccggccagagagctgtgaagacccatggagcccggaccaagtacctgaaggacctggtggaggaggaggccgaggaggccggcgtggccctgcggagcacccagagcaccctgcaggccggcctggccgcagatgcctgggccgcccccatcgccatgcagatctacaagaagcacctggacccccggcccggcccctgccccccagagctgggcctgggcctgggccagctggcctgctgctgcctgcacagaagagccaagagaagaccacccatgacccaggtgtatgagcggctggagaagctgcaggccgtggtggccggcgtgcccggccacagcgaggccgccagctgcatcccccccagcccccaggagaacagctatgtgagcagcacaggccgggcccacagcggggccgccccctggcagcccctggccgcccccagcggggccagcgcccaggccgctgagcagctgcagaggggccccaaccagcctgtggagagtgatgagagcctgggcggcctgtctgctgccctgcgctcctggcacctgacccccagctgccccctggaccctgcccccctgcgggaggccggctgcccccagggcgacacagctggggagagctcctggggcagcggccctggcagccggcccacagctgtggagggcctggccctgggcagcagcgccagcagcagcagcgagcccccccagatcatcatcaacccagcccggcagaagatggtgcagaagctggccctgtatgaagatggagccctggacagcctgcagctgctgagcagcagcagcctgcccggcctgggcctggagcaggaccggcagggccctgaggagagtgatgagttccagagctag

SEQ ID NO: 20172 - DNA, 2082 bp, synthetic construct
  misc_feature 1..2082: note = Description of Artificial Sequence: Synthetic coding sequence
  source 1..2082: mol_type = other DNA
atggccggcggccctggccctggagagcctgctgcccctggggcccagcacttcctgtatgaggtgcccccctgggtgatgtgccgcttctacaaggtgatggatgccctggagcctgctgactggtgccagtttggaggctggaggagagctgctgggggccgggaggcccggggcctgctggcccccaccccagatgcccccaggcctgctgctgccctgattgtgcgggaccagacagagctgcggctgtgtgagaggagcggccagaggacagcctctgtgctgtggccctggatcaacagaaatgcccgggtggccgacctggtgcacatcctgacccacctgcagctgctgcgggcccgggacatcatcacagcctggcaccccccagcccccctgcccagccctggcaccacagccccccggcccagcagcatcccagccccagctgaggccgaggcctggagccccaggaagctgcccagcagcgccagcaccttcctgagccctgccttccctggcagccagacccacagcggccctgagctgggcctggtgcccagccctgccagcctgtggcccccaccacccagccctgcccccagcagcaccaagccaggccctgagagctctgtgtccctgctgcagggcgcccggcccttccccttctgctggcccctgtgtgagatcagccggggcacccacaacttcagcgaggagctgaagatcggggagggcggcttcggctgtgtgtacagagctgtgatgaggaacacagtgtatgctgtgaagaggctgaaggaaaatgctgacctggagtggacagctgtgaagcagagcttcctgacagaggtggagcagctgagccgcttccgccaccccaacatcgtggactttgctggctactgtgcccagaatggcttctactgcctggtgtatggcttcctgcccaacggcagcctggaggaccggctgcactgccagacccaggcctgcccccccctgtcctggccccagaggctggacatcctgctgggcacagcccgggccatccagttcctgcaccaggacagccccagcctcatccacggggacatcaagagcagcaatgtgctgctggatgagcggctgacccccaagctgggggactttggcctggcccgcttcagcagatttgctggcagcagccccagccagagctccatggtggcccggacccagacagtgcggggcaccctggcctacctgcctgaggagtacatcaagacaggccgcctggccgtggacacagacaccttctcctttggagtggtggtgctggagaccctggccggccagagagctgtgaagacccatggagcccggaccaagtacctgaaggacctggtggaggaggaggccgaggaggccggcgtggccctgcggagcacccagagcaccctgcaggccggcctggccgcagatgcctgggccgcccccatcgccatgcagatctacaagaagcacctgggccagctggcctgctgctgcctgcaccggcgggccaagaggcggccccccatgacccaggagaacagctatgtgagcagcacaggccgggcccacagcggggccgccccctggcagcccctggccgcccccagcggggccagcgcccaggccgctgagcagctgcagaggggccccaaccagcctgtggagagtgatgagagcctgggcggcctgtctgctgccctgcgctcctggcacctgacccccagctgccccctggaccctgcccccctgcgggaggccggctgcccccagggcgacacagctggggagagctcctggggcagcggccctggcagccggcccacagctgtggagggcctggccctgggcagcagcgccagcagcagcagcgagcccccccagatcatcatcaacccagcccggcagaagatggtgcagaagctggccctgtatgaagatggagccctggacagcctgcagctgctgagcagcagcagcctgcccggcctgggcctggagcaggaccggcagggccctgaggagagtgatgagttccagagctag

SEQ ID NO: 20173 - DNA, 2049 bp, synthetic construct
  misc_feature 1..2049: note = Description of Artificial Sequence: Synthetic coding sequence
  source 1..2049: mol_type = other DNA
atggccggcggccctggccctggagagcctgctgcccctggggcccagcacttcctgtatgaggtgcccccctgggtgatgtgccgcttctacaaggtgatggatgccctggagcctgctgactggtgccagtttgctgccctgattgtgcgggaccagacagagctgcggctgtgtgagaggagcggccagaggacagcctctgtgctgtggccctggatcaacagaaatgcccgggtggccgacctggtgcacatcctgacccacctgcagctgctgcgggcccgggacatcatcacagcctggcaccccccagcccccctgcccagccctggcaccacagccccccggcccagcagcatcccagccccagctgaggccgaggcctggagccccaggaagctgcccagcagcgccagcaccttcctgagccctgccttccctggcagccagacccacagcggccctgagctgggcctggtgcccagccctgccagcctgtggcccccaccacccagccctgcccccagcagcaccaagccaggccctgagagctctgtgtccctgctgcagggcgcccggcccttccccttctgctggcccctgtgtgagatcagccggggcacccacaacttcagcgaggagctgaagatcggggagggcggcttcggctgtgtgtacagagctgtgatgaggaacacagtgtatgctgtgaagaggctgaaggaaaatgctgacctggagtggacagctgtgaagcagagcttcctgacagaggtggagcagctgagccgcttccgccaccccaacatcgtggactttgctggctactgtgcccagaatggcttctactgcctggtgtatggcttcctgcccaacggcagcctggaggaccggctgcactgccagacccaggcctgcccccccctgtcctggccccagaggctggacatcctgctgggcacagcccgggccatccagttcctgcaccaggacagccccagcctcatccacggggacatcaagagcagcaatgtgctgctggatgagcggctgacccccaagctgggggactttggcctggcccgcttcagcagatttgctggcagcagccccagccagagctccatggtggcccggacccagacagtgcggggcaccctggcctacctgcctgaggagtacatcaagacaggccgcctggccgtggacacagacaccttctcctttggagtggtggtgctggagaccctggccggccagagagctgtgaagacccatggagcccggaccaagtacctgaaggacctggtggaggaggaggccgaggaggccggcgtggccctgcggagcacccagagcaccctgcaggccggcctggccgcagatgcctgggccgcccccatcgccatgcagatctacaagaagcacctggacccccggcccggcccctgccccccagagctgggcctgggcctgggccagctggcctgctgctgcctgcacagaagagccaagagaagaccacccatgacccaggagaacagctatgtgagcagcacaggccgggcccacagcggggccgccccctggcagcccctggccgcccccagcggggccagcgcccaggccgctgagcagctgcagaggggccccaaccagcctgtggagagtgatgagagcctgggcggcctgtctgctgccctgcgctcctggcacctgacccccagctgccccctggaccctgcccccctgcgggaggccggctgcccccagggcgacacagctggggagagctcctggggcagcggccctggcagccggcccacagctgtggagggcctggccctgggcagcagcgccagcagcagcagcgagcccccccagatcatcatcaacccagcccggcagaagatggtgcagaagctggccctgtatgaagatggagccctggacagcctgcagctgctgagcagcagcagcctgcccggcctgggcctggagcaggaccggcagggccctgaggagagtgatgagttccagagctag

SEQ ID NO: 20174 - DNA, 2127 bp, synthetic construct
  misc_feature 1..2127: note = Description of Artificial Sequence: Synthetic coding sequence
  source 1..2127: mol_type = other DNA
atggccggcggccctggccctggagagcctgctgcccctggggcccagcacttcctgtatgaggtgcccccctgggtgatgtgccgcttctacaaggtgatggatgccctggagcctgctgactggtgccagtttggaggctggaggagagctgctgggggccgggaggcccggggcctgctggcccccaccccagatgcccccaggcctgctgctgccctgattgtgcgggaccagacagagctgcggctgtgtgagaggagcggccagaggacagcctctgtgctgtggccctggatcaacagaaatgcccgggtggccgacctggtgcacatcctgacccacctgcagctgctgcgggcccgggacatcatcacagcctggcaccccccagcccccctgcccagccctggcaccacagccccccggcccagcagcatcccagccccagctgaggccgaggcctggagccccaggaagctgcccagcagcgccagcaccttcctgagccctgccttccctggcagccagacccacagcggccctgagctgggcctggtgcccagccctgccagcctgtggcccccaccacccagccctgcccccagcagcaccaagccaggccctgagagctctgtgtccctgctgcagggcgcccggcccttccccttctgctggcccctgtgtgagatcagccggggcacccacaacttcagcgaggagctgaagatcggggagggcggcttcggctgtgtgtacagagctgtgatgaggaacacagtgtatgctgtgaagaggctgaaggaaaatgctgacctggagtggacagctgtgaagcagagcttcctgacagaggtggagcagctgagccgcttccgccaccccaacatcgtggactttgctggctactgtgcccagaatggcttctactgcctggtgtatggcttcctgcccaacggcagcctggaggaccggctgcactgccagacccaggcctgcccccccctgtcctggccccagaggctggacatcctgctgggcacagcccgggccatccagttcctgcaccaggacagccccagcctcatccacggggacatcaagagcagcaatgtgctgctggatgagcggctgacccccaagctgggggactttggcctggcccgcttcagcagatttgctggcagcagccccagccagagctccatggtggcccggacccagacagtgcggggcaccctggcctacctgcctgaggagtacatcaagacaggccgcctggccgtggacacagacaccttctcctttggagtggtggtgctggagaccctggccggccagagagctgtgaagacccatggagcccggaccaagtacctgaaggacctggtggaggaggaggccgaggaggccggcgtggccctgcggagcacccagagcaccctgcaggccggcctggccgcagatgcctgggccgcccccatcgccatgcagatctacaagaagcacctggacccccggcccggcccctgccccccagagctgggcctgggcctgggccagctggcctgctgctgcctgcacagaagagccaagagaagaccacccatgacccaggagaacagctatgtgagcagcacaggccgggcccacagcggggccgccccctggcagcccctggccgcccccagcggggccagcgcccaggccgctgagcagctgcagaggggccccaaccagcctgtggagagtgatgagagcctgggcggcctgtctgctgccctgcgctcctggcacctgacccccagctgccccctggaccctgcccccctgcgggaggccggctgcccccagggcgacacagctggggagagctcctggggcagcggccctggcagccggcccacagctgtggagggcctggccctgggcagcagcgccagcagcagcagcgagcccccccagatcatcatcaacccagcccggcagaagatggtgcagaagctggccctgtatgaagatggagccctggacagcctgcagctgctgagcagcagcagcctgcccggcctgggcctggagcaggaccggcagggccctgaggagagtgatgagttccagagctag

SEQ ID NO: 20175 - DNA, 1902 bp, synthetic construct
  misc_feature 1..1902: note = Description of Artificial Sequence: Synthetic coding sequence
  source 1..1902: mol_type = other DNA
atggccggcggccctggccctggagagcctgctgcccctggggcccagcacttcctgtatgaggtgcccccctgggtgatgtgccgcttctacaaggtgatggatgccctggagcctgctgactggtgccagtttgctgccctgattgtgcgggaccagacagagctgcggctgtgtgagaggagcggccagaggacagcctctgtgctgtggccctggatcaacagaaatgcccgggtggccgacctggtgcacatcctgacccacctgcagctgctgcgggcccgggacatcatcacagcctggcaccccccagcccccctgcccagccctggcaccacagccccccggcccagcagcatcccagccccagctgaggccgaggcctggagccccaggaagctgcccagcagcgccagcaccttcctgagccctgccttccctggcagccagacccacagcggccctgagctgggcctggtgcccagccctgccagcctgtggcccccaccacccagccctgcccccagcagcaccaagccaggccctgagagctctgtgtccctgctgcagggcgcccggcccttccccttctgctggcccctgtgtgagatcagccggggcacccacaacttcagcgaggagctgaagatcggggagggcggcttcggctgtgtgtacagagctgtgatgaggaacacagtgtatgctgtgaagaggctgaaggaaaatgctgacctggagtggacagctgtgaagcagagcttcctgacagaggtggagcagctgagccgcttccgccaccccaacatcgtggactttgctggctactgtgcccagaatggcttctactgcctggtgtatggcttcctgcccaacggcagcctggaggaccggctgcactgccagacccaggcctgcccccccctgtcctggccccagaggctggacatcctgctgggcacagcccgggccatccagttcctgcaccaggacagccccagcctcatccacggggacatcaagagcagcaatgtgctgctggatgagcggctgacccccaagctgggggactttggcctggcccgcttcagcagatttgctggcagcagccccagccagagctccatggtggcccggacccagacagtgcggggcaccctggcctacctgcctgaggagtacatcaagacaggccgcctggccgtggacacagacaccttctcctttggagtggtggtgctggagaccctggccggccagagagctgtgaagacccatggagcccggaccaagtacctggtgtatgaaaggctggagaagctgcaggccgtggtggccggcgtgcccggccacagcgaggccgccagctgcatcccccccagcccccaggagaacagctatgtgagcagcacaggccgggcccacagcggggccgccccctggcagcccctggccgcccccagcggggccagcgcccaggccgctgagcagctgcagaggggccccaaccagcctgtggagagtgatgagagcctgggcggcctgtctgctgccctgcgctcctggcacctgacccccagctgccccctggaccctgcccccctgcgggaggccggctgcccccagggcgacacagctggggagagctcctggggcagcggccctggcagccggcccacagctgtggagggcctggccctgggcagcagcgccagcagcagcagcgagcccccccagatcatcatcaacccagcccggcagaagatggtgcagaagctggccctgtatgaagatggagccctggacagcctgcagctgctgagcagcagcagcctgcccggcctgggcctggagcaggaccggcagggccctgaggagagtgatgagttccagagctag

SEQ ID NO: 20176 - DNA, 1245 bp, synthetic construct
  misc_feature 1..1245: note = Description of Artificial Sequence: Synthetic coding sequence
  source 1..1245: mol_type = other DNA
atgagcaagaagatcagcggcggctctgtggtggagatgcagggagatgagatgacccgcatcatctgggagctgatcaaggagaagctgatcttcccctacgtggagctggacctgcacagctatgacctgggcattgaaaatagagatgccaccaatgaccaggtgaccaaggatgctgctgaggccatcaagaagcacaacgtgggcgtgaagtgtgccaccatcaccccagatgagaagagggtggaggagttcaagctgaagcagatgtggaagagccccaacggcaccatccggaacatcctgggcggcaccgtcttccgggaggccatcatctgcaagaacatcccccggctggtgtctggctgggtgaagcccatcatcatcggcagacatgcctatggagaccagtaccgggccacagactttgtggtgcccggccctgggaaggtggagatcacctacacccccagtgatggcacccagaaggtgacctacctggtgcacaactttgaggagggcggcggcgtggccatgggcatgtacaaccaggacaagagcattgaggactttgcccacagcagcttccagatggccctgagcaagggctggcccctgtacctgagcaccaagaacaccatcctgaagaagtatgatggccgcttcaaggacatcttccaggagatctatgacaagcagtacaagagccagtttgaggcccagaagatctggtatgagcaccggctgattgatgacatggtggcccaggccatgaagtctgagggcggcttcatctgggcctgcaagaactatgatggagatgtgcagagcgacagcgtggcccagggctacggcagcctgggcatgatgacctctgtgctggtgtgcccagatggcaagacagtggaggccgaggccgcccatggaacagtgaccaggcactacaggatgtaccagaagggccaggagaccagcaccaaccccatcgccagcatctttgcctggacccggggcctggcccaccgggccaagctggacaacaacaaggagctggccttctttgccaatgccctggaggaggtgtccattgagaccattgaagctggcttcatgaccaaggacctggccgcctgcatcaagggcctgcccaacgtgcagaggagtgactacctgaacacctttgagttcatggacaagctgggggagaacctgaagatcaagctggcccaggccaagctgtag

SEQ ID NO: 20177 - DNA, 474 bp, synthetic construct
  misc_feature 1..474: note = Description of Artificial Sequence: Synthetic coding sequence
  source 1..474: mol_type = other DNA
atgagcaagaagatcagcggcggctctgtggtggagatgcagggagatgagatgacccgcatcatctgggagctgatcaaggagaagctgatcttcccctacgtggagctggacctgcacagctatgacctgggcattgaaaatagagatgccaccaatgaccaggtgaccaaggatgctgctgaggccatcaagaagcacaacgtgggcgtgaagtgtgccaccatcaccccagatgagaagagggtggaggagttcaagctgaagcagatgtggaagagccccaacggcaccatccggaacatcctgggcggcaccgtcttccgggaggccatcatctgcaagaacatcccccggctggtgtctggctgggtgaagcccatcatcatcggcagacatgcctatggagaccagtaccgggccacagactttgtggtgcccggccctgggaaggtggagatcacctacacctag

SEQ ID NO: 20178 - DNA, 1245 bp, synthetic construct; identical to SEQ ID NO: 20176
  misc_feature 1..1245: note = Description of Artificial Sequence: Synthetic coding sequence
  source 1..1245: mol_type = other DNA

SEQ ID NO: 20179 - DNA, 225 bp, synthetic construct
  misc_feature 1..225: note = Description of Artificial Sequence: Synthetic coding sequence
  source 1..225: mol_type = other DNA
atgagcaagaagatcagcggcggctctgtggtggagatgcagggagatgagatgacccgcatcatctgggagctgatcaaggagaagctgatcttcccctacgtggagctggacctgcacagctatgacctgggcattgaaaatagagatgccaccaatgaccaggtgaccaaggatgctgctgaggccatcaagaagcacaacgtgggcgtgaagtgtgcctag

SEQ ID NO: 20180 - DNA, 1245 bp, synthetic construct; identical to SEQ ID NO: 20176
  misc_feature 1..1245: note = Description of Artificial Sequence: Synthetic coding sequence
  source 1..1245: mol_type = other DNA

SEQ ID NO: 20181 - DNA, 189 bp, synthetic construct
  misc_feature 1..189: note = Description of Artificial Sequence: Synthetic coding sequence
  source 1..189: mol_type = other DNA
atgagcaagaagatcagcggcggctctgtggtggagatgcagggagatgagatgacccgcatcatctgggagctgatcaaggagaagctgatcttcccctacgtggagctggacctgcacagctatgacctgggcattgaaaatagagatgccaccaatgaccaggtgaccaaggatgctgctgagtag

SEQ ID NO: 20182 - DNA, 1359 bp, synthetic construct
  misc_feature 1..1359: note = Description of Artificial Sequence: Synthetic coding sequence
  source 1..1359: mol_type = other DNA
atggccggctacctgcgggtggtgcgcagcctgtgccgggccagcggcagcaggcctgcctgggccccagctgccctgacagcccccaccagccaggagcagccccggcggcactacgccgacaagaggatcaaggtggccaagcctgtggtggagatggatggagatgagatgacccgcatcatctggcagttcatcaaggagaagctgatcctgccccacgtggacatccagctgaagtactttgacctgggcctgcccaacagagaccagacagatgaccaggtgaccatcgacagcgccctggccacccagaagtacagcgtggccgtgaagtgtgccaccatcaccccagatgaggcccgggtggaggagttcaagctgaagaagatgtggaagagccccaacggcaccatccggaacatcctgggcggcaccgtcttccgggagcccatcatctgcaagaacatcccccggctggtgcccggctggaccaagcccatcaccatcggcagacatgcccatggagaccagtacaaggccacagactttgtggccgacagagctggcaccttcaagatggtgttcacccccaaggatggcagcggcgtgaaggagtgggaggtgtacaacttccctgctgggggcgtgggcatgggcatgtacaacacagatgagagcatcagcggctttgcccacagctgcttccagtatgccatccagaagaagtggcccctgtacatgagcaccaagaacaccatcctgaaggcctatgatggccgcttcaaggacatcttccaggagatctttgacaagcactacaagacagactttgacaagaacaagatctggtatgagcaccggctgattgatgacatggtggcccaggtgctgaagagcagcggcggctttgtgtgggcctgcaagaactatgatggagatgtgcagagcgacatcctggcccagggcttcggcagcctgggcctgatgacctctgtgctggtgtgcccagatggcaagaccatcgaggccgaggccgcccacggcaccgtgaccaggcactaccgggagcaccagaagggccggcccaccagcaccaaccccatcgccagcatctttgcctggacccggggcctggagcaccggggcaagctggatggcaaccaggacctgatccgctttgcccagatgctggagaaggtgtgtgtggagaccgtggagagcggggccatgaccaaggacctggccggctgcatccacggcctgagcaatgtgaagctgaatgagcacttcctgaacaccacagacttcctggacaccatcaagagcaacctggaccgggccctgggccggcagtag

SEQ ID NO: 20183 - DNA, 969 bp, synthetic construct
  misc_feature 1..969: note = Description of Artificial Sequence: Synthetic coding sequence
  source 1..969: mol_type = other DNA
atgtggaagagccccaacggcaccatccggaacatcctgggcggcaccgtcttccgggagcccatcatctgcaagaacatcccccggctggtgcccggctggaccaagcccatcaccatcggcagacatgcccatggagaccagtacaaggccacagactttgtggccgacagagctggcaccttcaagatggtgttcacccccaaggatggcagcggcgtgaaggagtgggaggtgtacaacttccctgctgggggcgtgggcatgggcatgtacaacacagatgagagcatcagcggctttgcccacagctgcttccagtatgccatccagaagaagtggcccctgtacatgagcaccaagaacaccatcctgaaggcctatgatggccgcttcaaggacatcttccaggagatctttgacaagcactacaagacagactttgacaagaacaagatctggtatgagcaccggctgattgatgacatggtggcccaggtgctgaagagcagcggcggctttgtgtgggcctgcaagaactatgatggagatgtgcagagcgacatcctggcccagggcttcggcagcctgggcctgatgacctctgtgctggtgtgcccagatggcaagaccatcgaggccgaggccgcccacggcaccgtgaccaggcactaccgggagcaccagaagggccggcccaccagcaccaaccccatcgccagcatctttgcctggacccggggcctggagcaccggggcaagctggatggcaaccaggacctgatccgctttgcccagatgctggagaaggtgtgtgtggagaccgtggagagcggggccatgaccaaggacctggccggctgcatccacggcctgagcaatgtgaagctgaatgagcacttcctgaacaccacagacttcctggacaccatcaagagcaacctggaccgggccctgggccggcagtag

SEQ ID NO: 20184 - DNA, 1203 bp, synthetic construct
  misc_feature 1..1203: note = Description of Artificial Sequence: Synthetic coding sequence
  source 1..1203: mol_type = other DNA
atggatggagatgagatgacccgcatcatctggcagttcatcaaggagaagctgatcctgccccacgtggacatccagctgaagtactttgacctgggcctgcccaacagagaccagacagatgaccaggtgaccatcgacagcgccctggccacccagaagtacagcgtggccgtgaagtgtgccaccatcaccccagatgaggcccgggtggaggagttcaagctgaagaagatgtggaagagccccaacggcaccatccggaacatcctgggcggcaccgtcttccgggagcccatcatctgcaagaacatcccccggctggtgcccggctggaccaagcccatcaccatcggcagacatgcccatggagaccagtacaaggccacagactttgtggccgacagagctggcaccttcaagatggtgttcacccccaaggatggcagcggcgtgaaggagtgggaggtgtacaacttccctgctgggggcgtgggcatgggcatgtacaacacagatgagagcatcagcggctttgcccacagctgcttccagtatgccatccagaagaagtggcccctgtacatgagcaccaagaacaccatcctgaaggcctatgatggccgcttcaaggacatcttccaggagatctttgacaagcactacaagacagactttgacaagaacaagatctggtatgagcaccggctgattgatgacatggtggcccaggtgctgaagagcagcggcggctttgtgtgggcctgcaagaactatgatggagatgtgcagagcgacatcctggcccagggcttcggcagcctgggcctgatgacctctgtgctggtgtgcccagatggcaagaccatcgaggccgaggccgcccacggcaccgtgaccaggcactaccgggagcaccagaagggccggcccaccagcaccaaccccatcgccagcatctttgcctggacccggggcctggagcaccggggcaagctggatggcaaccaggacctgatccgctttgcccagatgctggagaaggtgtgtgtggagaccgtggagagcggggccatgaccaaggacctggccggctgcatccacggcctgagcaatgtgaagctgaatgagcacttcctgaacaccacagacttcctggacaccatcaagagcaacctggaccgggccctgggccggcagtag

SEQ ID NO: 20185 - DNA, 3657 bp, synthetic construct
  misc_feature 1..3657: note = Description of Artificial Sequence: Synthetic coding sequence
  source 1..3657: mol_type = other DNA
atgaggagccccaggacccggggccgcagcggccggcccctgagcctgctgctggccctgctgtgtgccctgcgggccaaggtgtgtggggccagcggccagtttgagctggagatcctgtccatgcagaatgtgaatggagagctgcagaatggaaactgctgcggcggggccagaaatcctggggacaggaagtgcaccagagatgaatgtgacacctacttcaaggtgtgcctgaaggagtaccagagccgggtgacagctgggggcccctgcagctttggcagcggcagcacccctgtgattggaggcaacaccttcaacctgaaggccagcagaggaaatgacaggaaccgcatcgtgctgcccttctcctttgcctggcccaggagctacaccctgctggtggaggcctgggacagcagcaatgacacagtgcagcctgacagcatcatcgagaaggccagccacagcggcatgatcaaccccagccggcagtggcagaccctgaagcagaacacaggagtggcccactttgagtaccagatccgggtgacctgtgatgactactactacggcttcggctgcaacaagttctgccggcccagagatgacttcttcggccactacgcctgtgaccagaatggaaacaagacctgcatggagggctggatgggccctgagtgcaacagagccatctgccggcagggctgcagccccaagcacggcagctgcaagctgcccggggactgccgctgccagtatggctggcagggcctgtactgtgacaagtgcatcccccaccctggctgtgtgcacggcatctgcaatgagccctggcagtgcctgtgtgagaccaactggggcggccagctgtgtgacaaggacctgaactactgcggcacccaccagccctgcctgaatggaggcacctgcagcaacacaggccctgacaagtaccagtgcagctgcccagagggctacagcggccccaactgtgaaattgctgagcacgcctgcctgagtgacccctgccacaacagaggcagctgcaaggagaccagcctgggctttgaatgtgaatgttctcctggctggacaggccccacctgcagcaccaacattgatgactgcagccccaacaactgcagccatggaggcacctgccaggacctggtgaatggcttcaagtgtgtgtgccccccccagtggacaggcaagacctgccagctggatgccaatgaatgtgaggccaagccctgtgtgaatgccaagagctgcaagaacctgattgccagctactactgtgactgcctgcccggctggatgggccagaactgtgacatcaacatcaatgactgcctgggccagtgccagaatgatgccagctgccgggacctggtgaatggctaccgctgcatctgccccccaggctacgccggggaccactgtgagcgggacattgatgaatgtgccagcaacccctgcctgaatggaggccactgccagaatgagatcaaccgcttccagtgcctgtgccccaccggcttcagcggcaacctgtgccagctggacatcgactactgtgagcccaacccctgccagaatggagcccagtgctacaacagagccagtgactacttctgcaagtgcccagaagattatgagggcaagaactgcagccacctgaaggaccactgcaggaccaccccctgtgaggtgattgacagctgcaccgtggccatggccagcaatgacaccccagagggcgtgcgctacatcagcagcaatgtgtgtggcccccacggcaagtgcaagagccagagcggcggcaagttcacctgtgactgcaacaagggcttcaccggcacctactgccacgagaacatcaatgactgtgagagcaacccctgcagaaatggaggcacctgcattgatggagtgaacagctacaagtgcatctgcagtgatggctgggagggcgcctactgtgagaccaacatcaatgactgcagccagaacccctgccacaacggcggcacctgccgggacctggtgaatgacttctactgtgactgcaagaatggctggaagggcaagacctgccacagccgggacagccagtgtgatgaggccacctgcaacaacggcggcacctgctatgatgaaggagatgccttcaagtgcatgtgccctgggggctgggagggcaccacctgcaacatcgccaggaacagcagctgcctgcccaacccctgccacaatggaggcacctgtgtggtgaatggagagagcttcacctgtgtgtgcaaggagggctgggagggccccatctgtgcccagaacaccaatgactgcagcccccacccctgctacaacagcggcacctgtgtggatggagacaactggtaccgctgtgaatgtgcccctggctttgctggccctgactgccgcatcaacatcaatgaatgccagagcagcccctgtgcctttggagccacctgtgtggatgagatcaatggctaccgctgtgtgtgccccccaggccacagcggggccaagtgccaggaggtgtctggccggccctgcatcaccatgggcagcgtcatcccagatggagccaagtgggatgatgactgcaacacctgccagtgcctgaatggccgcatcgcctgcagcaaggtgtggtgtggcccccggccctgcctgctgcacaagggccacagcgagtgccccagcggccagagctgcatccccatcctggatgaccagtgctttgtgcacccctgcacaggagtgggagaatgtcgcagcagcagcctgcagcctgtgaagaccaagtgcaccagtgacagctactaccaggacaactgtgccaacatcaccttcaccttcaacaaggagatgatgagccctggcctgaccacagagcacatctgcagcgagctgaggaacctgaacatcctgaagaatgtgtctgctgagtacagcatctacatcgcctgtgagcccagccccagcgccaacaatgagatccacgtggccatctctgctgaggacatcagagatgatggcaaccccatcaaggagatcacagacaagatcatcgacctggtgtccaagagagatggcaacagcagcctgattgctgctgtggccgaggtgcgggtgcagaggcggcccctgaagaacagaacagacttcctggtgcccctgctgagctctgtgctgactgtggcctggatctgctgcctggtgacagccttctactggtgcctgaggaagaggaggaagccaggcagccacacccacagcgccagcgaggacaacaccaccaacaacgtgcgggagcagctgaaccagatcaagaaccccatcgagaagcatggagccaacacagtgcccatcaaggactatgagaacaagaacagcaagatgagcaagatccgcacccacaacagcgaggtggaggaggatgacatggacaagcaccagcagaaggccaggtttgccaagcagcctgcctacaccctggtggaccgggaggagaagcccccaaatggcacccccaccaagcaccccaactggaccaacaagcaggacaacagagacctggagagcgcccagagcctgaacaggatggagtacatcgtgtag

SEQ ID NO: 20186 - DNA, 3180 bp, synthetic construct
  misc_feature 1..3180: note = Description of Artificial Sequence: Synthetic coding sequence
  source 1..3180: mol_type = other DNA
atgatcaaccccagccggcagtggcagaccctgaagcagaacacaggagtggcccactttgagtaccagatccgggtgacctgtgatgactactactacggcttcggctgcaacaagttctgccggcccagagatgacttcttcggccactacgcctgtgaccagaatggaaacaagacctgcatggagggctggatgggccctgagtgcaacagagccatctgccggcagggctgcagccccaagcacggcagctgcaagctgcccggggactgccgctgccagtatggctggcagggcctgtactgtgacaagtgcatcccccaccctggctgtgtgcacggcatctgcaatgagccctggcagtgcctgtgtgagaccaactggggcggccagctgtgtgacaaggacctgaactactgcggcacccaccagccctgcctgaatggaggcacctgcagcaacacaggccctgacaagtaccagtgcagctgcccagagggctacagcggccccaactgtgaaattgctgagcacgcctgcctgagtgacccctgccacaacagaggcagctgcaaggagaccagcctgggctttgaatgtgagtgcagccctggctggacaggccccacctgcagcaccaacattgatgactgcagccccaacaactgcagccacggcggcacctgccaggacctggtgaatggcttcaagtgtgtgtgccccccccagtggacaggcaagacctgccagctggatgccaatgaatgtgaggccaagccctgtgtgaatgccaagagctgcaagaacctgattgccagctactactgtgactgcctgcccggctggatgggccagaactgtgacatcaacatcaatgactgcctgggccagtgccagaatgatgccagctgccgggacctggtgaatggctaccgctgcatctgccccccaggctacgccggggaccactgtgagcgggacattgatgaatgtgccagcaacccctgcctgaatggaggccactgccagaatgagatcaaccgcttccagtgcctgtgccccaccggcttcagcggcaacctgtgccagctggacatcgactactgtgagcccaacccctgccagaatggagcccagtgctacaacagagccagtgactacttctgcaagtgcccagaggactatgagggcaagaactgcagccacctgaaggaccactgcaggaccaccccctgtgaggtgattgacagctgcaccgtggccatggccagcaatgacaccccagagggcgtgcgctacatcagcagcaatgtgtgtggcccccacggcaagtgcaagagccagagcggcggcaagttcacctgtgactgcaacaagggcttcaccggcacctactgccacgagaacatcaatgactgtgagagcaacccctgcagaaatggaggcacctgcattgatggagtgaacagctacaagtgcatctgcagtgatggctgggagggcgcctactgtgagaccaacatcaatgactgcagccagaacccctgccacaatggaggcacctgccgggacctggtgaatgacttctactgtgactgcaagaatggctggaagggcaagacctgccacagccgggacagccagtgtgatgaggccacctgcaacaatggaggcacctgctatgatgaaggagatgccttcaagtgcatgtgccctgggggctgggagggcaccacctgcaacatcgccaggaacagcagctgcctgcccaacccctgccacaacggcggcacctgtgtggtgaatggagagagcttcacctgtgtgtgcaaggagggctgggagggccccatctgtgcccagaacaccaatgactgcagcccccacccctgctacaacagcggcacctgtgtggatggagacaactggtaccgctgtgaatgtgcccctggctttgctggccctgactgccgcatcaacatcaatgaatgccagagcagcccctgtgccttcggggccacctgtgtggatgagatcaatggctaccgctgtgtgtgccccccaggccacagcggggccaagtgccaggaggtgtctggccggccctgcatcaccatgggcagcgtcatcccagatggagccaagtgggatgatgactgcaacacctgccagtgcctgaatggaagaattgcctgcagcaaggtgtggtgtggcccccggccctgcctgctgcacaagggccacagtgaatgtcccagcggccagagctgcatccccatcctggatgaccagtgctttgtgcacccctgcaccggggtgggggagtgccgcagcagcagcctgcagcctgtgaagaccaagtgcaccagtgacagctactaccaggacaactgtgccaacatcaccttcaccttcaacaaggagatgatgagccctggcctgaccacagagcacatctgcagcgagctgaggaacctgaacatcctgaagaatgtgtctgctgagtacagcatctacatcgcctgtgagcccagccccagcgccaacaatgagatccacgtggccatctctgctgaggacatcagagatgatggcaaccccatcaaggagatcacagacaagatcatcgacctggtgtccaagagagatggcaacagcagcctgattgctgctgtggccgaggtgcgggtgcagaggcggcccctgaagaacagaacagacttcctggtgcccctgctgagctctgtgctgactgtggcctggatctgctgcctggtgacagccttctactggtgcctgaggaagaggaggaagccaggcagccacacccacagcgccagcgaggacaacaccaccaacaacgtgcgggagcagctgaaccagatcaagaaccccatcgagaagcacggggccaacacagtgcccatcaaggactatgagaacaagaacagcaagatgagcaagatccgcacccacaacagcgaggtggaggaggatgacatggacaagcaccagcagaaggccaggtttgccaagcagcctgcctacaccctggtggaccgggaggagaagccacccaacggcacccccaccaagcaccccaactggaccaacaagcaggacaacagagacctggagagcgcccagagcctgaacaggatggagtacatcgtgtag

SEQ ID NO: 20187 - DNA, 3399 bp, synthetic construct
  misc_feature 1..3399: note = Description of Artificial Sequence: Synthetic coding sequence
  source 1..3399: mol_type = other DNA
atgggcatggcctgcctgaccatgacagagatggagggcaccagcaccagcagcatctaccagaatggagacatctctggaaatgccaacagcatgaagcagattgatcctgtgctgcaggtgtacctgtaccacagcctgggcaagtctgaggccgactacctgaccttccccagcggggagtatgtggccgaggagatctgcatcgccgccagcaaggcctgtggcatcacccctgtgtaccacaacatgtttgccctgatgtctgaaacagagcgcatctggtacccacccaaccacgtgttccacattgatgagagcaccaggcacaacgtgctgtaccgcatccgcttctacttcccccgctggtactgcagcggcagcaacagagcctaccgccacggcatcagcagaggagctgaggcccccctgctggatgactttgtgatgagctacctgtttgcccagtggaggcatgactttgtgcacggctggatcaaggtgcctgtgacccatgagacccaggaggagtgcctgggcatggctgtgctggacatgatgagaattgccaaggaaaatgaccagacccccctggccatctacaacagcatctcctacaagaccttcctgcccaagtgcatccgggccaagatccaggactaccacatcctgaccaggaagaggatccgctaccgcttccgccgcttcatccagcagttcagccagtgcaaggccacagccaggaacctgaagctgaagtacctgatcaacctggagaccctgcagagcgccttctacacagagaagtttgaggtgaaggagcccggcagcggccccagcggggaggagatctttgccaccatcatcatcactggaaatggaggcatccagtggagccggggcaagcacaaggagagcgagaccctgacagagcaggacctgcagctgtactgtgacttccccaacatcattgatgtgtccatcaagcaggccaaccaggagggcagcaatgaaagccgggtggtgaccatccacaagcaggacggcaagaacctggagattgagctgagcagcctgcgggaggccctgagctttgtgtccctgattgatggctactaccgcctgacagcagatgcccaccactacctgtgcaaggaggtggcccctcctgctgtgctggagaacatccagagcaactgccacggccccatctccatggactttgccatcagcaagctgaagaaggccggcaaccagacaggcctgtatgtgctgcgctgcagccccaaggacttcaacaagtacttcctgacctttgctgtggagcgggagaatgtgattgagtacaagcactgcctgatcaccaagaatgaaaatgaggagtacaacctgagcggcaccaagaagaacttcagcagcctgaaggacctgctgaactgctaccagatggagaccgtgcggagtgacaacatcatcttccagttcaccaagtgctgcccccccaagcccaaggacaagagcaacctgctggtgttccgcaccaatggagtgtctgatgtgcccaccagccccaccctgcagaggcccacccacatgaaccagatggtgttccacaagatcagaaatgaagatctcatcttcaatgaaagcctgggccagggcaccttcaccaagatcttcaagggcgtgcggcgggaggtgggggactatggccagctgcacgagacagaggtgctgctgaaggtgctggacaaggcccacaggaactacagcgagagcttctttgaagctgcctccatgatgagcaagctgagccacaagcacctggtgctgaactatggagtgtgtgtgtgtggagatgagaacatcctggtgcaggagtttgtgaagtttggcagcctggacacctacctgaagaagaacaagaactgcatcaacatcctgtggaagctggaggtggccaagcagctggcctgggccatgcacttcctggaggagaacaccctcatccatggaaatgtgtgtgccaagaacatcctgctgatccgggaggaggacaggaagacaggcaacccccccttcatcaagctgagtgaccccggcatcagcatcaccgtgctgcccaaggacatcctgcaggagcgcatcccctgggtgcccccagagtgcatcgagaaccccaagaacctgaacctggccacagacaagtggagctttggcaccaccctgtgggagatctgcagcggcggggacaagcccctgagcgccctggacagccagaggaagctgcagttctatgaagatagacaccagctgcctgcccccaagtgggccgagctggccaacctgatcaacaactgcatggactatgagccagacttccggcccagcttccgggccatcatccgggacctgaacagcctcttcaccccagactatgagctgctgacagaaaatgacatgctgcccaacatgagaattggagccctgggcttcagcggggcctttgaagatcgggaccccacccagtttgaggagcggcacctgaagttcctgcagcagctgggcaaaggaaactttggatctgtggagatgtgccgctatgaccccctgcaggacaacacaggagaggtggtggccgtgaagaagctgcagcacagcacagaggagcacctgcgggactttgagcgggagattgagatcctgaagagcctgcagcacgacaacatcgtgaagtacaagggcgtgtgctacagcgctggaagaagaaacctgaagctgatcatggagtacctgccctacggcagcctgcgggactacctgcagaagcacaaggagagaattgaccacatcaagctgctgcagtacaccagccagatctgcaagggcatggagtacctgggcaccaagcgctacatccaccgggacctggccaccaggaacatcctggtggagaatgaaaatagagtgaagatcggggactttggcctgaccaaggtgctgccccaggacaaggagtactacaaggtgaaggagcctggagagagccccatcttctggtacgcccctgagagcctgacagagagcaagttctctgtggccagtgatgtgtggagctttggagtggtgctgtatgagctgttcacctacatcgagaagagcaagagccccccagctgagttcatgaggatgattggaaatgacaagcagggccagatgattgtgttccacctgattgagctgctgaagaacaacggccgcctgcccaggccagatggctgcccagatgagatctacatgatcatgacagagtgctggaacaacaacgtgaaccagaggcccagcttccgggacctggccctgcgggtggaccagatccgggacaacatggccggctag

SEQ ID NO: 20188 - DNA, 3399 bp, synthetic construct; identical to SEQ ID NO: 20187
  misc_feature 1..3399: note = Description of Artificial Sequence: Synthetic coding sequence
  source 1..3399: mol_type = other DNA

SEQ ID NO: 20189 - DNA, 2952 bp, synthetic construct
  misc_feature 1..2952: note = Description of Artificial Sequence: Synthetic coding sequence
  source 1..2952: mol_type = other DNA
atgagctacctgtttgcccagtggaggcatgactttgtgcacggctggatcaaggtgcctgtgacccatgagacccaggaggagtgcctgggcatggctgtgctggacatgatgagaattgccaaggaaaatgaccagacccccctggccatctacaacagcatctcctacaagaccttcctgcccaagtgcatccgggccaagatccaggactaccacatcctgaccaggaagaggatccgctaccgcttccgccgcttcatccagcagttcagccagtgcaaggccacagccaggaacctgaagctgaagtacctgatcaacctggagaccctgcagagcgccttctacacagagaagtttgaggtgaaggagcccggcagcggccccagcggggaggagatctttgccaccatcatcatcactggaaatggaggcatccagtggagccggggcaagcacaaggagagcgagaccctgacagagcaggacctgcagctgtactgtgacttccccaacatcattgatgtgtccatcaagcaggccaaccaggagggcagcaatgaaagccgggtggtgaccatccacaagcaggacggcaagaacctggagattgagctgagcagcctgcgggaggccctgagctttgtgtccctgattgatggctactaccgcctgacagcagatgcccaccactacctgtgcaaggaggtggcccccccagctgtgctggagaacatccagagcaactgccacggccccatctccatggactttgccatcagcaagctgaagaaggccggcaaccagacaggcctgtatgtgctgcgctgcagccccaaggacttcaacaagtacttcctgacctttgctgtggagagagaaaatgtcatcgagtacaagcactgcctgatcaccaagaatgaaaatgaggagtacaacctgagcggcaccaagaagaacttcagcagcctgaaggacctgctgaactgctaccagatggagaccgtgcggagtgacaacatcatcttccagttcaccaagtgctgcccccccaagcccaaggacaagagcaacctgctggtgttccgcaccaacggggtgtctgatgtgcccaccagccccaccctgcagaggcccacccacatgaaccagatggtgttccacaagatcagaaatgaagacctgatcttcaatgaaagcctgggccagggcaccttcaccaagatcttcaagggcgtgagaagagaggtgggggactatggccagctgcatgaaacagaggtgctgctgaaggtgctggacaaggcccacaggaactacagcgagagcttctttgaggccgcctccatgatgagcaagctgagccacaagcacctggtgctgaactacggcgtgtgtgtgtgtggagatgagaacatcctggtgcaggagtttgtgaagtttggcagcctggacacctacctgaagaagaacaagaactgcatcaacatcctgtggaagctggaggtggccaagcagctggcctgggccatgcacttcctggaggagaacaccctcatccacggcaatgtgtgtgccaagaacatcctgctgatccgggaggaggacaggaagacaggcaacccccccttcatcaagctgagtgaccccggcatcagcatcaccgtgctgcccaaggacatcctgcaggagcgcatcccctgggtgcccccagaatgtattgagaaccccaagaacctgaacctggccacagacaagtggagctttggcaccaccctgtgggagatctgcagcggcggggacaagcccctgagcgccctggacagccagaggaagctgcagttctatgaggacagacaccagctgcctgcccccaagtgggccgagctggccaacctgatcaacaactgcatggactatgagccagacttccggcccagcttccgggccatcatccgggacctgaacagcctcttcaccccagactatgagctgctgacagaaaatgacatgctgcccaacatgagaattggagccctgggcttcagcggggcctttgaggaccgggaccccacccagtttgaggagcggcacctgaagttcctgcagcagctgggcaagggcaactttggatctgtggagatgtgccgctatgaccccctgcaggacaacacaggagaggtggtggccgtgaagaagctgcagcacagcacagaggagcacctgcgggactttgagcgggagattgagatcctgaagagcctgcagcacgacaacatcgtgaagtacaagggcgtgtgctacagcgctggaagaagaaacctgaagctgatcatggagtacctgccctacggcagcctgcgggactacctgcagaagcacaaggagagaattgaccacatcaagctgctgcagtacaccagccagatctgcaagggcatggagtacctgggcaccaagcgctacatccaccgggacctggccaccaggaacatcctggtggagaatgaaaatagagtgaagattggagactttggcctgaccaaggtgctgccccaggacaaggagtactacaaggtgaaggagcccggggagagccccatcttctggtacgcccctgagagcctgacagagagcaagttctctgtggccagtgatgtgtggagctttggagtggtgctgtatgagctgttcacctacatcgagaagagcaagagccccccagctgagttcatgaggatgattggaaatgacaagcagggccagatgattgtgttccacctgattgagctgctgaagaacaacggccgcctgcccaggccagatggctgcccagatgagatctacatgatcatgacagagtgctggaacaacaacgtgaaccagaggcccagcttccgggacctggccctgcgggtggaccagatccgggacaacatggccggctag

SEQ ID NO: 20190 - DNA, 732 bp, synthetic construct
  misc_feature 1..732: note = Description of Artificial Sequence: Synthetic coding sequence
  source 1..732: mol_type = other DNA
atgactggaattgctgctgccagcttcttcagcaacacctgccgctttggaggctgcggcctgcacttccccaccctggccgacctgattgagcacatcgaggacaaccacatcgacacagacccccgggtgctggagaagcaggagctgcagcagcccacctacgtggccctgagctacatcaaccgcttcatgacagatgctgcccggcgggagcaggagagcctgaagaagaagatccagcccaagctgagcctgaccctgagcagctctgtgtccagaggaaatgtgtccaccccacccaggcacagcagcggcagcctgaccccacctgtgaccccacccatcacccccagcagcagcttccgcagcagcacccccaccggctctgaatatgatgaggaggaggtggactatgaggagagtgacagtgatgagagctggaccacagagagcgccatcagcagcgaggccatcctgagctccatgtgcatgaatggaggagaggagaagccctttgcctgccctgtgcccggctgcaagaagcgctacaagaatgtgaatggcatcaagtaccacgccaagaatggccacaggacccagatccgggtgaggaagcccttcaagtgccgctgtgggaagagctacaagacagcccagggcctgcggcaccacaccatcaacttccacccccctgtgtctgctgagatcatcaggaagatgcagcagtag

SEQ ID NO: 20191 - DNA, 1044 bp, synthetic construct
  misc_feature 1..1044: note = Description of Artificial Sequence: Synthetic coding sequence
  source 1..1044: mol_type = other DNA
atgtgcaccaagatggagcagcccttctaccatgatgacagctacacagccaccggctacggccgggcccctgggggcctgagcctgcatgactacaagctgctgaagcccagcctggccgtgaacctggccgacccctaccgcagcctgaaggcccctggggcccggggccctggccctgagggcggcggcggcggcagctacttcagcggccagggcagtgacaccggggccagcctgaagctggccagcagcgagctggagcggctgattgtgcccaacagcaatggagtcatcaccaccacccccaccccacctggccagtacttctacccccggggcggcggcagcggcggcggggccggcggggccggcggcggcgtgacagaggagcaggagggctttgctgatggctttgtgaaggccctggatgacctgcacaagatgaaccacgtgaccccacccaacgtgtccctgggcgccaccggcggccccccagctggccctggaggagtgtatgccggccctgagcccccacctgtgtacaccaacctgagcagctacagccctgccagcgccagcagtggaggagctggagctgctgtgggcaccggcagcagctaccccaccaccaccatctcctacctgccccacgcccccccatttgctgggggccacccagcccagctgggcctgggccgcggggccagcaccttcaaggaggagccccagacagtgcctgaggcccggagcagagatgccaccccacctgtgagccccatcaacatggaggaccaggagcgcatcaaggtggagaggaagaggctgaggaaccggctggccgccaccaagtgcaggaagaggaagctggagagaattgcccggctggaggacaaggtgaagaccctgaaggccgagaatgccggcctgagcagcacagctggcctgctgcgggagcaggtggcccagctgaagcagaaggtgatgacccacgtgtccaatggctgccagctgctgctgggcgtgaagggccacgccttctag

SEQ ID NO: 20192 - DNA, 996 bp, synthetic construct
  misc_feature 1..996: note = Description of Artificial Sequence: Synthetic coding sequence
  source 1..996: mol_type = other DNA
atgacagccaagatggagaccaccttctatgatgatgccctgaatgccagcttcctgcccagcgagagcggcccctacggctacagcaaccccaagatcctgaagcagagcatgaccctgaacctggccgaccctgtgggcagcctgaagccccacctgcgggccaagaacagcgacctgctgaccagcccagatgtgggcctgctgaagctggccagccctgagctggagcggctcatcatccagagcagcaatggccacatcaccaccacccccacccccacccagttcctgtgccccaagaatgtgacagatgagcaggagggctttgctgagggctttgtgcgggccctggccgagctgcacagccagaacaccctgcccagcgtgaccagcgctgcccagcctgtgaatggagctggcatggtggccccagctgtggcctctgtggccggcggcagcggcagcggcggcttcagcgccagcctgcacagcgagccccctgtgtatgccaacctgagcaacttcaaccctggggccctgagcagcggcggcggggcccccagctatggagctgctggcctggccttccctgcccagccccagcagcagcagcagcccccccaccacctgccccagcagatgcctgtgcagcacccccggctgcaggccctgaaggaggagccccagacagtgcctgagatgcctggagagaccccacccctgagccccatcgacatggagagccaggagcgcatcaaggccgagaggaagaggatgaggaacagaattgctgccagcaagtgcaggaagaggaagctggagagaattgcccggctggaggagaaggtgaagaccctgaaggcccagaacagcgagctggccagcacagccaacatgctgcgggagcaggtggcccagctgaagcagaaggtgatgaaccacgtgaacagcggctgccagctgatgctgacccagcagctgcagaccttctag

SEQ ID NO: 20193 - DNA, 831 bp, synthetic construct
  misc_feature 1..831: note = Description of Artificial Sequence: Synthetic coding sequence
  source 1..831: mol_type = other DNA
atgagggccccccacctgcacctgtctgctgccagcggggcccgggccctggccaagctgctgcccctgctgatggcccagctgtgggccgctgaggccgccctgctgccccagaatgacacccggctggaccctgaggcctacggcagcccctgtgcccggggcagccagccctggcaggtgtccctcttcaacggcctgtccttccactgtgccggcgtgctggtggaccagagctgggtgctgacagctgcccactgcggcaacaagcccctgtgggcccgggtgggagatgaccacctgctgctgctgcagggcgagcagctgcggaggaccaccaggtctgtggtgcaccccaagtaccaccagggcagcggccccatcctgcccaggagaacagatgaacatgacctgatgctgctgaagctggcccggcctgtggtgctgggcccccgggtgcgggccctgcagctgccctaccgctgtgcccagcccggggaccagtgccaggtggccggctggggcaccacagctgcccggcgggtgaagtacaacaagggcctgacctgcagcagcatcaccatcctgagccccaaggaatgtgaggtgttctacccaggagtggtgaccaacaacatgatctgtgccggcctggaccggggccaggacccctgccagagcgacagcggcggccccctggtgtgtgatgagaccctgcagggcatcctgtcctggggcgtgtacccctgtggcagcgcccagcaccctgctgtgtacacccagatctgcaagtacatgtcctggatcaacaaggtgatccgcagcaactag

SEQ ID NO: 20194 - DNA, 831 bp, synthetic construct; identical to SEQ ID NO: 20193
  misc_feature 1..831: note = Description of Artificial Sequence: Synthetic coding sequence
  source 1..831: mol_type = other DNA

SEQ ID NO: 20195 - DNA, 831 bp, synthetic construct; identical to SEQ ID NO: 20193
  misc_feature 1..831: note = Description of Artificial Sequence: Synthetic coding sequence
  source 1..831: mol_type = other DNA

SEQ ID NO: 20196 - DNA, 657 bp, synthetic construct
  misc_feature 1..657: note = Description of Artificial Sequence: Synthetic coding sequence
  source 1..657: mol_type = other DNA
atgtgggtgcctgtggtgttcctgaccctgtctgtgacctggattggagctgcccccctcatcctgagcagaattgtgggcggctgggagtgtgagaagcacagccagccctggcaggtgctggtggccagccggggccgggctgtgtgtggcggcgtgctggtgcacccccagtgggtgctgacagctgcccactgcatcaggaagccaggagatgacagcagccatgacctgatgctgctgcggctgtctgagcctgctgagctgacagatgctgtgaaggtgatggacctgcccacccaggagcccgccctgggcaccacctgctacgccagcggctggggcagcattgagcctgaggagttcctgacccccaagaagctgcagtgtgtggacctgcacgtgatcagcaatgatgtgtgtgcccaggtgcacccccagaaggtgaccaagttcatgctgtgtgccggccgctggacaggaggcaagagcacctgcagcggggacagcggcggccccctggtgtgcaatggagtgctgcagggcatcacctcctggggcagcgagccctgtgccctgcctgagcggcccagcctgtacaccaaggtggtgcactacaggaagtggatcaaggacaccatcgtggccaacccctag

SEQ ID NO: 20197 - DNA, 1590 bp, synthetic construct
  misc_feature 1..1590: note = Description of Artificial Sequence: Synthetic coding sequence
  source 1..1590: mol_type = other DNA
atgagcaccaatgaaaatgccaacaccccagctgcccggctgcaccgcttcaagaacaagggcaaggacagcacagagatgagaagaagacgcatcgaggtgaatgtggagctgaggaaggccaagaaggatgaccagatgctgaagagaagaaatgtgtcctccttcccagatgatgccaccagccccctgcaggagaacagaaacaaccagggcaccgtgaactggagcgtggatgacatcgtgaagggcatcaacagcagcaatgtggagaaccagctgcaggccacccaggccgccaggaagctgctgagccgggagaagcagccccccatcgacaacatcatccgggccggcctcatccccaagtttgtgtccttcctgggccgcacagactgcagccccatccagtttgagagcgcctgggccctgaccaacatcgccagcggcaccagcgagcagaccaaggctgtggtggatggaggagccatcccagccttcatcagcctgctggccagcccccacgcccacatcagcgagcaggccgtgtgggccctgggcaacattgctggagatggcagcgtcttccgggacctggtgatcaagtatggagctgtggaccccctgctggccctgctggccgtgcctgacatgagcagcctggcctgtggctacctgaggaacctgacctggaccctgagcaacctgtgcaggaacaagaacccagccccacccattgatgctgtggagcagatcctgcccaccctggtgcggctgctgcaccatgatgatcctgaggtgctggccgacacctgctgggccatctcctacctgacagatggccccaatgaaagaattggcatggtggtgaagacaggagtggtgccccagctggtgaagctgctgggcgccagcgagctgcccatcgtgaccccagccctgcgggccatcggcaacatcgtgactggaacagatgagcagacccaggtggtgattgatgctggggccctggccgtgttccccagcctgctgaccaaccccaagaccaacatccagaaggaggccacctggaccatgagcaacatcacagctggccggcaggaccagatccagcaggtggtgaaccacggcctggtgcccttcctggtgtctgtgctgagcaaggctgacttcaagacccagaaggaggccgtgtgggccgtgaccaactacaccagcggcggcaccgtggagcagatcgtgtacctggtgcactgcggcatcatcgagcccctgatgaacctgctgacagccaaggacaccaagatcatcctggtgatcctggatgccatcagcaacatcttccaggccgctgagaagctgggggagacagagaagctgagcatcatgattgaggagtgtggcggcctggacaagattgaggccctgcagaaccatgaaaatgaatctgtgtacaaggccagcctgagcctcatcgagaagtacttctctgtggaggaggaggaggaccagaatgtggtgcctgagaccaccagcgagggctacaccttccaggtgcaggatggagcccctggcaccttcaacttctag

SEQ ID NO: 20198 - DNA, 1590 bp, synthetic construct; identical to SEQ ID NO: 20197
  misc_feature 1..1590: note = Description of Artificial Sequence: Synthetic coding sequence
  source 1..1590: mol_type = other DNA

SEQ ID NO: 20199 - DNA, 1968 bp, synthetic construct
  misc_feature 1..1968: note = Description of Artificial Sequence: Synthetic coding sequence
  source 1..1968: mol_type = other DNA
atgcccctgaagtggaagaccagcagccctgccatctggaagtttcctgtgcctgtgctgaagaccagccgcagcacccccctgagccctgcctacatcagcctggtggaggaggaggaccagcacatgaagctgagcctgggcggcagcgagatgggcctgagcagccacctgcagagcagcaaggccggccccacccgcatcttcaccagcaacacccacagctctgtggtgctgcagggctttgaccagctgcggctggagggcctgctgtgtgatgtgaccctgatgcctggggacacagatgatgccttccctgtgcaccgggtgatgatggccagcgccagtgactacttcaaggccatgttcaccggcggcatgaaggagcaggacctgatgtgcatcaagctgcacggcgtgtccaaggtgggcctgaggaagatcatcgacttcatctacacagccaagctgagcctgaacatggacaacctgcaggacaccctggaggccgccagcttcctgcagatcctgcctgtgctggacttctgcaaggtgttcctgatctctggagtgaccctggacaactgtgtggaggtgggccgcatcgccaacacctacaacctgacagaggtggacaagtatgtgaacagctttgtgctgaagaacttccctgccctgctgagcactggagagttcctgaagctgccctttgagcggctggcctttgtgctgagcagcaacagcctgaagcactgcacagagctggagctgttcaaggccacctgccgctggctgcggctggaggagcccaggatggactttgctgccaagctgatgaagaacatccgcttccccctgatgaccccccaggagctgatcaactacgtgcagacagtggacttcatgaggacagacaacacctgtgtgaacctgctgctggaggccagcaactaccagatgatgccctacatgcagcctgtgatgcagagcgacagaacagccatccgcagtgacaccacccacctggtgaccctgggcggcgtgctgcggcagcagctggtggtgtccaaggagctgaggatgtatgatgagaaggcccacgagtggaagagcctggcccccatggatgccccccgctaccagcacggcattgctgtgattggcaacttcctgtatgtggtgggcggccagagcaactatgacaccaagggcaagacagctgtggacaccgtcttccgctttgacccccgctacaacaagtggatgcaggtggccagcctgaatgagaagaggaccttcttccacctgagcgccctgaagggctacctgtatgctgtgggcggcagaaatgctgctggggagctgcccaccgtggagtgctacaaccccaggaccaatgagtggacctacgtggccaagatgtctgagccccactacggccacgccggcaccgtgtatggaggagtgatgtacatcagcggcggcatcacccatgacaccttccagaaggagctgatgtgctttgatcctgacacagacaagtggatccagaaggcccccatgaccaccgtgcggggcctgcactgcatgtgcaccgtgggggagcggctgtatgtgattggaggcaaccacttccggggcaccagtgactatgatgatgtgctgagctgtgagtactacagccccatcctggaccagtggacccccatcgccgccatgctgcggggccagagtgatgtgggcgtggccgtgtttgagaacaagatctacgtggtgggcggctacagctggaacaaccgctgcatggtggagatcgtgcagaagtatgaccctgacaaggatgagtggcacaaggtgtttgacctgcctgagagcctgggcggcatccgggcctgcaccctgactgtgttccccccagaggagaccacccccagccccagccgggagagccccctgagcgccccctag

SEQ ID NO: 20200 - DNA, 1815 bp, synthetic construct
  misc_feature 1..1815: note = Description of Artificial Sequence: Synthetic coding sequence
  source 1..1815: mol_type = other DNA
atgggcctgagcagccacctgcagagcagcaaggccggccccacccgcatcttcaccagcaacacccacagctctgtggtgctgcagggctttgaccagctgcggctggagggcctgctgtgtgatgtgaccctgatgcctggggacacagatgatgccttccctgtgcaccgggtgatgatggccagcgccagtgactacttcaaggccatgttcaccggcggcatgaaggagcaggacctgatgtgcatcaagctgcatggagtgtccaaggtgggcctgaggaagatcatcgacttcatctacacagccaagctgagcctgaacatggacaacctgcaggacaccctggaggccgccagcttcctgcagatcctgcctgtgctggacttctgcaaggtgttcctgatcagcggcgtgaccctggacaactgtgtggaggtgggcagaattgccaacacctacaacctgacagaggtggacaagtatgtgaacagctttgtgctgaagaacttccctgccctgctgagcactggagagttcctgaagctgccctttgagcggctggcctttgtgctgagcagcaacagcctgaagcactgcacagagctggagctgttcaaggccacctgccgctggctgcggctggaggagcccaggatggactttgctgccaagctgatgaagaacatccgcttccccctgatgaccccccaggagctgatcaactacgtgcagacagtggacttcatgaggacagacaacacctgtgtgaacctgctgctggaggccagcaactaccagatgatgccctacatgcagcctgtgatgcagagcgacagaacagccatccgcagtgacaccacccacctggtgaccctgggcggcgtgctgcggcagcagctggtggtgtccaaggagctgaggatgtatgatgagaaggcccacgagtggaagagcctggcccccatggatgccccccgctaccagcacggcattgctgtgattggcaacttcctgtatgtggtgggcggccagagcaactatgacaccaagggcaagacagctgtggacacagtgttccgctttgacccccgctacaacaagtggatgcaggtggccagcctgaatgagaagaggaccttcttccacctgagcgccctgaagggctacctgtatgctgtgggcggcagaaatgctgctggggagctgcccaccgtggagtgctacaaccccaggaccaatgagtggacctacgtggccaagatgtctgagccccactacggccatgctggcaccgtgtatggaggagtgatgtacatcagcggcggcatcacccatgacaccttccagaaggagctgatgtgctttgatcctgacacagacaagtggatccagaaggcccccatgaccaccgtgcggggcctgcactgcatgtgcaccgtgggggagcggctgtatgtgattggaggcaaccacttccggggcaccagtgactatgatgatgtgctgagctgtgagtactacagccccatcctggaccagtggacccccatcgccgccatgctgcggggccagagtgatgtgggcgtggccgtgtttgagaacaagatctacgtggtgggcggctacagctggaacaaccgctgcatggtggagatcgtgcagaagtatgaccctgacaaggatgagtggcacaaggtgtttgacctgcctgagagcctgggcggcatccgggcctgcaccctgaccgtcttccccccagaggagaccacccccagccccagccgggagagccccctgagcgccccctag

SEQ ID NO: 20201 - DNA, 1815 bp, synthetic construct; identical to SEQ ID NO: 20200
  misc_feature 1..1815: note = Description of Artificial Sequence: Synthetic coding sequence
  source 1..1815: mol_type = other DNA

SEQ ID NO: 20202 - DNA, 1815 bp, synthetic construct; identical to SEQ ID NO: 20200
  misc_feature 1..1815: note = Description of Artificial Sequence: Synthetic coding sequence
  source 1..1815: mol_type = other DNA

SEQ ID NO: 20203 - DNA, 1815 bp, synthetic construct; identical to SEQ ID NO: 20200
  misc_feature 1..1815: note = Description of Artificial Sequence: Synthetic coding sequence
  source 1..1815: mol_type = other DNA

SEQ ID NO: 20204 - DNA, 117 bp, synthetic construct
  misc_feature 1..117: note = Description of Artificial Sequence: Synthetic coding sequence
  source 1..117: mol_type = other DNA
atgggcctgagcagccacctgcagagcagcaaggccggccccacccgcatcttcaccagcaacacccacagctctgtggtgctgcagggctttgaccagctgcggctggagggctag

SEQ ID NO: 20205 - DNA, 1815 bp, synthetic construct; identical to SEQ ID NO: 20200
  misc_feature 1..1815: note = Description of Artificial Sequence: Synthetic coding sequence
  source 1..1815: mol_type = other DNA

SEQ ID NO: 20206 - DNA, 1977 bp, synthetic construct
  misc_feature 1..1977: note = Description of Artificial Sequence: Synthetic coding sequence
  source 1..1977: mol_type = other DNA
atgatgagggtgcagaccctgcgggagaagtgggcctactggaggcggcggcagctgagcctgaagcaggccgacttcaaggacatcttcaagaagagcaccagcggcagcctggtggaggaggaggaccagcacatgaagctgagcctgggcggcagcgagatgggcctgagcagccacctgcagagcagcaaggccggccccacccgcatcttcaccagcaacacccacagctctgtggtgctgcagggctttgaccagctgcggctggagggcctgctgtgtgatgtgaccctgatgcctggggacacagatgatgccttccctgtgcaccgggtgatgatggccagcgccagtgactacttcaaggccatgttcaccggcggcatgaaggagcaggacctgatgtgcatcaagctgcatggagtgtccaaggtgggcctgaggaagatcatcgacttcatctacacagccaagctgagcctgaacatggacaacctgcaggacaccctggaggccgccagcttcctgcagatcctgcctgtgctggacttctgcaaggtgttcctgatcagcggcgtgaccctggacaactgtgtggaggtgggcagaattgccaacacctacaacctgacagaggtggacaagtatgtgaacagctttgtgctgaagaacttccctgccctgctgagcactggagagttcctgaagctgccctttgagcggctggcctttgtgctgagcagcaacagcctgaagcactgcacagagctggagctgttcaaggccacctgccgctggctgcggctggaggagcccaggatggactttgctgccaagctgatgaagaacatccgcttccccctgatgaccccccaggagctgatcaactacgtgcagacagtggacttcatgaggacagacaacacctgtgtgaacctgctgctggaggccagcaactaccagatgatgccctacatgcagcctgtgatgcagagcgacagaacagccatccgcagtgacaccacccacctggtgaccctgggcggcgtgctgcggcagcagctggtggtgtccaaggagctgaggatgtatgatgagaaggcccacgagtggaagagcctggcccccatggatgccccccgctaccagcacggcattgctgtgattggcaacttcctgtatgtggtgggcggccagagcaactatgacaccaagggcaagacagctgtggacacagtgttccgctttgacccccgctacaacaagtggatgcaggtggccagcctgaatgagaagaggaccttcttccacctgagcgccctgaagggctacctgtatgctgtgggcggcagaaatgctgctggggagctgcccaccgtggagtgctacaaccccaggaccaatgagtggacctacgtggccaagatgtctgagccccactacggccatgctggcaccgtgtatggaggagtgatgtacatcagcggcggcatcacccatgacaccttccagaaggagctgatgtgctttgatcctgacacagacaagtggatccagaaggcccccatgaccaccgtgcggggcctgcactgcatgtgcaccgtgggggagcggctgtatgtgattggaggcaaccacttccggggcaccagtgactatgatgatgtgctgagctgtgagtactacagccccatcctggaccagtggacccccatcgccgccatgctgcggggccagagtgatgtgggcgtggccgtgtttgagaacaagatctacgtggtgggcggctacagctggaacaaccgctgcatggtggagatcgtgcagaagtatgaccctgacaaggatgagtggcacaaggtgtttgacctgcctgagagcctgggcggcatccgggcctgcaccctgaccgtcttccccccagaggagaccacccccagccccagccgggagagccccctgagcgccccctag

SEQ ID NO: 20207 - DNA, 1920 bp, synthetic construct
  misc_feature 1..1920: note = Description of Artificial Sequence: Synthetic coding sequence
  source 1..1920: mol_type = other DNA
atggaccacctgcacagaggagagctggtggccgccatcctgaggaacagaagcctggtggaggaggaggaccagcacatgaagctgagcctgggcggcagcgagatgggcctgagcagccacctgcagagcagcaaggccggccccacccgcatcttcaccagcaacacccacagctctgtggtgctgcagggctttgaccagctgcggctggagggcctgctgtgtgatgtgaccctgatgcctggggacacagatgatgccttccctgtgcaccgggtgatgatggccagcgccagtgactacttcaaggccatgttcaccggcggcatgaaggagcaggacctgatgtgcatcaagctgcacggcgtgtccaaggtgggcctgaggaagatcatcgacttcatctacacagccaagctgagcctgaacatggacaacctgcaggacaccctggaggccgccagcttcctgcagatcctgcctgtgctggacttctgcaaggtgttcctgatctctggagtgaccctggacaactgtgtggaggtgggccgcatcgccaacacctacaacctgacagaggtggacaagtatgtgaacagctttgtgctgaagaacttccctgccctgctgagcactggagagttcctgaagctgccctttgagcggctggcctttgtgctgagcagcaacagcctgaagcactgcacagagctggagctgttcaaggccacctgccgctggctgcggctggaggagcccaggatggactttgctgccaagctgatgaagaacatccgcttccccctgatgaccccccaggagctgatcaactacgtgcagacagtggacttcatgaggacagacaacacctgtgtgaacctgctgctggaggccagcaactaccagatgatgccctacatgcagcctgtgatgcagagcgacagaacagccatccgcagtgacaccacccacctggtgaccctgggcggcgtgctgcggcagcagctggtggtgtccaaggagctgaggatgtatgatgagaaggcccacgagtggaagagcctggcccccatggatgccccccgctaccagcacggcattgctgtgattggcaacttcctgtatgtggtgggcggccagagcaactatgacaccaagggcaagacagctgtggacaccgtcttccgctttgacccccgctacaacaagtggatgcaggtggccagcctgaatgagaagaggaccttcttccacctgagcgccctgaagggctacctgtatgctgtgggcggcagaaatgctgctggggagctgcccaccgtggagtgctacaaccccaggaccaatgagtggacctacgtggccaagatgtctgagccccactacggccacgccggcaccgtgtatggaggagtgatgtacatcagcggcggcatcacccatgacaccttccagaaggagctgatgtgctttgatcctgacacagacaagtggatccagaaggcccccatgaccaccgtgcggggcctgcactgcatgtgcaccgtgggggagcggctgtatgtgattggaggcaaccacttccggggcaccagtgactatgatgatgtgctgagctgtgagtactacagccccatcctggaccagtggacccccatcgccgccatgctgcggggccagagtgatgtgggcgtggccgtgtttgagaacaagatctacgtggtgggcggctacagctggaacaaccgctgcatggtggagatcgtgcagaagtatgaccctgacaaggatgagtggcacaaggtgtttgacctgcctgagagcctgggcggcatccgggcctgcaccctgactgtgttccccccagaggagaccacccccagccccagccgggagagccccctgagcgccccctag

SEQ ID NO: 20208 - DNA, 1920 bp, synthetic construct; identical to SEQ ID NO: 20207
  misc_feature 1..1920: note = Description of Artificial Sequence: Synthetic coding sequence
  source 1..1920: mol_type = other DNA

SEQ ID NO: 20209 - DNA, 1842 bp, synthetic construct
  misc_feature 1..1842: note = Description of Artificial Sequence: Synthetic coding sequence
  source 1..1842: mol_type = other DNA
atgaagctgagcctgggcggcagcgagatgggcctgagcagccacctgcagagcagcaaggccggccccacccgcatcttcaccagcaacacccacagctctgtggtgctgcagggctttgaccagctgcggctggagggcctgctgtgtgatgtgaccctgatgcctggggacacagatgatgccttccctgtgcaccgggtgatgatggccagcgccagtgactacttcaaggccatgttcaccggcggcatgaaggagcaggacctgatgtgcatcaagctgcacggcgtgtccaaggtgggcctgaggaagatcatcgacttcatctacacagccaagctgagcctgaacatggacaacctgcaggacaccctggaggccgccagcttcctgcagatcctgcctgtgctggacttctgcaaggtgttcctgatctctggagtgaccctggacaactgtgtggaggtgggccgcatcgccaacacctacaacctgacagaggtggacaagtatgtgaacagctttgtgctgaagaacttccctgccctgctgagcactggagagttcctgaagctgccctttgagcggctggcctttgtgctgagcagcaacagcctgaagcactgcacagagctggagctgttcaaggccacctgccgctggctgcggctggaggagcccaggatggactttgctgccaagctgatgaagaacatccgcttccccctgatgaccccccaggagctgatcaactacgtgcagacagtggacttcatgaggacagacaacacctgtgtgaacctgctgctggaggccagcaactaccagatgatgccctacatgcagcctgtgatgcagagcgacagaacagccatccgcagtgacaccacccacctggtgaccctgggcggcgtgctgcggcagcagctggtggtgtccaaggagctgaggatgtatgatgagaaggcccacgagtggaagagcctggcccccatggatgccccccgctaccagcacggcattgctgtgattggcaacttcctgtatgtggtgggcggccagagcaactatgacaccaagggcaagacagctgtggacaccgtcttccgctttgacccccgctacaacaagtggatgcaggtggccagcctgaatgagaagaggaccttcttccacctgagcgccctgaagggctacctgtatgctgtgggcggcagaaatgctgctggggagctgcccaccgtggagtgctacaaccccaggaccaatgagtggacctacgtggccaagatgtctgagccccactacggccacgccggcaccgtgtatggaggagtgatgtacatcagcggcggcatcacccatgacaccttccagaaggagctgatgtgctttgatcctgacacagacaagtggatccagaaggcccccatgaccaccgtgcggggcctgcactgcatgtgcaccgtgggggagcggctgtatgtgattggaggcaaccacttccggggcaccagtgactatgatgatgtgctgagctgtgagtactacagccccatcctggaccagtggacccccatcgccgccatgctgcggggccagagtgatgtgggcgtggccgtgtttgagaacaagatctacgtggtgggcggctacagctggaacaaccgctgcatggtggagatcgtgcagaagtatgaccctgacaaggatgagtggcacaaggtgtttgacctgcctgagagcctgggcggcatccgggcctgcaccctgactgtgttccccccagaggagaccacccccagccccagccgggagagccccctgagcgccccctag

SEQ ID NO: 20210 - DNA, 1419 bp, synthetic construct
  misc_feature 1..1419: note = Description of Artificial Sequence: Synthetic coding sequence
  source 1..1419: mol_type = other DNA
atgaccacctgcagccggcagttcaccagcagcagctccatgaagggcagctgtggcatcggcggcggcatcggcggcggcagcagccgcatcagctctgtgctggccggcggcagctgccgggcccccagcacctacggcggcggcctgtctgtgagcagcagccgcttcagcagtggaggagcctgtggcctgggcggcggctatggaggcggcttcagcagcagcagcagcagctttggcagcggctttggaggcggctacggcggcggcctgggcgccggcctgggcggcggctttggaggcggctttgctggaggagatggcctgctggtgggcagcgagaaggtgaccatgcagaacctgaatgaccggctggccagctacctggacaaggtgcgggccctggaggaggccaatgctgacctggaggtgaagatccgggactggtaccagaggcagaggcctgctgagatcaaggactacagcccctacttcaagaccatcgaggacctgaggaacaagatcctgacagccaccgtggacaatgccaacgtgctgctgcagattgacaatgcccggctggccgcagatgacttccgcaccaagtatgaaacagagctgaacctgaggatgtctgtggaggccgacatcaatggcctgcggcgggtgctggatgagctgaccctggcccgggctgacctggagatgcagatcgagagcctgaaggaggagctggcctacctgaagaagaaccacgaggaggagatgaatgccctgcggggccaggtgggcggagatgtgaatgtggagatggatgctgcccctggggtggacctgagccgcatcctgaatgagatgagggaccagtatgagaagatggccgagaagaacaggaaggatgctgaggagtggttcttcaccaagacagaggagctgaaccgggaggtggccaccaacagcgagctggtgcagagcggcaagtctgagatcagcgagctgcggaggaccatgcagaacctggagattgagctgcagagccagctgtccatgaaggccagcctggagaacagcctggaggagaccaagggccgctactgcatgcagctggcccagatccaggagatgattggctctgtggaggagcagctggcccagctgcgctgtgagatggagcagcagaaccaggagtacaagatcctgctggatgtgaagacccggctggagcaggagatcgccacctaccgccgcctgctggagggggaggatgcccacctgagcagcagccagttcagcagcggcagccagagcagcagagatgtgaccagcagcagccggcagatccgcaccaaggtgatggatgtgcatgatggcaaggtggtgtccacccatgagcaggtgctgcggaccaagaactag

SEQ ID NO: 20211 - DNA, 1293 bp, synthetic construct
  misc_feature 1..1293: note = Description of Artificial Sequence: Synthetic coding sequence
  source 1..1293: mol_type = other DNA
atgtccttcaccaccaggagcaccttcagcaccaactaccgcagcctgggctctgtgcaggcccccagctatggagcccggcctgtgtcctctgctgcctctgtgtatgctggggccggcggcagcggcagccgcatctctgtgagccgcagcaccagcttccggggcggcatgggcagcggcggcctggccactggaattgctgggggcctggccggcatgggcggcatccagaatgagaaggagaccatgcagagcctgaatgaccggctggccagctacctggacagagtgcgcagcctggagacagagaacagaaggctggagagcaagatccgggagcacctggagaagaagggcccccaggtgcgggactggagccactacttcaagatcatcgaggacctgcgggcccagatctttgccaacacagtggacaatgcccgcatcgtgctgcagattgacaatgcccggctggccgcagatgacttccgggtgaagtatgaaacagagctggccatgaggcagagcgtggagaatgacatccacggcctgaggaaggtgattgatgacaccaacatcacccggctgcagctggagacagaaattgaggccctgaaggaggagctgctcttcatgaagaagaaccacgaggaggaggtgaagggcctgcaggcccagatcgccagcagcggcctgactgtggaggtggatgcccccaagagccaggacctggccaagatcatggctgacatccgggcccagtatgatgagctggccaggaagaaccgggaggagctggacaagtactggagccagcagatcgaggagagcaccaccgtggtgaccacccagagcgctgaggtgggcgctgctgagaccaccctgacagagctgcggaggacagtgcagagcctggagattgacctggacagcatgaggaacctgaaggccagcctggagaacagcctgcgggaggtggaggcccgctatgccctgcagatggagcagctgaatggcatcctgctgcacctggagagcgagctggcccagaccagggctgagggccagaggcaggcccaggagtatgaggccctgctgaacatcaaggtgaagctggaggccgagatcgccacctacagaaggctgctggaggatggagaggacttcaacctgggagatgccctggacagcagcaacagcatgcagaccatccagaagaccaccaccaggagaattgtggatggcaaggtggtgtctgagaccaatgacaccaaggtgctgcggcactag

SEQ ID NO: 20212 - DNA, 1293 bp, synthetic construct; identical to SEQ ID NO: 20211
  misc_feature 1..1293: note = Description of Artificial Sequence: Synthetic coding sequence
  source 1..1293: mol_type = other DNA

SEQ ID NO: 20213 - DNA, 1203 bp, synthetic construct
  misc_feature 1..1203: note = Description of Artificial Sequence: Synthetic coding sequence
  source 1..1203: mol_type = other DNA
atgaccagctacagctaccggcagagcagcgccaccagcagctttggaggcctgggcggcggctctgtgcgctttggacctggggtggccttccgggcccccagcatccatggaggcagcggcggccggggcgtgtctgtgtcctctgccaggtttgtgagcagcagcagcagcggggcctatggaggcggctatggaggagtgctgacagccagtgatggcctgctggccggaaatgagaagctgaccatgcagaacctgaatgaccggctggccagctacctggacaaggtgcgggccctggaggccgccaatggagagctggaggtgaagatccgggactggtaccagaagcagggccctggccccagccgggactacagccactactacaccaccatccaggacctgcgggacaagatcctgggcgccaccatcgagaacagcagaattgtgctgcagattgacaatgcccggctggccgcagatgacttccgcaccaagtttgaaacagagcaggccctgaggatgtctgtggaggccgacatcaatggcctgcggcgggtgctggatgagctgaccctggccaggacagacctggagatgcagatcgagggcctgaaggaggagctggcctacctgaagaagaaccacgaggaggagatcagcaccctgcggggccaggtgggcggccaggtgtctgtggaggtggacagcgcccctggaacagacctggccaagatcctgagtgacatgaggagccagtatgaggtgatggccgagcagaacaggaaggatgctgaggcctggttcaccagcaggacagaggagctgaaccgggaggtggccggccacacagagcagctgcagatgagccgctctgaggtgacagacctgcggaggaccctgcagggcctggagattgagctgcagagccagctgtccatgaaggccgccctggaggacaccctggccgagacagaggccaggtttggagcccagctggcccacatccaggccctgatctctggaattgaggcccagctgggagatgtgcgggctgacagcgagcggcagaaccaggagtaccagaggctgatggacatcaagagccggctggagcaggagatcgccacctaccgcagcctgctggagggccaggaggaccactacaacaacctgagcgccagcaaggtgctgtag

SEQ ID NO: 20214 - DNA, 591 bp, synthetic construct
  misc_feature 1..591: note = Description of Artificial Sequence: Synthetic coding sequence
  source 1..591: mol_type = other DNA
atgaccagctacagctaccggcagagcagcgccaccagcagctttggaggcctgggcggcggctctgtgcgctttggacctggggtggccttccgggcccccagcatccatggaggcagcggcggccggggcgtgtctgtgtcctctgccaggtttgtgagcagcagcagcagcggggcctatggaggcggctatggaggagtgctgacagccagtgatggcctgctggccggaaatgagaagctgaccatgcagaacctgaatgaccggctggccagctacctggacaaggtgcgggccctggaggccgccaatggagagctggagatcctgggcgccaccatcgagaacagccgcatcgtgctgcagattgacaatgcccggctggccgcagatgacttccgcaccaagtttgaaacagagcaggccctgaggatgtctgtggaggccgacatcaatggcctgcggcgggtgctggatgagctgaccctggccaggacagacctggagatgcagatcgagggcctgaaggaggagctggcctacctgaagaagaaccacgaggaggagatcagcaccctgcggggctag

SEQ ID NO: 20215 - DNA, 1773 bp, synthetic construct
  misc_feature 1..1773: note = Description of Artificial Sequence: Synthetic coding sequence
  source 1..1773: mol_type = other DNA
atgagccggcagagctctgtgtccttccgcagcggcggcagccgctccttcagcacagccagcgccatcacccccagcgtgtccaggaccagcttcacctctgtgagccgcagcggcggcggcggcggcggcggcttcggccgggtgtccctggccggggcctgtggggtgggcggctacggcagccgcagcctgtacaacctgggcggcagcaagaggatcagcatcagcaccagcggcggcagcttcaggaacagatttggagctggagctgggggcggctacggctttggaggaggagctggcagcggctttggatttggaggaggagctgggggcggcttcggcctgggcggcggggccggctttggaggcggctttggaggccctggcttccctgtgtgccccccaggcggcatccaggaggtgacagtgaaccagagcctgctgacccccctgaacctgcagattgaccccagcatccagagggtgaggacagaggagcgggagcagatcaagaccctgaacaacaagtttgccagcttcatcgacaaggtgcgcttcctggagcagcagaacaaggtgctggacaccaagtggaccctgctgcaggagcagggcaccaagacagtgcggcagaacctggagcccctgtttgagcagtacatcaacaacctgcggcggcagctggacagcatcgtgggggagcggggccgcctggacagcgagctgaggaacatgcaggacctggtggaggacttcaagaacaagtatgaagatgagatcaacaagaggaccacagcagaaaatgaatttgtgatgctgaagaaggatgtggatgctgcctacatgaacaaggtggagctggaggccaaggtggatgccctgatggatgagatcaacttcatgaagatgttctttgatgctgagctgagccagatgcagacccacgtgtctgacacctctgtggtgctgtccatggacaacaacagaaacctggacctggacagcatcatcgccgaggtgaaggcccagtatgaggagatcgccaacagaagcaggacagaagctgagagctggtaccagaccaagtatgaggagctgcagcagacagctggaagacatggagatgacctgaggaacaccaagcatgagatcagcgagatgaacaggatgatccagaggctgcgggcagaaattgacaacgtgaagaagcagtgtgccaacctgcagaatgccatcgcagatgctgagcagagaggagagctggccctgaaggatgccaggaacaagctggccgagctggaggaggccctgcagaaggccaagcaggacatggcccggctgctgcgggagtaccaggagctgatgaacaccaagctggccctggatgtggagatcgccacctacaggaagctgctggagggggaggagtgccgcctgagcggggagggcgtgggccctgtgaacatctctgtggtgaccagctctgtgagcagcggctacggcagcggcagcggctacggcggcggcctgggcggcggcctgggcggcggcctgggcggcggcctggccggcggcagcagcggcagctactacagcagcagcagtggaggagtgggcctgggcggcggcctgtctgtgggcggcagcggcttcagcgccagcagcggccggggcctgggcgtgggctttggaagtggcggcggcagcagcagctctgtgaagtttgtgtccaccaccagcagcagcaggaagagcttcaagagctag

SEQ ID NO: 20216 - DNA, 1668 bp, synthetic construct
  misc_feature 1..1668: note = Description of Artificial Sequence: Synthetic coding sequence
  source 1..1668: mol_type = other DNA
atgagccggcagagctctgtgtccttccgcagcggcggcagccgctccttcagcacagccagcgccatcacccccagcgtgtccaggaccagcttcacctctgtgagccgcagcggcggcggcggcggcggcggcttcggccgggtgtccctggccggggcctgtggggtgggcggctacggctttggaggaggagctggcagcggcttcggctttggaggaggagctgggggcggcttcggcctgggcggcggggccggctttggaggcggctttggaggccctggcttccctgtgtgccccccaggcggcatccaggaggtgacagtgaaccagagcctgctgacccccctgaacctgcagattgaccccagcatccagagggtgaggacagaggagcgggagcagatcaagaccctgaacaacaagtttgccagcttcatcgacaaggtgcgcttcctggagcagcagaacaaggtgctggacaccaagtggaccctgctgcaggagcagggcaccaagacagtgcggcagaacctggagcccctgtttgagcagtacatcaacaacctgcggcggcagctggacagcatcgtgggggagcggggccgcctggacagcgagctgaggaacatgcaggacctggtggaggacttcaagaacaagtatgaagatgagatcaacaagaggaccacagcagaaaatgaatttgtgatgctgaagaaggatgtggatgctgcctacatgaacaaggtggagctggaggccaaggtggatgccctgatggatgagatcaacttcatgaagatgttctttgatgctgagctgagccagatgcagacccacgtgtctgacacctctgtggtgctgtccatggacaacaacagaaacctggacctggacagcatcatcgccgaggtgaaggcccagtatgaggagatcgccaacagaagcaggacagaggccgagagctggtaccagaccaagtatgaggagctgcagcagacagctggaagacatggagatgacctgaggaacaccaagcatgagatcagcgagatgaacaggatgatccagaggctgcgggcagaaattgacaacgtgaagaagcagtgtgccaacctgcagaatgccatcgcagatgctgagcagagaggagagctggccctgaaggatgccaggaacaagctggccgagctggaggaggccctgcagaaggccaagcaggacatggcccggctgctgcgggagtaccaggagctgatgaacaccaagctggccctggatgtggagatcgccacctacaggaagctgctggagggggaggagtgccgcctgtctggagagggcgtgggccctgtgaacatctctgtggtgaccagctctgtgagcagcggctacggcagcggcagcggctatggaggcggcctgggcggcggcctgggcggcggcctgggcggcggcctggccggcggcagcagcggcagctactacagcagcagcagcggcggcgtgggcctgggcggcggcctgtctgtgggcggcagcggcttcagcgccagcagcggccggggcctgggcgtgggcttcggcagcggcggcggcagcagcagctctgtgaagtttgtgtccaccaccagcagcagcaggaagagcttcaagagctag

SEQ ID NO: 20217 - DNA, 399 bp, synthetic construct
  misc_feature 1..399: note = Description of Artificial Sequence: Synthetic coding sequence
  source 1..399: mol_type = other DNA
atgagccggcagagctctgtgtccttccgcagcggcggcagccgctccttcagcacagccagcgccatcacccccagcgtgtccaggaccagcttcacctctgtgagccgcagcggcggcggcggcggcggcggcttcggccgggtgtccctggccggggcctgtggggtgggcggctacggcagccgcagcctgtacaacctgggcggcagcaagaggatcagcatcagcaccagcggcggcagcttcaggaacagatttggagctggagctgggggcggctacggctttggaggaggagctggcagcggctttggatttggaggaggagctgggggcggcttcggcctgggcggcggggccggctttggaggcggctttggaggccctggcttctag

SEQ ID NO: 20218 - DNA, 1410 bp, synthetic construct
  misc_feature 1..1410: note = Description of Artificial Sequence: Synthetic coding sequence
  source 1..1410: mol_type = other DNA
atgagcatccacttcagcagccctgtgttcaccagccgctctgctgccttcagcggccgcggggcccaggtgcggctgagcagcgcccggcctgggggcctgggcagcagcagcctgtatggcctgggcgccagccggccccgggtggccgtgcgcagcgcctatggaggccctgtgggcgccggcatccgggaggtgaccatcaaccagagcctgctggcccccctgcggctggatgctgaccccagcctgcagagggtgcggcaggaggagagcgagcagatcaagaccctgaacaacaagtttgccagcttcatcgacaaggtgcgcttcctggagcagcagaacaagctgctggagaccaagtggaccctgctgcaggagcagaagagcgccaagagcagccggctgcctgacatctttgaggcccagattgctggcctgcggggccagctggaggccctgcaggtggatggcggccgcctggaggccgagctgcgctccatgcaggatgtggtggaggacttcaagaacaagtatgaagatgagatcaaccacaggacagctgctgaaaatgaatttgtggtgctgaagaaggatgtggatgctgcctacatgagcaaggtggagctggaggccaaggtggatgccctgaatgatgagatcaacttcctgcggaccctgaatgaaacagagctgacagagctgcagagccagatcagtgacacctctgtggtgctgtccatggacaacagccgcagcctggacctggatggcatcatcgccgaggtgaaggcccagtatgaggagatggccaagtgcagcagagctgaggccgaggcctggtaccagaccaagtttgagaccctgcaggcccaggccggcaagcatggagatgacctgaggaacaccagaaatgagatcagcgagatgaacagagccatccagaggctgcaggccgagattgacaacatcaagaaccagagggccaagctggaggccgccatcgccgaggccgaggagcggggggagctggccctgaaggatgcccgggccaagcaggaggagctggaggccgccctgcagaggggcaagcaggacatggcccggcagctgcgggagtaccaggagctgatgtctgtgaagctggccctggacattgaaattgccacctacaggaagctgctggagggggaggagagccggctggccggagatggagtgggcgctgtgaacatctctgtgatgaacagcactggaggcagcagcagcggcggcggcatcggcctgaccctgggcggcaccatgggcagcaatgccctgtccttcagcagcagcgctggccctggcctgctgaaggcctacagcatcagaacagccagcgccagccgccgcagcgcccgggactag

SEQ ID NO: 20219 - DNA, 1338 bp, synthetic construct
  misc_feature 1..1338: note = Description of Artificial Sequence: Synthetic coding sequence
  source 1..1338: mol_type = other DNA
atgagcatccacttcagcagccctgtgttcaccagccgctctgctgccttcagcggccgcggggcccaggtgcggctgagcagcgcccggcctgggggcctgggcagcagcagcctgtatggcctgggcgccagccggccccgggtggcccccctgcggctggatgctgaccccagcctgcagagggtgcggcaggaggagagcgagcagatcaagaccctgaacaacaagtttgccagcttcatcgacaaggtgcgcttcctggagcagcagaacaagctgctggagaccaagtggaccctgctgcaggagcagaagagcgccaagagcagccggctgcctgacatctttgaggcccagattgctggcctgcggggccagctggaggccctgcaggtggatggcggccgcctggaggccgagctgcgctccatgcaggatgtggtggaggacttcaagaacagatatgaagatgagatcaaccacaggacagctgctgaaaatgaatttgtggtgctgaagaaggatgtggatgctgcctacatgagcaaggtggagctggaggccaaggtggatgccctgaatgatgagatcaacttcctgcggaccctgaatgaaacagagctgacagagctgcagagccagatcagtgacacctctgtggtgctgtccatggacaacagccgcagcctggacctggatggcatcatcgccgaggtgaaggcccagtatgaggagatggccaagtgcagcagagctgaggccgaggcctggtaccagaccaagtttgagaccctgcaggcccaggccggcaagcatggagatgacctgaggaacaccagaaatgagatcagcgagatgaacagagccatccagaggctgcaggccgagattgacaacatcaagaaccagagggccaagctggaggccgccatcgccgaggccgaggagcggggggagctggccctgaaggatgcccgggccaagcaggaggagctggaggccgccctgcagaggggcaagcaggacatggcccggcagctgcgggagtaccaggagctgatgtctgtgaagctggccctggacattgaaattgccacctacaggaagctgctggagggggaggagagccggctggccggagatggagtgggcgctgtgaacatctctgtgatgaacagcactggaggcagcagcagcggcggcggcatcggcctgaccctgggcggcaccatgggcagcaatgccctgtccttcagcagcagcgctggccctggcctgctgaaggcctacagcatcagaacagccagcgccagccgccgcagcgcccgggactag

SEQ ID NO: 20220 - DNA, 1212 bp, synthetic construct
  misc_feature 1..1212: note = Description of Artificial Sequence: Synthetic coding sequence
  source 1..1212: mol_type = other DNA
atgagcatccacttcagcagccctgtgttcaccagccgctctgctgccttcagcggccgcggggcccaggtgcggctgagcagcgcccggcctgggggcctgggcagcagcagcctgtatggcctgggcgccagccggccccgggtggccgtgcgcagcgcctatggaggccctgtgggcgccggcatccgggaggtgaccatcaaccagagcctgctggcccccctgcggctggatgctgaccccagcctgcagagggtgcggcaggaggagagcgagcagatcaagaccctgaacaacaagtttgccagcttcatcgacaaggtgcgcttcctggagcagcagaacaagctgctggagaccaagtggaccctgctgcaggagcagaagagcgccaagagcagccggctgcctgacatctttgaggcccagattgctggcctgcggggccagctggaggccctgcaggtggatggcggccgcctggaggccgagctgcgctccatgcaggatgtggtggaggacttcaagaacaagtatgaagatgagatcaaccacaggacagctgctgaaaatgaatttgtggtgctgaagaaggatgtggatgctgcctacatgagcaaggtggagctggaggccaaggtggatgccctgaatgatgagatcaacttcctgcggaccctgaatgaaacagagatccacgtgctgcagagccacatcagtgacacctctgtggtggtgaagctggacaacagccaggacctgaacatggactgcatcatcgccgagatcaaggcccagtatgatgacatcgtgacctgctcctgggccaaggccgagagctggtaccacggctgcctggagatgaaggccaccgtcatctggcacggggagaccgtgggctgcaccaaggaggagatcaaggagctgacccacatgatccagaggctgatggccaaggtggagaatgccaagtgccagaacagcaagctggaggtggaggtgacccagagcgagcagcagggcgaggtggccctgagtgacaaccgctgcaagctggtggagctggagggcaccatgcagaaggcccggcagtaccaggaggtgatgaacagcaagctgggcctgaatgtgaaggccgccagcagctgccacctgctggatggagaggagcagaggctgtgtgatggcatctctgctgtgaacatctag

SEQ ID NO: 20221 - DNA, 1452 bp, synthetic construct
  misc_feature 1..1452: note = Description of Artificial Sequence: Synthetic coding sequence
  source 1..1452: mol_type = other DNA
atgagcatccgggtgacccagaagagctacaaggtgtccaccagcggcccccgggccttcagcagccgcagctacaccagcggccctggcagccgcatcagcagcagcagcttcagccgggtgggcagcagcaacttccggggcggcctgggcggcggctacggcggggccagcggcatgggcggcatcacagctgtgacagtgaaccagagcctgctgagccccctggtgctggaggtggaccccaacatccaggccgtgaggacccaggagaaggagcagatcaagaccctgaacaacaagtttgccagcttcatcgacaaggtgcgcttcctggagcagcagaacaagatgctggagaccaagtggagcctgctgcagcagcagaagacagcccggagcaacatggacaacatgtttgagagctacatcaacaacctgcggcggcagctggagaccctgggccaggagaagctgaagctggaggccgagctgggcaacatgcagggcctggtggaggacttcaagaacaagtatgaagatgagatcaacaagaggacagagatggagaatgaatttgtgctgatcaagaaggatgtggatgaggcctacatgaacaaggtggagctggagagccggctggagggcctgacagatgagatcaacttcctgcggcagctgtatgaggaggagatccgggagctgcagagccagatcagtgacacctctgtggtgctgtccatggacaacagccgcagcctggacatggacagcatcatcgccgaggtgaaggcccagtatgaggacatcgccaacagaagcagagctgaggccgagagcatgtaccagatcaagtatgaggagctgcagagcctggccggcaagcatggagatgacctgcggaggaccaagacagagatcagcgagatgaacagaaacatcagccggctgcaggccgagattgagggcctgaagggccagagggccagcctggaggccgccatcgcagatgctgagcagagaggagagctggccatcaaggatgccaatgccaagctgtctgagctggaggccgccctgcagagggccaagcaggacatggcccggcagctgcgggagtaccaggagctgatgaatgtgaagctggccctggacatcgagatcgccacctacaggaagctgctggagggggaggagagccggctggagagcggcatgcagaacatgagcatccacaccaagaccaccagcggctacgccggcggcctgagcagcgcctatggaggcctgaccagccctggcctgagctacagcctgggcagcagctttggaagtggagctggcagcagcagcttcagcaggaccagcagcagcagagctgtggtggtgaagaagattgagaccagagatggcaagctggtgtctgagagcagtgatgtgctgcccaagtag

SEQ ID NO: 20222 - DNA, 822 bp, synthetic construct
  misc_feature 1..822: note = Description of Artificial Sequence: Synthetic coding sequence
  source 1..822: mol_type = other DNA
atgagcatccgggtgacccagaagagctacaaggtgtccaccagcggcccccgggccttcagcagccgcagctacaccagcggccctggcagccgcatcagcagcagcagcttcagccgggtgggcagcagcaacttccggggcggcctgggcggcggctacggcggggccagcggcatgggcggcatcacagctgtgacagtgaaccagagcctgctgagccccctggtgctggaggtggaccccaacatccaggccgtgaggacccaggagaaggagcagatcaagaccctgaacaacaagtttgccagcttcatcgacaaggtgcgcttcctggagcagcagaacaagatgctggagaccaagtggagcctgctgcagcagcagaagacagcccggagcaacatggacaacatgtttgagagctacatcaacaacctgcggcggcagctggagaccctgggccaggagaagctgaagctggaggccgagctgggcaacatgcagggcctggtggaggacttcaagaacaagtatgaagatgagatcaacaagaggacagagatggagaatgaatttgtgctgatcaagaaggatgtggatgaggcctacatgaacaaggtggagctggagagccggctggagggcctgacagatgagatcaacttcctgcggcagctgtatgaggaggagatccgggagctgcagagccagatcagtgacacctctgtggtgctgtccatggacaacagccgcagcctggacatggacagcatcatcgccgaggtgaaggcccagtatgaggacatcgccaacagatag

SEQ ID NO: 20223 - DNA, 1452 bp, synthetic construct; identical to SEQ ID NO: 20221
  misc_feature 1..1452: note = Description of Artificial Sequence: Synthetic coding sequence
  source 1..1452: mol_type = other DNA

SEQ ID NO: 20224 - DNA, 534 bp, synthetic construct
  misc_feature 1..534: note = Description of Artificial Sequence: Synthetic coding sequence
  source 1..534: mol_type = other DNA
atgagcatccgggtgacccagaagagctacaaggtgtccaccagcggcccccgggccttcagcagccgcagctacaccagcggccctggcagccgcatcagcagcagcagcttcagccgggtgggcagcagcaacttccggggcggcctgggcggcggctacggcggggccagcggcatgggcggcatcacagctgtgacagtgaaccagagcctgctgagccccctggtgctggaggtggaccccaacatccaggccgtgaggacccaggagaaggagcagatcaagaccctgaacaacaagtttgccagcttcatcgacaaggtgcgcttcctggagcagcagaacaagatgctggagaccaagtggagcctgctgcagcagcagaagacagcccggagcaacatggacaacatgtttgagagctacatcaacaacctgcggcggcagctggagaccctgggccaggagaagctgaagctggaggccgagctgggcaacatgcagggcctggtggaggacttcaagaactag

SEQ ID NO: 20225 - DNA, 1536 bp, synthetic construct
  misc_feature 1..1536: note = Description of Artificial Sequence: Synthetic coding sequence
  source 1..1536: mol_type = other DNA
atgaatggagtgtcctggagccaggacctgcaggagggcatcagcgcctggtttggccccccagccagcaccccagccagcaccatgagcatccgggtgacccagaagagctacaaggtgtccaccagcggcccccgggccttcagcagccgcagctacaccagcggccctggcagccgcatcagcagcagcagcttcagccgggtgggcagcagcaacttccggggcggcctgggcggcggctacggcggggccagcggcatgggcggcatcacagctgtgacagtgaaccagagcctgctgagccccctggtgctggaggtggaccccaacatccaggccgtgaggacccaggagaaggagcagatcaagaccctgaacaacaagtttgccagcttcatcgacaaggtgcgcttcctggagcagcagaacaagatgctggagaccaagtggagcctgctgcagcagcagaagacagcccggagcaacatggacaacatgtttgagagctacatcaacaacctgcggcggcagctggagaccctgggccaggagaagctgaagctggaggccgagctgggcaacatgcagggcctggtggaggacttcaagaacaagtatgaagatgagatcaacaagaggacagagatggagaatgaatttgtgctgatcaagaaggatgtggatgaggcctacatgaacaaggtggagctggagagccggctggagggcctgacagatgagatcaacttcctgcggcagctgtatgaggaggagatccgggagctgcagagccagatcagtgacacctctgtggtgctgtccatggacaacagccgcagcctggacatggacagcatcatcgccgaggtgaaggcccagtatgaggacatcgccaacagaagcagagctgaggccgagagcatgtaccagatcaagtatgaggagctgcagagcctggccggcaagcatggagatgacctgcggaggaccaagacagagatcagcgagatgaacagaaacatcagccggctgcaggccgagattgagggcctgaagggccagagggccagcctggaggccgccatcgcagatgctgagcagagaggagagctggccatcaaggatgccaatgccaagctgtctgagctggaggccgccctgcagagggccaagcaggacatggcccggcagctgcgggagtaccaggagctgatgaatgtgaagctggccctggacatcgagatcgccacctacaggaagctgctggagggggaggagagccggctggagagcggcatgcagaacatgagcatccacaccaagaccaccagcggctacgccggcggcctgagcagcgcctatggaggcctgaccagccctggcctgagctacagcctgggcagcagctttggaagtggagctggcagcagcagcttcagcaggaccagcagcagcagagctgtggtggtgaagaagattgagaccagagatggcaagctggtgtctgagagcagtgatgtgctgcccaagtag

SEQ ID NO: 20226 - DNA, 1452 bp, synthetic construct; identical to SEQ ID NO: 20221
  misc_feature 1..1452: note = Description of Artificial Sequence: Synthetic coding sequence
  source 1..1452: mol_type = other DNA

SEQ ID NO: 20227 - DNA, 4071 bp, synthetic construct
  misc_feature 1..4071: note = Description of Artificial Sequence: Synthetic coding sequence
  source 1..4071: mol_type = other DNA
atgcagagcaaggtgctgctggccgtggccctgtggctgtgtgtggagaccagggctgcctctgtgggcctgcccagcgtgtccctggacctgccccggctgagcatccagaaggacatcctgaccatcaaggccaacaccaccctgcagatcacctgccggggccagagggacctggactggctgtggcccaacaaccagagcggcagcgagcagagggtggaggtgacagagtgcagtgatggcctcttctgcaagaccctgaccatccccaaggtgattggaaatgacaccggggcctacaagtgcttctaccgggagacagacctggccagcgtcatctacgtgtatgtgcaggactaccgcagccccttcatcgcctctgtgtctgaccagcacggcgtggtgtacatcacagagaacaagaacaagacagtggtgatcccctgcctgggcagcatcagcaacctgaatgtgtccctgtgtgcccgctacccagagaagagatttgtgcctgatggcaaccgcatctcctgggacagcaagaagggcttcaccatccccagctacatgatctcctatgccggcatggtgttctgtgaggccaagatcaatgatgagagctaccagagcatcatgtacatcgtggtggtggtgggctaccgcatctatgatgtggtgctgagccccagccacggcatcgagctgtctgtgggggagaagctggtgctgaactgcacagccaggacagagctgaatgtgggcatcgacttcaactgggagtaccccagcagcaagcaccagcacaagaagctggtgaacagagacctgaagacccagagcggcagcgagatgaagaagttcctgagcaccctgaccattgatggagtgaccaggagtgaccagggcctgtacacctgtgccgccagcagcggcctgatgaccaagaagaacagcacctttgtgcgggtgcatgagaagccctttgtggccttcggcagcggcatggagagcctggtggaggccaccgtgggggagcgggtgcgcatcccagccaagtacctgggctacccacctcctgagatcaagtggtacaagaatggcatccccctggagagcaaccacaccatcaaggccggccacgtgctgaccatcatggaggtgtctgagcgggacaccggcaactacaccgtcatcctgaccaaccccatcagcaaggagaagcagagccacgtggtgtccctggtggtgtatgtgcccccccagattggagagaagagcctcatcagccctgtggacagctaccagtatggcaccacccagaccctgacctgcaccgtgtatgccatccccccaccccaccacatccactggtactggcagctggaggaggagtgtgccaatgagcccagccaggccgtgtctgtgaccaacccctacccctgtgaggagtggaggtctgtggaggacttccagggcggcaacaagattgaggtgaacaagaaccagtttgccctgattgagggcaagaacaagacagtgtccaccctggtgatccaggccgccaacgtgtctgccctgtacaagtgtgaggccgtgaacaaggtgggccgcggggagagggtcatctccttccacgtgacccggggccctgagatcaccctgcagcctgacatgcagcccacagagcaggagagcgtgtccctgtggtgcacagctgacaggagcacctttgagaacctgacctggtacaagctgggcccccagcccctgcccatccacgtgggggagctgcccacccctgtgtgcaagaacctggacaccctgtggaagctgaatgccaccatgttcagcaacagcaccaatgacatcctgatcatggagctgaagaatgccagcctgcaggaccagggcgactatgtgtgcctggcccaggacaggaagaccaagaagaggcactgtgtggtgcggcagctgactgtgctggagcgggtggcccccaccatcaccggcaacctggagaaccagaccaccagcatcggggagagcattgaggtgtcctgcacagccagcggcaaccccccaccccagatcatgtggttcaaggacaatgagaccctggtggaggacagcggcatcgtgctgaaggatggcaacagaaacctgaccatcagaagagtgaggaaggaggatgagggcctgtacacctgccaggcctgcagcgtgctgggctgtgccaaggtggaggccttcttcatcatcgagggcgcccaggagaagaccaacctggagatcatcatcctggtgggcacagctgtgattgccatgttcttctggctgctgctggtgatcatcctgaggacagtgaagagggccaatggaggagagctgaagacaggctacctgagcatcgtgatggaccctgatgagctgcccctggatgagcactgtgagcggctgccctatgatgccagcaagtgggagttcccccgggaccggctgaagctgggcaagcccctgggccgcggggccttcggccaggtgattgaagcagatgccttcggcatcgacaagacagccacctgcaggacagtggccgtgaagatgctgaaggagggcgccacccacagcgagcaccgggccctgatgtctgagctgaagatcctgatccacatcggccaccacctgaatgtggtgaacctgctgggcgcctgcaccaagccaggcggccccctgatggtgattgtggagttctgcaagtttggaaacctgagcacctacctgcggagcaagagaaatgaatttgtgccctacaagaccaagggggcccgcttccggcagggcaaggactatgtgggcgccatccctgtggacctgaagaggcggctggacagcatcaccagcagccagagcagcgccagcagcggctttgtggaggagaagagcctgagtgatgtggaggaggaggaggccccagaagatctctacaaggacttcctgaccctggagcacctgatctgctacagcttccaggtggccaagggcatggagttcctggccagcaggaagtgcatccaccgggacctggccgccaggaacatcctgctgtctgagaagaatgtggtgaagatctgtgactttggcctggcccgggacatctacaaggaccctgactatgtgaggaaaggagatgcccggctgcccctgaagtggatggcccctgagaccatctttgacagagtgtacaccatccagagtgatgtgtggagctttggagtgctgctgtgggagatcttcagcctgggcgccagcccctacccaggagtgaagattgatgaggagttctgccggcggctgaaggagggcaccaggatgagggccccagactacaccaccccagagatgtaccagaccatgctggactgctggcacggggagcccagccagaggcccaccttcagcgagctggtggagcacctgggcaacctgctgcaggccaatgcccagcaggacggcaaggactacatcgtgctgcccatcagcgagaccctgtccatggaggaggacagcggcctgagcctgcccaccagccctgtgtcctgcatggaggaggaggaggtgtgtgaccccaagttccactatgacaacacagctggcatcagccagtacctgcagaacagcaagaggaagagcaggcctgtgtctgtgaagacctttgaggacatccccctggaggagcctgaggtgaaggtgatcccagatgacaaccagacagacagcggcatggtgctggccagcgaggagctgaagaccctggaggacaggaccaagctgagccccagctttggaggcatggtgcccagcaagagccgggagagcgtggccagcgagggcagcaaccagaccagcggctaccagagcggctaccacagtgatgacacagacaccaccgtgtacagcagcgaggaggccgagctgctgaagctgattgaaattggagtgcagacaggcagcacagcccagatcctgcagccagattctggcaccaccctgagcagcccccctgtgtag

SEQ ID NO: 20228 - DNA, 6630 bp, synthetic construct
  misc_feature 1..6630: note = Description of Artificial Sequence: Synthetic coding sequence
  source 1..6630: mol_type = other DNA
atgtggaatgacatcgagctgctgaccaatgatgacaccggcagcggctacctgtctgtgggcagcaggaaggagcacggcacagccctgtaccaggtggacctgctggtgaagatcagcagcgagaaggccagcctgaaccccaagatccaggcctgcagcctgagtgatggcttcatcatcgtggccgaccagagcgtcatcctgctggacagcatctgccgcagcctgcagctgcacctggtgtttgacacagaggtggatgtggtgggcctgtgccaggagggcaagttcctgctggtgggggagaggagcggcaacctgcacctgatccacgtgaccagcaagcagaccctgctgaccaatgcctttgtgcagaaggccaatgatgaaaatagaaggacctaccagaacctggtgattgagaaggatggcagcaatgaaggcacctactacatgctgctgctgacctacagcggcttcttctgcatcaccaacctgcagctgctgaagatccagcaggccattgaaaatgtggacttcagcacagccaagaagctgcagggccagatcaagagcagcttcatcagcacagagaactaccacaccctgggctgcctgagcctggtggccggggacctggccagcgaggtgcctgtgatcatcggcggcactggaaactgtgccttcagcaagtgggagccagacagcagcaagaagggcatgacagtgaagaacctgattgatgctgagatcatcaagggggccaagaagttccagctgattgacaacctgctgtttgtgctggacacagacaacgtgctgagcctgtgggacatctacaccctgacccctgtgtggaactggcccagcctgcacgtggaggagttcctgctgaccacagaagctgacagccccagctctgtgacctggcagggcatcaccaacctgaagctgattgccctgacagccagcgccaacaagaagatgaagaacctgatggtgtacagcctgcccaccatggagatcctgtacagcctggaggtgtcctctgtgagcagcctggtgcagacaggcatcagcacagacaccatctacctgctggagggcgtgtgcaagaatgaccccaagctgtctgaggacagcgtgtctgtgctggtgctgcgctgcctgacagaggccctgcctgaaaatcggctgagccggctgctgcacaagcacagatttgctgaggccgagagctttgccatccagtttggcctggatgtggagctggtgtacaaggtgaagagcaaccacatcctggagaagctggccctgagctctgtggatgccagcgagcagacagagtggcagcagctggtggatgatgccaaggagaacctgcacaagatccaggatgatgaatttgtggtgaactactgcctgaaggcccagtggatcacctatgagaccacccaggagatgctgaactatgccaagacccggctgctgaagaaggaggacaagacagccctgatctacagtgatggcctgaaggaggtgctgcgggcccacgccaagctgaccaccttctacggggcctttggacctgagaagttcagcggcagctcctggattgagttcctgaacaatgaagatgacctgaaggacatcttcctgcagctgaaggagggcaacctggtgtgtgcccagtacctgtggctgcggcaccgggccaactttgagagcagatttgatgtgaagatgctggagagcctgctgaacagcatgtctgcctctgtgtccctgcagaagctgtgcccctggttcaagaatgatgtgatcccctttgtgagaagaacagtgcctgagggccagatcatcctggccaagtggctggagcaggccgccaggaacctggagctgacagacaaggccaactggccagaaaatggcctgcagctggccgagatcttcttcaccgctgagaagacagatgagctgggcctggccagctcctggcactggatcagcctgaaggactaccagaacacagaggaggtgtgccagctgcggaccctggtgaacaacctgcgggagctgatcaccctgcacaggaagtacaactgcaagctggccctgagtgactttgagaaggagaacaccaccaccatcgtgttcaggatgtttgacaaggtgctggcccctgagctgatccccagcatcctggagaagttcatccgggtgtacatgagggagcatgacctgcaggaggaggagctgctgctgctgtacatcgaggacctgctgaaccgctgcagcagcaagagcaccagcctgtttgaaacagcctgggaggccaaggccatggctgtgattgcctgcctgagtgacacagacctgatctttgatgctgtgctgaagatcatgtatgctgctgtggtgccctggagcgctgctgtggagcagctggtgaagcagcacctggagatggaccaccccaaggtgaagctgctgcaggagagctacaagctgatggagatgaagaagctgctgcggggctacggcatccgggaggtgaacctgctgaacaaggagatcatgagggtggtgcgctacatcctgaagcaggatgtgcccagcagcctggaggatgccctgaaggtggcccaggccttcatgctgagtgatgatgagatctacagcctgcgcatcatcgacctgattgaccgggagcagggcgaggactgcctgctgctgctgaagagcctgcccccagctgaggccgagaagacagctgagagggtcatcatctgggcccggctggccctgcaggaggagccagaccacagcaaggagggcaaggcctggaggatgtctgtggccaagacctctgtggacatcctgaagatcctgtgtgacatccagaaggacaacctgcagaagaaggatgaatgtgaggagatgctgaagctgttcaaggaggtggccagcctgcaggagaactttgaggtgttcctgagctttgaggactacagcaacagcagcctggtggccgacctgcgggagcagcacatcaaggcccacgaggtggcccaggccaagcacaagccaggcagcaccccagagcccatcgctgctgaggtgcgcagccccagcatggagagcaagctgcaccggcaggccctggccctgcagatgagcaagcaggagctggaggccgagctgaccctgcgggccctgaaggatggcaacatcaagacagccctgaagaagtgcagcgacctcttcaagtaccactgcaatgctgacaccgggaagctgctcttcctgacctgccagaagctgtgccagatgctggccgacaacgtgcctgtgacagtgcctgtgggcctgaacctgcccagcatgattcatgacctggccagccaggccgccaccatctgcagcccagacttcctgctggatgccctggagctgtgcaagcacaccctgatggctgtggagctgagccggcagtgccagatggatgactgtggcatcctgatgaaggccagctttggcacccacaaggacccctatgaggagtggagctacagcgacttcttctctgaagatggcatcgtgctggagagccagatggtgctgcctgtgatctatgagctgatcagcagcctggtgcccctggccgagagcaagcgctaccccctggagagcaccagcctgccctactgcagcctgaatgaaggagatggcctggtgctgcccgtcatcaacagcatcagcgccctgctgcagaacctgcaggagagcagccagtgggagctggccctgcgctttgtggtgggcagctttggcacctgcctgcagcacagcgtgagcaacttcatgaatgccaccctgtctgagaagctgtttggagagaccaccctggtgaagagccgccacgtggtgatggagctgaaggagaaggctgtgatcttcatcagagaaaatgccaccaccctgctgcacaaggtgttcaactgccgcctggtggacctggacctggccctgggctactgcaccctgctgccccagaaggatgtgtttgagaacctgtggaagctgattgacaaggcctggcagaactatgacaagatcctggccatcagcctggtgggcagcgagctggccagcctgtaccaggagattgagatgggcctgaagttccgggagctgagcacagatgcccagtggggcatccggctgggcaagctgggcatctccttccagcccgtcttccggcagcacttcctgaccaagaaggacctgatcaaggccctggtggagaacatcgacatggacaccagcctcatcctggagtactgcagcaccttccagctggactgtgatgctgtgctgcagctgttcatcgagaccctgctgcacaacaccaatgccggccagggccagggagatgcctccatggacagcgccaagagaagacaccccaagctgctggccaaggccctggagatggtgcccctgctgaccagcaccaaggacctggtgatcagcctgagcggcatcctgcacaagctggacccctatgactatgagatgattgaggtggtgctgaaggtgattgagcgggcagatgagaagatcaccaacatcaacatcaaccaggccctgagcatcctgaagcacctgaagagctaccgccgcatcagcccccctgtggacctggagtaccagtacatgctggagcacgtgatcaccctgcccagcgctgcccagacccggctgcccttccacctgatcttcttcggcacagcccagaacttctggaagatcctgagcacagagctgtctgaggagagcttccccaccctgctgctgatcagcaagctgatgaagttcagcctggacaccctgtatgtgtccacagccaagcacgtgtttgagaagaagctgaagcccaagctgctgaagctgacccaggccaagagcagcaccctcatcaacaaggagatcaccaagatcacccagaccatcgagagctgcctgctgagcatcgtgaaccctgagtgggccgtggccatcgccatcagcctggcccaggacatccctgagggcagcttcaagatcagcgccctgaagttctgcctgtacctggccgagcgctggctgcagaacatccccagccaggatgagaagcgggagaaggccgaggccctgctgaagaagctgcacatccagtaccgccgcagcggcacagaggccgtgctgattgcccacaagctgaacacagaggagtacctgcgggtcatcggcaagccagcccacctgattgtgtccctgtatgagcaccccagcatcaaccagaggatccagaacagcagcggcacagactacccagacatccatgctgctgccaaggagattgctgaggtgaatgagatcaacctggagaaggtgtgggacatgctgctggagaagtggctgtgccccagcaccaagccaggagagaagcccagcgagctgtttgagctgcaggaggatgaggccctgcggcgggtgcagtacctgctgctgagccggcccatcgactacagcagcaggatgctgtttgtgtttgccaccagcaccaccaccaccctgggcatgcaccagctgacctttgcccacaggacccgggccctgcagtgcctcttctacctggccgacaaggagaccatcgagagcctcttcaagaagcccatcgaggaggtgaagagctacctgcgctgcatcaccttcctggccagctttgagaccctgaacatccccatcacctatgagctgttctgcagcagccccaaggagggcatgatcaagggcctgtggaagaaccacagccatgagagcatggctgtgcggctggtgacagagctgtgcctggagtacaagatctatgacctgcagctgtggaatggcctgctgcagaagctgctgggcttcaacatgatcccctacctgaggaaggtgctgaaggccatcagcagcatccacagcctgtggcaggtgccctacttcagcaaggcctggcagagggtcatccagatccccctgctgagcgccagctgccccctgagcccagaccagctgagtgactgcagcgagagcctgattgctgtgctggagtgccctgtgtctggggacctggacctgattggagtggcccggcagtacatccagctggagctgcctgcctttgccctggcctgcctgatgctgatgccccacagcgagaagaggcaccagcagatcaagaacttcctgggcagctgtgacccccaggtgatcctgaagcagctggaggagcacatgaacacaggccagctggccggcttcagccaccagatccgcagcctcatcctgaacaacatcatcaacaagaaggagtttggcatcctggccaagaccaagtacttccagatgctgaagatgcacgccatgaacaccaacaacatcacagagctggtgaactacctggccaatgacctgagcctggatgaggcctctgtgctgatcacagagtacagcaagcactgcggcaagcctgtgcccccagacacagccccctgtgagatcctgaagatgttcctgagcggcctgtcctag

SEQ ID NO: 20229 - DNA, 1332 bp, synthetic construct
  misc_feature 1..1332: note = Description of Artificial Sequence: Synthetic coding sequence
  source 1..1332: mol_type = other DNA
atgctggagcacgtgatcaccctgcccagcgctgcccagacccggctgcccttccacctgatcttctttggaacagcccagaacttctggaagatcctgagcacagagctgtctgaggagagcttccccaccctgctgctgatcagcaagctgatgaagttcagcctggacaccctgtatgtgtccacagccaagcacgtgtttgagaagaagctgaagcccaagctgctgaagctgacccaggccaagagcagcaccctcatcaacaaggagatcaccaagatcacccagaccatcgagagctgcctgctgagcatcgtgaaccctgagtgggccgtggccatcgccatcagcctggcccaggacatccctgagggcagcttcaagatcagcgccctgaagttctgcctgtacctggccgagcgctggctgcagaacatccccagccaggatgagaagcgggagaaggccgaggccctgctgaagaagctgcacatccagtacagaagaagtggcacagaagctgtgctgattgcccacaagctgaacacagaggagtacctgcgggtgattggcaagccagcccacctgattgtgtccctgtatgagcaccccagcatcaaccagaggatccagaacagcagcggcacagactacccagacatccacgccgccgccaaggagattgctgaggtgaatgagatcaacctggagaaggtgtgggacatgctgctggagaagtggctgtgccccagcaccaagccaggagagaagcccagcgagctgtttgagctgcaggaggatgaggccctgcggcgggtgcagtacctgctgctgagccggcccatcgactacagcagcaggatgctgtttgtgtttgccaccagcaccaccaccaccctgggcatgcaccagctgacctttgcccacaggacccgggccctgcagtgcctcttctacctggccgacaaggagaccatcgagagcctcttcaagaagcccatcgaggaggtgaagagctacctgcgctgcatcaccttcctggccagctttgagaccctgaacatccccatcacctatgagctgttctgcagcagccccaaggagggcatgatcaagggcctgtggaagaaccacagccatgagagcatggctgtgcggctggtgacagagctgtgcctggagtacaagatctatgacctgcagctgtggaatggcctgctgcagaagctgctgggcttcaacatgatcccctacctgaggaaggtgctgaaggccatcagcagcatccacagcctgtggcagcgctggaggagctgctacgtggcctag

SEQ ID NO: 20230 - DNA, 417 bp, synthetic construct
  misc_feature 1..417: note = Description of Artificial Sequence: Synthetic coding sequence
  source 1..417: mol_type = other DNA
atgaacagcctggtgtcctggcagctgctgctcttcctgtgtgccacccactttggagagcccctggagaaggtggcctctgtgggcaacagccggcccaccggccagcagctggagagcctgggcctgctggcccctggagagcagagcctgccctgcacagagaggaagccagctgccacagcccggctgagccggcggggcaccagcctgagccccccacctgagagcagcggcagcccccagcagcccggcctgagcgccccccacagccggcagatcccagccccccagggcgctgtgctggtgcagcgggagaaggacctgcccaactacaactggaacagctttggcctgcgctttgggaagcgggaggccgcccctggcaaccacggccgctctgctggccggggctag

SEQ ID NO: 20231 - DNA, 771 bp, synthetic construct
  misc_feature 1..771: note = Description of Artificial Sequence: Synthetic coding sequence
  source 1..771: mol_type = other DNA
atggcccacaggcctcccagccctgccctggcctctgtgctgctggccctgctgctgagcggggccgcccgggctgctgagatcgtgggcggccacgaggcccagccccacagccggccctacatggccagcctgcagatgaggggcaaccctggcagccacttctgtggcggcaccctcatccaccccagctttgtgctgacagctgcccactgcctgcgggacatcccccagaggctggtgaatgtggtgctgggcgcccacaacgtgaggacccaggagcccacccagcagcacttctctgtggcccaggtgttcctgaacaactatgatgctgagaacaagctgaatgatgtgctgctgatccagctgagcagccctgccaacctgagcgcctctgtggccaccgtgcagctgccccagcaggaccagcctgtgccccacggcacccagtgcctggccatgggctggggccgggtgggcgcccatgaccccccagcccaggtgctgcaggagctgaatgtgacagtggtgaccttcttctgccggccccacaacatctgcacctttgtgcccaggaggaaggccggcatctgcttcggggacagcggcggccccctcatctgtgatggcatcatccagggcatcgacagctttgtgatctggggctgtgccaccaggctcttcccagacttcttcaccagggtggccctgtatgtggactggatccgcagcaccctgcggcgggtggaggccaagggccggccctag

SEQ ID NO: 20232 - DNA, 2937 bp, synthetic construct
  misc_feature 1..2937: note = Description of Artificial Sequence: Synthetic coding sequence
  source 1..2937: mol_type = other DNA
atggcccacaccaccaaggtgaatggcagcgccagcggcaaggccggggacatcctgagcggggaccaggacaaggagcagaaggacccctactttgtggagaccccctacggctaccagctggacctggacttcctgaagtatgtggatgacatccagaagggcaacaccatcaagaggctgaacatccagaagaggaggaagcccagcgtgccctgcccagagcccaggaccaccagcggccagcagggcatctggaccagcacagagagcctgagcagcagcaacagtgatgacaacaagcagtgccccaacttcctgattgcccggagccaggtgaccagcacccccatcagcaagcccccaccacccctggagaccagcctgcccttcctgaccatccctgagaaccggcagctgcccccacccagcccccagctgcccaagcacaacctgcacgtgaccaagaccctgatggagacccggcggcggctggagcaggagcgggccaccatgcagatgaccccaggagagttccggcggccccggctggccagctttggaggcatgggcaccaccagcagcctgcccagctttgtgggcagcggcaaccacaacccagccaagcaccagctgcagaatggctaccagggcaatggagactatggcagctatgccccagctgcccccaccaccagctccatgggcagcagcatccgccacagccccctgagcagcggcatcagcacccctgtgaccaacgtgagccccatgcacctgcagcacatccgggagcagatggccatcgccctgaagaggctgaaggagctggaggagcaggtgaggaccatccctgtgctgcaggtgaagatctctgtgctgcaggaggagaagaggcagctggtgtcccagctgaagaaccagagagctgccagccagatcaacgtgtgtggggtgaggaagaggagctacagcgctggaaatgccagccagctggagcagctgagccgggccaggagaagtggaggagagctgtacattgattatgaggaggaggagatggagaccgtggagcagagcacccagaggatcaaggagttccggcagctgacagctgacatgcaggccctggagcagaagatccaggacagcagctgtgaggccagcagcgagctgcgggagaatggagaatgtagatctgtggccgtgggcgctgaggagaacatgaatgacatcgtggtgtaccaccggggcagccgcagctgcaaggatgctgctgtgggcaccctggtggagatgaggaactgtggggtgtctgtgacagaggccatgctgggcgtgatgacagaagctgacaaggagattgagctgcagcagcagaccatcgagagcctgaaggagaagatctaccgcctggaggtgcagctgcgggagaccacccatgaccgggagatgaccaagctgaagcaggagctgcaggccgccggcagcaggaagaaggtggacaaggccaccatggcccagcccctggtgttcagcaaggtggtggaggccgtggtgcagacccgggaccagatggtgggcagccacatggacctggtggacacctgtgtgggcacctctgtggagaccaacagcgtgggcatcagctgccagcctgagtgcaagaacaaggtggtgggccctgagctgcccatgaactggtggatcgtgaaggagcgggtggagatgcatgacagatgtgccggccgctctgtggagatgtgtgacaagtctgtgtctgtggaggtgtctgtgtgtgagaccggcagcaacacagaggagagcgtgaatgacctgaccctgctgaagaccaacctgaacctgaaggaggtgcgcagcatcggctgtggggactgcagcgtggatgtgacagtgtgcagccccaaggaatgtgccagcagaggagtgaacacagaggccgtgtcccaggtggaggccgctgtgatggctgtgcccaggacagctgaccaggacaccagcacagacctggagcaggtgcaccagttcaccaacacagaaacagccaccctcatcgagagctgcaccaacacctgcctgagcaccctggacaagcagaccagcacccagacagtggagaccaggacagtggccgtgggggagggccgggtgaaggacatcaacagcagcaccaagaccaggagcattggagtgggcaccctgctgagcggccacagcggctttgaccggcccagcgctgtgaagaccaaggagagcggcgtgggccagatcaacatcaatgacaactacctggtgggcctgaagatgaggaccatcgcctgtggccccccccagctgactgtgggcctgacagccagccgccgctctgtgggcgtgggagatgatcctgtgggggagagcctggagaacccccagccccaggcccccctgggcatgatgacaggcctggaccactacatcgagcgcatccagaagctgctggccgagcagcagaccctgctggccgagaactacagcgagctggccgaggccttcggggagccccacagccagatgggcagcctgaacagccagctgatcagcaccctgagcagcatcaacagcgtgatgaagagcgccagcacagaggagctgaggaacccagacttccagaagaccagcctgggcaagatcactggaaactacctgggctacacctgcaagtgtggcggcctgcagagcggcagccccctgagcagccagaccagccagcctgagcaggaggtgggcaccagcgagggcaagcccatcagcagcctggatgccttccccacccaggagggcaccctgagccctgtgaacctgacagatgaccagattgctgctggcctgtatggcaacttcagccacagccagagcctggccagcggcttctag

SEQ ID NO: 20233 - DNA, 831 bp, synthetic construct
  misc_feature 1..831: note = Description of Artificial Sequence: Synthetic coding sequence
  source 1..831: mol_type = other DNA
atgctgagcgcctgcaacctgctgaagaacaccatcaatgaccccaaggccctgaccagcaaggacatgaggttctgcctgaacaccctgcagcacgagtggttccgggtgagcagccagaagagcgccatcccagccatggtgggggactacatcgccgcctttgaggccatcagcccagatgtgctgcgctacgtgatcaacctggctgatggaaatggaaacacagccctgcactacagcgtgagccacagcaactttgaaattgtgaagctgctgctggatgctgatgtgtgcaatgtggaccaccagaacaaggccggctacacccccatcatgctggccgccctggccgctgtggaggccgagaaggacatgagaattgtggaggagctgtttggctgtggagatgtgaatgccaaggccagccaggccggccagacagccctgatgctggccgtgagccacggcagaattgacatggtgaagggcctgctggcctgtggggctgatgtgaacatccaggatgatgagggcagcacagccctgatgtgtgccagcgagcacggccacgtggagatcgtgaagctgctgctggcccagcccggctgcaatggccacctggaggacaatgatggcagcacagccctgagcatcgccctggaggccggccacaaggacattgctgtgctgctgtatgcccacgtgaactttgccaaggcccagagccctgtgtctgtggtgcacctggcctttgtgaaccggctgaagagcacccggctggtggaccccctgcccccaggcattgatggccggcagatcctgtgctag

SEQ ID NO: 20234 - DNA, 993 bp, synthetic construct
  misc_feature 1..993: note = Description of Artificial Sequence: Synthetic coding sequence
  source 1..993: mol_type = other DNA
atggccgagggccaccacgctgtgaacatcgagggcctgaagagcgcccgggtggaggatgagatgcaggtgcaggagtgtgagcctgagaaggtggagatccgggagagatatgagctgtctgagaagatgctgagcgcctgcaacctgctgaagaacaccatcaatgaccccaaggccctgaccagcaaggacatgggccaggtgcagtggctgacccccatgatccccaccctgcgggaggctgatgctgggggcagccatgagcgcttctgcctgaacaccctgcagcacgagtggttccgggtgagcagccagaagagcgccatcccagccatggtgggggactacatcgccgcctttgaggccatcagcccagatgtgctgcgctacgtgatcaacctggctgatggaaatggaaacacagccctgcactacagcgtgagccacagcaactttgaaattgtgaagctgctgctggatgctgatgtgtgcaatgtggaccaccagaacaaggccggctacacccccatcatgctggccgccctggccgctgtggaggccgagaaggacatgagaattgtggaggagctgtttggctgtggagatgtgaatgccaaggccagccaggccggccagacagccctgatgctggccgtgagccacggcagaattgacatggtgaagggcctgctggcctgtggggctgatgtgaacatccaggatgatgagggcagcacagccctgatgtgtgccagcgagcacggccacgtggagatcgtgaagctgctgctggcccagcccggctgcaatggccacctggaggacaatgatggcagcacagccctgagcatcgccctggaggccggccacaaggacattgctgtgctgctgtatgcccacgtgaactttgccaaggcccagagccctggcaccccccggctgggcaggaagaccagccctggccccacccaccggggcagctttgattag

SEQ ID NO: 20235 - DNA, 3585 bp, synthetic construct
  misc_feature 1..3585: note = Description of Artificial Sequence: Synthetic coding sequence
  source 1..3585: mol_type = other DNA
atggagacccggcggcggctggagcaggagcgggccaccatgcagatgaccccaggagagttccggcggccccggctggccagctttggaggcatgggcaccaccagcagcctgcccagctttgtgggcagcggcaaccacaacccagccaagcaccagctgcagaatggctaccagggcaatggagactatggcagctatgccccagctgcccccaccaccagctccatgggcagcagcatccgccacagccccctgagcagcggcatcagcacccctgtgaccaacgtgagccccatgcacctgcagcacatccgggagcagatggccatcgccctgaagaggctgaaggagctggaggagcaggtgaggaccatccctgtgctgcaggtgaagatctctgtgctgcaggaggagaagaggcagctggtgtcccagctgaagaaccagagagctgccagccagatcaacgtgtgtggggtgaggaagaggagctacagcgctggaaatgccagccagctggagcagctgagccgggccaggagaagtggaggagagctgtacattgattatgaggaggaggagatggagaccgtggagcagagcacccagaggatcaaggagttccggcagctgacagctgacatgcaggccctggagcagaagatccaggacagcagctgtgaggccagcagcgagctgcgggagaatggagaatgtagatctgtggccgtgggcgctgaggagaacatgaatgacatcgtggtgtaccaccggggcagccgcagctgcaaggatgctgctgtgggcaccctggtggagatgaggaactgtggggtgtctgtgacagaggccatgctgggcgtgatgacagaagctgacaaggagattgagctgcagcagcagaccatcgagagcctgaaggagaagatctaccgcctggaggtgcagctgcgggagaccacccatgaccgggagatgaccaagctgaagcaggagctgcaggccgccggcagcaggaagaaggtggacaaggccaccatggcccagcccctggtgttcagcaaggtggtggaggccgtggtgcagacccgggaccagatggtgggcagccacatggacctggtggacacctgtgtgggcacctctgtggagaccaacagcgtgggcatcagctgccagcctgagtgcaagaacaaggtggtgggccctgagctgcccatgaactggtggatcgtgaaggagcgggtggagatgcatgacagatgtgccggccgctctgtggagatgtgtgacaagtctgtgtctgtggaggtgtctgtgtgtgagaccggcagcaacacagaggagagcgtgaatgacctgaccctgctgaagaccaacctgaacctgaaggaggtgcgcagcatcggctgtggggactgcagcgtggatgtgacagtgtgcagccccaaggaatgtgccagcagaggagtgaacacagaggccgtgtcccaggtggaggccgctgtgatggctgtgcccaggacagctgaccaggacaccagcacagacctggagcaggtgcaccagttcaccaacacagaaacagccaccctcatcgagagctgcaccaacacctgcctgagcaccctggacaagcagaccagcacccagacagtggagaccaggacagtggccgtgggggagggccgggtgaaggacatcaacagcagcaccaagaccaggagcattggagtgggcaccctgctgagcggccacagcggctttgaccggcccagcgctgtgaagaccaaggagagcggcgtgggccagatcaacatcaatgacaactacctggtgggcctgaagatgaggaccatcgcctgtggccccccccagctgactgtgggcctgacagccagccgccgctctgtgggcgtgggagatgatcctgtgggggagagcctggagaacccccagccccaggcccccctgggcatgatgacaggcctggaccactacatcgagcgcatccagaagctgctggccgagcagcagaccctgctggccgagaactacagcgagctggccgaggccttcggggagccccacagccagatgggcagcctgaacagccagctgatcagcaccctgagcagcatcaacagcgtgatgaagagcgccagcacagaggagctgaggaacccagacttccagaagaccagcctgggcaagatcactggaaactacctgggctacacctgcaagtgtggcggcctgcagagcggcagccccctgagcagccagaccagccagcctgagcaggaggtgggcaccagcgagggcaagcccatcagcagcctggatgccttccccacccaggagggcaccctgagccctgtgaacctgacagatgaccagattgctgctggcctgtatgcctgcaccaacaatgaaagcaccctgaagagcatcatgaagaagaaggatggcaacaaggacagcaatggagccaagaagaacctgcagtttgtgggcatcaatggaggctatgagaccaccagcagtgatgacagcagcagtgatgagagcagcagcagcgagagtgatgatgaatgtgatgtgattgagtaccccctggaggaggaggaggaggaggaggatgaggacacccggggcatggccgagggccaccacgctgtgaacatcgagggcctgaagagcgcccgggtggaggatgagatgcaggtgcaggagtgtgagcctgagaaggtggagatccgggagagatatgagctgtctgagaagatgctgagcgcctgcaacctgctgaagaacaccatcaatgaccccaaggccctgaccagcaaggacatgaggttctgcctgaacaccctgcagcacgagtggttccgggtgagcagccagaagagcgccatcccagccatggtgggggactacatcgccgcctttgaggccatcagcccagatgtgctgcgctacgtgatcaacctggctgatggaaatggaaacacagccctgcactacagcgtgagccacagcaactttgaaattgtgaagctgctgctggatgctgatgtgtgcaatgtggaccaccagaacaaggccggctacacccccatcatgctggccgccctggccgctgtggaggccgagaaggacatgagaattgtggaggagctgtttggctgtggagatgtgaatgccaaggccagccaggccggccagacagccctgatgctggccgtgagccacggcagaattgacatggtgaagggcctgctggcctgtggggctgatgtgaacatccaggatgatgagggcagcacagccctgatgtgtgccagcgagcacggccacgtggagatcgtgaagctgctgctggcccagcccggctgcaatggccacctggaggacaatgatggcagcacagccctgagcatcgccctggaggccggccacaaggacattgctgtgctgctgtatgcccacgtgaactttgccaaggcccagagccctggcaccccccggctgggcaggaagaccagccctggccccacccaccggggcagctttgattag

SEQ ID NO: 20236 - DNA, 4059 bp, synthetic construct
  misc_feature 1..4059: note = Description of Artificial Sequence: Synthetic coding sequence
  source 1..4059: mol_type = other DNA
atggcccacaccaccaaggtgaatggcagcgccagcggcaaggccggggacatcctgagcggggaccaggacaaggagcagaaggacccctactttgtggagaccccctacggctaccagctggacctggacttcctgaagtatgtggatgacatccagaagggcaacaccatcaagaggctgaacatccagaagaggaggaagcccagcgtgccctgcccagagcccaggaccaccagcggccagcagggcatctggaccagcacagagagcctgagcagcagcaacagtgatgacaacaagcagtgccccaacttcctgattgcccggagccaggtgaccagcacccccatcagcaagcccccaccacccctggagaccagcctgcccttcctgaccatccctgagaaccggcagctgcccccacccagcccccagctgcccaagcacaacctgcacgtgaccaagaccctgatggagacccggcggcggctggagcaggagcgggccaccatgcagatgaccccaggagagttccggcggccccggctggccagctttggaggcatgggcaccaccagcagcctgcccagctttgtgggcagcggcaaccacaacccagccaagcaccagctgcagaatggctaccagggcaatggagactatggcagctatgccccagctgcccccaccaccagctccatgggcagcagcatccgccacagccccctgagcagcggcatcagcacccctgtgaccaacgtgagccccatgcacctgcagcacatccgggagcagatggccatcgccctgaagaggctgaaggagctggaggagcaggtgaggaccatccctgtgctgcaggtgaagatctctgtgctgcaggaggagaagaggcagctggtgtcccagctgaagaaccagagagctgccagccagatcaacgtgtgtggggtgaggaagaggagctacagcgctggaaatgccagccagctggagcagctgagccgggccaggagaagtggaggagagctgtacattgattatgaggaggaggagatggagaccgtggagcagagcacccagaggatcaaggagttccggcagctgacagctgacatgcaggccctggagcagaagatccaggacagcagctgtgaggccagcagcgagctgcgggagaatggagaatgtagatctgtggccgtgggcgctgaggagaacatgaatgacatcgtggtgtaccaccggggcagccgcagctgcaaggatgctgctgtgggcaccctggtggagatgaggaactgtggggtgtctgtgacagaggccatgctgggcgtgatgacagaagctgacaaggagattgagctgcagcagcagaccatcgagagcctgaaggagaagatctaccgcctggaggtgcagctgcgggagaccacccatgaccgggagatgaccaagctgaagcaggagctgcaggccgccggcagcaggaagaaggtggacaaggccaccatggcccagcccctggtgttcagcaaggtggtggaggccgtggtgcagacccgggaccagatggtgggcagccacatggacctggtggacacctgtgtgggcacctctgtggagaccaacagcgtgggcatcagctgccagcctgagtgcaagaacaaggtggtgggccctgagctgcccatgaactggtggatcgtgaaggagcgggtggagatgcatgacagatgtgccggccgctctgtggagatgtgtgacaagtctgtgtctgtggaggtgtctgtgtgtgagaccggcagcaacacagaggagagcgtgaatgacctgaccctgctgaagaccaacctgaacctgaaggaggtgcgcagcatcggctgtggggactgcagcgtggatgtgacagtgtgcagccccaaggaatgtgccagcagaggagtgaacacagaggccgtgtcccaggtggaggccgctgtgatggctgtgcccaggacagctgaccaggacaccagcacagacctggagcaggtgcaccagttcaccaacacagaaacagccaccctcatcgagagctgcaccaacacctgcctgagcaccctggacaagcagaccagcacccagacagtggagaccaggacagtggccgtgggggagggccgggtgaaggacatcaacagcagcaccaagaccaggagcattggagtgggcaccctgctgagcggccacagcggctttgaccggcccagcgctgtgaagaccaaggagagcggcgtgggccagatcaacatcaatgacaactacctggtgggcctgaagatgaggaccatcgcctgtggccccccccagctgactgtgggcctgacagccagccgccgctctgtgggcgtgggagatgatcctgtgggggagagcctggagaacccccagccccaggcccccctgggcatgatgacaggcctggaccactacatcgagcgcatccagaagctgctggccgagcagcagaccctgctggccgagaactacagcgagctggccgaggccttcggggagccccacagccagatgggcagcctgaacagccagctgatcagcaccctgagcagcatcaacagcgtgatgaagagcgccagcacagaggagctgaggaacccagacttccagaagaccagcctgggcaagatcactggaaactacctgggctacacctgcaagtgtggcggcctgcagagcggcagccccctgagcagccagaccagccagcctgagcaggaggtgggcaccagcgagggcaagcccatcagcagcctggatgccttccccacccaggagggcaccctgagccctgtgaacctgacagatgaccagattgctgctggcctgtatgcctgcaccaacaatgaaagcaccctgaagagcatcatgaagaagaaggatggcaacaaggacagcaatggagccaagaagaacctgcagtttgtgggcatcaatggaggctatgagaccaccagcagtgatgacagcagcagtgatgagagcagcagcagcgagagtgatgatgaatgtgatgtgattgagtaccccctggaggaggaggaggaggaggaggatgaggacacccggggcatggccgagggccaccacgctgtgaacatcgagggcctgaagagcgcccgggtggaggatgagatgcaggtgcaggagtgtgagcctgagaaggtggagatccgggagagatatgagctgtctgagaagatgctgagcgcctgcaacctgctgaagaacaccatcaatgaccccaaggccctgaccagcaaggacatgaggttctgcctgaacaccctgcagcacgagtggttccgggtgagcagccagaagagcgccatcccagccatggtgggggactacatcgccgcctttgaggccatcagcccagatgtgctgcgctacgtgatcaacctggctgatggaaatggaaacacagccctgcactacagcgtgagccacagcaactttgaaattgtgaagctgctgctggatgctgatgtgtgcaatgtggaccaccagaacaaggccggctacacccccatcatgctggccgccctggccgctgtggaggccgagaaggacatgagaattgtggaggagctgtttggctgtggagatgtgaatgccaaggccagccaggccggccagacagccctgatgctggccgtgagccacggcagaattgacatggtgaagggcctgctggcctgtggggctgatgtgaacatccaggatgatgagggcagcacagccctgatgtgtgccagcgagcacggccacgtggagatcgtgaagctgctgctggcccagcccggctgcaatggccacctggaggacaatgatggcagcacagccctgagcatcgccctggaggccggccacaaggacattgctgtgctgctgtatgcccacgtgaactttgccaaggcccagagccctggcaccccccggctgggcaggaagaccagccctggccccacccaccggggcagctttgattag

SEQ ID NO: 20237 - DNA, 4059 bp, synthetic construct; identical to SEQ ID NO: 20236
  misc_feature 1..4059: note = Description of Artificial Sequence: Synthetic coding sequence
  source 1..4059: mol_type = other DNA

SEQ ID NO: 20238 - DNA, 1197 bp, synthetic construct
  misc_feature 1..1197: note = Description of Artificial Sequence: Synthetic coding sequence
  source 1..1197: mol_type = other DNA
atgaagaagaaggatggcaacaaggacagcaatggagccaagaagaacctgcagtttgtgggcatcaatggaggctatgagaccaccagcagtgatgacagcagcagtgatgagagcagcagcagcgagagtgatgatgaatgtgatgtgattgagtaccccctggaggaggaggaggaggaggaggatgaggacacccggggcatggccgagggccaccacgctgtgaacatcgagggcctgaagagcgcccgggtggaggatgagatgcaggtgcaggagtgtgagcctgagaaggtggagatccgggagagatatgagctgtctgagaagatgctgagcgcctgcaacctgctgaagaacaccatcaatgaccccaaggccctgaccagcaaggacatgggccaggtgcagtggctgacccccatgatccccaccctgcgggaggctgatgctgggggcagccatgagcgcttctgcctgaacaccctgcagcacgagtggttccgggtgagcagccagaagagcgccatcccagccatggtgggggactacatcgccgcctttgaggccatcagcccagatgtgctgcgctacgtgatcaacctggctgatggaaatggaaacacagccctgcactacagcgtgagccacagcaactttgaaattgtgaagctgctgctggatgctgatgtgtgcaatgtggaccaccagaacaaggccggctacacccccatcatgctggccgccctggccgctgtggaggccgagaaggacatgagaattgtggaggagctgtttggctgtggagatgtgaatgccaaggccagccaggccggccagacagccctgatgctggccgtgagccacggcagaattgacatggtgaagggcctgctggcctgtggggctgatgtgaacatccaggatgatgagggcagcacagccctgatgtgtgccagcgagcacggccacgtggagatcgtgaagctgctgctggcccagcccggctgcaatggccacctggaggacaatgatggcagcacagccctgagcatcgccctggaggccggccacaaggacattgctgtgctgctgtatgcccacgtgaactttgccaaggcccagagccctggcaccccccggctgggcaggaagaccagccctggccccacccaccggggcagctttgattag

SEQ ID NO: 20239 - DNA, 2211 bp, synthetic construct
  misc_feature 1..2211: note = Description of Artificial Sequence: Synthetic coding sequence
  source 1..2211: mol_type = other DNA
atgggcaacccagaaaatattgaagatgcctacgtggccgtcatccggcccaagaacacagccagcctgaacagccgggagtaccgggccaagagctatgagatcctgctgcacgaggtgcccatcgagggccagaagaagaagaggaagaaggtgctgctggagaccaagctgcagggcaacagcgagatcacccagggcatcctggactatgtggtggagaccaccaagcccatcagccctgccaaccagggcatccggggcaagagggtggtgctgatgaagaagttccccctggatggagagaagatgggccgggaggccagcctcttcatcgtgcccagcgtggtgaaggacaacaccaagtacacctacaccccaggctgccccatcttctactgcctgcaggacatcatgagggtgtgcagcgagagcagcacccactttgccaccctgacagccaggatgctgattgccctggacaagtggctggatgaaagacatgcccagagccacttcatcccagccctcttccggcccagccccctggagcgcatcaagaccaacgtcatcaacccagcctatgccacagaaagtggccagacagagaacagcctgcacatgggctacagcgccctggagatcaagagcaagatgctggccctggagaaggctgacacctgcatctacaaccccctgtttggaagtgacctgcagtacaccaacagagtggacaaggtggtgatcaacccctacttcggcctgggcgccccagactacagcaagatccagatccccaagcaggagaagtggcagaggtccatgagctctgtgacagaggacaaggagcggcagtgggtggatgacttccccctgcacaggtctgcctgtgagggggacagcgagctgctgagccggctgctgtctgagcgcttctctgtgaaccagctggacagcgaccactgggcccccatccactacgcctgctggtacggcaaggtggaggccacccgcatcctgctggagaagggcaagtgcaaccccaacctgctgaatggccagctgagcagccccctgcactttgctgctgggggcggccacgccgagatcgtgcagatcctgctgaaccaccctgagacagacagacacatcacagaccagcagggccgcagccccctgaacatctgtgaggagaacaagcagaacaactgggaggaggccgccaagctgctgaaggaggccatcaacaagccctatgagaaggtgcgcatctacaggatggatggcagctacagatctgtggagctgaagcacggcaacaacaccaccgtgcagcagatcatggagggcatgaggctgagccaggagacccagcagtacttcaccatctggatctgcagcgagaacctgagcctgcagctgaagccctaccacaagcccctgcagcacgtgcgggactggccagagatcctggccgagctgaccaacctggacccccagcgggagaccccccagctgttcctgcggagagatgtgcggctgcccctggaggtggagaagcagatcgaggaccccctggccatcctgatcctgtttgatgaggcccgctacaacctgctgaagggcttctacacagccccagatgccaagctgatcaccctggccagcctgctgctgcagatcgtgtatggcaactatgagagcaagaagcacaagcagggcttcctgaatgaggagaacctgaagagcatcgtgcctgtgaccaagctgaagagcaaggccccccactggaccaaccgcatcctgcacgagtacaagaacctgagcaccagcgagggcgtgtccaaggagatgcaccacctgcagaggatgttcctgcagaactgctgggagatccccacctatggagctgccttcttcaccggccagatcttcaccaaggccagccccagcaaccacaaggtgattcctgtgtatgtgggcgtgaacatcaagggcctgcacctgctgaacatggagaccaaggccctgctgatcagcctgaagtatggctgcttcatgtggcagctgggggacacagacacctgcttccagatccacagcatggagaacaagatgtccttcatcgtgcacaccaagcaggccggcctggtggtgaagctgctgatgaagctgaatggccagctgatgcccacagagaggaacagctag

SEQ ID NO: 20240 - DNA, 2067 bp, synthetic construct
  misc_feature 1..2067: note = Description of Artificial Sequence: Synthetic coding sequence
  source 1..2067: mol_type = other DNA
atgggcaacccagaaaatattgaagatgcctacgtggccgtcatccggcccaagaacacagccagcctgaacagccgggagtaccgggccaagagctatgagatcctgctgcacgaggtgcccatcgagggccagaagaagaagaggaagaaggtgctgctggagaccaagctgcagggcaacagcgagatcacccagggcatcctggactatgtggtggagaccaccaagcccatcagccctgccaaccagggcatccggggcaagagggtggtgctgatgaagaagttccccctggatggagagaagatgggccgggaggccagcctcttcatcgtgcccagcgtggtgaaggacaacaccaagtacacctacaccccaggctgccccatcttctactgcctgcaggacatcatgagggtgtgcagcgagagcagcacccactttgccaccctgacagccaggatgctgattgccctggacaagtggctggatgaaagacatgcccagagccacttcatcccagccctcttccggcccagccccctggagcgcatcaagaccaacgtcatcaacccagcctatgccacagaaagtggccagacagagaacagcctgcacatgggctacagcgccctggagatcaagagcaagatgctggccctggagaaggctgacacctgcatctacaaccccctgtttggaagtgacctgcagtacaccaacagagtggacaaggtggtgatcaacccctacttcggcctgggcgccccagactacagcaagatccagatccccaagcaggagaagtggcagaggtccatgagctctgtgacagaggacaagtatggcaaggtggaggccacccgcatcctgctggagaagggcaagtgcaaccccaacctgctgaatggccagctgagcagccccctgcactttgctgctgggggcggccacgccgagatcgtgcagatcctgctgaaccaccctgagacagacagacacatcacagaccagcagggccgcagccccctgaacatctgtgaggagaacaagcagaacaactgggaggaggccgccaagctgctgaaggaggccatcaacaagccctatgagaaggtgcgcatctacaggatggatggcagctacagatctgtggagctgaagcacggcaacaacaccaccgtgcagcagatcatggagggcatgaggctgagccaggagacccagcagtacttcaccatctggatctgcagcgagaacctgagcctgcagctgaagccctaccacaagcccctgcagcacgtgcgggactggccagagatcctggccgagctgaccaacctggacccccagcgggagaccccccagctgttcctgcggagagatgtgcggctgcccctggaggtggagaagcagatcgaggaccccctggccatcctgatcctgtttgatgaggcccgctacaacctgctgaagggcttctacacagccccagatgccaagctgatcaccctggccagcctgctgctgcagatcgtgtatggcaactatgagagcaagaagcacaagcagggcttcctgaatgaggagaacctgaagagcatcgtgcctgtgaccaagctgaagagcaaggccccccactggaccaaccgcatcctgcacgagtacaagaacctgagcaccagcgagggcgtgtccaaggagatgcaccacctgcagaggatgttcctgcagaactgctgggagatccccacctatggagctgccttcttcaccggccagatcttcaccaaggccagccccagcaaccacaaggtgattcctgtgtatgtgggcgtgaacatcaagggcctgcacctgctgaacatggagaccaaggccctgctgatcagcctgaagtatggctgcttcatgtggcagctgggggacacagacacctgcttccagatccacagcatggagaacaagatgtccttcatcgtgcacaccaagcaggccggcctggtggtgaagctgctgatgaagctgaatggccagctgatgcccacagagaggaacagctag

SEQ ID NO: 20241 - DNA, 2211 bp, synthetic construct; identical to SEQ ID NO: 20239
  misc_feature 1..2211: note = Description of Artificial Sequence: Synthetic coding sequence
  source 1..2211: mol_type = other DNA

SEQ ID NO: 20242 - DNA, 2211 bp, synthetic construct; identical to SEQ ID NO: 20239
  misc_feature 1..2211: note = Description of Artificial Sequence: Synthetic coding sequence
  source 1..2211: mol_type = other DNA

SEQ ID NO: 20243 - DNA, 2211 bp, synthetic construct; identical to SEQ ID NO: 20239
  misc_feature 1..2211: note = Description of Artificial Sequence: Synthetic coding sequence
  source 1..2211: mol_type = other DNA

SEQ ID NO: 20244 - DNA, 210 bp, synthetic construct
  misc_feature 1..210: note = Description of Artificial Sequence: Synthetic coding sequence
  source 1..210: mol_type = other DNA
atgggcaacccagaaaatattgaagatgcctacgtggccgtcatccggcccaagaacacagccagcctgaacagccgggagtaccgggccaagagctatgagatcctgctgcacgaggtgcccatcgagggccagaagaagaagaggaagaaggtgctgctggagaccaagctgcagggcaacagcgagatcacccagggcatcctgtag

SEQ ID NO: 20245 - DNA, 1698 bp, synthetic construct
  misc_feature 1..1698: note = Description of Artificial Sequence: Synthetic coding sequence
  source 1..1698: mol_type = other DNA
atgggcaacccagaaaatattgaagatgcctacgtggccgtcatccggcccaagaacacagccagcctgaacagccgggagtaccgggccaagagctatgagatcctgctgcacgaggtgcccatcgagggccagaagaagaagaggaagaaggtgctgctggagaccaagctgcagggcaacagcgagatcacccagggcatcctggactatgtggtggagaccaccaagcccatcagccctgccaaccagggcatccggggcaagagggtggtgctgatgaagaagttccccctggatggagagaagatgggccgggaggccagcctcttcatcgtgcccagcgtggtgaaggacaacaccaagtacacctacaccccaggctgccccatcttctactgcctgcaggacatcatgagggtgtgcagcgagagcagcacccactttgccaccctgacagccaggatgctgattgccctggacaagtggctggatgaaagacatgcccagagccacttcatcccagccctcttccggcccagccccctggagcgcatcaagaccaacgtcatcaacccagcctatgccacagaaagtggccagacagagaacagcctgcacatgggctacagcgccctggagatcaagagcaagatgctggccctggagaaggctgacacctgcatctacaaccccctgtttggaagtgacctgcagtacaccaacagagtggacaaggtggtgatcaacccctacttcggcctgggcgccccagactacagcaagatccagatccccaagcaggagaagtggcagaggtccatgagctctgtgacagaggacaaggagcggcagtgggtggatgacttccccctgcacaggtctgcctgtgagggggacagcgagctgctgagccggctgctgtctgagcgcttctctgtgaaccagctggacagcgaccactgggcccccatccactacgcctgctggtacggcaaggtggaggccacccgcatcctgctggagaagggcaagtgcaaccccaacctgctgaatggccagctgagcagccccctgcactttgctgctgggggcggccacgccgagatcgtgcagatcctgctgaaccaccctgagacagacagacacatcacagaccagcagggccgcagccccctgaacatctgtgaggagaacaagcagaacaactgggaggaggccgccaagctgctgaaggaggccatcaacaagccctatgagaaggtgcgcatctacaggatggatggcagctacagatctgtggagctgaagcacggcaacaacaccaccgtgcagcagatcatggagggcatgaggctgagccaggagacccagcagtacttcaccatctggatctgcagcgagaacctgagcctgcagctgaagccctaccacaagcccctgcagcacgtgcgggactggccagagatcctggccgagctgaccaacctggacccccagcgggagaccccccagctgttcctgcggagagatgtgcggctgcccctggaggtggagaagcagatcgaggaccccctggccatcctgatcctgtttgatgaggcccgctacaacctgctgaagggcttctacacagccccagatgccaagctgatcaccctggccagcctgctgctgcagagcctgtggaagctgtag

SEQ ID NO: 20246 - DNA, 78 bp, synthetic construct
  misc_feature 1..78: note = Description of Artificial Sequence: Synthetic coding sequence
  source 1..78: mol_type = other DNA
atgggcaacccagaaaatattgaagatgcctacgtggccgtcatccggcccaagaacacagccagcctgaacagctag

SEQ ID NO: 20247 - DNA, 39 bp, synthetic construct
  misc_feature 1..39: note = Description of Artificial Sequence: Synthetic coding sequence
  source 1..39: mol_type = other DNA
atgggcaacccagaaaatattgaagatgcctacgtgtag

SEQ ID NO: 20248 - DNA, 117 bp, synthetic construct
  misc_feature 1..117: note = Description of Artificial Sequence: Synthetic coding sequence
  source 1..117: mol_type = other DNA
atgggcaacccagaaaatattgaagatgcctacgtggccgtcatccggcccaagaacacagccagcctgaacagccgggagtaccgggccaagagctatgagatcctgctgcactag

SEQ ID NO: 20249 - DNA, 297 bp, synthetic construct
  misc_feature 1..297: note = Description of Artificial Sequence: Synthetic coding sequence
  source 1..297: mol_type = other DNA
atgggcaacccagaaaatattgaagatgcctacgtggccgtcatccggcccaagaacacagccagcctgaacagccgggagtaccgggccaagagctatgagatcctgctgcacgaggtgcccatcgagggccagaagaagaagaggaagaaggtgctgctggagaccaagctgcagggcaacagcgagatcacccagggcatcctggactatgtggtggagaccaccaagcccatcagccctgccaaccagggcatccggggcaagagggtggtgctgatgaagaagttcccctag

SEQ ID NO: 20250 - DNA, 555 bp, synthetic construct
  misc_feature 1..555: note = Description of Artificial Sequence: Synthetic coding sequence
  source 1..555: mol_type = other DNA
atgggcaacccagaaaatattgaagatgcctacgtggccgtcatccggcccaagaacacagccagcctgaacagccgggagtaccgggccaagagctatgagatcctgctgcacgaggtgcccatcgagggccagaagaagaagaggaagaaggtgctgctggagaccaagctgcagggcaacagcgagatcacccagggcatcctggactatgtggtggagaccaccaagcccatcagccctgccaaccagggcatccggggcaagagggtggtgctgatgaagaagttccccctggatggagagaagatgggccgggaggccagcctcttcatcgtgcccagcgtggtgaaggacaacaccaagtacacctacaccccaggctgccccatcttctactgcctgcaggacatcatgagggtgtgcagcgagagcagcacccactttgccaccctgacagccaggatgctgattgccctggacaagtggctggatgaaagacatgcccagagccacttcatcccagccctcttccggcccagccccctggagtag

SEQ ID NO: 20251 - DNA, 339 bp, synthetic construct
  misc_feature 1..339: note = Description of Artificial Sequence: Synthetic coding sequence
  source 1..339: mol_type = other DNA
atgggcaacccagaaaatattgaagatgcctacgtggccgtcatccggcccaagaacacagccagcctgaacagccgggagtaccgggccaagagctatgagatcctgctgcacgaggtgcccatcgagggccagaagaagaagaggaagaaggtgctgctggagaccaagctgcagggcaacagcgagatcacccagggcatcctggactatgtggtggagaccaccaagcccatcagccctgccaaccagggcatccggggcaagagggtggtgctgatgaagaagttccccctggatggagagaagatgggccgggaggccagcctcttcatctag

SEQ ID NO: 20252 - DNA, 105 bp, synthetic construct
  misc_feature 1..105: note = Description of Artificial Sequence: Synthetic coding sequence
  source 1..105: mol_type = other DNA
atgggcaacccagaaaatattgaagatgcctacgtggccgtcatccggcccaagaacacagccagcctgaacagccgggagtaccgggccaagagctatgaatag

SEQ ID NO: 20253 - DNA, 177 bp, synthetic construct
  misc_feature 1..177: note = Description of Artificial Sequence: Synthetic coding sequence
  source 1..177: mol_type = other DNA
atgggcaacccagaaaatattgaagatgcctacgtggccgtcatccggcccaagaacacagccagcctgaacagccgggagtaccgggccaagagctatgagatcctgctgcacgaggtgcccatcgagggccagaagaagaagaggaagaaggtgctgctggagaccaagctgtag

SEQ ID NO: 20254 - DNA, 489 bp, synthetic construct
  misc_feature 1..489: note = Description of Artificial Sequence: Synthetic coding sequence
  source 1..489: mol_type = other DNA
atgggcaacccagaaaatattgaagatgcctacgtggccgtcatccggcccaagaacacagccagcctgaacagccgggagtaccgggccaagagctatgagatcctgctgcacgaggtgcccatcgagggccagaagaagaagaggaagaaggtgctgctggagaccaagctgcagggcaacagcgagatcacccagggcatcctggactatgtggtggagaccaccaagcccatcagccctgccaaccagggcatccggggcaagagggtggtgctgatgaagaagttccccctggatggagagaagatgggccgggaggccagcctcttcatcgtgcccagcgtggtgaaggacaacaccaagtacacctacaccccaggctgccccatcttctactgcctgcaggacatcatgagggtgtgcagcgagagcagcacccactttgccaccctgacagccaggatgctgattgccctggacaagtag

SEQ ID NO: 20255 - DNA, 732 bp, synthetic construct
  misc_feature 1..732: note = Description of Artificial Sequence: Synthetic coding sequence
  source 1..732: mol_type = other DNA
atgggcaacccagaaaatattgaagatgcctacgtggccgtcatccggcccaagaacacagccagcctgaacagccgggagtaccgggccaagagctatgagatcctgctgcacgaggtgcccatcgagggccagaagaagaagaggaagaaggtgctgctggagaccaagctgcagggcaacagcgagatcacccagggcatcctggactatgtggtggagaccaccaagcccatcagccctgccaaccagggcatccggggcaagagggtggtgctgatgaagaagttccccctggatggagagaagatgggccgggaggccagcctcttcatcgtgcccagcgtggtgaaggacaacaccaagtacacctacaccccaggctgccccatcttctactgcctgcaggacatcatgagggtgtgcagcgagagcagcacccactttgccaccctgacagccaggatgctgattgccctggacaagtggctggatgaaagacatgcccagagccacttcatcccagccctcttccggcccagccccctggagcgcatcaagaccaacgtcatcaacccagcctatgccacagaaagtggccagacagagaacagcctgcacatgggctacagcgccctggagatcaagagcaagatgctggccctggagaaggctgacacctgcatctacaaccccctgtttggaagtgacctgcagtacaccaacagatag

SEQ ID NO: 20256 - DNA, 198 bp, synthetic construct
  misc_feature 1..198: note = Description of Artificial Sequence: Synthetic coding sequence
  source 1..198: mol_type = other DNA
atgggcaacccagaaaatattgaagatgcctacgtggccgtcatccggcccaagaacacagccagcctgaacagccgggagtaccgggccaagagctatgagatcctgctgcacgaggtgcccatcgagggccagaagaagaagaggaagaaggtgctgctggagaccaagctgcagggcaacagcgagatcacctag

SEQ ID NO: 20257 - DNA, 1089 bp, synthetic construct
  misc_feature 1..1089: note = Description of Artificial Sequence: Synthetic coding sequence
  source 1..1089: mol_type = other DNA
atggccacagctgagacagccctgcccagcatcagcaccctgacagccctgggccccttcccagacacccaggatgacttcctgaagtggtggaggtctgaggaggcccaggacatgggccctggccccccagaccccacagagccccccctgcacgtgaagtctgaggaccagcctggagaggaggaggatgatgaaagaggagcagatgccacctgggacctggacctgctgctgaccaacttcagcggccctgagcctggaggagccccccagacctgtgccctggcccccagcgaggccagcggggcccagtacccacctcctcctgagaccctgggcgcctatgccggcggccctggcctggtggccggcctgctgggcagcgaggaccacagcggctgggtgcggcctgccctgcgggcccgggccccagatgcctttgtgggccctgccctggccccagccccagcccctgagcccaaggccctggccctgcagcctgtgtacccaggccctggagctggcagcagcggcggctacttccccaggacaggcctgtctgtgcctgctgccagcggggccccctacggcctgctgagcggctacccagccatgtacccagccccccagtaccagggccacttccagctgttccggggcctgcagggccctgcccctggccctgccaccagccccagcttcctgagctgcctgggccctggcaccgtgggcaccggcctgggcggcacagcagaagatcctggggtgattgctgagacagcccccagcaagaggggccgccgctcctgggccaggaagaggcaggccgcccacacctgtgcccaccctggctgtgggaagagctacaccaagagcagccacctgaaggcccacctgcggacccacactggagagaagccctatgcctgcacctgggagggctgcggctggaggtttgcccggagtgatgagctgaccaggcactacaggaagcacacaggccagaggcccttccgctgccagctgtgcccccgggccttcagcagaagtgaccacctggccctgcacatgaagaggcacctgtag

SEQ ID NO: 20258 - DNA, 999 bp, synthetic construct
  misc_feature 1..999: note = Description of Artificial Sequence: Synthetic coding sequence
  source 1..999: mol_type = other DNA
atggccaccctgaaggaccagctgatctacaacctgctgaaggaggagcagaccccccagaacaagatcaccgtggtgggcgtgggcgctgtgggcatggcctgtgccatcagcatcctgatgaaggacctggctgatgagctggccctggtggatgtgattgaggacaagctgaagggggagatgatggacctgcagcacggcagcctcttcctgcggacccccaagatcgtgtctgggaaggactacaacgtgacagccaacagcaagctggtgatcatcacagctggggcccggcagcaggagggggagagccggctgaacctggtgcagagaaatgtgaacatcttcaagttcatcatccccaacgtggtgaagtacagccccaactgcaagctgctgattgtgagcaaccctgtggacatcctgacctacgtggcctggaagatcagcggcttccccaagaacagagtgattggcagcggctgcaacctggacagcgcccgcttccgctacctgatgggagagcggctgggcgtgcaccccctgagctgccacggctgggtgctgggggagcacggggacagctctgtgcctgtgtggagcggcatgaatgtggccggcgtgtccctgaagaccctgcacccagacctgggcacagacaaggacaaggagcagtggaaggaggtgcacaagcaggtggtggagagcgcctatgaagtcatcaagctgaagggctacacctcctgggccatcggcctgtctgtggccgacctggccgagagcatcatgaagaacctgcggcgggtgcaccctgtgtccaccatgatcaagggcctgtatggcatcaaggatgatgtgttcctgtctgtgccctgcatcctgggccagaatggcatcagtgacctggtgaaggtgaccctgaccagcgaggaggaggcccggctgaagaagtctgctgacaccctgtggggcatccagaaggagctgcagttctag

SEQ ID NO: 20259 - DNA, 825 bp, synthetic construct
  misc_feature 1..825: note = Description of Artificial Sequence: Synthetic coding sequence
  source 1..825: mol_type = other DNA
atggccaccctgaaggaccagctgatctacaacctgctgaaggaggagcagaccccccagaacaagatcaccgtggtgggcgtgggcgctgtgggcatggcctgtgccatcagcatcctgatgaaggacctggctgatgagctggccctggtggatgtgattgaggacaagctgaagggggagatgatggacctgcagcacggcagcctcttcctgcggacccccaagatcgtgtctgggaaggactacaacgtgacagccaacagcaagctggtgatcatcacagctggggcccggcagcaggagggggagagccggctgaacctggtgcagagaaatgtgaacatcttcaagttcatcatccccaacgtggtgaagtacagccccaactgcaagctgctgattgtgagcaaccctgtggacatcctgacctacgtggcctggaagatcagcggcttccccaagaacagagtgattggcagcggctgcaacctggacagcgcccgcttccgctacctgatgggagagcggctgggcgtgcaccccctgagctgccacggctgggtgctgggggagcacggggacagctctgtgcctgtgtggagcggcatgaatgtggccggcgtgtccctgaagaccctgcacccagacctgggcacagacaaggacaaggagcagtggaaggaatgtcgctacaccctgggggaccccaagggggccgccatcctgaagagcagtgatgtgatctccttccactgcctgggctacaaccgcatcctgggcggcggctgtgcctgctgccccttctacctgatctgtgactag

SEQ ID NO: 20260 - DNA, 999 bp, synthetic construct; identical to SEQ ID NO: 20258
  misc_feature 1..999: note = Description of Artificial Sequence: Synthetic coding sequence
  source 1..999: mol_type = other DNA

SEQ ID NO: 20261 - DNA, 825 bp, synthetic construct
  misc_feature 1..825: note = Description of Artificial Sequence: Synthetic coding sequence
  source 1..825: mol_type = other DNA
atggccaccctgaaggaccagctgatctacaacctgctgaaggaggagcagaccccccagaacaagatcaccgtggtgggcgtgggcgctgtgggcatggcctgtgccatcagcatcctgatgaaggacctggctgatgagctggccctggtggatgtgattgaggacaagctgaagggggagatgatggacctgcagcacggcagcctcttcctgcggacccccaagatcgtgtctgggaaggtggacatcctgacctacgtggcctggaagatcagcggcttccccaagaacagagtgattggcagcggctgcaacctggacagcgcccgcttccgctacctgatgggagagcggctgggcgtgcaccccctgagctgccacggctgggtgctgggggagcacggggacagctctgtgcctgtgtggagcggcatgaatgtggccggcgtgtccctgaagaccctgcacccagacctgggcacagacaaggacaaggagcagtggaaggaggtgcacaagcaggtggtggagagcgcctatgaagtcatcaagctgaagggctacacctcctgggccatcggcctgtctgtggccgacctggccgagagcatcatgaagaacctgcggcgggtgcaccctgtgtccaccatgatcaagggcctgtatggcatcaaggatgatgtgttcctgtctgtgccctgcatcctgggccagaatggcatcagtgacctggtgaaggtgaccctgaccagcgaggaggaggcccggctgaagaagtctgctgacaccctgtggggcatccagaaggagctgcagttctag

SEQ ID NO: 20262 - DNA, 918 bp, synthetic construct
  misc_feature 1..918: note = Description of Artificial Sequence: Synthetic coding sequence
  source 1..918: mol_type = other DNA
atggccaccctgaaggaccagctgatctacaacctgctgaaggaggagcagaccccccagaacaagatcaccgtggtgggcgtgggcgctgtgggcatggcctgtgccatcagcatcctgatgaaggacctggctgatgagctggccatcgtgtctgggaaggactacaacgtgacagccaacagcaagctggtgatcatcacagctggggcccggcagcaggagggggagagccggctgaacctggtgcagagaaatgtgaacatcttcaagttcatcatccccaacgtggtgaagtacagccccaactgcaagctgctgattgtgagcaaccctgtggacatcctgacctacgtggcctggaagatcagcggcttccccaagaacagagtcatcggcagcggctgcaacctggacagcgcccgcttccgctacctgatgggagagcggctgggcgtgcaccccctgagctgccacggctgggtgctgggggagcacggggacagctctgtgcctgtgtggagcggcatgaatgtggccggcgtgtccctgaagaccctgcacccagacctgggcacagacaaggacaaggagcagtggaaggaggtgcacaagcaggtggtggagagcgcctatgaggtgatcaagctgaagggctacacctcctgggccatcggcctgtctgtggccgacctggccgagagcatcatgaagaacctgcggcgggtgcaccctgtgtccaccatgatcaagggcctgtatggcatcaaggatgatgtgttcctgtctgtgccctgcatcctgggccagaatggcatcagtgacctggtgaaggtgaccctgaccagcgaggaggaggcccggctgaagaagtctgctgacaccctgtggggcatccagaaggagctgcagttctag

SEQ ID NO: 20263 - DNA, 435 bp, synthetic construct
  misc_feature 1..435: note = Description of Artificial Sequence: Synthetic coding sequence
  source 1..435: mol_type = other DNA
atggccaccctgaaggaccagctgatctacaacctgctgaaggaggagcagaccccccagaacaagatcaccgtggtgggcgtgggcgctgtgggcatggcctgtgccatcagcatcctgatgaaggacctggctgatgagctggccctggtggatgtgattgaggacaagctgaagggggagatgatggacctgcagcacggcagcctcttcctgcggacccccaagatcgtgtctgggaaggactacaacgtgacagccaacagcaagctggtgatcatcacagctggggcccggcagcaggagggggagagccggctgaacctggtgcagagaaatgtgaacatcttcaagttcatcatccccaacgtggtgaagtacagccccaactgcaagctgctgattgtgagcaaccctggagaggcctttgattag

SEQ ID NO: 20264 - DNA, 345 bp, synthetic construct
  misc_feature 1..345: note = Description of Artificial Sequence: Synthetic coding sequence
  source 1..345: mol_type = other DNA
atggccaccctgaaggaccagctgatctacaacctgctgaaggaggagcagaccccccagaacaagatcaccgtggtgggcgtgggcgctgtgggcatggcctgtgccatcagcatcctgatgaaggacctggctgatgagctggccctggtggatgtgattgaggacaagctgaagggggagatgatggacctgcagcacggcagcctcttcctgcggacccccaagatcgtgtctgggaaggactacaacgtgacagccaacagcaagctggtgatcatcacagctggggcccggcagcaggagggggagagccggctgaacctggtgcagagaaatgtgtag

SEQ ID NO: 20265 - DNA, 219 bp, synthetic construct
  misc_feature 1..219: note = Description of Artificial Sequence: Synthetic coding sequence
  source 1..219: mol_type = other DNA
atggccaccctgaaggaccagctgatctacaacctgctgaaggaggagcagaccccccagaacaagatcaccgtggtgggcgtgggcgctgtgggcatggcctgtgccatcagcatcctgatgaaggacctggctgatgagctggccctggtggatgtgattgaggacaagctgaagggggagatgatggacctgcagcacggcagcctcttcctgtag

SEQ ID NO: 20266 - DNA, 1086 bp, synthetic construct
  misc_feature 1..1086: note = Description of Artificial Sequence: Synthetic coding sequence
  source 1..1086: mol_type = other DNA
atgggagagcccagcggcggctacacctacacccagaccagcatcttcctgttccacgccaagatccccttcggcagcaagagcaacatggccaccctgaaggaccagctgatctacaacctgctgaaggaggagcagaccccccagaacaagatcaccgtggtgggcgtgggcgctgtgggcatggcctgtgccatcagcatcctgatgaaggacctggctgatgagctggccctggtggatgtgattgaggacaagctgaagggggagatgatggacctgcagcacggcagcctcttcctgcggacccccaagatcgtgtctgggaaggactacaacgtgacagccaacagcaagctggtgatcatcacagctggggcccggcagcaggagggggagagccggctgaacctggtgcagagaaatgtgaacatcttcaagttcatcatccccaacgtggtgaagtacagccccaactgcaagctgctgattgtgagcaaccctgtggacatcctgacctacgtggcctggaagatcagcggcttccccaagaacagagtcatcggcagcggctgcaacctggacagcgcccgcttccgctacctgatgggagagcggctgggcgtgcaccccctgagctgccacggctgggtgctgggggagcacggggacagctctgtgcctgtgtggagcggcatgaatgtggccggcgtgtccctgaagaccctgcacccagacctgggcacagacaaggacaaggagcagtggaaggaggtgcacaagcaggtggtggagagcgcctatgaggtgatcaagctgaagggctacacctcctgggccatcggcctgtctgtggccgacctggccgagagcatcatgaagaacctgcggcgggtgcaccctgtgtccaccatgatcaagggcctgtatggcatcaaggatgatgtgttcctgtctgtgccctgcatcctgggccagaatggcatcagtgacctggtgaaggtgaccctgaccagcgaggaggaggcccggctgaagaagtctgctgacaccctgtggggcatccagaaggagctgcagttctag

SEQ ID NO: 20267 - DNA, 999 bp, synthetic construct; identical to SEQ ID NO: 20258
  misc_feature 1..999: note = Description of Artificial Sequence: Synthetic coding sequence
  source 1..999: mol_type = other DNA

SEQ ID NO: 20268 - DNA, 474 bp, synthetic construct
  misc_feature 1..474: note = Description of Artificial Sequence: Synthetic coding sequence
  source 1..474: mol_type = other DNA
atggccaccctgaaggaccagctgatctacaacctgctgaaggaggagcagaccccccagaacaagatcaccgtggtgggcgtgggcgctgtgggcatggcctgtgccatcagcatcctgatgaaggacctggctgatgagctggccctggtggatgtgattgaggacaagctgaagggggagatgatggacctgcagcacggcagcctcttcctgcggacccccaagatcgtgtctgggaaggactacaacgtgacagccaacagcaagctggtgatcatcacagctggggcccggcagcaggagggggagagccggctgaacctggtgcagagaaatgtgaacatcttcaagttcatcatccccaacgtggtgaagtacagccccaactgcaagctgctgattgtgagcaaccctgtggacatcctgacctacgtggcctggaagatcagcggcttccccaagaacagatag

SEQ ID NO: 20269 - DNA, 804 bp, synthetic construct
  misc_feature 1..804: note = Description of Artificial Sequence: Synthetic coding sequence
  source 1..804: mol_type = other DNA
atgggcagcgcctgcatcaaggtgaccaagtacttcctgttcctgttcaacctgatcttcttcatcctgggcgctgtgatcctgggcttcggcgtgtggatcctggccgacaagagcagcttcatctctgtgctgcagaccagcagcagcagcctgaggatgggcgcctacgtgttcatcggcgtgggcgctgtgaccatgctgatgggcttcctgggctgcattggagctgtgaatgaggtgcgctgcctgctgggcctgtactttgccttcctgctgctgatcctgattgcccaggtgacagctggggccctcttctacttcaacatgggcaagctgaagcaggagatgggcggcatcgtgacagagctgatccgggactacaacagcagccgggaggacagcctgcaggatgcctgggactatgtgcaggcccaggtgaagtgctgcggctgggtgtccttctacaactggacagacaatgctgagctgatgaacagacctgaggtgacctacccctgcagctgtgaggtgaagggggaggaggacaacagcctgtctgtgaggaagggcttctgtgaggcccctggcaacagaacccagagcggcaaccaccctgaggactggcctgtgtaccaggagggctgcatggagaaggtgcaggcctggctgcaggagaacctgggcatcatcctgggcgtgggcgtgggcgtggccatcatcgagctgctgggcatggtgctgagcatctgcctgtgcagacatgtgcacagcgaggactacagcaaggtgcccaagtactag

SEQ ID NO: 20270 - DNA, 3393 bp, synthetic construct
  misc_feature 1..3393: note = Description of Artificial Sequence: Synthetic coding sequence
  source 1..3393: mol_type = other DNA
atgaagaggtctgagaagccagagggctaccggcagatgaggcccaagaccttccctgccagcaactacacagtgagcagccggcagatgctgcaggagatccgggagagcctgaggaacctgagcaagcccagtgatgctgccaaggccgagcacaacatgagcaagatgagcacagaggacccccggcaggtgaggaacccccccaagtttggcacccaccacaaggccctgcaggagatccggaacagcctgctgccctttgccaatgagaccaacagcagccgcagcaccagcgaggtgaacccccagatgctgcaggacctgcaggccgccggctttgatgaggacatggtgatccaggccctgcagaagaccaacaacagaagcattgaagctgccatcgagttcatcagcaagatgagctaccaggacccccggcgggagcagatggctgctgctgctgcccggcccatcaatgcctccatgaagccaggaaatgtgcagcagagcgtgaacaggaagcagagctggaagggcagcaaggagagcctggtgccccagagacatggcccccccctgggggagagcgtggcctaccacagcgagagccccaacagccagacagatgtgggccggcccctgagcggcagcggcatcagcgcctttgtgcaggcccaccccagcaatggccagagggtgaaccccccacctccaccccaggtgcgctctgtgaccccacctcctccaccccggggccagaccccaccaccccggggcaccaccccacctcctccttcctgggagcccaacagccagaccaagcgctacagcggcaacatggagtatgtgatcagccgcatcagccctgtgcccccaggggcctggcaggagggctacccacctccacccctgaacaccagccccatgaacccccccaaccagggccagaggggcatcagctctgtgcctgtgggccggcagcccatcatcatgcagagcagcagcaagttcaacttccccagcggccggcccggcatgcagaatggaacaggccagacagacttcatgatccaccagaatgtggtgcctgctggcaccgtgaaccggcagcccccaccaccctaccccctgacagctgccaacggccagagccccagcgccctgcagacaggaggcagcgctgcccccagcagctacaccaacggcagcatcccccagagcatgatggtgcccaacagaaacagccacaacatggagctgtacaacatctctgtgcccggcctgcagaccaactggccccagagcagcagcgccccagcccagagcagccccagcagcggccacgagatccccacctggcagcccaacatccctgtgcgcagcaacagcttcaacaaccccctgggcaacagagccagccacagcgccaacagccagcccagcgccaccaccgtgacagccatcaccccagcccccatccagcagcctgtgaagtccatgagggtgctgaagccagagctgcagacagccctggcccccacccaccccagctggatcccccagcccatccagacagtgcagcccagccccttccctgagggcacagccagcaatgtgacagtgatgcctcctgtggccgaggcccccaactaccagggccccccaccaccctaccccaagcacctgctgcaccagaaccccagcgtgcccccctatgagagcatcagcaagcccagcaaggaggaccagcccagcctgcccaaggaggatgaaagtgagaagagctatgaaaatgtggacagcggggacaaggagaagaagcagatcaccaccagccccatcaccgtgaggaagaacaagaaggatgaggagcggcgggagagccgcatccagagctacagcccccaggccttcaagttcttcatggagcagcacgtggagaatgtgctgaagagccaccagcagaggctgcacaggaagaagcagctggagaatgagatgatgagggtgggcctgagccaggatgcccaggaccagatgaggaagatgctgtgccagaaggagagcaactacatccggctgaagagggccaagatggacaagtccatgtttgtgaagatcaagaccctgggcattggagccttcggggaggtgtgcctggccaggaaggtggacaccaaggccctgtatgccaccaagaccctgaggaagaaggatgtgctgctgaggaaccaggtggcccacgtgaaggccgagcgggacatcctggccgaggccgacaatgagtgggtggtgcggctgtactacagcttccaggacaaggacaacctgtactttgtgatggactacatccctggaggagacatgatgagcctgctgatccgcatgggcatcttccctgagagcctggcccgcttctacatcgccgagctgacctgtgctgtggagagcgtgcacaagatgggcttcatccaccgggacatcaagccagacaacatcctgattgacagagatggccacatcaagctgacagactttggcctgtgcaccggcttccgctggacccatgacagcaagtactaccagagcggggaccacccccggcaggacagcatggacttcagcaatgagtggggagaccccagcagctgccgctgtggggaccggctgaagcccctggagcggcgggccgcccggcagcaccagcgctgcctggcccacagcctggtgggcacccccaactacatcgcccctgaggtgctgctgaggacaggctacacccagctgtgtgactggtggagcgtgggcgtcatcctgtttgagatgctggtgggccagccccccttcctggcccagacccccctggagacccagatgaaggtgatcaactggcagaccagcctgcacatccccccccaggccaagctgagccctgaggccagtgacctgatcatcaagctgtgccggggcccagaagatcggctgggcaagaatggagcagatgagatcaaggcccaccccttcttcaagaccatcgacttcagcagtgacctgcggcagcagagcgccagctacatccccaagatcacccaccccacagacaccagcaactttgatcctgtggaccctgacaagctgtggagcgatgacaatgaggaggagaatgtgaatgacaccctgaatggctggtacaagaatggcaagcaccctgagcacgccttctatgagttcaccttccgccgcttctttgatgacaatggctacccctacaactaccccaagcccattgaatatgagtacatcaacagccagggcagcgagcagcagagtgatgaagatgaccagaacacaggcagcgagatcaagaacagagacctggtgtatgtgtag

SEQ ID NO: 20271 - DNA, 2073 bp, synthetic construct
  misc_feature 1..2073: note = Description of Artificial Sequence: Synthetic coding sequence
  source 1..2073: mol_type = other DNA
atgaagaggtctgagaagccagagggctaccggcagatgaggcccaagaccttccctgccagcaactacacagtgagcagccggcagatgctgcaggagatccgggagagcctgaggaacctgagcaagcccagtgatgctgccaaggccgagcacaacatgagcaagatgagcacagaggacccccggcaggtgaggaacccccccaagtttggcacccaccacaaggccctgcaggagatccggaacagcctgctgccctttgccaatgagaccaacagcagccgcagcaccagcgaggtgaacccccagatgctgcaggacctgcaggccgccggctttgatgaggacatggtgatccaggccctgcagaagaccaacaacagaagcattgaagctgccatcgagttcatcagcaagatgagctaccaggacccccggcgggagcagatggctgctgctgctgcccggcccatcaatgcctccatgaagccaggaaatgtgcagcagagcgtgaacaggaagcagagctggaagggcagcaaggagagcctggtgccccagagacatggcccccccctgggggagagcgtggcctaccacagcgagagccccaacagccagacagatgtgggccggcccctgagcggcagcggcatcagcgcctttgtgcaggcccaccccagcaatggccagagggtgaaccccccacctccaccccaggtgcgctctgtgaccccacctcctccaccccggggccagaccccaccaccccggggcaccaccccacctcctccttcctgggagcccaacagccagaccaagcgctacagcggcaacatggagtatgtgatcagccgcatcagccctgtgcccccaggggcctggcaggagggctacccacctccacccctgaacaccagccccatgaacccccccaaccagggccagaggggcatcagctctgtgcctgtgggccggcagcccatcatcatgcagagcagcagcaagttcaacttccccagcggccggcccggcatgcagaatggaacaggccagacagacttcatgatccaccagaatgtggtgcctgctggcaccgtgaaccggcagcccccaccaccctaccccctgacagctgccaacggccagagccccagcgccctgcagacaggaggcagcgctgcccccagcagctacaccaacggcagcatcccccagagcatgatggtgcccaacagaaacagccacaacatggagctgtacaacatctctgtgcccggcctgcagaccaactggccccagagcagcagcgccccagcccagagcagccccagcagcggccacgagatccccacctggcagcccaacatccctgtgcgcagcaacagcttcaacaaccccctgggcaacagagccagccacagcgccaacagccagcccagcgccaccaccgtgacagccatcaccccagcccccatccagcagcctgtgaagtccatgagggtgctgaagccagagctgcagacagccctggcccccacccaccccagctggatcccccagcccatccagacagtgcagcccagccccttccctgagggcacagccagcaatgtgacagtgatgcctcctgtggccgaggcccccaactaccagggccccccaccaccctaccccaagcacctgctgcaccagaaccccagcgtgcccccctatgagagcatcagcaagcccagcaaggaggaccagcccagcctgcccaaggaggatgaaagtgagaagagctatgaaaatgtggacagcggggacaaggagaagaagcagatcaccaccagccccatcaccgtgaggaagaacaagaaggatgaggagcggcgggagagccgcatccagagctacagcccccaggccttcaagttcttcatggagcagcacgtggagaatgtgctgaagagccaccagcagaggctgcacaggaagaagcagctggagaatgagatgatgagggtgaagcccttcaagatgagcatcttcatcctgaaccacctgtttgcctggtgcctcttctag

SEQ ID NO: 20272 - DNA, 3393 bp, synthetic construct; identical to SEQ ID NO: 20270
  misc_feature 1..3393: note = Description of Artificial Sequence: Synthetic coding sequence
  source 1..3393: mol_type = other DNA

SEQ ID NO: 20273 - DNA, 3267 bp, synthetic construct
  misc_feature 1..3267: note = Description of Artificial Sequence: Synthetic coding sequence
  source 1..3267: mol_type = other DNA
atgaggcccaagaccttccctgccaccacctacagcggcaacagccggcagaggctgcaggagatccgggagggcctgaagcagcccagcaagagctctgtgcagggcctgcctgctggccccaacagcgacaccagcctggatgccaaggtgctgggcagcaaggatgccacccggcagcagcagcagatgagggccacccccaagtttggcccctaccagaaggccctgcgggagatccgctacagcctgctgccctttgccaatgaaagtggcaccagcgctgctgctgaggtgaaccggcagatgctgcaggagctggtgaatgccggctgtgaccaggagatggccggccgggccctgaagcagacaggcagccgcagcattgaagctgccctggagtacatcagcaagatgggctacctggaccccagaaatgagcagatcgtgcgggtcatcaagcagaccagccctgggaagggcctgatgcccacccctgtgacccggcggcccagctttgagggcaccggggacagctttgccagctaccaccagctgagcggcaccccctatgagggccccagctttggagcagatggccccacagccctggaggagatgccccggccctacgtggactacctgtttcctggggtgggcccccacggccctggccaccagcaccagcacccccccaagggctatggagcctctgtggaggccgccggggcccacttccccctgcagggcgcccactacggccggccccacctgctggtgcctggagagcccctgggctatggagtgcagaggagccccagcttccagagcaagaccccacctgagactggaggctacgccagcctgcccaccaagggccagggcggccccccaggggccggcctggccttccccccacctgctgctggcctgtatgtgccccacccccaccacaagcaggccggccctgctgcccaccagctgcacgtgctgggcagccgcagccaggtgtttgccagtgacagccccccccagagcctgctgacccccagcaggaacagcctgaatgtggacctgtatgagctgggcagcacctctgtgcagcagtggccagctgccaccctggcccggcgggacagcctgcagaagccaggcctggaggccccaccccgggcccacgtggccttccggccagactgccctgtgcccagcaggaccaacagcttcaacagccaccagccccggcccggccccccaggcaaggccgagcccagcctgcctgcccccaacacagtgacagctgtgacagctgcccacatcctgcaccctgtgaagtctgtgcgggtgctgcggcctgagccccagacagctgtgggccccagccacccagcctgggtgcctgccccagccccagccccagccccagccccagccccagctgctgagggcctggatgccaaggaggagcacgccctggccctgggcggggccggggccttccccctggatgtggagtatggaggccctgaccggcgctgccccccaccaccctaccccaagcacctgctgctgcggagcaagtctgagcagtatgacctggacagcctgtgtgccggcatggagcagagcctgcgggccggccccaatgaacctgagggcggggacaagagcaggaagagcgccaagggggacaagggcggcaaggacaagaagcagatccagaccagccctgtgcctgtgaggaagaacagcagagatgaggagaagcgggagagccgcatcaagagctacagcccctatgccttcaagttcttcatggagcagcacgtggagaatgtcatcaagacctaccagcagaaggtgaacagaaggctgcagctggagcaggagatggccaaggccggcctgtgtgaggccgagcaggagcagatgaggaagatcctgtaccagaaggagagcaactacaaccggctgaagagggccaagatggacaagtccatgtttgtgaagatcaagaccctgggcatcggggcctttggagaggtgtgcctggcctgcaaggtggacacccacgccctgtatgccatgaagaccctgaggaagaaggatgtgctgaacagaaaccaggtggcccacgtgaaggccgagcgggacatcctggccgaggccgacaatgagtgggtggtgaagctgtactacagcttccaggacaaggacagcctgtactttgtgatggactacatccctggaggagacatgatgagcctgctgatccgcatggaggtgtttcctgagcacctggcccgcttctacatcgccgagctgaccctggccattgaatctgtgcacaagatgggcttcatccaccgggacatcaagccagacaacatcctgattgacctggatggccacatcaagctgacagactttggcctgtgcaccggcttccgctggacccacaacagcaagtactaccagaagggcagccacgtgcggcaggacagcatggagcccagcgacctgtgggatgatgtgagcaactgccgctgtggggaccggctgaagaccctggagcagagggccaggaagcagcaccagcgctgcctggcccacagcctggtgggcacccccaactacatcgcccctgaggtgctgctgaggaagggctacacccagctgtgtgactggtggagcgtgggcgtcatcctgtttgagatgctggtgggccagccccccttcctggcccccacccccacagagacccagctgaaggtgatcaactgggagaacaccctgcacatcccagcccaggtgaagctgagccctgaggcccgggacctgatcaccaagctgtgctgcagcgctgaccaccggctgggcagaaatggagcagatgacctgaaggcccaccccttcttcagcgccatcgacttcagcagtgacatcaggaagcagcctgccccctacgtgcccaccatcagccaccccatggacaccagcaactttgatcctgtggatgaggagagcccctggaatgatgccagcgagggcagcaccaaggcctgggacaccctgaccagccccaacaacaagcaccctgagcacgccttctatgagttcaccttccgccgcttctttgatgacaatggctaccccttccgctgccccaagcccagcggggctgaggccagccaggccgagagcagtgacctggagagcagtgacctggtggaccagacagagggctgccagcctgtgtatgtgtag

SEQ ID NO: 20274 - DNA, 3267 bp, synthetic construct; identical to SEQ ID NO: 20273
  misc_feature 1..3267: note = Description of Artificial Sequence: Synthetic coding sequence
  source 1..3267: mol_type = other DNA

SEQ ID NO: 20275 - DNA, 972 bp, synthetic construct
  misc_feature 1..972: note = Description of Artificial Sequence: Synthetic coding sequence
  source 1..972: mol_type = other DNA
atggcctacgtgcctgcccctggctaccagcccacctacaaccccaccctgccctactaccagcccatccctgggggcctgaatgtgggcatgtctgtgtacatccagggcgtggccagcgagcacatgaagcgcttctttgtgaactttgtggtgggccaggaccccggcagtgatgtggccttccacttcaaccccaggtttgatggctgggacaaggtggtgttcaacaccctgcagggcggcaagtggggcagcgaggagaggaagaggtccatgcccttcaagaagggagctgcctttgagctggtgttcatcgtgctggccgagcactacaaggtggtggtgaatggaaaccccttctatgaatatggccaccggctgcccctgcagatggtgacccacctgcaggtggatggagacctgcagctgcagagcatcaacttcatcggcggccagcccctgcggccccagggcccccccatgatgccaccctacccaggccctggccactgccaccagcagctgaacagcctgcccaccatggagggcccccccaccttcaacccccctgtgccctacttcggccgcctgcagggcggcctgacagcccggaggaccatcatcatcaagggctacgtgcccccaacaggcaagagctttgccatcaacttcaaggtgggcagcagcggggacatcgccctgcacatcaaccccaggatgggaaatggaacagtggtgaggaacagcctgctgaatggctcctggggcagcgaggagaagaagatcacccacaaccccttcggccctggccagttctttgacctgagcatccgctgtggcctggaccgcttcaaggtgtatgccaacggccagcacctgtttgattttgcccaccggctgagcgccttccagagggtggacaccctggagatccagggagatgtgaccctgtcctatgtgcagatctag

SEQ ID NO: 20276 - DNA, 1530 bp, synthetic construct
  misc_feature 1..1530: note = Description of Artificial Sequence: Synthetic coding sequence
  source 1..1530: mol_type = other DNA
atgaacaatgaggaggacctgctgcaggaggacagcaccagagatgagggcaatgaaacagaggccaacagcatgaacaccctgcggaggaccaggaagaaggtgaccaagccctacgtgtgcagcacagaggtgggggagacagacatgagcaacagcaatgactgcatgagggacagcagccagatcctgaccccaccccagctgagcagcaggatgaagcacatccggcaggccatggccaagaaccggctgcagtttgtgcgctttgaggccacagacctgcacggcgtgagccgcagcaagaccatcccagcccacttcttccaggagaaggtgtcccatggagtgtgcatgccccggggctacctggaggtgatccccaaccccaaggacaatgagatgaacaacatccgggccacctgcttcaacagcgacatcgtgctgatgcctgagctgagcaccttccgggtgctgccctgggccgacagaacagcccgggtcatctgtgacaccttcaccgtgactggagagcccctgctgaccagcccccgctacatcgccaagaggcagctgagccacctgcaggccagcggcttcagcctgctgagcgccttcatctatgacttctgcatctttggagtgcctgagatcctgaacagcaagatcatctccttccctgccctgaccttcctgaacaaccacgaccagcccttcatgcaggagctggtggatggcctgtaccacactggagccaacgtggagagcttcagcagcagcaccaggcctggccagatggagatctccttcctgcctgagtttggcatcagcagcgctgacaatgccttcaccctgaggactggagtgaaggaggtggccaggaagtacaactacatcgccagcttcttcatcgagaccggcttctgtgacagcggcatcctgagccacagcctgtgggatgtggacaggaagaagaacatgttctgcagcaccagcggcacagagcagctgaccatcaccgggaagaagtggctggccggcctgctgaagcacagcgctgccctgagctgcctgatggcccccagcgtgtcctgcaggaagcgctacagcaaggacaggaaggacctgaagaagtctgtgcccaccacctggggctacaatgacaacagctgcatcttcaacatcaagtgccacggggagaagggcaccagaattgagaacaagctgggcagcgccacagccaacccctacctggtgctggccgccaccgtggccgccggcctggatggcctgcacagcagcaatgaggtgctggccggcccagatgagagcacagacttctaccaggtggagcccagcgagatccccctgaagctggaggatgccctggtggccctggaggaggaccagtgcctgcggcaggccctgggggagaccttcatccgctactttgtggccatgaagaagtatgagctggagaatgaggagattgctgctgagaggaacaagttcctggagtacttcatctag

SEQ ID NO: 20277 - DNA, 627 bp, synthetic construct
  misc_feature 1..627: note = Description of Artificial Sequence: Synthetic coding sequence
  source 1..627: mol_type = other DNA
atgaacaatgaggaggacctgctgcaggaggacagcaccagagatgagggcaatgaaacagaggccaacagcatgaacaccctgcggaggaccaggaagaaggtgaccaagccctacgtgtgcagcacagaggtgggggagacagacatgagcaacagcaatgactgcatgagggacagcagccagatcctgaccccaccccagctgagcagcaggatgaagcacatccggcaggccatggccaagaaccggctgcagtttgtgcgctttgaggccacagacctgcacggcgtgagccgcagcaagaccatcccagcccacttcttccaggagaaggtgtcccatggagtgtgcatgccccggggctacctggaggtgatccccaaccccaaggacaatgagatgaacaacatccgggccacctgcttcaacagcgacatcgtgctgatgcctgagctgagcaccttccgggtgctgccctgggccgacagaacagcccgggtcatctgtgacaccttcaccgtgacagtgtctggcatgagcatcggcaggaagacctgcagcgctgccctgctggagctgagcagcagccgcagcctgggcaagaatggctggcaggacagctag

SEQ ID NO: 20278 - DNA, 504 bp, synthetic construct
  misc_feature 1..504: note = Description of Artificial Sequence: Synthetic coding sequence
  source 1..504: mol_type = other DNA
atgcactggggcaccctgtgtggcttcctgtggctgtggccctacctgttctacgtgcaggccgtgcccatccagaaggtgcaggatgacaccaagaccctcatcaagaccatcgtgacccgcatcaatgacatcagccacacccagagcgtgagcagcaagcagaaggtgacaggcctggacttcatccctggcctgcaccccatcctgaccctgagcaagatggaccagaccctggccgtgtaccagcagatcctgacctccatgcccagcagaaatgtcatccagatcagcaatgacctggagaacctgcgggacctgctgcacgtgctggccttcagcaagagctgccacctgccctgggccagcggcctggagaccctggacagcctgggcggcgtgctggaggccagcggctacagcacagaggtggtggccctgagccggctgcagggcagcctgcaggacatgctgtggcagctggacctgagccctggctgctag

SEQ ID NO: 20279 - DNA, 1791 bp, synthetic construct
  misc_feature 1..1791: note = Description of Artificial Sequence: Synthetic coding sequence
  source 1..1791: mol_type = other DNA
atgggctctgtgagcagcctcatcagcggccacagcttccacagcaagcactgccgggccagccagtacaagctgaggaagagcagccacctgaagaagctgaaccgctacagtgatggcctgctgcgcttcggcttcagccaggacagcggccacggcaagagcagcagcaagatgggcaagtctgaggacttcttctacatcaaggtgtcccagaaggcccggggcagccaccacccagactacacagccctgagcagcggggacctgggcggccaggccggcgtggactttgaccccagcaccccacccaagctgatgcccttcagcaaccagctggagatgggcagcgagaagggagctgtgcggcccacagccttcaagcctgtgctgcccaggtctggggccatcctgcacagcagccctgagagcgccagccaccagctgcacccagcccccccagacaagcccaaggagcaggagctgaagccaggcctgtgcagcggggccctgagtgacagcggcaggaacagcatgagcagcctgcccacccacagcaccagcagcagctaccagctggaccccctggtgacccctgtgggccccaccagcagatttggaggcagcgcccacaacatcacccagggcatcgtgctgcaggacagcaacatgatgagcctgaaggccctgtccttcagtgatggcggcagcaagctgggccacagcaacaaggctgacaagggccccagctgtgtgcgcagccccatcagcacagatgagtgcagcatccaggagctggagcagaagctgctggagcgggagggcgccctgcagaagctgcagaggagctttgaggagaaggagctggccagcagcctggcctatgaggagcggccccggcgctgcagagatgagctggagggccctgagcccaagggcggcaacaagctgaagcaggccagccagaagagccagagggcccagcaggtgctgcacctgcaggtgctgcagctgcagcaggagaagaggcagctgcggcaggagctggagagcctgatgaaggagcaggacctgctggagaccaagctgcggagctatgaaagagagaagaccagctttggacctgccctggaggagacccagtgggaggtgtgccagaagagcggggagatcagcctgctgaagcagcagctgaaggagagccagacagaggtgaatgccaaggccagcgagatcctgggcctgaaggcccagctgaaggacacccggggcaagctggagggcctggagctgcggacccaggacctggagggcgccctgcggaccaagggcctggagctggaggtgtgtgaaaatgagctgcagaggaagaagaatgaagctgagctgctgcgggagaaggtgaacctgctggagcaggagctgcaggagctgcgggcccaggccgccctggcccgggacatgggcccccccaccttcccagaagatgtgcctgccctgcagcgggagctggagcggctgcgggcagagctgcgggaggagcggcagggccatgaccagatgagcagcggcttccagcacgagcggctggtgtggaaggaggagaaggagaaggtgatccagtaccagaagcagctgcagcagagctatgtggccatgtaccagaggaaccagaggctggagaaggccctgcagcagctggcccggggggacagcgctggggagcccctggaggtggacctggagggcgctgacatcccctatgaggacatcatcgccacagagatctag

SEQ ID NO: 20280 - DNA, 231 bp, synthetic construct
  misc_feature 1..231: note = Description of Artificial Sequence: Synthetic coding sequence
  source 1..231: mol_type = other DNA
atgggctctgtgagcagcctcatcagcggccacagcttccacagcaagcactgccgggccagccagtacaagctgaggaagagcagccacctgaagaagctgaaccgctacagtgatggcctgctgcgcttcggcttcagccaggacagcggccacggcaaggccatgacccgctgcccccgggccagctccatgagcggcagctgtggcagaagaagaagaagaagatag

SEQ ID NO: 20281 - DNA, 1722 bp, synthetic construct
  misc_feature 1..1722: note = Description of Artificial Sequence: Synthetic coding sequence
  source 1..1722: mol_type = other DNA
atgggctctgtgagcagcctcatcagcggccacagcttccacagcaagcactgccgggccagccagtacaagctgaggaagagcagccacctgaagaagctgaaccgctacagtgatggcctgctgcgcttcggcttcagccaggacagcggccacggcaagagcagcagcaagatgggcaagtctgaggacttcttctacatcaaggtgtcccagaaggcccggggcagccaccacccagactacacagccctgagcagcggggacctgggcggccaggccggcgtggactttgaccccagcaccccacccaagctgatgcccttcagcaaccagctggagatgggcagcgagaagggagctgtgcggcccacagccttcaagcctgtgctgcccaggtctggggccatcctgcacagcagccctgagagcgccagccaccagctgcacccagcccccccagacaagcccaaggagcaggagctgaagccaggcctgtgcagcggggccctgagtgacagcggcaggaacagcatgagcagcctgcccacccacagcaccagcagcagctaccagctggaccccctggtgacccctgtgggccccaccagcagatttggaggcagcgcccacaacatcacccagggcatcgtgctgcaggacagcaacatgatgagcctgaaggccctgtccttcagtgatggcggcagcaagctgggccacagcaacaaggctgacaagggccccagctgtgtgcgcagccccatcagcacagatgagtgcagcatccaggagctggagcagaagctgctggagcgggagggcgccctgcagaagctgcagaggagctttgaggagaaggagctggccagcagcctggcctatgaggagcggccccggcgctgcagagatgagctggagggccctgagcccaagggcggcaacaagctgaagcaggccagccagaagagccagagggcccagcaggtgctgcacctgcaggtgctgcagctgcagcaggagaagaggcagctgcggcaggagctggagagcctgatgaaggagcaggacctgctggagaccaagctgcggagctatgaaagagagaagaccagctttggacctgccctggaggagacccagtgggaggtgtgccagaagagcggggagatcagcctgctgaagcagcagctgaaggagagccagacagaggtgaatgccaaggccagcgagatcctgggcctgaaggcccagctgaaggacacccggggcaagctggagggcctggagctgcggacccaggacctggagggcgccctgcggaccaagggcctggagctggaggtgtgtgaaaatgagctgcagaggaagaagaatgaagctgagctgctgcgggagaaggtgaacctgctggagcaggagctgcaggagctgcgggcccaggccgccctggcccgggacatgggcccccccaccttcccagaagatgtgcctgccctgcagcgggagctggagcggctggtgtggaaggaggagaaggagaaggtgatccagtaccagaagcagctgcagcagagctatgtggccatgtaccagaggaaccagaggctggagaaggccctgcagcagctggcccggggggacagcgctggggagcccctggaggtggacctggagggcgctgacatcccctatgaggacatcatcgccacagagatctag

SEQ ID NO: 20282 - DNA, 1791 bp, synthetic construct; identical to SEQ ID NO: 20279
  misc_feature 1..1791: note = Description of Artificial Sequence: Synthetic coding sequence
  source 1..1791: mol_type = other DNA

SEQ ID NO: 20283 - DNA, 1614 bp, synthetic construct
  misc_feature 1..1614: note = Description of Artificial Sequence: Synthetic coding sequence
  source 1..1614: mol_type = other DNA
atgggctctgtgagcagcctcatcagcggccacagcttccacagcaagcactgccgggccagccagtacaagctgaggaagagcagccacctgaagaagctgaaccgctacagtgatggcctgctgcgcttcggcttcagccaggacagcggccacggcaagagcagcagcaagatgggcaagtctgaggacttcttctacatcaaggtgtcccagaaggcccggggcagccaccacccagactacacagccctgagcagcggggacctgggcggccaggccggcgtggactttgaccccagcaccccacccaagctgatgcccttcagcaaccagctggagatgggcagcgagaagggagctgtgcggcccacagccttcaagcctgtgctgcccaggtctggggccatcctgcacagcagccctgagagcgccagccaccagctgcacccagcccccccagacaagcccaaggagcaggagctgaagccaggcctgtgcagcggggccctgagtgacagcggcaggaacagcatgagcagcctgcccacccacagcaccagcagcagctaccagctggaccccctggtgacccctgtgggccccaccagcagatttggaggcagcgcccacaacatcacccagggcatcgtgctgcaggacagcaacatgatgagcctgaaggccctgtccttcagtgatggcggcagcaagctgggccacagcaacaaggctgacaagggccccagctgtgtgcgcagccccatcagcacagatgagtgcagcatccaggagctggagcagaagctgctggagcgggagggcgccctgcagaagctgcagaggagctttgaggagaaggagctggccagcagcctggcctatgaggagcggccccggcgctgcagagatgagctggagggccctgagcccaagggcggcaacaagctgaagcaggccagccagaagagccagagggcccagcaggtgctgcacctgcaggtgctgcagctgcagcaggagaagaggcagctgcggcaggagctggagagcctgatgaaggagcaggacctgctggagaccaagctgcggagctatgaaagagagaagaccagctttggacctgccctggaggagacccagtgggaggtgtgccagaagagcggggagatcagcctgctgaagcagcagctgaaggagagccagacagaggtgaatgccaaggccagcgagatcctgggcctgaaggcccagctgaaggacacccggggcaagctggagggcctggagctgcggacccaggacctggagggcgccctgcggaccaagggcctggagctggaggtgtgtgaaaatgagctgcagaggaagaagaatgaagctgagctgctgcgggagaagcatgagcggctggtgtggaaggaggagaaggagaaggtgatccagtaccagaagcagctgcagcagagctatgtggccatgtaccagaggaaccagaggctggagaaggccctgcagcagctggcccggggggacagcgctggggagcccctggaggtggacctggagggcgctgacatcccctatgaggacatcatcgccacagagatctag

SEQ ID NO: 20284 - DNA, 1005 bp, synthetic construct
  misc_feature 1..1005: note = Description of Artificial Sequence: Synthetic coding sequence
  source 1..1005: mol_type = other DNA
atgacagaaaattctgacaaggtgcccatcgccctggtgggcccagatgatgtggagttctgcagccccccagcctatgccaccctgactgtgaagcccagcagccctgcccggctgctgaaggtgggcgctgtggtgctgatctctggagctgtgctgctgctgtttggagccatcggggccttctacttctggaagggcagtgacagccacatctacaacgtgcactacaccatgagcatcaacgggaagctgcaggacggctccatggagattgatgctggcaacaacctggagaccttcaagatgggcagcggggctgaggaggccatcgctgtgaatgacttccagaatggcatcaccggcatccgctttgctggaggagagaagtgctacatcaaggcccaggtgaaggcccgcatccctgaggtgggcgctgtgaccaagcagagcatcagcagcaagctggagggcaagatcatgcctgtgaagtatgaggagaacagcctcatctgggtggccgtggaccagcctgtgaaggacaacagcttcctgagcagcaaggtgctggagctgtgtggggacctgcccatcttctggctgaagcccacctaccccaaggagatccagcgggagcggcgggaggtggtgaggaagatcgtgcccaccaccaccaagaggccccacagcggccccaggagcaaccctggggccggccgcctgaacaatgagacccggcccagcgtgcaggaggacagccaggccttcaacccagacaacccctaccaccagcaggagggggagagcatgacctttgacccccggctggaccacgagggcatctgctgcattgaatgtagaagaagctacacccactgccagaagatctgtgagcccctgggcggctactacccctggccctacaactaccagggctgccgcagcgcctgcagggtcatcatgccctgctcctggtgggtggcccgcatcctgggcatggtgtag

SEQ ID NO: 20285 - DNA, 390 bp, synthetic construct
  misc_feature 1..390: note = Description of Artificial Sequence: Synthetic coding sequence
  source 1..390: mol_type = other DNA
atgagcatcaacgggaagctgcaggacggctccatggagattgatgctggcaacaacctggagaccttcaagatgggcagcggggctgaggaggccatcgctgtgaatgacttccagaatggcatcaccggcatccgctttgctggaggagagaagtgctacatcaaggcccaggtgaaggcccgcatccctgaggtgggcgctgtgaccaagcagagcatcagcagcaagctggagggcaagatcatgcctgtgaagtatgaggagaacagcctcatctgggtggccgtggaccagcctgtgaaggacaacagcttcctgagcagcaaggtgctggagctgtgtggggacctgcccatcttctggctgaagcccacctaccccaagtag

SEQ ID NO: 20286 - DNA, 1002 bp, synthetic construct
  misc_feature 1..1002: note = Description of Artificial Sequence: Synthetic coding sequence
  source 1..1002: mol_type = other DNA
atgacagaaaattctgacaaggtgcccatcgccctggtgggcccagatgatgtggagttctgcagccccccagcctatgccaccctgactgtgaagcccagcagccctgcccggctgctgaaggtgggcgctgtggtgctgatctctggagctgtgctgctgctgtttggagccatcggggccttctacttctggaagggcagtgacagccacatctacaacgtgcactacaccatgagcatcaacgggaagctgcaggacggctccatggagattgatgctggcaacaacctggagaccttcaagatgggcagcggggctgaggaggccatcgctgtgaatgacttccagaatggcatcaccggcatccgctttgctggaggagagaagtgctacatcaaggcccaggtgaaggcccgcatccctgaggtgggcgctgtgaccaagcagagcatcagcagcaagctggagggcaagatcatgcctgtgaagtatgaggagaacagcctcatctgggtggccgtggaccagcctgtgaaggacaacagcttcctgagcagcaaggtgctggagctgtgtggggacctgcccatcttctggctgaagcccacctaccccaaggagatccagcgggagcggcgggaggtggtgaggaagatcgtgcccaccaccaccaagaggccccacagcggccccaggagcaaccctggggccggccgcctgaacaatgagacccggcccagcgtgcaggaggacagccaggccttcaacccagacaacccctaccaccaggagggggagagcatgacctttgacccccggctggaccacgagggcatctgctgcatcgagtgccgccgcagctacacccactgccagaagatctgtgagcccctgggcggctactacccctggccctacaactaccagggctgccgcagcgcctgcagggtcatcatgccctgctcctggtgggtggcccgcatcctgggcatggtgtag

SEQ ID NO: 20287 - DNA, 408 bp, synthetic construct
  misc_feature 1..408: note = Description of Artificial Sequence: Synthetic coding sequence
  source 1..408: mol_type = other DNA
atgaatgaggtgatcatctacaacgtgctgctgctgcggaccatcagctgcatcagcgagacctacggccactacctgatccactgccccagcaagatcagccctgagctgctgaagaaggagagcatcaccaacagctatgcccacttccagatctacaacgtgcactacaccatgagcatcaacgggaagctgcaggacggctccatggagattgatgctggcaacaacctggagaccttcaagatgggcagcggggctgaggaggccatcgctgtgaatgacttccagaatgtgtccatcttccacgccttccgggagttcaaccaggccagcctgcgggacttcagcaacagccgccgcagctctgtgagccacacccaccccaacggcaactgcagcctgtag

SEQ ID NO: 20288 - DNA, 2760 bp, synthetic construct
  misc_feature 1..2760: note = Description of Artificial Sequence: Synthetic coding sequence
  source 1..2760: mol_type = other DNA
atgcagaggagcatcatgtccttcttccaccccaagaaggagggcaaggccaagaagccagagaaggaggccagcaacagcagccgggagacagagcccccacccaaggccgccctgaaggagtggaatggagtggtgtctgagagtgacagccctgtgaagaggcctggcaggaaggccgcccgggtgctgggcagcgagggggaggaggaggatgaggccctgagccctgccaagggccagaagccagccctggactgcagccaggtgagcccccccaggcctgccaccagccctgagaacaatgccagcctgagtgacaccagccccatggacagcagccccagcggcatccccaagagaagaacagccaggaagcagctgcccaagaggaccatccaggaggtgctggaggagcagagtgaagatgaggaccgggaggccaagaggaagaaggaggaggaggaggaggagacccccaaggagagcctgacagaagctgaggtggccacagagaaggagggggaggatggagaccagcccaccaccccacccaagcccctgaagaccagcaaggccgagacccccacagaatctgtgtctgagcctgaggtggccaccaagcaggagctgcaggaggaggaggagcagaccaagccaccccggcgggcccccaagaccctgagcagcttcttcacccccaggaagccagctgtgaagaaggaggtgaaggaggaggagcccggggcccctgggaaggagggcgctgctgagggccccctggaccccagcggctacaacccagccaagaacaactaccaccctgtggaggatgcctgctggaagccaggccagaaggtgccctacctggccgtggcccggacctttgagaagattgaggaggtgtctgcccggctgaggatggtggagaccctgagcaacctgctgcggtctgtggtggccctgagccccccagacctgctgcctgtgctgtacctgagcctgaaccacctgggccccccccagcagggcctggagctgggcgtgggagatggagtgctgctgaaggctgtggcccaggccaccggccggcagctggagagcgtgcgggcagaggccgctgagaagggagatgtgggcctggtggccgagaacagccgcagcacccagaggctgatgctgcccccaccacccctgacagccagcggggtcttcagcaagttccgggacatcgcccggctgactggaagtgccagcacagccaagaagattgacatcatcaagggcctgtttgtggcctgccgccacagcgaggcccgcttcatcgcccggagcctgagcggccgcctgcggctgggcctggccgagcagagcgtgctggccgccctgagccaggccgtgtccctgaccccacctggccaggagttccccccagccatggtggatgctgggaagggcaagacagctgaggccaggaagacctggctggaggagcagggcatgatcctgaagcagaccttctgtgaggtgcctgacctggaccgcatcatccctgtgctgctggagcacggcctggagcggctgcctgagcactgcaagctgagccctggcatccccctgaagcccatgctggcccaccccacccggggcatcagcgaggtgctgaagagatttgaggaggccgccttcacctgtgagtacaagtatgatggccagagggcccagatccacgccctggagggcggggaggtgaagatcttcagcaggaaccaggaggacaacacaggcaagtacccagacatcatcagccgcatccccaagatcaagctgcccagcgtgaccagcttcatcctggacacagaggccgtggcctgggaccgggagaagaagcagatccagcccttccaggtgctgaccaccaggaagaggaaggaggtggatgccagcgagatccaggtgcaggtgtgcctgtatgcctttgacctgatctacctgaatggagagagcctggtgcgggagcccctgagcagaagacggcagctgctgcgggagaactttgtggagacagaaggagaatttgtgtttgccaccagcctggacaccaaggacatcgagcagattgctgagttcctggagcagagcgtgaaggacagctgtgagggcctgatggtgaagaccctggatgtggatgccacctatgaaattgccaagaggagccacaactggctgaagctgaagaaggactacctggatggagtgggggacaccctggacctggtggtgattggagcctacctgggccggggcaagagagctggccgctatggaggcttcctgctggccagctatgatgaagattctgaggagctgcaggccatctgcaagctgggcaccggcttcagtgatgaggagctggaggagcaccaccagagcctgaaggccctggtgctgcccagcccccggccctacgtgagaattgatggagctgtgatcccagaccactggctggaccccagcgctgtgtgggaggtgaagtgtgccgacctgagcctgagccccatctacccagctgcccggggcctggtggacagcgacaagggcatcagcctgcgcttcccccgcttcatccgggtgcgggaggacaagcagcctgagcaggccaccaccagcgcccaggtggcctgcctgtacaggaagcagagccagatccagaaccagcagggagaagattctggcagtgaccctgaggacacctactag

SEQ ID NO: 20289 - DNA, 2667 bp, synthetic construct
  misc_feature 1..2667: note = Description of Artificial Sequence: Synthetic coding sequence
  source 1..2667: mol_type = other DNA
atgcagaggagcatcatggccgccctgaaggagtggaatggagtggtgtctgagagtgacagccctgtgaagaggcctggcaggaaggccgcccgggtgctgggcagcgagggggaggaggaggatgaggccctgagccctgccaagggccagaagccagccctggactgcagccaggtgagcccccccaggcctgccaccagccctgagaacaatgccagcctgagtgacaccagccccatggacagcagccccagcggcatccccaagagaagaacagccaggaagcagctgcccaagaggaccatccaggaggtgctggaggagcagagtgaagatgaggaccgggaggccaagaggaagaaggaggaggaggaggagacccccaaggagagcctgacagaggccgaggtggccacagagaaggagggagaagatggagaccagcccaccaccccacccaagcccctgaagaccagcaaggccgagacccccacagagagcgtgtctgagcctgaggtggccaccaagcaggagctgcaggaggaggaggagcagaccaagcccccaagaagagcccccaagaccctgagcagcttcttcacccccaggaagccagctgtgaagaaggaggtgaaggaggaggagcccggggcccctgggaaggagggcgctgctgagggccccctggaccccagcggctacaacccagccaagaacaactaccaccctgtggaggatgcctgctggaagccaggccagaaggtgccctacctggccgtggcccggacctttgagaagattgaggaggtgtctgcccggctgaggatggtggagaccctgagcaacctgctgcggtctgtggtggccctgagccccccagacctgctgcctgtgctgtacctgagcctgaaccacctgggccccccccagcagggcctggagctgggcgtgggagatggagtgctgctgaaggctgtggcccaggccaccggccggcagctggagagcgtgcgggcagaggccgctgagaagggagatgtgggcctggtggccgagaacagccgcagcacccagaggctgatgctgcccccaccacccctgacagccagcggggtcttcagcaagttccgggacatcgcccggctgaccggcagcgccagcacagccaagaagattgacatcatcaagggcctgtttgtggcctgccgccacagcgaggcccgcttcatcgcccggagcctgagcggccgcctgcggctgggcctggccgagcagagcgtgctggccgccctgagccaggccgtgtccctgaccccacctggccaggagttccccccagccatggtggatgctgggaagggcaagacagctgaggccaggaagacctggctggaggagcagggcatgatcctgaagcagaccttctgtgaggtgcctgacctggaccgcatcatccctgtgctgctggagcacggcctggagcggctgcctgagcactgcaagctgagccctggcatccccctgaagcccatgctggcccaccccacccggggcatcagcgaggtgctgaagagatttgaggaggccgccttcacctgtgagtacaagtatgatggccagagggcccagatccacgccctggagggcggggaggtgaagatcttcagcaggaaccaggaggacaacacaggcaagtacccagacatcatcagccgcatccccaagatcaagctgcccagcgtgaccagcttcatcctggacacagaagctgtggcctgggaccgggagaagaagcagatccagcccttccaggtgctgaccaccaggaagaggaaggaggtggatgccagcgagatccaggtgcaggtgtgcctgtatgcctttgacctgatctacctgaatggagagagcctggtgcgggagcccctgagcagaagacggcagctgctgagagaaaattttgtggagacagaaggagaatttgtgtttgccaccagcctggacaccaaggacatcgagcagattgctgagttcctggagcagagcgtgaaggacagctgtgagggcctgatggtgaagaccctggatgtggatgccacctatgagatcgccaagaggagccacaactggctgaagctgaagaaggactacctggatggagtgggggacaccctggacctggtggtgattggagcctacctgggccggggcaagagagctggccgctatggaggcttcctgctggccagctatgatgaggacagcgaggagctgcaggccatctgcaagctgggcaccggcttcagtgatgaggagctggaggagcaccaccagagcctgaaggccctggtgctgcccagcccccggccctacgtgagaattgatggagctgtgatcccagaccactggctggaccccagcgctgtgtgggaggtgaagtgtgccgacctgagcctgagccccatctacccagctgcccggggcctggtggacagcgacaagggcatcagcctgcgcttcccccgcttcatccgggtgcgggaggacaagcagcctgagcaggccaccaccagcgcccaggtggcctgcctgtacaggaagcagagccagatccagaaccagcagggcgaggacagcggcagtgaccctgaggacacctactag

SEQ ID NO: 20290 - DNA, 2556 bp, synthetic construct
  misc_feature 1..2556: note = Description of Artificial Sequence: Synthetic coding sequence
  source 1..2556: mol_type = other DNA
atgcagaggagcatcatgtccttcttccaccccaagaaggagggcaaggccaagaagccagagaaggaggccagcaacagcagccgggagacagagcccccacccaaggccgccctgaaggagtggaatggagtggtgtctgagagtgacagccctgtgaagaggcctggcaggaaggccgcccgggtgctgggcagcgagggggaggaggaggatgaggccctgagccctgccaagggccagaagccagccctggactgcagccaggtgagcccccccaggcctgccaccagccctgagaacaatgccagcctgagtgacaccagccccatggacagcagccccagcggcatccccaagagaagaacagaagctgagacccccacagaatctgtgtctgagcctgaggtggccaccaagcaggagctgcaggaggaggaggagcagaccaagccaccccggcgggcccccaagaccctgagcagcttcttcacccccaggaagccagctgtgaagaaggaggtgaaggaggaggagcccggggcccctgggaaggagggcgctgctgagggccccctggaccccagcggctacaacccagccaagaacaactaccaccctgtggaggatgcctgctggaagccaggccagaaggtgccctacctggccgtggcccggacctttgagaagattgaggaggtgtctgcccggctgaggatggtggagaccctgagcaacctgctgcggtctgtggtggccctgagccccccagacctgctgcctgtgctgtacctgagcctgaaccacctgggccccccccagcagggcctggagctgggcgtgggagatggagtgctgctgaaggctgtggcccaggccaccggccggcagctggagagcgtgcgggcagaggccgctgagaagggagatgtgggcctggtggccgagaacagccgcagcacccagaggctgatgctgcccccaccacccctgacagccagcggggtcttcagcaagttccgggacatcgcccggctgactggaagtgccagcacagccaagaagattgacatcatcaagggcctgtttgtggcctgccgccacagcgaggcccgcttcatcgcccggagcctgagcggccgcctgcggctgggcctggccgagcagagcgtgctggccgccctgagccaggccgtgtccctgaccccacctggccaggagttccccccagccatggtggatgctgggaagggcaagacagctgaggccaggaagacctggctggaggagcagggcatgatcctgaagcagaccttctgtgaggtgcctgacctggaccgcatcatccctgtgctgctggagcacggcctggagcggctgcctgagcactgcaagctgagccctggcatccccctgaagcccatgctggcccaccccacccggggcatcagcgaggtgctgaagagatttgaggaggccgccttcacctgtgagtacaagtatgatggccagagggcccagatccacgccctggagggcggggaggtgaagatcttcagcaggaaccaggaggacaacacaggcaagtacccagacatcatcagccgcatccccaagatcaagctgcccagcgtgaccagcttcatcctggacacagaggccgtggcctgggaccgggagaagaagcagatccagcccttccaggtgctgaccaccaggaagaggaaggaggtggatgccagcgagatccaggtgcaggtgtgcctgtatgcctttgacctgatctacctgaatggagagagcctggtgcgggagcccctgagcagaagacggcagctgctgcgggagaactttgtggagacagaaggagaatttgtgtttgccaccagcctggacaccaaggacatcgagcagattgctgagttcctggagcagagcgtgaaggacagctgtgagggcctgatggtgaagaccctggatgtggatgccacctatgaaattgccaagaggagccacaactggctgaagctgaagaaggactacctggatggagtgggggacaccctggacctggtggtgattggagcctacctgggccggggcaagagagctggccgctatggaggcttcctgctggccagctatgatgaagattctgaggagctgcaggccatctgcaagctgggcaccggcttcagtgatgaggagctggaggagcaccaccagagcctgaaggccctggtgctgcccagcccccggccctacgtgagaattgatggagctgtgatcccagaccactggctggaccccagcgctgtgtgggaggtgaagtgtgccgacctgagcctgagccccatctacccagctgcccggggcctggtggacagcgacaagggcatcagcctgcgcttcccccgcttcatccgggtgcgggaggacaagcagcctgagcaggccaccaccagcgcccaggtggcctgcctgtacaggaagcagagccagatccagaaccagcagggagaagattctggcagtgaccctgaggacacctactag

SEQ ID NO: 20291 - DNA, 1248 bp, synthetic construct
  misc_feature 1..1248: note = Description of Artificial Sequence: Synthetic coding sequence
  source 1..1248: mol_type = other DNA
atgcagaggagcatcatgtccttcttccaccccaagaaggagggcaaggccaagaagccagagaaggaggccagcaacagcagccgggagacagagcccccacccaaggccgccctgaaggagtggaatggagtggtgtctgagagtgacagccctgtgaagaggcctggcaggaaggccgcccgggtgctgggcagcgagggggaggaggaggatgaggccctgagccctgccaagggccagaagccagccctggactgcagccaggtgagcccccccaggcctgccaccagccctgagaacaatgccagcctgagtgacaccagccccatggacagcagccccagcggcatccccaagagaagaacagaggaggagacccccaaggagagcctgacagaagctgaggtggccacagagaaggagggggaggatggagaccagcccaccaccccacccaagcccctgaagaccagcaaggccgagacccccacagaatctgtgtctgagcctgaggtggccaccaagcaggagctgcaggaggaggaggagcagaccaagccaccccggcgggcccccaagaccctgagcagcttcttcacccccaggaagccagctgtgaagaaggaggtgaaggaggaggagcccggggcccctgggaaggagggcgctgctgagggccccctggaccccagcggctacaacccagccaagaacaactaccaccctgtggaggatgcctgctggaagccaggccagaaggtgccctacctggccgtggcccggacctttgagaagattgaggaggtgtctgcccggctgaggatggtggagaccctgagcaacctgctgcggtctgtggtggccctgagccccccagacctgctgcctgtgctgtacctgagcctgaaccacctgggccccccccagcagggcctggagctgggcgtgggagatggagtgctgctgaaggctgtggcccaggccaccggccgggagcggcgggagaccaggagccacaactgccaccccaggcacccccaccccaggagccccctgaaggtgggctcctggagccccagcggcctgcggcagcccaggaaggccacctggggctggtggcccaggacagctgctgccccccggggcagctgctgccaccacctgcggagcctgcccccaggcagcagcgccagcagcgccaccagccctggcagcctggccgtgctgccccagcccaggaggtag

SEQ ID NO: 20292 - DNA, 2499 bp, synthetic construct
  misc_feature 1..2499: note = Description of Artificial Sequence: Synthetic coding sequence
  source 1..2499: mol_type = other DNA
gtgtgctgccccggcagcggggcccgggaccagaggaaggcccggctgacagatgaggagaagtgctggacaggaagagaaaattctgatgccaacatgcagaggagcatcatgtccttcttccaccccaagaaggagggcaaggccaagaagccagagaaggaggccagcaacagcagccgggagacagagcccccacccaaggccgccctgaaggagtggaatggagtggtgtctgagagtgacagccctgtgaagaggcctggcaggaaggccgcccgggtgctgggcagcgagggggaggaggaggatgaggccctgagccctgccaagggccagaagccagccctggactgcagccaggtgagcccccccaggcctgccaccagccctgagaacaatgccagcctgagtgacaccagccccatggacagcagccccagcggcatccccaagagaagaacagccaggaagcagctgcccaagaggaccatccaggaggtgctggaggagcagagtgaagatgaggaccgggaggccaagaggaagaaggaggaggaggaggagacccccaaggagagcctgacagaggccgaggtggccacagagaaggagggagaagatggagaccagcccaccaccccacccaagcccctgaagaccagcaaggccgagacccccacagagagcgtgtctgagcctgaggtggccaccaagcaggagctgcaggaggaggaggagcagaccaagcccccaagaagagcccccaagaccctgagcagcttcttcacccccaggaagccagctgtgaagaaggaggtgaaggaggaggagcccggggcccctgggaaggagggcgctgctgagggccccctggaccccagcggctacaacccagccaagaacaactaccaccctgtggaggatgcctgctggaagccaggccagaaggtgccctacctggccgtggcccggacctttgagaagattgaggaggtgtctgcccggctgaggatggtggagaccctgagcaacctgctgcggtctgtggtggccctgagccccccagacctgctgcctgtgctgtacctgagcctgaaccacctgggccccccccagcagggcctggagctgggcgtgggagatggagtgctgctgaaggctgtggcccaggccaccggccggcagctggagagcgtgcgggcagaggccgctgagaagggagatgtgggcctggtggccgagaacagccgcagcacccagaggctgatgctgcccccaccacccctgacagccagcggggtcttcagcaagttccgggacatcgcccggctgaccggcagcgccagcacagccaagaagattgacatcatcaagggcctgtttgtggcctgccgccacagcgaggcccgcttcatcgcccggagcctgagcggccgcctgcggctgggcctggccgagcagagcgtgctggccgccctgagccaggccgtgtccctgaccccacctggccaggagttccccccagccatggtggatgctgggaagggcaagacagctgaggccaggaagacctggctggaggagcagggcatgatcctgaagcagaccttctgtgaggtgcctgacctggaccgcatcatccctgtgctgctggagcacggcctggagcggctgcctgagcactgcaagctgagccctggcatccccctgaagcccatgctggcccaccccacccggggcatcagcgaggtgctgaagagatttgaggaggccgccttcacctgtgagtacaagtatgatggccagagggcccagatccacgccctggagggcggggaggtgaagatcttcagcaggaaccaggaggacaacacaggcaagtacccagacatcatcagccgcatccccaagatcaagctgcccagcgtgaccagcttcatcctggacacagaagctgtggcctgggaccgggagaagaagcagatccagcccttccaggtgctgaccaccaggaagaggaaggaggtggatgccagcgagatccaggtgcaggtgtgcctgtatgcctttgacctgatctacctgaatggagagagcctggtgcgggagcccctgagcagaagacggcagctgctgagagaaaattttgtggagacagaaggagaatttgtgtttgccaccagcctggacaccaaggacatcgagcagattgctgagttcctggagcagagcgtgaaggacagctgtgagggcctgatggtgaagaccctggatgtggatgccacctatgagatcgccaagaggagccacaactggctgaagctgaagaaggactacctggatggagtgggggacaccctggacctggtggtgattggagcctacctgggccggggcaagagagctggccgctatggaggcttcctgctggccagctatgatgaggacagcgaggagctgcaggccatctgcaaggtgctgggcaactggggctag

SEQ ID NO: 20293 - DNA, 2850 bp, synthetic construct
  misc_feature 1..2850: note = Description of Artificial Sequence: Synthetic coding sequence
  source 1..2850: mol_type = other DNA
atgagcctggccttcaagatcttcttcccccagaccctgcgggccctgagcaggaaggagctgtgcctcttcaggaagcaccactggagagatgtgcggcagttcagccagtggagcgagacagacctgctgcacggccaccccctcttcctgcggaggaagcctgtgctgtccttccagggcagccacctgcggagccgggccacctacctggtgttcctgcccggcctgcacgtgggcctgtgcagcggcccctgtgagatggccgagcagcgcttctgtgtggactatgccaagaggggcacagctggctgcaagaagtgcaaggagaagatcgtgaagggcgtgtgcagaattggcaaggtggtgcccaaccccttcagcgagagcggcggggacatgaaggagtggtaccacatcaagtgcatgtttgagaagctggagcgggcccgggccaccaccaagaagattgaggacctgacagagctggagggctgggaggagctggaggacaatgagaaggagcagatcacccagcacatcgctgacctgagcagcaaggctgctggcacccccaagaagaaggctgtggtgcaggccaagctgaccaccaccggccaggtgaccagccctgtgaagggggccagctttgtgaccagcaccaaccccaggaagttcagcggcttcagcgccaagcccaacaacagcggggaggcccccagcagccccacccccaagaggagcctgagcagcagcaaatgtgaccccaggcacaaggactgcctgctgcgggagttcaggaagctgtgtgccatggtggccgacaaccccagctacaacaccaagacccagatcatccaggacttcctgaggaagggcagcgctggagatggcttccatggagatgtgtacctgactgtgaagctgctgctgcccggggtcatcaagacagtgtacaacctgaatgacaagcagatcgtgaagctgttcagccgcatcttcaactgcaacccagatgacatggcccgggacctggagcagggagatgtgtctgagaccatccgggtcttctttgagcagagcaagagcttccccccagctgccaagagcctgctgaccatccaggaggtggatgagttcctgctgcggctgagcaagctgaccaaggaggatgagcagcagcaggccctgcaggacatcgccagccgctgcacagccaatgacctgaagtgcatcatccgcctcatcaagcatgacctgaagatgaacagcggggccaagcacgtgctggatgccctggaccccaatgcctatgaggccttcaaggccagcaggaacctgcaggatgtggtggagcgggtgctgcacaatgcccaggaggtggagaaggagcccggccagaggcgggccctgtctgtgcaggccagcctgatgacccctgtgcagcccatgctggccgaggcctgcaagtctgtggagtatgccatgaagaagtgccccaacggcatgttttctgagatcaagtatgatggagagcgggtgcaggtgcacaagaatggagaccacttctcctacttcagccgcagcctgaagcctgtgctgccccacaaggtggcccacttcaaggactacatcccccaggccttccctgggggccacagcatgatcctggacagcgaggtgctgctgattgacaacaagacaggcaagcccctgcccttcggcaccctgggcgtgcacaagaaggccgccttccaggatgccaacgtgtgcctgtttgtgtttgactgcatctacttcaatgatgtgtccctgatggaccggcccctgtgtgaaagaaggaagttcctgcatgacaacatggtggagatccccaaccgcatcatgttttctgagatgaagagggtgaccaaggccctggacctggccgacatgatcaccagggtcatccaggagggcctggagggcctggtgctgaaggatgtgaagggcacctatgagcccgggaagaggcactggctgaaggtgaagaaggactacctgaatgaaggagccatggctgacacagctgacctggtggtgctgggcgccttctacggccagggcagcaagggcggcatgatgagcatcttcctgatgggctgctatgaccccggcagccagaagtggtgcaccgtgaccaagtgtgccggcggccatgatgatgccaccctggcccggctgcagaatgagctggacatggtgaagatcagcaaggaccccagcaagatccccagctggctgaaggtgaacaagatctactacccagacttcatcgtgcctgaccccaagaaggctgctgtgtgggagatcactggagctgagttcagcaagtctgaggcccacacagcagatggcatcagcatccgcttcccccgctgcacccgcatcagagatgacaaggactggaagagcgccaccaacctgccccagctgaaggagctgtaccagctgagcaaggagaaggctgacttcaccgtggtggccggagatgagggcagcagcaccaccggcggcagcagcgaggagaacaagggccccagcggcagcgctgtgtccaggaaggcccccagcaagcccagcgccagcaccaagaaggccgagggcaagctgagcaacagcaacagcaaggatggcaacatgcagacagccaagcccagcgccatgaaggtgggggagaagctggccaccaagagcagccctgtgaaggtgggggagaagaggaaggccgcagatgagaccctgtgccagaccaagagaagacctgccagcgagcagaggggccgcacagtgcctgctggaagaagatag

SEQ ID NO: 20294 - DNA, 3030 bp, synthetic construct
  misc_feature 1..3030: note = Description of Artificial Sequence: Synthetic coding sequence
  source 1..3030: mol_type = other DNA
atgagcctggccttcaagatcttcttcccccagaccctgcgggccctgagcaggaaggagctgtgcctcttcaggaagcaccactggagagatgtgcggcagttcagccagtggagcgagacagacctgctgcacggccaccccctcttcctgcggaggaagcctgtgctgtccttccagggcagccacctgcggagccgggccacctacctggtgttcctgcccggcctgcacgtgggcctgtgcagcggcccctgtgagatggccgagcagcgcttctgtgtggactatgccaagaggggcacagctggctgcaagaagtgcaaggagaagatcgtgaagggcgtgtgcagaattggcaaggtggtgcccaaccccttcagcgagagcggcggggacatgaaggagtggtaccacatcaagtgcatgtttgagaagctggagcgggcccgggccaccaccaagaagattgaggacctgacagagctggagggctgggaggagctggaggacaatgagaaggagcagatcacccagcacatcgctgacctgagcagcaaggctgctggcacccccaagaagaaggctgtggtgcaggccaagctgaccaccaccggccaggtgaccagccctgtgaagggggccagctttgtgaccagcaccaaccccaggaagttcagcggcttcagcgccaagcccaacaacagcggggaggcccccagcagccccacccccaagaggagcctgagcagcagcaaatgtgaccccaggcacaaggactgcctgctgcgggagttcaggaagctgtgtgccatggtggccgacaaccccagctacaacaccaagacccagatcatccaggacttcctgaggaagggcagcgctggagatggcttccatggagatgtgtacctgactgtgaagctgctgctgcccggggtcatcaagacagtgtacaacctgaatgacaagcagatcgtgaagctgttcagccgcatcttcaactgcaacccagatgacatggcccgggacctggagcagggagatgtgtctgagaccatccgggtcttctttgagcagagcaagagcttccccccagctgccaagagcctgctgaccatccaggaggtggatgagttcctgctgcggctgagcaagctgaccaaggaggatgagcagcagcaggccctgcaggacatcgccagccgctgcacagccaatgacctgaagtgcatcatccgcctcatcaagcatgacctgaagatgaacagcggggccaagcacgtgctggatgccctggaccccaatgcctatgaggccttcaaggccagcaggaacctgcaggatgtggtggagcgggtgctgcacaatgcccaggaggtggagaaggagcccggccagaggcgggccctgtctgtgcaggccagcctgatgacccctgtgcagcccatgctggccgaggcctgcaagtctgtggagtatgccatgaagaagtgccccaacggcatgttttctgagatcaagtatgatggagagcgggtgcaggtgcacaagaatggagaccacttctcctacttcagccgcagcctgaagcctgtgctgccccacaaggtggcccacttcaaggactacatcccccaggccttccctgggggccacagcatgatcctggacagcgaggtgctgctgattgacaacaagacaggcaagcccctgcccttcggcaccctgggcgtgcacaagaaggccgccttccaggatgccaacgtgtgcctgtttgtgtttgactgcatctacttcaatgatgtgtccctgatggaccggcccctgtgtgaaagaaggaagttcctgcatgacaacatggtggagatccccaaccgcatcatgttttctgagatgaagagggtgaccaaggccctggacctggccgacatgatcaccagggtcatccaggagggcctggagggcctggtgctgaaggatgtgaagggcacctatgagcccgggaagaggcactggctgaaggtgaagaaggactacctgaatgaaggagccatggctgacacagctgacctggtggtgctgggcgccttctacggccagggcagcaagggcggcatgatgagcatcttcctgatgggctgctatgaccccggcagccagaagtggtgcaccgtgaccaagtgtgccggcggccatgatgatgccaccctggcccggctgcagaatgagctggacatggtgaagatcagcaaggaccccagcaagatccccagctggctgaaggtgaacaagatctactacccagacttcatcgtgcctgaccccaagaaggctgctgtgtgggagatcactggagctgagttcagcaagtctgaggcccacacagcagatggcatcagcatccgcttcccccgctgcacccgcatcagagatgacaaggactggaagagcgccaccaacctgccccagctgaaggagctgtaccagctgagcaaggagaaggctgacttcaccgtggtggccggagatgagggcagcagcaccaccggcggcagcagcgaggagaacaagggccccagcggcagcgctgtgtccaggaaggcccccagcaagcccagcgccagcaccaagaaggccgagggcaagctgagcaacagcaacagcaaggatggcaacatgcagacagccaagcccagcgccatgaaggtgggggagaagctggccaccaagagcagccctgtgaaggtgggggagaagaggaaggccgcagatgagaccctgtgccagaccaaggtgctgctggacatcttcaccggggtgcggctgtacctgccccccagcaccccagacttcagccggctgcggcgctactttgtggcctttgatggagacctggtgcaggagtttgacatgaccagcgccacccacgtgctgggcagccgggacaagaacccagctgcccagcaggtgtccccagagtggatctgggcctgcatcaggaagaggcggctggtggccccctgctag

SEQ ID NO: 20295 - DNA, 2736 bp, synthetic construct
  misc_feature 1..2736: note = Description of Artificial Sequence: Synthetic coding sequence
  source 1..2736: mol_type = other DNA
atggccgccagccagaccagccagacagtggccagccacgtgccctttgctgacctgtgcagcaccctggagcgcatccagaagagcaagggccgggcagagaagatccgccacttccgggagttcctggacagctggaggaagttccatgatgccctgcacaagaaccacaaggatgtgacagacagcttctacccagccatgaggctcatcctgccccagctggagcgggagaggatggcctacggcatcaaggagaccatgctggccaagctgtacatcgagctgctgaacctgcccagagatggcaaggatgccctgaagctgctgaactaccgcacccccaccggcacccatggagatgctggggactttgccatgattgcctactttgtgctgaagccccgctgcctgcagaagggcagcctgaccatccagcaggtgaatgacctgctggacagcatcgccagcaacaacagcgccaagaggaaggacctgatcaagaagagcctgctgcagctgatcacccagagcagcgccctggagcagaagtggctgatccgcatgatcatcaaggacctgaagctgggcgtgtcccagcagaccatcttctctgtgttccacaatgatgctgctgagctgcacaacgtgaccacagacctggagaaggtgtgccggcagctgcatgaccccagcgtgggcctgagtgacatcagcatcaccctcttcagcgccttcaagcccatgctggccgccatcgctgacatcgagcacatcgagaaggacatgaagcaccagagcttctacatcgagaccaagctggatggagagaggatgcagatgcacaaggatggagatgtgtacaagtacttcagcagaaatggctacaactacacagaccagtttggagccagccccacagagggcagcctgacccccttcatccacaatgccttcaaggctgacatccagatctgcatcctggatggagagatgatggcctacaaccccaacacccagaccttcatgcagaagggcaccaagtttgacatcaagaggatggtggaggacagcgacctgcagacctgctactgtgtgtttgatgtgctgatggtgaacaacaagaagctgggccacgagaccctgaggaagagatatgagatcctgagcagcatcttcacccccatccctggccgcatcgagatcgtgcagaagacccaggcccacaccaagaatgaggtgattgatgccctgaatgaggccatcgacaagcgggaggagggcatcatggtgaagcagcccctgagcatctacaagccagacaagagaggagagggctggctgaagatcaagccagaatatgtgtctggcctgatggatgagctggacatcctgattgtgggcggctactggggcaagggcagcagaggaggcatgatgagccacttcctgtgtgctgtggccgagaagcccccacctggagagaagcccagcgtcttccacaccctgagccgggtgggcagcggctgcaccatgaaggagctgtatgacctgggcctgaagctggccaagtactggaagcccttccacaggaaggccccacccagcagcatcctgtgtggcacagagaagccagaggtgtacatcgagccctgcaacagcgtcatcgtgcagatcaaggctgctgagatcgtgcccagcgacatgtacaagacaggctgcaccctgcgcttccccagaattgagaagatcagagatgacaaggagtggcatgagtgcatgaccctggatgacctggagcagctgcggggcaaggccagcggcaagctggccagcaagcacctgtacatcggaggagatgatgagccccaggagaagaagaggaaggccgcccccaagatgaagaaggtgattggcatcatcgagcacctgaaggcccccaacctgaccaacgtgaacaagatcagcaacatctttgaagatgtggagttctgtgtgatgagcggcacagacagccagcccaagccagacctggagaacagaattgctgagtttggaggctacatcgtgcagaaccctggccctgacacctactgtgtgattgctggcagcgagaacatccgggtgaagaacatcatcctgagcaacaagcatgatgtggtgaagccagcctggctgctggagtgcttcaagaccaagagctttgtgccctggcagccccgcttcatgatccacatgtgccccagcaccaaggagcactttgcccgggagtatgactgctatggagacagctacttcatcgacacagacctgaaccagctgaaggaggtgttttctggcatcaagaacagcaatgagcagaccccagaggagatggccagcctgattgctgacctggagtaccgctacagctgggactgcagccccctgtccatgttccgccgccacacagtgtacctggacagctatgctgtgatcaatgacctgagcaccaagaatgaaggcacccggctggccatcaaggccctggagctgcgcttccacggggccaaggtggtgtcctgcctggccgagggcgtgagccacgtgatcattggagaggaccacagccgggtggccgacttcaaggccttccggaggaccttcaagaggaagttcaagatcctgaaggagagctgggtgacagacagcattgacaagtgtgagctgcaggaggagaaccagtacctgatctag

SEQ ID NO: 20296 - DNA, 2736 bp, synthetic construct; identical to SEQ ID NO: 20295
  misc_feature 1..2736: note = Description of Artificial Sequence: Synthetic coding sequence
  source 1..2736: mol_type = other DNA

SEQ ID NO: 20297 - DNA, 2736 bp, synthetic construct; identical to SEQ ID NO: 20295
  misc_feature 1..2736: note = Description of Artificial Sequence: Synthetic coding sequence
  source 1..2736: mol_type = other DNA

SEQ ID NO: 20298 - DNA, 1944 bp, synthetic construct
  misc_feature 1..1944: note = Description of Artificial Sequence: Synthetic coding sequence
  source 1..1944: mol_type = other DNA
atgaggctgaccctgctgtgctgcacctggagggaggagaggatgggagaggagggcagcgagctgcctgtgtgtgccagctgtggccagaggatctatgatggccagtacctgcaggccctgaatgctgactggcatgctgactgcttccgctgctgtgactgcagcgccagcctgagccaccagtactatgagaaggatggccagctgttctgcaagaaggactactgggcccgctacggggagagctgccacggctgcagcgagcagatcaccaagggcctggtgatggtggccggggagctgaagtaccaccctgagtgcttcatctgcctgacctgtggcaccttcatcggagatggagacacctacaccctggtggagcacagcaagctgtactgcggccactgctactaccagacagtggtgacccctgtgattgagcagatcctgcctgacagccctggcagccacctgccccacacagtgaccctggtgtccatcccagccagcagccacggcaagaggggcctgtctgtgtccattgaccccccccacggccccccaggctgcggcacagagcacagccacacagtgcgggtgcagggcgtggaccccggctgcatgagcccagatgtgaagaacagcatccacgtgggggaccgcatcctggagatcaatggcacccccatcagaaatgtgcccctggatgaaattgacctgctgatccaggagaccagccggctgctgcagctgaccctggagcatgacccccatgacaccctgggccacggcctgggccctgagaccagccccctgagcagccctgcctacaccccatctggagaggccggcagcagcgcccggcagaagcctgtgctgcggagctgcagcattgacaggagccctggagctggcagcctgggcagccctgccagccagaggaaggacctgggccgctctgagagcctgcgggtggtgtgccggccccaccgcatcttccggcccagcgacctgattcatggagaggtgctgggcaagggctgcttcggccaggccatcaaggtgacccaccgggagactggagaggtgatggtgatgaaggagctgatccgctttgatgaggagacccagaggaccttcctgaaggaggtgaaggtgatgcgctgcctggagcaccccaacgtgctgaagttcatcggcgtgctgtacaaggacaagaggctgaacttcatcacagagtacatcaagggcggcaccctgcggggcatcatcaagtccatggacagccagtacccctggagccagagggtgtcctttgccaaggacatcgccagcggcatggcctacctgcacagcatgaacatcatccaccgggacctgaacagccacaactgcctggtgcgggagaacaagaatgtggtggtggccgactttggcctggcccggctgatggtggatgagaagacccagcctgagggcctgcggagcctgaagaagccagacaggaagaagcgctacacagtggtgggcaacccctactggatggcccctgagatgatcaatggccgctcctatgatgagaaggtggatgtgttctcctttggaattgtgctgtgtgagatcatcggccgggtgaatgctgaccctgactacctgcccaggaccatggactttggcctgaatgtgcggggcttcctggaccgctactgcccccccaactgcccccccagcttcttccccatcaccgtgcgctgctgtgacctggaccctgagaagaggcccagctttgtgaagctggagcactggctggagaccctgaggatgcacctggccggccacctgcccctgggcccccagctggagcagctggaccggggcttctgggagacctacagaagaggagagagcggcctgcctgcccaccctgaggtgcctgactag

SEQ ID NO: 20299 - DNA, 1944 bp, synthetic construct; identical to SEQ ID NO: 20298
  misc_feature 1..1944: note = Description of Artificial Sequence: Synthetic coding sequence
  source 1..1944: mol_type = other DNA

SEQ ID NO: 20300 - DNA, 1842 bp, synthetic construct
  misc_feature 1..1842: note = Description of Artificial Sequence: Synthetic coding sequence
  source 1..1842: mol_type = other DNA
atgctgctggccagcgcccccaggagaagacgcttcctgcagagggccaagtgctgtgactgcagcgccagcctgagccaccagtactatgagaaggatggccagctgttctgcaagaaggactactgggcccgctacggggagagctgccacggctgcagcgagcagatcaccaagggcctggtgatggtggccggggagctgaagtaccaccctgagtgcttcatctgcctgacctgtggcaccttcatcggagatggagacacctacaccctggtggagcacagcaagctgtactgcggccactgctactaccagacagtggtgacccctgtgattgagcagatcctgcctgacagccctggcagccacctgccccacacagtgaccctggtgtccatcccagccagcagccacggcaagaggggcctgtctgtgtccattgaccccccccacggccccccaggctgcggcacagagcacagccacacagtgcgggtgcagggcgtggaccccggctgcatgagcccagatgtgaagaacagcatccacgtgggggaccgcatcctggagatcaatggcacccccatcagaaatgtgcccctggatgaaattgacctgctgatccaggagaccagccggctgctgcagctgaccctggagcatgacccccatgacaccctgggccacggcctgggccctgagaccagccccctgagcagccctgcctacaccccatctggagaggccggcagcagcgcccggcagaagcctgtgctgcggagctgcagcattgacaggagccctggagctggcagcctgggcagccctgccagccagaggaaggacctgggccgctctgagagcctgcgggtggtgtgccggccccaccgcatcttccggcccagcgacctgattcatggagaggtgctgggcaagggctgcttcggccaggccatcaaggtgacccaccgggagactggagaggtgatggtgatgaaggagctgatccgctttgatgaggagacccagaggaccttcctgaaggaggtgaaggtgatgcgctgcctggagcaccccaacgtgctgaagttcatcggcgtgctgtacaaggacaagaggctgaacttcatcacagagtacatcaagggcggcaccctgcggggcatcatcaagtccatggacagccagtacccctggagccagagggtgtcctttgccaaggacatcgccagcggcatggcctacctgcacagcatgaacatcatccaccgggacctgaacagccacaactgcctggtgcgggagaacaagaatgtggtggtggccgactttggcctggcccggctgatggtggatgagaagacccagcctgagggcctgcggagcctgaagaagccagacaggaagaagcgctacacagtggtgggcaacccctactggatggcccctgagatgatcaatggccgctcctatgatgagaaggtggatgtgttctcctttggaattgtgctgtgtgagatcatcggccgggtgaatgctgaccctgactacctgcccaggaccatggactttggcctgaatgtgcggggcttcctggaccgctactgcccccccaactgcccccccagcttcttccccatcaccgtgcgctgctgtgacctggaccctgagaagaggcccagctttgtgaagctggagcactggctggagaccctgaggatgcacctggccggccacctgcccctgggcccccagctggagcagctggaccggggcttctgggagacctacagaagaggagagagcggcctgcctgcccaccctgaggtgcctgactag

SEQ ID NO: 20301 - DNA, 471 bp, synthetic construct
  misc_feature 1..471: note = Description of Artificial Sequence: Synthetic coding sequence
  source 1..471: mol_type = other DNA
atgatggtgctggacaaggaggatggagtgcccatgctgtctgtgcagcccaagggcaagcagaagggctgtgccggctgcaacaggaagatcaaggaccgctacctgctgaaggccctggacaagtactggcatgaggactgcctgaagtgtgcctgctgtgactgccgcctgggggaggtgggcagcaccctgtacaccaaggccaacctgatcctgtgcagaagagactacctgcggctgtttggcaccactggaaactgtgccgcctgcagcaagctgatcccagcctttgagatggtgatgagggcccgggacaacgtgtaccacctggactgctttgcctgccagctgtgcaaccagcgcttctgtgtgggggacaagttcttcctgaagaacaacatgatcctgtgccagatggactatgaggagggccagctgaatggcacctttgagagccaggtgcagtag

SEQ ID NO: 20302 - DNA, 468 bp, synthetic construct
  misc_feature 1..468: note = Description of Artificial Sequence: Synthetic coding sequence
  source 1..468: mol_type = other DNA
atggtgctggaccaggaggatggagtgcccatgctgtctgtgcagcccaagggcaagcagaagggctgtgccggctgcaacaggaagatcaaggaccgctacctgctgaaggccctggacaagtactggcatgaggactgcctgaagtgtgcctgctgtgactgccgcctgggggaggtgggcagcaccctgtacaccaaggccaacctgatcctgtgccggcgggactacctgcggctgtttggcaccaccggcaactgtgccgcctgcagcaagctgatcccagcctttgagatggtgatgagggcccgggacaacgtgtaccacctggactgctttgcctgccagctgtgcaaccagcgcttctgtgtgggggacaagttcttcctgaagaacaacatgatcctgtgccagatggactatgaggagggccagctgaatggcacctttgagagccaggtgcagtag

SEQ ID NO: 20303 - DNA, 684 bp, synthetic construct
  misc_feature 1..684: note = Description of Artificial Sequence: Synthetic coding sequence
  source 1..684: mol_type = other DNA
atggagggcagcgctgtgacagtgctggagcggggcggggccagcagccctgctgagcggcgcagcaagagaagaagaagaagtggaggagatggcggcggcggcggcggggcccgggcccctgagggcgtgcgggccccagctgctggccagccccgggccaccaagggggcccctcctcctcctggcaccccaccacccagccccatgagcagcgccatcgagaggaagagcctggaccccagcgaggagcctgtggatgaggtgctgcagatcccccccagcctgctgacctgtggcggctgccagcagaacatcggggaccgctacttcctgaaggccatcgaccagtactggcatgaggactgcctgagctgtgacctgtgtggctgccgcctgggggaggtgggccggcggctgtactacaagctgggcaggaagctgtgccggcgggactacctgcggctgtttggccaggacggcctgtgtgccagctgtgacaagaggatccgggcctatgagatgaccatgagggtgaaggacaaggtgtaccacctggagtgcttcaagtgtgccgcctgccagaagcacttctgtgtgggggaccgctacctgctgatcaacagcgacatcgtgtgtgagcaggacatctatgagtggaccaagatcaatggcatgatctag

SEQ ID NO: 20304 - DNA, 477 bp, synthetic construct
  misc_feature 1..477: note = Description of Artificial Sequence: Synthetic coding sequence
  source 1..477: mol_type = other DNA
atgagcagcgccattgaaaggaagagcctggaccccagcgaggagcctgtggatgaggtgctgcagatcccccccagcctgctgacctgtggcggctgccagcagaacattggagaccgctacttcctgaaggccatcgaccagtactggcatgaggactgcctgagctgtgacctgtgtggctgccgcctgggggaggtgggcagaagactctactacaagctgggcaggaagctgtgcagaagagactacctgcggctgtttggccaggacggcctgtgtgccagctgtgacaagaggatccgggcctatgagatgaccatgagggtgaaggacaaggtgtaccacctggagtgcttcaagtgtgccgcctgccagaagcacttctgtgtgggggaccgctacctgctgatcaacagcgacatcgtgtgtgagcaggacatctatgagtggaccaagatcaatggcatgatctag

SEQ ID NO: 20305 - DNA, 1677 bp, synthetic construct
  misc_feature 1..1677: note = Description of Artificial Sequence: Synthetic coding sequence
  source 1..1677: mol_type = other DNA
atgcaccggggcggccagcccctgaagaagagaagaggcagcttcaagatggccgagctggaccagctgcctgatgagagcagcagcgccaaggccctggtgtccctgaaggagggcagcctgagcaacacctggaatgagaagtacagcagcctgcagaagacccctgtgtggaagggcaggaacaccagcagcgctgtggagatgcccttcaggaacagcaagaggagccgcctcttcagtgatgaagatgaccggcagatcaacaccaggagccccaagaggaaccagagggtggccatggtgccccagaagttcaccgccaccatgagcaccccagacaagaaggccagccagaagattggcttccggctgaggaacctgctgaagctgcccaaggcccacaagtggtgcatctatgagtggttctacagcaacatcgacaagcccctgtttgaaggagacaatgacttctgtgtgtgcctgaaggagagcttccccaacctgaagaccaggaagctgaccagggtggagtggggcaagatccggcggctgatgggcaagccccggcgctgcagcagcgccttctttgaggaggagaggtctgccctgaagcagaagaggcagaagatccggctgctgcagcagaggaaggtggctgatgtgtcccagttcaaggacctgcctgatgagatccccctgcccctggtgattggcaccaaggtgacagcccggctgcggggcgtgcatgatggcctcttcaccggccagattgatgctgtggacaccctgaatgccacctacagagtgacctttgacagaacaggcctgggcacccacaccatcccagactatgaggtgctgagcaatgagccccatgagaccatgcccatcgccgccttcggccagaagcagaggcccagccgcttcttcatgaccccaccccggctgcactacaccccacccctgcagagccccatcatcgacaatgaccccctgctgggccagagcccctggaggagcaagatcagcggcagtgacacagagaccctgggcggcttccctgtggagttcctgatccaggtgacccggctgagcaagatcctgatgatcaagaaggagcacatcaagaagctgcgggagatgaacacagaggccgagaagctgaagagctacagcatgcccatcagcattgagttccagaggagatatgccaccatcgtgctggagctggagcagctgaacaaggacctgaacaaggtgctgcacaaggtgcagcagtactgctatgagctggccccagaccagggcctgcagcctgctgaccagcccacagacatgagaagaagatgtgaggaggaggcccaggagatcgtgagacatgccaacagcagcacaggccagccctgtgtggagaatgaaaacctgacagacctgatcagccggctgacagccatcctgctgcagatcaagtgcctggccgagggcggggacctgaacagctttgagttcaagagcctgacagacagcctgaatgacatcaagagcaccattgatgccagcaacatcagctgcttccagaacaacgtggagatccacgtggcccacatccagagcggcctgagccagatgggcaacctgcacgcctttgctgccaacaacaccaacagagactag

SEQ ID NO: 20306 - DNA, 1524 bp, synthetic construct
  misc_feature 1..1524: note = Description of Artificial Sequence: Synthetic coding sequence
  source 1..1524: mol_type = other DNA
atggccgagctggaccagctgcctgatgagagcagcagcgccaaggccctggtgtccctgaaggagggcagcctgagcaacacctggaatgagaagtacagcagcctgcagaagacccctgtgtggaagggcaggaacaccagcagcgctgtggagatgaagttcaccgccaccatgagcaccccagacaagaaggccagccagaagattggcttccggctgaggaacctgctgaagctgcccaaggcccacaagtggtgcatctatgagtggttctacagcaacatcgacaagcccctgtttgaaggagacaatgacttctgtgtgtgcctgaaggagagcttccccaacctgaagaccaggaagctgaccagggtggagtggggcaagatccggcggctgatgggcaagccccggcgctgcagcagcgccttctttgaggaggagaggtctgccctgaagcagaagaggcagaagatccggctgctgcagcagaggaaggtggctgatgtgtcccagttcaaggacctgcctgatgagatccccctgcccctggtgattggcaccaaggtgacagcccggctgcggggcgtgcatgatggcctcttcaccggccagattgatgctgtggacaccctgaatgccacctacagagtgacctttgacagaacaggcctgggcacccacaccatcccagactatgaggtgctgagcaatgagccccatgagaccatgcccatcgccgccttcggccagaagcagaggcccagccgcttcttcatgaccccaccccggctgcactacaccccacccctgcagagccccatcatcgacaatgaccccctgctgggccagagcccctggaggagcaagatcagcggcagtgacacagagaccctgggcggcttccctgtggagttcctgatccaggtgacccggctgagcaagatcctgatgatcaagaaggagcacatcaagaagctgcgggagatgaacacagaagctgagaagctgaagagctacagcatgcccatcagcattgagttccagaggagatatgccaccatcgtgctggagctggagcagctgaacaaggacctgaacaaggtgctgcacaaggtgcagcagtactgctatgagctggccccagaccagggcctgcagcctgctgaccagcccacagacatgagaagaagatgtgaggaggaggcccaggagatcgtgagacatgccaacagcagcacaggccagccctgtgtggagaatgaaaacctgacagacctgatcagccggctgacagccatcctgctgcagatcaagtgcctggccgagggcggggacctgaacagctttgagttcaagagcctgacagacagcctgaatgacatcaagagcaccattgatgccagcaacatcagctgcttccagaacaacgtggagatccacgtggcccacatccagagcggcctgagccagatgggcaacctgcacgcctttgctgccaacaacaccaacagagactag

SEQ ID NO: 20307 - DNA, 1572 bp, synthetic construct
  misc_feature 1..1572: note = Description of Artificial Sequence: Synthetic coding sequence
  source 1..1572: mol_type = other DNA
atgaggcccaggacagagggcttcttccccccagctggggccagcctgcccttcagcaccaggaacaagcagcctgctgtgcctgctgctgctgcccgggctgctgagcacgcccctggagctggccctggccgggacagcggggccggcacagcccccccagccctgcggcggcgggccagcccctgtggcctgctgccccccttcctgcccccaggcagcgctgggggcggcggcggcggggcccggcggggcccccccagcgctgcccccccacccagggctggagctggaggagctggccctgccagcgccagccggggcggcagcagcgctgccaggagaagaggccagagggccccccacagcaacctgcccaggaaggacagcctgcggcccaccatgcaccggggcggccagcccctgaagaagagaagaggcagcttcaagatggccgagctggaccagctgcctgatgagagcagcagcgccaaggccctggtgtccctgaaggagggcagcctgagcaacacctggaatgagaagtacagcagcctgcagaagacccctgtgtggaagggcaggaacaccagcagcgctgtggagatgcccttcaggaacagcaagaggagccgcctcttcagtgatgaagatgaccggcagatcaacaccaggagccccaagaggaaccagagggtggccatggtgccccagaagttcaccgccaccatgagcaccccagacaagaaggccagccagaagattggcttccggctgaggaacctgctgaagctgcccaaggcccacaagtggtgcatctatgagtggttctacagcaacatcgacaagcccctgtttgaaggagacaatgacttctgtgtgtgcctgaaggagagcttccccaacctgaagaccaggaagctgaccagggtggagtggggcaagatccggcggctgatgggcaagccccggcgctgcagcagcgccttctttgaggaggagaggtctgccctgaagcagaagaggcagaagatccggctgctgcagcagaggaaggtggctgatgtgtcccagttcaaggacctgcctgatgagatccccctgcccctggtgattggcaccaaggtgacagcccggctgcggggcgtgcatgatggcctcttcaccggccagattgatgctgtggacaccctgaatgccacctacagagtgacctttgacagaacaggcctgggcacccacaccatcccagactatgaggtgctgagcaatgagccccatgagaccatgcccatcgccgccttcggccagaagcagaggcccagccgcttcttcatgaccccaccccggctgcactacaccccacccctgcagagccccatcatcgacaatgaccccctgctgggccagagcccctggaggagcaagatcagcggcagtgacacagagaccctgggcggcttccctgtggagttcctgatccaggtgacccggctgagcaagatcctgatgatcaagggcacctaccaggagatcaagggaaatgagcacaggagcaggaagattggatag

SEQ ID NO: 20308 - DNA, 1842 bp, synthetic construct
  misc_feature 1..1842: note = Description of Artificial Sequence: Synthetic coding sequence
  source 1..1842: mol_type = other DNA
gagacagctgagcagaacagcagcctggccgtgggcctgaatgaccagctgcatgacctgagccgcagccgcagccctgctgcccggagcagcgccagcaacatccgggagcggcgggcccgcatcgcccggggccgctgggacagagtgcctgatgtggccacccggcggggcctgctgcggcctgctgtgtctgggaaggtgcggggcagaagaagacccagcaatgtgggctttggaaactgcagcagcgccaaggccctggtgtccctgaaggagggcagcctgagcaacacctggaatgagaagtacagcagcctgcagaagacccctgtgtggaagggcaggaacaccagcagcgctgtggagatgcccttcaggaacagcaagaggagccgcctcttcagtgatgaagatgaccggcagatcaacaccaggagccccaagaggaaccagagggtggccatggtgccccagaagttcaccgccaccatgagcaccccagacaagaaggccagccagaagattggcttccggctgaggaacctgctgaagctgcccaaggcccacaagtggtgcatctatgagtggttctacagcaacatcgacaagcccctgtttgaaggagacaatgacttctgtgtgtgcctgaaggagagcttccccaacctgaagaccaggaagctgaccagggtggagtggggcaagatccggcggctgatgggcaagccccggcgctgcagcagcgccttctttgaggaggagaggtctgccctgaagcagaagaggcagaagatccggctgctgcagcagaggaaggtggctgatgtgtcccagttcaaggacctgcctgatgagatccccctgcccctggtgattggcaccaaggtgacagcccggctgcggggcgtgcatgatggcctcttcaccggccagattgatgctgtggacaccctgaatgccacctacagagtgacctttgacagaacaggcctgggcacccacaccatcccagactatgaggtgctgagcaatgagccccatgagaccatgcccatcgccgccttcggccagaagcagaggcccagccgcttcttcatgaccccaccccggctgcactacaccccacccctgcagagccccatcatcgacaatgaccccctgctgggccagagcccctggaggagcaagatcagcggcagtgacacagagaccctgggcggcttccctgtggagttcctgatccaggtgacccggctgagcaagatcctgatgatcaagaaggagcacatcaagaagctgcgggagatgaacacagaagctgagaagctgaagagctacagcatgcccatcagcattgagttccagaggagatatgccaccatcgtgctggagctggagcagctgaacaaggacctgaacaaggtgctgcacaaggtgcagcagtactgctatgagctggccccagaccagggcctgcagcctgctgaccagcccacagacatgagaagaagatgtgaggaggaggcccaggagatcgtgagacatgccaacagcagcacaggccagccctgtgtggagaatgaaaacctgacagacctgatcagccggctgacagccatcctgctgcagatcaagtgcctggccgagggcggggacctgaacagctttgagttcaagagcctgacagacagcctgaatgacatcaagagcaccattgatgccagcaacatcagctgcttccagaacaacgtggagatccacgtggcccacatccagagcggcctgagccagatgggcaacctgcacgcctttgctgccaacaacaccaacagagactag

SEQ ID NO: 20309 - DNA, 13800 bp, synthetic construct
  misc_feature 1..13800: note = Description of Artificial Sequence: Synthetic coding sequence
  source 1..13800: mol_type = other DNA
atgtctgagttcctgctggccctgctgaccctgagcggcctgctgcccatcgcccgggtgctgactgtgggcgctgaccgggaccagcagctgtgtgaccccggggagttcctgtgccacgaccacgtgacctgtgtgtcccagagctggctgtgtgatggagaccctgactgcccagatgacagtgatgagagcctggacacctgcccagaggaggtggagatcaagtgccccctgaaccacatcgcctgcctgggcaccaacaagtgtgtgcacctgagccagctgtgcaatggagtgctggactgcccagatggctatgatgagggcgtgcactgccaggagctgctgagcaactgccagcagctgaactgccagtacaagtgcaccatggtgaggaacagcacccgctgctactgtgaagatggctttgagatcacagaagatggccgcagctgcaaggaccaggatgaatgtgctgtgtatggcacctgcagccagacctgcaggaacacccacggcagctacacctgcagctgtgtggagggctacctgatgcagcctgacaacagaagctgcaaggccaagattgagcccacagacaggcctcccatcctgctgattgccaactttgagaccatcgaggtgttctacctgaatggcagcaagatggccaccctgagctctgtgaatggaaatgagatccacaccctggacttcatctacaatgaagacatgatctgctggattgagagccgggagagcagcaaccagctgaagtgcatccagatcaccaaggccggcggcctgacagatgagtggaccatcaacatcctgcagagcttccacaacgtgcagcagatggccatcgactggctgaccaggaacctgtactttgtggaccacgtgggggaccgcatctttgtgtgcaacagcaatggatctgtgtgtgtgaccctgattgacctggagctgcacaaccccaaggccatcgctgtggaccccatcgccggcaagctgttcttcacagattatggaaatgtggccaaggtggagcgctgtgacatggatggcatgaacagaacccgcatcatcgacagcaagacagagcagcctgctgccctggccctggacctggtgaacaagctggtgtactgggtggacctgtacctggactatgtgggcgtggtggactaccagggcaagaacagacacacagtcatccagggccggcaggtgcgccacctgtatggcatcaccgtgtttgaggactacctgtatgccaccaacagcgacaactacaacatcgtgcgcatcaaccgcttcaatggaacagacatccacagcctcatcaagattgaaaatgcctggggcatccgcatctaccagaagaggacccagcccaccgtgcgcagccacgcctgtgaggtggacccctacggcatgcctgggggctgcagccacatctgcctgctgagcagcagctacaagaccaggacctgccgctgcaggacaggcttcaacctgggcagtgatggccgcagctgcaagaggcccaagaatgaactcttcctgttctacggcaagggccggcccggcatcgtgcggggcatggacctgaacaccaagattgctgatgagtacatgatccccatcgagaacctggtgaacccccgggccctggacttccacgccgagaccaactacatctactttgctgacaccaccagcttcctgattggccggcagaagattgatggaacagagcgggagaccatcctgaaggatgacctggacaacgtggagggcattgctgtggactggattggcaacaacctgtactggaccaatgatggccacaggaagaccatcaacgtggcccggctggagaaggccagccagagcaggaagaccctgctggagggggagatgagccacccccggggcatcgtggtggaccctgtgaatggctggatgtactggacagactgggaggaggatgaaattgatgacagcgtgggccgcatcgagaaggcctggatggatggcttcaaccggcagatctttgtgaccagcaagatgctgtggcccaacggcctgaccctggacttccacaccaacaccctgtactggtgtgatgcctactatgaccacatcgagaaggtgttcctgaatggcacccacaggaagatcgtgtacagcggccgggagctgaaccaccccttcggcctgagccaccacggcaactacgtgttctggacagactacatgaatggcagcatcttccagctggacctgatcaccagcgaggtgaccctgctgcggcatgagaggcctcccctgtttggcctgcagatctatgaccccaggaagcagcagggcgacaacatgtgccgggtgaacaacggcggctgcagcaccctgtgcctggccatccctgggggccgggtgtgtgcctgtgccgacaaccagctgctggatgaaaatggcaccacctgcaccttcaaccctggagaggccctgccccacatctgcaaggccggggagttccgctgcaagaacagacactgcatccaggcccgctggaagtgtgatggagatgatgactgcctggatggcagtgatgaggacagcgtgaactgcttcaaccacagctgcccagatgaccagttcaagtgccagaacaaccgctgcatccccaagcgctggctgtgtgatggagccaatgactgtggcagcaatgaagatgagagcaaccagacctgcacagcccggacctgccaggtggaccagttcagctgtggaaatggccgctgcatcccccgggcctggctgtgtgacagagaagatgactgtggggaccagacagatgagatggccagctgtgagttccccacctgtgagcccctgacccagtttgtgtgcaagagcggccgctgcatcagcagcaagtggcactgtgacagtgatgatgactgtggagatggcagtgatgaggtgggctgtgtgcacagctgctttgacaaccagttccgctgcagcagcggccgctgcatccctggccactgggcctgtgatggagacaatgactgtggggacttcagtgatgaggcccagatcaactgcaccaaggaggagatccacagccctgctggctgcaatggaaatgagttccagtgccacccagatggcaactgtgtgcctgacctgtggaggtgtgatggagagaaggactgtgaagatggcagtgatgagaagggctgcaatggcaccatccggctgtgtgaccacaagaccaagttcagctgctggagcacaggccgctgcatcaacaaggcctgggtgtgtgatggagacatcgactgtgaggaccagagtgatgaagatgactgtgacagcttcctgtgtggcccccccaagcacccctgtgccaatgacacctctgtgtgcctgcagcctgagaagctgtgcaatggcaagaaggactgcccagatggcagtgatgagggctacctgtgtgatgaatgttccctgaacaacggcggctgcagcaaccactgcagcgtggtgcccggccggggcatcgtgtgcagctgcccagagggcctgcagctgaacaaggacaacaagacctgtgagatcgtggactactgcagcaaccacctgaagtgcagccaggtgtgtgagcagcacaagcacacagtgaagtgcagctgctatgagggctggaagctggatgtggatggagagagctgcacctctgtggacccctttgaggccttcatcatcttcagcatcagacatgagatcagaagaattgacctgcacaagagggactacagcctgctggtgcccggcctgaggaacaccatcgccctggacttccacttcaaccagagcctgctgtactggacagatgtggtggaggaccgcatctaccggggcaagctgtctgagagcggcggcgtgtctgccatcgaggtggtggtggagcacggcctggccaccccagagggcctgactgtggactggattgctggcaacatctactggattgacagcaacctggaccagatcgaggtggccaagctggatggcagcctgcggaccaccctgattgctggggccatggagcacccccgggccatcgccctggaccccaggtatggcatcctcttctggacagactgggatgccaacttcccccgcatcgagagcgcctccatgtctggggccggcaggaagaccatctacaaggacatgaagacaggagcctggcccaacggcctgactgtggaccactttgagaagagaattgtgtggacagatgcccggagtgatgccatctacagcgccctgtatgatggcaccaacatgattgagatcatccggggccacgagtacctgagccacccctttgctgtgtccctgtatggcagcgaggtgtactggacagactggaggaccaacaccctgagcaaggccaacaagtggacaggccagaatgtgtctgtcatccagaagaccagcgcccagccctttgacctgcagatctaccaccccagccggcagccccaggcccccaacccctgtgccgccaatgatggcaagggcccctgcagccacatgtgcctgatcaaccacaacagatctgctgcctgtgcctgcccccacctgatgaagctgagcagtgacaagaagacctgctatgagatgaagaagttcctgctgtatgcccggcgctctgagatccggggcgtggacatcgacaacccctacttcaacttcatcacagccttcaccgtgcctgacattgatgatgtgacagtgattgactttgatgccagcgaggagcggctgtactggacagacatcaagacccagaccatcaagagggccttcatcaatggcaccggcctggagaccgtcatcagccgggacatccagagcatccggggcctggccgtggactgggtgtccaggaacctgtactggatcagcagcgagtttgatgagacccagatcaacgtggcccggctggatggcagcctgaagaccagcatcatccacggcatcgacaagccccagtgcctggccgcccaccctgtgcggggcaagctgtactggacagatggcaacaccatcaacatggccaacatggatggcagcaacagcaagatcctcttccagaaccagaaggagcctgtgggcctgagcattgattatgtggagaacaagctgtactggatcagcagtggaaatggcaccatcaaccgctgcaacctggatggcggcaacctggaggtgattgagagcatgaaggaggagctgaccaaggccacagccctgaccatcatggacaagaagctgtggtgggccgaccagaacctggcccagctgggcacctgcagcaagagagatggaagaaaccccaccatcctgaggaacaagaccagcggcgtggtgcacatgaaggtgtatgacaaggaggcccagcagggcagcaacagctgccagctgaacaacggcggctgcagccagctgtgcctgcccaccagcgagaccaccaggacctgcatgtgcaccgtgggctactacctgcagaagaacaggatgagctgccagggcatcgagagcttcctgatgtacagcgtgcatgagggcatccggggcatccccctggagcccagcgacaagatggatgccctgatgcccatcagcggcaccagctttgctgtgggcatcgacttccacgccgagaatgacaccatctactggacagacatgggcttcaacaagatcagccgggccaagagggaccagacctggaaggaggacatcatcaccaacggcctgggccgggtggagggcattgctgtggactggattgctggcaacatctactggacagaccacggcttcaacctgattgaggtggcccggctgaatggcagcttccgctacgtgatcatcagccagggcctggaccagcccaggagcattgctgtgcaccctgagaagggcctgctcttctggacagagtggggccagatgccctgcatcggcaaggcccggctggatggcagcgagaaggtggtgctggtgtccatgggcatcgcctggcccaacggcatcagcattgattatgaggagaacaagctgtactggtgtgatgccaggacagacaagattgaaagaattgacctggagactggaggcaaccgggagatggtgctgagcggcagcaatgtggacatgttttctgtggccgtgtttggagcctacatctactggagcgaccgggcccacgccaatggatctgtgagaagaggccacaagaatgatgccacagagaccatcaccatgaggacaggcctgggcgtgaacctgaaggaggtgaagatcttcaacagagtgcgggagaagggcaccaacgtgtgtgcccgggacaatggaggctgcaagcagctgtgcctgtaccggggcaacagcaggaggacctgtgcctgtgcccacggctacctggctgaagatggagtgacctgcctgcggcatgagggctacctgctgtacagcggccgcaccatcctgaagagcatccacctgagtgatgagaccaacctgaacagccccatccggccctatgagaacccccgctacttcaagaatgtgattgccctggcctttgactacaaccagaggaggaagggcaccaaccgcatcttctacagtgatgcccacttcggcaacatccagctgatcaaggacaactgggaggaccggcaggtgattgtggagaatgtgggctctgtggagggcctggcctaccaccgggcctgggacaccctgtactggaccagcagcaccaccagcagcatcaccaggcacacagtggaccagaccaggcctggggcctttgaccgggaggccgtcatcaccatgtctgaagatgaccacccccacgtgctggccctggatgagtgccagaacctgatgttctggaccaactggaatgagcagcaccccagcatcatgaggagcaccctgaccgggaagaatgcccaggtggtggtgtccacagacatcctgacccccaacggcctgaccatcgactacagagctgagaagctgtacttcagtgatggcagcctgggcaagattgagcgctgtgaatatgatggcagccagagacatgtgattgtgaagagcggccctggcaccttcctgagcctggccgtgtatgacaactacatcttctggagcgactggggcagaagagccatcctgcggagcaacaagtacacaggaggagacaccaagatcctgcggagtgacatcccccaccagcccatgggcatcatcgctgtggccaatgacaccaacagctgtgagctgagcccctgtgccctgctgaatggaggctgccacgacctgtgcctgctgacccccaacggccgggtgaactgcagctgccgcggggaccgcatcctgctggaggacaacagatgtgtgaccaagaacagcagctgcaatgcctacagcgagtttgaatgtggaaatggagagtgcatcgactaccagctgacctgtgatggcatcccccactgcaaggacaagagtgatgagaagctgctgtactgtgagaacagaagctgcagaagaggcttcaagccctgctacaacagacgctgcatcccccacggcaagctgtgtgatggagaaaatgactgtggggacaacagtgatgagctggactgcaaggtgtccacctgtgccaccgtggagttccgctgtgctgatggcacctgcatccccaggtctgcccgctgcaaccagaacatcgactgtgctgatgccagtgatgagaagaactgcaacaacacagactgcacccacttctacaagctgggcgtgaagaccaccggcttcatccgctgcaacagcaccagcctgtgtgtgctgcccacctggatctgtgatggcagcaatgactgtggggactacagtgatgagctgaagtgccctgtgcagaacaagcacaagtgtgaggagaactacttcagctgccccagcggccgctgcatcctgaacacctggatctgtgatggccagaaggactgtgaagatggaagagatgagttccactgtgacagcagctgctcctggaaccagtttgcctgcagcgcccagaagtgcatcagcaagcactggatctgtgatggagaagatgactgtggagatggcctggatgaaagtgacagcatctgtggggccatcacctgtgccgctgacatgttcagctgccagggcagccgggcctgtgtgcccaggcactggctgtgtgatggagagcgggactgcccagatggcagtgatgagctgagcacagctggctgtgcccccaacaacacctgtgatgaaaatgccttcatgtgccacaacaaggtgtgcatccccaagcagtttgtgtgtgaccatgatgatgactgtggagatggcagtgatgagagcccccagtgtggctaccggcagtgtggcacagaggagttcagctgtgctgatggccgctgcctgctgaacacccagtggcagtgtgatggagactttgactgcccagaccacagtgatgaggcccccctgaaccccaagtgcaagtctgctgagcagagctgcaacagcagcttcttcatgtgcaagaatggccgctgcatccccagcggcggcctgtgtgacaacaaggatgactgtggagatggcagtgatgaaagaaactgccacatcaatgaatgtctgagcaagaaggtgtctggctgcagccaggactgccaggacctgcctgtgtcctacaagtgcaagtgctggccaggcttccagctgaaggatgatggcaagacctgtgtggacattgatgaatgtagcagcggcttcccctgcagccagcagtgcatcaacacctacggcacctacaagtgcctgtgcacagatggctatgagatccagcctgacaaccccaacggctgcaagagcctgagtgatgaggagcccttcctgatcctggccgaccaccacgagatcaggaagatcagcacagatggcagcaactacaccctgctgaagcagggcctgaacaacgtcatcgccatcgactttgactaccgggaggagttcatctactggattgacagcagccggcccaacggcagccgcatcaacaggatgtgcctgaatggaagtgacatcaaggtggtgcacaacacagctgtgcccaatgccctggccgtggactggattggcaagaacctgtactggagcgacacagagaagaggatcatcgaggtgtccaagctgaatggcctgtaccccaccatcctggtgtccaagaggctgaagttcccccgggacctgagcctggacccccaggccggctacctgtactggattgactgctgtgagtacccccacatcggccgggtgggcatggatggcaccaaccagagcgtggtgattgagaccaagatcagccggcccatggccctgaccattgattatgtgaacagaaggctgtactgggcagatgagaaccacatcgagttcagcaacatggatggcagccaccgccacaaggtgcccaaccaggacatccctggggtcatcgccctgaccctgtttgaggactacatctactggacagatggcaagaccaagagcctgagccgggcccacaagaccagcggggctgaccggctgagcctcatctacagctggcacgccatcacagacatccaggtgtaccacagctaccggcagccagatgtgtccaagcacctgtgcatgatcaacaatggaggctgcagccacctgtgcctgctggcccctgggaagacccacacctgtgcctgccccaccaacttctacctggccgctgacaacagaacctgcctgagcaactgcacagccagccagttccgctgcaagacagacaagtgcatccccttctggtggaagtgtgacacagtggatgactgtggagatggcagtgatgagccagatgactgcccagagttccgctgccagcccggccgcttccagtgtggcaccggcctgtgtgccctgcctgccttcatctgtgatggagaaaatgactgtggggacaacagtgatgagctgaactgtgacacccacgtgtgcctgagcggccagttcaagtgcaccaagaaccagaagtgcatccctgtgaacctgcgctgcaatggccaggatgactgtggagatgaggaggatgagcgggactgcccagagaacagctgcagcccagactacttccagtgcaagaccaccaagcactgcatcagcaagctgtgggtgtgtgatgaggaccctgactgtgctgatgccagtgatgaggccaactgtgacaagaagacctgtggcccccatgagttccagtgcaagaacaacaactgcatcccagaccactggaggtgtgacagccagaatgactgcagcgacaacagtgatgaggagaactgcaagccccagacctgcaccctgaaggacttcctgtgtgccaacggggactgtgtgagcagccgcttctggtgtgatggagactttgactgtgctgatggcagtgatgaaagaaactgtgagaccagctgcagcaaggaccagttccgctgcagcaatggccagtgcatcccagccaagtggaagtgtgatggccacgaggactgcaagtacggggaggatgagaagagctgtgagcccgccagccccacctgcagcagccgggagtacatctgtgccagtgatggctgcatcagcgccagcctgaagtgcaatggagaatatgactgtgctgatggcagtgatgagatggactgtgtgacagagtgcaaggaggaccagttccgctgcaagaacaaggcccactgcatccccatccgctggctgtgtgatggcatccatgactgtgtggatggcagtgatgaggagaactgtgagcggggcggcaacatctgcagagcagatgagttcctgtgcaacaacagcctgtgcaagctgcacttctgggtgtgtgatggagaagatgactgtggggacaacagtgatgaggccccagacatgtgtgtgaagttcctgtgccccagcacccggccccaccgctgcaggaacaaccgcatctgcctgcagagcgagcagatgtgcaatggaattgatgaatgtggggacaacagtgatgaggaccactgcggcggcaagctgacctacaaggcccggccctgcaagaaggatgaatttgcctgcagcaacaagaagtgcatccccatggacctgcagtgtgaccggctggatgactgtggagatggcagtgatgagcagggctgccgcatcgcccccacagagtacacctgtgaggacaacgtgaacccctgtggagatgatgcctactgcaaccagatcaagaccagcgtcttctgccgctgcaagccaggcttccagaggaacatgaagaaccggcagtgtgaggacctgaatgaatgtctggtgtttggcacctgcagccaccagtgcatcaacgtggagggcagctacaagtgtgtgtgtgaccagaacttccaggagaggaacaacacctgcatcgccgagggcagcgaggaccaggtgctgtacatcgccaatgacacagacatcctgggcttcatctaccccttcaactacagcggggaccaccagcagatcagccacatcgagcacaacagccgcatcaccggcatggatgtgtactaccagagggacatgatcatctggagcacccagttcaaccctgggggcatcttctacaagaggatccacggccgggagaagaggcaggccaacagcggcctcatctgcccagagttcaagaggccccgggacattgctgtggactgggtggccggcaacatctactggacagaccacagcaggatgcactggttctcctactacaccacccactggaccagcctgcgctacagcatcaacgtgggccagctgaatggccccaactgcacccggctgctgaccaacatggccggggagccctatgccatcgctgtgaaccccaagaggggcatgatgtactggacagtggtgggggaccacagccacatcgaggaggccgccatggatggcaccctgcggcgcatcctggtgcagaagaacctgcagaggcccaccggcctggccgtggactacttcagcgagcgcatctactgggccgactttgagctgagcatcatcggctctgtgctgtatgatggcagcaacagcgtggtgtctgtgagcagcaagcagggcctgctgcacccccacagaattgacatctttgaggactacatctatggagctggccccaagaatggagtcttccgggtgcagaagtttggacatggctctgtggagtacctggccctgaacatcgacaagaccaagggcgtgctgatcagccaccgctacaagcagctggacctgcccaacccctgcctggacctggcctgtgagttcctgtgcctgctgaaccccagcggggccacctgtgtgtgcccagagggcaagtacctgatcaatggcacctgcaatgatgacagcctgctggatgacagctgcaagctgacctgtgaaaatggaggccgctgcatcctgaatgagaagggggacctgcgctgccactgctggcccagctacagcggggagcgctgtgaggtgaaccactgcagcaactactgccagaatggaggcacctgtgtgcccagcgtgctgggccggcccacctgcagctgtgccctgggcttcaccggccccaactgtgggaagacagtgtgtgaggacttctgccagaatggaggcacctgcatcgtgacagctggcaaccagccctactgccactgccagcctgagtacaccggggaccgctgccagtactacgtgtgccaccactactgtgtgaacagcgagagctgcaccatcggagatgatggctctgtggagtgtgtgtgccccaccaggtatgagggccccaagtgtgaggtggacaagtgtgtgcgctgccacggcggccactgcatcatcaacaaggacagcgaggacatcttctgcaactgcaccaacgggaagatcgccagcagctgccagctgtgtgatggctactgctacaacggcggcacctgccagctggaccctgagaccaacgtgcctgtgtgcctgtgcagcaccaactggagcggcacccagtgtgagaggcctgcccccaagagcagcaagagtgaccacatcagcaccaggagcatcgccatcatcgtgcccctggtgctgctggtgaccctcatcaccaccctggtgattggcctggtgctgtgcaagaggaagaggaggaccaagaccatccggcggcagcccatcatcaatggaggcatcaacgtggagatcggcaaccccagctacaacatgtatgaggtggaccatgaccacaatgatggcggcctgctggaccccggcttcatgattgaccccaccaaggcccgctacatcggcggcggccccagcgccttcaagctgccccacacagccccacccatctacctgaacagcgacctgaagggccccctgacagctggccccaccaactacagcaaccctgtgtatgccaagctgtacatggatggccagaactgcaggaacagcctgggctctgtggatgagaggaaggagctgctgcccaagaagattgagatcggcatccgggagaccgtggcctag

SEQ ID NO: 20310 - DNA, 2349 bp, synthetic construct
  misc_feature 1..2349: note = Description of Artificial Sequence: Synthetic coding sequence
  source 1..2349: mol_type = other DNA
atgtctgagttcctgctggccctgctgaccctgagcggcctgctgcccatcgcccgggtgctgactgtgggcgctgaccgggaccagcagctgtgtgaccccggggagttcctgtgccacgaccacgtgacctgtgtgtcccagagctggctgtgtgatggagaccctgactgcccagatgacagtgatgagagcctggacaccagcaggacctgccaggtggaccagttcagctgtggaaatggccgctgcatcccccgggcctggctgtgtgaccgggaggatgactgtggggaccagacagatgagatggccagctgtgagttccccacctgtgagcccctgacccagtttgtgtgcaagagcggccgctgcatcagcagcaagtggcactgtgacagtgatgatgactgtggagatggcagtgatgaggtgggctgtgtgcacagctgctttgacaaccagttccgctgcagcagcggccgctgcatccctggccactgggcctgtgatggagacaatgactgtggggacttcagtgatgaggcccagatcaactgcaccaaggaggagatccacagccctgctggctgcaatggaaatgagttccagtgccacccagatggcaactgtgtgcctgacctgtggaggtgtgatggagagaaggactgtgaagatggcagtgatgagaagggctgcaatggcaccatccggctgtgtgaccacaagaccaagttcagctgctggagcacaggccgctgcatcaacaaggcctgggtgtgtgatggagacatcgactgtgaggaccagagtgatgaagatgactgtgacagcttcctgtgtggcccccccaagcacccctgtgccaatgacacctctgtgtgcctgcagcctgagaagctgtgcaatggcaagaaggactgcccagatggcagtgatgagggctacctgtgtgatgagtgcagcctgaacaatggaggctgcagcaaccactgcagcgtggtgcccggccggggcatcgtgtgcagctgcccagagggcctgcagctgaacaaggacaacaagacctgtgaaattgtggactactgcagcaaccacctgaagtgcagccaggtgtgtgagcagcacaagcacacagtgaagtgcagctgctatgagggctggaagctggatgtggatggagagagctgcacctctgtggacccctttgaggccttcatcatcttcagcatcagacatgagatcagaagaattgacctgcacaagagggactacagcctgctggtgcccggcctgaggaacaccatcgccctggacttccacttcaaccagagcctgctgtactggacagatgtggtggaggaccgcatctaccggggcaagctgtctgagagcggaggagtgtctgccatcgaggtggtggtggagcacggcctggccaccccagagggcctgactgtggactggattgctggcaacatctactggattgacagcaacctggaccagatcgaggtggccaagctggatggcagcctgcggaccaccctgattgctggggccatggagcacccccgggccatcgccctggaccccaggtatggcatcctcttctggacagactgggatgccaacttccccagaattgaaagtgcctccatgtctggagctggcaggaagaccatctacaaggacatgaagacaggagcctggcccaacggcctgactgtggaccactttgagaagagaattgtgtggacagatgcccggagtgatgccatctacagcgccctgtatgatggcaccaacatgattgagatcatccggggccacgagtacctgagccacccctttgctgtgtccctgtatggcagcgaggtgtactggacagactggaggaccaacaccctgagcaaggccaacaagtggacaggccagaatgtgtctgtcatccagaagaccagcgcccagccctttgacctgcagatctaccaccccagccggcagccccaggcccccaacccctgtgccgccaatgatggcaagggcccctgcagccacatgtgcctgatcaaccacaacagatctgctgcctgtgcctgcccccacctgatgaagctgagcagtgacaagaagacctgctatgagatgaagaagttcctgctgtatgccaggagaagtgagatccggggcgtggacatcgacaacccctacttcaacttcatcacagccttcaccgtgcctgacattgatgatgtgaccgtcatcgactttgatgccagcgaggagcggctgtactggacagacatcaagacccagaccatcaagagggccttcatcaatggatag

SEQ ID NO: 20311 - DNA, 13614 bp, synthetic construct
  misc_feature 1..13614: note = Description of Artificial Sequence: Synthetic coding sequence
  source 1..13614: mol_type = other DNA
ttcctgcacagcggccctgaggaggtggagatcaagtgccccctgaaccacatcgcctgcctgggcaccaacaagtgtgtgcacctgagccagctgtgcaatggagtgctggactgcccagatggctatgatgagggcgtgcactgccagggcgagagcatctgccagcagctgaactgcaccatgtacaagtacaagtgcaccatggtgaggaacagcacccgctgctactgtgaagatggctttgagatcacagaagatggccgcagctgcaaggaccaggatgaatgtgctgtgtatggcacctgcagccagacctgcaggaacacccacggcagctacacctgcagctgtgtggagggctacctgatgcagcctgacaacagaagctgcaaggccaagattgagcccacagacaggcctcccatcctgctgattgccaactttgagaccatcgaggtgttctacctgaatggcagcaagatggccaccctgagctctgtgaatggaaatgagatccacaccctggacttcatctacaatgaagacatgatctgctggattgagagccgggagagcagcaaccagctgaagtgcatccagatcaccaaggccggcggcctgacagatgagtggaccatcaacatcctgcagagcttccacaacgtgcagcagatggccatcgactggctgaccaggaacctgtactttgtggaccacgtgggggaccgcatctttgtgtgcaacagcaatggatctgtgtgtgtgaccctgattgacctggagctgcacaaccccaaggccatcgctgtggaccccatcgccggcaagctgttcttcacagattatggaaatgtggccaaggtggagcgctgtgacatggatggcatgaacagaacccgcatcatcgacagcaagacagagcagcctgctgccctggccctggacctggtgaacaagctggtgtactgggtggacctgtacctggactatgtgggcgtggtggactaccagggcaagaacagacacacagtcatccagggccggcaggtgcgccacctgtatggcatcaccgtgtttgaggactacctgtatgccaccaacagcgacaactacaacatcgtgcgcatcaaccgcttcaatggaacagacatccacagcctcatcaagattgaaaatgcctggggcatccgcatctaccagaagaggacccagcccaccgtgcgcagccacgcctgtgaggtggacccctacggcatgcctgggggctgcagccacatctgcctgctgagcagcagctacaagaccaggacctgccgctgcaggacaggcttcaacctgggcagtgatggccgcagctgcaagaggcccaagaatgaactcttcctgttctacggcaagggccggcccggcatcgtgcggggcatggacctgaacaccaagattgctgatgagtacatgatccccatcgagaacctggtgaacccccgggccctggacttccacgccgagaccaactacatctactttgctgacaccaccagcttcctgattggccggcagaagattgatggaacagagcgggagaccatcctgaaggatgacctggacaacgtggagggcattgctgtggactggattggcaacaacctgtactggaccaatgatggccacaggaagaccatcaacgtggcccggctggagaaggccagccagagcaggaagaccctgctggagggggagatgagccacccccggggcatcgtggtggaccctgtgaatggctggatgtactggacagactgggaggaggatgaaattgatgacagcgtgggccgcatcgagaaggcctggatggatggcttcaaccggcagatctttgtgaccagcaagatgctgtggcccaacggcctgaccctggacttccacaccaacaccctgtactggtgtgatgcctactatgaccacatcgagaaggtgttcctgaatggcacccacaggaagatcgtgtacagcggccgggagctgaaccaccccttcggcctgagccaccacggcaactacgtgttctggacagactacatgaatggcagcatcttccagctggacctgatcaccagcgaggtgaccctgctgcggcatgagaggcctcccctgtttggcctgcagatctatgaccccaggaagcagcagggcgacaacatgtgccgggtgaacaacggcggctgcagcaccctgtgcctggccatccctgggggccgggtgtgtgcctgtgccgacaaccagctgctggatgaaaatggcaccacctgcaccttcaaccctggagaggccctgccccacatctgcaaggccggggagttccgctgcaagaacagacactgcatccaggcccgctggaagtgtgatggagatgatgactgcctggatggcagtgatgaggacagcgtgaactgcttcaaccacagctgcccagatgaccagttcaagtgccagaacaaccgctgcatccccaagcgctggctgtgtgatggagccaatgactgtggcagcaatgaagatgagagcaaccagacctgcacagcccggacctgccaggtggaccagttcagctgtggaaatggccgctgcatcccccgggcctggctgtgtgacagagaagatgactgtggggaccagacagatgagatggccagctgtgagttccccacctgtgagcccctgacccagtttgtgtgcaagagcggccgctgcatcagcagcaagtggcactgtgacagtgatgatgactgtggagatggcagtgatgaggtgggctgtgtgcacagctgctttgacaaccagttccgctgcagcagcggccgctgcatccctggccactgggcctgtgatggagacaatgactgtggggacttcagtgatgaggcccagatcaactgcaccaaggaggagatccacagccctgctggctgcaatggaaatgagttccagtgccacccagatggcaactgtgtgcctgacctgtggaggtgtgatggagagaaggactgtgaagatggcagtgatgagaagggctgcaatggcaccatccggctgtgtgaccacaagaccaagttcagctgctggagcacaggccgctgcatcaacaaggcctgggtgtgtgatggagacatcgactgtgaggaccagagtgatgaagatgactgtgacagcttcctgtgtggcccccccaagcacccctgtgccaatgacacctctgtgtgcctgcagcctgagaagctgtgcaatggcaagaaggactgcccagatggcagtgatgagggctacctgtgtgatgaatgttccctgaacaacggcggctgcagcaaccactgcagcgtggtgcccggccggggcatcgtgtgcagctgcccagagggcctgcagctgaacaaggacaacaagacctgtgagatcgtggactactgcagcaaccacctgaagtgcagccaggtgtgtgagcagcacaagcacacagtgaagtgcagctgctatgagggctggaagctggatgtggatggagagagctgcacctctgtggacccctttgaggccttcatcatcttcagcatcagacatgagatcagaagaattgacctgcacaagagggactacagcctgctggtgcccggcctgaggaacaccatcgccctggacttccacttcaaccagagcctgctgtactggacagatgtggtggaggaccgcatctaccggggcaagctgtctgagagcggcggcgtgtctgccatcgaggtggtggtggagcacggcctggccaccccagagggcctgactgtggactggattgctggcaacatctactggattgacagcaacctggaccagatcgaggtggccaagctggatggcagcctgcggaccaccctgattgctggggccatggagcacccccgggccatcgccctggaccccaggtatggcatcctcttctggacagactgggatgccaacttcccccgcatcgagagcgcctccatgtctggggccggcaggaagaccatctacaaggacatgaagacaggagcctggcccaacggcctgactgtggaccactttgagaagagaattgtgtggacagatgcccggagtgatgccatctacagcgccctgtatgatggcaccaacatgattgagatcatccggggccacgagtacctgagccacccctttgctgtgtccctgtatggcagcgaggtgtactggacagactggaggaccaacaccctgagcaaggccaacaagtggacaggccagaatgtgtctgtcatccagaagaccagcgcccagccctttgacctgcagatctaccaccccagccggcagccccaggcccccaacccctgtgccgccaatgatggcaagggcccctgcagccacatgtgcctgatcaaccacaacagatctgctgcctgtgcctgcccccacctgatgaagctgagcagtgacaagaagacctgctatgagatgaagaagttcctgctgtatgcccggcgctctgagatccggggcgtggacatcgacaacccctacttcaacttcatcacagccttcaccgtgcctgacattgatgatgtgacagtgattgactttgatgccagcgaggagcggctgtactggacagacatcaagacccagaccatcaagagggccttcatcaatggcaccggcctggagaccgtcatcagccgggacatccagagcatccggggcctggccgtggactgggtgtccaggaacctgtactggatcagcagcgagtttgatgagacccagatcaacgtggcccggctggatggcagcctgaagaccagcatcatccacggcatcgacaagccccagtgcctggccgcccaccctgtgcggggcaagctgtactggacagatggcaacaccatcaacatggccaacatggatggcagcaacagcaagatcctcttccagaaccagaaggagcctgtgggcctgagcattgattatgtggagaacaagctgtactggatcagcagtggaaatggcaccatcaaccgctgcaacctggatggcggcaacctggaggtgattgagagcatgaaggaggagctgaccaaggccacagccctgaccatcatggacaagaagctgtggtgggccgaccagaacctggcccagctgggcacctgcagcaagagagatggaagaaaccccaccatcctgaggaacaagaccagcggcgtggtgcacatgaaggtgtatgacaaggaggcccagcagggcagcaacagctgccagctgaacaacggcggctgcagccagctgtgcctgcccaccagcgagaccaccaggacctgcatgtgcaccgtgggctactacctgcagaagaacaggatgagctgccagggcatcgagagcttcctgatgtacagcgtgcatgagggcatccggggcatccccctggagcccagcgacaagatggatgccctgatgcccatcagcggcaccagctttgctgtgggcatcgacttccacgccgagaatgacaccatctactggacagacatgggcttcaacaagatcagccgggccaagagggaccagacctggaaggaggacatcatcaccaacggcctgggccgggtggagggcattgctgtggactggattgctggcaacatctactggacagaccacggcttcaacctgattgaggtggcccggctgaatggcagcttccgctacgtgatcatcagccagggcctggaccagcccaggagcattgctgtgcaccctgagaagggcctgctcttctggacagagtggggccagatgccctgcatcggcaaggcccggctggatggcagcgagaaggtggtgctggtgtccatgggcatcgcctggcccaacggcatcagcattgattatgaggagaacaagctgtactggtgtgatgccaggacagacaagattgaaagaattgacctggagactggaggcaaccgggagatggtgctgagcggcagcaatgtggacatgttttctgtggccgtgtttggagcctacatctactggagcgaccgggcccacgccaatggatctgtgagaagaggccacaagaatgatgccacagagaccatcaccatgaggacaggcctgggcgtgaacctgaaggaggtgaagatcttcaacagagtgcgggagaagggcaccaacgtgtgtgcccgggacaatggaggctgcaagcagctgtgcctgtaccggggcaacagcaggaggacctgtgcctgtgcccacggctacctggctgaagatggagtgacctgcctgcggcatgagggctacctgctgtacagcggccgcaccatcctgaagagcatccacctgagtgatgagaccaacctgaacagccccatccggccctatgagaacccccgctacttcaagaatgtgattgccctggcctttgactacaaccagaggaggaagggcaccaaccgcatcttctacagtgatgcccacttcggcaacatccagctgatcaaggacaactgggaggaccggcaggtgattgtggagaatgtgggctctgtggagggcctggcctaccaccgggcctgggacaccctgtactggaccagcagcaccaccagcagcatcaccaggcacacagtggaccagaccaggcctggggcctttgaccgggaggccgtcatcaccatgtctgaagatgaccacccccacgtgctggccctggatgagtgccagaacctgatgttctggaccaactggaatgagcagcaccccagcatcatgaggagcaccctgaccgggaagaatgcccaggtggtggtgtccacagacatcctgacccccaacggcctgaccatcgactacagagctgagaagctgtacttcagtgatggcagcctgggcaagattgagcgctgtgaatatgatggcagccagagacatgtgattgtgaagagcggccctggcaccttcctgagcctggccgtgtatgacaactacatcttctggagcgactggggcagaagagccatcctgcggagcaacaagtacacaggaggagacaccaagatcctgcggagtgacatcccccaccagcccatgggcatcatcgctgtggccaatgacaccaacagctgtgagctgagcccctgtgccctgctgaatggaggctgccacgacctgtgcctgctgacccccaacggccgggtgaactgcagctgccgcggggaccgcatcctgctggaggacaacagatgtgtgaccaagaacagcagctgcaatgcctacagcgagtttgaatgtggaaatggagagtgcatcgactaccagctgacctgtgatggcatcccccactgcaaggacaagagtgatgagaagctgctgtactgtgagaacagaagctgcagaagaggcttcaagccctgctacaacagacgctgcatcccccacggcaagctgtgtgatggagaaaatgactgtggggacaacagtgatgagctggactgcaaggtgtccacctgtgccaccgtggagttccgctgtgctgatggcacctgcatccccaggtctgcccgctgcaaccagaacatcgactgtgctgatgccagtgatgagaagaactgcaacaacacagactgcacccacttctacaagctgggcgtgaagaccaccggcttcatccgctgcaacagcaccagcctgtgtgtgctgcccacctggatctgtgatggcagcaatgactgtggggactacagtgatgagctgaagtgccctgtgcagaacaagcacaagtgtgaggagaactacttcagctgccccagcggccgctgcatcctgaacacctggatctgtgatggccagaaggactgtgaagatggaagagatgagttccactgtgacagcagctgctcctggaaccagtttgcctgcagcgcccagaagtgcatcagcaagcactggatctgtgatggagaagatgactgtggagatggcctggatgaaagtgacagcatctgtggggccatcacctgtgccgctgacatgttcagctgccagggcagccgggcctgtgtgcccaggcactggctgtgtgatggagagcgggactgcccagatggcagtgatgagctgagcacagctggctgtgcccccaacaacacctgtgatgaaaatgccttcatgtgccacaacaaggtgtgcatccccaagcagtttgtgtgtgaccatgatgatgactgtggagatggcagtgatgagagcccccagtgtggctaccggcagtgtggcacagaggagttcagctgtgctgatggccgctgcctgctgaacacccagtggcagtgtgatggagactttgactgcccagaccacagtgatgaggcccccctgaaccccaagtgcaagtctgctgagcagagctgcaacagcagcttcttcatgtgcaagaatggccgctgcatccccagcggcggcctgtgtgacaacaaggatgactgtggagatggcagtgatgaaagaaactgccacatcaatgaatgtctgagcaagaaggtgtctggctgcagccaggactgccaggacctgcctgtgtcctacaagtgcaagtgctggccaggcttccagctgaaggatgatggcaagacctgtgtggacattgatgaatgtagcagcggcttcccctgcagccagcagtgcatcaacacctacggcacctacaagtgcctgtgcacagatggctatgagatccagcctgacaaccccaacggctgcaagagcctgagtgatgaggagcccttcctgatcctggccgaccaccacgagatcaggaagatcagcacagatggcagcaactacaccctgctgaagcagggcctgaacaacgtcatcgccatcgactttgactaccgggaggagttcatctactggattgacagcagccggcccaacggcagccgcatcaacaggatgtgcctgaatggaagtgacatcaaggtggtgcacaacacagctgtgcccaatgccctggccgtggactggattggcaagaacctgtactggagcgacacagagaagaggatcatcgaggtgtccaagctgaatggcctgtaccccaccatcctggtgtccaagaggctgaagttcccccgggacctgagcctggacccccaggccggctacctgtactggattgactgctgtgagtacccccacatcggccgggtgggcatggatggcaccaaccagagcgtggtgattgagaccaagatcagccggcccatggccctgaccattgattatgtgaacagaaggctgtactgggcagatgagaaccacatcgagttcagcaacatggatggcagccaccgccacaaggtgcccaaccaggacatccctggggtcatcgccctgaccctgtttgaggactacatctactggacagatggcaagaccaagagcctgagccgggcccacaagaccagcggggctgaccggctgagcctcatctacagctggcacgccatcacagacatccaggtgtaccacagctaccggcagccagatgtgtccaagcacctgtgcatgatcaacaatggaggctgcagccacctgtgcctgctggcccctgggaagacccacacctgtgcctgccccaccaacttctacctggccgctgacaacagaacctgcctgagcaactgcacagccagccagttccgctgcaagacagacaagtgcatccccttctggtggaagtgtgacacagtggatgactgtggagatggcagtgatgagccagatgactgcccagagttccgctgccagcccggccgcttccagtgtggcaccggcctgtgtgccctgcctgccttcatctgtgatggagaaaatgactgtggggacaacagtgatgagctgaactgtgacacccacgtgtgcctgagcggccagttcaagtgcaccaagaaccagaagtgcatccctgtgaacctgcgctgcaatggccaggatgactgtggagatgaggaggatgagcgggactgcccagagaacagctgcagcccagactacttccagtgcaagaccaccaagcactgcatcagcaagctgtgggtgtgtgatgaggaccctgactgtgctgatgccagtgatgaggccaactgtgacaagaagacctgtggcccccatgagttccagtgcaagaacaacaactgcatcccagaccactggaggtgtgacagccagaatgactgcagcgacaacagtgatgaggagaactgcaagccccagacctgcaccctgaaggacttcctgtgtgccaacggggactgtgtgagcagccgcttctggtgtgatggagactttgactgtgctgatggcagtgatgaaagaaactgtgagaccagctgcagcaaggaccagttccgctgcagcaatggccagtgcatcccagccaagtggaagtgtgatggccacgaggactgcaagtacggggaggatgagaagagctgtgagcccgccagccccacctgcagcagccgggagtacatctgtgccagtgatggctgcatcagcgccagcctgaagtgcaatggagaatatgactgtgctgatggcagtgatgagatggactgtgtgacagagtgcaaggaggaccagttccgctgcaagaacaaggcccactgcatccccatccgctggctgtgtgatggcatccatgactgtgtggatggcagtgatgaggagaactgtgagcggggcggcaacatctgcagagcagatgagttcctgtgcaacaacagcctgtgcaagctgcacttctgggtgtgtgatggagaagatgactgtggggacaacagtgatgaggccccagacatgtgtgtgaagttcctgtgccccagcacccggccccaccgctgcaggaacaaccgcatctgcctgcagagcgagcagatgtgcaatggaattgatgaatgtggggacaacagtgatgaggaccactgcggcggcaagctgacctacaaggcccggccctgcaagaaggatgaatttgcctgcagcaacaagaagtgcatccccatggacctgcagtgtgaccggctggatgactgtggagatggcagtgatgagcagggctgccgcatcgcccccacagagtacacctgtgaggacaacgtgaacccctgtggagatgatgcctactgcaaccagatcaagaccagcgtcttctgccgctgcaagccaggcttccagaggaacatgaagaaccggcagtgtgaggacctgaatgaatgtctggtgtttggcacctgcagccaccagtgcatcaacgtggagggcagctacaagtgtgtgtgtgaccagaacttccaggagaggaacaacacctgcatcgccgagggcagcgaggaccaggtgctgtacatcgccaatgacacagacatcctgggcttcatctaccccttcaactacagcggggaccaccagcagatcagccacatcgagcacaacagccgcatcaccggcatggatgtgtactaccagagggacatgatcatctggagcacccagttcaaccctgggggcatcttctacaagaggatccacggccgggagaagaggcaggccaacagcggcctcatctgcccagagttcaagaggccccgggacattgctgtggactgggtggccggcaacatctactggacagaccacagcaggatgcactggttctcctactacaccacccactggaccagcctgcgctacagcatcaacgtgggccagctgaatggccccaactgcacccggctgctgaccaacatggccggggagccctatgccatcgctgtgaaccccaagaggggcatgatgtactggacagtggtgggggaccacagccacatcgaggaggccgccatggatggcaccctgcggcgcatcctggtgcagaagaacctgcagaggcccaccggcctggccgtggactacttcagcgagcgcatctactgggccgactttgagctgagcatcatcggctctgtgctgtatgatggcagcaacagcgtggtgtctgtgagcagcaagcagggcctgctgcacccccacagaattgacatctttgaggactacatctatggagctggccccaagaatggagtcttccgggtgcagaagtttggacatggctctgtggagtacctggccctgaacatcgacaagaccaagggcgtgctgatcagccaccgctacaagcagctggacctgcccaacccctgcctggacctggcctgtgagttcctgtgcctgctgaaccccagcggggccacctgtgtgtgcccagagggcaagtacctgatcaatggcacctgcaatgatgacagcctgctggatgacagctgcaagctgacctgtgaaaatggaggccgctgcatcctgaatgagaagggggacctgcgctgccactgctggcccagctacagcggggagcgctgtgaggtgaaccactgcagcaactactgccagaatggaggcacctgtgtgcccagcgtgctgggccggcccacctgcagctgtgccctgggcttcaccggccccaactgtgggaagacagtgtgtgaggacttctgccagaatggaggcacctgcatcgtgacagctggcaaccagccctactgccactgccagcctgagtacaccggggaccgctgccagtactacgtgtgccaccactactgtgtgaacagcgagagctgcaccatcggagatgatggctctgtggagtgtgtgtgccccaccaggtatgagggccccaagtgtgaggtggacaagtgtgtgcgctgccacggcggccactgcatcatcaacaaggacagcgaggacatcttctgcaactgcaccaacgggaagatcgccagcagctgccagctgtgtgatggctactgctacaacggcggcacctgccagctggaccctgagaccaacgtgcctgtgtgcctgtgcagcaccaactggagcggcacccagtgtgagaggcctgcccccaagagcagcaagagtgaccacatcagcaccaggagcatcgccatcatcgtgcccctggtgctgctggtgaccctcatcaccaccctggtgattggcctggtgctgtgcaagaggaagaggaggaccaagaccatccggcggcagcccatcatcaatggaggcatcaacgtggagatcggcaaccccagctacaacatgtatgaggtggaccatgaccacaatgatggcggcctgctggaccccggcttcatgattgaccccaccaaggcccgctacatcggcggcggccccagcgccttcaagctgccccacacagccccacccatctacctgaacagcgacctgaagggccccctgacagctggccccaccaactacagcaaccctgtgtatgccaagctgtacatggatggccagaactgcaggaacagcctgggctctgtggatgagaggaaggagctgctgcccaagaagattgagatcggcatccgggagaccgtggcctag

SEQ ID NO: 20312 - DNA, 843 bp, synthetic construct
  misc_feature 1..843: note = Description of Artificial Sequence: Synthetic coding sequence
  source 1..843: mol_type = other DNA
atgtgccccccccaggcccaggccgaggtgggccccaccatgacagagaaggccgagatggtgtgtgcccccagccctgccccagcccccccacccaagccagccagccctggccccccccaggtggaggaggtgggccacagaggaggcagcagccccccccggctgcccccaggagtgcctgtgatcagcctgggccacagccggcccccaggagtggccatgcccaccacagagctgggcaccctgcggccccccctgctgcagctgagcaccctgggcacagccccacccaccctggccctgcactaccacccccaccccttcctgaacagcgtgtacatcggccctgctggccccttcagcatcttccccagcagccggctgaagagaagacccagccactgtgagctggacctggccgagggccaccagccccagaaggtggcccggcgggtcttcaccaacagccgggagcgctggaggcagcagaatgtgaatggagcctttgctgagctgaggaagctgctgcccacccaccccccagacaggaagctgagcaagaatgaggtgctgcggctggccatgaagtacatcggcttcctggtgcggctgctgcgggaccaggccgccgccctggccgccggccccaccccacctggccccaggaagaggcctgtgcaccgggtgcctgatgatggagcccggcggggcagcggcagaagagctgaggccgccgcccggagccagcctgcccctcctgctgaccctgatggcagccctggaggagctgcccggcccatcaagatggagcagacagccctgagccctgaggtgaggtag

SEQ ID NO: 20313 - DNA, 1620 bp, synthetic construct
  misc_feature 1..1620: note = Description of Artificial Sequence: Synthetic coding sequence
  source 1..1620: mol_type = other DNA
atgggctgcggctgcagcagccacccagaagatgactggatggagaacattgatgtgtgtgagaactgccactaccccatcgtgcccctggatggcaagggcaccctgctgatcagaaatggcagcgaggtgcgggaccccctggtgacctatgagggcagcaaccccccagccagccccctgcaggacaacctggtgattgccctgcacagctatgagcccagccatgatggagacctgggctttgagaagggggagcagctgcgcatcctggagcagagcggggagtggtggaaggcccagagcctgaccaccggccaggagggcttcatccccttcaactttgtggccaaggccaacagcctggagcctgagccctggttcttcaagaacctgagcaggaaggatgctgagcggcagctgctggcccctggcaacacccacggcagcttcctgatccgggagagcgagagcacagctggcagcttcagcctgtctgtgcgggactttgaccagaaccagggcgaggtggtgaagcactacaagatccggaacctggacaatggaggcttctacatcagcccccgcatcaccttccctggcctgcacgagctggtgcgccactacaccaatgccagtgatggcctgtgcacccggctgagccggccctgccagacccagaagccccagaagccctggtgggaggatgagtgggaggtgccccgggagaccctgaagctggtggagcggctgggcgccggccagtttggagaggtgtggatgggctactacaacggccacaccaaggtggccgtgaagagcctgaagcagggctccatgagcccagatgccttcctggccgaggccaacctgatgaagcagctgcagcaccagaggctggtgcggctgtatgctgtggtgacccaggagcccatctacatcatcacagagtacatggagaatgacaccctgctggacagccagctggaggagaagggcctgggcgccagcccctggggcaacctgggccagcagctgctgctgctgcccaccggcagcctggtggacttcctgaagacccccagcggcatcaagctgaccatcaacaagctgctggacatggccgcccagattgctgagggcatggccttcatcgaggagaggaactacatccaccgggacctgcgggccgccaacatcctggtgtctgacaccctgagctgcaagattgctgactttggcctggcccggctgattgaggacaatgagtacacagcccgggagggcgccaagttccccatcaagtggacagcccctgaggccatcaactacggcaccttcaccatcaagagtgatgtgtggagctttggcatcctgctgacagaaattgtgacccacggccgcatcccctacccaggcatgaccaaccctgaggtgatccagaacctggagcggggctacaggatggtgcggccagacaactgcccagaggagctgtaccagctgatgaggctgtgctggaaggagaggcctgaggaccggcccacctttgactacctgcggtctgtgctggaggacttcttcaccgccacagagggccagtaccagccccagccctag

SEQ ID NO: 20314 - DNA, 1530 bp, synthetic construct
  misc_feature 1..1530: note = Description of Artificial Sequence: Synthetic coding sequence
  source 1..1530: mol_type = other DNA
atgggctgcggctgcagcagccacccagaagatgactggatggagaacattgatgtgtgtgagaactgccactaccccatcgtgcccctggatggcaagggcaccctgctgatcagaaatggcagcgaggtgcgggaccccctggtgacctatgagggcagcaaccccccagccagccccctgcaggacaacctggtgattgccctgcacagctatgagcccagccatgatggagacctgggctttgagaagggggagcagctgcgcatcctggagcagagcggggagtggtggaaggcccagagcctgaccaccggccaggagggcttcatccccttcaactttgtggccaaggccaacagcctggagcctgagccctggttcttcaagaacctgagcaggaaggatgctgagcggcagctgctggcccctggcaacacccacggcagcttcctgatccgggagagcgagagcacagctggcagcttcagcctgtctgtgcgggactttgaccagaaccagggcgaggtggtgaagcactacaagatccggaacctggacaatggaggcttctacatcagcccccgcatcaccttccctggcctgcacgagctggtgcgccactacaccaatgccagtgatggcctgtgcacccggctgagccggccctgccagacccagaagccccagaagccctggtgggaggatgagtgggaggtgccccgggagaccctgaagctggtggagcggctgggcgccggccagtttggagaggtgtggatgggctactacaacggccacaccaaggtggccgtgaagagcctgaagcagggctccatgagcccagatgccttcctggccgaggccaacctgatgaagcagctgcagcaccagaggctggtgcggctgtatgctgtggtgacccaggagcccatctacatcatcacagagtacatggagaatggcagcctggtggacttcctgaagacccccagcggcatcaagctgaccatcaacaagctgctggacatggccgcccagattgctgagggcatggccttcatcgaggagaggaactacatccaccgggacctgcgggccgccaacatcctggtgtctgacaccctgagctgcaagattgctgactttggcctggcccggctgattgaggacaatgagtacacagcccgggagggcgccaagttccccatcaagtggacagcccctgaggccatcaactacggcaccttcaccatcaagagtgatgtgtggagctttggcatcctgctgacagaaattgtgacccacggccgcatcccctacccaggcatgaccaaccctgaggtgatccagaacctggagcggggctacaggatggtgcggccagacaactgcccagaggagctgtaccagctgatgaggctgtgctggaaggagaggcctgaggaccggcccacctttgactacctgcggtctgtgctggaggacttcttcaccgccacagagggccagtaccagccccagccctag

SEQ ID NO: 20315 - DNA, 1551 bp, synthetic construct
  misc_feature 1..1551: note = Description of Artificial Sequence: Synthetic coding sequence
  source 1..1551: mol_type = other DNA
atgggctgcggctgcagcagccacccagaagatgactggatggagaacattgatgtgtgtgagaactgccactaccccatcgtgcccctggatggcaagggcaccctgctgatcagaaatggcagcgaggtgcgggaccccctggtgacctatgagggcagcaaccccccagccagccccctgcagggcgacccccggcagcagggcctgaaggacaaggcctgtggcagcctggccgtgggcttccacctgagccccacctacttcctgcccggcctggccttcctggtgccccaccctgtgaccccaggcttcctgcccatcccagcccgcttcagcctgatgcccctggtgttcacagacaacctggtgattgccctgcacagctatgagcccagccatgatggagacctgggctttgagaagggggagcagctgcgcatcctggagcagagcggggagtggtggaaggcccagagcctgaccaccggccaggagggcttcatccccttcaactttgtggccaaggccaacagcctggagcctgagccctggttcttcaagaacctgagcaggaaggatgctgagcggcagctgctggcccctggcaacacccacggcagcttcctgatccgggagagcgagagcacagctggcagcttcagcctgtctgtgcgggactttgaccagaaccagggcgaggtggtgaagcactacaagatccggaacctggacaatggaggcttctacatcagcccccgcatcaccttccctggcctgcacgagctggtgcgccactacacccgctactacaacggccacaccaaggtggccgtgaagagcctgaagcagggctccatgagcccagatgccttcctggccgaggccaacctgatgaagcagctgcagcaccagaggctggtgcggctgtatgctgtggtgacccaggagcccatctacatcatcacagagtacatggagaatggcagcctggtggacttcctgaagaccccatctggcatcaagctgaccatcaacaagctgctggacatggccgcccagattgctgagggcatggccttcatcgaggagaggaactacatccaccgggacctgcgggccgccaacatcctggtgtctgacaccctgagctgcaagattgctgactttggcctggcccggctgattgaagataatgagtacacagcccgggagggcgccaagttccccatcaagtggacagcccctgaggccatcaactacggcaccttcaccatcaagagtgatgtgtggagctttggcatcctgctgacagagatcgtgacccacggccgcatcccctacccaggcatgaccaaccctgaggtgatccagaacctggagcggggctacaggatggtgcggccagacaactgcccagaggagctgtaccagctgatgaggctgtgctggaaggagaggccagaagatcggcccacctttgactacctgcggtctgtgctggaggacttcttcaccgccacagagggccagtaccagccccagccctag

SEQ ID NO: 20316 - DNA, 750 bp, synthetic construct
  misc_feature 1..750: note = Description of Artificial Sequence: Synthetic coding sequence
  source 1..750: mol_type = other DNA
atgggctactacaacggccacaccaaggtggccgtgaagagcctgaagcagggctccatgagcccagatgccttcctggccgaggccaacctgatgaagcagctgcagcaccagaggctggtgcggctgtatgctgtggtgacccaggagcccatctacatcatcacagagtacatggagaatggcagcctggtggacttcctgaagacccccagcggcatcaagctgaccatcaacaagctgctggacatggccgcccagattgctgagggcatggccttcatcgaggagaggaactacatccaccgggacctgcgggccgccaacatcctggtgtctgacaccctgagctgcaagattgctgactttggcctggcccggctgattgaggacaatgagtacacagcccgggagggcgccaagttccccatcaagtggacagcccctgaggccatcaactacggcaccttcaccatcaagagtgatgtgtggagctttggcatcctgctgacagaaattgtgacccacggccgcatcccctacccaggcatgaccaaccctgaggtgatccagaacctggagcggggctacaggatggtgcggccagacaactgcccagaggagctgtaccagctgatgaggctgtgctggaaggagaggcctgaggaccggcccacctttgactacctgcggtctgtgctggaggacttcttcaccgccacagagggccagtaccagccccagccctag

SEQ ID NO: 20317 - DNA, 1611 bp, synthetic construct
  misc_feature 1..1611: note = Description of Artificial Sequence: Synthetic coding sequence
  source 1..1611: mol_type = other DNA
atgggcatccctggcagccacaacctgcgctacttctggaacttccctggccagggccccatcatcagtgatgtgggcggcgctgacctgggcggggcccccagcgcccccagcagcatccccagcggcaccatgggctgcggctgcagcagccacccagaagatgactggatggagaacattgatgtgtgtgagaactgccactaccccatcgtgcccctggatggcaagggcaccctgctgatcagaaatggcagcgaggtgcgggaccccctggtgacctatgagggcagcaaccccccagccagccccctgcaggacaacctggtgattgccctgcacagctatgagcccagccatgatggagacctgggctttgagaagggggagcagctgcgcatcctggagcagagcggggagtggtggaaggcccagagcctgaccaccggccaggagggcttcatccccttcaactttgtggccaaggccaacagcctggagcctgagccctggttcttcaagaacctgagcaggaaggatgctgagcggcagctgctggcccctggcaacacccacggcagcttcctgatccgggagagcgagagcacagctggcagcttcagcctgtctgtgcgggactttgaccagaaccagggcgaggtggtgaagcactacaagatccggaacctggacaatggaggcttctacatcagcccccgcatcaccttccctggcctgcacgagctggtgcgccactacaccaatgccagtgatggcctgtgcacccggctgagccggccctgccagacccagaagccccagaagccctggtgggaggatgagtgggaggtgccccgggagaccctgaagctggtggagcggctgggcgccggccagtttggagaggtgtggatgggctactacaacggccacaccaaggtggccgtgaagagcctgaagcagggctccatgagcccagatgccttcctggccgaggccaacctgatgaagcagctgcagcaccagaggctggtgcggctgtatgctgtggtgacccaggagcccatctacatcatcacagagtacatggagaatggcagcctggtggacttcctgaagacccccagcggcatcaagctgaccatcaacaagctgctggacatggccgcccagattgctgagggcatggccttcatcgaggagaggaactacatccaccgggacctgcgggccgccaacatcctggtgtctgacaccctgagctgcaagattgctgactttggcctggcccggctgattgaggacaatgagtacacagcccgggagggcgccaagttccccatcaagtggacagcccctgaggccatcaactacggcaccttcacccacggccgcatcccctacccaggcatgaccaaccctgaggtgatccagaacctggagcggggctacaggatggtgcggccagacaactgcccagaggagctgtaccagctgatgaggctgtgctggaaggagaggccagaagatcggcccacctttgactacctgcggtctgtgctggaggacttcttcaccgccacagagggccagtaccagccccagccctag

SEQ ID NO: 20318 - DNA, 1200 bp, synthetic construct
  misc_feature 1..1200: note = Description of Artificial Sequence: Synthetic coding sequence
  source 1..1200: mol_type = other DNA
atgccccagctgagcggcggcggcggcggcggcggcggggaccctgagctgtgtgccacagatgagatgatccccttcaaggatgaaggagacccccagaaggagaagatctttgctgagatcagccaccctgaggaggagggggacctggccgacatcaagagcagcctggtgaatgaaagtgagatcatcccagccagcaatggccacgaggtggcccggcaggcccagaccagccaggagccctaccatgacaaggcccgggagcacccagatgatggcaagcacccagatggcggcctgtacaacaagggccccagctacagcagctacagcggctacatcatgatgcccaacatgaacaatgacccctacatgagcaatggcagcctgagcccccccatccccaggaccagcaacaaggtgcctgtggtgcagcccagccatgctgtgcaccccctgacccccctcatcacctacagtgatgagcacttcagccctggcagccaccccagccacatccccagtgatgtgaacagcaagcagggcatgagccgccaccccccagccccagacatccccaccttctaccccctgagccctggaggagtgggccagatcaccccacccctgggctggcagggccagcctgtgtaccccatcaccggcggcttccggcagccctaccccagcagcctgtctgtggacacctccatgagccgcttcagccaccacatgatccctggccccccaggcccccacaccaccggcatcccccacccagccatcgtgaccccccaggtgaagcaggagcacccccacacagacagcgacctgatgcacgtgaagccccagcacgagcagaggaaggagcaggagcccaagaggccccacatcaagaagcccctgaatgccttcatgctgtacatgaaggagatgagggccaacgtggtggccgagtgcaccctgaaggagagcgctgccatcaaccagatcctgggccgccgctggcacgccctgagccgggaggagcaggccaagtactatgagctggccaggaaggagcggcagctgcacatgcagctgtacccaggctggagcgcccgggacaactacggcaagaagaagaagaggaagcgggagaagctgcaggagagcgccagcggcaccggccccaggatgacagctgcctacatctag

SEQ ID NO: 20319 - DNA, 1161 bp, synthetic construct
  misc_feature 1..1161: note = Description of Artificial Sequence: Synthetic coding sequence
  source 1..1161: mol_type = other DNA
atgccccagctgagcggcggcggcggcggcggcggcggggaccctgagctgtgtgccacagatgagatgatccccttcaaggatgaaggagacccccagaaggagaagatctttgctgagatcagccaccctgaggaggagggggacctggccgacatcaagagcagcctggtgaatgaaagtgagatcatcccagccagcaatggccacgaggtggcccggcaggcccagaccagccaggagccctaccatgacaaggcccgggagcacccagatgatggcaagcacccagatggcggcctgtacaacaagggccccagctacagcagctacagcggctacatcatgatgcccaacatgaacaatgacccctacatgagcaatggcagcctgagcccccccatccccaggaccagcaacaaggtgcctgtggtgcagcccagccatgctgtgcaccccctgacccccctcatcacctacagtgatgagcacttcagccctggcagccaccccagccacatccccagtgatgtgaacagcaagcagggcatgagccgccaccccccagccccagacatccccaccttctaccccctgagccctggaggagtgggccagatcaccccacccctgggctggttcagccaccacatgatccctggccccccaggcccccacaccaccggcatcccccacccagccatcgtgaccccccaggtgaagcaggagcacccccacacagacagcgacctgatgcacgtgaagccccagcacgagcagaggaaggagcaggagcccaagaggccccacatcaagaagcccctgaatgccttcatgctgtacatgaaggagatgagggccaacgtggtggccgagtgcaccctgaaggagagcgctgccatcaaccagatcctgggccgccgctggcacgccctgagccgggaggagcaggccaagtactatgagctggccaggaaggagcggcagctgcacatgcagctgtacccaggctggagcgcccgggacaactacggcaagaagaagaagaggaagcgggagaagctgcaggagagcgccagcggcggcaagaggagcagcttccccacctgcaaggccaaggccgccaccccaggccccctgctggagatggaggcctgctag

SEQ ID NO: 20320 - DNA, 1116 bp, synthetic construct
  misc_feature 1..1116: note = Description of Artificial Sequence: Synthetic coding sequence
  source 1..1116: mol_type = other DNA
atgccccagctgagcggcggcggcggcggcggcggcggggaccctgagctgtgtgccacagatgagatgatccccttcaaggatgaaggagacccccagaaggagaagatctttgctgagatcagccaccctgaggaggagggggacctggccgacatcaagagcagcctggtgaatgaaagtgagatcatcccagccagcaatggccacgaggtggcccggcaggcccagaccagccaggagccctaccatgacaaggcccgggagcacccagatgatggcaagcacccagatggcggcctgtacaacaagggccccagctacagcagctacagcggctacatcatgatgcccaacatgaacaatgacccctacatgagcaatggcagcctgagcccccccatccccaggaccagcaacaaggtgcctgtggtgcagcccagccatgctgtgcaccccctgacccccctcatcacctacagtgatgagcacttcagccctggcagccaccccagccacatccccagtgatgtgaacagcaagcagggcatgagccgccaccccccagccccagacatccccaccttctaccccctgagccctggaggagtgggccagatcaccccacccctgggctggttcagccaccacatgatccctggccccccaggcccccacaccaccggcatcccccacccagccatcgtgaccccccaggtgaagcaggagcacccccacacagacagcgacctgatgcacgtgaagccccagcacgagcagaggaaggagcaggagcccaagaggccccacatcaagaagcccctgaatgccttcatgctgtacatgaaggagatgagggccaacgtggtggccgagtgcaccctgaaggagagcgctgccatcaaccagatcctgggccgccgctggcacgccctgagccgggaggagcaggccaagtactatgagctggccaggaaggagcggcagctgcacatgcagctgtacccaggctggagcgcccgggacaactacggcaagaagaagaagaggaagcgggagaagctgcaggagagcgccagcggcaccggccccaggatgacagctgcctacatctag

SEQ ID NO: 20321 - DNA, 912 bp, synthetic construct
  misc_feature 1..912: note = Description of Artificial Sequence: Synthetic coding sequence
  source 1..912: mol_type = other DNA
atggccgaggtggcccggcaggcccagaccagccaggagccctaccatgacaaggcccgggagcacccagatgatggcaagcacccagatggcggcctgtacaacaagggccccagctacagcagctacagcggctacatcatgatgcccaacatgaacaatgacccctacatgagcaatggcagcctgagcccccccatccccaggaccagcaacaaggtgcctgtggtgcagcccagccatgctgtgcaccccctgacccccctcatcacctacagtgatgagcacttcagccctggcagccaccccagccacatccccagtgatgtgaacagcaagcagggcatgagccgccaccccccagccccagacatccccaccttctaccccctgagccctggaggagtgggccagatcaccccacccctgggctggttcagccaccacatgatccctggccccccaggcccccacaccaccggcatcccccacccagccatcgtgaccccccaggtgaagcaggagcacccccacacagacagcgacctgatgcacgtgaagccccagcacgagcagaggaaggagcaggagcccaagaggccccacatcaagaagcccctgaatgccttcatgctgtacatgaaggagatgagggccaacgtggtggccgagtgcaccctgaaggagagcgctgccatcaaccagatcctgggccgccgctggcacgccctgagccgggaggagcaggccaagtactatgagctggccaggaaggagcggcagctgcacatgcagctgtacccaggctggagcgcccgggacaactacggcaagaagaagaagaggaagcgggagaagctgcaggagagcgccagcggcaccggccccaggatgacagctgcctacatctag

SEQ ID NO: 20322 - DNA, 1500 bp, synthetic construct
  misc_feature 1..1500: note = Description of Artificial Sequence: Synthetic coding sequence
  source 1..1500: mol_type = other DNA
atgaatgatgaccccagcatggaggagaatggagtggagcgggtgtgcccagagagcctgctgcagagccgggagtacagcagcctgcccctgcccaggcacaccagcagcacagatggcaccatcaccagcagtgaccccggcctggagatcctgaacatggccagctgtgacctggacaggaacagcctgtgcaagaaggaggaggacaccaggtctgccagccccaccatcgaggcccagggcaccagccctgcccatgacaacatcgccttccaggacagcaccagcaaggacaagaccatcctgaacctggaggccaaggaggagcctgagaccatcgaggagcacaagaaggagcacgccagcggggacagcgtggtgagccccctgcctgtgaccaccgtgaagtctgtgaacctgcggcagagcgagaacaccagcgccaatgagaaggaggtggaggccgagttcctgcggctgagcctgggcttcaagtgtgactggttcaccctggagaagagggtgaagctggaggagaggagccgggacctggccgaggagaacctgaagaaggagatcaccaactgcctgaagctgctggagagcctgacccccctgtgtgaagatgacaaccaggcccaggagatcatcaagaagctggagaagagcatcaagttcctgagccagtgtgccgcccgggtggccagcagagctgagatgctgggcgccatcaaccaggagagccgggtgtccaaggctgtggaggtgatgatccagcacgtggagaacctgaagaggatgtatgccaaggagcacgccgagctggaggagctgaagcaggtgctgctgcagaatgaaagaagcttcaaccccctggaggatgatgatgactgccagatcaagaagaggtctgccagcctgaacagcaagcccagcagcctgcggcgggtgaccatcgccagcctgcccagaaatattggaaatgccggcatggtggccggcatggagaacaatgaccgcttcagccgccgcagcagctcctggaggatcctgggcagcaagcagagcgagcaccggcccagcctgccccgcttcatcagcacctacagctgggcagatgctgaggaggagaagtgtgagctgaagaccaaggatgacagcgagcccagcggggaggagaccgtggagaggaccaggaagcccagcctgtctgagaagaagaacaaccccagcaagtgggatgtgtcctctgtgtatgacaccatcgcctcctgggccaccaacctgaagagcagcatcaggaaggccaacaaggccctgtggctgagcatcgccttcatcgtgctgtttgctgccctgatgtccttcctgaccggccagctgttccagaagtctgtggatgctgcccccacccagcaggaggacagctggaccagcctggagcacatcctgtggcccttcacccggctgcggcacaacggccccccacctgtgtag

SEQ ID NO: 20323 - DNA, 1500 bp, synthetic construct; identical to SEQ ID NO: 20322
  misc_feature 1..1500: note = Description of Artificial Sequence: Synthetic coding sequence
  source 1..1500: mol_type = other DNA

SEQ ID NO: 20324 - DNA, 1500 bp, synthetic construct; identical to SEQ ID NO: 20322
  misc_feature 1..1500: note = Description of Artificial Sequence: Synthetic coding sequence
  source 1..1500: mol_type = other DNA

SEQ ID NO: 20325 - DNA, 234 bp, synthetic construct
  misc_feature 1..234: note = Description of Artificial Sequence: Synthetic coding sequence
  source 1..234: mol_type = other DNA
atgaatgatgaccccagcatggaggagaatggagtggagcgggtgtgcccagagagcctgctgcagagccgggagtacagcagcctgcccctgcccaggcacaccagcagcacagatggcaccatcaccagcagtgaccccggcctggagatcctgaacatggccagctgtgacctggacaggaacagcctgtgcaagaaggaggaggacaccaggtctgccagccccacctag

SEQ ID NO: 20326 - DNA, 27 bp, synthetic construct
  misc_feature 1..27: note = Description of Artificial Sequence: Synthetic coding sequence
  source 1..27: mol_type = other DNA
atgaatgatgaccccagcatggagtag

SEQ ID NO: 20327 - DNA, 618 bp, synthetic construct
  misc_feature 1..618: note = Description of Artificial Sequence: Synthetic coding sequence
  source 1..618: mol_type = other DNA
atgaccccacctgagcggctcttcctgccccgggtgcggggcaccaccctgcacctgctgctgctgggcctgctgctggtgctgctgcccggggcccagggcctgcccggggtgggcctgaccccatctgctgcccagacagcccggcagcaccccaagatgcacctggcccacagcaccctgaagccagctgcccacctgattggagaccccagcaagcagaacagcctgctgtggagggccaacacagaccgggccttcctgcaggacggcttcagcctgagcaacaacagcctgctggtgcccaccagcggcatctactttgtgtacagccaggtggtgttcagcggcaaggcctacagccccaaggccaccagcagccccctgtacctggcccacgaggtgcagctgttcagcagccagtaccccttccacgtgcccctgctgagcagccagaagatggtgtacccaggcctgcaggagccctggctgcacagcatgtaccatggagctgccttccagctgacccagggcgaccagctgagcacccacacagatggcatcccccacctggtgctgagccccagcacagtgttcttcggggcctttgccctgtag

SEQ ID NO: 20328 - DNA, 618 bp, synthetic construct; identical to SEQ ID NO: 20327
  misc_feature 1..618: note = Description of Artificial Sequence: Synthetic coding sequence
  source 1..618: mol_type = other DNA

SEQ ID NO: 20329 - DNA, 417 bp, synthetic construct
  misc_feature 1..417: note = Description of Artificial Sequence: Synthetic coding sequence
  source 1..417: mol_type = other DNA
atgaccccacctgagcggctcttcctgccccgggtgcggggcaccaccctgcacctgctgctgctgggcctgctgctggtgctgctgcccggggcccagggcctgcccggggtgggcctgaccccatctgctgcccagacagcccggcagcaccccaagatgcacctggcccacagcaccctgaagccagctgcccacctgattggagaccccagcaagcagaacagcctgctgtggagggccaacacagaccgggccttcctgcaggacggcttcagcctgagcaacaacagcctgctggtgcccaccagcggcatctactttgtgtacagccagggcagcagcccccccctgctgtggcccttccagcagctgaagagcagcctcatcaagagccctgagctgagcaagaagtag

SEQ ID NO: 20330 - DNA, 2010 bp, synthetic construct
  misc_feature 1..2010: note = Description of Artificial Sequence: Synthetic coding sequence
  source 1..2010: mol_type = other DNA
atggagggcaacaagctggaggagcaggacagcagccccccccagagcaccccaggcctgatgaagggcaacaagcgggaggagcagggcctgggccctgagcctgctgccccccagcagcccacagctgaggaggaggccctgattgagttccacaggagctaccgggagctgtttgagttcttctgcaacaacaccaccatccatggagccatccggctggtgtgcagccagcacaacaggatgaagacagccttctgggccgtgctgtggctgtgcaccttcggcatgatgtactggcagtttggcctgctgtttggagagtacttctcctaccctgtgtccctgaacatcaacctgaacagcgacaagctggtgtttcctgctgtgaccatctgcaccctgaacccctaccgctacccagagatcaaggaggagctggaggagctggaccgcatcacagagcagaccctgtttgacctgtacaagtacagcagcttcaccaccctggtggccggcagccgcagcagaagagacctgcggggcaccctgccccaccccctgcagaggctgcgggtgcccccaccaccccacggggcccggcgggcccggtctgtggccagcagcctgcgggacaacaacccccaggtggactggaaggactggaagattggcttccagctgtgcaaccagaacaagagtgactgcttctaccagacctacagcagtggagtggatgctgtgcgggagtggtaccgcttccactacatcaacatcctgagccggctgcctgagaccctgcccagcctggaggaggacaccctgggcaacttcatctttgcctgccgcttcaaccaggtgtcctgcaaccaggccaactacagccacttccaccaccccatgtatggcaactgctacaccttcaatgacaagaacaacagcaacctgtggatgagctccatgcctggcatcaacaacggcctgagcctgatgctgcgggcagagcagaatgacttcatccccctgctgagcacagtgactggagcccgggtgatggtgcacggccaggatgagcccgccttcatggatgatggcggcttcaacctgcggcctggggtggagaccagcatctccatgaggaaggagaccctggaccggctgggcggggactatggagactgcaccaagaatggaagtgatgtgcctgtggagaacctgtaccccagcaagtacacccagcaggtgtgcatccacagctgcttccaggagagcatgatcaaggaatgtggctgtgcctacatcttctacccccggccccagaatgtggagtactgtgactacaggaagcacagctcctggggctactgctactacaagctgcaggtggacttcagcagtgaccacctgggctgcttcaccaagtgcaggaagccctgcagcgtgaccagctaccagctgtctgctggctacagccgctggcccagcgtgaccagccaggagtgggtgttccagatgctgagccggcagaacaactacacagtgaacaacaagagaaatggagtggccaaggtgaacatcttcttcaaggagctgaactacaagaccaacagcgagagccccagcgtgaccatggtgaccctgctgagcaacctgggcagccagtggagcctgtggtttggcagctctgtgctgtctgtggtggagatggccgagctggtgtttgacctgctggtgatcatgttcctgatgctgctgcggcgcttccgcagccgctactggagccctggccggggcggccgcggggcccaggaggtggccagcaccctggccagcagcccccccagccacttctgcccccaccccatgagcctgagcctgagccagcccggccctgcccccagccctgccctgacagcccctcctccagcctatgccaccctgggcccccggcccagccctgggggcagcgctggggccagcagcagcacctgccccctgggcggcccctag

SEQ ID NO: 20331 - DNA, 987 bp, synthetic construct
  misc_feature 1..987: note = Description of Artificial Sequence: Synthetic coding sequence
  source 1..987: mol_type = other DNA
atgggcctggaggagatcgccccctgcaccagcaagaggaagacccagtgccgctgccagcccggcatgttctgtgccgcctgggccctggagtgcacccactgtgagctgctgagtgactgccccccaggcacagaagctgagctgaaggatgaggtgggcaaaggaaacaaccactgtgtgccctgcaaggccggccacttccagaacaccagcagccccagcgcccgctgccagccccacacccgctgtgagaaccagggcctggtggaggccgcccctggaacagcccagagcgacaccacctgcaagaaccccctggagcccctgcccccagagatgagcggcaccatgctgatgctggccgtgctgctgcccctggccttcttcctgctgctggccaccgtcttcagctgcatctggaagagccaccccagcctgtgcaggaagctgggcagcctgctgaagagaagaccccagggcgagggccccaaccctgtggccggctcctgggagccccccaaggcccacccctacttcccagacctggtgcagcccctgctgcccatctctggagatgtgtcccctgtgtccacaggcctgcctgctgcccctgtgctggaggccggcgtgccccagcagcagagccccctggacctgacccgggagccccagctggagcccggggagcagagccaggtggcccacggcaccaacggcatccacgtgactggaggctccatgaccatcactggaaacatctacatctacaacggccctgtgctgggcggccccccaggccctggggacctgcctgccaccccagagcccccctaccccatccctgaggagggggaccccggccccccaggcctgagcaccccccaccaggaggatggcaaggcctggcacctggccgagacagagcactgtggggccacccccagcaacagaggccccaggaaccagttcatcacccatgactag

SEQ ID NO: 20332 - DNA, 1725 bp, synthetic construct
  misc_feature 1..1725: note = Description of Artificial Sequence: Synthetic coding sequence
  source 1..1725: mol_type = other DNA
atggccctggcccggggcagccggcagctgggcgccctggtgtggggcgcctgcctgtgtgtgctggtgcacggccagcaggcccagcccggccagggcagtgaccctgcccgctggaggcagctgatccagtgggagaacaacggccaggtgtacagcctgctgaacagcggctctgaatatgtgcctgctggcccccagaggtctgagagcagcagccgggtgctgctggccggggccccccaggcccagcagaggaggagccacggcagcccccggcggcggcaggcccccagcctgcccctgcccggccgggtgggcagtgacacagtgcggggccaggcccggcacccctttggatttggccaggtgcctgacaactggagggaggtggccgtgggggacagcacaggcatggcccgggcccggacctctgtgtcccagcagagacatggaggcagcgccagctctgtgtctgccagcgcctttgccagcacctaccggcagcagcccagctacccccagcagttcccctacccccaggccccctttgtgtcccagtatgaaaattatgaccctgccagcaggacctatgaccagggctttgtgtactacagacctgctgggggcggcgtgggcgctggagctgctgctgtggccagcgctggggtcatctacccctaccagccccgggcccgctatgaggagtatggaggaggagaggagctgcctgagtacccaccccagggcttctacccagcccctgagcggccctacgtgcccccacctcctcctcctccagatggcctggaccggcgctacagccacagcctgtacagcgagggcaccccaggctttgagcaggcctacccagaccccggccctgaggccgcccaggcccatggaggagacccccggctgggctggtacccaccctatgccaaccccccacctgaggcctacggccccccccgggccctggagcccccctacctgcctgtgcgcagcagtgacaccccacctcctggaggagagagaaatggagcccagcagggccgcctgtctgtgggctctgtgtaccggcccaaccagaatggccggggcctgcctgacctggtgcctgaccccaactacgtgcaggccagcacctacgtgcagagggcccacctgtacagcctgcgctgtgccgctgaggagaagtgcctggccagcacagcctatgcccctgaggccacagattatgatgtgcgggtgctgctgcgcttcccccagagggtgaagaaccagggcacagctgacttcctgcccaaccggcccaggcacacctgggagtggcacagctgccaccagcactaccacagcatggatgagttcagccactatgacctgctggatgctgccaccgggaagaaggtggccgagggccacaaggccagcttctgcctggaggacagcacctgtgactttggaaacctgaagagatatgcctgcaccagccacacccagggcctgagccctggctgctatgacacctacaatgctgacatcgactgccagtggattgacatcacagatgtgcagcccggcaactacatcctgaaggtgcacgtgaaccccaagtacatcgtgctggagagtgacttcaccaacaacgtggtgcgctgcaacatccactacacaggccgctacgtgtctgccaccaactgcaagatcgtgcagagctag

SEQ ID NO: 20333 - DNA, 1311 bp, synthetic construct
  misc_feature 1..1311: note = Description of Artificial Sequence: Synthetic coding sequence
  source 1..1311: mol_type = other DNA
atggcccgggcccggacctctgtgtcccagcagagacatggaggcagcgccagctctgtgtctgccagcgcctttgccagcacctaccggcagcagcccagctacccccagcagttcccctacccccaggccccctttgtgtcccagtatgaaaattatgaccctgccagcaggacctatgaccagggctttgtgtactacagacctgctgggggcggcgtgggcgctggagctgctgctgtggccagcgctggggtcatctacccctaccagccccgggcccgctatgaggagtatggaggaggagaggagctgcctgagtacccaccccagggcttctacccagcccctgagcggccctacgtgcccccacctcctcctcctccagatggcctggaccggcgctacagccacagcctgtacagcgagggcaccccaggctttgagcaggcctacccagaccccggccctgaggccgcccaggcccatggaggagacccccggctgggctggtacccaccctatgccaaccccccacctgaggcctacggccccccccgggccctggagcccccctacctgcctgtgcgcagcagtgacaccccacctcctggaggagagagaaatggagcccagcagggccgcctgtctgtgggctctgtgtaccggcccaaccagaatggccggggcctgcctgacctggtgcctgaccccaactacgtgcaggccagcacctacgtgcagagggcccacctgtacagcctgcgctgtgccgctgaggagaagtgcctggccagcacagcctatgcccctgaggccacagattatgatgtgcgggtgctgctgcgcttcccccagagggtgaagaaccagggcacagctgacttcctgcccaaccggcccaggcacacctgggagtggcacagctgccaccagcactaccacagcatggatgagttcagccactatgacctgctggatgctgccaccgggaagaaggtggccgagggccacaaggccagcttctgcctggaggacagcacctgtgactttggaaacctgaagagatatgcctgcaccagccacacccagggcctgagccctggctgctatgacacctacaatgctgacatcgactgccagtggattgacatcacagatgtgcagcccggcaactacatcctgaaggtgcacgtgaaccccaagtacatcgtgctggagagtgacttcaccaacaacgtggtgcgctgcaacatccactacacaggccgctacgtgtctgccaccaactgcaagatcgtgcagagctag

SEQ ID NO: 20334 - DNA, 636 bp, synthetic construct
  misc_feature 1..636: note = Description of Artificial Sequence: Synthetic coding sequence
  source 1..636: mol_type = other DNA
atgaccaccctgacccggcaggacctgaactttggccaggtggtggctgatgtgctgtgtgagttcctggaggtggccgtgcacctgatcctgtatgtgcgggaggtgtaccctgtgggcatcttccagaagaggaagaagtacaacgtgcctgtgcagatgagctgccaccctgagctgaaccagtacatccaggacaccctgcactgtgtgaagcccctgctggagaagaatgatgtggagaaggtggtggtggtgatcctggacaaggagcacaggcctgtggagaagtttgtgtttgagatcacccagccccccctgctgagcatcagcagtgacagcctgctgagccacgtggagcagctgctgcgggccttcatcctgaagatctctgtgtgtgatgctgtgctggaccacaaccccccaggctgcaccttcaccgtgctggtgcacacccgggaggccgccaccaggaacatggagaagatccaggtgatcaaggacttcccctggatcctggctgatgagcaggatgtgcacatgcatgaccccaggctcatccccctgaagaccatgaccagtgacatcctgaagatgcagctgtatgtggaggagcgggcccacaagggcagctag

SEQ ID NO: 20335 - DNA, 318 bp, synthetic construct
  misc_feature 1..318: note = Description of Artificial Sequence: Synthetic coding sequence
  source 1..318: mol_type = other DNA
atgaccaccctgacccggcaggacctgaactttggccaggtggtggctgatgtgctgtgtgagttcctggaggtggccgtgcacctgatcctgtatgtgcgggaggtgtaccctgtgggcatcttccagaagaggaagaagtacaacgtgcctgtgcagatgagctgccaccctgagctgaaccagtacatccaggacaccctgcactgtgtgaagcccctgctggagaaggtgcgggtgcactgggccccccagcccagccaccccatgctgacccctgtgcctgtgtgcagccagagcaacagcggcatgggctag

SEQ ID NO: 20336 - DNA, 531 bp, synthetic construct
  misc_feature 1..531: note = Description of Artificial Sequence: Synthetic coding sequence
  source 1..531: mol_type = other DNA
atgaccaccctgacccggcaggacctgaactttggccaggtggtggctgatgtgctgtgtgagttcctggaggtggccgtgcacctgatcctgtatgtgcgggaggtgtaccctgtgggcatcttccagaagaggaagaagtacaacgtgcctgtgcagaatgatgtggagaaggtggtggtggtgatcctggacaaggagcacaggcctgtggagaagtttgtgtttgagatcacccagccccccctgctgagcatcagcagtgacagcctgctgagccacgtggagcagctgctgcgggccttcatcctgaagatctctgtgtgtgatgctgtgctggaccacaaccccccaggagtgtccaccccccaccccctcttcccctggcacttccacggctacctgggcctggtgtgtgtgcccaggtccatgtttggctgcagcgagacccacctgttcctgaccctgcgggtgcacctgctgtgggaggccagcctgattgacagcacctggctgcccagcccctactag

SEQ ID NO: 20337 - DNA, 636 bp, synthetic construct; identical to SEQ ID NO: 20334
  misc_feature 1..636: note = Description of Artificial Sequence: Synthetic coding sequence
  source 1..636: mol_type = other DNA

SEQ ID NO: 20338 - DNA, 675 bp, synthetic construct
  misc_feature 1..675: note = Description of Artificial Sequence: Synthetic coding sequence
  source 1..675: mol_type = other DNA
atgaccaccctgacccggcaggacctgaactttggccaggtggtggctgatgtgctgtgtgagttcctggaggtggccgtgcacctgatcctgtatgtgcgggaggtgtaccctgtgggcatcttccagaagaggaagaagtacaacgtgcctgtgcagatgagctgccaccctgagctgaaccagtacatccaggacaccctgcactgtgtgaagcccctgctggagaagaatgatgtggagaaggtggtggtggtgatcctggacaaggagcacaggcctgtggagaagtttgtgtttgagatcacccagccccccctgctgagcatccgctgggccgccccagccccccggcccctggccggcatcagcagtgacagcctgctgagccacgtggagcagctgctgcgggccttcatcctgaagatctctgtgtgtgatgctgtgctggaccacaaccccccaggctgcaccttcaccgtgctggtgcacacccgggaggccgccaccaggaacatggagaagatccaggtgatcaaggacttcccctggatcctggctgatgagcaggatgtgcacatgcatgaccccaggctcatccccctgaagaccatgaccagtgacatcctgaagatgcagctgtatgtggaggagcgggcccacaagggcagctag

SEQ ID NO: 20339 - DNA, 675 bp, synthetic construct; identical to SEQ ID NO: 20338
  misc_feature 1..675: note = Description of Artificial Sequence: Synthetic coding sequence
  source 1..675: mol_type = other DNA

SEQ ID NO: 20340 - DNA, 636 bp, synthetic construct; identical to SEQ ID NO: 20334
  misc_feature 1..636: note = Description of Artificial Sequence: Synthetic coding sequence
  source 1..636: mol_type = other DNA

SEQ ID NO: 20341 - DNA, 597 bp, synthetic construct
  misc_feature 1..597: note = Description of Artificial Sequence: Synthetic coding sequence
  source 1..597: mol_type = other DNA
atgaccaccctgacccggcaggacctgaactttggccagggccgggaggccggccctgctggccctggggccggggccagcggccctgctggcttcctggagcgggccaccggcctgtgccccccagctgtggtggctgatgtgctgtgtgagttcctggaggtggccgtgcacctgatcctgtatgtgcgggaggtgtaccctgtgggcatcttccagaagaggaagaagtacaacgtgcctgtgcagatgagctgccaccctgagctgaaccagtacatccaggacaccctgcactgtgtgaagcccctgctggagaagaatgatgtggagaaggtggtggtggtgatcctggacaaggagcacaggcctgtggagaagtttgtgtttgagatcacccagccccccctgctgagcatcagcagtgacagcctgctgagccacgtggagcagctgctgcgggccttcatcctgaagatctctgtgtgtgatgctgtgctggaccacaaccccccaggctgcaccttcaccgtgctggtgcacacccgggaggccgccaccaggaacatggagaagatccaggtgatcaaggtgtag

SEQ ID NO: 20342 - DNA, 504 bp, synthetic construct
  misc_feature 1..504: note = Description of Artificial Sequence: Synthetic coding sequence
  source 1..504: mol_type = other DNA
atgaccaccctgacccggcaggacctgaactttggccaggtggtggctgatgtgctgtgtgagttcctggaggtggccgtgcacctgatcctgtatgtgcgggaggtgtaccctgtgggcatcttccagaagaggaagaagtacaacgtgcctgtgcagatgagctgccaccctgagctgaaccagtacatccaggacaccctgcactgtgtgaagcccctgctggagaagaatgatgtggagaaggtggtggtggtgatcctggacaaggagcacaggcctgtggagaagtttgtgtttgagatcacccagccccccctgctgagcatcagcagtgacagcctgctgagccacgtggagcagctgctgcgggccttcatcctgaagatctctgtgtgtgatgctgtgctggaccacaaccccccaggctgcaccttcaccgtgctggtgcacacccgggaggccgccaccaggaacatggagaagatccaggtgatcaagtag

SEQ ID NO: 20343 - DNA, 3159 bp, synthetic construct
  misc_feature 1..3159: note = Description of Artificial Sequence: Synthetic coding sequence
  source 1..3159: mol_type = other DNA
atggccggcatggacagcggcaacctgaagacagcccggctgtggagagatgctgccctgcgggccaggaagctgcggagcaacctgcggcagctgaccctgacagctgctggggcctgccctggagctggagcagatgccctggagagccctgccagcccccagctggtgctgcctgccaacctgggggacatcgaggccctgaacctgggcaacaacggcctggaggaggtgcctgagggcctgggcagcgccctgggcagcctgcgggtgctggtgctgcggaggaacagatttgcccggctgcccccagctgtggccgagctgggccaccacctgacagagctggatgtgagccacaaccggctgacagccctgggcgctgaggtggtgtctgccctgcgggagctgaggaagctgaacctgagccacaaccagctgcctgccctgcctgcccagctgggcgccctggcccacctggaggagctggatgtgtccttcaaccggctggcccacctgcctgacagcctgagctgcctgagccggctgcggaccctggatgtggaccacaaccagctgacagccttcccccggcagctgctgcagctggtggccctggaggagctggatgtgagcagcaaccggctgcggggcctgcctgaggacatcagcgccctgcgggccctgaagatcctgtggctgtctggagctgagctgggcaccctgcctgctggcttctgtgagctggccagcctggagagcctgatgctggacaacaacggcctgcaggccctgcctgcccagttcagctgcctgcagaggctgaagatgctgaacctgagcagcaacctgtttgaggagttccctgctgccctgctgcccctggccggcctggaggagctgtacctgagcaggaaccagctgacctctgtgcccagcctcatcagcggcctgggccgcctgctgaccctgtggctggacaacaaccgcatccgctacctgcctgacagcatcgtggagctgaccggcctggaggagctggtgctgcagggcaaccagattgctgtgctgcctgaccacttcggccagctgagccgggtgggcctgtggaagatcaaggacaaccccctcatccagcccccctatgaggtgtgcatgaagggcatcccctacatcgccgcctaccagaaggagctggcccacagccagcctgctgtgcagccccggctgaagctgctgctgatgggccacaaggccgccggcaagaccctgctgcggcactgcctgacagaggagcgggtggagggctgccctgggggcggggacaaggagaagtgctacccacccagccccccacctgtgtccaagggcatcgaggtgacctcctggacagcagatgccagccggggcctgcgcttcatcgtgtatgacctggccggagatgagagctatgaggtgatccagcccttcttcctgagccctggggccctgtatgtgctggtggtgaacctggccacctatgagcccaggcacttccccaccaccgtgggcagcttcctgcaccgggtgggcgcccgggtgccccatgctgtggtgtgcatcgtgggcacccatgctgacctgtgtggggagcgggagctggaggagaagtgcctggacatccaccggcagatcgccctgcaggagaagcatgatgctgagggcctgagccggctggccaaggtggtggatgaggccctggcccgggactttgagctgcggagcgccagcccccatgctgcctactacggcgtgtctgacaagaacctgcggcggaggaaggcccacttccagtacctgctgaaccaccggctgcagatcctgagccctgtgctgcctgtgtcctgccgggaccccaggcacctgcggcggctgcgggacaagctgctgtctgtggccgagcaccgggagatcttccccaacctgcaccgggtgctgcccaggtcctggcaggtgctggaggagctgcacttccagcccccccaggcccagaggctgtggctgtcctggtgggacagcgcccggctgggcctgcaggccggcctgacagaagatcggctgcagagcgccctgagctacctgcacgagagcggcaagctgctgtactttgaggacagccctgccctgaaggagcacgtgttccacaacctgacccggctgattgacatcctgaatgtgttcttccagagggaccccagcctgctgctgcacaagctgctgctgggcaccagcggggagggcaaggccgagggggagagcagcccccccatggcccggagcacccccagccaggagctgctgcgggccacccagctgcaccagtatgtggagggcttcctgctgcacggcctgctgcctgcccacgtgatccggctgctgctgaagccccacgtgcaggcccagcaggacctgcagctgctgctggagctgctggagaagatgggcctgtgctactgcctgaacaagcccaagggcaagcccctgaatggcagcacagcctggtacaagttcccctgctacgtgcagaatgaggtgccccatgctgaggcctggatcaatggcaccaacctggccggccagagctttgtggccgagcagctgcagatcgagtacagcttccccttcaccttccccctgggcctgtttgcccgctacagcgtgcagatcaacagccacgtggtgcacagaagtgatggcaagttccagatctttgcctaccggggcaaggtgcctgtggtggtgtcctacagacctgcccggggcgtgctgcagcctgacaccctgagcatcgccagccacgccagcctgcccaacatctggacagcctggcaggccatcacccccctggtggaggagctgaatgtgctgctgcaggagtggccaggcctgcactacacagtgcacatcctgtgcagcaagtgcctgaagaggggcagccccaacccccacgccttccctggagagctgctgagccagcccaggcctgagggcgtggccgagatcatctgccccaagaatggaagtgagcgggtgaatgtggccctggtgtacccacccacccccaccgtcatcagcccctgcagcaagaagaatgtgggggagaagcacaggaaccagtag

SEQ ID NO: 20344 - DNA, 549 bp, synthetic construct
  misc_feature 1..549: note = Description of Artificial Sequence: Synthetic coding sequence
  source 1..549: mol_type = other DNA
atgggcaagggccgctttgatgagaaggaaaatgtgagcaactgcatccagctgaagaccagcgtcatcaagggcatcaagaaccagctgattgagcagtttcctggcatcgagccctggctgaaccagatcatgcccaagaaggaccctgtgaagatcgtgcgctgccacgagcacatcgagatcctgactgtgaatggagagctgctcttcttccggcagcgggagggccccttctaccccaccctgcggctgctgcacaagtaccccttcatcctgccccaccagcaggtggacaagggggccatcaagtttgtgctgagcggggccaacatcatgtgccccggcctgaccagccctggggccaagctgtacccagctgctgtggacaccatcgtggccatcatggccgagggcaagcagcacgccctgtgtgtgggcgtgatgaagatgtctgctgaggacatcgagaaggtgaacaagggcattggaattgagaacatccactacctgaatgatggcctgtggcacatgaagacctacaagtag

SEQ ID NO: 20345 - DNA, 546 bp, synthetic construct
  misc_feature 1..546: note = Description of Artificial Sequence: Synthetic coding sequence
  source 1..546: mol_type = other DNA
atgttcaagaagtttgatgagaaggaaaatgtgagcaactgcatccagctgaagaccagcgtcatcaagggcatcaagaaccagctgattgagcagtttcctggcatcgagccctggctgaaccagatcatgcccaagaaggaccctgtgaagatcgtgcgctgccacgagcacatcgagatcctgactgtgaatggagagctgctcttcttccggcagcgggagggccccttctaccccaccctgcggctgctgcacaagtaccccttcatcctgccccaccagcaggtggacaagggggccatcaagtttgtgctgagcggggccaacatcatgtgccccggcctgaccagccctggggccaagctgtacccagctgctgtggacaccatcgtggccatcatggccgagggcaagcagcacgccctgtgtgtgggcgtgatgaagatgtctgcagaagatattgagaaggtgaacaagggcatcggcatcgagaacatccactacctgaatgatggcctgtggcacatgaagacctacaagtag

SEQ ID NO: 20346 - DNA, 2226 bp, synthetic construct
  misc_feature 1..2226: note = Description of Artificial Sequence: Synthetic coding sequence
  source 1..2226: mol_type = other DNA
atggccctcttcaccccctggaagctgagcagccagaagctgggcttcttcctggtgaccttcggcttcatctggggcatgatgctgctgcacttcaccatccagcagaggacccagcctgagagcagctccatgctgcgggagcagatcctggacctgagcaagcgctacatcaaggccctggccgaggagaacagaaatgtggtggatggcccctatgctggggtgatgacagcctatgacctgaagaagaccctggccgtgctgctggacaacatcctgcagagaattggcaagctggagagcaaggtggacaacctggtggtgaatggcaccggcaccaacagcaccaacagcaccacagctgtgcccagcctggtggccctggagaagatcaacgtggccgacatcatcaatggagcccaggagaagtgtgtgctgccccccatggatggctacccccactgtgagggcaagatcaagtggatgaaggacatgtggaggagtgacccctgctacgccgactatggagtggatggcagcacctgcagcttcttcatctacctgtctgaggtggagaactggtgcccccacctgccctggagggccaagaacccctatgaggaggccgaccacaacagcctggccgagatcagaacagacttcaacatcctgtacagcatgatgaagaagcatgaggagttccgctggatgaggctgcgcatccggaggatggctgatgcctggatccaggccatcaagagcctggccgagaagcagaacctggagaagaggaagaggaagaaggtgctggtgcacctgggcctgctgaccaaggagagcggcttcaagattgctgagacagccttcagcggcggccccctgggggagctggtgcagtggagcgacctgatcaccagcctgtacctgctgggccatgacatccgcatcagcgccagcctggccgagctgaaggagatcatgaagaaggtggtgggcaacagaagtggctgccccaccgtgggggacagaattgtggagctgatctacattgatattgtgggcctggcccagttcaagaagaccctgggccccagctgggtgcactaccagtgcatgctgcgggtgctggacagctttggaacagagcctgagttcaaccacgccaactatgcccagagcaagggccacaagaccccctggggcaagtggaacctgaacccccagcagttctacaccatgttcccccacaccccagacaacagcttcctgggctttgtggtggagcagcacctgaacagcagtgacatccaccacatcaatgagatcaagaggcagaaccagagcctggtgtatggcaaggtggacagcttctggaagaacaagaagatctacctggacatcatccacacctacatggaggtgcacgccaccgtgtatggcagcagcaccaagaacatccccagctatgtgaagaaccacggcatcctgagcggccgggacctgcagttcctgctgcgggagaccaagctgtttgtgggcctgggcttcccctatgagggccctgcccccctggaggccatcgccaacggctgtgccttcctgaaccccaagttcaacccccccaagagcagcaagaacacagacttcttcatcggcaagcccaccctgcgggagctgaccagccagcacccctatgcagaggtgttcatcggccggccccacgtgtggacagtggacctgaacaaccaggaggaggtggaggatgctgtgaaggccatcctgaaccagaagattgagccctacatgccctatgagttcacctgtgagggcatgctgcagaggatcaatgccttcatcgagaagcaggacttctgccacggccaggtgatgtggccacccctgagcgccctgcaggtgaagctggccgagcccggccagagctgcaagcaggtgtgccaggagagccagctgatctgtgagcccagcttcttccagcacctgaacaaggacaaggacatgctgaagtacaaggtgacctgccagagcagcgagctggccaaggacatcctggtgcccagctttgaccccaagaacaagcactgtgtgttccagggcgacctgctgctcttcagctgtgccggggcccaccccaggcaccagagggtgtgcccctgccgggacttcatcaagggccaggtggccctgtgcaaggactgcctgtag

SEQ ID NO: 20347 - DNA, 2226 bp, synthetic construct; identical to SEQ ID NO: 20346
  misc_feature 1..2226: note = Description of Artificial Sequence: Synthetic coding sequence
  source 1..2226: mol_type = other DNA

SEQ ID NO: 20348 - DNA, 1410 bp, synthetic construct
  misc_feature 1..1410: note = Description of Artificial Sequence: Synthetic coding sequence
  source 1..1410: mol_type = other DNA
atgcacagcttcccccccctgctgctgctgctcttctggggcgtggtgagccacagcttccctgccaccctggagacccaggagcaggatgtggacctggtgcagaagtacctggagaagtactacaacctgaagaatgatggccggcaggtggagaagagaagaaattctggccctgtggtggagaagctgaagcagatgcaggagttcttcggcctgaaggtgacaggcaagccagatgctgagaccctgaaggtgatgaagcagccccgctgtggggtgcctgatgtggcccagtttgtgctgacagagggcaacccccgctgggagcagacccacctgacctacagaattgagaactacaccccagacctgcccagggcagatgtggaccacgccatcgagaaggccttccagctgtggagcaatgtgacccccctgaccttcaccaaggtgtctgagggccaggccgacatcatgatcagctttgtgcggggggaccaccgggacaacagcccctttgatggccctgggggcaacctggcccacgccttccagcccggccctggcattggaggagatgcccactttgatgaagatgagcgctggaccaacaacttccgggagtacaacctgcaccgggtggccgcccacgagctgggccacagcctgggcctgagccacagcacagacatcggggccctgatgtaccccagctacaccttctctggagatgtgcagctggcccaggatgacattgatggcatccaggccatctacggccgcagccagaaccctgtgcagcccatcggcccccagacccccaaggcctgtgacagcaagctgacctttgatgccatcaccaccatccggggggaggtgatgttcttcaaggaccgcttctacatgaggaccaaccccttctacccagaggtggagctgaacttcatcagcgtcttctggccccagctgcccaacggcctggaggccgcctatgaatttgctgacagagatgaggtgcgcttcttcaagggcaacaagtactgggccgtgcagggccagaatgtgctgcacggctaccccaaggacatctacagcagctttggcttccccaggacagtgaagcacattgatgctgccctgtctgaggagaacacaggcaagacctacttctttgtggccaacaagtactggaggtatgatgagtacaagaggtccatggaccccggctaccccaagatgattgcccatgacttccctggcatcggccacaaggtggatgctgtgttcatgaaggatggcttcttctacttcttccacggcacccggcagtacaagtttgaccccaagaccaagaggatcctgaccctgcagaaggccaacagctggttcaactgcaggaagaactag

SEQ ID NO: 20349 - DNA, 1431 bp, synthetic construct
  misc_feature 1..1431: note = Description of Artificial Sequence: Synthetic coding sequence
  source 1..1431: mol_type = other DNA
atgatgcacctggccttcctggtgctgctgtgcctgcctgtgtgcagcgcctaccccctgtctggagctgccaaggaggaggacagcaacaaggacctggcccagcagtacctggagaagtactacaacctggagaaggatgtgaagcagttccggaggaaggacagcaacctgattgtgaagaagatccagggcatgcagaagttcctgggcctggaggtgacaggcaagctggacacagacaccctggaggtgatgaggaagccccgctgtggggtgcctgatgtgggccacttcagcagcttccctggcatgcccaagtggaggaagacccacctgacctacagaattgtgaactacaccccagacctgcccagagatgctgtggacagcgccatcgagaaggccctgaaggtgtgggaggaggtgacccccctgaccttcagccggctgtatgaaggagaggccgacatcatgatcagctttgctgtgaaggagcacggggacttctacagctttgatggccctggccacagcctggcccacgcctacccacctggccctggcctgtatggagacatccactttgatgatgatgagaagtggacagaagatgccagcggcaccaacctcttcctggtggccgcccacgagctgggccacagcctgggcctcttccacagcgccaacacagaggccctgatgtaccccctgtacaacagcttcacagagctggcccagttccggctgagccaggatgatgtgaatggcatccagagcctgtatggccccccaccagccagcacagaggagcccctggtgcccaccaagtctgtgcccagcggcagcgagatgcctgccaagtgtgaccctgccctgagctttgatgccatcagcaccctgcggggggagtacctgttcttcaaggaccgctacttctggaggaggagccactggaaccctgagcctgagttccacctgatcagcgccttctggcccagcctgcccagctacctggatgctgcctatgaggtgaacagccgggacaccgtcttcatcttcaagggaaatgagttctgggccatcagaggaaatgaggtgcaggccggctacccccggggcatccacaccctgggcttcccccccaccatcaggaagattgatgctgctgtgtctgacaaggagaagaagaagacctacttctttgctgctgacaagtactggaggtttgatgagaacagccagagcatggagcagggcttcccccggctgattgctgatgacttccctggggtggagcccaaggtggatgctgtgctgcaggccttcggcttcttctacttcttcagcggcagcagccagtttgaatttgaccccaatgccaggatggtgacccacatcctgaagagcaacagctggctgcactgctag

SEQ ID NO: 20350 - DNA, 930 bp, synthetic construct
  misc_feature 1..930: note = Description of Artificial Sequence: Synthetic coding sequence
  source 1..930: mol_type = other DNA
atgcccaggcactgcagcgctgctggctgctgcacccgggacacccgggagaccaggaacagaggcatctccttccaccggctgcccaagaaggacaacccccggcggggcctgtggctggccaactgccagaggctggaccccagcggccagggcctgtgggaccctgccagcgagtacatctacttctgcagcaagcactttgaggaggactgctttgagctggtgggcatcagcggctaccaccggctgaaggagggcgctgtgcccaccatctttgagagcttcagcaagctgcggaggaccaccaagaccaagggccacagctacccacctggccctgctgaggtgtcccggctgcggcgctgcaggaagcgctgcagcgagggccggggccccaccacccccttcagccccccacctccagcagatgtgacctgcttccctgtggaggaggccagcgccccagccaccctgcctgccagccctgctggccgcctggagcccggcctgagcagccccttcagtgacctgctgggccccctgggcgcccaggctgatgaagctggctgcagcgcccagcccagccctgagcggcagcccagccccctggagcccaggcctgtgagccccagcgcctacatgctgcggctgcccccacctgctggggcctacatccagaatgagcacagctaccaggtgggcagcgccctgctgtggaagagaagagctgaggccgccctggatgccctggacaaggcccagaggcagctgcaggcctgcaagagaagagagcagaggctgcggctgcggctgaccaagctgcagcaggagcgggcccgggagaagagggcccaggctgatgcccggcagaccctgaaggagcacgtgcaggactttgccatgcagctgagcagctccatggcctag

SEQ ID NO: 20351 - DNA, 1416 bp, synthetic construct
  misc_feature 1..1416: note = Description of Artificial Sequence: Synthetic coding sequence
  source 1..1416: mol_type = other DNA
atgcaccctggggtgctggccgccttcctgttcctgtcctggacccactgccgggccctgcccctgcccagcggaggagatgaagatgacctgtctgaggaggacctgcagtttgctgagcgctacctgcggagctactaccaccccaccaacctggccggcatcctgaaggaaaatgctgccagctccatgacagagcggctgcgggagatgcagagcttcttcggcctggaggtgacaggcaagctggatgacaacaccctggatgtgatgaagaagccccgctgtggggtgcctgatgtgggggagtacaacgtgttccccaggaccctgaagtggagcaagatgaacctgacctaccgcatcgtgaactacaccccagacatgacccacagcgaggtggagaaggccttcaagaaggccttcaaggtgtggagcgatgtgacccccctgaacttcacccggctgcatgatggcattgctgacatcatgatcagctttggcatcaaggagcacggggacttctacccctttgatggccccagcggcctgctggcccacgccttccccccaggccccaactatggaggagatgcccactttgatgatgatgagacctggaccagcagcagcaagggctacaacctcttcctggtggccgcccacgagtttggccacagcctgggcctggaccacagcaaggaccccggggccctgatgttccccatctacacctacacaggcaagagccacttcatgctgcctgatgatgatgtgcagggcatccagagcctgtatggccctggagatgaggaccccaaccccaagcaccccaagaccccagacaagtgtgaccccagcctgagcctggatgccatcaccagcctgcggggggagaccatgatcttcaaggaccgcttcttctggaggctgcacccccagcaggtggatgctgagctgttcctgaccaagagcttctggccagagctgcccaacagaattgatgctgcctatgagcaccccagccatgacctgatcttcatcttccggggcaggaagttctgggccctgaatggctatgacatcctggagggctaccccaagaagatcagcgagctgggcctgcccaaggaggtgaagaagatctctgctgctgtgcactttgaagatactgggaagaccctgctcttcagcggcaaccaggtgtggaggtatgatgacaccaaccacatcatggacaaggactaccccaggctcatcgaggaggacttccctggcattggagacaaggtggatgctgtgtatgagaagaatggctacatctacttcttcaacggccccatccagtttgagtacagcatctggagcaacagaattgtgcgggtgatgcctgccaacagcatcctgtggtgctag

SEQ ID NO: 20352 - DNA, 1470 bp, synthetic construct
  misc_feature 1..1470: note = Description of Artificial Sequence: Synthetic coding sequence
  source 1..1470: mol_type = other DNA
atgcaccctggggtgctggccgccttcctgttcctgtcctggacccactgccgggccctgcccctgcccagcggaggagatgaagatgacctgtctgaggaggacctgcagtttgctgagcgctacctgcggagctactaccaccccaccaacctggccggcatcctgaaggaaaatgctgccagctccatgacagagcggctgcgggagatgcagagcttcttcggcctggaggtgacaggcaagctggatgacaacaccctggatgtgatgaagaagccccgctgtggggtgcctgatgtgggggagtacaacgtgttccccaggaccctgaagtggagcaagatgaacctgacctaccgcatcgtgaactacaccccagacatgacccacagcgaggtggagaaggccttcaagaaggccttcaaggtgtggagcgatgtgacccccctgaacttcacccggctgcatgatggcattgctgacatcatgatcagctttggcatcaaggagcacggggacttctacccctttgatggccccagcggcctgctggcccacgccttccccccaggccccaactatggaggagatgcccactttgatgatgatgagacctggaccagcagcagcaagggctacaacctcttcctggtggccgcccacgagtttggccacagcctgggcctggaccacagcaaggaccccggggccctgatgttccccatctacacctacacaggcaagagccacttcatgctgcctgatgatgatgtgcagggcatccagagcctgtatggccctggagatgaggaccccaaccccaagcaccccaagaccccagacaagtgtgaccccagcctgagcctggatgccatcaccagcctgcggggggagaccatgatcttcaaggaccgcttcttctggaggctgcacccccagcaggtggatgctgagctgttcctgaccaagagcttctggccagagctgcccaacagaattgatgctgcctatgagcaccccagccatgacctgatcttcatcttccggggcaggaagttctgggccctgaatggctatgacatcctggagggctaccccaagaagatcagcgagctgggcctgcccaaggaggtgaagaagatctctgctgctgtgcactttgaagatactgggaagaccctgctcttcagcggcaaccaggtgtggaggtatgatgacaccaaccacatcatggacaaggactaccccaggctcatcgaggaggacttccctggcattggagacaaggtggatgctgtgtatgagaagaatgaaagccacagcgtgacccaggccggcgtgcactgcaggaacctgagcagcctgcagcccccacctcctggcttcaagcgcttcagctgcctgagcctgtggagctcctgggactaccgcctgtacctgttcttccagaggacccacacagtgtag

SEQ ID NO: 20353 - DNA, 1152 bp, synthetic construct
  misc_feature 1..1152: note = Description of Artificial Sequence: Synthetic coding sequence
  source 1..1152: mol_type = other DNA
atgcaccctggggtgctggccgccttcctgttcctgtcctggacccactgccgggccctgcccctgcccagcggaggagatgaagatgacctgtctgaggaggacctgcagtttgctgagcgctacctgcggagctactaccaccccaccaacctggccggcatcctgaaggaaaatgctgccagctccatgacagagcggctgcgggagatgcagagcttcttcggcctggaggtgacaggcaagctggatgacaacaccctggatgtgatgaagaagccccgctgtggggtgcctgatgtgggggagtacaacgtgttccccaggaccctgaagtggagcaagatgaacctgacctaccgcatcgtgaactacaccccagacatgacccacagcgaggtggagaaggccttcaagaaggccttcaaggtgtggagcgatgtgacccccctgaacttcacccggctgcatgatggcattgctgacatcatgatcagctttggcatcaaggagcacggggacttctacccctttgatggccccagcggcctgctggcccacgccttccccccaggccccaactatggaggagatgcccactttgatgatgatgagacctggaccagcagcagcaagggctacaacctcttcctggtggccgcccacgagtttggccacagcctgggcctggaccacagcaaggaccccggggccctgatgttccccatctacacctacacaggcaagagccacttcatgctgcctgatgatgatgtgcagggcatccagagcctgtatggccctggagatgaggaccccaaccccaagcaccccaagaccccagacaagtgtgaccccagcctgagcctggatgccatcaccagcctgcggggggagaccatgatcttcaaggaccgcttcttctggaggctgcacccccagcaggtggatgctgagctgttcctgaccaagagcttctggccagagctgcccaacagaattgatgctgcctatgagcaccccagccatgacctgatcttcatcttccggggcaggaagttctgggccctgaatggctatgacatcctggagggctaccccaagaagatcagcgagctgggcctgcccaaggaggtgaacaagctgcagtag

SEQ ID NO: 20354 - DNA, 1749 bp, synthetic construct
  misc_feature 1..1749: note = Description of Artificial Sequence: Synthetic coding sequence
  source 1..1749: mol_type = other DNA
atgagccctgcccccaggcctccccgctgcctgctgctgcccctgctgaccctgggcacagccctggccagcctgggcagcgcccagagcagcagcttcagccctgaggcctggctgcagcagtatggctacctgcccccaggggacctgcggacccacacccagaggagcccccagagcctgtctgctgccatcgccgccatgcagaagttctacggcctgcaggtgacaggcaaggcagatgctgacaccatgaaggccatgagaagaccccgctgtggggtgcctgacaagtttggagctgagatcaaggccaacgtgcggaggaagagatatgccatccagggcctgaagtggcagcacaatgagatcaccttctgcatccagaactacacccccaaggtgggggagtatgccacctatgaggccatcaggaaggccttccgggtgtgggagagcgccacccccctgcgcttccgggaggtgccctatgcctacatccgggagggccacgagaagcaggccgacatcatgatcttctttgctgagggcttccacggggacagcaccccatttgatggagagggcggcttcctggcccacgcctacttccctggccccaacattggaggagacacccactttgattctgctgagccctggacagtgagaaatgaagacctgaatggaaatgacatcttcctggtggccgtgcatgagctgggccacgccctgggcctggagcacagcagtgaccccagcgccatcatggcccccttctaccagtggatggacacagaaaattttgtgctgcctgatgatgaccggcggggcatccagcagctgtatggaggagagagcggcttccccaccaagatgccaccccagcccaggaccaccagccggcccagcgtgcctgacaagcccaagaaccccacctacggccccaacatctgtgatggcaactttgacacagtggccatgctgcggggggagatgtttgtgttcaaggagcgctggttctggagggtgaggaacaaccaggtgatggatggctaccccatgcccatcggccagttctggaggggcctgcctgccagcatcaacacagcctatgaaaggaaggatggcaagtttgtgttcttcaagggggacaagcactgggtgtttgatgaggccagcctggagcccggctaccccaagcacatcaaggagctgggccggggcctgcccacagacaagattgatgctgccctcttctggatgcccaacgggaagacctacttcttccggggcaacaagtactaccgcttcaatgaggagctgcgggctgtggacagcgagtaccccaagaacatcaaggtgtgggagggcatccctgagagcccccggggcagcttcatgggcagtgatgaggtgttcacctacttctacaagggcaacaagtactggaagttcaacaaccagaagctgaaggtggagcccggctaccccaagagcgccctgcgggactggatgggctgccccagcggcggccgcccagatgagggcacagaggaggagacagaggtgatcatcatcgaggtggatgaggagggcggcggcgctgtgtctgctgctgctgtggtgctgcctgtgctgctgctgctgctggtgctggccgtgggcctggccgtgttcttcttcagaagacatggcaccccccggcggctgctgtactgccagaggagcctgctggacaaggtgtag

SEQ ID NO: 20355 - DNA, 2052 bp, synthetic construct
  misc_feature 1..2052: note = Description of Artificial Sequence: Synthetic coding sequence
  source 1..2052: mol_type = other DNA
atggccagcggccctggcagccaggagcgggagggcctgctgattgtgaagctggaggaggactgtgcctggagccaggagctgcccccaccagaccccggccccagccctgaggccagccacctgcgcttccgccgcttccgcttccaggaggccgccggcccccgggaggccctgagccggctgcaggagctgtgccacggctggctgcggcctgagatgaggaccaaggagcagatcctggagctgctggtgctggagcagttcctgaccatcctgccccaggagatccagagccgggtgcaggagctgcaccctgagagcggggaggaggccgtgaccctggtggaggacatgcagcgggagctgggccgcctgcggcagcaggtgaccaaccacggccggggcacagaggtgctgctggaggagcccctgcccctggagacagcccgggagagccccagcttcaagctggagcccatggagacagagaggagccctggcccccggctgcaggagctgctgggccccagcccccagagggacccccaggccgtgaaggagcgggccctgagcgccccctggctgagcctcttccccccagagggcaacatggaggacaaggagatgacaggcccccagctgcctgagagcctggaggatgtggccatgtacatcagccaggaggagtggggccaccaggaccccagcaagagggccctgagccgggacacagtgcaggagagctatgaaaatgtggacagcctggagagccacatccccagccaggaggtgcccggcacccaggtgggccagggcggcaagctgtgggaccccagcgtgcagagctgcaaggagggcctgagcccccggggccctgcccctggagaggagaagtttgagaacctggagggcgtgcccagcgtgtgcagcgagaacatccacccccaggtgctgctgcctgaccaggcccggggggaggtgccctggagccctgagctgggccggccccatgacaggagccagggcgactgggcccctcctcctgagggcggcatggagcaggccctggccggggccagcagcggccgggagctgggccggcccaaggagctgcagcccaagaagctgcacctgtgccccctgtgtgggaagaacttcagcaacaacagcaacctgatccgccaccagagaattcatgctgctgagcggctgtgcatgggcgtggactgcacagagatctttggaggcaacccccgcttcctgagcctgcaccgggcccacctgggggaggaggcccacaagtgcctggagtgtgggaagtgcttcagccagaacacccacctgaccaggcaccagaggacccacactggagagaagccctaccagtgcaacatctgtgggaagtgcttcagctgcaacagcaacctgcaccgccaccagaggacccacactggagagaagccctacaagtgcccagaatgtggggagatctttgcccacagcagcaacctgctgcggcaccagaggatccacactggagagcggccctacaagtgcccagaatgtgggaagagcttcagccgcagcagccacctggtgatccacgagaggacccatgagcgggagcggctgtaccccttctctgaatgtggggaggccgtgtctgacagcacccccttcctgaccaaccacggggcccacaaggccgagaagaagctgtttgagtgcctgacctgtgggaagagcttccggcagggcatgcacctgaccaggcaccagaggacccacactggagagaagccctacaagtgcaccctgtgtggggagaacttcagccacaggagcaacctgatccgccaccagaggatccacactggagagaagccctacacctgccatgaatgtggggacagcttcagccacagcagcaaccgcatccgccacctgcggacccacactggagagcggccctacaagtgcagtgaatgtggggagagcttcagccgcagcagccggctgatgagccaccagaggacccacactggatag

SEQ ID NO: 20356 - DNA, 1755 bp, synthetic construct
  misc_feature 1..1755: note = Description of Artificial Sequence: Synthetic coding sequence
  source 1..1755: mol_type = other DNA
atgcagaagttcttcggcctgccccagacaggagacctggaccagaacaccatcgagaccatgaggaagccccgctgtggcaacccagatgtggccaactacaacttcttccccaggaagcccaagtgggacaagaaccagatcacctaccgcatcatcggctacaccccagacctggaccctgagaccgtggatgatgcctttgcccgggccttccaggtgtggagcgatgtgacccccctgcgcttcagccgcatccatgatggagaggccgacatcatgatcaactttggccgctgggagcacggagatggctacccctttgatggcaaggatggcctgctggcccacgcctttgcccctggcactggagtgggcggggacagccactttgatgatgatgagctgtggaccctgggggagggccaggtggtgcgggtgaagtatggaaatgctgatggagagtactgcaagttccccttcctgttcaacgggaaggagtacaacagctgcacagacaccggccgcagtgatggcttcctgtggtgcagcaccacctacaactttgagaaggatggcaagtatggcttctgcccccatgaggccctcttcaccatgggcggcaatgctgagggccagccctgcaagttccccttccgcttccagggcaccagctatgacagctgcaccacagagggccgcacagatggctaccgctggtgtggcaccacagaagattatgaccgggacaagaagtatggcttctgcccagagacagccatgagcacagtgggcggcaacagcgagggcgccccctgtgtgttccccttcaccttcctgggcaacaagtatgagagctgcaccagcgctggccgcagtgatggcaagatgtggtgtgccaccacagccaactatgatgatgacaggaagtggggcttctgcccagaccagggctacagcctcttcctggtggccgcccatgaatttggacatgccatgggcctggagcacagccaggaccccggggccctgatggcccccatctacacctacaccaagaacttccggctgagccaggatgacatcaagggcatccaggagctgtatggagccagcccagacatcgacctgggcaccggccccacccccaccctgggccctgtgaccccagagatctgcaagcaggacatcgtgtttgatggcatcgcccagatccggggggagatcttcttcttcaaggaccgcttcatctggaggacagtgaccccccgggacaagcccatgggccccctgctggtggccaccttctggccagagctgcctgagaagattgatgctgtgtatgaggccccccaggaggagaaggctgtgttctttgctggaaatgagtactggatctacagcgccagcaccctggagcggggctaccccaagcccctgaccagcctgggcctgcccccagatgtgcagagggtggatgctgccttcaactggagcaagaacaagaagacctacatctttgctggggacaagttctggagatacaatgaggtgaagaagaagatggaccccggcttccccaagctgattgctgatgcctggaatgccatcccagacaacctggatgctgtggtggacctgcagggcggcggccacagctacttcttcaagggggcctactacctgaagctggagaaccagagcctgaagtctgtgaagtttggcagcatcaagagtgactggctgggctgctag

SEQ ID NO: 20357 - DNA, 1434 bp, synthetic construct
  misc_feature 1..1434: note = Description of Artificial Sequence: Synthetic coding sequence
  source 1..1434: mol_type = other DNA
atgaagagcctgcccatcctgctgctgctgtgtgtggccgtgtgcagcgcctaccccctggatggagctgcccggggggaggacacctccatgaacctggtgcagaagtacctggagaactactatgacctgaagaaggatgtgaagcagtttgtgcggaggaaggacagcggccctgtggtgaagaagatccgggagatgcagaagttcctgggcctggaggtgacaggcaagctggacagcgacaccctggaggtgatgaggaagccccgctgtggggtgcctgatgtgggccacttccgcaccttccctggcatccccaagtggaggaagacccacctgacctaccgcatcgtgaactacaccccagacctgcccaaggatgctgtggacagcgctgtggagaaggccctgaaggtgtgggaggaggtgacccccctgaccttcagccggctgtatgaaggagaggccgacatcatgatcagctttgctgtgcgggagcacggggacttctacccctttgatggccctggaaatgtgctggcccacgcctatgcccctggccctggcatcaatggagatgcccactttgatgatgatgagcagtggaccaaggacaccaccggcaccaacctcttcctggtggccgcccacgagatcggccacagcctgggcctcttccacagcgccaacacagaggccctgatgtaccccctgtaccacagcctgacagacctgacccgcttccggctgagccaggatgacatcaatggcatccagagcctgtatggccccccaccagacagccctgagacccccctggtgcccacagagcctgtgcccccagagcccggcaccccagccaactgtgaccctgccctgagctttgatgctgtgtccaccctgcggggggagatcctgatcttcaaggacagacacttctggaggaagagcctgaggaagctggagcctgagctgcacctgatcagcagcttctggcccagcctgcccagcggcgtggatgctgcctatgaggtgaccagcaaggacctggtgttcatcttcaagggcaaccagttctgggccatcagaggaaatgaggtgcgggccggctacccccggggcatccacaccctgggcttcccccccaccgtgaggaagattgatgctgccatcagtgacaaggagaagaacaagacctacttctttgtggaggacaagtactggaggtttgatgagaagagaaattccatggagcccggcttccccaagcagattgctgaggacttccctggcatcgacagcaagattgatgctgtgtttgaggagtttggcttcttctacttcttcaccggcagcagccagctggagtttgaccccaatgccaagaaggtgacccacaccctgaagagcaacagctggctgaactgctag

SEQ ID NO: 20358 - DNA, 804 bp, synthetic construct
  misc_feature 1..804: note = Description of Artificial Sequence: Synthetic coding sequence
  source 1..804: mol_type = other DNA
atgaggctgactgtgctgtgtgctgtgtgcctgctgcccggcagcctggccctgcccctgccccaggaggccggcggcatgtctgagctgcagtgggagcaggcccaggactacctgaagcgcttctacctgtatgattctgagaccaagaatgccaacagcctggaggccaagctgaaggagatgcagaagttcttcggcctgcccatcaccggcatgctgaacagccgggtgattgagatcatgcagaagccccgctgtggggtgcctgatgtggccgagtacagcctcttccccaacagccccaagtggaccagcaaggtggtgacctacagaattgtgtcctacacccgggacctgccccacatcaccgtggaccggctggtgtccaaggccctgaacatgtggggcaaggagatccccctgcacttcaggaaggtggtgtggggcacagctgacatcatgattggatttgcccggggggcccatggagacagctacccctttgatggccctggcaacaccctggcccacgcctttgcccctggcaccggcctgggcggagatgcccactttgatgaagatgagcgctggacagatggcagcagcctgggcatcaacttcctgtatgctgccacccatgagctgggccacagcctgggcatgggccacagcagtgaccccaatgctgtgatgtaccccacctatggaaatggagacccccagaacttcaagctgagccaggatgacatcaagggcatccagaagctgtatggcaagaggagcaacagcaggaagaagtag

SEQ ID NO: 20359 - DNA, 2124 bp, synthetic construct
  misc_feature 1..2124: note = Description of Artificial Sequence: Synthetic coding sequence
  source 1..2124: mol_type = other DNA
atgagcctgtggcagcccctggtgctggtgctgctggtgctgggctgctgctttgctgccccccggcagaggcagagcaccctggtgctcttccctggggacctgcggaccaacctgacagaccggcagctggccgaggagtacctgtaccgctatggctacaccagggtggccgagatgagaggagagagcaagagcctgggccctgccctgctgctgctgcagaagcagctgagcctgcctgagactggagagctggacagcgccaccctgaaggccatgaggaccccccgctgtggggtgcctgacctgggccgcttccagacctttgaaggagacctgaagtggcaccaccacaacatcacctactggatccagaactacagcgaggacctgcccagggctgtgattgatgatgcctttgcccgggcctttgccctgtggagcgctgtgacccccctgaccttcaccagggtgtacagcagagatgctgacatcgtcatccagtttggagtggccgagcacggagatggctacccctttgatggcaaggatggcctgctggcccacgccttccccccaggccctggcatccagggagatgcccactttgatgatgatgagctgtggagcctgggcaagggcgtggtggtgcccaccaggtttggaaatgctgatggagctgcctgccacttccccttcatctttgagggccgcagctacagcgcctgcaccacagatggccgcagtgatggcctgccctggtgcagcaccacagccaactatgacacagatgaccgcttcggcttctgccccagcgagcggctgtacacccaggatggaaatgctgatggcaagccctgccagttccccttcatcttccagggccagagctacagcgcctgcaccacagatggccgcagtgatggctaccgctggtgtgccaccacagccaactatgaccgggacaagctgtttggcttctgccccaccagggctgacagcacagtgatgggcggcaacagcgctggggagctgtgtgtgttccccttcaccttcctgggcaaggagtacagcacctgcaccagcgagggcagaggagatggccgcctgtggtgtgccaccaccagcaactttgacagcgacaagaagtggggcttctgcccagaccagggctacagcctcttcctggtggccgcccatgaatttggacatgccctgggcctggaccacagctctgtgcctgaggccctgatgtaccccatgtaccgcttcacagagggcccccccctgcacaaggatgatgtgaatggcatccgccacctgtatggccccaggcctgagcctgagcccaggcctcccaccaccaccaccccccagcccacagccccacccaccgtgtgccccaccggcccccccaccgtgcaccccagcgagcggcccacagctggccccaccggcccccccagcgctggccccaccggccccccaacagctggccccagcacagccaccaccgtgcccctgagccctgtggatgatgcctgcaatgtgaacatctttgatgccatcgccgagatcggcaaccagctgtacctgttcaaggatggcaagtactggaggttcagcgagggccggggcagccggccccagggccccttcctgattgctgacaagtggccagccctgcccaggaagctggacagcgtgtttgaggagcggctgagcaagaagctgttcttcttcagcggccggcaggtgtgggtgtacacaggagcctctgtgctgggcccccggcggctggacaagctgggcctgggcgcagatgtggcccaggtgactggagccctgcggagcggccggggcaagatgctgctcttcagcggccggcggctgtggaggtttgatgtgaaggcccagatggtggaccccaggtctgccagcgaggtggacaggatgtttcctggggtgcccctggacacccatgatgtgttccagtaccgggagaaggcctacttctgccaggaccgcttctactggagggtgagcagccgctctgagctgaaccaggtggaccaggtgggctacgtgacctatgacatcctgcagtgcccagaggactag

SEQ ID NO: 20360 - DNA, 834 bp, synthetic construct
  misc_feature 1..834: note = Description of Artificial Sequence: Synthetic coding sequence
  source 1..834: mol_type = other DNA
atgggcggcaacagcgctggggagctgtgtgtgttccccttcaccttcctgggcaaggagtacagcaactttgacagcgacaagaagtggggcttctgcccagaccagggctacagcctcttcctggtggccgcccacgagtttggccacgccctgggcctggaccacagctctgtgcctgaggccctgatgtaccccatgtaccgcttcacagagggcccccccctgcacaaggatgatgtgaatggcatccgccacctgtatggccccaggcctgagcctgagccccggccccccaccaccaccaccccccagcccacagcccccccaacagtgtgccccactggaccacccaccgtgcacccccccttcctgattgctgacaagtggccagccctgcccaggaagctggacagcgtgtttgaggagcggctgagcaagaagctgttcttcttcagcggccggcaggtgtgggtgtacacaggagcctctgtgctgggcccccggcggctggacaagctgggcctgggcgcagatgtggcccaggtgactggagccctgcggagcggccggggcaagatgctgctcttcagcggccggcggctgtggaggtttgatgtgaaggcccagatggtggaccccaggtctgccagcgaggtggacaggatgtttcctggggtgcccctggacacccatgatgtgttccagtaccgggagaaggcctacttctgccaggaccgcttctactggagggtgagcagccgctctgagctgaaccaggtggaccaggtgggctacgtgacctatgacatcctgcagtgcccagaggactag

SEQ ID NO: 20361 - DNA, 324 bp, synthetic construct
  misc_feature 1..324: note = Description of Artificial Sequence: Synthetic coding sequence
  source 1..324: mol_type = other DNA
atggccggggaggatgtgggcgcccccccagaccacctgtgggtgcaccaggagggcatctacagagatgagtaccagaggacctgggtggccgtggtggaggaggagaccagcttcctgcgggcccgggtgcagcagatccaggtgcccctgggagatgctgcccggcccagccacctgctgaccagccagctgcccctgatgtggcagctgtacccagaggagcgctacatggacaacaacagccggctgtggcagatccagcaccacctgatggtgcggggcgtgcaggagctgctgctgaagctgctgcctgatgactag

SEQ ID NO: 20362 - DNA, 324 bp, synthetic construct; identical to SEQ ID NO: 20361
  misc_feature 1..324: note = Description of Artificial Sequence: Synthetic coding sequence
  source 1..324: mol_type = other DNA

SEQ ID NO: 20363 - DNA, 1329 bp, synthetic construct
  misc_feature 1..1329: note = Description of Artificial Sequence: Synthetic coding sequence
  source 1..1329: mol_type = other DNA
atggtgcgcagccggcagatgtgcaacaccaacatgtctgtgcccacagatggagctgtgaccaccagccagatcccagccagcgagcaggagaccctggtgcggcccaagcccctgctgctgaagctgctgaagtctgtgggcgcccagaaggacacctacaccatgaaggaggtgctcttctacctgggccagtacatcatgaccaagaggctgtatgatgagaagcagcagcacatcgtgtactgcagcaatgacctgctgggggacctgtttggagtgcccagcttctctgtgaaggagcacaggaagatctacaccatgatctacagaaacctggtggtggtgaaccagcaggaggagaacagtgatgagctgtctggagagcggcagaggaagaggcacaagagtgacagcatcagcctgagctttgatgagagcctggccctgtgtgtgatccgggagatctgctgtgagaggagcagcagcagcgagagcacaggcacccccagcaacccagacctggatgctggggtgtctgagcacagcggggactggctggaccaggacagcgtgtctgaccagttctctgtggagtttgaggtggagagcctggacagcgaggactacagcctgtctgaggagggccaggagctgagtgatgaagatgatgaggtgtaccaggtgacagtgtaccaggccggggagagtgacacagacagctttgaggaggaccctgagatcagcctggccgactactggaagtgcaccagctgcaatgagatgaacccccccctgcccagccactgcaaccgctgctgggccctgcgggagaactggctgcctgaagataaaggcaaggacaagggggagatcagcgagaaggccaagctggagaacagcacccaggccgaggagggctttgatgtgcctgactgcaagaagaccatcgtgaatgacagccgggagagctgtgtggaggagaatgatgacaagatcacccaggccagccagagccaggagagcgaggactacagccagcccagcaccagcagcagcatcatctacagcagccaggaggatgtgaaggagtttgagcgggaggagacccaggacaaggaggagagcgtggagagcagcctgcccctgaatgccatcgagccctgtgtgatctgccagggccggcccaagaatggctgcatcgtgcacggcaagacaggccacctgatggcctgcttcacctgtgccaagaagctgaagaagaggaacaagccctgccctgtgtgccggcagcccatccagatgattgtgctgacctacttcccctag

SEQ ID NO: 20364 - DNA, 1311 bp, synthetic construct
  misc_feature 1..1311: note = Description of Artificial Sequence: Synthetic coding sequence
  source 1..1311: mol_type = other DNA
atgtgcaacaccaacatgtctgtgcccacagatggagctgtgaccaccagccagatcccagccagcgagcaggagaccctggtgcggcccaagcccctgctgctgaagctgctgaagtctgtgggcgcccagaaggacacctacaccatgaaggaggtgctcttctacctgggccagtacatcatgaccaagaggctgtatgatgagaagcagcagcacatcgtgtactgcagcaatgacctgctgggggacctgtttggagtgcccagcttctctgtgaaggagcacaggaagatctacaccatgatctacagaaacctggtggtggtgaaccagcaggaggagaacagtgatgagctgtctggagagcggcagaggaagaggcacaagagtgacagcatcagcctgagctttgatgagagcctggccctgtgtgtgatccgggagatctgctgtgagaggagcagcagcagcgagagcacaggcacccccagcaacccagacctggatgctggggtgtctgagcacagcggggactggctggaccaggacagcgtgtctgaccagttctctgtggagtttgaggtggagagcctggacagcgaggactacagcctgtctgaggagggccaggagctgagtgatgaagatgatgaggtgtaccaggtgacagtgtaccaggccggggagagtgacacagacagctttgaggaggaccctgagatcagcctggccgactactggaagtgcaccagctgcaatgagatgaacccccccctgcccagccactgcaaccgctgctgggccctgcgggagaactggctgcctgaagataaaggcaaggacaagggggagatcagcgagaaggccaagctggagaacagcacccaggccgaggagggctttgatgtgcctgactgcaagaagaccatcgtgaatgacagccgggagagctgtgtggaggagaatgatgacaagatcacccaggccagccagagccaggagagcgaggactacagccagcccagcaccagcagcagcatcatctacagcagccaggaggatgtgaaggagtttgagcgggaggagacccaggacaaggaggagagcgtggagagcagcctgcccctgaatgccatcgagccctgtgtgatctgccagggccggcccaagaatggctgcatcgtgcacggcaagacaggccacctgatggcctgcttcacctgtgccaagaagctgaagaagaggaacaagccctgccctgtgtgccggcagcccatccagatgattgtgctgacctacttcccctag

SEQ ID NO: 20365 - DNA, 966 bp, synthetic construct
  misc_feature 1..966: note = Description of Artificial Sequence: Synthetic coding sequence
  source 1..966: mol_type = other DNA
atgtgcaacaccaacatgtctgtgcccacagatggagctgtgaccaccagccagatcccagccagcgagcaggagaccctggtgcggcccaagcccctgctgctgaagctgctgaagtctgtgggcgcccagaaggacacctacaccatgaaggaggacctggatgctggggtgtctgagcacagcggggactggctggaccaggacagcgtgtctgaccagttctctgtggagtttgaggtggagagcctggacagcgaggactacagcctgtctgaggagggccaggagctgagtgatgaagatgatgaggtgtaccaggtgacagtgtaccaggccggggagagtgacacagacagctttgaagaagatcctgagatcagcctggccgactactggaagtgcaccagctgcaatgagatgaacccccccctgcccagccactgcaaccgctgctgggccctgcgggagaactggctgcctgaggacaagggcaaggacaagggggagatcagcgagaaggccaagctggagaacagcacccaggccgaggagggctttgatgtgcctgactgcaagaagaccatcgtgaatgacagccgggagagctgtgtggaggagaatgatgacaagatcacccaggccagccagagccaggagagcgaggactacagccagcccagcaccagcagcagcatcatctacagcagccaggaggatgtgaaggagtttgagcgggaggagacccaggacaaggaggagagcgtggagagcagcctgcccctgaatgccatcgagccctgcgtcatctgccagggccggcccaagaatggctgcatcgtgcacggcaagacaggccacctgatggcctgcttcacctgtgccaagaagctgaagaagaggaacaagccctgccctgtgtgccggcagcccatccagatgattgtgctgacctacttcccctag

SEQ ID NO: 20366 - DNA, 1359 bp, synthetic construct
  misc_feature 1..1359: note = Description of Artificial Sequence: Synthetic coding sequence
  source 1..1359: mol_type = other DNA
atggtgcgcagccggcagatgtgcaacaccaacatgtctgtgcccacagatggagctgtgaccaccagccagatcccagccagcgagcaggagaccctggtgcggcccaagcccctgctgctgaagctgctgaagtctgtgggcgcccagaaggacacctacaccatgaaggagaagatctacaccatgatctacagaaacctggtggtggtgaaccagcaggagagcagtgacagcggcacctctgtgtctgaaaatcgctgccacctggagggcggcagtgaccagaaggacctggtgcaggagctgcaggaggagaagcccagcagcagccacctggtgtcccggcccagcaccagcagcagaagaagagccatcagcgagacagaagaaaattctgatgagctgtctggagagcggcagaggaagaggcacaagagtgacagcatcagcctgagctttgatgagagcctggccctgtgtgtgatccgggagatctgctgtgagaggagcagcagcagcgagagcacaggcacccccagcaacccagacctggatgctggggtgtctgagcacagcggggactggctggaccaggacagcgtgtctgaccagttctctgtggagtttgaggtggagagcctggacagcgaggactacagcctgtctgaggagggccaggagctgagtgatgaagatgatgaggtgtaccaggtgacagtgtaccaggccggggagagtgacacagacagctttgaggaggaccctgagatcagcctggccgactactggaagtgcaccagctgcaatgagatgaacccccccctgcccagccactgcaaccgctgctgggccctgcgggagaactggctgcctgaagataaaggcaaggacaagggggagatcagcgagaaggccaagctggagaacagcacccaggccgaggagggctttgatgtgcctgactgcaagaagaccatcgtgaatgacagccgggagagctgtgtggaggagaatgatgacaagatcacccaggccagccagagccaggagagcgaggactacagccagcccagcaccagcagcagcatcatctacagcagccaggaggatgtgaaggagtttgagcgggaggagacccaggacaaggaggagagcgtggagagcagcctgcccctgaatgccatcgagccctgtgtgatctgccagggccggcccaagaatggctgcatcgtgcacggcaagacaggccacctgatggcctgcttcacctgtgccaagaagctgaagaagaggaacaagccctgccctgtgtgccggcagcccatccagatgattgtgctgacctacttcccctag

SEQ ID NO: 20367 - DNA, 771 bp, synthetic construct
  misc_feature 1..771: note = Description of Artificial Sequence: Synthetic coding sequence
  source 1..771: mol_type = other DNA
atgtgcaacaccaacatgtctgtgcccacagatggagctgtgaccaccagccagatcccagccagcgagcaggagaccctggtgcggcccaagcccctgctgctgaagctgctgaagtctgtgggcgcccagaaggacacctacaccatgaaggaggtgctcttctacctgggccagtacatcatgaccaagaggctgtatgatgagaagcagcagcacatcgtgtactgcagcaatgacctgctgggggacctgtttggagtgcccagcttctctgtgaaggagcacaggaagatctacaccatgatctacagaaacctggtggtggtgaaccagcaggagagcagtgacagcggcacctctgtgtctgagaaccgctgccacctggagggcggcagtgaccagaaggacctggtgcaggagctgcaggaggagaagcccagcagcagccacctggtgtcccggcccagcaccagcagcagaagaagagccatcagcgagacagaggagaacagtgatgagctgagcggggagcggcagaggaagaggcacaagagtgacagcatcagcctgagctttgatgagagcctggccctgtgtgtgatccgggagatctgctgtgagaggagcagcagcagcgagagcacaggcacccccagcaacccagacctgctgctgggcgtgtaccaggtgacagtgtaccaggccggggagagtgacacagacagctttgaggaggaccctgagatcagcctggcccactacctgtag

SEQ ID NO: 20368 - DNA, 798 bp, synthetic construct
  misc_feature 1..798: note = Description of Artificial Sequence: Synthetic coding sequence
  source 1..798: mol_type = other DNA
atgtctgtgcccacagatggagctgtgaccaccagccagatcccagccagcgagcaggagaccctggacctggatgctggggtgtctgagcacagcggggactggctggaccaggacagcgtgtctgaccagttctctgtggagtttgaggtggagagcctggacagcgaggactacagcctgtctgaggagggccaggagctgagtgatgaagatgatgaggactactggaagtgcaccagctgcaatgagatgaacccccccctgcccagccactgcaaccgctgctgggccctgcgggagaactggctgcctgaggacaagggcaaggacaagggggagatcagcgagaaggccaagctggagaacagcacccaggccgaggagggctttgatgtgcctgactgcaagaagaccatcgtgaatgacagccgggagagctgtgtggaggagaatgatgacaagatcacccaggccagccagagccaggagagcgaggactacagccagcccagcaccagcagcagcatcatctacagcagccaggaggatgtgaaggagtttgagcgggaggagacccaggacaaggaggagagcgtggagagcagcctgcccctgaatgccatcgagccctgcgtcatctgccagggccggcccaagaatggctgcatcgtgcacggcaagacaggccacctgatggcctgcttcacctgtgccaagaagctgaagaagaggaacaagccctgccctgtgtgccggcagcccatccagatgattgtgctgacctacttcccctag

SEQ ID NO: 20369 - DNA, 1401 bp, synthetic construct
  misc_feature 1..1401: note = Description of Artificial Sequence: Synthetic coding sequence
  source 1..1401: mol_type = other DNA
atgtgcaacaccaacatgtctgtgcccacagatggagctgtgaccaccagccagatcccagccagcgagcaggagaccctggtgctcttctacctgggccagtacatcatgaccaagaggctgtatgatgagaagcagcagcacatcgtgtactgcagcaatgacctgctgggggacctgtttggagtgcccagcttctctgtgaaggagcacaggaagatctacaccatgatctacagaaacctggtggtggtgaaccagcaggagagcagtgacagcggcacctctgtgtctgaaaatcgctgccacctggagggcggcagtgaccagaaggacctggtgcaggagctgcaggaggagaagcccagcagcagccacctggtgtcccggcccagcaccagcagcagaagaagagccatcagcgagacagaagaaaattctgatgagctgtctggagagcggcagaggaagaggcacaagagtgacagcatcagcctgagctttgatgagagcctggccctgtgtgtgatccgggagatctgctgtgagaggagcagcagcagcgagagcacaggcacccccagcaacccagacctggatgctggggtgtctgagcacagcggggactggctggaccaggacagcgtgtctgaccagttctctgtggagtttgaggtggagagcctggacagcgaggactacagcctgtctgaggagggccaggagctgagtgatgaagatgatgaggtgtaccaggtgacagtgtaccaggccggggagagtgacacagacagctttgaggaggaccctgagatcagcctggccgactactggaagtgcaccagctgcaatgagatgaacccccccctgcccagccactgcaaccgctgctgggccctgcgggagaactggctgcctgaagataaaggcaaggacaagggggagatcagcgagaaggccaagctggagaacagcacccaggccgaggagggctttgatgtgcctgactgcaagaagaccatcgtgaatgacagccgggagagctgtgtggaggagaatgatgacaagatcacccaggccagccagagccaggagagcgaggactacagccagcccagcaccagcagcagcatcatctacagcagccaggaggatgtgaaggagtttgagcgggaggagacccaggacaaggaggagagcgtggagagcagcctgcccctgaatgccatcgagccctgtgtgatctgccagggccggcccaagaatggctgcatcgtgcacggcaagacaggccacctgatggcctgcttcacctgtgccaagaagctgaagaagaggaacaagccctgccctgtgtgccggcagcccatccagatgattgtgctgacctacttcccctag

SEQ ID NO: 20370 - DNA, 966 bp, synthetic construct; identical to SEQ ID NO: 20365
  misc_feature 1..966: note = Description of Artificial Sequence: Synthetic coding sequence
  source 1..966: mol_type = other DNA

SEQ ID NO: 20371 - DNA, 480 bp, synthetic construct
  misc_feature 1..480: note = Description of Artificial Sequence: Synthetic coding sequence
  source 1..480: mol_type = other DNA
atgtgcaacaccaacatgtctgtgcccacagatggagctgtgaccaccagccagatcccagccagcgagcaggagaccctggtgcggcccaagcccctgctgctgaagctgctgaagtctgtgggcgcccagaaggacacctacaccatgaaggaggacctggatgctggggtgtctgagcacagcggggactggctggaccaggacagcgtgtctgaccagttctctgtggagtttgaggtggagagcctggacagcgaggactacagcctgtctgaggagggccaggagctgagtgatgaagatgatgaggtgtaccaggtgacagtgtaccaggccggggagagtgacacagacagctttgaagaagatcctgagatcagcctggccgactactggaagtgcctgaagaagaggaacaagccctgccctgtgtgccggcagcccatccagatgattgtgctgacctacttcccctag

SEQ ID NO: 20372 - DNA, 891 bp, synthetic construct
  misc_feature 1..891: note = Description of Artificial Sequence: Synthetic coding sequence
  source 1..891: mol_type = other DNA
atgtgcaacaccaacatgtctgtgcccacagatggagctgtgaccaccagccagatcccagccagcgagcaggagaccctggacctggatgctggggtgtctgagcacagcggggactggctggaccaggacagcgtgtctgaccagttctctgtggagtttgaggtggagagcctggacagcgaggactacagcctgtctgaggagggccaggagctgagtgatgaagatgatgaggtgtaccaggtgacagtgtaccaggccggggagagtgacacagacagctttgaggaggaccctgagatcagcctggccgactactggaagtgcaccagctgcaatgagatgaacccccccctgcccagccactgcaaccgctgctgggccctgcgggagaactggctgcctgaagataaaggcaaggacaagggggagatcagcgagaaggccaagctggagaacagcacccaggccgaggagggctttgatgtgcctgactgcaagaagaccatcgtgaatgacagccgggagagctgtgtggaggagaatgatgacaagatcacccaggccagccagagccaggagagcgaggactacagccagcccagcaccagcagcagcatcatctacagcagccaggaggatgtgaaggagtttgagcgggaggagacccaggacaaggaggagagcgtggagagcagcctgcccctgaatgccatcgagccctgtgtgatctgccagggccggcccaagaatggctgcatcgtgcacggcaagacaggccacctgatggcctgcttcacctgtgccaagaagctgaagaagaggaacaagccctgccctgtgtgccggcagcccatccagatgattgtgctgacctacttcccctag

SEQ ID NO: 20373 - DNA, 732 bp, synthetic construct
  misc_feature 1..732: note = Description of Artificial Sequence: Synthetic coding sequence
  source 1..732: mol_type = other DNA
atgtgcaacaccaacatgtctgtgcccacagatggagctgtgaccaccagccagatcccagccagcgagcaggagaccctggtgcggcccaagcccctgctgctgaagctgctgaagtctgtgggcgcccagaaggacacctacaccatgaaggaggactactggaagtgcaccagctgcaatgagatgaacccccccctgcccagccactgcaaccgctgctgggccctgcgggagaactggctgcctgaggacaagggcaaggacaagggggagatcagcgagaaggccaagctggagaacagcacccaggccgaggagggctttgatgtgcctgactgcaagaagaccatcgtgaatgacagccgggagagctgtgtggaggagaatgatgacaagatcacccaggccagccagagccaggagagcgaggactacagccagcccagcaccagcagcagcatcatctacagcagccaggaggatgtgaaggagtttgagcgggaggagacccaggacaaggaggagagcgtggagagcagcctgcccctgaatgccatcgagccctgcgtcatctgccagggccggcccaagaatggctgcatcgtgcacggcaagacaggccacctgatggcctgcttcacctgtgccaagaagctgaagaagaggaacaagccctgccctgtgtgccggcagcccatccagatgattgtgctgacctacttcccctag

SEQ ID NO: 20374 - DNA, 657 bp, synthetic construct
  misc_feature 1..657: note = Description of Artificial Sequence: Synthetic coding sequence
  source 1..657: mol_type = other DNA
atgtgcaacaccaacatgtctgtgcccacagatggagctgtgaccaccagccagatcccagccagcgagcaggagaccctggactactggaagtgcaccagctgcaatgagatgaacccccccctgcccagccactgcaaccgctgctgggccctgcgggagaactggctgcctgaagataaaggcaaggacaagggggagatcagcgagaaggccaagctggagaacagcacccaggccgaggagggctttgatgtgcctgactgcaagaagaccatcgtgaatgacagccgggagagctgtgtggaggagaatgatgacaagatcacccaggccagccagagccaggagagcgaggactacagccagcccagcaccagcagcagcatcatctacagcagccaggaggatgtgaaggagtttgagcgggaggagacccaggacaaggaggagagcgtggagagcagcctgcccctgaatgccatcgagccctgtgtgatctgccagggccggcccaagaatggctgcatcgtgcacggcaagacaggccacctgatggcctgcttcacctgtgccaagaagctgaagaagaggaacaagccctgccctgtgtgccggcagcccatccagatgattgtgctgacctacttcccctag

SEQ ID NO: 20375 - DNA, 657 bp, synthetic construct; identical to SEQ ID NO: 20374
  misc_feature 1..657: note = Description of Artificial Sequence: Synthetic coding sequence
  source 1..657: mol_type = other DNA

SEQ ID NO: 20376 - DNA, 771 bp, synthetic construct
  misc_feature 1..771: note = Description of Artificial Sequence: Synthetic coding sequence
  source 1..771: mol_type = other DNA
atgtgcaacaccaacatgtctgtgcccacagatggagctgtgaccaccagccagatcccagccagcgagcaggagaccctggtgcggcccaagcccctgctgctgaagctgctgaagtctgtgggcgcccagaaggacacctacaccatgaaggaggtgctcttctacctgggccagtacatcatgaccaagaggctgtatgatgagaagcagcagcacatcgtgtactgcagcaatgacctgctgggggacctgtttggagtgcccagcttctctgtgaaggagcacaggaagatctacaccatgatctacagaaacctggtggtggtgaaccagcaggagagcagtgacagcggcacctctgtgtctgagaaccgctgccacctggagggcggcagtgaccagaaggacctggtgcaggagctgcaggaggagaagcccagcagcagccacctggtgtcccggcccagcaccagcagcagaagaagagccatcagcgagacagaggagaacagtgatgagctgagcggggagcggcagaggaagaggcacaagagtgacagcatcagcctgagctttgatgagagcctggccctgtgtgtgatccgggagatctgctgtgagaggagcagcagcagcgagagcacaggcacccccagcaacccagacctggatgctggggtgtaccaggtgacagtgtaccaggccggggagagtgacacagacagctttgaggaggaccctgagatcagcctggccgactactggtag

SEQ ID NO: 20377 - DNA, 813 bp, synthetic construct
  misc_feature 1..813: note = Description of Artificial Sequence: Synthetic coding sequence
  source 1..813: mol_type = other DNA
atgtgcaacaccaacatgtctgtgcccacagatggagctgtgaccaccagccagatcccagccagcgagcaggagaccctggacctggatgctggggtgtctgagcacagcggggactggctggaccaggacagcgtgtctgaccagttctctgtggagtttgaggtggagagcctggacagcgaggactacagcctgtctgaggagggccaggagctgagtgatgaagatgatgaggactactggaagtgcaccagctgcaatgagatgaacccccccctgcccagccactgcaaccgctgctgggccctgcgggagaactggctgcctgaagataaaggcaaggacaagggggagatcagcgagaaggccaagctggagaacagcacccaggccgaggagggctttgatgtgcctgactgcaagaagaccatcgtgaatgacagccgggagagctgtgtggaggagaatgatgacaagatcacccaggccagccagagccaggagagcgaggactacagccagcccagcaccagcagcagcatcatctacagcagccaggaggatgtgaaggagtttgagcgggaggagacccaggacaaggaggagagcgtggagagcagcctgcccctgaatgccatcgagccctgtgtgatctgccagggccggcccaagaatggctgcatcgtgcacggcaagacaggccacctgatggcctgcttcacctgtgccaagaagctgaagaagaggaacaagccctgccctgtgtgccggcagcccatccagatgattgtgctgacctacttcccctag

SEQ ID NO: 20378 - DNA, 1494 bp, synthetic construct
  misc_feature 1..1494: note = Description of Artificial Sequence: Synthetic coding sequence
  source 1..1494: mol_type = other DNA
atggtgcgcagccggcagatgtgcaacaccaacatgtctgtgcccacagatggagctgtgaccaccagccagatcccagccagcgagcaggagaccctggtgcggcccaagcccctgctgctgaagctgctgaagtctgtgggcgcccagaaggacacctacaccatgaaggaggtgctcttctacctgggccagtacatcatgaccaagaggctgtatgatgagaagcagcagcacatcgtgtactgcagcaatgacctgctgggggacctgtttggagtgcccagcttctctgtgaaggagcacaggaagatctacaccatgatctacagaaacctggtggtggtgaaccagcaggagagcagtgacagcggcacctctgtgtctgagaaccgctgccacctggagggcggcagtgaccagaaggacctggtgcaggagctgcaggaggagaagcccagcagcagccacctggtgtcccggcccagcaccagcagcagaagaagagccatcagcgagacagaggagaacagtgatgagctgagcggggagcggcagaggaagaggcacaagagtgacagcatcagcctgagctttgatgagagcctggccctgtgtgtgatccgggagatctgctgtgagaggagcagcagcagcgagagcacaggcacccccagcaacccagacctggatgctggggtgtctgagcacagcggggactggctggaccaggacagcgtgtctgaccagttctctgtggagtttgaggtggagagcctggacagcgaggactacagcctgtctgaggagggccaggagctgagtgatgaagatgatgaggtgtaccaggtgacagtgtaccaggccggggagagtgacacagacagctttgaagaagatcctgagatcagcctggccgactactggaagtgcaccagctgcaatgagatgaacccccccctgcccagccactgcaaccgctgctgggccctgcgggagaactggctgcctgaggacaagggcaaggacaagggggagatcagcgagaaggccaagctggagaacagcacccaggccgaggagggctttgatgtgcctgactgcaagaagaccatcgtgaatgacagccgggagagctgtgtggaggagaatgatgacaagatcacccaggccagccagagccaggagagcgaggactacagccagcccagcaccagcagcagcatcatctacagcagccaggaggatgtgaaggagtttgagcgggaggagacccaggacaaggaggagagcgtggagagcagcctgcccctgaatgccatcgagccctgcgtcatctgccagggccggcccaagaatggctgcatcgtgcacggcaagacaggccacctgatggcctgcttcacctgtgccaagaagctgaagaagaggaacaagccctgccctgtgtgccggcagcccatccagatgattgtgctgacctacttcccctag

SEQ ID NO: 20379 - DNA, 393 bp, synthetic construct
  misc_feature 1..393: note = Description of Artificial Sequence: Synthetic coding sequence
  source 1..393: mol_type = other DNA
atgtgcaacaccaacatgtctgtgcccacagatggagctgtgaccaccagccagatcccagccagcgagcaggagaccctggtgcggcccaagcccctgctgctgaagctgctgaagtctgtgggcgcccagaaggacacctacaccatgaaggagtttgagcgggaggagacccaggacaaggaggagagcgtggagagcagcctgcccctgaatgccatcgagccctgtgtgatctgccagggccggcccaagaatggctgcatcgtgcacggcaagacaggccacctgatggcctgcttcacctgtgccaagaagctgaagaagaggaacaagccctgccctgtgtgccggcagcccatccagatgattgtgctgacctacttcccctag

SEQ ID NO: 20380 - DNA, 774 bp, synthetic construct
  misc_feature 1..774: note = Description of Artificial Sequence: Synthetic coding sequence
  source 1..774: mol_type = other DNA
atgtgcaacaccaacatgtctgtgcccacagatggagctgtgaccaccagccagatcccagccagcgagcaggagaccctggtgcggcccaagcccctgctgctgaagctgctgaagtctgtgggcgcccagaaggacacctacaccatgaaggaggtgctcttctacctgggccagtacatcatgaccaagaggctgtatgatgagaagcagcagcacatcgtgtactgcagcaatgacctgctgggggacctgtttggagtgcccagcttctctgtgaaggagcacaggaagatctacaccatgatctacagaaacctggtggtggtgaaccagcaggagagcagtgacagcggcacctctgtgtctgagaaccgctgccacctggagggcggcagtgaccagaaggacctggtgcaggagctgcaggaggagaagcccagcagcagccacctggtgtcccggcccagcaccagcagcagaagaagagccatcagcgagacagaggagaacagtgatgagctgagcggggagcggcagaggaagaggcacaagagtgacagcatcagcctgagctttgatgagagcctggccctgtgtgtgatccgggagatctgctgtgagaggagcagcagcagcgagagcacaggcacccccagcaacccagacctggatgctggggtgtctgagcacagcggggactggctggaccaggacagcgtgtctgaccagttctctgtggagtttgaggtggagagcctggacagcgagtag

SEQ ID NO: 20381 - DNA, 891 bp, synthetic construct; identical to SEQ ID NO: 20372
  misc_feature 1..891: note = Description of Artificial Sequence: Synthetic coding sequence
  source 1..891: mol_type = other DNA

SEQ ID NO: 20382 - DNA, 1341 bp, synthetic construct
  misc_feature 1..1341: note = Description of Artificial Sequence: Synthetic coding sequence
  source 1..1341: mol_type = other DNA
atgtgcaacaccaacatgtctgtgcccacagatggagctgtgaccaccagccagatcccagccagcgagcaggagaccctggtgcggcccaagcccctgctgctgaagctgctgaagtctgtgggcgcccagaaggacacctacaccatgaaggagaagatctacaccatgatctacagaaacctggtggtggtgaaccagcaggagagcagtgacagcggcacctctgtgtctgaaaatcgctgccacctggagggcggcagtgaccagaaggacctggtgcaggagctgcaggaggagaagcccagcagcagccacctggtgtcccggcccagcaccagcagcagaagaagagccatcagcgagacagaagaaaattctgatgagctgtctggagagcggcagaggaagaggcacaagagtgacagcatcagcctgagctttgatgagagcctggccctgtgtgtgatccgggagatctgctgtgagaggagcagcagcagcgagagcacaggcacccccagcaacccagacctggatgctggggtgtctgagcacagcggggactggctggaccaggacagcgtgtctgaccagttctctgtggagtttgaggtggagagcctggacagcgaggactacagcctgtctgaggagggccaggagctgagtgatgaagatgatgaggtgtaccaggtgacagtgtaccaggccggggagagtgacacagacagctttgaggaggaccctgagatcagcctggccgactactggaagtgcaccagctgcaatgagatgaacccccccctgcccagccactgcaaccgctgctgggccctgcgggagaactggctgcctgaagataaaggcaaggacaagggggagatcagcgagaaggccaagctggagaacagcacccaggccgaggagggctttgatgtgcctgactgcaagaagaccatcgtgaatgacagccgggagagctgtgtggaggagaatgatgacaagatcacccaggccagccagagccaggagagcgaggactacagccagcccagcaccagcagcagcatcatctacagcagccaggaggatgtgaaggagtttgagcgggaggagacccaggacaaggaggagagcgtggagagcagcctgcccctgaatgccatcgagccctgtgtgatctgccagggccggcccaagaatggctgcatcgtgcacggcaagacaggccacctgatggcctgcttcacctgtgccaagaagctgaagaagaggaacaagccctgccctgtgtgccggcagcccatccagatgattgtgctgacctacttcccctag

SEQ ID NO: 20383 - DNA, 642 bp, synthetic construct
  misc_feature 1..642: note = Description of Artificial Sequence: Synthetic coding sequence
  source 1..642: mol_type = other DNA
atgcccaactttgtggtggactggagggtgtacacagacagcctcttcctgactgtggactttggcctgtgtgccgaggagagcagcaccagcaggaagaggaccacagaagatgacatccccaccctgcccaccagcgagcacaagtgcatccacagcagagaagatgaggacctgattgagaacctggcccaggatgagaccagccggctggacctgggctttgaggagtgggatgtggccggcctgccctggtggttcctgggcaacctgcggagcaactacacccccaggagcaatggcagcacagacctgcagaccaaccaggatgtgggcacagccatcgtgtctgacaccacagatgacctgtggttcctgaatgaatctgtgtctgagcagctgggcgtgggcatcaaggtggaggccgctgacacagagcagaccagcgaggaggtgggcaaggtgtctgacaagaaggtgattgaggtgggcaagaatgatgacctggaggacagcaagagcctgagtgatgacacagatgtggaggtgaccagtgaagatgagtggcagtgcacagagtgcaagaagttcaacagccccagcaagcgctactgcttccgctgctgggccctgaggaagtag

SEQ ID NO: 20384 - DNA, 396 bp, synthetic construct
  misc_feature 1..396: note = Description of Artificial Sequence: Synthetic coding sequence
  source 1..396: mol_type = other DNA
atgaccagcttcagcaccagcgcccagtgcagcaccagtgacagcgcctgccgcatcagccctggccagatcaaccaggtgcggcccaagctgcccctgctgaagatcctgcatgctgctggggcccagggcgagatgttcaccgtgaaggaggtgatgcactacctgggccagtacatcatggtgaagcagctgtatgaccagcaggagcagcacatggtgtactgcggcggggacctgctgggggagctgctgggccggcagagcttctctgtgaaggaccccagccccctgtatgacatgctgaggaagaacctggtgaccctggccacagccaccacagagatgggccacctgttctgccgcatcagccacgccctggagctggccgactag

SEQ ID NO: 20385 - DNA, 1473 bp, synthetic construct
  misc_feature 1..1473: note = Description of Artificial Sequence: Synthetic coding sequence
  source 1..1473: mol_type = other DNA
atgaccagcttcagcaccagcgcccagtgcagcaccagtgacagcgcctgccgcatcagccctggccagatcaaccaggtgcggcccaagctgcccctgctgaagatcctgcatgctgctggggcccagggcgagatgttcaccgtgaaggaggtgatgcactacctgggccagtacatcatggtgaagcagctgtatgaccagcaggagcagcacatggtgtactgcggcggggacctgctgggggagctgctgggccggcagagcttctctgtgaaggaccccagccccctgtatgacatgctgaggaagaacctggtgaccctggccacagccaccacagatgctgcccagaccctggccctggcccaggaccacagcatggacatccccagccaggaccagctgaagcagagcgctgaggagagcagcaccagcaggaagaggaccacagaagatgacatccccaccctgcccaccagcgagcacaagtgcatccacagccgggaggatgaggacctgattgagaacctggcccaggatgagaccagccggctggacctgggctttgaggagtgggatgtggccggcctgccctggtggttcctgggcaacctgcggagcaactacacccccaggagcaatggcagcacagacctgcagaccaaccaggatgtgggcacagccatcgtgtctgacaccacagatgacctgtggttcctgaatgaatctgtgtctgagcagctgggcgtgggcatcaaggtggaggccgctgacacagagcagaccagcgaggaggtgggcaaggtgtctgacaagaaggtgattgaggtgggcaagaatgatgacctggaggacagcaagagcctgagtgatgacacagatgtggaggtgaccagtgaagatgagtggcagtgcacagagtgcaagaagttcaacagccccagcaagcgctactgcttccgctgctgggccctgaggaaggactggtacagcgactgcagcaagctgacccacagcctgagcaccagtgacatcacagccatccctgagaaggaaaatgaaggaaatgatgtgcctgactgcaggaggaccatcagcgcccctgtggtgcggcccaaggatgcctacatcaagaaggagaacagcaagctgtttgacccctgcaacagcgtggagttcctggacctggcccacagcagcgagagccaggagaccatcagctccatgggagagcagctggacaacctgtctgagcagaggacagacacagagaacatggaggactgccagaacctgctgaagccctgcagcctgtgtgagaagaggcccagagatggcaacatcatccacggccgcacaggccacctggtgacctgcttccactgtgcccggcggctgaagaaggccggggccagctgccccatctgcaagaaggagatccagctggtgatcaaggtgttcatcgcctag

SEQ ID NO: 20386 - DNA, 495 bp, synthetic construct
  misc_feature 1..495: note = Description of Artificial Sequence: Synthetic coding sequence
  source 1..495: mol_type = other DNA
atgaccagcttcagcaccagcgcccagtgcagcaccagtgacagcgcctgccgcatcagccctggccagatcaaccaggagaatgaaggaaatgatgtgcctgactgcaggaggaccatcagcgcccctgtggtgcggcccaaggatgcctacatcaagaaggagaacagcaagctgtttgacccctgcaacagcgtggagttcctggacctggcccacagcagcgagagccaggagaccatcagctccatgggagagcagctggacaacctgtctgagcagaggacagacacagagaacatggaggactgccagaacctgctgaagccctgcagcctgtgtgagaagaggcccagagatggcaacatcatccacggccgcacaggccacctggtgacctgcttccactgtgcccggcggctgaagaaggccggggccagctgccccatctgcaagaaggagatccagctggtgatcaaggtgttcatcgcctag

SEQ ID NO: 20387 - DNA, 423 bp, synthetic construct
  misc_feature 1..423: note = Description of Artificial Sequence: Synthetic coding sequence
  source 1..423: mol_type = other DNA
atgaccagcttcagcaccagcgcccagtgcagcaccagtgacagcgcctgccgcatcagccctggccagatcaaccaggtgcggcccaagctgcccctgctgaagatcctgcatgctgctggggcccagggcgagatgttcaccgtgaaggaggtgatgcactacctgggccagtacatcatggtgaagcagctgtatgaccagcaggagcagcacatggtgtactgcggcggggacctgctgggggagctgctgggccggcagagcttctctgtgaaggaccccagccccctgtatgacatgctgaggaagaacctggtgaccctggccacagccaccacagccaagtgccggggcaagttccacttccagaagaagaactacagaagacgctacccccacacagcctacctgcgggcctag

SEQ ID NO: 20388 - DNA, 516 bp, synthetic construct
  misc_feature 1..516: note = Description of Artificial Sequence: Synthetic coding sequence
  source 1..516: mol_type = other DNA
gacctgattgagaacctggcccaggatgagaccagccggctggacctgggctttgaggagtgggatgtggccggcctgccctggtggttcctgggcaacctgcggagcaactacacccccaggagcaatggcagcacagacctgcagaccaaccaggtgattgaggtgggcaagaatgatgacctggaggacagcaagagcctgagtgatgacacagatgtggaggtgaccagtgaagatgagtggcagtgcacagagtgcaagaagttcaacagccccagcaagcgctactgcttccgctgctgggccctgaggaaggactggtacagcgactgcagcaagctgacccacagcctgagcaccagtgacatcacagccatccctgagaaggaaaatgaaggaaatgatgtgcctgactgcaggaggaccatcagcgcccctgtggtgcggcccaaggatgcctacatcaagaaggagaacagcaagctgtttgacccctgcaacagcgtggagtag

SEQ ID NO: 20389 - DNA, 1323 bp, synthetic construct
  misc_feature 1..1323: note = Description of Artificial Sequence: Synthetic coding sequence
  source 1..1323: mol_type = other DNA
atgaccagcttcagcaccagcgcccagtgcagcaccagtgacagcgcctgccgcatcagccctggccagatcaaccaggtgcggcccaagctgcccctgctgaagatcctgcatgctgctggggcccagggcgagatgttcaccgtgaaggaggtgatgcactacctgggccagtacatcatggtgaagcagctgtatgaccagcaggagcagcacatggtgtactgcggcggggacctgctgggggagctgctgggccggcagagcttctctgtgaaggaccccagccccctgtatgacatgctgaggaagaacctggtgaccctggccacagccaccacagatgctgcccagaccctggccctggcccaggaccacagcatggacatccccagccaggaccagctgaagcagagcgctgaggagagcagcaccagcaggaagaggaccacagaagatgacatccccaccctgcccaccagcgagcacaagtgcatccacagccgggaggatgaggacctgattgagaacctggcccaggatgagaccagccggctggacctgggctttgaggagtgggatgtggccggcctgccctggtggttcctgggcaacctgcggagcaactacacccccaggagcaatggcagcacagacctgcagaccaaccaggtgattgaggtgggcaagaatgatgacctggaggacagcaagagcctgagtgatgacacagatgtggaggtgaccagtgaagatgagtggcagtgcacagagtgcaagaagttcaacagccccagcaagcgctactgcttccgctgctgggccctgaggaaggactggtacagcgactgcagcaagctgacccacagcctgagcaccagtgacatcacagccatccctgagaaggaaaatgaaggaaatgatgtgcctgactgcaggaggaccatcagcgcccctgtggtgcggcccaaggatgcctacatcaagaaggagaacagcaagctgtttgacccctgcaacagcgtggagttcctggacctggcccacagcagcgagagccaggagaccatcagctccatgggagagcagctggacaacctgtctgagcagaggacagacacagagaacatggaggactgccagaacctgctgaagccctgcagcctgtgtgagaagaggcccagagatggcaacatcatccacggccgcacaggccacctggtgacctgcttccactgtgcccggcggctgaagaaggccggggccagctgccccatctgcaagaaggagatccagctggtgatcaaggtgttcatcgcctag

SEQ ID NO: 20390 - DNA, 384 bp, synthetic construct
  misc_feature 1..384: note = Description of Artificial Sequence: Synthetic coding sequence
  source 1..384: mol_type = other DNA
atgaccagcttcagcaccagcgcccagtgcagcaccagtgacagcgcctgccgcatcagccctggccagatcaaccaggtgcggcccaagctgcccctgctgaagatcctgcatgctgctggggcccagggcgagatgttcaccgtgaaggaggtgatgcactacctgggccagtacatcatggtgaagcagctgtatgaccagcaggagcagcacatggtgtactgcggcggggacctgctgggggagctgctgggccggcagagcttctctgtgaaggaccccagccccctgtatgacatgctgaggaagaacctggtgaccctggccacagccaccaccggctgccagaggagagtgaatggcccccagagggcctggtag

SEQ ID NO: 20391 - DNA, 462 bp, synthetic construct
  misc_feature 1..462: note = Description of Artificial Sequence: Synthetic coding sequence
  source 1..462: mol_type = other DNA
atgaccagcttcagcaccagcgcccagtgcagcaccagtgacagcgcctgccgcatcagccctggccagatcaaccaggtgcggcccaagctgcccctgctgaagatcctgcatgctgctggggcccagggcgagatgttcaccgtgaaggaggtgatgcactacctgggccagtacatcatggtgaagcagctgtatgaccagcaggagcagcacatggtgtactgcggcggggacctgctgggggagctgctgggccggcagagcttctctgtgaaggaccccagccccctgtatgacatgctgaggaagaacctggtgaccctggccacagccaccaccggcagccagtatggctacagcaagagccggcccacagaggccaagtgccggggcaagttccacttccagaagaagaactacagaagacgctacccccacacagcctacctgcgggcctag

SEQ ID NO: 20392 - DNA, 7650 bp, synthetic construct
  misc_feature 1..7650: note = Description of Artificial Sequence: Synthetic coding sequence
  source 1..7650: mol_type = other DNA
atgctgggcaccggccctgctgctgccaccacagctgccaccaccagcagcaatgtgtctgtgctgcagcagtttgccagcggcctgaagagcagaaatgaggagacccgggccaaggccgccaaggagctgcagcactacgtgaccatggagctgcgggagatgagccaggaggagagcacccgcttctatgaccagctgaaccaccacatctttgagctggtgagcagcagtgatgccaatgaaaggaagggcggcatcctggccatcgccagcctcatcggcgtggagggcggcaatgccacccgcatcggccgctttgccaactacctgaggaacctgctgcccagcaatgaccctgtggtgatggagatggccagcaaggccatcggccgcctggccatggccggggacaccttcaccgcagaatatgtggagtttgaggtgaagagggccctggagtggctgggcgctgacagaaatgaaggaagaagacatgctgctgtgctggtgctgcgggagctggccatctctgtgcccaccttcttcttccagcaggtgcagcccttctttgacaacatctttgtggccgtgtgggaccccaagcaggccatccgggagggcgctgtggccgccctgcgggcctgcctgatcctgaccacccagcgggagcccaaggagatgcagaagccccagtggtaccgccacacctttgaggaggccgagaagggctttgatgagaccctggccaaggagaagggcatgaacagagatgaccgcatccacggggccctgctgatcctgaatgagctggtgcgcatcagctccatggagggggagcggctgcgggaggagatggaggagatcacccagcagcagctggtgcatgacaagtactgcaaggacctgatgggcttcggcaccaagcccaggcacatcacccccttcaccagcttccaggccgtgcagccccagcagagcaatgccctggtgggcctgctgggctacagcagccaccagggcctgatgggcttcggcaccagccccagccctgccaagagcaccctggtggagagccgctgctgccgggacctgatggaggagaagtttgaccaggtgtgccagtgggtgctgaagtgcaggaacagcaagaacagcctcatccagatgaccatcctgaacctgctgccccggctggccgccttccggcccagcgccttcacagacacccagtacctgcaggacaccatgaaccacgtgctgagctgtgtgaagaaggagaaggagaggacagctgccttccaggccctgggcctgctgtctgtggccgtgcgctctgagttcaaggtgtacctgccccgggtgctggacatcatccgggccgccctgccccccaaggactttgcccacaagaggcagaaggccatgcaggtggatgccaccgtcttcacctgcatctccatgctggcccgggccatgggccctggcatccagcaggacatcaaggagctgctggagcccatgctggccgtgggcctgagccctgccctgacagctgtgctgtatgacctgagccggcagatcccccagctgaagaaggacatccaggacggcctgctgaagatgctgagcctggtgctgatgcacaagcccctgcggcaccctggcatgcccaagggcctggcccaccagctggccagccctggcctgaccaccctgcctgaggccagtgatgtgggcagcatcaccctggccctgcggaccctgggcagctttgaatttgagggccacagcctgacccagtttgtgcgccactgtgccgaccacttcctgaacagcgagcacaaggagatccgcatggaggccgcccggacctgcagccggctgctgacccccagcatccacctgatcagcggccacgcccacgtggtgtcccagacagctgtgcaggtggtggctgatgtgctgagcaagctgctggtggtgggcatcacagatcctgaccctgacatccgctactgtgtgctggccagcctggatgaaagatttgatgcccacctggcccaggccgagaacctgcaggccctgtttgtggccctgaatgaccaggtgtttgagatccgggagctggccatctgcaccgtgggccgcctgagctccatgaacccagcctttgtgatgcccttcctgaggaagatgctgatccagatcctgacagagctggagcacagcggcatcggccgcatcaaggagcagagcgccaggatgctgggccacctggtgtccaatgcccccaggctcatccggccctacatggagcccatcctgaaggccctgatcctgaagctgaaggaccctgaccctgaccccaaccctggggtcatcaacaacgtgctggccaccatcggggagctggcccaggtgtctggcctggagatgaggaagtgggtggatgagctgttcatcatcatcatggacatgctgcaggacagcagcctgctggccaagaggcaggtggccctgtggaccctgggccagctggtggccagcacaggctacgtggtggagccctacaggaagtaccccaccctgctggaggtgctgctgaacttcctgaagacagagcagaaccagggcacccggcgggaggccatccgggtgctgggcctgctgggcgccctggacccctacaagcacaaggtgaacatcggcatgattgaccagagcagagatgccagcgctgtgtccctgtctgagagcaagagcagccaggacagcagtgactacagcaccagcgagatgctggtgaacatgggcaacctgcccctggatgagttctacccagctgtgtccatggtggccctgatgaggatcttccgggaccagagcctgagccaccaccacaccatggtggtgcaggccatcaccttcatcttcaagagcctgggcctgaagtgtgtgcagttcctgccccaggtgatgcccaccttcctgaatgtcatccgggtgtgtgatggagccatccgggagttcctgttccagcagctgggcatgctggtgtcctttgtgaagagccacatccggccctacatggatgagatcgtgaccctgatgagggagttctgggtgatgaacaccagcatccagagcaccatcatcctgctgattgagcagatcgtggtggccctgggcggggagttcaagctgtacctgccccagctgatcccccacatgctgcgggtcttcatgcatgacaacagccctggaagaattgtgtccatcaagctgctggccgccatccagctgtttggagccaacctggatgactacctgcacctgctgctgccccccatcgtgaagctgtttgatgcccctgaggcccccctgcccagcaggaaggccgccctggagaccgtggaccggctgacagagagcctggacttcacagattatgccagccgcatcatccaccccatcgtgaggaccctggaccagagccctgagctgcggagcacagccatggacaccctgagcagcctggtgttccagctgggcaagaagtaccagatcttcatccccatggtgaacaaggtgctggtgcgccaccgcatcaaccaccagagatatgatgtgctgatctgccgcatcgtgaagggctacaccctggctgatgaggaggaggaccccctcatctaccagcacaggatgctgcggagcggccagggagatgccctggccagcggccctgtggagaccggccccatgaagaagctgcacgtgtccaccatcaacctgcagaaggcctggggcgccgccaggagagtgtccaaggatgactggctggagtggctgcggcggctgagcctggagctgctgaaggacagcagcagccccagcctgcggagctgctgggccctggcccaggcctacaaccccatggcccgggacctcttcaatgctgcctttgtgtcctgctggagcgagctgaatgaagaccagcaggatgagctgatccgcagcattgagctggccctgaccagccaggacattgctgaggtgacccagaccctgctgaacctggccgagttcatggagcacagcgacaagggccccctgcccctgagagatgacaatggcatcgtgctgctgggggagagagctgccaagtgccgggcctatgccaaggccctgcactacaaggagctggagttccagaagggccccaccccagccatcctggagagcctcatcagcatcaacaacaagctgcagcagcctgaggccgccgccggcgtgctggagtatgccatgaagcactttggagagctggagatccaggccacctggtatgagaagctgcacgagtgggaggatgccctggtggcctatgacaagaagatggacaccaacaaggatgatcctgagctgatgctgggccgcatgcgctgcctggaggccctgggggagtggggccagctgcaccagcagtgctgtgagaagtggaccctggtgaatgatgagacccaggccaagatggccaggatggctgctgctgctgcctggggcctgggccagtgggacagcatggaggagtacacctgcatgatcccccgggacacccatgatggagccttctacagagctgtgctggccctgcaccaggacctcttcagcctggcccagcagtgcatcgacaaggcccgggacctgctggatgctgagctgacagccatggccggggagagctacagccgggcctatggagccatggtgtcctgccacatgctgtctgagctggaggaggtgatccagtacaagctggtgcctgagcggcgggagatcatccggcagatctggtgggagcggctgcagggctgccagagaattgtggaggactggcagaagatcctgatggtgcgcagcctggtggtgagcccccatgaggacatgaggacctggctgaagtatgccagcctgtgtgggaagagcggccgcctggccctggcccacaagaccctggtgctgctgctgggcgtggaccccagccggcagctggaccaccccctgcccaccgtgcacccccaggtgacctacgcctacatgaagaacatgtggaagagcgccaggaagattgatgccttccagcacatgcagcactttgtgcagaccatgcagcagcaggcccagcacgccatcgccacagaggaccagcagcacaagcaggagctgcacaagctgatggcccgctgcttcctgaagctgggggagtggcagctgaacctgcagggcatcaatgaaagcaccatccccaaggtgctgcagtactacagcgctgccacagaacatgaccgctcctggtacaaggcctggcacgcctgggccgtgatgaactttgaggccgtgctgcactacaagcaccagaaccaggccagagatgagaagaagaagctgcggcatgccagcggggccaacatcaccaatgccaccacagctgccaccacagctgccacagccaccaccacagccagcacagagggcagcaacagcgagagcgaggccgagagcacagagaacagccccacccccagccccctgcagaagaaggtgacagaggacctgagcaagaccctgctgatgtacacagtgcctgctgtgcagggcttcttccgcagcatcagcctgagccggggcaacaacctgcaggacaccctgcgggtgctgaccctgtggtttgattatggccactggccagatgtgaatgaggccctggtggagggcgtgaaggccatccagattgacacctggctgcaggtgatcccccagctgattgccagaattgacaccccccggcccctggtgggccgcctcatccaccagctgctgacagacatcggccgctaccacccccaggccctgatctaccccctgactgtggccagcaagagcaccaccacagcccggcacaatgctgccaacaagatcctgaagaacatgtgtgagcacagcaacaccctggtgcagcaggccatgatggtgtctgaggagctgatccgggtggccatcctgtggcatgagatgtggcatgagggcctggaggaggccagccggctgtactttggagagagaaatgtgaagggcatgtttgaggtgctggagcccctgcacgccatgatggagcggggcccccagaccctgaaggagaccagcttcaaccaggcctacggccgggacctgatggaggcccaggagtggtgcaggaagtacatgaagtctggaaatgtgaaggacctgacccaggcctgggacctgtactaccacgtgttccgccgcatcagcaagcagctgccccagctgaccagcctggagctgcagtatgtgagccccaagctgctgatgtgccgggacctggagctggccgtgcccggcacctatgaccccaaccagcccatcatccgcatccagagcatcgcccccagcctgcaggtgatcaccagcaagcagaggcccaggaagctgaccctgatgggcagcaatggccacgagtttgtgttcctgctgaagggccacgaggacctgcggcaggatgagcgggtgatgcagctgtttggcctggtgaacaccctgctggccaatgaccccaccagcctgaggaagaacctgagcatccagagatatgctgtgatccccctgagcaccaacagcggcctgattggctgggtgccccactgtgacaccctgcacgccctgatccgggactaccgggagaagaagaagatcctgctgaacatcgagcaccgcatcatgctgaggatggccccagactatgaccacctgaccctgatgcagaaggtggaggtgtttgaacatgctgtgaacaacacagctggagatgacctggccaagctgctgtggctgaagagccccagcagcgaggtgtggtttgacaggaggaccaactacaccaggagcctggccgtgatgtccatggtgggctacatcctgggcctgggggacagacaccccagcaacctgatgctggaccggctgagcggcaagatcctgcacatcgactttggagactgctttgaggtggccatgacccgggagaagtttcctgagaagatccccttccggctgaccaggatgctgaccaatgccatggaggtgacaggcctggatggcaactaccgcatcacctgccacacagtgatggaggtgctgcgggagcacaaggacagcgtgatggctgtgctggaggcctttgtgtatgaccccctgctgaactggaggctgatggacaccaacaccaagggcaacaagaggagcaggaccaggacagacagctacagcgctggccagagcgtggagatcctggatggagtggagctgggggagcccgcccacaagaagacaggcaccaccgtgcctgagagcatccacagcttcatcggagatggcctggtgaagccagaggccctgaacaagaaggccatccagatcatcaacagagtgcgggacaagctgaccggccgggacttcagccatgatgacaccctggatgtgcccacccaggtggagctgctgatcaagcaggccaccagccatgagaacctgtgccagtgctacatcggctggtgccccttctggtag

SEQ ID NO: 20393 - DNA, 2265 bp, synthetic construct
  misc_feature 1..2265: note = Description of Artificial Sequence: Synthetic coding sequence
  source 1..2265: mol_type = other DNA
atgaactttgaagctgtgctgcactacaagcaccagaaccaggccagagatgagaagaagaagctgcggcatgccagcggggccaacatcaccaatgccaccacagctgccaccacagctgccacagccaccaccacagccagcacagagggcagcaacagcgagagcgaggccgagagcacagagaacagccccacccccagccccctgcagaagaaggtgacagaggacctgagcaagaccctgctgatgtacacagtgcctgctgtgcagggcttcttccgcagcatcagcctgagccggggcaacaacctgcaggacaccctgcgggtgctgaccctgtggtttgattatggccactggccagatgtgaatgaggccctggtggagggcgtgaaggccatccagattgacacctggctgcaggtgatcccccagctgattgccagaattgacaccccccggcccctggtgggccgcctcatccaccagctgctgacagacatcggccgctaccacccccaggccctgatctaccccctgactgtggccagcaagagcaccaccacagcccggcacaatgctgccaacaagatcctgaagaacatgtgtgagcacagcaacaccctggtgcagcaggccatgatggtgtctgaggagctgatccgggtggccatcctgtggcatgagatgtggcatgagggcctggaggaggccagccggctgtactttggagagagaaatgtgaagggcatgtttgaggtgctggagcccctgcacgccatgatggagcggggcccccagaccctgaaggagaccagcttcaaccaggcctacggccgggacctgatggaggcccaggagtggtgcaggaagtacatgaagtctggaaatgtgaaggacctgacccaggcctgggacctgtactaccacgtgttccgccgcatcagcaagcagctgccccagctgaccagcctggagctgcagtatgtgagccccaagctgctgatgtgccgggacctggagctggccgtgcccggcacctatgaccccaaccagcccatcatccgcatccagagcatcgcccccagcctgcaggtgatcaccagcaagcagaggcccaggaagctgaccctgatgggcagcaatggacatgaatttgtgttcctgctgaagggccacgaggacctgcggcaggatgagcgggtgatgcagctgtttggcctggtgaacaccctgctggccaatgaccccaccagcctgaggaagaacctgagcatccagagatatgctgtgatccccctgagcaccaacagcggcctcatcggctgggtgccccactgtgacaccctgcacgccctgatccgggactaccgggagaagaagaagatcctgctgaacatcgagcaccgcatcatgctgaggatggccccagactatgaccacctgaccctgatgcagaaggtggaggtgtttgagcacgctgtgaacaacacagctggagatgacctggccaagctgctgtggctgaagagccccagcagcgaggtgtggtttgacaggaggaccaactacaccaggagcctggccgtgatgtccatggtgggctacatcctgggcctgggggacagacaccccagcaacctgatgctggaccggctgagcggcaagatcctgcacatcgactttggagactgctttgaggtggccatgacccgggagaagtttcctgagaagatccccttccggctgaccaggatgctgaccaatgccatggaggtgacaggcctggatggcaactaccgcatcacctgccacacagtgatggaggtgctgcgggagcacaaggacagcgtgatggctgtgctggaggcctttgtgtatgaccccctgctgaactggaggctgatggacaccaacaccaagggcaacaagaggagcaggaccaggacagacagctacagcgctggccagagcgtggagatcctggatggagtggagctgggggagcccgcccacaagaagacaggcaccaccgtgcctgagagcatccacagcttcatcggagatggcctggtgaagccagaggccctgaacaagaaggccatccagatcatcaacagagtgcgggacaagctgaccggccgggacttcagccatgatgacaccctggatgtgcccacccaggtggagctgctgatcaagcaggccaccagccatgagaacctgtgccagtgctacatcggctggtgccccttctggtag

SEQ ID NO: 20394 - DNA, 486 bp, synthetic construct
  misc_feature 1..486: note = Description of Artificial Sequence: Synthetic coding sequence
  source 1..486: mol_type = other DNA
atgctggaccggctgagcggcaagatcctgcacatcgactttggagactgctttgaggtggccatgacccgggagaagtttcctgagaagatccccttccggctgaccaggatgctgaccaatgccatggaggtgacaggcctggatggcaactaccgcatcacctgccacacagtgatggaggtgctgcgggagcacaaggacagcgtgatggctgtgctggaggcctttgtgtatgaccccctgctgaactggaggctgatggacaccaacaccaagggcaacaagaggagcaggaccaggacagacagctacagcgctggccagagcgtggagatcctggatggagtggagctgggggagcccgcccacaagaagacaggcaccaccgtgcctgagagcatccacagcttcatcggagatggcctggtgaagccagaggccctgaacaagaaggccatccagatcatcaacagagtgaggtag

SEQ ID NO: 20395 - DNA, 5187 bp, synthetic construct
  misc_feature 1..5187: note = Description of Artificial Sequence: Synthetic coding sequence
  source 1..5187: mol_type = other DNA
atgctgggcaccggccctgctgctgccaccacagctgccaccaccagcagcaatgtgtctgtgctgcagcagtttgccagcggcctgaagagcagaaatgaggagacccgggccaaggccgccaaggagctgcagcactacgtgaccatggagctgcgggagatgagccaggaggagagcacccgcttctatgaccagctgaaccaccacatctttgagctggtgagcagcagtgatgccaatgaaaggaagggcggcatcctggccatcgccagcctcatcggcgtggagggcggcaatgccacccgcatcggccgctttgccaactacctgaggaacctgctgcccagcaatgaccctgtggtgatggagatggccagcaaggccatcggccgcctggccatggccggggacaccttcaccgcagaatatgtggagtttgaggtgaagagggccctggagtggctgggcgctgacagaaatgaaggaagaagacatgctgctgtgctggtgctgcgggagctggccatctctgtgcccaccttcttcttccagcaggtgcagcccttctttgacaacatctttgtggccgtgtgggaccccaagcaggccatccgggagggcgctgtggccgccctgcgggcctgcctgatcctgaccacccagcgggagcccaaggagatgcagaagccccagtggtaccgccacacctttgaggaggccgagaagggctttgatgagaccctggccaaggagaagggcatgaacagagatgaccgcatccacggggccctgctgatcctgaatgagctggtgcgcatcagctccatggagggggagcggctgcgggaggagatggaggagatcacccagcagcagctggtgcatgacaagtactgcaaggacctgatgggcttcggcaccaagcccaggcacatcacccccttcaccagcttccaggccgtgcagccccagcagagcaatgccctggtgggcctgctgggctacagcagccaccagggcctgatgggcttcggcaccagccccagccctgccaagagcaccctggtggagagccgctgctgccgggacctgatggaggagaagtttgaccaggtgtgccagtgggtgctgaagtgcaggaacagcaagaacagcctcatccagatgaccatcctgaacctgctgccccggctggccgccttccggcccagcgccttcacagacacccagtacctgcaggacaccatgaaccacgtgctgagctgtgtgaagaaggagaaggagaggacagctgccttccaggccctgggcctgctgtctgtggccgtgcgctctgagttcaaggtgtacctgccccgggtgctggacatcatccgggccgccctgccccccaaggactttgcccacaagaggcagaaggccatgcaggtggatgccaccgtcttcacctgcatctccatgctggcccgggccatgggccctggcatccagcaggacatcaaggagctgctggagcccatgctggccgtgggcctgagccctgccctgacagctgtgctgtatgacctgagccggcagatcccccagctgaagaaggacatccaggacggcctgctgaagatgctgagcctggtgctgatgcacaagcccctgcggcaccctggcatgcccaagggcctggcccaccagctggccagccctggcctgaccaccctgcctgaggccagtgatgtgggcagcatcaccctggccctgcggaccctgggcagctttgaatttgagggccacagcctgacccagtttgtgcgccactgtgccgaccacttcctgaacagcgagcacaaggagatccgcatggaggccgcccggacctgcagccggctgctgacccccagcatccacctgatcagcggccacgcccacgtggtgtcccagacagctgtgcaggtggtggctgatgtgctgagcaagctgctggtggtgggcatcacagatcctgaccctgacatccgctactgtgtgctggccagcctggatgaaagatttgatgcccacctggcccaggccgagaacctgcaggccctgtttgtggccctgaatgaccaggtgtttgagatccgggagctggccatctgcaccgtgggccgcctgagctccatgaacccagcctttgtgatgcccttcctgaggaagatgctgatccagatcctgacagagctggagcacagcggcatcggccgcatcaaggagcagagcgccaggatgctgggccacctggtgtccaatgcccccaggctcatccggccctacatggagcccatcctgaaggccctgatcctgaagctgaaggaccctgaccctgaccccaaccctggggtcatcaacaacgtgctggccaccatcggggagctggcccaggtgtctggcctggagatgaggaagtgggtggatgagctgttcatcatcatcatggacatgctgcaggacagcagcctgctggccaagaggcaggtggccctgtggaccctgggccagctggtggccagcacaggctacgtggtggagccctacaggaagtaccccaccctgctggaggtgctgctgaacttcctgaagacagagcagaaccagggcacccggcgggaggccatccgggtgctgggcctgctgggcgccctggacccctacaagcacaaggtgaacatcggcatgattgaccagagcagagatgccagcgctgtgtccctgtctgagagcaagagcagccaggacagcagtgactacagcaccagcgagatgctggtgaacatgggcaacctgcccctggatgagttctacccagctgtgtccatggtggccctgatgaggatcttccgggaccagagcctgagccaccaccacaccatggtggtgcaggccatcaccttcatcttcaagagcctgggcctgaagtgtgtgcagttcctgccccaggtgatgcccaccttcctgaatgtcatccgggtgtgtgatggagccatccgggagttcctgttccagcagctgggcatgctggtgtcctttgtgaagagccacatccggccctacatggatgagatcgtgaccctgatgagggagttctgggtgatgaacaccagcatccagagcaccatcatcctgctgattgagcagatcgtggtggccctgggcggggagttcaagctgtacctgccccagctgatcccccacatgctgcgggtcttcatgcatgacaacagccctggaagaattgtgtccatcaagctgctggccgccatccagctgtttggagccaacctggatgactacctgcacctgctgctgccccccatcgtgaagctgtttgatgcccctgaggcccccctgcccagcaggaaggccgccctggagaccgtggaccggctgacagagagcctggacttcacagattatgccagccgcatcatccaccccatcgtgaggaccctggaccagagccctgagctgcggagcacagccatggacaccctgagcagcctggtgttccagctgggcaagaagtaccagatcttcatccccatggtgaacaaggtgctggtgcgccaccgcatcaaccaccagagatatgatgtgctgatctgccgcatcgtgaagggctacaccctggctgatgaggaggaggaccccctcatctaccagcacaggatgctgcggagcggccagggagatgccctggccagcggccctgtggagaccggccccatgaagaagctgcacgtgtccaccatcaacctgcagaaggcctggggcgccgccaggagagtgtccaaggatgactggctggagtggctgcggcggctgagcctggagctgctgaaggacagcagcagccccagcctgcggagctgctgggccctggcccaggcctacaaccccatggcccgggacctcttcaatgctgcctttgtgtcctgctggagcgagctgaatgaagaccagcaggatgagctgatccgcagcattgagctggccctgaccagccaggacattgctgaggtgacccagaccctgctgaacctggccgagttcatggagcacagcgacaagggccccctgcccctgagagatgacaatggcatcgtgctgctgggggagagagctgccaagtgccgggcctatgccaaggccctgcactacaaggagctggagttccagaagggccccaccccagccatcctggagagcctcatcagcatcaacaacaagctgcagcagcctgaggccgccgccggcgtgctggagtatgccatgaagcactttggagagctggagatccaggccacctggtatgagaagctgcacgagtgggaggatgccctggtggcctatgacaagaagatggacaccaacaaggatgatcctgagctgatgctgggccgcatgcgctgcctggaggccctgggggagtggggccagctgcaccagcagtgctgtgagaagtggaccctggtgaatgatgagacccaggccaagatggccaggatggctgctgctgctgcctggggcctgggccagtgggacagcatggaggagtacacctgcatgatcccccgggacacccatgatggagccttctacagagctgtgctggccctgcaccaggacctcttcagcctggcccagcagtgcatcgacaaggcccgggacctgctggatgctgagctgacagccatggccggggagagctacagccgggcctatggagccatggtgtcctgccacatgctgtctgagctggaggaggtgatccagtacaagctggtgcctgagcggcgggagatcatccggcagatctggtgggagcggctgcagggctgccagagaattgtggaggactggcagaagatcctgatggtgcgcagcctggtggtgagcccccatgaggacatgaggacctggctgaagtatgccagcctgtgtgggaagagcggccgcctggccatcgcccccctgaacatgggcacagccaacagcgcccagcccaggagcctgcgctcctggaggacctggatccgcatcctggactgcaaggacacagaagatgctgacctgaccccagccacctaccccaagaccagcctggtgtgtggccagcagcagaagtgcctgcaggaccggcccaagtag

SEQ ID NO: 20396 - DNA, 6270 bp, synthetic construct
  misc_feature 1..6270: note = Description of Artificial Sequence: Synthetic coding sequence
  source 1..6270: mol_type = other DNA
atggaggacacccaggccatcgactgggatgtggaggaggaggaggagacagagcagagcagcgagagcctgcgctgcaatgtggagcctgtgggccgcctgcacatcttcagcggggcccacggccctgagaaggacttccccctgcacctgggcaagaatgtggtgggccgcatgccagactgcagcgtggccctgcccttccccagcatcagcaagcagcacgccgagattgagatcctggcctgggacaaggcccccatcctgcgggactgtggcagcctgaatggcacccagatcctgcggccccccaaggtgctgagccctggggtgagccaccggctgcgggaccaggagctgatcctgtttgctgacctgctgtgccagtaccaccggctggatgtgtccctgccctttgtgtcccggggccccctgactgtggaggagaccccccgggtgcagggcgagacccagccccagaggctgctgctggccgaggacagcgaggaggaggtggacttcctgtctgagaggaggatggtgaagaagagcaggaccaccagcagcagcgtcatcgtgcctgagagtgatgaggagggccacagccctgtgctgggcggcctgggccccccatttgccttcaacctgaacagcgacacagatgtggaggagggccagcagcctgccacagaggaggccagcagcgctgcccggcggggggccaccgtggaggccaagcagagcgaggccgaggtggtgacagagatccagctggagaaggaccagcccctggtgaaggagaaggacaatgacaccaaggtgaagagaggagctggaaatggagtggtgcctgctggggtcatcctggagaggagccagcccccaggagaagattctgacacagatgtggatgatgacagcaggcctcctggccggcctgctgaggtgcacctggagcgggcccagcccttcggcttcatcgacagcgacacagatgctgaggaggagcgcatcccagccacccctgtggtgatccccatgaagaagaggaagatcttccacggcgtgggcacccggggccctggggcccctggcctggcccacctgcaggagagccaggccggcagtgacacagatgtggaggagggcaaggccccccaggccgtgcccctggagaagagccaggcctccatggtgatcaacagcgacacagatgatgaggaggaggtgtctgctgccctgaccctggcccacctgaaggagagccagcctgccatctggaacagagatgctgaggaggacatgccccagagggtggtgctgctgcagaggagccagaccaccacagagcgggacagcgacacagatgtggaggaggaggagctgcctgtggagaaccgggaggccgtgctgaaggaccacaccaagatccgggccctggtgcgggcccacagcgagaaggaccagcccccatttggagacagtgatgacagcgtggaggccgacaagagcagccctggcatccacctggagaggagccaggccagcaccaccgtggacatcaacacccaggtggagaaggaggtgcccccaggcagcgccatcatccacatcaagaagcaccaggtgtctgtggagggcaccaaccagacagatgtgaaggctgtgggcggccctgccaagctgctggtggtgtccctggaggaggcctggcccctgcacggggactgtgaaacagatgctgaggagggcaccagcctgacagcctctgtggtggctgatgtgaggaagagccagctgcctgcagaaggagatgctggagctgagtgggccgctgctgtgctgaagcaggagcgggcccacgaggtgggcgcccagggcggcccccctgtggcccaggtggagcaggacctgcccatcagccgggagaacctgacagacctggtggtggacacagacaccctgggggagagcacccagccccagcgggagggcgcccaggtgcccaccggccgggagcgggagcagcacgtgggcggcaccaaggacagcgaggacaactacggggacagcgaggacctggacctgcaggccacccagtgcttcctggagaaccagggcctggaggccgtgcagagcatggaggatgagcccacccaggccttcatgctgaccccaccccaggagctgggccccagccactgcagcttccagaccaccggcaccctggatgagccctgggaggtgctggccacccagcccttctgcctgcgggagagtgaagattctgagacccagccctttgacacccacctggaggcctacggcccctgcctgagccccccccgggccatccctggggaccagcaccctgagagccctgtgcacacagagcccatgggcatccagggccggggccggcagacagtggacaaggtgatgggcatccccaaggagacagctgagcgggtgggccctgagcggggccccctggagcgggagacagagaagctgctgcctgagcggcagacagatgtgactggagaggaggagctgaccaagggcaagcaggaccgggagcagaagcagctgctggcccgggacacccagaggcaggagagtgacaagaatggagagagcgccagccctgagcgggaccgggagagcctgaaggtggagattgagaccagcgaggagatccaggagaagcaggtgcagaagcagaccctgcccagcaaggcctttgagcgggaggtggagaggcctgtggccaacagagaatgtgaccctgctgagctggaggagaaggtgcccaaggtgatcctggagcgggacacccagagaggagagcctgagggcggcagccaggaccagaagggccaggccagcagccccaccccagagcccggggtgggcgctggggacctgcccggccccaccagcgcccctgtgcccagcggcagccagagcggcggccggggcagccctgtgagcccccggcggcaccagaagggcctgctgaactgcaagatgcccccagctgagaaggccagccgcatccgggctgctgagaaggtgtccagaggagaccaggagagcccagatgcctgcctgcccccaacagtgcctgaggccccagccccaccccagaagcccctgaacagccagagccagaagcacctggcccccccacccctgctgagccccctgctgcccagcatcaagcccaccgtgaggaagacccggcaggacggcagccaggaggcccctgaggcccccctgagcagcgagctggagcccttccaccccaagcccaagatccgcaccaggaagagcagcaggatgacccccttccctgccaccagcgctgcccctgagccccaccccagcaccagcacagcccagcctgtgacccccaagcccaccagccaggccaccaggagcaggaccaacagaagctctgtgaagaccccagagcctgtggtgcccacagcccctgagctgcagcccagcaccagcacagaccagcctgtgaccagcgagcccaccagccaggtgacccggggcaggaagagccgcagctctgtgaagaccccagagaccgtggtgcccacagccctggagctgcagcccagcaccagcacagacaggcctgtgaccagcgagcccaccagccaggccacccggggcaggaagaacagaagctctgtgaagaccccagagcctgtggtgcccacagcccctgagctgcagcccagcaccagcacagaccagcctgtgaccagcgagcccacctaccaggccacccggggcaggaagaacagaagctctgtgaagaccccagagcctgtggtgcccacagcccctgagctgcggcccagcaccagcacagacaggcctgtgacccccaagcccaccagcaggaccaccaggagcaggaccaacatgagctctgtgaagaccccagagaccgtggtgcccacagcccctgagctgcagatcagcaccagcacagaccagcctgtgacccccaagcccaccagcaggaccaccaggagcaggaccaacatgagctctgtgaagaaccctgagagcacagtgcccatcgcccctgagctgccccccagcaccagcacagagcagcctgtgaccccagagcccaccagccgggccacccggggcaggaagaacagaagcagcggcaagaccccagagaccctggtgcccacagcccccaagctggagcccagcaccagcacagaccagcctgtgaccccagagcccaccagccaggccacccggggccgcaccaacagaagctctgtgaagaccccagagaccgtggtgcccacagcccctgagctgcagcccagcaccagcacagaccagcctgtgaccccagagcccaccagccaggccacccggggccgcacagacaggagctctgtgaagaccccagagaccgtggtgcccacagcccctgagctgcaggccagcgccagcacagaccagcctgtgaccagcgagcccaccagcaggaccacccggggcaggaagaacagaagctctgtgaagaccccagagaccgtggtgcctgctgcccctgagctgcagcccagcaccagcacagaccagcctgtgaccccagagcccaccagccgggccacccggggccgcaccaacagaagctctgtgaagaccccagagagcatcgtgcccatcgcccctgagctgcagcccagcaccagcaggaaccagctggtgaccccagagcccaccagccgggccacccgctgcaggaccaacagaagctctgtgaagaccccagagcctgtggtgcccacagcccctgagccccaccccaccaccagcacagaccagcctgtgacccccaagctgaccagccgggccaccaggaggaagaccaacagaagctctgtgaagacccccaagcctgtggagcctgctgccagtgacctggagcccttcacccccacagaccagagcgtgaccccagaggccatcgcccagggcggccagagcaagaccctgcggagcagcacagtgcgggccatgcctgtgcccaccaccccagagttccagagccctgtgaccacagaccagcccatcagccctgagcccatcacccagcccagctgcatcaagaggcagagagctgctggcaaccctggcagcctggccgcccccatcgaccacaagccctgcagcgcccccctggagcccaagagccaggccagcaggaaccagcgctggggcgctgtgcgggctgctgagagcctgacagccatccctgagcccgccagcccccagctgctggagacccccatccacgccagccagatccagaaggtggagcccgccggccgcagccgcttcaccccagagctgcagcccaaggccagccagagcaggaagaggagcctggccaccatggacagccccccccaccagaagcagccccagagaggagaggtgtcccagaagacagtcatcatcaaggaggaggaggaggacacagctgagaagccaggcaaggaggaggatgtggtgacccccaagccaggcaagaggaagagggaccaggccgaggaggagcccaaccgcatccccagccgcagcctgcggaggaccaagctgaaccaggagagcacagcccccaaggtgctcttcaccggggtggtggatgcccggggggagagagctgtgctggccctgggcggcagcctggccggcagcgctgctgaggccagccacctggtgacagaccgcatccggaggacagtgaagttcctgtgtgccctgggccggggcatccccatcctgagcctggactggctgcaccagagcaggaaggccggcttcttcctgcccccagatgaatatgtggtgacagatcctgagcaggagaagaactttggcttcagcctgcaggatgccctgagccgggcccgggagcggcggctgctggagggctatgagatctacgtgaccccaggagtgcagcccccaccaccccagatgggagagatcatcagctgctgcggcggcacctacctgcccagcatgcccaggagctacaagccccagagggtggtgatcacctgcccccaggacttcccccactgcagcatccccctgcgggtgggcctgcccctgctgagccctgagttcctgctgactggagtgctgaagcaggaggccaagccagaggcctttgtgctgagccccctggagatgagcagcacctag

SEQ ID NO: 20397 - DNA, 489 bp, synthetic construct
  misc_feature 1..489: note = Description of Artificial Sequence: Synthetic coding sequence
  source 1..489: mol_type = other DNA
atggaggacacccaggccatcgactgggatgtggaggaggaggaggagacagagcagagcagcgagagcctgcgctgcaatgtggagcctgtgggccgcctgcacatcttcagcggggcccacggccctgagaaggacttccccctgcacctgggcaagaatgtggtgggccgcatgccagactgcagcgtggccctgcccttccccagcatcagcaagcagcacgccgagattgagatcctggcctgggacaaggcccccatcctgcgggactgtggcagcctgaatggcacccagatcctgcggccccccaaggtgctgagccctggggtgagccaccggctgcgggaccaggagctgatcctgtttgctgacctgctgtgccagtaccaccggctggatgtgtccctgccctttgtgtcccggggccccctgactgtggaggagaccccccgggtgcagggcgagacccagccccagaggctgtag

SEQ ID NO: 20398 - DNA, 384 bp, synthetic construct
  misc_feature 1..384: note = Description of Artificial Sequence: Synthetic coding sequence
  source 1..384: mol_type = other DNA
atggaggacacccaggccatcgactgggatgtggaggaggaggaggagacagagcagagcagcgagagcctgcgctgcaatgtggagcctgtgggccgcctgcacatcttcagcggggcccacggccctgagaaggacttccccctgcacctgggcaagaatgtggtgggccgcatgccagactgcagcgtggccctgcccttccccagcatcagcaagcagcacgccgagattgagatcctggcctgggacaaggcccccatcctgcgggactgtggcagcctgaatggcacccagatcctgcggccccccaaggtgctgagccctggggtgagccaccggctgcgggaccaggagctgatcctgtttgctgacctgctgtag

SEQ ID NO: 20399 - DNA, 921 bp, synthetic construct
  misc_feature 1..921: note = Description of Artificial Sequence: Synthetic coding sequence
  source 1..921: mol_type = other DNA
tgacatgtgggcggcaccaaggacagcgaggacaactatggagacagcgaggacctggacctgcaggccacccagtgcttcctggagaaccagggcctggaggccgtgcagagcatggaggatgagcccacccaggccttcatgctgaccccaccccaggagctgggccccagccactgcagcttccagaccaccggcctgctgaactgcaagatgcctcctgctgagaaggccagccgcatccgggctgctgagaaggtgtccagaggagaccaggagagcccagatgcctgcctgccccccaccgtgcctgaggccccagccccaccccagaagcccctgaacagccagagccagaagcacctggcccccccacccctgctgagccccctgctgcccagcatcaagcccaccgtgaggaagacccggcaggacggcagccaggaggcccctgaggcccccctgagcagcgagctggagcccttccaccccaagcccaagatccgcaccaggaagagcagcaggatgacccccttccctgccaccagcgctgcccctgagccccaccccagcaccagcacagcccagcctgtgacccccaagcccaccagccaggccaccaggagcaggaccaacagaagctctgtgaagaccccagagcctgtggtgcccacagcccctgagctgcagcccagcaccagcacagaccagcctgtgaccagcgagcccaccagccaggtgacccggggcaggaagagccgcagctctgtgaagaccccagagaccgtggtgcccacagccctggagctgcagcccagcaccagcacagacaggcctgtgaccagcgagcccaccagccaggccacccggggcaggaagaacagaagctctgtgaagaccccagagcctgtggtgccctag

SEQ ID NO: 20400 - DNA, 342 bp, synthetic construct
  misc_feature 1..342: note = Description of Artificial Sequence: Synthetic coding sequence
  source 1..342: mol_type = other DNA
atggaggacacccaggccatcgactgggatgtggaggaggaggaggagacagagcagagcagcgagagcctgcgctgcaatgtggagcctgtgggccgcctgcacatcttcagcggggcccacggccctgagaaggacttccccctgcacctgggcaagaatgtggtgggccgcatgccagactgcagcgtggccctgcccttccccagcatcagcaagcagcacgccgagattgagatcctggcctgggacaaggcccccatcctgcgggactgtggcagcctgaatggcacccagatcctgcggccccccaaggtgctgagccctggggtgagccactag

SEQ ID NO: 20401 - DNA, 5409 bp, synthetic construct
  misc_feature 1..5409: note = Description of Artificial Sequence: Synthetic coding sequence
  source 1..5409: mol_type = other DNA
atggaggacacccaggccatcgactgggatgtggaggaggaggaggagacagagcagagcagcgagagcctgcgctgcaatgtggagcctgtgggccgcctgcacatcttcagcggggcccacggccctgagaaggacttccccctgcacctgggcaagaatgtggtgggccgcatgccagactgcagcgtggccctgcccttccccagcatcagcaagcagcacgccgagattgagatcctggcctgggacaaggcccccatcctgcgggactgtggcagcctgaatggcacccagatcctgcggccccccaaggtgctgagccctggggtgagccaccggctgcgggaccaggagctgatcctgtttgctgacctgctgtgccagtaccaccggctggatgtgtccctgccctttgtgtcccggggccccctgactgtggaggagaccccccgggtgcagggcgagacccagccccagaggctgctgctggccgaggacagcgaggaggaggtggacttcctgtctgagaggaggatggtgaagaagagcaggaccaccagcagcagcgtcatcgtgcctgagagtgatgaggagggccacagccctgtgctgggcggcctgggccccccatttgccttcaacctgaacagcgacacagatgtggaggagggccagcagcctgccacagaggaggccagcagcgctgcccggcggggggccaccgtggaggccaagcagagcgaggccgaggtggtgacagagatccagctggagaaggaccagcccctggtgaaggagaaggacaatgacaccaaggtgaagagaggagctggaaatggagtggtgcctgctggggtcatcctggagaggagccagcccccaggagaagattctgacacagatgtggatgatgacagcaggcctcctggccggcctgctgaggtgcacctggagcgggcccagcccttcggcttcatcgacagcgacacagatgctgaggaggagcgcatcccagccacccctgtggtgatccccatgaagaagaggaagatcttccacggcgtgggcacccggggccctggggcccctggcctggcccacctgcaggagagccaggccggcagtgacacagatgtggaggagggcaaggccccccaggccgtgcccctggagaagagccaggcctccatggtgatcaacagcgacacagatgatgaggaggaggtgtctgctgccctgaccctggcccacctgaaggagagccagcctgccatctggaacagagatgctgaggaggacatgccccagagggtggtgctgctgcagaggagccagaccaccacagagcgggacagcgacacagatgtggaggaggaggagctgcctgtggagaaccgggaggccgtgctgaaggaccacaccaagatccgggccctggtgcgggcccacagcgagaaggaccagcccccatttggagacagtgatgacagcgtggaggccgacaagagcagccctggcatccacctggagaggagccaggccagcaccaccgtggacatcaacacccaggtggagaaggaggtgcccccaggcagcgccatcatccacatcaagaagcaccaggtgtctgtggagggcaccaaccagacagatgtgaaggctgtgggcggccctgccaagctgctggtggtgtccctggaggaggcctggcccctgcacggggactgtgaaacagatgctgaggagggcaccagcctgacagcctctgtggtggctgatgtgaggaagagccagctgcctgcagaaggagatgctggagctgagtgggccgctgctgtgctgaagcaggagcgggcccacgaggtgggcgcccagggcggcccccctgtggcccaggtggagcaggacctgcccatcagccgggagaacctgacagacctggtggtggacacagacaccctgggggagagcacccagccccagcgggagggcgcccaggtgcccaccggccgggagcgggagcagcacgtgggcggcaccaaggacagcgaggacaactacggggacagcgaggacctggacctgcaggccacccagtgcttcctggagaaccagggcctggaggccgtgcagagcatggaggatgagcccacccaggccttcatgctgaccccaccccaggagctgggccccagccactgcagcttccagaccaccggcaccctggatgagccctgggaggtgctggccacccagcccttctgcctgcgggagagtgaagattctgagacccagccctttgacacccacctggaggcctacggcccctgcctgagccccccccgggccatccctggggaccagcaccctgagagccctgtgcacacagagcccatgggcatccagggccggggccggcagacagtggacaaggtgatgggcatccccaaggagacagctgagcgggtgggccctgagcggggccccctggagcgggagacagagaagctgctgcctgagcggcagacagatgtgactggagaggaggagctgaccaagggcaagcaggaccgggagcagaagcagctgctggcccgggacacccagaggcaggagagtgacaagaatggagagagcgccagccctgagcgggaccgggagagcctgaaggtggagattgagaccagcgaggagatccaggagaagcaggtgcagaagcagaccctgcccagcaaggcctttgagcgggaggtggagaggcctgtggccaacagagaatgtgaccctgctgagctggaggagaaggtgcccaaggtgatcctggagcgggacacccagagaggagagcctgagggcggcagccaggaccagaagggccaggccagcagccccaccccagagcccggggtgggcgctggggacctgcccggccccaccagcgcccctgtgcccagcggcagccagagcggcggccggggcagccctgtgagcccccggcggcaccagaagggcctgctgaactgcaagatgcccccagctgagaaggccagccgcatccgggctgctgagaaggtgtccagaggagaccaggagagcccagatgcctgcctgcccccaacagtgcctgaggccccagccccaccccagaagcccctgaacagccagagccagaagcacctggcccccccacccctgctgagccccctgctgcccagcatcaagcccaccgtgaggaagacccggcaggacggcagccaggaggcccctgaggcccccctgagcagcgagctggagcccttccaccccaagcccaagatccgcaccaggaagagcagcaggatgacccccttccctgccaccagcgctgcccccaagctggagcccagcaccagcacagaccagcctgtgaccccagagcccaccagccaggccacccggggccgcaccaacagaagctctgtgaagaccccagagaccgtggtgcccacagcccctgagctgcagcccagcaccagcacagaccagcctgtgaccccagagcccaccagccaggccacccggggccgcacagacaggagctctgtgaagaccccagagaccgtggtgcccacagcccctgagctgcaggccagcgccagcacagaccagcctgtgaccagcgagcccaccagcaggaccacccggggcaggaagaacagaagctctgtgaagaccccagagaccgtggtgcctgctgcccctgagctgcagcccagcaccagcacagaccagcctgtgaccccagagcccaccagccgggccacccggggccgcaccaacagaagctctgtgaagaccccagagagcatcgtgcccatcgcccctgagctgcagcccagcaccagcaggaaccagctggtgaccccagagcccaccagccgggccacccgctgcaggaccaacagaagctctgtgaagaccccagagcctgtggtgcccacagcccctgagccccaccccaccaccagcacagaccagcctgtgacccccaagctgaccagccgggccaccaggaggaagaccaacagaagctctgtgaagacccccaagcctgtggagcctgctgccagtgacctggagcccttcacccccacagaccagagcgtgaccccagaggccatcgcccagggcggccagagcaagaccctgcggagcagcacagtgcgggccatgcctgtgcccaccaccccagagttccagagccctgtgaccacagaccagcccatcagccctgagcccatcacccagcccagctgcatcaagaggcagagagctgctggcaaccctggcagcctggccgcccccatcgaccacaagccctgcagcgcccccctggagcccaagagccaggccagcaggaaccagcgctggggcgctgtgcgggctgctgagagcctgacagccatccctgagcccgccagcccccagctgctggagacccccatccacgccagccagatccagaaggtggagcctgctggccgcagccgcttcaccccagagctgcagcccaaggccagccagagcaggaagaggagcctggccaccatggacagccccccccaccagaagcagccccagagaggagaggtgtcccagaagacagtcatcatcaaggaggaggaggaggacacagctgagaagccaggcaaggaggaggatgtggtgacccccaagccaggcaagaggaagagggaccaggccgaggaggagcccaaccgcatccccagccgcagcctgcggaggaccaagctgaaccaggagagcacagcccccaaggtgctcttcaccggggtggtggatgcccggggggagagagctgtgctggccctgggcggcagcctggccggcagcgctgctgaggccagccacctggtgacagaccgcatcagaagaacagtgaagttcctgtgtgccctgggccggggcatccccatcctgagcctggactggctgcaccagagcaggaaggccggcttcttcctgcccccagatgaatatgtggtgacagatcctgagcaggagaagaactttggcttcagcctgcaggatgccctgagccgggcccgggagcggcggctgctggagggctatgagatctacgtgaccccaggagtgcagcccccaccaccccagatgggagagatcatcagctgctgcggcggcacctacctgcccagcatgcccaggagctacaagccccagagggtggtgatcacctgcccccaggacttcccccactgcagcatccccctgcgggtgggcctgcccctgctgagccctgagttcctgctgactggagtgctgaagcaggaggccaagccagaggcctttgtgctgagccccctggagatgagcagcacctag

SEQ ID NO: 20402 - DNA, 666 bp, synthetic construct
  misc_feature 1..666: note = Description of Artificial Sequence: Synthetic coding sequence
  source 1..666: mol_type = other DNA
atggaggacacccaggccatcgactgggatgtggaggaggaggaggagacagagcagagcagcgagagcctgcgctgcaatgtggagcctgtgggccgcctgcacatcttcagcggggcccacggccctgagaaggacttccccctgcacctgggcaagaatgtggtgggccgcatgccagactgcagcgtggccctgcccttccccagcatcagcaagcagcacgccgagattgagatcctggcctgggacaaggcccccatcctgcgggactgtggcagcctgaatggcacccagatcctgagcagcagcctgcccccaccccagaccagcctgctgcccctgagcctgcggctgcggctgctgggggaggagcagattgaccccctgagccggctgctgaagcagctgagcccccagcccctgagctaccgcctgcccccaccccagaccagcctgagccccctgagcccccacctgggccccctgggggaggagaagattggccccctgagccggcccctgaagcagctgtgcccccagcccctgagcagcagcctgcccccaccccagaccaacctgagccccctgagcccccacctgggccccctgggcgccggccagatcggccccctgagccggcccctgaaccagctgagcctgtag

SEQ ID NO: 20403 - DNA, 738 bp, synthetic construct
  misc_feature 1..738: note = Description of Artificial Sequence: Synthetic coding sequence
  source 1..738: mol_type = other DNA
atggaggacacccaggccatcgactgggatgtggaggaggaggaggagacagagcagagcagcgagagcctgcgctgcaatgtggagcctgtgggccgcctgcacatcttcagcggggcccacggccctgagaaggacttccccctgcacctgggcaagaatgtggtgggccgcatgccagactgcagcgtggccctgcccttccccagcatcagcaagcagcacgccgagattgagatcctggcctgggacaaggcccccatcctgcgggactgtggcagcctgaatggcacccagatcctgcggccccccaaggtgctgagccctggggtgagccaccggctgcgggaccaggagctgatcctgtttgctgacctgctgtgccagtaccaccggctggatgtgtccctgccctttgtgtcccggggccccctgactgtggaggagaccccccgggtgcagggcgagacccagccccagaggctgctgctggccgaggacagcgaggaggaggtggacttcctgtctgagaggaggatggtgaagaagagcaggaccaccagcagcagcgtcatcgtgcctgagagtgatgaggagggccacagccctgtgctgggcggcctgggccccccatttgccttcaacctgaacagcgacacagatgtggaggagggccagcagcctgccacagaggaggccagcagcgctgcccggcggggggccaccgtggaggcctag

SEQ ID NO: 20404 - DNA, 735 bp, synthetic construct
  misc_feature 1..735: note = Description of Artificial Sequence: Synthetic coding sequence
  source 1..735: mol_type = other DNA
atggaggacacccaggccatcgactgggatgtggaggaggaggaggagacagagcagagcagcgagagcctgcgctgcaatgtggagcctgtgggccgcctgcacatcttcagcggggcccacggccctgagaaggacttccccctgcacctgggcaagaatgtggtgggccgcatgccagactgcagcgtggccctgcccttccccagcatcagcaagcagcacgccgagattgagatcctggcctgggacaaggcccccatcctgcgggactgtggcagcctgaatggcacccagatcctgcggccccccaaggtgctgagccctggggtgagccaccggctgcgggaccaggagctgatcctgtttgctgacctgctgtgccagtaccaccggctggatgtgtccctgccctttgtgtcccggggccccctgactgtggaggagaccccccgggtgcagggcgagacccagccccagaggctgctgctggccgaggacagcgaggaggaggtggacttcctgtctgagaggaggatggtgaagaagagcaggaccaccagcagcagcgtcatcgtgcctgagagtgatgaggagggccacagccctgtgctgggcggcctgggccccccatttgccttcaacctgaacagcgacacagatgtggaggagggccagcagccccacagaggaggcctgctgagctgccagaagcgctgccactgccggggctag

SEQ ID NO: 20405 - DNA, 5478 bp, synthetic construct
  misc_feature 1..5478: note = Description of Artificial Sequence: Synthetic coding sequence
  source 1..5478: mol_type = other DNA
atggaggacacccaggccatcgactgggatgtggaggaggaggaggagacagagcagagcagcgagagcctgcgctgcaatgtggagcctgtgggccgcctgcacatcttcagcggggcccacggccctgagaaggacttccccctgcacctgggcaagaatgtggtgggccgcatgccagactgcagcgtggccctgcccttccccagcatcagcaagcagcacgccgagattgagatcctggcctgggacaaggcccccatcctgcgggactgtggcagcctgaatggcacccagatcctgcggccccccaaggtgctgagccctggggtgagccaccggctgcgggaccaggagctgatcctgtttgctgacctgctgtgccagtaccaccggctggatgtgtccctgccctttgtgtcccggggccccctgactgtggaggagaccccccgggtgcagggcgagacccagccccagaggctgctgctggccgaggacagcgaggaggaggtggacttcctgtctgagaggaggatggtgaagaagagcaggaccaccagcagcagcgtcatcgtgcctgagagtgatgaggagggccacagccctgtgctgggcggcctgggccccccatttgccttcaacctgaacagcgacacagatgtggaggagggccagcagcctgccacagaggaggccagcagcgctgcccggcggggggccaccgtggaggccaagcagagcgaggccgaggtggtgacagagatccagctggagaaggaccagcccctggtgaaggagaaggacaatgacaccaaggtgaagagaggagctggaaatggagtggtgcctgctggggtcatcctggagaggagccagcccccaggagaagattctgacacagatgtggatgatgacagcaggcctcctggccggcctgctgaggtgcacctggagcgggcccagcccttcggcttcatcgacagcgacacagatgctgaggaggagcgcatcccagccacccctgtggtgatccccatgaagaagaggaagatcttccacggcgtgggcacccggggccctggggcccctggcctggcccacctgcaggagagccaggccggcagtgacacagatgtggaggagggcaaggccccccaggccgtgcccctggagaagagccaggcctccatggtgatcaacagcgacacagatgatgaggaggaggtgtctgctgccctgaccctggcccacctgaaggagagccagcctgccatctggaacagagatgctgaggaggacatgccccagagggtggtgctgctgcagaggagccagaccaccacagagcgggacagcgacacagatgtggaggaggaggagctgcctgtggagaaccgggaggccgtgctgaaggaccacaccaagatccgggccctggtgcgggcccacagcgagaaggaccagcccccatttggagacagtgatgacagcgtggaggccgacaagagcagccctggcatccacctggagaggagccaggccagcaccaccgtggacatcaacacccaggtggagaaggaggtgcccccaggcagcgccatcatccacatcaagaagcaccaggtgtctgtggagggcaccaaccagacagatgtgaaggctgtgggcggccctgccaagctgctggtggtgtccctggaggaggcctggcccctgcacggggactgtgaaacagatgctgaggagggcaccagcctgacagcctctgtggtggctgatgtgaggaagagccagctgcctgcagaaggagatgctggagctgagtgggccgctgctgtgctgaagcaggagcgggcccacgaggtgggcgcccagggcggcccccctgtggcccaggtggagcaggacctgcccatcagccgggagaacctgacagacctggtggtggacacagacaccctgggggagagcacccagccccagcgggagggcgcccaggtgcccaccggccgggagcgggagcagcacgtgggcggcaccaaggacagcgaggacaactacggggacagcgaggacctggacctgcaggccacccagtgcttcctggagaaccagggcctggaggccgtgcagagcatggaggatgagcccacccaggccttcatgctgaccccaccccaggagctgggccccagccactgcagcttccagaccaccggcctgctgaactgcaagatgcccccagctgagaaggccagccgcatccgggctgctgagaaggtgtccagaggagaccaggagagcccagatgcctgcctgcccccaacagtgcctgaggccccagccccaccccagaagcccctgaacagccagagccagaagcacctggcccccccacccctgctgagccccctgctgcccagcatcaagcccaccgtgaggaagacccggcaggacggcagccaggaggcccctgaggcccccctgagcagcgagctggagcccttccaccccaagcccaagatccgcaccaggaagagcagcaggatgacccccttccctgccaccagcgctgcccctgagccccaccccagcaccagcacagcccagcctgtgacccccaagcccaccagccaggccaccaggagcaggaccaacagaagctctgtgaagaccccagagcctgtggtgcccacagcccctgagctgcagcccagcaccagcacagaccagcctgtgaccagcgagcccaccagccaggtgacccggggcaggaagagccgcagctctgtgaagaccccagagaccgtggtgcccacagccctggagctgcagcccagcaccagcacagacaggcctgtgaccagcgagcccaccagccaggccacccggggcaggaagaacagaagctctgtgaagaccccagagcctgtggtgcccacagcccctgagctgcagcccagcaccagcacagaccagcctgtgaccagcgagcccacctaccaggccacccggggcaggaagaacagaagctctgtgaagaccccagagcctgtggtgcccacagcccctgagctgcggcccagcaccagcacagacaggcctgtgacccccaagcccaccagcaggaccaccaggagcaggaccaacatgagctctgtgaagaccccagagaccgtggtgcccacagcccctgagctgcagatcagcaccagcacagaccagcctgtgacccccaagcccaccagcaggaccaccaggagcaggaccaacatgagctctgtgaagaaccctgagagcacagtgcccatcgcccctgagctgccccccagcaccagcacagagcagcctgtgaccccagagcccaccagccgggccacccggggcaggaagaacagaagcagcggcaagaccccagagaccctggtgcccacagcccccaagctggagcccagcaccagcacagaccagcctgtgaccccagagcccaccagccaggccacccggggccgcaccaacagaagctctgtgaagaccccagagaccgtggtgcccacagcccctgagctgcagcccagcaccagcacagaccagcctgtgaccccagagcccaccagccaggccacccggggccgcacagacaggagctctgtgaagaccccagagaccgtggtgcccacagcccctgagctgcaggccagcgccagcacagaccagcctgtgaccagcgagcccaccagcaggaccacccggggcaggaagaacagaagctctgtgaagaccccagagaccgtggtgcctgctgcccctgagctgcagcccagcaccagcacagaccagcctgtgaccccagagcccaccagccgggccacccggggccgcaccaacagaagctctgtgaagaccccagagagcatcgtgcccatcgcccctgagctgcagcccagcaccagcaggaaccagctggtgaccccagagcccaccagccgggccacccgctgcaggaccaacagaagctctgtgaagaccccagagcctgtggtgcccacagcccctgagccccaccccaccaccagcacagaccagcctgtgacccccaagctgaccagccgggccaccaggaggaagaccaacagaagctctgtgaagacccccaagcctgtggagcctgctgccagtgacctggagcccttcacccccacagaccagagcgtgaccccagaggccatcgcccagggcggccagagcaagaccctgcggagcagcacagtgcgggccatgcctgtgcccaccaccccagagttccagagccctgtgaccacagaccagcccatcagccctgagcccatcacccagcccagctgcatcaagaggcagagagctgctggcaaccctggcagcctggccgcccccatcgaccacaagccctgcagcgcccccctggagcccaagagccaggccagcaggaaccagcgctggggcgctgtgcgggctgctgagagcctgacagccatccctgagcccgccagcccccagctgctggagacccccatccacgccagccagatccagaaggtggagcccgccggccgcagccgcttcaccccagagctgcagcccaaggccagccagagcaggaagaggagcctggccaccatggacagccccccccaccagaagcagccccagagaggagaggtgtcccagaagacagtcatcatcaaggaggaggaggaggacacagctgagaagccaggcaaggaggaggatgtggtgacccccaagccaggcaagaggaagagggaccaggccgaggaggagcccaaccgcatccccagccgcagcctgcggaggaccaagctgaaccaggagagcacagcccccaaggtgctcttcaccggggtggtggatgcccggggggagagagctgtgctggccctgggcggcagcctggccggcagcgctgctgaggccagccacctggtgacagaccgcatccggaggacagtgaagttcctgtgtgccctgggccggggcatccccatcctgagcctggactggctgcaccagagcaggaaggccggcttcttcctgcccccagatgaatatgtggtgacagatcctgagcaggagaagaactttggcttcagcctgcaggatgccctgagccgggcccgggagcggcggctgctggagggctatgagatctacgtgaccccaggagtgcagcccccaccaccccagatgggagagatcatcagctgctgcggcggcacctacctgcccagcatgcccaggagctacaagccccagagggtggtgatcacctgcccccaggacttcccccactgcagcatccccctgcgggtgggcctgcccctgctgagccctgagttcctgctgactggagtgctgaagcaggaggccaagccagaggcctttgtgctgagccccctggagatgagcagcacctag

SEQ ID NO: 20406 - DNA, 4968 bp, synthetic construct
  misc_feature 1..4968: note = Description of Artificial Sequence: Synthetic coding sequence
  source 1..4968: mol_type = other DNA
atgtaccaccggctggatgtgtccctgccctttgtgtcccggggccccctgactgtggaggagaccccccgggtgcagggcgagacccagccccagaggctgctgctggccgaggacagcgaggaggaggtggacttcctgtctgagaggaggatggtgaagaagagcaggaccaccagcagcagcgtcatcgtgcctgagagtgatgaggagggccacagccctgtgctgggcggcctgggccccccatttgccttcaacctgaacagcgacacagatgtggaggagggccagcagcctgccacagaggaggccagcagcgctgcccggcggggggccaccgtggaggccaagcagagcgaggccgaggtggtgacagagatccagctggagaaggaccagcccctggtgaaggagaaggacaatgacaccaaggtgaagagaggagctggaaatggagtggtgcctgctggggtcatcctggagaggagccagcccccaggagaagattctgacacagatgtggatgatgacagcaggcctcctggccggcctgctgaggtgcacctggagcgggcccagcccttcggcttcatcgacagcgacacagatgctgaggaggagcgcatcccagccacccctgtggtgatccccatgaagaagaggaagatcttccacggcgtgggcacccggggccctggggcccctggcctggcccacctgcaggagagccaggccggcagtgacacagatgtggaggagggcaaggccccccaggccgtgcccctggagaagagccaggcctccatggtgatcaacagcgacacagatgatgaggaggaggtgtctgctgccctgaccctggcccacctgaaggagagccagcctgccatctggaacagagatgctgaggaggacatgccccagagggtggtgctgctgcagaggagccagaccaccacagagcgggacagcgacacagatgtggaggaggaggagctgcctgtggagaaccgggaggccgtgctgaaggaccacaccaagatccgggccctggtgcgggcccacagcgagaaggaccagcccccatttggagacagtgatgacagcgtggaggccgacaagagcagccctggcatccacctggagaggagccaggccagcaccaccgtggacatcaacacccaggtggagaaggaggtgcccccaggcagcgccatcatccacatcaagaagcaccaggtgtctgtggagggcaccaaccagacagatgtgaaggctgtgggcggccctgccaagctgctggtggtgtccctggaggaggcctggcccctgcacggggactgtgaaacagatgctgaggagggcaccagcctgacagcctctgtggtggctgatgtgaggaagagccagctgcctgcagaaggagatgctggagctgagtgggccgctgctgtgctgaagcaggagcgggcccacgaggtgggcgcccagggcggcccccctgtggcccaggtggagcaggacctgcccatcagccgggagaacctgacagacctggtggtggacacagacaccctgggggagagcacccagccccagcgggagggcgcccaggtgcccaccggccgggagcgggagcagcacgtgggcggcaccaaggacagcgaggacaactacggggacagcgaggacctggacctgcaggccacccagtgcttcctggagaaccagggcctggaggtgcagagcatggaggatgagcccacccaggccttcatgctgaccccaccccaggagctgggccccagccactgcagcttccagaccaccggcctgctgaactgcaagatgcctcctgctgagaaggccagccgcatccgggctgctgagaaggtgtccagaggagaccaggagagcccagatgcctgcctgccccccaccgtgcctgaggccccagccccaccccagaagcccctgaacagccagagccagaagcacctggcccccccacccctgctgagccccctgctgcccagcatcaagcccaccgtgaggaagacccggcaggacggcagccaggaggcccctgaggcccccctgagcagcgagctggagcccttccaccccaagcccaagatccgcaccaggaagagcagcaggatgacccccttccctgccaccagcgctgcccctgagccccaccccagcaccagcacagcccagcctgtgacccccaagcccaccagccaggccaccaggagcaggaccaacagaagctctgtgaagaccccagagcctgtggtgcccacagcccctgagctgcagcccagcaccagcacagaccagcctgtgaccagcgagcccaccagccaggtgacccggggcaggaagagccgcagctctgtgaagaccccagagaccgtggtgcccacagccctggagctgcagcccagcaccagcacagacaggcctgtgaccagcgagcccaccagccaggccacccggggcaggaagaacagaagctctgtgaagaccccagagcctgtggtgcccacagcccctgagctgcagcccagcaccagcacagaccagcctgtgaccagcgagcccacctaccaggccacccggggcaggaagaacagaagctctgtgaagaccccagagcctgtggtgcccacagcccctgagctgcggcccagcaccagcacagacaggcctgtgacccccaagcccaccagcaggaccaccaggagcaggaccaacatgagctctgtgaagaaccctgagagcacagtgcccatcgcccctgagctgccccccagcaccagcacagagcagcctgtgaccccagagcccaccagccgggccacccggggcaggaagaacagaagcagcggcaagaccccagagaccctggtgcccacagcccccaagctggagcccagcaccagcacagaccagcctgtgaccccagagcccaccagccaggccacccggggccgcaccaacagaagctctgtgaagaccccagagaccgtggtgcccacagcccctgagctgcagcccagcaccagcacagaccagcctgtgaccccagagcccaccagccaggccacccggggccgcacagacaggagctctgtgaagaccccagagaccgtggtgcccacagcccctgagctgcaggccagcgccagcacagaccagcctgtgaccagcgagcccaccagcaggaccacccggggcaggaagaacagaagctctgtgaagaccccagagaccgtggtgcctgctgcccctgagctgcagcccagcaccagcacagaccagcctgtgaccccagagcccaccagccgggccacccggggccgcaccaacagaagctctgtgaagaccccagagagcatcgtgcccatcgcccctgagctgcagcccagcaccagcaggaaccagctggtgaccccagagcccaccagccgggccacccgctgcaggaccaacagaagctctgtgaagaccccagagcctgtggtgcccacagcccctgagccccaccccaccaccagcacagaccagcctgtgacccccaagctgaccagccgggccaccaggaggaagaccaacagaagctctgtgaagacccccaagcctgtggagcctgctgccagtgacctggagcccttcacccccacagaccagagcgtgaccccagaggccatcgcccagggcggccagagcaagaccctgcggagcagcacagtgcgggccatgcctgtgcccaccaccccagagttccagagccctgtgaccacagaccagcccatcagccctgagcccatcacccagcccagctgcatcaagaggcagagagctgctggcaaccctggcagcctggccgcccccatcgaccacaagccctgcagcgcccccctggagcccaagagccaggccagcaggaaccagcgctggggcgctgtgcgggctgctgagagcctgacagccatccctgagcccgccagcccccagctgctggagacccccatccacgccagccagatccagaaggtggagcccgccggccgcagccgcttcaccccagagctgcagcccaaggccagccagagcaggaagaggagcctggccaccatggacagccccccccaccagaagcagccccagagaggagaggtgtcccagaagacagtcatcatcaaggaggaggaggaggacacagctgagaagccaggcaaggaggaggatgtggtgacccccaagccaggcaagaggaagagggaccaggccgaggaggagcccaaccgcatccccagccgcagcctgcggaggaccaagctgaaccaggagagcacagcccccaaggtgctcttcaccggggtggtggatgcccggggggagagagctgtgctggccctgggcggcagcctggccggcagcgctgctgaggccagccacctggtgacagaccgcatccggaggacagtgaagttcctgtgtgccctgggccggggcatccccatcctgagcctggactggctgcaccagagcaggaaggccggcttcttcctgcccccagatgaatatgtggtgacagatcctgagcaggagaagaactttggcttcagcctgcaggatgccctgagccgggcccgggagcggcggctgctggagggctatgagatctacgtgaccccaggagtgcagcccccaccaccccagatgggagagatcatcagctgctgcggcggcacctacctgcccagcatgcccaggagctacaagccccagagggtggtgatcacctgcccccaggacttcccccactgcagcatccccctgcgggtgggcctgcccctgctgagccctgagttcctgctgactggagtgctgaagcaggaggccaagccagaggcctttgtgctgagccccctggagatgagcagcacctag

SEQ ID NO: 20407 - DNA, 1941 bp, synthetic construct
  misc_feature 1..1941: note = Description of Artificial Sequence: Synthetic coding sequence
  source 1..1941: mol_type = other DNA
atgggcctgccccggctggtgtgtgccttcctgctggccgcctgctgctgctgcccccgggtggccggcgtgcctggagaggccgagcagcctgcccctgagctggtggaggtggaggtgggcagcacagccctgctgaagtgtggcctgagccagagccagggcaacctgagccacgtggactggttctctgtgcacaaggagaagaggaccctcatcttccgggtgcggcagggccagggccagagcgagcctggagaatatgagcagaggctgagcctgcaggacagaggagccaccctggccctgacccaggtgaccccccaggatgagcgcatcttcctgtgccagggcaagaggcccaggagccaggagtaccgcatccagctgcgggtgtacaaggcccctgaggagcccaacatccaggtgaaccccctgggcatccctgtgaacagcaaggagcctgaggaggtggccacctgtgtgggcagaaatggctaccccatcccccaggtgatctggtacaagaatggccggcccctgaaggaggagaagaacagagtgcacatccagagcagccagacagtggagagcagcggcctgtacaccctgcagagcatcctgaaggcccagctggtgaaggaggacaaggatgcccagttctactgtgagctgaactaccgcctgcccagcggcaaccacatgaaggagagccgggaggtgacagtgcctgtgttctaccccacagagaaggtgtggctggaggtggagcctgtgggcatgctgaaggagggggacagagtggagatccgctgcctggctgatggcaaccccccaccccacttcagcatcagcaagcagaaccccagcacccgggaggccgaggaggagaccaccaatgacaacggggtgctggtgctggagcccgccaggaaggagcacagcggccgctatgagtgccagggcctggacctggacaccatgatcagcctgctgtctgagccccaggagctgctggtgaactacgtgtctgatgtgcgggtgtccccagctgcccctgagcggcaggagggcagcagcctgaccctgacctgtgaggccgagagcagccaggacctggagttccagtggctgcgggaggagaccggccaggtgctggagcggggccctgtgctgcagctgcatgacctgaagcgggaggccggcggcggctaccgctgtgtggcctctgtgcccagcatccctggcctgaacagaacccagctggtgaatgtggccatcttcggccccccctggatggccttcaaggagaggaaggtgtgggtgaaggagaacatggtgctgaacctgagctgtgaggccagcggccacccccggcccaccatctcctggaatgtgaatggaacagccagcgagcaggaccaggacccccagagggtgctgagcaccctgaatgtgctggtgaccccagagctgctggagactggagtggagtgcacagccagcaatgacctgggcaagaacaccagcatcctcttcctggagctggtgaacctgaccaccctgaccccagacagcaacaccaccaccggcctgagcaccagcacagccagcccccacacccgggccaacagcaccagcacagagaggaagctgcctgagcctgagagcagaggagtggtgattgtggccgtcatcgtgtgcatcctggtgctggccgtgctgggcgctgtgctgtacttcctgtacaagaagggcaagctgccctgcagaagaagtggcaagcaggagatcaccctgccccccagcaggaagtctgagctggtggtggaggtgaagagtgacaagctgcctgaggagatgggcctgctgcagggcagcagcggggacaagagggcccctggggaccagggcgagaagtacatcgacctgcggcactag

SEQ ID NO: 20408 - DNA, 1584 bp, synthetic construct
  misc_feature 1..1584: note = Description of Artificial Sequence: Synthetic coding sequence
  source 1..1584: mol_type = other DNA
atggtgtacatcgtgcggcagttcctgctgtacaacgtgtctggctctgtgtacctggaccagctgattgtgctgctgacagccaagttcagcatcctgagaattgctggcagccgggtgcaccacagccccttcagcggccacctggatggctgcagcttcctgagcctgcagcacagcctgcacaccagcctggacatgagcagacatgaaaatgtgttcctgggcctgaccctgagcagcaagtctgctggcctgaagggcttccagctggcctttgtgcccggcctgctgcagggcactggaggctacctggatggccccctgcccacccctgtggacaacccccgggtgggcctggaggtgggcctgcggctgagcctgccccccctgcccccctgccctggggtgcacatccagagcagccagacagtggagagcagcggcctgtacaccctgcagagcatcctgaaggcccagctggtgaaggaggacaaggatgcccagttctactgtgagctgaactaccgcctgcccagcggcaaccacatgaaggagagccgggaggtgacagtgcctgtgttctaccccacagagaaggtgtggctggaggtggagcctgtgggcatgctgaaggagggggacagagtggagatccgctgcctggctgatggcaaccccccaccccacttcagcatcagcaagcagaaccccagcacccgggaggccgaggaggagaccaccaatgacaatggagtgctggtgctggagcccgccaggaaggagcacagcggccgctatgagtgccagggcctggacctggacaccatgatcagcctgctgtctgagccccaggagctgctggtgaactacgtgtctgatgtgcgggtgtccccagctgcccctgagcggcaggagggcagcagcctgaccctgacctgtgaggccgagagcagccaggacctggagttccagtggctgcgggaggagaccggccaggtgctggagcggggccctgtgctgcagctgcatgacctgaagcgggaggccggcggcggctaccgctgtgtggcctctgtgcccagcatccctggcctgaacagaacccagctggtgaatgtggccatctttggaccaccctggatggccttcaaggagaggaaggtgtgggtgaaggagaacatggtgctgaacctgagctgtgaggccagcggccacccccggcccaccatctcctggaatgtgaatggaacagccagcgagcaggaccaggacccccagagggtgctgagcaccctgaatgtgctggtgaccccagagctgctggagaccggggtggagtgcacagccagcaatgacctgggcaagaacaccagcatcctcttcctggagctggtgaacctgaccaccctgaccccagacagcaacaccaccaccggcctgagcaccagcacagccagcccccacacccgggccaacagcaccagcacaggcaagccaggcctggcccgggagcagggctgtgcccgggccagcttcctgccctgccccagccctgagagccctgtgcagaagggggagtag

SEQ ID NO: 20409 - DNA, 141 bp, synthetic construct
  misc_feature 1..141: note = Description of Artificial Sequence: Synthetic coding sequence
  source 1..141: mol_type = other DNA
ggtgtggtgattgtggccgtcatcgtgtgcatcctggtgctggccgtgctgggcgctgtgctgtacttcctgtacaagaagggcaagctgccctgcagaagaagtggcaagcaggagatggagaggaacaccagcatctag

SEQ ID NO: 20410 - DNA, 2253 bp, synthetic construct
  misc_feature 1..2253: note = Description of Artificial Sequence: Synthetic coding sequence
  source 1..2253: mol_type = other DNA
atgggcaagtctgagagccagatggacatcacagacatcaacacccccaagcccaagaagaagcagcgctggacccccctggagatcagcctgtctgtgctggtgctgctgctgaccatcatcgctgtgaccatgattgccctgtatgccacctatgatgatggcatctgcaagagcagtgactgcatcaagtctgctgcccggctcatccagaacatggatgccaccacagagccctgcacagacttcttcaagtatgcctgtggcggctggctgaagagaaatgtcatccctgagaccagcagccgctatggcaactttgacatcctgagagatgagctggaggtggtgctgaaggatgtgctgcaggagcccaagacagaggacatcgtggccgtgcagaaggccaaggccctgtaccgcagctgcatcaatgaaagtgccatcgacagcagaggaggagagcccctgctgaagctgctgcctgacatctacggctggcctgtggccacagagaactgggagcagaagtacggggcctcctggacagctgagaaggccatcgcccagctgaacagcaaatatggcaagaaggtgctgatcaacctgtttgtgggcacagatgacaagaacagcgtgaaccacgtgatccacatcgaccagccccggctgggcctgcccagccgggactactatgaatgtacaggcatctacaaggaggcctgcacagcctacgtggacttcatgatctctgtggcccggctcatccggcaggaggagcggctgcccattgatgagaaccagctggccctggagatgaacaaggtgatggagctggagaaggagatcgccaatgccacagccaagccagaagatagaaatgaccccatgctgctgtacaacaagatgaccctggcccagatccagaacaacttcagcctggagatcaatggcaagcccttctcctggctgaacttcaccaatgagatcatgagcacagtgaacatcagcatcaccaatgaggaggatgtggtggtgtatgcccctgagtacctgaccaagctgaagcccatcctgaccaagtacagcgcccgggacctgcagaacctgatgtcctggaggttcatcatggacctggtgagcagcctgagcaggacctacaaggagagcagaaatgccttcaggaaggccctgtatggcaccaccagcgagacagccacctggaggcgctgtgccaactacgtgaatggaaacatggagaatgctgtgggccgcctgtatgtggaggccgcctttgctggggagagcaagcacgtggtggaggacctgattgcccagatccgggaggtgttcatccagaccctggatgacctgacctggatggatgctgagaccaagaagagagctgaggagaaggccctggccatcaaggagcgcatcggctacccagatgacatcgtgtccaatgacaacaagctgaacaatgagtacctggagctgaactacaaggaggatgagtactttgagaacatcatccagaacctgaagttcagccagagcaagcagctgaagaagctgcgggagaaggtggacaaggatgagtggatctctggagctgctgtggtgaatgccttctacagcagcggcaggaaccagatcgtgtttcctgctggcatcctgcagccccccttcttcagcgcccagcagagcaacagcctgaactatggaggcatcggcatggtgattggccacgagatcacccacggctttgatgacaatggaagaaacttcaacaaggatggagacctggtggactggtggacccagcagagcgccagcaacttcaaggagcagagccagtgcatggtgtaccagtatggcaacttctcctgggacctggccggcggccagcacctgaatggcatcaacaccctgggagaaaatattgctgacaatggaggcctgggccaggcctaccgggcctaccagaactacatcaagaagaatggagaggagaagctgctgcccggcctggacctgaaccacaagcagctgttcttcctgaactttgcccaggtgtggtgtggcacctacagaccagaatatgctgtgaacagcatcaagacagatgtgcacagccctggcaacttccgcatcatcggcaccctgcagaacagcgctgagttcagcgaggccttccactgcaggaagaacagctacatgaaccctgagaagaagtgccgggtgtggtag

SEQ ID NO: 20411 - DNA, 2253 bp, synthetic construct; identical to SEQ ID NO: 20410
  misc_feature 1..2253: note = Description of Artificial Sequence: Synthetic coding sequence
  source 1..2253: mol_type = other DNA

SEQ ID NO: 20412 - DNA, 2253 bp, synthetic construct; identical to SEQ ID NO: 20410
  misc_feature 1..2253: note = Description of Artificial Sequence: Synthetic coding sequence
  source 1..2253: mol_type = other DNA

SEQ ID NO: 20413 - DNA, 486 bp, synthetic construct
  misc_feature 1..486: note = Description of Artificial Sequence: Synthetic coding sequence
  source 1..486: mol_type = other DNA
atgggcaagtctgagagccagatggacatcacagacatcaacacccccaagcccaagaagaagcagcgctggacccccctggagatcagcctgtctgtgctggtgctgctgctgaccatcatcgctgtgaccatgattgccctgtatgccacctatgatgatggcatctgcaagagcagtgactgcatcaagtctgctgcccggctcatccagaacatggatgccaccacagagccctgcacagacttcttcaagtatgcctgtggcggctggctgaagagaaatgtcatccctgagaccagcagccgctatggcaactttgacatcctgagagatgagctggaggtggtgctgaaggatgtgctgcaggagcccaagacagaggacatcgtggccgtgcagaaggccaaggccctgtaccgcagctgcatcaatgaaagtgccatcgacagcagaggaggagagcccctgctgaagctgctgtag

SEQ ID NO: 20414 - DNA, 282 bp, synthetic construct
  misc_feature 1..282: note = Description of Artificial Sequence: Synthetic coding sequence
  source 1..282: mol_type = other DNA
atgggcaagtctgagagccagatggacatcacagacatcaacacccccaagcccaagaagaagcagcgctggacccccctggagatcagcctgtctgtgctggtgctgctgctgaccatcatcgctgtgaccatgattgccctgtatgccacctatgatgatggcatctgcaagagcagtgactgcatcaagtctgctgcccggctcatccagaacatggatgccaccacagagccctgcacagacttcttcaagtatgcctgtggcggctggctgaagtag

SEQ ID NO: 20415 - DNA, 702 bp, synthetic construct
  misc_feature 1..702: note = Description of Artificial Sequence: Synthetic coding sequence
  source 1..702: mol_type = other DNA
atgggcaagtctgagagccagatggacatcacagacatcaacacccccaagcccaagaagaagcagcgctggacccccctggagatcagcctgtctgtgctggtgctgctgctgaccatcatcgctgtgaccatgattgccctgtatgccacctatgatgatggcatctgcaagagcagtgactgcatcaagtctgctgcccggctcatccagaacatggatgccaccacagagccctgcacagacttcttcaagtatgcctgtggcggctggctgaagagaaatgtcatccctgagaccagcagccgctatggcaactttgacatcctgagagatgagctggaggtggtgctgaaggatgtgctgcaggagcccaagacagaggacatcgtggccgtgcagaaggccaaggccctgtaccgcagctgcatcaatgaaagtgccatcgacagcagaggaggagagcccctgctgaagctgctgcctgacatctacggctggcctgtggccacagagaactgggagcagaagtacggggcctcctggacagctgagaaggccatcgcccagctgaacagcaaatatggcaagaaggtgctgatcaacctgtttgtgggcacagatgacaagaacagcgtgaaccacgtgatccacatcgaccagccccggctgggcctgcccagccgggactactatgaatag

SEQ ID NO: 20416 - DNA, 360 bp, synthetic construct
  misc_feature 1..360: note = Description of Artificial Sequence: Synthetic coding sequence
  source 1..360: mol_type = other DNA
atgggcaagtctgagagccagatggacatcacagacatcaacacccccaagcccaagaagaagcagcgctggacccccctggagatcagcctgtctgtgctggtgctgctgctgaccatcatcgctgtgaccatgattgccctgtatgccacctatgatgatggcatctgcaagagcagtgactgcatcaagtctgctgcccggctcatccagaacatggatgccaccacagagccctgcacagacttcttcaagtatgcctgtggcggctggctgaagagaaatgtcatccctgagaccagcagccgctatggcaactttgacatcctgagagatgagctggaggtggtgctgaagtag

SEQ ID NO: 20417 - DNA, 2253 bp, synthetic construct; identical to SEQ ID NO: 20410
  misc_feature 1..2253: note = Description of Artificial Sequence: Synthetic coding sequence
  source 1..2253: mol_type = other DNA

SEQ ID NO: 20418 - DNA, 2253 bp, synthetic construct; identical to SEQ ID NO: 20410
  misc_feature 1..2253: note = Description of Artificial Sequence: Synthetic coding sequence
  source 1..2253: mol_type = other DNA

SEQ ID NO: 20419 - DNA, 48 bp, synthetic construct
  misc_feature 1..48: note = Description of Artificial Sequence: Synthetic coding sequence
  source 1..48: mol_type = other DNA
atgggcaagtctgagagccagatggacatcacagacatcaacacctag

SEQ ID NO: 20420 - DNA, 894 bp, synthetic construct
  misc_feature 1..894: note = Description of Artificial Sequence: Synthetic coding sequence
  source 1..894: mol_type = other DNA
atgaccaccccaagaaattctgtgaatggcaccttccctgctgagcccatgaagggccccatcgccatgcagagcggccccaagcccctcttccggaggatgagcagcctggtgggccccacccagagcttcttcatgagggagagcaagaccctgggcgctgtgcagatcatgaatggcctcttccacatcgccctgggcggcctgctgatgatcccagctggcatctatgcccccatctgtgtgacagtgtggtaccccctgtggggcggcatcatgtacatcatcagcggcagcctgctggccgccacagagaagaacagcaggaagtgcctggtgaagggcaagatgatcatgaacagcctgagcctgtttgctgccatcagcggcatgatcctgagcatcatggacatcctgaacatcaagatcagccacttcctgaagatggagagcctgaacttcatccgggcccacaccccctacatcaacatctacaactgtgagcccgccaaccccagcgagaagaacagccccagcacccagtactgctacagcatccagagcctcttcctgggcatcctgtctgtgatgctgatctttgccttcttccaggagctggtgattgctggcatcgtggagaatgagtggaagaggacctgcagccggcccaagagcaacatcgtgctgctgtctgctgaggagaagaaggagcagaccatcgagatcaaggaggaggtggtgggcctgacagagaccagcagccagcccaagaatgaggaggacatcgagatcatccccatccaggaggaggaggaggaggagacagagaccaacttccctgagcccccccaggaccaggagagcagccccattgaaaatgacagcagcccctag

SEQ ID NO: 20421 - DNA, 894 bp, synthetic construct; identical to SEQ ID NO: 20420
  misc_feature 1..894: note = Description of Artificial Sequence: Synthetic coding sequence
  source 1..894: mol_type = other DNA

SEQ ID NO: 20422 - DNA, 24 bp, synthetic construct
  misc_feature 1..24: note = Description of Artificial Sequence: Synthetic coding sequence
  source 1..24: mol_type = other DNA
atgaccaccccaagaaacagctag

SEQ ID NO: 20423 - DNA, 855 bp, synthetic construct
  misc_feature 1..855: note = Description of Artificial Sequence: Synthetic coding sequence
  source 1..855: mol_type = other DNA
atgaccaccccaagaaattctgtgaatggcaccttccctgctgagcccatgaagggccccatcgccatgcagagcggccccaagcccctcttccggaggatgagcagcctggtgggccccacccagagcttcttcatgagggagagcaagaccctgggcgctgtgcagatcatgaatggcctcttccacatcgccctgggcggcctgctgatgatcccagctggcatctatgcccccatctgtgtgacagtgtggtaccccctgtggggcggcatcatgtacatcatcagcggcagcctgctggccgccacagagaagaacagcaggaagtgcctggtgaagggcaagatgatcatgaacagcctgagcctgtttgctgccatcagcggcatgatcctgagcatcatggacatcctgaacatcaagatcagccacttcctgaagatggagagcctgaacttcatccgggcccacaccccctacatcaacatctacaactgtgagcccgccaaccccagcgagaagaacagccccagcacccagtactgctacagcatccagagcctcttcctggagctggtgattgctggcatcgtggagaatgagtggaagaggacctgcagccggcccaagagcaacatcgtgctgctgtctgctgaggagaagaaggagcagaccatcgagatcaaggaggaggtggtgggcctgacagagaccagcagccagcccaagaatgaagaagatattgagatcatccccatccaggaggaggaggaggaggagacagagaccaacttccctgagcccccccaggaccaggagagcagccccattgaaaatgacagcagcccctag

SEQ ID NO: 20424 - DNA, 21 bp, synthetic construct
  misc_feature 1..21: note = Description of Artificial Sequence: Synthetic coding sequence
  source 1..21: mol_type = other DNA
atgaccaccccaagaaattag

SEQ ID NO: 20425 - DNA, 894 bp, synthetic construct; identical to SEQ ID NO: 20420
  misc_feature 1..894: note = Description of Artificial Sequence: Synthetic coding sequence
  source 1..894: mol_type = other DNA

SEQ ID NO: 20426 - DNA, 930 bp, synthetic construct
  misc_feature 1..930: note = Description of Artificial Sequence: Synthetic coding sequence
  source 1..930: mol_type = other DNA
atggatgaccagggctgcccccgctgcaagaccaccaagtacagaaaccccagcctgaagctgatggtgaatgtgtgtggccacaccctgtgtgagagctgtgtggacctgctgtttgtgagaggagctggcaactgcccagaatgtggcacccccctgaggaagagcaacttccgggtgcagctgtttgaggaccccaccgtggacaaggaggtggagatcaggaagaaggtgctgaagatctacaacaagcgggaggaggacttccccagcctgcgggagtacaatgacttcctggaggaggtggaggagatcgtgttcaacctgaccaacaacgtggacctggacaacaccaagaagaagatggagatctaccagaaggagaacaaggatgtgatccagaagaacaagctgaagctgacccgggagcaggaggagctggaggaggccctggaggtggagcggcaggagaatgagcagaggaggctcttcatccagaaggaggagcagctgcagcagatcctgaagaggaagaacaagcaggccttcctggatgagctggagagcagtgacctgcctgtggccctgctgctggcccagcacaaggacaggagcacccagctggagatgcagctggagaagcccaagcctgtgaagcctgtgaccttcagcacaggcatcaagatgggccagcacatcagcctggcccccatccacaagctggaggaggccctgtatgagtaccagcccctgcagatcgagacctacggcccccacgtgcctgagctggagatgctgggccgcctgggctacctgaaccacgtgcgggccgccagcccccaggacctggccggcggctacaccagcagcctggcctgccaccgggccctgcaggatgccttcagcggcctcttctggcagcccagctag

SEQ ID NO: 20427 - DNA, 804 bp, synthetic construct
  misc_feature 1..804: note = Description of Artificial Sequence: Synthetic coding sequence
  source 1..804: mol_type = other DNA
atggatgaccagggctgcccccgctgcaagaccaccaagtacagaaaccccagcctgaagctgatggtgaatgtgtgtggccacaccctgtgtgagagctgtgtggacctgctgtttgtgagaggagctggcaactgcccagaatgtggcacccccctgaggaagagcaacttccgggtgcagctgtttgaggaccccaccgtggacaaggaggtggagatcaggaagaaggtgctgaagatctacaacaagcgggaggaggacttccccagcctgcgggagtacaatgacttcctggaggaggtggaggagatcgtgttcaacctgaccaacaacgtggacctggacaacaccaagaagaagatggagatctaccagaaggagaacaaggatgtgatccagaagaacaagctgaagctgacccgggagcaggaggagctggaggaggccctggaggtggagcggcaggagaatgagcagaggaggctcttcatccagaaggaggagcagctgcagcagatcctgaagaggaagaacaagcaggccttcctggatgagctgggccagcacatcagcctggcccccatccacaagctggaggaggccctgtatgagtaccagcccctgcagatcgagacctacggcccccacgtgcctgagctggagatgctgggccgcctgggctacctgaaccacgtgcgggccgccagcccccaggacctggccggcggctacaccagcagcctggcctgccaccgggccctgcaggatgccttcagcggcctcttctggcagcccagctag

SEQ ID NO: 20428 - DNA, 510 bp, synthetic construct
  misc_feature 1..510: note = Description of Artificial Sequence: Synthetic coding sequence
  source 1..510: mol_type = other DNA
acccgggagcaggaggagctggaggaggccctggaggtggagcggcaggagaatgagcagaggaggctcttcatccagaaggaggagcagctgcagcagatcctgaagaggaagaacaagcaggccttcctggatgagctggagagcagtgacctgcctgtggccctgctgctggcccagcacaaggacaggagcacccagctggagatgcagctggagaagcccaagcctgtgaagcctgtgaccttcagcacaggcatcaagatgggccagcacatcagcctggcccccatccacaagctggaggaggccctgtatgagtaccagcccctgcagatcgagacctacggcccccacgtgcctgagctggagatgctgggccgcctgggctacctgaaccacgtgcgggccgccagcccccaggacctggccggcggctacaccagcagcctggcctgccaccgggccctgcaggatgccttcagcggcctcttctggcagcccagctag

SEQ ID NO: 20429 - DNA, 3963 bp, synthetic construct
  misc_feature 1..3963: note = Description of Artificial Sequence: Synthetic coding sequence
  source 1..3963: mol_type = other DNA
atgtttggcctggaccagtttgagccccaggtgaacagcagaaatgccggccagggcgagaggaacttcaatgagaccggcctgtccatgaacacccacttcaaggccccagccttccacactggaggccccccaggccctgtggaccctgccatgtctgccctgggggagccccccatcctgggcatgaacatggagccctacggcttccacgcccggggccacagcgagctgcacgccggcggcctgcaggcccagcctgtgcacggcttcttcggcggccagcagccccaccacggccaccctggcagccaccacccccaccagcaccacccccactttggaggcaactttggaggccctgaccccggggccagctgcctgcatggaggccgcctgctgggctacggcggggccgccggcggcctgggcagccagcccccatttgctgagggctatgagcacatggccgagagccagggccctgagagctttggcccccagaggcctggcaacctgcctgacttccacagcagcggggccagcagccatgctgtgcctgccccctgcctgcccctggaccagagccccaacagagctgccagcttccacggcctgcccagcagcagcggcagtgacagccacagcctggagccccggcgggtgaccaaccagggcgctgtggacagcctggagtacaactacccaggagaggcccccagcggccactttgacatgttcagccccagcgacagcgagggccagctgccccactacgccgccggccggcaggtgcctgggggcgccttccctggggccagcgccatgcccagggctgctggcatggtgggcctgagcaagatgcacgcccagcccccccagcagcagccccagcagcagcagcagccccagcagcagcagcagcagcacggcgtcttctttgagcgcttcagcggggccaggaagatgcctgtgggcctggagcccagcgtgggcagccgccaccccctgatgcagcccccccagcaggcccctcctccaccccagcagcagcccccccagcagcccccccagcagcagcccccacctcctcctggcctgctggtgcggcagaacagctgccccccagccctgccccggccccagcagggcgaggccggcacccccagcggcggcctgcaggacggcggccccatgctgcccagccagcacgcccagtttgagtaccccatccaccggctggagaacagatccatgcacccctacagcgagcctgtgttctccatgcagcaccccccaccccagcaggcccccaaccagaggctgcagcactttgatgccccaccctacatgaatgtggccaagaggcccaggtttgacttccctggcagcgctggggtggacagatgtgcctcctggaatggctccatgcacaatggagccctggacaaccacctgagccccagcgcctacccaggcctgcctggagagttcaccccacctgtgcctgacagcttccccagcggcccccccctgcagcacccagccccagaccaccagagcctgcagcagcagcagcagcagcagcagcagcagcagcagcagcagcagcagcagcagcagcagcagcagcagcagcagcagcagcagaggcagaatgctgccctgatgatcaagcagatggccagcaggaaccagcagcagaggctgcggcagcccaacctggcccagctgggccaccctggagatgtgggccagggcggcctggtgcatggaggccctgtgggcggcctggcccagcccaactttgagcgggagggcggcagcactggagctggccgcctgggcacctttgagcagcaggccccccacctggcccaggagagcgcctggttcagcggcccccaccccccacctggggacctgctgcccaggaggatgggcggcagcggcctgcctgctgactgtggcccccatgaccccagcctggcccctcctcctcctcctgggggcagcggcgtgctcttccggggccccctgcaggagcccatgaggatgcctggagagggccacgtgcctgccctgcccagccctggcctgcagtttggaggcagcctgggcggcctgggccagctgcagagccctggagctggggtgggcctgcccagcgctgccagcgagcggcggcccccacctccagactttgccaccagcgccctgggcggccagcccggcttcccctttggagctgctggccggcagagcaccccccacagcggccctggggtgaacagcccccccagcgctgggggcggcggcggcagcagcggcggcggcggcggcggcggggcctacccaccccagcctgacttccagcccagccagaggaccagcgccagcaagctgggcgccctgagcctgggcagcttcaacaagcccagcagcaaggacaacctgtttggccagagctgcctggccgccctgagcacagcctgccagaacatgattgccagcctgggcgcccccaacctgaatgtgaccttcaacaagaagaaccccccagagggcaagaggaagctgagccagaatgaaacagatggagctgctgtggccggcaaccctggcagtgactacttccctgggggcacagcccctggggcccctggccctgggggccccagcggcaccagcagcagcggcagcaaggccagcggcccccccaaccccccagcccagggagatggcaccagcctgagccccaactacaccctggagagcaccagcggaaatgatggcaagcctgtgtctgggggcggcggccggggccggggccgcaggaagagggacagcggccacgtgtccccaggcaccttctttgacaagtacagcgctgccccagacagcggcggggcccctggggtgtccccaggccagcagcaggccagcggggctgctgtgggcggcagcagcgctggggagaccaggggggcccccacccctcatgagaaggccctgaccagccccagctggggcaaaggagctgagctgctgctgggggaccagcctgacctgattggcagcctggatggaggagccaagagtgacagcagcagccccaacgtgggggagtttgccagtgatgaggtgtccaccagctatgccaatgaagatgaggtgagcagcagcagtgacaacccccaggccctggtgaaggccagccgcagccccctggtgacaggcagccccaagctgcccccccggggcgtgggcgctggggagcacggccccaaggcccctcctccagccctgggcctgggcatcatgagcaacagcaccagcaccccagacagctatggaggcggcggcggccctggccaccctggcaccccaggcctggagcaggtgaggacccccaccagcagcagcggggcccctcctccagatgagatccaccccctggagatcctgcaggcccagatccagctgcagaggcagcagttcagcatcagcgaggaccagcccctgggcctgaagggcggcaagaagggggagtgtgctgtgggcgccagcggggcccagaatggagacagcgagctgggcagctgctgcagcgaggccgtgaagagcgccatgagcaccatcgacctggacagcctgatggccgagcacagcgctgcctggtacatgcctgctgacaaggccctggtggacagcgcagatgatgacaagaccctggccccctgggagaaggccaagccccagaaccccaacagcaaggaggcccatgacctgcctgccaacaaggccagcgccagccagcccggcagccacctgcagtgcctgtctgtgcactgcacagatgatgtgggagatgccaaggcccgggcctctgtgcccacctggaggagcctgcacagcgacatcagcaaccgcttcggcacctttgtggccgccctgacctag

SEQ ID NO: 20430 - DNA, 4227 bp, synthetic construct
  misc_feature 1..4227: note = Description of Artificial Sequence: Synthetic coding sequence
  source 1..4227: mol_type = other DNA
atgaaggccccagctgtgctggcccctggcatcctggtgctgctcttcaccctggtgcagaggagcaatggagagtgcaaggaggccctggccaagtctgagatgaatgtgaacatgaagtaccagctgcccaacttcaccgctgagacccccatccagaatgtcatcctgcacgagcaccacatcttcctgggcgccaccaactacatctacgtgctgaatgaggaggacctgcagaaggtggccgagtacaagacaggccctgtgctggagcacccagactgcttcccctgccaggactgcagcagcaaggccaacctgagcggcggcgtgtggaaggacaacatcaacatggccctggtggtggacacctactatgatgaccagctgatcagctgtggctctgtgaacagaggcacctgccagagacatgtgttcccccacaaccacacagctgacatccagagcgaggtgcactgcatcttcagcccccagatcgaggagcccagccagtgcccagactgtgtggtgtctgccctgggcgccaaggtgctgagctctgtgaaggaccgcttcatcaacttctttgtgggcaacaccatcaacagcagctacttcccagaccaccccctgcacagcatctctgtgcggcggctgaaggagaccaaggatggcttcatgttcctgacagaccagagctacattgatgtgctgcctgagttccgggacagctaccccatcaagtatgtgcacgcctttgagagcaacaacttcatctacttcctgactgtgcagcgggagaccctggatgcccagaccttccacacccgcatcatccgcttctgcagcatcaacagcggcctgcacagctacatggagatgcccctggagtgcatcctgacagagaagaggaagaagaggagcaccaagaaggaggtgttcaacatcctgcaggccgcctacgtgtccaagccaggggcccagctggcccggcagattggagccagcctgaatgatgacatcctgtttggagtgtttgcccagagcaagccagattctgctgagcccatggacagaagtgccatgtgtgccttccccatcaagtatgtgaatgacttcttcaacaagatcgtgaacaagaacaacgtgcgctgcctgcagcacttctacggccccaaccacgagcactgcttcaacagaaccctgctgaggaacagcagcggctgtgaggccaggagagatgagtacagaacagagttcaccacagccctgcagagggtggacctcttcatgggccagttcagcgaggtgctgctgaccagcatcagcaccttcatcaagggggacctgaccatcgccaacctgggcaccagcgagggccgcttcatgcaggtggtggtgagccgcagcggccccagcaccccccacgtgaacttcctgctggacagccaccctgtgtccccagaggtgattgtggagcacaccctgaaccagaatggctacaccctggtgatcaccgggaagaagatcaccaagatccccctgaatggcctgggctgccgccacttccagagctgcagccagtgcctgagcgcccccccatttgtgcagtgtggctggtgccacgacaagtgtgtgcgctctgaggagtgcctgagcggcacctggacccagcagatctgcctgcctgccatctacaaggtgttccccaacagcgcccccctggagggcggcacccggctgaccatctgtggctgggactttggcttcagaagaaacaacaagtttgacctgaagaagaccagggtgctgctgggcaatgaaagctgcaccctgaccctgtctgagagcaccatgaacaccctgaagtgcaccgtgggccctgccatgaacaagcacttcaacatgagcatcatcatcagcaatggccacggcaccacccagtacagcaccttctcctatgtggaccctgtgatcaccagcatcagccccaagtatggccccatggccggcggcaccctgctgaccctgaccggcaactacctgaacagcggcaacagccgccacatcagcatcggcggcaagacctgcaccctgaagtctgtgagcaacagcatcctggagtgctacaccccagcccagaccatcagcacagaatttgctgtgaagctgaagattgacctggccaaccgggagaccagcatcttctcctaccgggaggaccccatcgtgtatgagatccaccccaccaagagcttcatcagcacctggtggaaggagcccctgaacatcgtgtccttcctgttctgctttgccagcggcggcagcaccatcactggagtgggcaagaacctgaacagcgtgtctgtgcccaggatggtgatcaacgtgcatgaggccggcaggaacttcaccgtggcctgccagcacaggagcaacagcgagatcatctgctgcaccacccccagcctgcagcagctgaacctgcagctgcccctgaagaccaaggccttcttcatgctggatggcatcctgagcaagtactttgacctgatctacgtgcacaaccctgtgttcaagccctttgagaagcctgtgatgatctccatgggaaatgaaaatgtgctggagatcaagggaaatgacattgatcctgaggccgtgaagggggaggtgctgaaggtgggcaacaagagctgtgagaacatccacctgcacagcgaggccgtgctgtgcaccgtgcccaatgacctgctgaagctgaacagcgagctgaacatcgagtggaagcaggccatcagcagcacagtgctgggcaaggtgattgtgcagcctgaccagaacttcaccggcctgattgctggggtggtgtccatcagcacagccctgctgctgctgctgggcttcttcctgtggctgaagaagaggaagcagatcaaggacctgggcagcgagctggtgcgctatgatgcccgggtgcacaccccccacctggaccggctggtgtctgcccggtctgtgagccccaccacagagatggtgtccaatgaatctgtggactaccgggccaccttccctgaggaccagttccccaacagcagccagaatggcagctgccggcaggtgcagtaccccctgacagacatgagccccatcctgaccagcggggacagcgacatcagcagccccctgctgcagaacacagtgcacatcgacctgagcgccctgaaccctgagctggtgcaggccgtgcagcacgtggtgattggccccagcagcctgattgtgcacttcaatgaagtcatcggccggggccacttcggctgtgtgtaccacggcaccctgctggacaatgatggcaagaagatccactgtgctgtgaagagcctgaaccgcatcacagacatcggggaggtgtcccagttcctgacagagggcatcatcatgaaggacttcagccaccccaacgtgctgagcctgctgggcatctgcctgcggtctgagggcagccccctggtggtgctgccctacatgaagcacggggacctgaggaacttcatcagaaatgagacccacaaccccaccgtgaaggacctgattggcttcggcctgcaggtggccaagggcatgaagtacctggccagcaagaagtttgtgcaccgggacctggccgccaggaactgcatgctggatgagaagttcaccgtgaaggtggccgactttggcctggcccgggacatgtatgacaaggagtactacagcgtgcacaacaagacaggagccaagctgcctgtgaagtggatggccctggagagcctgcagacccagaagttcaccaccaagagtgatgtgtggagctttggagtgctgctgtgggagctgatgaccaggggggccccaccctacccagatgtgaacacctttgacatcaccgtgtacctgctgcagggccggcggctgctgcagcctgagtactgcccagaccccctgtatgaggtgatgctgaagtgctggcaccccaaggccgagatgaggcccagcttcagcgagctggtgagccgcatcagcgccatcttcagcaccttcatcggggagcactacgtgcacgtgaatgccacctacgtgaatgtgaagtgtgtggccccctaccccagcctgctgagcagcgaggacaatgctgatgatgaggtggacaccaggcctgccagcttctgggagaccagctag

SEQ ID NO: 20431 - DNA, 4173 bp, synthetic construct
  misc_feature 1..4173: note = Description of Artificial Sequence: Synthetic coding sequence
  source 1..4173: mol_type = other DNA
atgaaggccccagctgtgctggcccctggcatcctggtgctgctcttcaccctggtgcagaggagcaatggagagtgcaaggaggccctggccaagtctgagatgaatgtgaacatgaagtaccagctgcccaacttcaccgctgagacccccatccagaatgtcatcctgcacgagcaccacatcttcctgggcgccaccaactacatctacgtgctgaatgaggaggacctgcagaaggtggccgagtacaagacaggccctgtgctggagcacccagactgcttcccctgccaggactgcagcagcaaggccaacctgagcggcggcgtgtggaaggacaacatcaacatggccctggtggtggacacctactatgatgaccagctgatcagctgtggctctgtgaacagaggcacctgccagagacatgtgttcccccacaaccacacagctgacatccagagcgaggtgcactgcatcttcagcccccagatcgaggagcccagccagtgcccagactgtgtggtgtctgccctgggcgccaaggtgctgagctctgtgaaggaccgcttcatcaacttctttgtgggcaacaccatcaacagcagctacttcccagaccaccccctgcacagcatctctgtgcggcggctgaaggagaccaaggatggcttcatgttcctgacagaccagagctacattgatgtgctgcctgagttccgggacagctaccccatcaagtatgtgcacgcctttgagagcaacaacttcatctacttcctgactgtgcagcgggagaccctggatgcccagaccttccacacccgcatcatccgcttctgcagcatcaacagcggcctgcacagctacatggagatgcccctggagtgcatcctgacagagaagaggaagaagaggagcaccaagaaggaggtgttcaacatcctgcaggccgcctacgtgtccaagccaggggcccagctggcccggcagattggagccagcctgaatgatgacatcctgtttggagtgtttgcccagagcaagccagattctgctgagcccatggacagaagtgccatgtgtgccttccccatcaagtatgtgaatgacttcttcaacaagatcgtgaacaagaacaacgtgcgctgcctgcagcacttctacggccccaaccacgagcactgcttcaacagaaccctgctgaggaacagcagcggctgtgaggccaggagagatgagtacagaacagagttcaccacagccctgcagagggtggacctcttcatgggccagttcagcgaggtgctgctgaccagcatcagcaccttcatcaagggggacctgaccatcgccaacctgggcaccagcgagggccgcttcatgcaggtggtggtgagccgcagcggccccagcaccccccacgtgaacttcctgctggacagccaccctgtgtccccagaggtgattgtggagcacaccctgaaccagaatggctacaccctggtgatcaccgggaagaagatcaccaagatccccctgaatggcctgggctgccgccacttccagagctgcagccagtgcctgagcgcccccccatttgtgcagtgtggctggtgccacgacaagtgtgtgcgctctgaggagtgcctgagcggcacctggacccagcagatctgcctgcctgccatctacaaggtgttccccaacagcgcccccctggagggcggcacccggctgaccatctgtggctgggactttggcttcagaagaaacaacaagtttgacctgaagaagaccagggtgctgctgggcaatgaaagctgcaccctgaccctgtctgagagcaccatgaacaccctgaagtgcaccgtgggccctgccatgaacaagcacttcaacatgagcatcatcatcagcaatggccacggcaccacccagtacagcaccttctcctatgtggaccctgtgatcaccagcatcagccccaagtatggccccatggccggcggcaccctgctgaccctgaccggcaactacctgaacagcggcaacagccgccacatcagcatcggcggcaagacctgcaccctgaagtctgtgagcaacagcatcctggagtgctacaccccagcccagaccatcagcacagaatttgctgtgaagctgaagattgacctggccaaccgggagaccagcatcttctcctaccgggaggaccccatcgtgtatgagatccaccccaccaagagcttcatcagcggcggcagcaccatcactggagtgggcaagaacctgaacagcgtgtctgtgcccaggatggtgatcaacgtgcatgaggccggcaggaacttcaccgtggcctgccagcacaggagcaacagcgagatcatctgctgcaccacccccagcctgcagcagctgaacctgcagctgcccctgaagaccaaggccttcttcatgctggatggcatcctgagcaagtactttgacctgatctacgtgcacaaccctgtgttcaagccctttgagaagcctgtgatgatctccatgggaaatgaaaatgtgctggagatcaagggaaatgacattgatcctgaggccgtgaagggggaggtgctgaaggtgggcaacaagagctgtgagaacatccacctgcacagcgaggccgtgctgtgcaccgtgcccaatgacctgctgaagctgaacagcgagctgaacatcgagtggaagcaggccatcagcagcacagtgctgggcaaggtgattgtgcagcctgaccagaacttcaccggcctgattgctggggtggtgtccatcagcacagccctgctgctgctgctgggcttcttcctgtggctgaagaagaggaagcagatcaaggacctgggcagcgagctggtgcgctatgatgcccgggtgcacaccccccacctggaccggctggtgtctgcccggtctgtgagccccaccacagagatggtgtccaatgaatctgtggactaccgggccaccttccctgaggaccagttccccaacagcagccagaatggcagctgccggcaggtgcagtaccccctgacagacatgagccccatcctgaccagcggggacagcgacatcagcagccccctgctgcagaacacagtgcacatcgacctgagcgccctgaaccctgagctggtgcaggccgtgcagcacgtggtgattggccccagcagcctgattgtgcacttcaatgaagtcatcggccggggccacttcggctgtgtgtaccacggcaccctgctggacaatgatggcaagaagatccactgtgctgtgaagagcctgaaccgcatcacagacatcggggaggtgtcccagttcctgacagagggcatcatcatgaaggacttcagccaccccaacgtgctgagcctgctgggcatctgcctgcggtctgagggcagccccctggtggtgctgccctacatgaagcacggggacctgaggaacttcatcagaaatgagacccacaaccccaccgtgaaggacctgattggcttcggcctgcaggtggccaagggcatgaagtacctggccagcaagaagtttgtgcaccgggacctggccgccaggaactgcatgctggatgagaagttcaccgtgaaggtggccgactttggcctggcccgggacatgtatgacaaggagtactacagcgtgcacaacaagacaggagccaagctgcctgtgaagtggatggccctggagagcctgcagacccagaagttcaccaccaagagtgatgtgtggagctttggagtgctgctgtgggagctgatgaccaggggggccccaccctacccagatgtgaacacctttgacatcaccgtgtacctgctgcagggccggcggctgctgcagcctgagtactgcccagaccccctgtatgaggtgatgctgaagtgctggcaccccaaggccgagatgaggcccagcttcagcgagctggtgagccgcatcagcgccatcttcagcaccttcatcggggagcactacgtgcacgtgaatgccacctacgtgaatgtgaagtgtgtggccccctaccccagcctgctgagcagcgaggacaatgctgatgatgaggtggacaccaggcctgccagcttctgggagaccagctag

SEQ ID NO: 20432 - DNA, 2295 bp, synthetic construct
  misc_feature 1..2295: note = Description of Artificial Sequence: Synthetic coding sequence
  source 1..2295: mol_type = other DNA
atgaaggccccagctgtgctggcccctggcatcctggtgctgctcttcaccctggtgcagaggagcaatggagagtgcaaggaggccctggccaagtctgagatgaatgtgaacatgaagtaccagctgcccaacttcaccgctgagacccccatccagaatgtcatcctgcacgagcaccacatcttcctgggcgccaccaactacatctacgtgctgaatgaggaggacctgcagaaggtggccgagtacaagacaggccctgtgctggagcacccagactgcttcccctgccaggactgcagcagcaaggccaacctgagcggcggcgtgtggaaggacaacatcaacatggccctggtggtggacacctactatgatgaccagctgatcagctgtggctctgtgaacagaggcacctgccagagacatgtgttcccccacaaccacacagctgacatccagagcgaggtgcactgcatcttcagcccccagatcgaggagcccagccagtgcccagactgtgtggtgtctgccctgggcgccaaggtgctgagctctgtgaaggaccgcttcatcaacttctttgtgggcaacaccatcaacagcagctacttcccagaccaccccctgcacagcatctctgtgcggcggctgaaggagaccaaggatggcttcatgttcctgacagaccagagctacattgatgtgctgcctgagttccgggacagctaccccatcaagtatgtgcacgcctttgagagcaacaacttcatctacttcctgactgtgcagcgggagaccctggatgcccagaccttccacacccgcatcatccgcttctgcagcatcaacagcggcctgcacagctacatggagatgcccctggagtgcatcctgacagagaagaggaagaagaggagcaccaagaaggaggtgttcaacatcctgcaggccgcctacgtgtccaagccaggggcccagctggcccggcagattggagccagcctgaatgatgacatcctgtttggagtgtttgcccagagcaagccagattctgctgagcccatggacagaagtgccatgtgtgccttccccatcaagtatgtgaatgacttcttcaacaagatcgtgaacaagaacaacgtgcgctgcctgcagcacttctacggccccaaccacgagcactgcttcaacagaaccctgctgaggaacagcagcggctgtgaggccaggagagatgagtacagaacagagttcaccacagccctgcagagggtggacctcttcatgggccagttcagcgaggtgctgctgaccagcatcagcaccttcatcaagggggacctgaccatcgccaacctgggcaccagcgagggccgcttcatgcaggtggtggtgagccgcagcggccccagcaccccccacgtgaacttcctgctggacagccaccctgtgtccccagaggtgattgtggagcacaccctgaaccagaatggctacaccctggtgatcaccgggaagaagatcaccaagatccccctgaatggcctgggctgccgccacttccagagctgcagccagtgcctgagcgcccccccatttgtgcagtgtggctggtgccacgacaagtgtgtgcgctctgaggagtgcctgagcggcacctggacccagcagatctgcctgcctgccatctacaaggtgttccccaacagcgcccccctggagggcggcacccggctgaccatctgtggctgggactttggcttcagaagaaacaacaagtttgacctgaagaagaccagggtgctgctgggcaatgaaagctgcaccctgaccctgtctgagagcaccatgaacaccctgaagtgcaccgtgggccctgccatgaacaagcacttcaacatgagcatcatcatcagcaatggccacggcaccacccagtacagcaccttctcctatgtggaccctgtgatcaccagcatcagccccaagtatggccccatggccggcggcaccctgctgaccctgaccggcaactacctgaacagcggcaacagccgccacatcagcatcggcggcaagacctgcaccctgaagtctgtgagcaacagcatcctggagtgctacaccccagcccagaccatcagcacagaatttgctgtgaagctgaagattgacctggccaaccgggagaccagcatcttctcctaccgggaggaccccatcgtgtatgagatccaccccaccaagagcttcatccgccacgtgaacatcgccctgatccagaggtag

SEQ ID NO: 20433 - DNA, 783 bp, synthetic construct
  misc_feature 1..783: note = Description of Artificial Sequence: Synthetic coding sequence
  source 1..783: mol_type = other DNA
atgaaggacttcagccaccccaacgtgctgagcctgctgggcatctgcctgcggtctgagggcagccccctggtggtgctgccctacatgaagcacggggacctgaggaacttcatcagaaatgagacccacaaccccaccgtgaaggacctgattggcttcggcctgcaggtggccaagggcatgaagtacctggccagcaagaagtttgtgcaccgggacctggccgccaggaactgcatgctggatgagaagttcaccgtgaaggtggccgactttggcctggcccgggacatgtatgacaaggagtactacagcgtgcacaacaagacaggagccaagctgcctgtgaagtggatggccctggagagcctgcagacccagaagttcaccaccaagagtgatgtgtggagctttggagtgctgctgtgggagctgatgaccaggggggccccaccctacccagatgtgaacacctttgacatcaccgtgtacctgctgcagggccggcggctgctgcagcctgagtactgcccagaccccctgtatgaggtgatgctgaagtgctggcaccccaaggccgagatgaggcccagcttcagcgagctggtgagccgcatcagcgccatcttcagcaccttcatcggggagcactacgtgcacgtgaatgccacctacgtgaatgtgaagtgtgtggccccctaccccagcctgctgagcagcgaggacaatgctgatgatgaggtggacaccaggcctgccagcttctgggagaccagctag

SEQ ID NO: 20434 - DNA, 1749 bp, synthetic construct
  misc_feature 1..1749: note = Description of Artificial Sequence: Synthetic coding sequence
  source 1..1749: mol_type = other DNA
atggccgcccgctcctggcaggatgagctggcccagcaggccgaggagggcagcgcccggctgcgggagatgctgtctgtgggcctgggcttcctgaggacagagctgggcctggacctgggcctggagcccaagcgctacccaggctgggtgatcctggtgggcaccggggccctgggcctgctgctgctcttcctgctgggctacggctgggccgccgcctgtgccggggccaggaagaagaggaggagcccccccaggaagcgggaggaggccgctgctgtgcctgctgctgccccagatgacctggccctgctgaagaacctgcggtctgaggagcagaagaagaagaacaggaagaagctgtctgagaagcccaagcccaatggaagaacagtggaggtggccgagggggaggccgtgaggaccccccagagcgtgacagccaagcagcccccagaaattgacaagaagaatgagaagagcaagaagaacaagaagaagagcaagagtgatgccaaggctgtgcagaacagcagcagacatgatggcaaggaggtggatgagggcgcctgggagaccaagatcagccaccgggagaagaggcagcagaggaagagggacaaggtgctgacagacagcggcagcctggacagcaccatccctggcatcgagaacaccatcaccgtgaccacagagcagctgaccacagccagcttccctgtgggcagcaagaagaacaagggggacagccacctgaatgtgcaggtgagcaacttcaagagcggcaagggggacagcaccctgcaggtgagcagcggcctgaatgaaaacctgactgtgaatggaggcggctggaatgagaagtctgtgaagctgagcagccagatctctgctggggaggagaagtggaacagcgtgtccccagccagcgctgggaagaggaagacagagcccagcgcctggagccaggacacaggagatgccaacaccaacgggaaggactggggccgctcctggagcgacaggagcatcttctctggaattggcagcacagctgagcctgtgtcccagagcaccaccagtgactaccagtgggatgtgtccaggaaccagccctacattgatgatgagtggagcggcctgaatggcctgagcagcgctgaccccaacagcgactggaatgccccagctgaggagtggggcaactgggtggatgaggagcgggccagcctgctgaagagccaggagcccatcccagatgaccagaaggtgtctgatgatgacaaggagaagggggagggcgccctgcccaccgggaagagcaagaagaagaagaagaagaagaagaagcagggcgaggacaacagcacagcccaggacacagaggagctggagaaggagatccgggaggacctgcctgtgaacaccagcaagacccggcccaagcaggagaaggccttcagcctgaagaccatcagcaccagtgaccctgctgaggtgctggtgaagaacagccagcccatcaagaccctgcccccagccaccagcacagagcccagcgtcatcctgagcaagagtgacagcgacaagagcagcagccaggtgccccccatcctgcaggagacagacaagagcaagagcaacaccaagcagaacagcgtgccccccagccagaccaagtctgagacctcctgggagagccccaagcagatcaagaagaagaagaaggcccggcgggagacctag

SEQ ID NO: 20435 - DNA, 2148 bp, synthetic construct
  misc_feature 1..2148: note = Description of Artificial Sequence: Synthetic coding sequence
  source 1..2148: mol_type = other DNA
atggccgccaacatgtacagagtgggggactatgtgtactttgagaacagcagcagcaacccctacctgatcagaagaattgaggagctgaacaagacagccaatggaaatgtggaggccaaggtggtgtgcttctacagaagaagagacatcagcagcaccctcatcgccctggccgacaagcacgccaccctgtctgtgtgctacaaggccggccctggagctgacaatggagaggagggggagattgaggaggagatggagaaccctgagatggtggacctgcctgagaagctgaagcaccagctgcggcaccgggagctgttcctgagccggcagctggagagcctgcctgccacccacatccggggcaaatgttctgtgaccctgctgaatgaaacagagagcctgaagagctacctggagcgggaggacttcttcttctacagcctggtgtatgacccccagcagaagaccctgctggccgacaagggggagatccgggtgggcaaccgctaccaggccgacatcacagacctgctgaaggagggggaggaggatggccgggaccagagccggctggagacccaggtgtgggaggcccacaaccccctgacagacaagcagattgaccagttcctggtggtggcccggtctgtgggcacctttgcccgggccctggactgcagcagctctgtgcggcagcccagcctgcacatgtctgctgctgctgccagccgggacatcaccctcttccacgccatggacaccctgcacaagaacatctatgacatcagcaaggccatcagcgccctggtgccccagggcggccctgtgctgtgcagagatgagatggaggagtggagcgccagcgaggccaacctgtttgaggaggccctggagaagtatggcaaggacttcacagacatccagcaggacttcctgccctggaagagcctgaccagcatcatcgagtactactacatgtggaagaccacagaccgctacgtgcagcagaagaggctgaaggctgctgaggccgagagcaagctgaagcaggtgtacatccccaactacaacaagcccaaccccaaccagatctctgtgaacaacgtgaaggccggcgtggtgaatggcaccggggcccctggccagagccctggagctggccgggcctgtgagagctgctacaccacccagagctaccagtggtacagctggggcccccccaacatgcagtgccgcctgtgtgccagctgctggacctactggaagaagtatggaggcctgaagatgcccacccggctggatggagagaggcctggccccaacagaagcaacatgagcccccacggcctgcctgcccggagcagcggcagccccaagtttgccatgaagacccggcaggccttctacctgcacaccaccaagctgaccagaattgcccggcggctgtgccgggagatcctgcggccctggcatgctgcccggcacccctacctgcccatcaacagcgctgccatcaaggcagaatgtacagcccggctgcctgaggccagccagagccccctggtgctgaagcaggccgtgaggaagcccctggaggccgtgctgcgctacctggagacccaccccaggcctcccaagccagaccctgtgaagtctgtgtcctctgtgctgagcagcctgaccccagccaaggtggcccctgtgatcaacaacggcagccccaccatcctgggcaagaggagctatgagcagcacaatggagtggatggcaacatgaagaagaggctgctgatgcccagccggggcctggccaaccacggccaggcccggcacatgggccccagcaggaacctgctgctgaatggcaagagctaccccaccaaggtgcggctcatccggggcggcagcctgccccctgtgaagagaagaaggatgaactggattgatgccccagatgatgtgttctacatggccacagaggagaccaggaagatcaggaagctgctgagcagcagcgagaccaagagagctgcccggcggccctacaagcccatcgccctgcggcagagccaggccctgcccccccggcccccacctccagcccctgtgaatgatgagcccatcgtgattgaggactag

SEQ ID NO: 20436 - DNA, 1887 bp, synthetic construct
  misc_feature 1..1887: note = Description of Artificial Sequence: Synthetic coding sequence
  source 1..1887: mol_type = other DNA
atggtggacctgcctgagaagctgaagcaccagctgcggcaccgggagctgttcctgagccggcagctggagagcctgcctgccacccacatccggggcaagtgcagcgtgaccctgctgaatgaaacagagagcctgaagagctacctggagcgggaggacttcttcttctacagcctggtgtatgacccccagcagaagaccctgctggccgacaagggggagatccgggtgggcaaccgctaccaggccgacatcacagacctgctgaaggagggggaggaggatggccgggaccagagccggctggagacccaggtgtgggaggcccacaaccccctgacagacaagcagattgaccagttcctggtggtggcccggtctgtgggcacctttgcccgggccctggactgcagcagctctgtgcggcagcccagcctgcacatgtctgctgctgctgccagccgggacatcaccctcttccacgccatggacaccctgcacaagaacatctatgacatcagcaaggccatcagcgccctggtgccccagggcggccctgtgctgtgcagagatgagatggaggagtggagcgccagcgaggccaacctgtttgaggaggccctggagaagtatggcaaggacttcacagacatccagcaggacttcctgccctggaagagcctgaccagcatcatcgagtactactacatgtggaagaccacagacagatatgtgcagcagaagaggctgaaggctgctgaggccgagagcaagctgaagcaggtgtacatccccaactacaacaagcccaaccccaaccagatctctgtgaacaacgtgaaggccggcgtggtgaatggaactggagcccctggccagagccctggggccggccgggcctgtgagagctgctacaccacccagagctaccagtggtacagctggggcccccccaacatgcagtgccgcctgtgtgccagctgctggacctactggaagaagtatggaggcctgaagatgcccacccggctggatggagagcggcccggccccaacagaagcaacatgagcccccacggcctgcctgcccggagcagcggcagccccaagtttgccatgaagacccggcaggccttctacctgcacaccaccaagctgacccgcatcgcccggcggctgtgccgggagatcctgcggccctggcacgccgcccggcacccctacctgcccatcaacagcgctgccatcaaggccgagtgcacagcccggctgcctgaggccagccagagccccctggtgctgaagcaggccgtgaggaagcccctggaggccgtgctgcgctacctggagacccacccccggccccccaagccagaccctgtgaagtctgtgtcctctgtgctgagcagcctgaccccagccaaggtggcccctgtgatcaacaacggcagccccaccatcctgggcaagaggagctatgagcagcacaacggggtggatggcaacatgaagaagaggctgctgatgcccagccggggcaccagcagcggcctggccaaccacggccaggcccggcacatgggccccagcaggaacctgctgctgaatggcaagagctaccccaccaaggtgcggctcatccggggcggcagcctgccccctgtgaagagaagaaggatgaactggattgatgccccagatgatgtgttctacatggccacagaggagaccaggaagatcaggaagctgctgagcagcagcgagaccaagagagctgcccggcggccctacaagcccatcgccctgcggcagagccaggccctgccccccaggcctcctcctccagcccctgtgaatgatgagcccatcgtgattgaagattag

SEQ ID NO: 20437 - DNA, 768 bp, synthetic construct
  misc_feature 1..768: note = Description of Artificial Sequence: Synthetic coding sequence
  source 1..768: mol_type = other DNA
atgaagacccggcaggccttctacctgcacaccaccaagctgaccagaattgcccggcggctgtgccgggagatcctgcggccctggcatgctgcccggcacccctacctgcccatcaacagcgctgccatcaaggcagaatgtacagcccggctgcctgaggccagccagagccccctggtgctgaagcaggccgtgaggaagcccctggaggccgtgctgcgctacctggagacccaccccaggcctcccaagccagaccctgtgaagtctgtgtcctctgtgctgagcagcctgaccccagccaaggtggcccctgtgatcaacaacggcagccccaccatcctgggcaagaggagctatgagcagcacaatggagtggatggcaacatgaagaagaggctgctgatgcccagccggggcacctacctgggcctggccaaccacggccaggcccggcacatgggccccagcaggaacctgctgctgaatggcaagagctaccccaccaaggtgcggctcatccggggcggcagcctgccccctgtgaagagaagaaggatgaactggattgatgccccagatgatgtgttctacatggccacagaggagaccaggaagatcaggaagctgctgagcagcagcgagaccaagagagctgcccggcggccctacaagcccatcgccctgcggcagagccaggccctgcccccccggcccccacctccagcccctgtgaatgatgagcccatcgtgattgaggactag

SEQ ID NO: 20438 - DNA, 1293 bp, synthetic construct
  misc_feature 1..1293: note = Description of Artificial Sequence: Synthetic coding sequence
  source 1..1293: mol_type = other DNA
atggccgccaacatgtacagagtgggggactatgtgtactttgagaacagcagcagcaacccctacctgatcagaagaattgaggagctgaacaagacagccaatggaaatgtggaggccaaggtggtgtgcttctacagaagaagagacatcagcagcaccctcatcgccctggccgacaagcacgccaccctgtctgtgtgctacaaggccggccctggagctgacaatggagaggagggggagattgaggaggagatggagaaccctgagatggtggacctgcctgagaagctgaagcaccagctgcggcaccgggagctgttcctgagccggcagctggagagcctgcctgccacccacatccggggcaaatgttctgtgaccctgctgaatgaaacagagagcctgaagagctacctggagcgggaggacttcttcttctacagcctggtgtatgacccccagcagaagaccctgctggccgacaagggggagatccgggtgggcaaccgctaccaggccgacatcacagacctgctgaaggagggggaggaggatggccgggaccagagccggctggagacccaggtgtgggaggcccacaaccccctgacagacaagcagattgaccagttcctggtggtggcccggtctgtgggcacctttgcccgggccctggactgcagcagctctgtgcggcagcccagcctgcacatgtctgctgctgctgccagccgggacatcaccctcttccacgccatggacaccctgcacaagaacatctatgacatcagcaaggccatcagcgccctggtgccccagggcggccctgtgctgtgcagagatgagatggaggagtggagcgccagcgaggccaacctgtttgaggaggccctggagaagtatggcaaggacttcacagacatccagcaggacttcctgccctggaagagcctgaccagcatcatcgagtactactacatgtggaagaccacagaccgctacgtgcagcagaagaggctgaaggctgctgaggccgagagcaagctgaagcaggtgtacatccccaactacaacaagcccaaccccaaccagatctctgtgaacaacgtgaaggccggcgtggtgaatggcaccggggcccctggccagagccctggagctggccgggcctgtgagagctgctacatgagcagcctgcgcatcctgctggacatcctggaggagatctggtggctggagaatgccaaccctgtgcgctggagggaggcccggaccaagccccagtag

SEQ ID NO: 20439 - DNA, 1422 bp, synthetic construct
  misc_feature 1..1422: note = Description of Artificial Sequence: Synthetic coding sequence
  source 1..1422: mol_type = other DNA
atgctgcggcctgtgattgaggaggagatctccatgctgggggagatcacccacctgcagaccatcagcgaggacctgaagagcctgaccatggacccccacaagctgcccagcagcagcgagcaggtgatcctggacctgaagggcagtgactacagctggagctaccagaccccacccagcagccccagcaccaccatgagcaggaagagctctgtgtgcagcagcctgaacagcgtgaacagcagtgacagccgcagcagcggcagccacagccacagccccagcagccactaccgctaccgcagcagcaacctggcccagcaggcccctgtgcggctgagctctgtgagcagccatgacagcggcttcatcagccaggatgccttccagagcaagagccccagccccatgcctcctgaggcccccaaccagaggaggaaggagaagcgggagccagaccccaacggcggcggccccaccacagccagcggccccccagctgctgctgaggaggcccagaggcccaggtccatgacagtgtctgctgccaccaggcctggagaggagatggaggcctgtgaggagctggccctggccctgagccggggcctgcagctggacacccagaggagcagccgggacagcctgcagtgcagcagcggctacagcacccagaccaccaccccctgctgcagcgaggacaccatccccagccaggtgtctgactatgactacttctctgtgtctggggaccaggaggccgaccagcaggagtttgacaagagcagcaccatccccaggaacagcgacatcagccagagctacagaaggatgttccaggccaagaggcctgccagcacagctggcctgcccaccaccctgggccctgccatggtgaccccaggagtggccaccatccggaggacccccagcaccaagcccagcgtgcggcggggcaccatcggggccggccccatccccatcaagacccctgtgattcctgtgaagacccccaccgtgcctgacctgcccggggtgctgcctgcccccccagatggccctgaggagcggggggagcacagccctgagagccccagcgtgggggagggcccccagggcgtgacctccatgcccagctccatgtggagcggccaggcctctgtgaacccccccctgcccggccccaagcccagcatccctgaggagcaccggcaggccatccctgagagcgaggccgaggaccaggagcgggagccccccagcgccaccgtgtccccaggccagatccctgagagtgaccctgctgacctgagcccccgggacaccccccagggcgaggacatgctgaatgccatccggcggggcgtgaagctgaagaagaccaccaccaatgacagaagtgccccccgcttctcctag

SEQ ID NO: 20440 - DNA, 2193 bp, synthetic construct
  misc_feature 1..2193: note = Description of Artificial Sequence: Synthetic coding sequence
  source 1..2193: mol_type = other DNA
atggaggccgtgattgagaaggagtgcagcgccctgggcggcctcttccagaccatcatcagtgacatgaagggcagctaccctgtgtgggaggacttcatcaacaaggccggcaagctgcagagccagctgcggaccaccgtggtggccgccgccgccttcctggatgccttccagaaggtggccgacatggccaccaacacccggggcggcacccgggagatcggcagcgccctgaccaggatgtgcatgaggcacaggagcattgaggccaagctgcggcagttcagcagcgccctgattgactgcctgatcaaccccctgcaggagcagatggaggagtggaagaaggtggccaaccagctggacaaggaccacgccaaggagtacaagaaggcccggcaggagatcaagaagaagagcagtgacaccctgaagctgcagaagaaggccaagaagggccgcggggacatccagccccagctggacagcgccctgcaggatgtgaatgacaagtacctgctgctggaggagacagagaagcaggccgtgaggaaggccctgattgaggagcggggccgcttctgcaccttcatctccatgctgcggcctgtgattgaggaggagatctccatgctgggggagatcacccacctgcagaccatcagcgaggacctgaagagcctgaccatggacccccacaagctgcccagcagcagcgagcaggtgatcctggacctgaagggcagtgactacagctggagctaccagaccccacccagcagccccagcaccaccatgagcaggaagagctctgtgtgcagcagcctgaacagcgtgaacagcagtgacagccgcagcagcggcagccacagccacagccccagcagccactaccgctaccgcagcagcaacctggcccagcaggcccctgtgcggctgagctctgtgagcagccatgacagcggcttcatcagccaggatgccttccagagcaagagccccagccccatgcctcctgaggcccccaaccagaacagcagcagcagcgccagcagcgaggccagcgagacctgccagagcgtgtctgagtgcagcagccccacctctgtgagcagcggcagcaccatgggcgcctgggtgtccacagagaaggactgggccaagccaggcccctatgaccagcccctggtgaacaccctgcagaggaggaaggagaagcgggagccagaccccaatggaggcggccccaccacagccagcggccccccagctgctgctgaggaggcccagaggcccaggtccatgacagtgtctgctgccaccaggcctggagaggagatggaggcctgtgaggagctggccctggccctgagccggggcctgcagctggacacccagaggagcagccgggacagcctgcagtgcagcagcggctacagcacccagaccaccaccccctgctgcagcgaggacaccatccccagccaggtgtctgactatgactacttctctgtgtctggggaccaggaggccgaccagcaggagtttgacaagagcagcaccatccccaggaacagcgacatcagccagagctacagaaggatgttccaggccaagaggcctgccagcacagctggcctgcccaccaccctgggccctgccatggtgaccccaggagtggccaccatccggaggacccccagcaccaagcccagcgtgagaagaggcaccatcggggccggccccatccccatcaagacccctgtgattcctgtgaagacccccaccgtgcctgacctgcccggggtgctgcctgcccccccagatggccctgaggagcggggggagcacagccctgagagccccagcgtgggggagggcccccagggcgtgacctccatgcccagctccatgtggagcggccaggcctctgtgaacccccccctgcccggccccaagcccagcatccctgaggagcaccggcaggccatccctgagagcgaggccgaggaccaggagcgggagcccccatctgccaccgtgtccccaggccagatccctgagagtgaccctgctgacctgagcccccgggacaccccccagggcgaggacatgctgaatgccatcagaagaggagtgaagctgaagaagaccaccaccaatgacagaagtgccccccgcttctcctag

SEQ ID NO: 20441 - DNA, 1590 bp, synthetic construct
  misc_feature 1..1590: note = Description of Artificial Sequence: Synthetic coding sequence
  source 1..1590: mol_type = other DNA
atgagcaggaagagctctgtgtgcagcagcctgaacagcgtgaacagcagtgacagccgcagcagcggcagccacagccacagccccagcagccactaccgctaccgcagcagcaacctggcccagcaggcccctgtgcggctgagctctgtgagcagccatgacagcggcttcatcagccaggatgccttccagagcaagagccccagccccatgcctcctgaggcccccaaccagaacagcagcagcagcgccagcagcgaggccagcgagacctgccagagcgtgtctgagtgcagcagccccacctctgtgagcagcggcagcaccatgggcgcctgggtgtccacagagaagctgagcaatggcttcagccactacagcctgagcagcgagagccacgtgggccccaccggggccggcctcttcccccactgcctgcctgccagccggctgctgccccgggtgacctctgtgcacctgcctgactatgcccactactacaccatcggccctggcatgttccccagcagccagatccccagctggaaggactgggccaagccaggcccctatgaccagcccctggtgaacaccctgcagaggaggaaggagaagcgggagccagaccccaacggcggcggccccaccacagccagcggccccccagctgctgctgaggaggcccagaggcccaggtccatgacagtgtctgctgccaccaggcctggagaggagatggaggcctgtgaggagctggccctggccctgagccggggcctgcagctggacacccagaggagcagccgggacagcctgcagtgcagcagcggctacagcacccagaccaccaccccctgctgcagcgaggacaccatccccagccaggtgtctgactatgactacttctctgtgtctggggaccaggaggccgaccagcaggagtttgacaagagcagcaccatccccaggaacagcgacatcagccagagctacagaaggatgttccaggccaagaggcctgccagcacagctggcctgcccaccaccctgggccctgccatggtgaccccaggagtggccaccatccggaggacccccagcaccaagcccagcgtgcggcggggcaccatcggggccggccccatccccatcaagacccctgtgattcctgtgaagacccccaccgtgcctgacctgcccggggtgctgcctgcccccccagatggccctgaggagcggggggagcacagccctgagagccccagcgtgggggagggcccccagggcgtgacctccatgcccagctccatgtggagcggccaggcctctgtgaacccccccctgcccggccccaagcccagcatccctgaggagcaccggcaggccatccctgagagcgaggccgaggaccaggagcgggagccccccagcgccaccgtgtccccaggccagatccctgagagtgaccctgctgacctgagcccccgggacaccccccagggcgaggacatgctgaatgccatccggcggggcgtgaagctgaagaagaccaccaccaatgacagaagtgccccccgcttctcctag

SEQ ID NO: 20442 - DNA, 2268 bp, synthetic construct
  misc_feature 1..2268: note = Description of Artificial Sequence: Synthetic coding sequence
  source 1..2268: mol_type = other DNA
atggaggccgtgattgagaaggagtgcagcgccctgggcggcctcttccagaccatcatcagtgacatgaagggcagctaccctgtgtgggaggacttcatcaacaaggccggcaagctgcagagccagctgcggaccaccgtggtggccgccgccgccttcctggatgccttccagaaggtggccgacatggccaccaacacccggggcggcacccgggagatcggcagcgccctgaccaggatgtgcatgaggcacaggagcattgaggccaagctgcggcagttcagcagcgccctgattgactgcctgatcaaccccctgcaggagcagatggaggagtggaagaaggtggccaaccagctggacaaggaccacgccaaggagtacaagaaggcccggcaggagatcaagaagaagagcagtgacaccctgaagctgcagaagaaggccaagaagggccgcggggacatccagccccagctggacagcgccctgcaggatgtgaatgacaagtacctgctgctggaggagacagagaagcaggccgtgaggaaggccctgattgaggagcggggccgcttctgcaccttcatctccatgctgcggcctgtgattgaggaggagatctccatgctgggggagatcacccacctgcagaccatcagcgaggacctgaagagcctgaccatggacccccacaagctgcccagcagcagcgagcaggtgatcctggacctgaagggcagtgactacagctggagctaccagaccccacccagcagccccagcaccaccatgagcaggaagagctctgtgtgcagcagcctgaacagcgtgaacagcagtgacagccgcagcagcggcagccacagccacagccccagcagccactaccgctaccgcagcagcaacctggcccagcaggcccctgtgcggctgagctctgtgagcagccatgacagcggcttcatcagccaggatgccttccagagcaagagccccagccccatgcctcctgaggcccccaaccagctgagcaatggcttcagccactacagcctgagcagcgagagccacgtgggccccaccggggccggcctcttcccccactgcctgcctgccagccggctgctgccccgggtgacctctgtgcacctgcctgactatgcccactactacaccatcggccctggcatgttccccagcagccagatccccagctggaaggactgggccaagccaggcccctatgaccagcccctggtgaacaccctgcagaggaggaaggagaagcgggagccagaccccaacggcggcggccccaccacagccagcggccccccagctgctgctgaggaggcccagaggcccaggtccatgacagtgtctgctgccaccaggcctggagaggagatggaggcctgtgaggagctggccctggccctgagccggggcctgcagctggacacccagaggagcagccgggacagcctgcagtgcagcagcggctacagcacccagaccaccaccccctgctgcagcgaggacaccatccccagccaggtgtctgactatgactacttctctgtgtctggggaccaggaggccgaccagcaggagtttgacaagagcagcaccatccccaggaacagcgacatcagccagagctacagaaggatgttccaggccaagaggcctgccagcacagctggcctgcccaccaccctgggccctgccatggtgaccccaggagtggccaccatccggaggacccccagcaccaagcccagcgtgcggcggggcaccatcggggccggccccatccccatcaagacccctgtgattcctgtgaagacccccaccgtgcctgacctgcccggggtgctgcctgcccccccagatggccctgaggagcggggggagcacagccctgagagccccagcgtgggggagggcccccagggcgtgacctccatgcccagctccatgtggagcggccaggcctctgtgaacccccccctgcccggccccaagcccagcatccctgaggagcaccggcaggccatccctgagagcgaggccgaggaccaggagcgggagccccccagcgccaccgtgtccccaggccagatccctgagagtgaccctgctgacctgagcccccgggacaccccccagggcgaggacatgctgaatgccatccggcggggcgtgaagctgaagaagaccaccaccaatgacagaagtgccccccgcttctcctag

SEQ ID NO: 20443 - DNA, 1437 bp, synthetic construct
  misc_feature 1..1437: note = Description of Artificial Sequence: Synthetic coding sequence
  source 1..1437: mol_type = other DNA
atggccggcgtggaggaggtggccgccagcggcagccacctgaatggagacctggaccctgatgaccgggaggagggcgccgccagcacagctgaggaggccgccaagaagaagaggaggaagaagaagaagagcaagggccccagcgctgctggggagcaggagccagacaaggagagcggggcctctgtggatgaggtggcccggcagctggagaggtctgccctggaggacaaggagagagatgaagatgatgaagatggagatggagatggagatggagccaccgggaagaagaagaagaagaagaagaagaagaggggccccaaggtgcagacagatcctccttctgtgcccatctgtgacctgtaccccaacggggtcttccccaagggccaggagtgtgagtacccacccacccaggacggccgcacagctgcctggaggaccaccagcgaggagaagaaggccctggaccaggccagcgaggagatctggaatgacttccgggaggccgctgaggcccaccggcaggtgaggaaatatgtgatgtcctggatcaagccaggcatgaccatgattgagatctgtgagaagctggaggactgcagcaggaagctgatcaaggaaaatggcctgaatgccggcctggccttccccaccggctgcagcctgaacaactgtgccgcccactacaccccaaatgctggggacaccaccgtgctgcagtatgatgacatctgcaagattgactttggcacccacatcagcggccgcatcatcgactgtgccttcaccgtgaccttcaaccccaagtatgacaccctgctgaaggctgtgaaggatgccaccaacacaggcatcaagtgtgccggcattgatgtgcggctgtgtgatgtgggggaggccatccaggaggtgatggagagctatgaggtggagattgatggcaagacctaccaggtgaagcccatccggaacctgaatggccacagcatcggccagtaccgcatccacgccggcaagacagtgcccatcgtgaagggcggggaggccaccaggatggaggagggggaggtgtatgccatcgagaccttcggcagcactggaaaaggagtggtgcatgatgacatggagtgcagccactacatgaagaactttgatgtgggccacgtgcccatccggctgcccaggaccaagcacctgctgaatgtcatcaatgaaaattttggcaccctggccttctgccgccgctggctggaccggctgggggagagcaagtacctgatggccctgaagaacctgtgtgacctgggcatcgtggacccctacccacccctgtgtgacatcaagggcagctacacagcccagtttgagcacaccatcctgctgcggcccacctgcaaggaggtggtgtccagaggagatgactactag

SEQ ID NO: 20444 - DNA, 1743 bp, synthetic construct
  misc_feature 1..1743: note = Description of Artificial Sequence: Synthetic coding sequence
  source 1..1743: mol_type = other DNA
atgggcaccaccggcctggagagcctgagcctgggggacagaggagctgcccccaccgtgaccagcagcgagcggctggtgcctgaccccccaaatgacctgaggaaagaagatgtggccatggagctggagcgggtgggggaggatgaggagcagatgatgatcaagaggagcagcgagtgcaaccccctgctgcaggagcccatcgccagcgcccagtttggagccacagctggaacagaatgtaggaagtctgtgccctgtggctgggagcgggtggtgaagcagaggctgtttgggaagacagctggccgctttgatgtgtacttcatcagcccccagggcctgaagttccgcagcaagagcagcctggccaactacctgcacaagaatggagagaccagcctgaagccagaagattttgacttcaccgtgctgagcaagaggggcatcaagagccgctacaaggactgcagcatggccgccctgaccagccacctgcagaaccagagcaacaacagcaactggaacctgcggaccaggagcaagtgcaagaaggatgtgttcatgccacccagcagcagcagcgagctgcaggagagccggggcctgagcaacttcaccagcacccacctgctgctgaaggaggatgaaggagtggatgatgtgaacttcaggaaggtgaggaagcccaagggcaaggtgaccatcctgaagggcatccccatcaagaagaccaagaagggctgcaggaagagctgcagcggctttgtgcagagcgacagcaagcgggagagcgtgtgcaacaaggcagatgctgagagcgagcctgtggcccagaagagccagctggacagaacagtgtgcatcagtgatgctggggcctgtggggagaccctgtctgtgaccagcgaggagaacagcctggtgaagaagaaggagaggagcctgagcagcggcagcaacttctgcagcgagcagaagaccagcggcatcatcaacaagttctgcagcgccaaggacagcgagcacaatgagaagtatgaggacaccttcctggagagcgaggagatcggcaccaaggtggaggtggtggagaggaaggagcacctgcacacagacatcctgaagaggggcagcgagatggacaacaactgcagccccaccaggaaggacttcaccggggagaagatcttccaggaggacaccatccccaggacccagattgaaagaaggaagaccagcctgtacttcagcagcaagtacaacaaggaggccctgagcccccccaggaggaaggccttcaagaagtggaccccacccaggagccccttcaacctggtgcaggagaccctcttccatgacccctggaagctgctgattgccaccatcttcctgaacagaaccagcggcaagatggccatccctgtgctgtggaagttcctggagaagtaccccagcgctgaggtggccaggacagctgactggagagatgtgtctgagctgctgaagcccctgggcctgtatgacctgcgggccaagaccatcgtgaagttcagtgatgagtacctgaccaagcagtggaagtaccccatcgagctgcatggaattggcaagtatggaaatgacagctaccgcatcttctgtgtgaatgagtggaagcaggtgcaccctgaggaccacaagctgaacaagtaccatgactggctgtgggagaaccacgagaagctgagcctgtcctag

SEQ ID NO: 20445 - DNA, 789 bp, synthetic construct
  misc_feature 1..789: note = Description of Artificial Sequence: Synthetic coding sequence
  source 1..789: mol_type = other DNA
atgggcaccaccggcctggagagcctgagcctgggggacagaggagctgcccccaccgtgaccagcagcgagcggctggtgcctgaccccccaaatgacctgaggaaagaagatgtggccatggagctggagcgggtgggggaggatgaggagcagatgatgatcaagaggagcagcgagtgcaaccccctgctgcaggagcccatcgccagcgcccagtttggagccacagctggaacagagtgccaggacaccatccccaggacccagattgaaagaaggaagaccagcctgtacttcagcagcaagtacaacaaggaggccctgagcccccccaggaggaaggccttcaagaagtggaccccacccaggagccccttcaacctggtgcaggagaccctcttccatgacccctggaagctgctgattgccaccatcttcctgaacagaaccagcggcaagatggccatccctgtgctgtggaagttcctggagaagtaccccagcgctgaggtggccaggacagctgactggagagatgtgtctgagctgctgaagcccctgggcctgtatgacctgcgggccaagaccatcgtgaagttcagtgatgagtacctgaccaagcagtggaagtaccccatcgagctgcatggaattggcaagtatggaaatgacagctaccgcatcttctgtgtgaatgagtggaagcaggtgcaccctgaggaccacaagctgaacaagtaccatgactggctgtgggagaaccacgagaagctgagcctgtcctag

SEQ ID NO: 20446 - DNA, 1725 bp, synthetic construct
  misc_feature 1..1725: note = Description of Artificial Sequence: Synthetic coding sequence
  source 1..1725: mol_type = other DNA
atgggcaccaccggcctggagagcctgagcctgggggacagaggagctgcccccaccgtgaccagcagcgagcggctggtgcctgaccccccaaatgacctgaggaaagaagatgtggccatggagctggagcgggtgggggaggatgaggagcagatgatgatcaagaggagcagcgagtgcaaccccctgctgcaggagcccatcgccagcgcccagtttggagccacagctggaacagaatgtaggaagtctgtgccctgtggctgggagcgggtggtgaagcagaggctgtttgggaagacagctggccgctttgatgtgtacttcatcagcccccagggcctgaagttccgcagcaagagcagcctggccaactacctgcacaagaatggagagaccagcctgaagccagaagattttgacttcaccgtgctgagcaagaggggcatcaagagccgctacaaggactgcagcatggccgccctgaccagccacctgcagaaccagagcaacaacagcaactggaacctgcggaccaggagcaagtgcaagaaggatgtgttcatgccacccagcagcagcagcgagctgcaggagagccggggcctgagcaacttcaccagcacccacctgctgctgaaggaggatgaaggagtggatgatgtgaacttcaggaaggtgaggaagcccaagggcaaggtgaccatcctgaagggcatccccatcaagaagaccaagaagggctgcaggaagagctgcagcggctttgtgcagagcgacagcaagcgggagagcgtgtgcaacaaggcagatgctgagagcgagcctgtggcccagaagagccagctggacagaacagtgtgcatcagtgatgctggggcctgtggggagaccctgtctgtgaccagcgaggagaacagcctggtgaagaagaaggagaggagcctgagcagcggcagcaacttctgcagcgagcagaagaccagcggcatcatcaacaagttctgcagcgccaaggacagcgagcacaatgagaagtatgaggacaccttcctggagagcgaggagatcggcaccaaggtggaggtggtggagaggaaggagcacctgcacacagacatcctgaagaggggcagcgagatggacaacaactgcagccccaccaggaaggacttcacagaggacaccatccccaggacccagattgaaagaaggaagaccagcctgtacttcagcagcaagtacaacaaggaggccctgagcccccccaggaggaaggccttcaagaagtggaccccacccaggagccccttcaacctggtgcaggagaccctcttccatgacccctggaagctgctgattgccaccatcttcctgaacagaaccagcggcaagatggccatccctgtgctgtggaagttcctggagaagtaccccagcgctgaggtggccaggacagctgactggagagatgtgtctgagctgctgaagcccctgggcctgtatgacctgcgggccaagaccatcgtgaagttcagtgatgagtacctgaccaagcagtggaagtaccccatcgagctgcatggaattggcaagtatggaaatgacagctaccgcatcttctgtgtgaatgagtggaagcaggtgcaccctgaggaccacaagctgaacaagtaccatgactggctgtgggagaaccacgagaagctgagcctgtcctag

SEQ ID NO: 20447 - DNA, 93 bp, synthetic construct
  misc_feature 1..93: note = Description of Artificial Sequence: Synthetic coding sequence
  source 1..93: mol_type = other DNA
atggtgaatgaggcccggggcaacagcagcctgaacccctgcctggagggcagcgccagcagcggcagcgagagcagcaaggacagcagctag

SEQ ID NO: 20448 - DNA, 2094 bp, synthetic construct
  misc_feature 1..2094: note = Description of Artificial Sequence: Synthetic coding sequence
  source 1..2094: mol_type = other DNA
atggaccacaggaaggcccgggtgctgcctgctggccactactgccccagcctgggcatctgggccagccaggtgggctctgtgcgcagctctgtgcccccatccatcagcaggaacccagccatggtgaatgaggcccggggcaacagcagcctgaacccctgcctggagggcagcgccagcagcggcagcgagagcagcaaggacagcagccgctgcagcaccccaggcctggaccctgagagacatgagcggctgcgggagaagatgagaagaaggctggagagcggggacaagtggttcagcctggagttcttcccccccaggacagctgagggcgctgtgaacctgatcagcagatttgacaggatggccgccggcggccccctgtacattgatgtgacctggcaccctgctggggaccccggcagtgacaaggagaccagctccatgatgattgccagcacagctgtgaactactgcggcctggagaccatcctgcacatgacctgctgccggcagaggctggaggagatcaccggccacctgcacaaggccaagcagctgggcctgaagaacatcatggccctgcggggggaccccatcggggaccagtgggaggaggaggagggcggcttcaactatgctgtggacctggtgaagcacatccgctcagaatttggagactactttgacatctgtgtggccggctaccccaagggccaccctgaggccggcagctttgaggccgacctgaagcacctgaaggagaaggtgtctgctggagctgacttcatcatcacccagctgttctttgaggccgacaccttcttccgctttgtgaaggcctgcacagacatgggcatcacctgccccatcgtgcccggcatcttccccatccagggctaccacagcctgcggcagctggtgaagctgagcaagctggaggtgccccaggagatcaaggatgtgattgagcccatcaaggacaatgatgctgccatccggaactacggcatcgagctggccgtgtccctgtgccaggagctgctggccagcggcctggtgcccggcctgcacttctacaccctgaaccgggagatggccaccacagaggtgctgaagaggctgggcatgtggacagaggacccccggcggcccctgccctgggccctgagcgcccaccccaagaggcgggaggaggatgtgcggcccatcttctgggccagccggcccaagagctacatctaccgcacccaggagtgggatgagttccccaacggccgctggggcaacagcagcagccctgccttcggggagctgaaggactactacctgttctacctgaagagcaagagccccaaggaggagctgctgaagatgtggggcgaggagctgaccagcgaggagagcgtgtttgaggtgtttgtgctgtacctgtctggagagcccaacagaaatggccacaaggtgacctgcctgccctggaatgatgagcccctggccgctgagaccagcctgctgaaggaggagctgctgcgggtgaaccggcagggcatcctgaccatcaacagccagcccaacatcaacgggaagcccagcagtgaccccatcgtgggctggggccccagcggcggctacgtgttccagaaggcctacctggagttcttcaccagccgggagacagctgaggccctgctgcaggtgctgaagaagtatgagctgcgggtgaactaccacctggtgaatgtgaagggggagaacatcaccaatgcccctgagctgcagcccaatgctgtgacctggggcatcttccctggccgggagatcatccagcccaccgtggtggaccctgtgtccttcatgttctggaaggatgaggcctttgccctgtggattgagcgctggggcaagctgtatgaggaggagagccccagcaggaccatcatccagtacatccatgacaactacttcctggtgaacctggtggacaatgacttccccctggacaactgcctgtggcaggtggtggaggacaccctggagctgctgaaccggcccacccagaatgcccgggagacagaggccccctag

SEQ ID NO: 20449 - DNA, 2094 bp, synthetic construct; identical to SEQ ID NO: 20448
  misc_feature 1..2094: note = Description of Artificial Sequence: Synthetic coding sequence
  source 1..2094: mol_type = other DNA

SEQ ID NO: 20450 - DNA, 1971 bp, synthetic construct
  misc_feature 1..1971: note = Description of Artificial Sequence: Synthetic coding sequence
  source 1..1971: mol_type = other DNA
atggtgaatgaggcccggggcaacagcagcctgaacccctgcctggagggcagcgccagcagcggcagcgagagcagcaaggacagcagccgctgcagcaccccaggcctggaccctgagagacatgagcggctgcgggagaagatgagaagaaggctggagagcggggacaagtggttcagcctggagttcttcccccccaggacagctgagggcgctgtgaacctgatcagcagatttgacaggatggctgctgggggccccctgtacattgatgtgacctggcaccctgctggggaccccggcagtgacaaggagaccagctccatgatgattgccagcacagctgtgaactactgcggcctggagaccatcctgcacatgacctgctgccggcagaggctggaggagatcaccggccacctgcacaaggccaagcagctgggcctgaagaacatcatggccctgcggggggaccccatcggggaccagtgggaggaggaggagggcggcttcaactatgctgtggacctggtgaagcacatccgctcagaatttggagactactttgacatctgtgtggccggctaccccaagggccaccctgaggccggcagctttgaagctgacctgaagcacctgaaggagaaggtgtctgctggagctgacttcatcatcacccagctgttctttgaagctgacaccttcttccgctttgtgaaggcctgcacagacatgggcatcacctgccccatcgtgcccggcatcttccccatccagggctaccacagcctgcggcagctggtgaagctgagcaagctggaggtgccccaggagatcaaggatgtgattgagcccatcaaggacaatgatgctgccatcagaaattatggaattgagctggccgtgtccctgtgccaggagctgctggccagcggcctggtgcccggcctgcacttctacaccctgaaccgggagatggccaccacagaggtgctgaagaggctgggcatgtggacagaggacccccggcggcccctgccctgggccctgagcgcccaccccaagagaagagaggaggatgtgcggcccatcttctgggccagccggcccaagagctacatctaccgcacccaggagtgggatgagttccccaacggccgctggggcaacagcagcagccctgcctttggagagctgaaggactactacctgttctacctgaagagcaagagccccaaggaggagctgctgaagatgtggggcgaggagctgaccagcgaggagagcgtgtttgaggtgtttgtgctgtacctgagcggggagcccaacagaaatggccacaaggtgacctgcctgccctggaatgatgagcccctggccgctgagaccagcctgctgaaggaggagctgctgcgggtgaaccggcagggcatcctgaccatcaacagccagcccaacatcaatggcaagcccagcagtgaccccatcgtgggctggggccccagcggcggctacgtgttccagaaggcctacctggagttcttcaccagccgggagacagctgaggccctgctgcaggtgctgaagaagtatgagctgcgggtgaactaccacctggtgaatgtgaagggggagaacatcaccaatgcccctgagctgcagcccaatgctgtgacctggggcatcttccctggccgggagatcatccagcccaccgtggtggaccctgtgtccttcatgttctggaaggatgaggcctttgccctgtggattgagcgctggggcaagctgtatgaggaggagagccccagcaggaccatcatccagtacatccatgacaactacttcctggtgaacctggtggacaatgacttccccctggacaactgcctgtggcaggtggtggaggacaccctggagctgctgaaccggcccacccagaatgcccgggagacagaggccccctag

SEQ ID NO: 20451 - DNA, 1971 bp, synthetic construct; identical to SEQ ID NO: 20450
  misc_feature 1..1971: note = Description of Artificial Sequence: Synthetic coding sequence
  source 1..1971: mol_type = other DNA

SEQ ID NO: 20452 - DNA, 93 bp, synthetic construct; identical to SEQ ID NO: 20447
  misc_feature 1..93: note = Description of Artificial Sequence: Synthetic coding sequence
  source 1..93: mol_type = other DNA

SEQ ID NO: 20453 - DNA, 432 bp, synthetic construct
  misc_feature 1..432: note = Description of Artificial Sequence: Synthetic coding sequence
  source 1..432: mol_type = other DNA
atggtgaatgaggcccggggcaacagcagcctgaacccctgcctggagggcagcgccagcagcggcagcgagagcagcaaggacagcagccgctgcagcaccccaggcctggaccctgagagacatgagcggctgcgggagaagatgagaagaaggctggagagcggggacaagtggttcagcctggagttcttcccccccaggacagctgagggcgctgtgaacctgatcagcagatttgacaggatggctgctgggggccccctgtacattgatgtgacctggcaccctgctggggaccccggcagtgacaaggagaccagctccatgatgattgccagcacagctgtgaactactgcggcctggagaccatcctgcacatgacctgctgccggcagaggctggaggagatcaccggccacctgcactag

SEQ ID NO: 20454 - DNA, 162 bp, synthetic construct
  misc_feature 1..162: note = Description of Artificial Sequence: Synthetic coding sequence
  source 1..162: mol_type = other DNA
atgtgccggggctgcggctgcctgcccccagatgccccctgccccaccctgtgcagcaggaacccagccatggtgaatgaggcccggggcaacagcagcctgaacccctgcctggagggcagcgccagcagcggcagcgagagcagcaaggacagcagctag

SEQ ID NO: 20455 - DNA, 93 bp, synthetic construct; identical to SEQ ID NO: 20447
  misc_feature 1..93: note = Description of Artificial Sequence: Synthetic coding sequence
  source 1..93: mol_type = other DNA

SEQ ID NO: 20456 - DNA, 2508 bp, synthetic construct
  misc_feature 1..2508: note = Description of Artificial Sequence: Synthetic coding sequence
  source 1..2508: mol_type = other DNA
atggccgcccccatcctgaaggatgtggtggcctacgtggaggtgtggagcagcaatggaacagagaactacagcaagaccttcaccacccagctggtggacatgggcgccaaggtgtccaagaccttcaacaagcaggtgacccacgtgatcttcaaggatggctaccagagcacctgggacaaggcccagaagaggggcgtgaagctggtgtctgtgctgtgggtggagaagtgcaggacagctggggcccacattgatgagagcctcttccctgctgccaacatgaatgagcacctgagcagcctcatcaagaagaagaggaagtgcatgcagcccaaggacttcaacttcaagaccccagaaaatgacaagcgcttccagaagaagtttgagaagatggccaaggagctgcagaggcagaagaccaacctggatgatgatgtgcccatcctgctgtttgagagcaatggcagcctcatctacacccccaccatcgagatcaacagccgccaccacagcgccatggagaagaggctgcaggagatgaaggagaagcgggagaacctgagccccaccagcagccagatgatccagcagagccatgacaaccccagcaacagcctgtgtgaggcccccctgaacatcagccgggacaccctgtgcagtgatgagtactttgctgggggcctgcacagcagctttgatgacctgtgtggcaacagcggctgcggcaaccaggagaggaagctggagggcagcatcaatgacatcaagagtgatgtgtgcatcagcagcctggtgctgaaggccaacaacatccacagcagccccagcttcacccacctggacaagagcagcccccagaagttcctgagcaacctgagcaaggaggagatcaacctgcagaggaacattgctgggaaggtggtgaccccagaccagaagcaggccgccggcatgagccaggagacctttgaggagaagtaccgcctgagccccaccctgagcagcaccaagggccacctgctgatccacagccggcccaggagcagctctgtgaagaggaagagggtgagccacggcagccacagcccccccaaggagaagtgcaagaggaagaggagcacccggcgcagcatcatgccccggctgcagctgtgccgctcagaagatcggctgcagcacgtggccggccctgccctggaggccctgagctgtggggagagcagctatgatgactacttctccccagacaacctgaaggagcgctacagcgagaacctgcccccagagagccagctgcccagcagccctgcccagctgagctgccgcagcctgagcaagaaggagaggaccagcatctttgagatgtctgacttcagctgtgtgggcaagaagaccaggacagtggacatcaccaacttcaccgccaagaccatcagcagccccaggaagacaggaaatggagagggccgggccaccagcagctgtgtgaccagcgcccctgaggaggccctgcgctgctgccggcaggccggcaaggaggatgcctgcccagagggcaatggcttctcctacaccatcgaggaccctgccctgcccaagggccatgatgatgacctgacccccctggagggcagcctggaggagatgaaggaggccgtgggcctgaagagcacccagaacaagggcaccaccagcaagatcagcaacagcagcgagggggaggcccagagcgagcacgagccctgcttcatcgtggactgcaacatggagaccagcacagaggagaaggagaacctgcccggcggctacagcggctctgtgaagaaccggcccaccaggcatgatgtgctggatgacagctgtgatggcttcaaggacctgatcaagccccatgaggagctgaagaagagcggccggggcaagaagcccaccaggaccctggtgatgacctccatgcccagcgagaagcagaatgtggtgatccaggtggtggacaagctgaagggcttcagcatcgccccagatgtgtgtgagaccaccacccacgtgctgagcggcaagcccctgcggaccctgaatgtgctgctgggcatcgcccggggctgctgggtgctgtcctatgactgggtgctgtggagcctggagctgggccactggatcagcgaggagccctttgagctgagccaccacttccctgctgcccccctgtgccgctctgagtgccacctgtctgctggcccctaccggggcaccctgtttgctgaccagcctgccatgtttgtgtccccagccagcagcccccctgtggccaagctgtgtgagctggtgcacctgtgtggcggccgggtgtcccaggtgccccggcaggccagcatcgtgattggcccctacagcggcaagaagaaggccaccgtgaagtacctgtctgagaagtgggtgctggacagcatcacccagcacaaggtgtgtgcccctgagaactacctgctgagccagtag

SEQ ID NO: 20457 - DNA, 1833 bp, synthetic construct
  misc_feature 1..1833: note = Description of Artificial Sequence: Synthetic coding sequence
  source 1..1833: mol_type = other DNA
atggccgcccccatcctgaaggatgtggtggcctacgtggaggtgtggagcagcaatggaacagagaactacagcaagaccttcaccacccagctggtggacatgggcgccaaggtgtccaagaccttcaacaagcaggtgacccacgtgatcttcaaggatggctaccagagcacctgggacaaggcccagaagaggggcgtgaagctggtgtctgtgctgtgggtggagaagtgcaggacagctggggcccacattgatgagagcctcttccctgctgccaacatgaatgagcacctgagcagcctcatcaagaagaagaggaagtgcatgcagcccaaggacttcaacttcaagaccccagaaaatgacaagcgcttccagaagaagtttgagaagatggccaaggagctgcagaggcagaagaccaacctggatgatgatgtgcccatcctgctgtttgagagcaatggcagcctcatctacacccccaccatcgagatcaacagccgccaccacagcgccatggagaagaggctgcaggagatgaaggagaagcgggagaacctgagccccaccagcagccagatgatccagcagagccatgacaaccccagcaacagcctgtgtgaggcccccctgaacatcagccgggacaccctgtgcagtgatgagtactttgctgggggcctgcacagcagctttgatgacctgtgtggcaacagcggctgcggcaaccaggagaggaagctggagggcagcatcaatgacatcaagagtgatgtgtgcatcagcagcctggtgctgaaggccaacaacatccacagcagccccagcttcacccacctggacaagagcagcccccagaagttcctgagcaacctgagcaaggaggagatcaacctgcagaggaacattgctgggaaggtggtgaccccagaccagaagcaggccgccggcatgagccaggagacctttgaggagaagtaccgcctgagccccaccctgagcagcaccaagggccacctgctgatccacagccggcccaggagcagctctgtgaagaggaagagggtgagccacggcagccacagcccccccaaggagaagtgcaagaggaagaggagcacccggcgcagcatcatgccccggctgcagctgtgccgctcagaagatcggctgcagcacgtggccggccctgccctggaggccctgagctgtggggagagcagctatgatgactacttctccccagacaacctgaaggagcgctacagcgagaacctgcccccagagagccagctgcccagcagccctgcccagctgagctgccgcagcctgagcaagaaggagaggaccagcatctttgagatgtctgacttcagctgtgtgggcaagaagaccaggacagtggacatcaccaacttcaccgccaagaccatcagcagccccaggaagacaggaaatggagagggccgggccaccagcagctgtgtgaccagcgcccctgaggaggccctgcgctgctgccggcaggccggcaaggaggatgcctgcccagagggcaatggcttctcctacaccatcgaggaccctgccctgcccaagggccatgatgatgacctgacccccctggagggcagcctggaggagatgaaggaggccgtgggcctgaagagcacccagaacaagggcaccaccagcaagatcagcaacagcagcgagggggaggcccagagcgagcacgagccctgcttcatcgtggactgcaacatggagaccagcacagaggagaaggagaacctgcccggcggctacagcggctccatgtag

SEQ ID NO: 20458 - DNA, 1689 bp, synthetic construct
  misc_feature 1..1689: note = Description of Artificial Sequence: Synthetic coding sequence
  source 1..1689: mol_type = other DNA
atggccgcccccatcctgaaggatgtggtggcctacgtggaggtgtggagcagcaatggaacagagaactacagcaagaccttcaccacccagctggtggacatgggcgccaaggtgtccaagaccttcaacaagcaggtgacccacgtgatcttcaaggatggctaccagagcacctgggacaaggcccagaagaggggcgtgaagctggtgtctgtgctgtgggtggagaagtgcaggacagctggggcccacattgatgagagcctcttccctgctgccaacatgaatgagcacctgagcagcctcatcaagaagaagaggaagtgcatgcagcccaaggacttcaacttcaagaccccagaaaatgacaagcgcttccagaagaagtttgagaagatggccaaggagctgcagaggcagaagaccaacctggccagccagatgatccagcagagccatgacaaccccagcaacagcctgtgtgaggcccccctgaacatcagccgggacaccctgtgcagtgatgagtactttgctgggggcctgcacagcagctttgatgacctgtgtggcaacagcggctgcggcaaccaggagaggaagctggagggcagcatcaatgacatcaagagtgatgtgtgcatcagcagcctggtgctgaaggccaacaacatccacagcagccccagcttcacccacctggacaagagcagcccccagaagttcctgagcaacctgagcaaggaggagatcaacctgcagaggaacattgctgggaaggtggtgaccccagaccagaagcaggccgccggcatgagccaggagacctttgaggagaagtaccgcctgagccccaccctgagcagcaccaagggccacctgctgatccacagccggcccaggagcagctctgtgaagaggaagagggtgagccacggcagccacagcccccccaaggagaagtgcaagaggaagaggagcacccggcgcagcatcatgccccggctgcagctgtgccgctcagaagatcggctgcagcacgtggccggccctgccctggaggccctgagctgtggggagagcagctatgatgactacttctccccagacaacctgaaggagcgctacagcgagaacctgcccccagagagccagctgcccagcagccctgcccagctgagctgccgcagcctgagcaagaaggagaggaccagcatctttgagatgtctgacttcagctgtgtgggcaagaagaccaggacagtggacatcaccaacttcaccgccaagaccatcagcagccccaggaagacaggaaatggagagggccgggccaccagcagctgtgtgaccagcgcccctgaggaggccctgcgctgctgccggcaggccggcaaggaggatgcctgcccagagggcaatggcttctcctacaccatcgaggaccctgccctgcccaagggccatgatgatgacctgacccccctggagggcagcctggaggagatgaaggaggccgtgggcctgaagagcacccagaacaagggcaccaccagcaagatcagcaacagcagcgagggggaggcccagagcgagcacgagccctgcttcatcgtggactgcaacatggagaccagcacagaggagaaggagaacctgcccggcggctacagcggctccatgtag

SEQ ID NO: 20459 - DNA, 234 bp, synthetic construct
  misc_feature 1..234: note = Description of Artificial Sequence: Synthetic coding sequence
  source 1..234: mol_type = other DNA
atgaatgtgctgctgggctctgtggtgatctttgccacctttgtgaccctgtgcaatgccagctgctacttcatccccaatgaaggagtgcctggggacagcaccaggatgttcctgcacctgtgggtgatgaccaagaccacagccaaggagagcagcagaagaagaacagccagcatctcctggtggaggaggaggacccagaagaggcctgtgctgtctgtgaatggatag

SEQ ID NO: 20460 - DNA, 345 bp, synthetic construct
  misc_feature 1..345: note = Description of Artificial Sequence: Synthetic coding sequence
  source 1..345: mol_type = other DNA
atgaatgtgctgctgggctctgtggtgatctttgccacctttgtgaccctgtgcaatgccagctgctacttcatccccaatgaaggagtgcctggggacagcaccaggaagtgcatggacctgaagggcaacaagcaccccatcaacagcgagtggcagacagacaactgtgagacctgcacctgctatgaaacagagatcagctgctgcaccctggtgtccacccctgtgggctatgacaaggacaactgccagaggatcttcaagaaggaggactgcaagtacatcgtggtggagaagaaggaccccaagaagacctgcagcgtgtctgagtggatcatctag

SEQ ID NO: 20461 - DNA, 3813 bp, synthetic construct
  misc_feature 1..3813: note = Description of Artificial Sequence: Synthetic coding sequence
  source 1..3813: mol_type = other DNA
atgacagatgacaacagtgatgacaagattgaagatgagctgcagaccttcttcaccagtgacaaggatggcaacacccacgcctacaaccccaagagcccccccacccagaacagcagcgccagctctgtgaactggaacagcgccaacccagatgacatggtggtggactatgaaacagatcctgctgtggtgactggagagaacatcagcctgagcctgcagggcgtggaggtgtttggccacgagaagagcagcagtgacttcatcagcaagcaggtgctggacatgcacaaggacagcatctgccagtgcccagccctggtgggcacagagaagcccaagtacctgcagcacagctgccacagcctggaggccgtggagggccagagcgtggagcccagcctgccctttgtgtggaagcccaatgacaacctgaactgtgccggctactgtgatgccctggagctgaaccagacctttgacatgacagtggacaaggtgaactgcaccttcatcagccaccacgccatcggcaagagccagagcttccacacagctggcagcctgcccccaactggaagaagaagtggcagcaccagcagcctgagctacagcacctggaccagcagccacagcgacaagacccacgcccgggagaccacctatgaccgggagagctttgagaacccccaggtgacccccagcgaggcccaggacatgacctacacagccttcagtgatgtggtgatgcagagcgaggtgtttgtgtctgacatcggcaaccagtgtgcctgcagcagcggcaaggtgaccagcgagtacacagatggcagccagcagaggctggtgggggagaaggagacccaggccctgacccctgtgtctgatggcatggaggtgcccaatgattctgccctgcaggagttcttctgcctgagccatgatgagagcaacagcgagccccacagccagagcagctaccgccacaaggagatgggccagaacctgcgggagaccgtgtcctactgcctgattgatgatgaatgtcccctgatggtgcctgcctttgacaagtctgaggcccaggtgctgaaccctgagcacaaggtgacagaaacagaggacacccagatggtgtccaagggcaaggacctgggcacccagaaccacaccagcgagctgatcctgagcagccccccaggccagaaggtgggcagcagctttggcctgacctgggatgccaatgacatggtgatcagcacagacaagaccatgtgcatgagcacccctgtgctggagcccaccaaggtgaccttctctgtgagccccatcgaggccacagagaagtgcaagaaggtggagaagggcaacagaggcctgaagaacatcccagacagcaaggaggcccctgtgaacctgtgcaagcccagcctgggcaagagcaccatcaagaccaacacccccatcggctgcaaggtgaggaagacagagatcatctcctacccccggcccaacttcaagaatgtgaaggccaaggtgatgagcagagctgtgctgcagcccaaggatgctgccctgagcaaggtgaccccccggccccagcagaccagcgccagcagccccagctctgtgaacagccggcagcagacagtgctgagcaggacccccaggagtgacctgaatgctgacaagaaggccgagatcctgatcaacaagacccacaagcagcagttcaacaagctgatcaccagccaggccgtgcacgtgaccacccacagcaagaatgccagccaccgggtgcccaggaccaccagcgctgtgaagagcaaccaggaggatgtggacaaggccagcagcagcaacagcgcctgtgaaacaggctctgtgtctgccctcttccagaagatcaagggcatcctgcctgtgaagatggagagcgcagaatgtctggagatgacctacgtgcccaacatcgaccgcatcagccctgagaagaagggggagaaggaaaatggcacctccatggagaagcaggagctgaagcaggagatcatgaatgagacctttgaatatggcagcctcttcctgggcagcgccagcaagaccaccaccaccagcggcaggaacatcagcaagccagacagctgtggcctgcggcagattgctgcccccaaggccaaggtgggcccccctgtgtcctgcctgcggaggaacagcgacaacagaaaccccagcgctgacagagctgtgagcccccagaggatcagaagagtgagcagcagcggcaagcccaccagcctgaagacagcccagagctcctgggtgaacctgccccggcccctgcccaagagcaaggccagcctgaagagccctgccctgcggaggacaggcagcacccccagcatcgccagcacccacagcgagctgagcacctacagcaacaacagcggaaatgctgctgtgatcaagtatgaggagaagccacccaagccagccttccagaatggcagcagcggcagcttctacctgaagcccctggtgtcccgggcccacgtgcacctgatgaagaccccacccaagggccccagcaggaagaacctcttcaccgccctgaatgctgtggagaagagccggcagaagaaccccaggagcctgtgcatccagccccagacagccccagatgccctgcccccagagaagaccctggagctgacccagtacaagaccaagtgtgagaaccagagcggcttcatcctgcagctgaagcagctgctggcctgtggcaacaccaagtttgaggccctgactgtggtgatccagcacctgctgtctgagcgggaggaggccctgaagcagcacaagaccctgagccaggagctggtgaacctgcggggggagctggtgacagccagcaccacctgtgagaagctggagaaggccagaaatgagctgcagacagtgtatgaggcctttgtgcagcagcaccaggccgagaagacagagcgggagaaccggctgaaggagttctacacccgggagtatgagaagctgcgggacacctacatcgaggaggccgagaagtacaagatgcagctgcaggagcagtttgacaacctgaatgctgcccacgagaccagcaagctggagattgaggccagccacagcgagaagctggagctgctgaagaaggcctatgaggccagcctgtctgagatcaagaagggccatgaaattgagaagaagagcctggaggacctgctgtctgagaagcaggagagcctggagaagcagatcaatgacctgaagtcagaaaatgatgccctgaatgagaagctgaagtctgaggagcagaagaggcgggcccgggagaaggccaacctgaagaacccccagatcatgtacctggagcaggagctggagagcctgaaggctgtgctggagatcaagaatgagaagctgcaccagcaggacatcaagctgatgaagatggagaagctggtggacaacaacacagccctggtggacaagctgaagcgcttccagcaggagaatgaggagctgaaggccaggatggacaagcacatggccatcagccggcagctgagcacagagcaggccgtgctgcaggagagcctggagaaggagagcaaggtgaacaagaggctgtccatggagaatgaggagctgctgtggaagctgcacaacggggacctgtgcagccccaagaggagccccaccagcagcgccatccccctgcagagccccagaaattctggcagcttccccagccccagcatcagccccaggtag

SEQ ID NO: 20462 - DNA, 1311 bp, synthetic construct
  misc_feature 1..1311: note = Description of Artificial Sequence: Synthetic coding sequence
  source 1..1311: mol_type = other DNA
atgctgctgagccccaagttcagcctgagcaccatccacatccggctgacagccaagggcctgctgaggaacctgcggctgcccagcggcttccgccgcagcacagtggtgttccacacagtggagaagagccggcagaagaaccccaggagcctgtgcatccagccccagacagccccagatgccctgcccccagagaagaccctggagctgacccagtacaagaccaagtgtgagaaccagagcggcttcatcctgcagctgaagcagctgctggcctgtggcaacaccaagtttgaggccctgactgtggtgatccagcacctgctgtctgagcgggaggaggccctgaagcagcacaagaccctgagccaggagctggtgaacctgcggggggagctggtgacagccagcaccacctgtgagaagctggagaaggccagaaatgagctgcagacagtgtatgaggcctttgtgcagcagcaccaggccgagaagacagagcgggagaaccggctgaaggagttctacacccgggagtatgagaagctgcgggacacctacatcgaggaggccgagaagtacaagatgcagctgcaggagcagtttgacaacctgaatgctgcccacgagaccagcaagctggagattgaggccagccacagcgagaagctggagctgctgaagaaggcctatgaggccagcctgtctgagatcaagaagggccatgaaattgagaagaagagcctggaggacctgctgtctgagaagcaggagagcctggagaagcagatcaatgacctgaagtcagaaaatgatgccctgaatgagaagctgaagtctgaggagcagaagaggcgggcccgggagaaggccaacctgaagaacccccagatcatgtacctggagcaggagctggagagcctgaaggctgtgctggagatcaagaatgagaagctgcaccagcaggacatcaagctgatgaagatggagaagctggtggacaacaacacagccctggtggacaagctgaagcgcttccagcaggagaatgaggagctgaaggccaggatggacaagcacatggccatcagccggcagctgagcacagagcaggccgtgctgcaggagagcctggagaaggagagcaaggtgaacaagaggctgtccatggagaatgaggagctgctgtggaagctgcacaacggggacctgtgcagccccaagaggagccccaccagcagcgccatccccctgcagagccccagaaattctggcagcttccccagccccagcatcagccccaggtag

SEQ ID NO: 20463 - DNA, 1554 bp, synthetic construct
  misc_feature 1..1554: note = Description of Artificial Sequence: Synthetic coding sequence
  source 1..1554: mol_type = other DNA
atgacagtgcctgggggcttccgcagctgcacagaaacagacatcagcagcaagatcttcatcaacagcaccctgaccccacctgctggcagcgagcggcactatgatgccaccctgctgaccctgctggtggtgggcagctacagcctgtgcatcatccccctgctggccaccttcaccgggaagaagacaggaaatgctgctgtgatcaagtatgaggagaagccacccaagccagccttccagaatggcagcagcggcagcttctacctgaagcccctggtgtcccgggcccacgtgcacctgatgaagaccccacccaagggccccagcaggaagaacctcttcaccgccctgaatgctgtggagaagagccggcagaagaaccccaggagcctgtgcatccagccccagacagccccagatgccctgcccccagagaagaccctggagctgacccagtacaagaccaagtgtgagaaccagagcggcttcatcctgcagctgaagcagctgctggcctgtggcaacaccaagtttgaggccctgactgtggtgatccagcacctgctgtctgagcgggaggaggccctgaagcagcacaagaccctgagccaggagctggtgaacctgcggggggagctggtgacagccagcaccacctgtgagaagctggagaaggccagaaatgagctgcagacagtgtatgaggcctttgtgcagcagcaccaggccgagaagacagaaagagaaaatcggctgaaggagttctacacccgggagtatgagaagctgcgggacacctacatcgaggaggccgagaagtacaagatgcagctgcaggagcagtttgacaacctgaatgctgcccacgagaccagcaagctggagattgaggccagccacagcgagaagctggagctgctgaagaaggcctatgaggccagcctgtctgagatcaagaagggccacgagattgagaagaagagcctggaggacctgctgtctgagaagcaggagagcctggagaagcagatcaatgacctgaagtcagaaaatgatgccctgaatgagaagctgaagtctgaggagcagaagagaagagcccgggagaaggccaacctgaagaacccccagatcatgtacctggagcaggagctggagagcctgaaggctgtgctggagatcaagaatgagaagctgcaccagcaggacatcaagctgatgaagatggagaagctggtggacaacaacacagccctggtggacaagctgaagcgcttccagcaggagaatgaggagctgaaggccaggatggacaagcacatggccatcagccggcagctgagcacagagcaggccgtgctgcaggagagcctggagaaggagagcaaggtgaacaagaggctgtccatggagaatgaggagctgctgtggaagctgcacaatggagacctgtgcagccccaagaggagccccaccagcagcgccatccccctgcagagccccaggaacagcggcagcttccccagccccagcatcagccccaggtag

SEQ ID NO: 20464 - DNA, 2313 bp, synthetic construct
  misc_feature 1..2313: note = Description of Artificial Sequence: Synthetic coding sequence
  source 1..2313: mol_type = other DNA
atgacagatgacaacagtgatgacaagattgaagatgagctgcagaccttcttcaccagtgacaaggatggcaacacccacgcctacaaccccaagagcccccccacccagaacagcagcgccagctctgtgaactggaacagcgccaacccagatgacatggtggtggactatgaaacagatcctgctgtggtgactggagagaacatcagcctgagcctgcagggcgtggaggtgtttggccacgagaagagcagcagtgacttcatcagcaagcaggtgctggacatgcacaaggacagcatctgccagtgcccagccctggtgggcacagagaagcccaagtacctgcagcacagctgccacagcctggaggccgtggagggccagagcgtggagcccagcctgccctttgtgtggaagcccaatgacaacctgaactgtgccggctactgtgatgccctggagctgaaccagacctttgacatgacagtggacaaggtgaactgcaccttcatcagccaccacgccatcggcaagagccagagcttccacacagctggcagcctgcccccaactggaagaagaagtggcagcaccagcagcctgagctacagcacctggaccagcagccacagcgacaagacccacgcccgggagaccacctatgaccgggagagctttgagaacccccaggtgacccccagcgaggcccaggacatgacctacacagccttcagtgatgtggtgatgcagagcgaggtgtttgtgtctgacatcggcaaccagtgtgcctgcagcagcggcaaggtgaccagcgagtacacagatggcagccagcagaggctggtgggggagaaggagacccaggccctgacccctgtgtctgatggcatggaggtgcccaatgattctgccctgcaggagttcttctgcctgagccatgatgagagcaacagcgagccccacagccagagcagctaccgccacaaggagatgggccagaacctgcgggagaccgtgtcctactgcctgattgatgatgaatgtcccctgatggtgcctgcctttgacaagtctgaggcccaggtgctgaaccctgagcacaaggtgacagaaacagaggacacccagatggtgtccaagggcaaggacctgggcacccagaaccacaccagcgagctgatcctgagcagccccccaggccagaaggtgggcagcagctttggcctgacctgggatgccaatgacatggtgatcagcacagacaagaccatgtgcatgagcacccctgtgctggagcccaccaaggtgaccttctctgtgagccccatcgaggccacagagaagtgcaagaaggtggagaagggcaacagaggcctgaagaacatcccagacagcaaggaggcccctgtgaacctgtgcaagcccagcctgggcaagagcaccatcaagaccaacacccccatcggctgcaaggtgaggaagacagagatcatctcctacccccggcccaacttcaagaatgtgaaggccaaggtgatgagcagagctgtgctgcagcccaaggatgctgccctgagcaaggtgaccccccggccccagcagaccagcgccagcagccccagctctgtgaacagccggcagcagacagtgctgagcaggacccccaggagtgacctgaatgctgacaagaaggccgagatcctgatcaacaagacccacaagcagcagttcaacaagctgatcaccagccaggccgtgcacgtgaccacccacagcaagaatgccagccaccgggtgcccaggaccaccagcgctgtgaagagcaaccaggaggatgtggacaaggccagcagcagcaacagcgcctgtgaaacaggctctgtgtctgccctcttccagaagatcaagggcatcctgcctgtgaagatggagagcgcagaatgtctggagatgacctacgtgcccaacatcgaccgcatcagccctgagaagaagggggagaaggaaaatggcacctccatggagaagcaggagctgaagcaggagatcatgaatgagacctttgaatatggcagcctcttcctgggcagcgccagcaagaccaccaccaccagcggcaggaacatcagcaagccagacagctgtggcctgcggcagattgctgcccccaaggccaaggtgggcccccctgtgtcctgcctgcggaggaacagcgacaacagaaaccccagcgctgacagagctgtgagcccccagaggatcagaagagtgagcagctctgtgctgcccaaggccgccttctcctag

SEQ ID NO: 20465 - DNA, 3651 bp, synthetic construct
  misc_feature 1..3651: note = Description of Artificial Sequence: Synthetic coding sequence
  source 1..3651: mol_type = other DNA
atgacagatgacaacagtgatgacaagattgaagatgagctgcagaccttcttcaccagtgacaaggatggcaacacccacgcctacaaccccaagagcccccccacccagaacagcagcgccagctctgtgaactggaacagcgccaacccagatgacatggtggtggactatgaaacagatcctgctgtggtgactggagagaacatcagcctgagcctgcagggcgtggaggtgtttggccacgagaagagcagcagtgacttcatcagcaagcaggtgctggacatgcacaaggacagcatctgccagtgcccagccctggtgggcacagagaagcccaagtacctgcagcacagctgccacagcctggaggccgtggagggccagagcgtggagcccagcctgccctttgtgtggaagcccaatgacaacctgaactgtgccggctactgtgatgccctggagctgaaccagacctttgacatgacagtggacaaggtgaactgcaccttcatcagccaccacgccatcggcaagagccagagcttccacacagctggcagcctgcccccaactggaagaagaagtggcagcaccagcagcctgagctacagcacctggaccagcagccacagcgacaagacccacgcccgggagaccacctatgaccgggagagctttgagaacccccaggtgacccccagcgaggcccaggacatgacctacacagccttcagtgatgtggtgatgcagagcgaggtgtttgtgtctgacatcggcaaccagtgtgcctgcagcagcggcaaggtgaccagcgagtacacagatggcagccagcagaggctggtgggggagaaggagacccaggccctgacccctgtgtctgatggcatggaggtgcccaatgattctgccctgcaggagttcttctgcctgagccatgatgagagcaacagcgagccccacagccagagcagctaccgccacaaggagatgggccagaacctgcgggagaccgtgtcctactgcctgattgatgatgaatgtcccctgatggtgcctgcctttgacaagtctgaggcccaggtgctgaaccctgagcacaaggtgacagaaacagaggacacccagatggtgtccaagggcaaggacctgggcacccagaaccacaccagcgagctgatcctgagcagccccccaggccagaaggtgggcagcagctttggcctgacctgggatgccaatgacatggtgatcagcacagacaagaccatgtgcatgagcacccctgtgctggagcccaccaaggtgaccttctctgtgagccccatcgaggccacagagaagtgcaagaaggtggagaagggcaacagaggcctgaagaacatcccagacagcaaggaggcccctgtgaacctgtgcaagcccagcctgggcaagagcaccatcaagaccaacacccccatcggctgcaaggtgaggaagacagagatcatctcctacccccggcccaacttcaagaatgtgaaggccaaggtgatgagcagagctgtgctgcagcccaaggatgctgccctgagcaaggtgaccccccggccccagcagaccagcgccagcagccccagctctgtgaacagccggcagcagacagtgctgagcaggacccccaggagtgacctgaatgctgacaagaaggccgagatcctgatcaacaagacccacaagcagcagttcaacaagctgatcaccagccaggccgtgcacgtgaccacccacagcaagaatgccagccaccgggtgcccaggaccaccagcgctgtgaagagcaaccaggaggatgtggacaaggccagcagcagcaacagcgcctgtgaaacaggctctgtgtctgccctcttccagaagatcaagggcatcctgcctgtgaagatggagagcgcagaatgtctggagatgacctacgtgcccaacatcgaccgcatcagccctgagaagaagggggagaaggaaaatggcacctccatggagaagcaggagctgaagcaggagatcatgaatgagacctttgaatatggcagcctcttcctgggcagcgccagcaagaccaccaccaccagcggcaggaacatcagcaagccagacagctgtggcctgcggcagattgctgcccccaaggccaaggtgggcccccctgtgtcctgcctgcggaggaacagcgacaacagaaaccccagcgctgacagagctgtgagcccccagaggatcagaagagtgagcagcagcgctggaaatgctgctgtgatcaagtatgaggagaagccacccaagccagccttccagaatggcagcagcggcagcttctacctgaagcccctggtgtcccgggcccacgtgcacctgatgaagaccccacccaagggccccagcaggaagaacctcttcaccgccctgaatgctgtggagaagagccggcagaagaaccccaggagcctgtgcatccagccccagacagccccagatgccctgcccccagagaagaccctggagctgacccagtacaagaccaagtgtgagaaccagagcggcttcatcctgcagctgaagcagctgctggcctgtggcaacaccaagtttgaggccctgactgtggtgatccagcacctgctgtctgagcgggaggaggccctgaagcagcacaagaccctgagccaggagctggtgaacctgcggggggagctggtgacagccagcaccacctgtgagaagctggagaaggccagaaatgagctgcagacagtgtatgaggcctttgtgcagcagcaccaggccgagaagacagagcgggagaaccggctgaaggagttctacacccgggagtatgagaagctgcgggacacctacatcgaggaggccgagaagtacaagatgcagctgcaggagcagtttgacaacctgaatgctgcccacgagaccagcaagctggagattgaggccagccacagcgagaagctggagctgctgaagaaggcctatgaggccagcctgtctgagatcaagaagggccatgaaattgagaagaagagcctggaggacctgctgtctgagaagcaggagagcctggagaagcagatcaatgacctgaagtcagaaaatgatgccctgaatgagaagctgaagtctgaggagcagaagaggcgggcccgggagaaggccaacctgaagaacccccagatcatgtacctggagcaggagctggagagcctgaaggctgtgctggagatcaagaatgagaagctgcaccagcaggacatcaagctgatgaagatggagaagctggtggacaacaacacagccctggtggacaagctgaagcgcttccagcaggagaatgaggagctgaaggccaggatggacaagcacatggccatcagccggcagctgagcacagagcaggccgtgctgcaggagagcctggagaaggagagcaaggtgaacaagaggctgtccatggagaatgaggagctgctgtggaagctgcacaacggggacctgtgcagccccaagaggagccccaccagcagcgccatccccctgcagagccccagaaattctggcagcttccccagccccagcatcagccccaggtag

SEQ ID NO: 20466 - DNA, 1029 bp, synthetic construct
  misc_feature 1..1029: note = Description of Artificial Sequence: Synthetic coding sequence
  source 1..1029: mol_type = other DNA
atgggctgccccagcagcaagctgtgcctgtacagcccctgtgccgccacccggcgggaggaggccctgaagcagcacaagaccctgagccaggagctggtgaacctgcggggggagctggtgacagccagcaccacctgtgagaagctggagaaggccagaaatgagctgcagacagtgtatgaggcctttgtgcagcagcaccaggccgagaagacagagcgggagaaccggctgaaggagttctacacccgggagtatgagaagctgcgggacacctacatcgaggaggccgagaagtacaagatgcagctgcaggagcagtttgacaacctgaatgctgcccacgagaccagcaagctggagattgaggccagccacagcgagaagctggagctgctgaagaaggcctatgaggccagcctgtctgagatcaagaagggccatgaaattgagaagaagagcctggaggacctgctgtctgagaagcaggagagcctggagaagcagatcaatgacctgaagtcagaaaatgatgccctgaatgagaagctgaagtctgaggagcagaagaggcgggcccgggagaaggccaacctgaagaacccccagatcatgtacctggagcaggagctggagagcctgaaggctgtgctggagatcaagaatgagaagctgcaccagcaggacatcaagctgatgaagatggagaagctggtggacaacaacacagccctggtggacaagctgaagcgcttccagcaggagaatgaggagctgaaggccaggatggacaagcacatggccatcagccggcagctgagcacagagcaggccgtgctgcaggagagcctggagaaggagagcaaggtgaacaagaggctgtccatggagaatgaggagctgctgtggaagctgcacaacggggacctgtgcagccccaagaggagccccaccagcagcgccatccccctgcagagccccagaaattctggcagcttccccagccccagcatcagccccaggtag

SEQ ID NO: 20467 - DNA, 3651 bp, synthetic construct; identical to SEQ ID NO: 20465
  misc_feature 1..3651: note = Description of Artificial Sequence: Synthetic coding sequence
  source 1..3651: mol_type = other DNA

SEQ ID NO: 20468 - DNA, 1248 bp, synthetic construct
  misc_feature 1..1248: note = Description of Artificial Sequence: Synthetic coding sequence
  source 1..1248: mol_type = other DNA
atgaagaccccacccaagggccccagcaggaagaacctcttcaccgccctgaatgctgtggagaagagccggcagaagaaccccaggagcctgtgcatccagccccagacagccccagatgccctgcccccagagaagaccctggagctgacccagtacaagaccaagtgtgagaaccagagcggcttcatcctgcagctgaagcagctgctggcctgtggcaacaccaagtttgaggccctgactgtggtgatccagcacctgctgtctgagcgggaggaggccctgaagcagcacaagaccctgagccaggagctggtgaacctgcggggggagctggtgacagccagcaccacctgtgagaagctggagaaggccagaaatgagctgcagacagtgtatgaggcctttgtgcagcagcaccaggccgagaagacagaaagagaaaatcggctgaaggagttctacacccgggagtatgagaagctgcgggacacctacatcgaggaggccgagaagtacaagatgcagctgcaggagcagtttgacaacctgaatgctgcccacgagaccagcaagctggagattgaggccagccacagcgagaagctggagctgctgaagaaggcctatgaggccagcctgtctgagatcaagaagggccacgagattgagaagaagagcctggaggacctgctgtctgagaagcaggagagcctggagaagcagatcaatgacctgaagtcagaaaatgatgccctgaatgagaagctgaagtctgaggagcagaagagaagagcccgggagaaggccaacctgaagaacccccagatcatgtacctggagcaggagctggagagcctgaaggctgtgctggagatcaagaatgagaagctgcaccagcaggacatcaagctgatgaagatggagaagctggtggacaacaacacagccctggtggacaagctgaagcgcttccagcaggagaatgaggagctgaaggccaggatggacaagcacatggccatcagccggcagctgagcacagagcaggccgtgctgcaggagagcctggagaaggagagcaaggtgaacaagaggctgtccatggagaatgaggagctgctgtggaagctgcacaatggagacctgtgcagccccaagaggagccccaccagcagcgccatccccctgcagagccccaggaacagcggcagcttccccagccccagcatcagccccaggtag

SEQ ID NO: 20469 - DNA, 7407 bp, synthetic construct
  misc_feature 1..7407: note = Description of Artificial Sequence: Synthetic coding sequence
  source 1..7407: mol_type = other DNA
atggccaccgtggtggtggaggccacagagcctgagcccagcggcagcatcgccaacccagctgccagcaccagccccagcctgagccaccgcttcctggacagcaagttctacctgctggtggtggtgggggagatcgtgacagaggagcacctgcggcgggccatcggcaacatcgagctgggcatccgctcctgggacaccaacctgattgagtgcaacctggaccaggagctgaagctgtttgtgagccgccacagcgcccgcttcagccctgaggtgcccggccagaagatcctgcaccacagaagtgatgtgctggagaccgtggtgctgatcaaccccagtgatgaagctgtgtccacagaggtgcggctgatgatcacagatgctgcccggcacaagctgctggtgctgaccggccagtgctttgaaaatactggagagctgatcctgcagagcggcagcttctccttccagaacttcatcgagatcttcacagaccaggagattggagagctgctgagcaccacccacccagccaacaaggccagcctgaccctcttctgcccagaggagggggactggaagaacagcaacctggacagacacaacctgcaggacttcatcaacatcaagctgaacagcgccagcatcctgcctgagatggagggcctgtctgagttcacagagtacctgtctgagagcgtggaggtgcccagcccctttgacatcctggagccccccaccagcggcggcttcctgaagctgagcaagccctgctgctacatcttccctgggggccgcggggacagcgccctgtttgctgtgaatggcttcaacatgctgatcaatggaggcagcgagaggaagagctgcttctggaagctgatccgccacctggacagagtggacagcatcctgctgacccacatcggagatgacaacctgcccggcatcaacagcatgctgcagaggaagattgctgagctggaggaggagcagagccagggcagcaccaccaacagcgactggatgaagaacctgatcagcccagacctgggcgtggtgttcctgaatgtgcctgagaacctgaagaaccctgagcccaacatcaagatgaagaggagcattgaggaggcctgcttcaccctgcagtacctgaacaagctgtccatgaagccagagcccctcttccgctctgtgggcaacaccatcgaccccgtcatcctcttccagaagatgggcgtgggcaagctggagatgtatgtgctgaaccctgtgaagagcagcaaggagatgcagtacttcatgcagcagtggacaggcaccaacaaggacaaggccgagttcatcctgcccaacggccaggaggtggacctgcccatctcctacctgacctctgtgagcagcctgattgtgtggcacccagccaacccagctgagaagatcatccgggtgctcttccctggcaacagcacccagtacaacatcctggagggcctggagaagctgaagcacctggacttcctgaagcagcccctggccacccagaaggacctgaccggccaggtgcccacccctgtggtgaagcagaccaagctgaagcagagagctgacagccgggagagcctgaagccagctgccaagcccctgcccagcaagtctgtgaggaaggagagcaaggaggagaccccagaggtgaccaaggtgaaccacgtggagaagccacccaaggtggagagcaaggagaaggtgatggtgaagaaggacaagcccatcaagacagagaccaagcccagcgtgacagagaaggaggtgcccagcaaggaggagcccagccctgtgaaggccgaggtggccgagaagcaggccacagatgtgaagcccaaggccgccaaggagaagacagtgaagaaggagaccaaggtgaagccagaggacaagaaggaggagaaggagaagcccaagaaggaggtggccaagaaggaggacaagacccccatcaagaaggaggagaagcccaagaaggaggaggtgaagaaggaggtgaagaaggagatcaagaaggaggagaagaaggagcccaagaaggaggtgaagaaggagaccccacccaaggaggtgaagaaggaggtgaagaaggaggagaagaaggaggtgaagaaggaggagaaggagcccaagaaggagatcaagaagctgcccaaggatgccaagaagagcagcacccccctgtctgaggccaagaagccagctgccctgaagcccaaggtgcccaagaaggaggagagcgtgaagaaggacagcgtggccgccggcaagcccaaggagaagggcaagatcaaggtgatcaagaaggagggcaaggctgctgaggccgtggccgctgctgtgggcactggagccaccacagctgctgtgatggctgctgctggcattgctgccatcggccctgccaaggagctggaggccgagaggagcctgatgagcagccctgaggacctgaccaaggactttgaggagctgaaggccgaggaggtggatgtgaccaaggacatcaagccccagctggagctgattgaagatgaggagaagctgaaggagacagagcctgtggaggcctacgtgatccagaaggagcgggaggtgaccaagggccctgctgagagcccagatgagggcatcaccaccacagaaggagagggggagtgtgagcagaccccagaggagctggagcctgtggagaagcagggcgtggatgacatcgagaagtttgaagatgagggcgccggctttgaggagagcagcgagactggagactatgaggagaaggccgagacagaggaggccgaggagcctgaggaggatggagaggagcacgtgtgtgtgtctgccagcaagcacagccccacagaagatgaggagagcgccaaggccgaggctgatgcctacatccgggagaagcgggagagcgtggccagcggagatgacagagctgaggaggacatggatgaggccatcgagaagggggaggccgagcagagcgaggaggaggctgatgaggaggacaaggcagaagatgcccgggaggaggagtatgagcctgagaagatggaggccgaggactatgtgatggctgtggtggacaaggctgctgaggccggcggcgctgaggagcagtatggcttcctgaccacccccaccaagcagctgggcgcccagagccctggccgggagcccgccagcagcatccatgatgagaccctgcccggcggcagcgagagcgaggccacagccagtgatgaggagaaccgggaggaccagcctgaggagttcaccgccaccagcggctacacccagagcaccatcgagatcagcagcgagcccacccccatggatgagatgagcaccccaagagatgtgatgtctgatgagaccaacaatgaggagacagagagccccagccaggagtttgtgaacatcaccaagtatgagagcagcctgtacagccaggagtacagcaagccagcagatgtgacccccctgaatggcttcagcgagggcagcaagacagatgccacagatggcaaggactacaatgccagcgccagcaccatcagcccccccagctccatggaggaggacaagttcagccgcagcgccctgagagatgcctactgcagcgaggtgaaggccagcaccaccctggacatcaaggacagcatctctgctgtgagcagcgagaaggtgagccccagcaagagccccagcctgagccccagcccccccagccccctggagaagacccccctgggggagaggtctgtgaacttcagcctgaccccaaatgagatcaaggtgtctgctgaggccgaggtggcccctgtgtccccagaggtgacccaggaggtggtggaggagcactgtgccagccctgaggacaagaccctggaggtggtgagccccagccagagcgtgacaggcagcgctggccacaccccctactaccagagccccacagatgagaagagcagccacctgcccacagaggtgattgagaagcccccagctgtgcctgtgtcctttgagttcagtgatgccaaggatgaaaatgaaagagcctctgtgagccccatggatgagcctgtgcctgattctgagagccccatcgagaaggtgctgagccccctgcggagccccccactcatcggcagcgagagcgcctatgagagcttcctgtctgcagatgacaaggccagcggcagaggagctgagagcccctttgaggagaagagcggcaagcagggcagcccagaccaggtgtcccctgtgtctgagatgaccagcaccagcctgtaccaggacaagcaggagggcaagagcacagactttgcccccatcaaggaggactttggccaggagaagaagacagatgatgtggaggccatgagcagccagcctgccctggccctggatgagaggaagctgggagatgtgagccccacccagattgatgtgtcccagtttggcagcttcaaggaggacaccaagatgagcatcagcgagggcaccgtgtctgacaagagcgccacccctgtggatgaaggagtggccgaggacacctacagccacatggagggcgtggcctctgtgtccacagcctctgtggccaccagcagcttccctgagcccaccacagatgatgtgagccccagcctgcacgccgaggtgggcagcccccacagcacagaggtggatgacagcctgtctgtgtctgtggtgcagacccccaccaccttccaggagacagagatgagccccagcaaggaggagtgcccccggcccatgagcatcagccccccagacttcagccccaagacagccaagagcaggacccctgtgcaggaccacaggtctgagcagagctccatgagcattgaatttggccaggagagccctgagcagagcctggccatggacttcagccggcagagcccagaccaccccaccgtgggcgctggggtgctgcacatcacagaaaatggccccacagaggtggactacagccccagcgacatgcaggacagcagcctgagccacaagatcccccccatggaggagcccagctacacccaggacaatgacctgtctgagctgatctctgtgtcccaggtggaggccagccccagcaccagcagcgcccacacccccagccagatcgccagccccctgcaggaggacaccctgagtgatgtggccccaccccgggacatgagcctgtatgccagcctgaccagcgagaaggtgcagagcctggagggggagaagctgagccccaagagtgacatcagccccctgaccccccgggagagcagccccctgtacagccccaccttcagtgacagcaccagcgctgtgaaggagaagacagccacctgccacagcagcagcagcccccccattgatgctgccagcgctgagccctacggcttccgggcctctgtgctgtttgacaccatgcagcaccacctggccctgaacagagacctgagcaccccaggcctggagaaggacagcggcggcaagacccctggggacttctcctatgcctaccagaagccagaggagaccaccaggagcccagatgaagaagattatgactatgagagctatgagaagaccaccaggaccagtgatgtgggcggctactactatgagaagattgaaagaaccaccaagagccccagcgacagcggctacagctatgagaccatcggcaagaccaccaagaccccagaagatggagactacagctatgagatcatcgagaagaccaccaggaccccagaggagggcggctacagctatgacatcagcgagaagaccaccagccccccagaggtgtctggctacagctatgagaagacagagaggagccggcggctgctggatgacatcagcaatggctatgatgacagtgaagatggcggccacaccctgggggaccccagctacagctatgagaccacagagaagatcaccagcttccctgagagcgagggctacagctatgagaccagcaccaagaccaccaggaccccagacaccagcacctactgctatgaaacagctgagaagatcaccaggaccccccaggccagcacctacagctatgagaccagtgacctgtgctacacagctgagaagaagagccccagcgaggcccggcaggatgtggacctgtgcctggtgagcagctgtgagtacaagcaccccaagacagagctgagccccagcttcatcaaccccaaccccctggagtggtttgccagcgaggagcccacagaggagagcgagaagcccctgacccagagcggcggggcccctcctcctcctgggggcaagcagcagggccggcagtgtgatgagaccccacccacctctgtgtctgagagcgcccccagccagacagacagtgatgtgcccccagagacagaggagtgccccagcatcacagcagatgccaacatcgacagtgaagatgagagcgagaccatccccacagacaagacagtgacctacaagcacatggaccccccaccagcccctgtgcaggacaggagccccagccccaggcacccagatgtgtccatggtggaccctgaggccctggccatcgagcagaacctgggcaaggccctgaagaaggacctgaaggagaagaccaagaccaagaagccaggcaccaagaccaagagcagcagccctgtgaagaagagtgatggcaagagcaagcccctggccgccagccccaagccagctggcctgaaggagagcagtgacaaggtgtcccgggtggccagccccaagaagaaggagagcgtggagaaggccgccaagcccaccaccaccccagaggtgaaggccgcccggggggaggagaaggacaaggagaccaagaatgctgccaatgccagcgccagcaagagcgccaagacagccacagctggccctggcaccaccaagaccaccaagagcagcgctgtgcccccaggcctgcctgtgtacctggacctgtgctacatccccaaccacagcaacagcaagaatgtggatgtggagttcttcaagagggtgcgcagcagctactacgtggtgtctggaaatgaccctgctgctgaggagcccagcagagctgtgctggatgccctgctggagggcaaggcccagtggggcagcaacatgcaggtgaccctcatccccacccatgacagcgaggtgatgagggagtggtaccaggagacccatgagaagcagcaggacctgaacatcatggtgctggccagcagcagcacagtggtgatgcaggatgagagcttccctgcctgcaagattgagctgtag

SEQ ID NO: 20470 - DNA, 432 bp, synthetic construct
  misc_feature 1..432: note = Description of Artificial Sequence: Synthetic coding sequence
  source 1..432: mol_type = other DNA
atgcagcaccggggcttcctgctgctgaccctgctggccctgctggccctgaccagcgctgtggccaagaagaaggacaaggtgaagaagggcggccctggctctgaatgtgccgagtgggcctggggcccctgcacccccagcagcaaggactgtggggtgggcttccgggagggcacctgtggggcccagacccagaggatccgctgccgggtgccctgcaactggaagaaggagtttggagctgactgcaagtacaagtttgagaactggggcgcctgtgatggcggcaccggcaccaaggtgcggcagggcaccctgaagaaggcccgctacaatgcccagtgccaggagaccatccgggtgaccaagccctgcacccccaagaccaaggccaaggccaaggccaagaagggcaagggcaaggactag

SEQ ID NO: 20471 - DNA, 432 bp, synthetic construct; identical to SEQ ID NO: 20470
  misc_feature 1..432: note = Description of Artificial Sequence: Synthetic coding sequence
  source 1..432: mol_type = other DNA

SEQ ID NO: 20472 - DNA, 432 bp, synthetic construct; identical to SEQ ID NO: 20470
  misc_feature 1..432: note = Description of Artificial Sequence: Synthetic coding sequence
  source 1..432: mol_type = other DNA

SEQ ID NO: 20473 - DNA, 459 bp, synthetic construct
  misc_feature 1..459: note = Description of Artificial Sequence: Synthetic coding sequence
  source 1..459: mol_type = other DNA
atgcagcaccggggcttcctgctgctgaccctgctggccctgctggccctgaccagcgctgtggccaagaagaaggaggagggcgccctgcagtgcagcgtgcctggggaccaccccaggcaccaggccctgcacccccaggaccagagcaagggccagagccaggagcgggagggcaagggcctggatgccaagccaggctgccagggcgcccctggggtgacctggggcctggcccacgccctgcccctgcccggcccccgctgtgacccccctgtgcccagcgtgtgcagcctggccctgatcaaccacgccctgccctgccccagccacagccctgccccacccctgagcgcccagagcggggagggccagggcatcctgggcagcctgagcctgccccagagcaatgtgagcccccgggcccgcttctgcagcagcccccagttccactactag

SEQ ID NO: 20474 - DNA, 432 bp, synthetic construct; identical to SEQ ID NO: 20470
  misc_feature 1..432: note = Description of Artificial Sequence: Synthetic coding sequence
  source 1..432: mol_type = other DNA

SEQ ID NO: 20475 - DNA, 432 bp, synthetic construct; identical to SEQ ID NO: 20470
  misc_feature 1..432: note = Description of Artificial Sequence: Synthetic coding sequence
  source 1..432: mol_type = other DNA

SEQ ID NO: 20476 - DNA, 432 bp, synthetic construct; identical to SEQ ID NO: 20470
  misc_feature 1..432: note = Description of Artificial Sequence: Synthetic coding sequence
  source 1..432: mol_type = other DNA

SEQ ID NO: 20477 - DNA, 150 bp, synthetic construct
  misc_feature 1..150: note = Description of Artificial Sequence: Synthetic coding sequence
  source 1..150: mol_type = other DNA
atgcagcaccggggcttcctgctgctgaccctgctggccctgctggccctgaccagcgctgtggccaagaagaaggacaaggtgaagaagggcggccctggctctgaatgtgccgagtgggcctggggcccctgcacccccagcagctag

SEQ ID NO: 20478 - DNA, 396 bp, synthetic construct
  misc_feature 1..396: note = Description of Artificial Sequence: Synthetic coding sequence
  source 1..396: mol_type = other DNA
atgcagcaccggggcttcctgctgctgaccctgctggccctgctggccctgaccagcgctgtggccaagaagaaggacaaggtgaagaagggcggccctggctctgaatgtgccgagtgggcctggggcccctgcacccccagcagcaaggactgtggggtgggcttccgggagggcacctgtggggcccagacccagaggatccgctgccgggtgccctgcaactggaagaaggagtttggagctgactgcaagtacaagtttgagaactggggcgcctgtgatggcggcaccggcaccaaggtgcggcagggcaccctgaagaaggcccgctacaatgcccagtgccaggagaccatccgggtgaccaagccctgcacccccaagaccaagtag

SEQ ID NO: 20479 - DNA, 264 bp, synthetic construct
  misc_feature 1..264: note = Description of Artificial Sequence: Synthetic coding sequence
  source 1..264: mol_type = other DNA
atgcagcaccggggcttcctgctgctgaccctgctggccctgctggccctgaccagcgctgtggccaagaagaaggctgactgcaagtacaagtttgagaactggggcgcctgtgatggcggcaccggcaccaaggtgcggcagggcaccctgaagaaggcccgctacaatgcccagtgccaggagaccatccgggtgaccaagccctgcacccccaagaccaaggccaaggccaaggccaagaagggcaagggcaaggactag

SEQ ID NO: 20480 - DNA, 2715 bp, synthetic construct
  misc_feature 1..2715: note = Description of Artificial Sequence: Synthetic coding sequence
  source 1..2715: mol_type = other DNA
atggccgagagcagcgagagcttcaccatggccagcagccctgcccagaggagaagaggaaatgaccccctgaccagcagccctggccgcagcagcagaagaacagatgccctgaccagcagccctggccgggacctgcccccatttgaagatgaaagtgagggcctgctgggcacagagggccccctggaggaggaggaggatggagaggagctgattggagatggcatggagcgggactaccgggccatccctgagctggatgcctatgaggccgagggcctggccctggatgatgaagatgtggaggagctgacagccagccagcgggaggccgctgagcgggccatgaggcagagggaccgggaggccggccggggcctgggccgcatgaggcggggcctgctgtatgacagtgatgaggaggatgaggagaggcctgccaggaagaggcggcaggtggagcgggccacagaagatggagaagaagatgaggagatgattgagagcattgagaacctggaggacctgaagggccacagcgtgcgggagtgggtgtccatggccggcccccggctggagatccaccaccgcttcaagaacttcctgcggacccacgtggacagccacggccacaacgtgttcaaggagcgcatcagtgacatgtgcaaggaaaatcgggagagcctggtggtgaactatgaggacctggccgcccgggagcacgtgctggcctacttcctgcctgaggccccagctgagctgctgcagatctttgatgaggccgccctggaggtggtgctggccatgtaccccaagtatgaccgcatcaccaaccacatccacgtgcgcatcagccacctgcccctggtggaggagctgcggagcctgcggcagctgcacctgaaccagctgatccgcaccagcggcgtggtgaccagctgcaccggggtgctgccccagctgtccatggtgaagtacaactgcaacaagtgcaactttgtgctgggccccttctgccagagccagaaccaggaggtgaagccaggcagctgcccagagtgccagagcgctggcccctttgaggtgaacatggaggagaccatctaccagaactaccagaggatccgcatccaggagagccctgggaaggtggccgccggccgcctgcccaggagcaaggatgccatcctgctggccgacctggtggacagctgcaagccaggagatgaaattgagctgaccggcatctaccacaacaactatgatggcagcctgaacacagccaacggcttccctgtgtttgccaccgtcatcctggccaaccacgtggccaagaaggacaacaaggtggccgtgggggagctgacagatgaagatgtgaagatgatcaccagcctgagcaaggaccagcagattggagagaagatctttgccagcatcgcccccagcatctacggccacgaggacatcaagaggggcctggccctggccctgtttggaggagagcccaagaaccctgggggcaagcacaaggtgcggggggacatcaacgtgctgctgtgtggggaccctggaacagccaagagccagttcctgaagtacatcgagaaggtgagcagccgggccatcttcaccaccggccagggcgccagcgctgtgggcctgacagcctacgtgcagaggcaccctgtgtcccgggagtggaccctggaggccggggccctggtgctggccgaccggggcgtgtgcctgattgatgaatttgacaagatgaatgaccaggacaggaccagcatccacgaggccatggagcagcagagcatcagcatcagcaaggccggcatcgtgaccagcctgcaggcccgctgcaccgtgattgctgctgccaaccccatcggcggccgctatgaccccagcctgaccttctctgaaaatgtggacctgacagagcccatcatcagcagatttgacatcctgtgtgtggtgcgggacacagtggaccctgtgcaggatgagatgctggccaggtttgtggtgggcagccacgtgcgccaccaccccagcaacaaggaggaggagggcctggccaacggcagcgctgctgagcccgccatgcccaacacctacggcgtggagcccctgccccaggaggtgctgaagaagtacatcatctatgccaaggagcgggtgcaccccaagctgaaccagatggaccaggacaaggtggccaagatgtacagcgacctgaggaaggagagcatggccaccggcagcatccccatcaccgtgcgccacattgaatccatgatccgcatggccgaggcccacgcccgcatccacctgcgggactatgtgattgaagatgatgtgaacatggccatccgggtgatgctggagagcttcatcgacacccagaagttctctgtgatgaggtccatgaggaagacctttgcccgctacctgtccttcagaagagacaacaatgagctgctgctcttcatcctgaagcagctggtggccgagcaggtgacctaccagaggaacagatttggagcccagcaggacaccatcgaggtgcctgagaaggacctggtggacaaggcccggcagatcaacatccacaacctgagcgccttctatgattctgagctgttcaggatgaacaagttcagccatgacctgaagaggaagatgatcctgcagcagttctag

SEQ ID NO: 20481 - DNA, 2427 bp, synthetic construct
  misc_feature 1..2427: note = Description of Artificial Sequence: Synthetic coding sequence
  source 1..2427: mol_type = other DNA
atggccgagagcagcgagagcttcaccatggccagcagccctgcccagaggagaagaggaaatgaccccctgaccagcagccctggctggggcctgggccgcatgaggcggggcctgctgtatgacagtgatgaggaggatgaggagaggcctgccaggaagaggcggcaggtggagcgggccacagaagatggagaagaagatgaggagatgattgagagcattgagaacctggaggacctgaagggccacagcgtgcgggagtgggtgtccatggccggcccccggctggagatccaccaccgcttcaagaacttcctgcggacccacgtggacagccacggccacaacgtgttcaaggagcgcatcagtgacatgtgcaaggaaaatcgggagagcctggtggtgaactatgaggacctggccgcccgggagcacgtgctggcctacttcctgcctgaggccccagctgagctgctgcagatctttgatgaggccgccctggaggtggtgctggccatgtaccccaagtatgaccgcatcaccaaccacatccacgtgcgcatcagccacctgcccctggtggaggagctgcggagcctgcggcagctgcacctgaaccagctgatccgcaccagcggcgtggtgaccagctgcaccggggtgctgccccagctgtccatggtgaagtacaactgcaacaagtgcaactttgtgctgggccccttctgccagagccagaaccaggaggtgaagccaggcagctgcccagagtgccagagcgctggcccctttgaggtgaacatggaggagaccatctaccagaactaccagaggatccgcatccaggagagccctgggaaggtggccgccggccgcctgcccaggagcaaggatgccatcctgctggccgacctggtggacagctgcaagccaggagatgaaattgagctgaccggcatctaccacaacaactatgatggcagcctgaacacagccaacggcttccctgtgtttgccaccgtcatcctggccaaccacgtggccaagaaggacaacaaggtggccgtgggggagctgacagatgaagatgtgaagatgatcaccagcctgagcaaggaccagcagattggagagaagatctttgccagcatcgcccccagcatctacggccacgaggacatcaagaggggcctggccctggccctgtttggaggagagcccaagaaccctgggggcaagcacaaggtgcggggggacatcaacgtgctgctgtgtggggaccctggaacagccaagagccagttcctgaagtacatcgagaaggtgagcagccgggccatcttcaccaccggccagggcgccagcgctgtgggcctgacagcctacgtgcagaggcaccctgtgtcccgggagtggaccctggaggccggggccctggtgctggccgaccggggcgtgtgcctgattgatgaatttgacaagatgaatgaccaggacaggaccagcatccacgaggccatggagcagcagagcatcagcatcagcaaggccggcatcgtgaccagcctgcaggcccgctgcaccgtgattgctgctgccaaccccatcggcggccgctatgaccccagcctgaccttctctgaaaatgtggacctgacagagcccatcatcagcagatttgacatcctgtgtgtggtgcgggacacagtggaccctgtgcaggatgagatgctggccaggtttgtggtgggcagccacgtgcgccaccaccccagcaacaaggaggaggagggcctggccaacggcagcgctgctgagcccgccatgcccaacacctacggcgtggagcccctgccccaggaggtgctgaagaagtacatcatctatgccaaggagcgggtgcaccccaagctgaaccagatggaccaggacaaggtggccaagatgtacagcgacctgaggaaggagagcatggccaccggcagcatccccatcaccgtgcgccacattgaatccatgatccgcatggccgaggcccacgcccgcatccacctgcgggactatgtgattgaagatgatgtgaacatggccatccgggtgatgctggagagcttcatcgacacccagaagttctctgtgatgaggtccatgaggaagacctttgcccgctacctgtccttcagaagagacaacaatgagctgctgctcttcatcctgaagcagctggtggccgagcaggtgacctaccagaggaacagatttggagcccagcaggacaccatcgaggtgcctgagaaggacctggtggacaaggcccggcagatcaacatccacaacctgagcgccttctatgattctgagctgttcaggatgaacaagttcagccatgacctgaagaggaagatgatcctgcagcagttctag

SEQ ID NO: 20482 - DNA, 2865 bp, synthetic construct
  misc_feature 1..2865: note = Description of Artificial Sequence: Synthetic coding sequence
  source 1..2865: mol_type = other DNA
atggccgagagcagcgagagcttcaccatggccagcagccctgcccagaggagaagaggaaatgaccccctgaccagcagccctggccgcagcagcagaagaacagatgccctgaccagcagccctggccgggacctgcccccatttgaagatgaaagtgagggcctgctgggcacagagggccccctggaggaggaggaggatggagaggagctgattggagatggcatggagcgggactaccgggccatccctgagctggatgcctatgaggccgagggcctggccctggatgatgaagatgtggaggagctgacagccagccagcgggaggccggccggggcctgctgtatgacagtgatgaagaagatgaggagaggcctgccaggaagaggcggcaggtggagcgggccacagaagatggagaggaggatgaggagatgattgagagcattgagaacctggaggacctgaagggccacagcgtgcgggagtgggtgtccatggccggcccccggctggagatccaccaccgcttcaagaacttcctgcggacccacgtggacagccacggccacaacgtgttcaaggagcgcatcagtgacatgtgcaaggagaaccgggagagcctggtggtgaactatgaggacctggccgcccgggagcacgtgctggcctacttcctgcctgaggccccagctgagctgctgcagatctttgatgaagctgccctggaggtggtgctggccatgtaccccaagtatgaccgcatcaccaaccacatccacgtgcgcatcagccacctgcccctggtggaggagctgcggagcctgcggcagctgcacctgaaccagctgatccgcaccagcggcgtggtgaccagctgcacaggagtgctgccccagctgtccatggtgaagtacaactgcaacaagtgcaactttgtgctgggccccttctgccagagccagaaccaggaggtgaagccaggcagctgcccagagtgccagagcgctggcccctttgaggtgaacatggaggagaccatctaccagaactaccagaggatccgcatccaggagagccctgggaaggtggccgccggccgcctgcccaggagcaaggatgccatcctgctggccgacctggtggacagctgcaagccaggagatgaaattgagctgaccggcatctaccacaacaactatgatggcagcctgaacacagccaacggcttccctgtgtttgccaccgtcatcctggccaaccacgtggccaagaaggacaacaaggtggccgtgggggagctgacagatgaagatgtgaagatgatcaccagcctgagcaaggaccagcagatcggggagaaggagagcagcagaaatgccagcctggccgaggccggcatcggggccatccccagccagctgctggccatcgagcccagcctgcggcgctctggagtgcccatcggggaggtgggcgtgtcccagaggcaggaggcccggagcttcagcagcgccaacacccactggttcctggaggacctgctgggccccagctgccgggacaccatgatctttgccagcatcgcccccagcatctacggccacgaggacatcaagaggggcctggccctggccctgtttggaggagagcccaagaaccctgggggcaagcacaaggtgcggggggacatcaacgtgctgctgtgtggggaccctggaacagccaagagccagttcctgaagtacatcgagaaggtgagcagccgggccatcttcaccaccggccagggcgccagcgctgtgggcctgacagcctacgtgcagaggcaccctgtgtcccgggagtggaccctggaggccggggccctggtgctggccgaccggggcgtgtgcctgattgatgaatttgacaagatgaatgaccaggacaggaccagcatccacgaggccatggagcagcagagcatcagcatcagcaaggccggcatcgtgaccagcctgcaggcccgctgcaccgtgattgctgctgccaaccccatcggcggccgctatgaccccagcctgaccttctctgaaaatgtggacctgacagagcccatcatcagcagatttgacatcctgtgtgtggtgcgggacacagtggaccctgtgcaggatgagatgctggccaggtttgtggtgggcagccacgtgcgccaccaccccagcaacaaggaggaggagggcctggccaacggcagcgctgctgagcccgccatgcccaacacctacggcgtggagcccctgccccaggaggtgctgaagaagtacatcatctatgccaaggagcgggtgcaccccaagctgaaccagatggaccaggacaaggtggccaagatgtacagcgacctgaggaaggagagcatggccaccggcagcatccccatcaccgtgcgccacattgaatccatgatccgcatggccgaggcccacgcccgcatccacctgcgggactatgtgattgaagatgatgtgaacatggccatccgggtgatgctggagagcttcatcgacacccagaagttctctgtgatgaggtccatgaggaagacctttgcccgctacctgtccttcagaagagacaacaatgagctgctgctcttcatcctgaagcagctggtggccgagcaggtgacctaccagaggaacagatttggagcccagcaggacaccatcgaggtgcctgagaaggacctggtggacaaggcccggcagatcaacatccacaacctgagcgccttctatgattctgagctgttcaggatgaacaagttcagccatgacctgaagaggaagatgatcctgcagcagttctag

SEQ ID NO: 20483 - DNA, 753 bp, synthetic construct
  misc_feature 1..753: note = Description of Artificial Sequence: Synthetic coding sequence
  source 1..753: mol_type = other DNA
atggccctgcgggccggcctggtgctgggcttccacaccctgatgaccctgctgagcccccaggaggccggggccaccaaggctgaccacatgggcagctatggccctgccttctaccagagctatggagccagcggccagttcacccatgaatttgatgaggagcagctgttctctgtggacctgaagaagtctgaggccgtgtggaggctgcctgagtttggagactttgccaggtttgacccccagggcggcctggccggcattgctgccatcaaggcccacctggacatcctggtggagaggagcaacagaagccgggccatcaacgtgcccccccgggtgacagtgctgcccaagagccgggtggagctgggccagcccaacatcctgatctgcatcgtggacaacatcttcccccctgtgatcaacatcacctggctgagaaatggccagacagtgacagaaggagtggcccagaccagcttctacagccagcctgaccacctgttcaggaagttccactacctgccctttgtgcccagcgcagaagatgtgtatgactgccaggtggagcactggggcctggatgcccccctgctgcggcactgggagctgcaggtgcccatccccccaccagatgccatggagaccctggtgtgtgccctgggcctggccatcggcctggtgggcttcctggtgggcaccgtgctgatcatcatgggcacctacgtgtcctctgtgcccaggtag

SEQ ID NO: 20484 - DNA, 993 bp, synthetic construct
  misc_feature 1..993: note = Description of Artificial Sequence: Synthetic coding sequence
  source 1..993: mol_type = other DNA
atgcaccgctaccgggcccctggagagcaggatggagatgccatgcccctgggcagcgctgtggacatcctggccacagatgaccccaacttcagccaggaggaccagcaggacacccagatctatgagaagcatgacaacctgctgcacggcaccaagaagaagaaggagaagatggtgtctgctgccttcatgaagaagtacatccacgtggccaagatcatcaagcctgtgctgacccaggagagcgccacctacatcgccgaggagtacagccggctgcggagccaggacagcatgagcagtgacacagcccggaccagccctgtgacagcccggaccctggagaccctcatccggctggccacagcccacgccaaggccaggatgagcaagacagtggacctgcaggatgctgaggaggccgtggagctggtgcagtatgcctacttcaagaaggtgctggagaaggagaagaagaggaagaagagaagtgaagatgaaagtgaaacagaagatgaggaggagaagagccaggaggaccaggagcagaagaggaagaggaggaagacccggcagccagatgccaaggatggagacagctatgacccctatgacttcagtgacacagaggaggagatgccccaggtgcacacccccaagacagctgacagccaggagaccaaggagagccagaaggtggagctgtctgagagcagagatggcatcagcccctgctgccccggctggagctggaccccaggcctgaagcagagcttctacctgagcctgcccaagggctgggactaccgccacaagcccctgtgcctgtttgacctgatcctcttcaatgactgccgggtgtccatggtggagggcatccagggcggccccctgggctgtgtgcccggcagcagctgtgctgtgaacagacatgagagcccccaccgcatccaccagcccggccagaggcgggccctgctcttctcctag

SEQ ID NO: 20485 - DNA, 2289 bp, synthetic construct
  misc_feature 1..2289: note = Description of Artificial Sequence: Synthetic coding sequence
  source 1..2289: mol_type = other DNA
atgtggagctgtggccgcctgcgggagatcacctggacctcctggaccacccggctgctgaacaatgcctttgaggagctggtggccttccagagggccctgaaggactttgtggccagcattgatgccacctacgccaagcagtatgaggagttctacgtgggcctggagggcagctttggcagcaagcacgtgagccccaggaccctgaccagctgcttcctgagctgtgtggtgtgtgtggagggcatcgtgaccaagtgcagcctggtgcggcccaaggtggtgcgctctgtgcactactgcccagccaccaagaagaccattgaaagacgctacagcgacctgaccaccctggtggccttccccagcagctctgtgtaccccaccaaggatgaggagaacaaccccctggagacagaatatggcctgtctgtgtacaaggaccaccagaccatcaccatccaggagatgcctgagaaggccccagctggccagctgcccaggtctgtggatgtgatcctggatgatgacctggtggacaaggccaagccaggggacagagtgcaggtggtgggcacctaccgctgcctgcccgggaagaagggcggctacaccagcggcaccttcagaacagtgctgattgcctgcaatgtgaagcagatgagcaaggatgcccagcccagcttcagcgcagaagatattgccaagatcaagaagttcagcaagaccaggagcaaggacatctttgaccagctggccaagagcctggcccccagcatccacggccatgactatgtgaagaaggccatcctgtgcctgctgctgggcggcgtggagcgggacctggagaatggcagccacatccggggggacatcaacatcctgctgattggagaccccagcgtggccaagagccagctgctgcgctacgtgctgtgcacagccccccgggccatccccaccaccggccggggcagcagcggcgtgggcctgacagctgctgtgaccacagaccaggagaccggggagcggcggctggaggccggggccatggtgctggccgaccggggcgtggtgtgcattgatgaatttgacaagatgtctgacatggacagaacagccatccacgaggtgatggagcagggccgggtgaccatcgccaaggccggcatccacgcccggctgaatgcccgctgcagcgtgctggccgccgccaaccctgtgtatggccgctatgaccagtacaagacccccatggagaacatcggcctgcaggacagcctgctgagcagatttgacctgctcttcatcatgctggaccagatggaccctgagcaggaccgggagatcagtgaccacgtgctgaggatgcaccgctaccgggcccctggagagcaggatggagatgccatgcccctgggcagcgctgtggacatcctggccacagatgaccccaacttcagccaggaggaccagcaggacacccagatctatgagaagcatgacaacctgctgcacggcaccaagaagaagaaggagaagatggtgtctgctgccttcatgaagaagtacatccacgtggccaagatcatcaagcctgtgctgacccaggagagcgccacctacatcgccgaggagtacagccggctgcggagccaggacagcatgagcagtgacacagcccggaccagccctgtgacagcccggaccctggagaccctcatccggctggccacagcccacgccaaggccaggatgagcaagacagtggacctgcaggatgctgaggaggccgtggagctggtgcagtatgcctacttcaagaaggtgctggagaaggagaagaagaggaagaagagaagtgaagatgagagcgagacagaagatgaggaggagaagagccaggaggaccaggagcagaagaggaagaggaggaagacccggcagccagatgccaaggatggagacagctatgacccctatgacttcagtgacacagaggaggagatgccccaggtgcacacccccaagacagctgacagccaggagaccaaggagagccagaaggtggagctgtctgagagccggctgaaggccttcaaggtggccctgctggatgtgttccgggaggcccacgcccagagcatcggcatgaaccggctgacagagagcatcaacagagacagcgaggagcccttcagctctgtggagatccaggccgccctgagcaagatgcaggatgacaaccaggtgatggtgtctgagggcatcatcttcctgatctag

SEQ ID NO: 20486 - DNA, 987 bp, synthetic construct
  misc_feature 1..987: note = Description of Artificial Sequence: Synthetic coding sequence
  source 1..987: mol_type = other DNA
cgctaccgggcccctggagagcaggatggagatgccatgcccctgggcagcgctgtggacatcctggccacagatgaccccaacttcagccaggaggaccagcaggacacccagatctatgagaagcatgacaacctgctgcacggcaccaagaagaagaaggagaagatggtgtctgctgccttcatgaagaagtacatccacgtggccaagatcatcaagcctgtgctgacccaggagagcgccacctacatcgccgaggagtacagccggctgcggagccaggacagcatgagcagtgacacagcccggaccagccctgtgacagcccggaccctggagaccctcatccggctggccacagcccacgccaaggccaggatgagcaagacagtggacctgcaggatgctgaggaggccgtggagctggtgcagtatgcctacttcaagaaggtgctggagaaggagaagaagaggaagaagagaagtgaagatgaaagtgaaacagaagatgaggaggagaagagccaggaggaccaggagcagaagaggaagaggaggaagacccggcagccagatgccaaggatggagacagctatgacccctatgacttcagtgacacagaggaggagatgccccaggtgcacacccccaagacagctgacagccaggagaccaaggagagccagaaggtggagctgtctgagagcagagatggcatcagcccctgctgccccggctggagctggaccccaggcctgaagcagagcttctacctgagcctgcccaagggctgggactaccgccacaagcccctgtgcctgtttgacctgatcctcttcaatgactgccgggtgtccatggtggagggcatccagggcggccccctgggctgtgtgcccggcagcagctgtgctgtgaacagacatgagagcccccaccgcatccaccagcccggccagaggcgggccctgctcttctcctag

SEQ ID NO: 20487 - DNA, 2562 bp, synthetic construct
  misc_feature 1..2562: note = Description of Artificial Sequence: Synthetic coding sequence
  source 1..2562: mol_type = other DNA
atgctgcccaggagcccccccctgccccggggcaacctgtggtggagggaggagtttggcagcttccgggccggcgtggagagctcctgggagcccccccgggactttggaggcggcagcagcctggccgccggcatggccggcaccgtggtgctggatgatgtggagctgcgggaggcccagagggactacctggacttcctggatgatgaggaggaccagggcatctaccagagcaaggtgcgggagctgatcagtgacaaccagtaccgcctgattgtgaatgtgaatgacctgcggaggaagaatgagaagagggccaaccggctgctgaacaatgcctttgaggagctggtggccttccagagggccctgaaggactttgtggccagcattgatgccacctacgccaagcagtatgaggagttctacgtgggcctggagggcagctttggcagcaagcacgtgagccccaggaccctgaccagctgcttcctgagctgtgtggtgtgtgtggagggcatcgtgaccaagtgcagcctggtgcggcccaaggtggtgcgctctgtgcactactgcccagccaccaagaagaccatcgagcggcgctacagcgacctgaccaccctggtggccttccccagcagctctgtgtaccccaccaaggatgaggagaacaaccccctggagacagaatatggcctgtctgtgtacaaggaccaccagaccatcaccatccaggagatgcctgagaaggccccagctggccagctgcccaggtctgtggatgtgatcctggatgatgacctggtggacaaggccaagccaggggacagagtgcaggtggtgggcacctaccgctgcctgcccgggaagaagggcggctacaccagcggcaccttcagaacagtgctgattgcctgcaatgtgaagcagatgagcaaggatgcccagcccagcttctctgctgaggacatcgccaagatcaagaagttcagcaagaccaggagcaaggacatctttgaccagctggccaagagcctggcccccagcatccacggccatgactatgtgaagaaggccatcctgtgcctgctgctgggcggcgtggagcgggacctggagaatggcagccacatccggggggacatcaacatcctgctgattggagaccccagcgtggccaagagccagctgctgcgctacgtgctgtgcacagccccccgggccatccccaccaccggccggggcagcagtggagtgggcctgacagctgctgtgaccacagaccaggagactggagagcggcggctggaggccggggccatggtgctggccgacagaggagtggtgtgcattgatgaatttgacaagatgtctgacatggacagaacagccatccacgaggtgatggagcagggccgggtgaccatcgccaaggccggcatccacgcccggctgaatgcccgctgcagcgtgctggccgccgccaaccctgtgtatggccgctatgaccagtacaagacccccatggagaacatcggcctgcaggacagcctgctgagcagatttgacctgctcttcatcatgctggaccagatggaccctgagcaggaccgggagatcagtgaccacgtgctgaggatgcaccgctaccgggcccctggagagcaggatggagatgccatgcccctgggcagcgctgtggacatcctggccacagatgaccccaacttcagccaggaggaccagcaggacacccagatctatgagaagcatgacaacctgctgcacggcaccaagaagaagaaggagaagatggtgtctgctgccttcatgaagaagtacatccacgtggccaagatcatcaagcctgtgctgacccaggagagcgccacctacatcgccgaggagtacagccggctgcggagccaggacagcatgagcagtgacacagcccggaccagccctgtgacagcccggaccctggagaccctcatccggctggccacagcccacgccaaggccaggatgagcaagacagtggacctgcaggatgctgaggaggccgtggagctggtgcagtatgcctacttcaagaaggtgctggagaaggagaagaagaggaagaagagaagtgaagatgaaagtgaaacagaagatgaggaggagaagagccaggaggaccaggagcagaagaggaagaggaggaagacccggcagccagatgccaaggatggagacagctatgacccctatgacttcagtgacacagaggaggagatgccccaggtgcacacccccaagacagctgacagccaggagaccaaggagagccagaaggtggagctgtctgagagccggctgaaggccttcaaggtggccctgctggatgtgttccgggaggcccacgcccagagcatcggcatgaaccggctgacagagagcatcaacagagattctgaggagcccttcagctctgtggagatccaggccgccctgagcaagatgcaggatgacaaccaggtgatggtgtctgagggcatcatcttcctgatctag

SEQ ID NO: 20488 - DNA, 2592 bp, synthetic construct
  misc_feature 1..2592: note = Description of Artificial Sequence: Synthetic coding sequence
  source 1..2592: mol_type = other DNA
atgagcagccctgccagcacccccagccggcggggcagccggcggggccgggccaccccagcccagacccccaggagtgaagatgcccggagcagccccagccagaggagaagaggagaggacagcaccagcactggagagctgcagcccatgcccaccagccctggggtggacctgcagagccctgctgcccaggatgtgctcttcagcagccccccccagatgcacagcagcgccatccccctggactttgatgtgagcagccccctgacctacggcacccccagcagccgggtggagggcacccccaggtctggagtgcggggcacccctgtgcggcagaggccagacctgggcagcgcccagaagggcctgcaggtggacctgcagagtgatggagctgctgctgaagatattgtggccagcgagcagagcctgggccagaagctggtgatctggggcacagatgtgaatgtggccgcctgcaaggagaacttccagcgcttcctgcagcgcttcatcgaccccctggccaaggaggaggagaatgtgggcatcgacatcacagagcccctgtacatgcagaggctgggggagatcaacgtgattggagagcccttcctgaatgtgaactgtgagcacatcaagagctttgacaagaacctgtaccggcagctgatctcctacccccaggaggtgatccccacctttgacatggctgtgaatgagatcttctttgaccgctacccagacagcatcctggagcaccagatccaggtgcggcccttcaatgccctgaagaccaagaacatgaggaacctgaacccagaagatattgaccagctgatcaccatcagcggcatggtgatccgcaccagccagctgatccctgagatgcaggaggccttcttccagtgccaggtgtgtgcccacaccaccagggtggagatggaccggggcagaattgctgagcccagcgtgtgtggccgctgccacaccacccacagcatggccctgatccacaacagaagcctcttcagtgacaagcagatgatcaagctgcaggagagccctgaggacatgcctgctggccagaccccccacacagtcatcctgtttgcccacaatgacctggtggacaaggtgcagcccggggacagagtgaatgtgacaggcatctacagagctgtgcccatccgggtgaacccccgggtgtccaatgtgaagtctgtgtacaagacccacattgatgtgatccactacaggaagacagatgccaagaggctgcacggcctggatgaggaggccgagcagaagctgttcagcgagaagagggtggagctgctgaaggagctgagcaggaagccagacatctatgagcggctggccagcgccctggcccccagcatctatgaacatgaggacatcaagaagggcatcctgctgcagctgtttggaggcaccaggaaggacttcagccacacaggccggggcaagttccgggcagagatcaacatcctgctgtgtggggaccccggcaccagcaagagccagctgctgcagtatgtgtacaacctggtgccccggggccagtacaccagcggcaagggcagcagcgctgtgggcctgacagcctacgtgatgaaggaccctgagacccggcagctggtgctgcagacaggagccctggtgctgagtgacaatggcatctgctgcattgatgaatttgacaagatgaatgaaagcaccaggtctgtgctgcacgaggtgatggagcagcagaccctgagcatcgccaaggccggcatcatctgccagctgaatgcccggacctctgtgctggccgccgccaaccccatcgagagccagtggaaccccaagaagaccaccatcgagaacatccagctgccccacaccctgctgagcagatttgacctgatcttcctgctgctggacccccaggatgaggcctatgaccggcggctggcccaccacctggtggccctgtactaccagagcgaggagcaggccgaggaggagctgctggacatggctgtgctgaaggactacatcgcctatgcccacagcaccatcatgccccggctgtctgaggaggccagccaggccctgattgaggcctacgtggacatgaggaagattggcagcagccggggcatggtgtctgcctacccccggcagctggagagcctcatccggctggccgaggcccacgccaaggtgcggctgagcaacaaggtggaggccattgatgtggaggaggccaagaggctgcaccgggaggccctgaagcagagcgccacagaccccaggacaggcatcgtggacatcagcatcctgaccaccggcatgtctgccaccagcaggaagaggaaggaggagctggccgaggccctgaagaagctgatcctgagcaagggcaagaccccagccctgaagtaccagcagctgtttgaggacatccggggccagagcgacatcgccatcaccaaggacatgtttgaggaggccctgcgggccctggctgatgatgacttcctgactgtgacaggcaagacagtgcggctgctgtag

SEQ ID NO: 20489 - DNA, 2472 bp, synthetic construct
  misc_feature 1..2472: note = Description of Artificial Sequence: Synthetic coding sequence
  source 1..2472: mol_type = other DNA
atgcctggccacctgcccctgagagatgtggaggcccgcatccccccaccccggggcagctgcagccgctgccagccccggctggagtggacctgccgggccctgctgcggaggacctgctgcttccctgccctgcccaagtgcatcctgcagctgagcctgctgaccctgatgctggagggcacccccaggtctggagtgcggggcacccctgtgcggcagaggccagacctgggcagcgcccagaagggcctgcaggtggacctgcagagtgatggagctgctgctgaagatattgtggccagcgagcagagcctgggccagaagctggtgatctggggcacagatgtgaatgtggccgcctgcaaggagaacttccagcgcttcctgcagcgcttcatcgaccccctggccaaggaggaggagaatgtgggcatcgacatcacagagcccctgtacatgcagaggctgggggagatcaacgtgattggagagcccttcctgaatgtgaactgtgagcacatcaagagctttgacaagaacctgtaccggcagctgatctcctacccccaggaggtgatccccacctttgacatggctgtgaatgagatcttctttgaccgctacccagacagcatcctggagcaccagatccaggtgcggcccttcaatgccctgaagaccaagaacatgaggaacctgaacccagaagatattgaccagctgatcaccatcagcggcatggtgatccgcaccagccagctgatccctgagatgcaggaggccttcttccagtgccaggtgtgtgcccacaccaccagggtggagatggaccggggcagaattgctgagcccagcgtgtgtggccgctgccacaccacccacagcatggccctgatccacaacagaagcctcttcagtgacaagcagatgatcaagctgcaggagagccctgaggacatgcctgctggccagaccccccacacagtcatcctgtttgcccacaatgacctggtggacaaggtgcagcccggggacagagtgaatgtgacaggcatctacagagctgtgcccatccgggtgaacccccgggtgtccaatgtgaagtctgtgtacaagacccacattgatgtgatccactacaggaagacagatgccaagaggctgcacggcctggatgaggaggccgagcagaagctgttcagcgagaagagggtggagctgctgaaggagctgagcaggaagccagacatctatgagcggctggccagcgccctggcccccagcatctatgaacatgaggacatcaagaagggcatcctgctgcagctgtttggaggcaccaggaaggacttcagccacacaggccggggcaagttccgggcagagatcaacatcctgctgtgtggggaccccggcaccagcaagagccagctgctgcagtatgtgtacaacctggtgccccggggccagtacaccagcggcaagggcagcagcgctgtgggcctgacagcctacgtgatgaaggaccctgagacccggcagctggtgctgcagacaggagccctggtgctgagtgacaatggcatctgctgcattgatgaatttgacaagatgaatgaaagcaccaggtctgtgctgcacgaggtgatggagcagcagaccctgagcatcgccaaggccggcatcatctgccagctgaatgcccggacctctgtgctggccgccgccaaccccatcgagagccagtggaaccccaagaagaccaccatcgagaacatccagctgccccacaccctgctgagcagatttgacctgatcttcctgctgctggacccccaggatgaggcctatgaccggcggctggcccaccacctggtggccctgtactaccagagcgaggagcaggccgaggaggagctgctggacatggctgtgctgaaggactacatcgcctatgcccacagcaccatcatgccccggctgtctgaggaggccagccaggccctgattgaggcctacgtggacatgaggaagattggcagcagccggggcatggtgtctgcctacccccggcagctggagagcctcatccggctggccgaggcccacgccaaggtgcggctgagcaacaaggtggaggccattgatgtggaggaggccaagaggctgcaccgggaggccctgaagcagagcgccacagaccccaggacaggcatcgtggacatcagcatcctgaccaccggcatgtctgccaccagcaggaagaggaaggaggagctggccgaggccctgaagaagctgatcctgagcaagggcaagaccccagccctgaagtaccagcagctgtttgaggacatccggggccagagcgacatcgccatcaccaaggacatgtttgaggaggccctgcgggccctggctgatgatgacttcctgactgtgacaggcaagacagtgcggctgctgtag

SEQ ID NO: 20490 - DNA, 2592 bp, synthetic construct; identical to SEQ ID NO: 20488
  misc_feature 1..2592: note = Description of Artificial Sequence: Synthetic coding sequence
  source 1..2592: mol_type = other DNA

SEQ ID NO: 20491 - DNA, 855 bp, synthetic construct
  misc_feature 1..855: note = Description of Artificial Sequence: Synthetic coding sequence
  source 1..855: mol_type = other DNA
atggccccccggctgtgcagcatctctgtgacagcccggcggctgctgggcggccctggccccagggctggagatgtggccagcgctgctgctgcccgcttctacagcaaggacaatgaaggctcctggttccgcagcctgtttgtgcacaaggtggaccccaggaaggatgcccacagcaccctgctgagcaagaaggagaccagcaacctgtacaagatccagttccacaacgtgaagccagagtacctggatgcctacaacagcctgacagaagctgtgctgcccaagctgcacctggatgaggactacccctgcagcctggtgggcaactggaacacctggtacggggagcaggaccaggccgtgcacctgtggaggttcagcggcggctacccagccctgatggactgcatgaacaagctgaagaacaacaaggagtacctggagttccggcgggagaggagccagatgctgctgagcagaagaaaccagctgctgctggagttctccttctggaatgagccccagcccaggatgggccccaacatctatgagctgcggacctacaagctgaagccaggcaccatgattgagtggggcaacaactgggcccgggccatcaagtaccggcaggagaaccaggaggccgtgggcggcttcttcagccagattggagagctgtatgtggtgcaccacctgtgggcctacaaggacctgcagagccgggaggagaccagaaatgctgcctggaggaagaggggctgggatgaaaatgtgtactacacagtgcccctggtgcgccacatggagagccgcatcatgatccccctgaagatcagccccctgcagtag

SEQ ID NO: 20492 - DNA, 2076 bp, synthetic construct
  misc_feature 1..2076: note = Description of Artificial Sequence: Synthetic coding sequence
  source 1..2076: mol_type = other DNA
atgagcggctttgatgatcctggcatcttctacagcgacagctttggaggagatgcccaggctgatgagggccaggccaggaagagccagctgcagaggcgcttcaaggagttcctgcggcagtacagagtgggcacagacagaacaggcttcaccttcaagtacagagatgagctgaagaggcactacaacctgggggagtactggattgaggtggagatggaggacctggccagctttgatgaggacctggccgactacctgtacaagcagcctgctgagcacctgcagctgagtgacatgatgagccacctggtgaagatccctggcatcatcatcgccgccagcgctgtgcgggccaaggccacccgcatcagcatccagtgccgcagctgcaggaacaccctgaccaacatcgccatgaggcctggcctggagggctacgccctgcccaggaagtgcaacacagaccaggccggccggcccaagtgccccctggacccctacttcatcatgccagacaagtgcaagtgtgtggacttccagaccctgaagctgcaggagctgcctgatgctgtgccccatggagagatgcccaggcacatgcagctgtactgtgaccgctacctgtgtgacaaggtggtgcccggcaacagagtgaccatcatgggcatctacagcatcaagaagtttggcctgaccaccagccggggccgggacagagtgggcgtgggcatccgcagcagctacatccgggtgctgggcatccaggtggacacagatggcagcggccgcagctttgctggagctgtgagcccccaggaggaggaggagttccggcggctggccgccctgcccaacgtgtatgaagtcatcagcaagagcatcgcccccagcatctttggaggaacagacatgaagaaggccatcgcctgcctgctgtttggaggcagcaggaagaggctgcctgatggcctgacccggcggggggacatcaacctgctgatgctgggggaccccggcacagccaagagccagctgctgaagtttgtggagaagtgcagccccatcggcgtgtacaccagcggcaagggcagcagcgctgctggcctgacagcctctgtgatgagggaccccagcagcaggaacttcatcatggagggcggggccatggtgctggctgatggaggagtggtgtgcattgatgaatttgacaagatgagagaagatgacagagtggccatccacgaggccatggagcagcagaccatcagcatcgccaaggccggcatcaccaccaccctgaacagccgctgcagcgtgctggccgccgccaacagcgtgtttggccgctgggatgagaccaagggggaggacaacatcgacttcatgcccaccatcctgagcagatttgacatgatcttcatcgtgaaggatgagcacaatgaggagagagatgtgatgctggccaagcacgtgatcaccctgcacgtgtctgccctgacccagacccaggccgtggagggggagattgacctggccaagctgaagaagttcatcgcctactgccgggtgaagtgtggcccccggctgtctgctgaggccgctgagaagctgaagaaccgctacatcatcatgaggtctggggcccggcagcacgagcgggacagcgacagaagaagcagcatccccatcaccgtgcggcagctggaggccatcgtgagaattgctgaggccctgagcaagatgaagctgcagccctttgccacagaagcagatgtggaggaggccctgcggctcttccaggtgtccaccctggatgctgccctgagcggcaccctgtctggagtggagggcttcaccagccaggaggaccaggagatgctgagccgcatcgagaagcagctgaagagaagatttgccatcggcagccaggtgtctgagcacagcatcatcaaggacttcaccaagcagaagtacccagagcacgccatccacaaggtgctgcagctgatgctgcggcggggggagatccagcacaggatgcagaggaaggtgctgtaccgcctgaagtag

SEQ ID NO: 20493 - DNA, 696 bp, synthetic construct
  misc_feature 1..696: note = Description of Artificial Sequence: Synthetic coding sequence
  source 1..696: mol_type = other DNA
atgagcggctttgatgatcctggcatcttctacagcgacagctttggaggagatgcccaggctgatgagggccaggccaggaagagccagctgcagaggcgcttcaaggagttcctgcggcagtacagagtgggcacagacagaacaggcttcaccttcaagtacagcctggcccccagcctcatcgagcacctgctgcctgcccgctactgcagcggctgctgggccgccgccctgaagctggacctggccccagccagcagagatgagctgaagaggcactacaacctgggggagtactggattgaggtggagatggaggacctggccagctttgatgaggacctggccgactacctgtacaagcagcctgctgagcacctgcagctgctggaggaggccgccaaggaggtggctgatgaggtgacccggccccggcccagcggggaggaggtgctgcaggacatccaggtgatgctgaagagtgatgccagccccagcagcatccgcagcctgaagagtgacatgatgagccacctggtgaagatccctggcatcatcatcgccgccagcgctgtgcgggccaaggccacccgcatcagcatccagtgccgcagctgcaggaacaccctgaccaacatcgccatgaggcctggcctggagggctacgccctgcccaggaagtgcaacacctag

SEQ ID NO: 20494 - DNA, 1125 bp, synthetic construct
  misc_feature 1..1125: note = Description of Artificial Sequence: Synthetic coding sequence
  source 1..1125: mol_type = other DNA
atgaacagcagcggcatcaccacctggggcagcacaggcctgcgctggcgctggaggacccggccccggcccagcggggaggaggtgctgcaggacatccaggtgatgctgaagagtgatgccagccccagcagcatccgcagcctgaagagtgacatgatgagccacctggtgaagatccctggcatcatcatcgccgccagcgctgtgcgggccaaggccacccgcatcagcatccagtgccgcagctgcaggaacaccctgaccaacatcgccatgaggcctggcctggagggctacgccctgcccaggaagtgcaacacagaccaggccggccggcccaagtgccccctggacccctacttcatcatgccagacaagtgcaagtgtgtggacttccagaccctgaagctgcaggagctgcctgatgctgtgccccatggagagatgcccaggcacatgcagctgtactgtgaccgctacctgtgtgacaaggtggtgcccggcaacagagtgaccatcatgggcatctacagcatcaagaagtttggcctgaccaccagccggggccgggacagagtgggcgtgggcatccgcagcagctacatccgggtgctgggcatccaggtggacacagatggcagcggccgcagctttgctggagctgtgagcccccaggaggaggaggagttccggcggctggccgccctgcccaacgtgtatgaagtcatcagcaagagcatcgcccccagcatctttggaggaacagacatgaagaaggccatcgcctgcctgctgtttggaggcagcaggaagaggctgcctgatggcctgacccggcggggggacatcaacctgctgatgctgggggaccccggcacagccaagagccagctgctgaagtttgtggagaagtgcagccccatcggcgtgtacaccagcggcaagggcagcagcgctgctggcctgacagcctctgtgatgagggaccccagcagcaggaacttcatcatggagggcggggccatggtgctggctgatggaggagtggtgtgcattgatgaatttgacaagcaccgggaggccgcccaggcccccctgtgccactggctgcccggggtgtag

SEQ ID NO: 20495 - DNA, 1788 bp, synthetic construct
  misc_feature 1..1788: note = Description of Artificial Sequence: Synthetic coding sequence
  source 1..1788: mol_type = other DNA
atgttctacttccggggctgcggccgctgggtggccgtgtccttcaccaagcagcagttccccctggcccggctgagcagtgacagcgctgcccccaggaccccccactttgatgtgattgtcatcggcggcggccatgctggaacagaagctgccacagctgctgcccgctgtggcagcaggaccctgctgctgacccaccgggtggacaccatcggccagatgagctgcaaccccagctttggaggcatcggcaagggccacctgatgagggaggtggatgccctggatggcctgtgcagccgcatctgtgaccagagcggcgtgcactacaaggtgctgaacagaaggaagggccctgctgtgtggggcctgcgggcccagattgacaggaagctgtacaagcagaacatgcagaaggagatcctgaacacccccctgctgactgtgcaggagggcgctgtggaggacctgatcctgacagagcctgagcctgagcacacaggcaagtgccgggtgtctggagtggtgctgcctgaggaccagctgccctgctacctgacccacaccaacccccgggtggatgaaattgtgctgaagaacctgcacctgaacagccacgtgaaggagaccacccggggcccccgctactgccccagcattgagagcaaggtgctgcgcttccccaaccggctgcaccaggtgtggctggagcctgagggcatggacagcgacctgatctacccccagggcctgtccatgaccctgcctgctgagctgcaggagaagatgatcacctgcatccggggcctggagaaggccaaggtgatccagcccggctatggagtgcagtatgactacctggacccccggcagatcacccccagcctggagacccacctggtgcagaggctcttctttgctggccagatcaatggcaccaccggctatgaggaggccgccgcccagggcgtgattgctggcatcaatgccagcctgcgggtgtccaggaagcccccatttgtggtgtccaggacagagggctacatcggcgtgctgattgatgacctgaccaccctgggcaccagcgagccctacaggatgttcaccagccgggtggagttccggctgagcctgcggccagacaatgctgacagccggctgaccctgcggggctacaaggatgctggctgtgtgtcccagcagagatatgaaagagcctgctggatgaagagcagcctggaggagggcatctctgtgctgaagagcattgagttcctgagcagcaagtggaagaagctgatccctgaggccagcatcagcaccagccgcagcctgcctgtgcgggccctggatgtgctgaagtatgaggaggtggacatggacagcctggccaaggctgtgcctgagcccctgaagaagtacaccaagtgccgggagctggccgagcggctgaagattgaggccacctatgaatctgtgctcttccaccagctgcaggagatcaagggcgtgcagcaggatgaggccctgcagctgcccaaggacctggactacctgaccatcagagatgtgtccctgagccatgaggtgcgggagaagctgcacttcagccggccccagaccatcggggccgccagccgcatccctggggtgaccccagctgccatcatcaacctgctgcgctttgtgaagaccacccagaggcggcagagcgccatgaatgaaagcagcaagacagaccagtacctgtgtgatgctgaccggctgcaggagcgggagctgtag

SEQ ID NO: 20496 - DNA, 2154 bp, synthetic construct
  misc_feature 1..2154: note = Description of Artificial Sequence: Synthetic coding sequence
  source 1..2154: mol_type = other DNA
atgttctacttccggggctgcggccgctgggtggccgtgtccttcaccaagcagcagttccccctggcccggctgagcagtgacagcgctgcccccaggaccccccactttgatgtgattgtcatcggcggcggccatgctggaacagaagctgccacagctgctgcccgctgtggcagcaggaccctgctgctgacccaccgggtggacaccatcggccagatgagctgcaaccccagctttggaggcatcggcaagggccacctgatgagggaggtggatgccctggatggcctgtgcagccgcatctgtgaccagagcggcgtgcactacaaggtgctgaacagaaggaagggccctgctgtgtggggcctgcgggcccagattgacaggaagctgtacaagcagaacatgcagaaggagatcctgaacacccccctgctgactgtgcaggagggcgctgtggaggacctgatcctgacagagcctgagcctgagcacacaggcaagtgccgggtgtctggagtggtgctggtggatggcagcacagtgtatgcagagagcgtcatcctgaccaccggcaccttcctgcggggcatgattgtgattggcctggagacccaccctgctggccgcctgggggaccagcccagcatcggcctggcccagaccctggagaagctgggctttgtggtgggccgcctgaagacaggcaccccaccaagaattgccaaggagagcatcaacttcagcatcctgaacaagcacatcccagacaaccccagcatccccttctccttcaccaatgaaacagtgtggatcaagccagaggaccagctgccctgctacctgacccacaccaacccccgggtggatgagatcgtgctgaagaacctgcacctgaacagccacgtgaaggagaccacccggggcccccgctactgccccagcattgagagcaaggtgctgcgcttccccaaccggctgcaccaggtgtggctggagcctgagggcatggacagcgacctgatctacccccagggcctgtccatgaccctgcctgctgagctgcaggagaagatgatcacctgcatccggggcctggagaaggccaaggtgatccagccagatggagtgctgctgctgctgcccaggatggagtgcaatggagccatcagcgcccaccacaacctgcccctgcccggctatggagtgcagtatgactacctggacccccggcagatcacccccagcctggagacccacctggtgcagaggctcttctttgctggccagatcaatggcaccaccggctatgaggaggccgccgcccagggcgtgattgctggcatcaatgccagcctgcgggtgtccaggaagcccccatttgtggtgtccaggacagagggctacatcggcgtgctgattgatgacctgaccaccctgggcaccagcgagccctacaggatgttcaccagccgggtggagttccggctgagcctgcggccagacaatgctgacagccggctgaccctgcggggctacaaggatgctggctgtgtgtcccagcagagatatgaaagagcctgctggatgaagagcagcctggaggagggcatctctgtgctgaagagcattgagttcctgagcagcaagtggaagaagctgatccctgaggccagcatcagcaccagccgcagcctgcctgtgcgggccctggatgtgctgaagtatgaggaggtggacatggacagcctggccaaggctgtgcctgagcccctgaagaagtacaccaagtgccgggagctggccgagcggctgaagattgaggccacctatgaatctgtgctcttccaccagctgcaggagatcaagggcgtgcagcaggatgaggccctgcagctgcccaaggacctggactacctgaccatcagagatgtgtccctgagccatgaggtgcgggagaagctgcacttcagccggccccagaccatcggggccgccagccgcatccctggggtgaccccagctgccatcatcaacctgctgcgctttgtgaagaccacccagaggcggcagagcgccatgaatgaaagcagcaagacagaccagtacctgtgtgatgctgaccggctgcaggagcgggagctgtag

SEQ ID NO: 20497 - DNA, 1932 bp, synthetic construct
  misc_feature 1..1932: note = Description of Artificial Sequence: Synthetic coding sequence
  source 1..1932: mol_type = other DNA
atgagctgcaaccccagctttggaggcatcggcaagggccacctgatgagggaggtggatgccctggatggcctgtgcagccgcatctgtgaccagagcggcgtgcactacaaggtgctgaacagaaggaagggccctgctgtgtggggcctgcgggcccagattgacaggaagctgtacaagcagaacatgcagaaggagatcctgaacacccccctgctgactgtgcaggagggcgctgtggaggacctgatcctgacagagcctgagcctgagcacacaggcaagtgccgggtgtctggagtggtgctggtggatggcagcacagtgtatgcagagagcgtcatcctgaccaccggcaccttcctgcggggcatgattgtgattggcctggagacccaccctgctggccgcctgggggaccagcccagcatcggcctggcccagaccctggagaagctgggctttgtggtgggccgcctgaagacaggcaccccaccaagaattgccaaggagagcatcaacttcagcatcctgaacaagcacatcccagacaaccccagcatccccttctccttcaccaatgaaacagtgtggatcaagccagaggaccagctgccctgctacctgacccacaccaacccccgggtggatgagatcgtgctgaagaacctgcacctgaacagccacgtgaaggagaccacccggggcccccgctactgccccagcattgagagcaaggtgctgcgcttccccaaccggctgcaccaggtgtggctggagcctgagggcatggacagcgacctgatctacccccagggcctgtccatgaccctgcctgctgagctgcaggagaagatgatcacctgcatccggggcctggagaaggccaaggtgatccagccagatggagtgctgctgctgctgcccaggatggagtgcaatggagccatcagcgcccaccacaacctgcccctgcccggctatggagtgcagtatgactacctggacccccggcagatcacccccagcctggagacccacctggtgcagaggctcttctttgctggccagatcaatggcaccaccggctatgaggaggccgccgcccagggcgtgattgctggcatcaatgccagcctgcgggtgtccaggaagcccccatttgtggtgtccaggacagagggctacatcggcgtgctgattgatgacctgaccaccctgggcaccagcgagccctacaggatgttcaccagccgggtggagttccggctgagcctgcggccagacaatgctgacagccggctgaccctgcggggctacaaggatgctggctgtgtgtcccagcagagatatgaaagagcctgctggatgaagagcagcctggaggagggcatctctgtgctgaagagcattgagttcctgagcagcaagtggaagaagctgatccctgaggccagcatcagcaccagccgcagcctgcctgtgcgggccctggatgtgctgaagtatgaggaggtggacatggacagcctggccaaggctgtgcctgagcccctgaagaagtacaccaagtgccgggagctggccgagcggctgaagattgaggccacctatgaatctgtgctcttccaccagctgcaggagatcaagggcgtgcagcaggatgaggccctgcagctgcccaaggacctggactacctgaccatcagagatgtgtccctgagccatgaggtgcgggagaagctgcacttcagccggccccagaccatcggggccgccagccgcatccctggggtgaccccagctgccatcatcaacctgctgcgctttgtgaagaccacccagaggcggcagagcgccatgaatgaaagcagcaagacagaccagtacctgtgtgatgctgaccggctgcaggagcgggagctgtag

SEQ ID NO: 20498 - DNA, 2199 bp, synthetic construct
  misc_feature 1..2199: note = Description of Artificial Sequence: Synthetic coding sequence
  source 1..2199: mol_type = other DNA
atgttctacttccggggctgcggccgctgggtggccgtgtccttcaccaagcagcagttccccctggcccggctgagcagtgacagcgctgcccccaggaccccccactttgatgtgattgtcatcggcggcggccatgctggaacagaagctgccacagctgctgcccgctgtggcagcaggaccctgctgctgacccaccgggtggacaccatcggccagatgagctgcaaccccagctttggaggcatcggcaagggccacctgatgagggaggtggatgccctggatggcctgtgcagccgcatctgtgaccagagcggcgtgcactacaaggtgctgaacagaaggaagggccctgctgtgtggggcctgcgggcccagattgacaggaagctgtacaagcagaacatgcagaaggagatcctgaacacccccctgctgactgtgcaggagggcgctgtggaggacctgatcctgacagagcctgagcctgagcacacaggcaagtgccgggtgtctggagtggtgctggtggatggcagcacagtgtatgcagagagcgtcatcctgaccaccggcaccttcctgcggggcatgattgtgattggcctggagacccaccctgctggccgcctgggggaccagcccagcatcggcctggcccagaccctggagaagctgggctttgtggtgggccgcctgaagacaggcaccccaccaagaattgccaaggagagcatcaacttcagcatcctgaacaagcacatcccagacaaccccagcatccccttctccttcaccaatgaaacagtgtggatcaagccagaggaccagctgccctgctacctgacccacaccaacccccgggtggatgagatcgtgctgaagaacctgcacctgaacagccacgtgaaggagaccacccggggcccccgctactgccccagcattgagagcaaggtgctgcgcttccccaaccggctgcaccaggtgtggctggagcctgagggcatggacagcgacctgatctacccccagggcctgtccatgaccctgcctgctgagctgcaggagaagatgatcacctgcatccggggcctggagaaggccaaggtgatccagcccggctacggcgtgcagtatgactacctggacccccggcagatcacccccagcctggagacccacctggtgcagaggctcttctttgctggccagatcaatggcaccaccggctatgaggaggccgccgcccagacagagtgctgcagcgtggcccggctggagtgcagcgacatgatcagccagctgcaggccatcctgctgccccagcccagcctggtggccggcacagctggcatgcaccacaacacccagggcgtgattgctggcatcaatgccagcctgcgggtgtccaggaagcccccatttgtggtgtccaggacagagggctacatcggcgtgctgattgatgacctgaccaccctgggcaccagcgagccctacaggatgttcaccagccgggtggagttccggctgagcctgcggccagacaatgctgacagccggctgaccctgcggggctacaaggatgctggctgtgtgtcccagcagagatatgagcgggcctgctggatgaagagcagcctggaggagggcatctctgtgctgaagagcattgagttcctgagcagcaagtggaagaagctgatccctgaggccagcatcagcaccagccgcagcctgcctgtgcgggccctggatgtgctgaagtatgaggaggtggacatggacagcctggccaaggctgtgcctgagcccctgaagaagtacaccaagtgccgggagctggccgagcggctgaagattgaggccacctatgagagcgtgctcttccaccagctgcaggagatcaagggcgtgcagcaggatgaggccctgcagctgcccaaggacctggactacctgaccatcagagatgtgtccctgagccatgaggtgcgggagaagctgcacttcagccggccccagaccatcggggccgccagccgcatccctggggtgaccccagctgccatcatcaacctgctgcgctttgtgaagaccacccagaggcggcagagcgccatgaatgaaagcagcaagacagaccagtacctgtgtgatgctgaccggctgcaggagcgggagctgtag

SEQ ID NO: 20499 - DNA, 2079 bp, synthetic construct
  misc_feature 1..2079: note = Description of Artificial Sequence: Synthetic coding sequence
  source 1..2079: mol_type = other DNA
atgttctacttccggggctgcggccgctgggtggccgtgtccttcaccaagcagcagttccccctggcccggctgagcagtgacagcgctgcccccaggaccccccactttgatgtgattgtcatcggcggcggccatgctggaacagaagctgccacagctgctgcccgctgtggcagcaggaccctgctgctgacccaccgggtggacaccatcggccagatgagctgcaaccccagctttggaggcatcggcaagggccacctgatgagggaggtggatgccctggatggcctgtgcagccgcatctgtgaccagagcggcgtgcactacaaggtgctgaacagaaggaagggccctgctgtgtggggcctgcgggcccagattgacaggaagctgtacaagcagaacatgcagaaggagatcctgaacacccccctgctgactgtgcaggagggcgctgtggaggacctgatcctgacagagcctgagcctgagcacacaggcaagtgccgggtgtctggagtggtgctggtggatggcagcacagtgtatgcagagagcgtcatcctgaccaccggcaccttcctgcggggcatgattgtgattggcctggagacccaccctgctggccgcctgggggaccagcccagcatcggcctggcccagaccctggagaagctgggctttgtggtgggccgcctgaagacaggcaccccaccaagaattgccaaggagagcatcaacttcagcatcctgaacaagcacatcccagacaaccccagcatccccttctccttcaccaatgaaacagtgtggatcaagccagaggaccagctgccctgctacctgacccacaccaacccccgggtggatgagatcgtgctgaagaacctgcacctgaacagccacgtgaaggagaccacccggggcccccgctactgccccagcattgagagcaaggtgctgcgcttccccaaccggctgcaccaggtgtggctggagcctgagggcatggacagcgacctgatctacccccagggcctgtccatgaccctgcctgctgagctgcaggagaagatgatcacctgcatccggggcctggagaaggccaaggtgatccagcccggctacggcgtgcagtatgactacctggacccccggcagatcacccccagcctggagacccacctggtgcagaggctcttctttgctggccagatcaatggcaccaccggctatgaggaggccgccgcccagggcgtgattgctggcatcaatgccagcctgcgggtgtccaggaagcccccatttgtggtgtccaggacagagggctacatcggcgtgctgattgatgacctgaccaccctgggcaccagcgagccctacaggatgttcaccagccgggtggagttccggctgagcctgcggccagacaatgctgacagccggctgaccctgcggggctacaaggatgctggctgtgtgtcccagcagagatatgagcgggcctgctggatgaagagcagcctggaggagggcatctctgtgctgaagagcattgagttcctgagcagcaagtggaagaagctgatccctgaggccagcatcagcaccagccgcagcctgcctgtgcgggccctggatgtgctgaagtatgaggaggtggacatggacagcctggccaaggctgtgcctgagcccctgaagaagtacaccaagtgccgggagctggccgagcggctgaagattgaggccacctatgagagcgtgctcttccaccagctgcaggagatcaagggcgtgcagcaggatgaggccctgcagctgcccaaggacctggactacctgaccatcagagatgtgtccctgagccatgaggtgcgggagaagctgcacttcagccggccccagaccatcggggccgccagccgcatccctggggtgaccccagctgccatcatcaacctgctgcgctttgtgaagaccacccagaggcggcagagcgccatgaatgaaagcagcaagacagaccagtacctgtgtgatgctgaccggctgcaggagcgggagctgtag

SEQ ID NO: 20500 - DNA, 381 bp, synthetic construct
  misc_feature 1..381: note = Description of Artificial Sequence: Synthetic coding sequence
  source 1..381: mol_type = other DNA
atgagcattggagtgcccatcaaggtgctgcatgaagctgagggccacatcgtgacctgtgagaccaacacaggagaggtgtaccggggcaagctgattgaagctgaggacaacatgaactgccagatgagcaacatcaccgtgacctacagagatggccgggtggcccagctggagcaggtgtacatccggggcagcaagatccgcttcctgatcctgcctgacatgctgaagaatgcccccatgctgaagtccatgaagaacaagaaccagggcagcggggccggccggggcaaggccgccatcctgaaggcccaggtggccgcccggggccggggccggggcatgggccggggcaacatcttccagaagagaagatag

SEQ ID NO: 20501 - DNA, 1083 bp, synthetic construct
  misc_feature 1..1083: note = Description of Artificial Sequence: Synthetic coding sequence
  source 1..1083: mol_type = other DNA
atggctgctgctgctgctgctggagctggccctgagatggtgcggggccaggtgtttgatgtgggcccccgctacaccaacctgagctacatcggggagggcgcctacggcatggtgtgcagcgcctatgacaacgtgaacaaggtgcgggtggccatcaagaagatcagcccctttgagcaccagacctactgccagaggaccctgcgggagatcaagatcctgctgcgcttcagacatgagaacatcatcggcatcaatgacatcatccgggcccccaccatcgagcagatgaaggatgtgtacatcgtgcaggacctgatggagacagacctgtacaagctgctgaagacccagcacctgagcaatgaccacatctgctacttcctgtaccagatcctgcggggcctgaagtacatccacagcgccaacgtgctgcaccgggacctgaagcccagcaacctgctgctgaacaccacctgtgacctgaagatctgtgactttggcctggcccgggtggccgaccctgaccatgaccacacaggcttcctgacagaatatgtggccacccgctggtaccgggcccctgagatcatgctgaacagcaagggctacaccaagagcattgacatctggagcgtgggctgcatcctggccgagatgctgagcaaccggcccatcttccctgggaagcactacctggaccagctgaaccacatcctgggcatcctgggcagccccagccaggaggacctgaactgcatcatcaacctgaaggccaggaactacctgctgagcctgccccacaagaacaaggtgccctggaacagactcttccccaatgctgacagcaaggccctggacctgctggacaagatgctgaccttcaacccccacaagagaattgaggtggagcaggccctggcccacccctacctggagcagtactatgaccccagtgatgagcccatcgccgaggcccccttcaagtttgacatggagctggatgacctgcccaaggagaagctgaaggagctgatctttgaggagacagcccgcttccagcccggctaccgctcctag

SEQ ID NO: 20502 - DNA, 1047 bp, synthetic construct
  misc_feature 1..1047: note = Description of Artificial Sequence: Synthetic coding sequence
  source 1..1047: mol_type = other DNA
atggtgcggggccaggtgtttgatgtgggcccccgctacaccaacctgagctacatcggggagggcgcctacggcatggtgtgcagcgcctatgacaacgtgaacaaggtgcgggtggccatcaagaagatcagcccctttgagcaccagacctactgccagaggaccctgcgggagatcaagatcctgctgcgcttcagacatgagaacatcatcggcatcaatgacatcatccgggcccccaccatcgagcagatgaaggatgtgtacatcgtgcaggacctgatggagacagacctgtacaagctgctgaagacccagcacctgagcaatgaccacatctgctacttcctgtaccagatcctgcggggcctgaagtacatccacagcgccaacgtgctgcaccgggacctgaagcccagcaacctgctgctgaacaccacctgtgacctgaagatctgtgactttggcctggcccgggtggccgaccctgaccatgaccacacaggcttcctgacagaatatgtggccacccgctggtaccgggcccctgagatcatgctgaacagcaagggctacaccaagagcattgacatctggagcgtgggctgcatcctggccgagatgctgagcaaccggcccatcttccctgggaagcactacctggaccagctgaaccacatcctgggcatcctgggcagccccagccaggaggacctgaactgcatcatcaacctgaaggccaggaactacctgctgagcctgccccacaagaacaaggtgccctggaacagactcttccccaatgctgacagcaaggccctggacctgctggacaagatgctgaccttcaacccccacaagagaattgaggtggagcaggccctggcccacccctacctggagcagtactatgaccccagtgatgagcccatcgccgaggcccccttcaagtttgacatggagctggatgacctgcccaaggagaagctgaaggagctgatctttgaggagacagcccgcttccagcccggctaccgctcctag

SEQ ID NO: 20503 - DNA, 951 bp, synthetic construct
  misc_feature 1..951: note = Description of Artificial Sequence: Synthetic coding sequence
  source 1..951: mol_type = other DNA
atggctgctgctgctgctgctggagctggccctgagatggtgcggggccaggtgtttgatgtgggcccccgctacaccaacctgagctacatcggggagggcgcctacggcatggtgtgcagcgcctatgacaacgtgaacaaggtgcgggtggccatcaagaagatcagcccctttgagcaccagacctactgccagaggaccctgcgggagatcaagatcctgctgcgcttcagacatgagaacatcatcggcatcaatgacatcatccgggcccccaccatcgagcagatgaaggatgtgtacatcgtgcaggacctgatggagacagacctgtacaagctgctgaagacccagcacctgagcaatgaccacatctgctacttcctgtaccagatcctgcggggcctgaagtacatccacagcgccaacgtgctgcaccgggacctgaagcccagcaacctgctgctgaacaccacctgtgacctgaagatctgtgactttggcctggcccgggtggccgaccctgaccatgaccacacaggcttcctgacagaatatgtggccacccgctggtaccgggcccctgagatcatgctgaacagcaagggctacaccaagagcattgacatctggagcgtgggctgcatcctggccgagatgctgagcaaccggcccatcttccctgggaagcactacctggaccagctgaaccacatcctggccctggacctgctggacaagatgctgaccttcaacccccacaagagaattgaggtggagcaggccctggcccacccctacctggagcagtactatgaccccagtgatgagcccatcgccgaggcccccttcaagtttgacatggagctggatgacctgcccaaggagaagctgaaggagctgatctttgaggagacagcccgcttccagcccggctaccgctcctag

SEQ ID NO: 20504 - DNA, 1095 bp, synthetic construct
  misc_feature 1..1095: note = Description of Artificial Sequence: Synthetic coding sequence
  source 1..1095: mol_type = other DNA
atgagcggcccccgggccggcttctaccggcaggagctgaacaagacagtgtgggaggtgccccagaggctgcagggcctgcggcctgtgggcagcggggcctacggctctgtgtgcagcgcctatgatgcccggctgcggcagaaggtggccgtgaagaagctgagccggcccttccagagcctcatccacgcccggaggacctaccgggagctgcggctgctgaagcacctgaagcatgaaaatgtcatcggcctgctggatgtgttcaccccagccaccagcattgaggacttcagcgaggtgtacctggtgaccaccctgatgggcgctgacctgaacaacatcgtgaagtgccaggccctgagtgatgagcacgtgcagttcctggtgtaccagctgctgcggggcctgaagtacatccacagcgctggcatcatccaccgggacctgaagcccagcaatgtggccgtgaatgaagactgtgagctgcgcatcctggactttggcctggcccggcaggctgatgaggagatgacaggctacgtggccacccgctggtaccgggcccctgagatcatgctgaactggatgcactacaaccagacagtggacatctggagcgtgggctgcatcatggccgagctgctgcagggcaaggccctcttccctggcagtgactacatcgaccagctgaagaggatcatggaggtggtgggcacccccagccctgaggtgctggccaagatcagcagcgagcacgcccggacctacatccagagcctgccccccatgccccagaaggacctgagcagcatcttccggggggccaaccccctggccatcgacctgctgggccgcatgctggtgctggacagcgaccagagggtgtctgctgctgaggccctggcccacgcctacttcagccagtaccatgaccctgaagatgagcctgaggccgagccctatgatgagagcgtggaggccaaggagaggaccctggaggagtggaaggagctgacctaccaggaggtgctgtccttcaagcccccagagccccccaagcccccaggcagcctggagattgagcagtag

SEQ ID NO: 20505 - DNA, 1095 bp, synthetic construct; identical to SEQ ID NO: 20504
  misc_feature 1..1095: note = Description of Artificial Sequence: Synthetic coding sequence
  source 1..1095: mol_type = other DNA

SEQ ID NO: 20506 - DNA, 642 bp, synthetic construct
  misc_feature 1..642: note = Description of Artificial Sequence: Synthetic coding sequence
  source 1..642: mol_type = other DNA
atgggcgctgacctgaacaacatcgtgaagtgccaggccctgagtgatgagcacgtgcagttcctggtgtaccagctgctgcggggcctgaagtacatccacagcgctggcatcatccaccgggacctgaagcccagcaatgtggccgtgaatgaagactgtgagctgcgcatcctggactttggcctggcccggcaggctgatgaggagatgacaggctacgtggccacccgctggtaccgggcccctgagatcatgctgaactggatgcactacaaccagacaggagctgggggccggccctggggagatgagggccagggcccccggctggccctggactggctgtgcatgcctggcctgcggggccaggcccggagccccaggatgtgggacccccacagcaaggtggccctgcagaggcccctggagcatgatggctgctggccacccctggccgtgcagctgtggaccagcccctgcctgggcggcctgggcatggccgaggagggcgtgtgccccagctggggcctggatgtgacagtgggcctgctggaggagggccggggcgtgggcaccctgatggaggtgcccagccccagccacagcggctacctggtgcggggcctgcaccacggctag

SEQ ID NO: 20507 - DNA, 1149 bp, synthetic construct
  misc_feature 1..1149: note = Description of Artificial Sequence: Synthetic coding sequence
  source 1..1149: mol_type = other DNA
atggactttggcctggccctgctgctggccggcctgctgggcctgctgctgggccagagcctgcaggtgaagcccctgcaggtggagcccccagagcctgtggtggccgtggccctgggcgccagccggcagctgacctgccgcctggcctgtgccgacagaggagcctctgtgcagtggaggggcctggacaccagcctgggcgctgtgcagagcgacaccggccgctctgtgctgactgtgagaaatgccagcctgtctgctgctggcaccagggtgtgtgtgggcagctgtggcggccgcaccttccagcacacagtgcagctgctggtgtatgccttcccagaccagctgactgtgtccccagctgccctggtgcctggggaccctgaggtggcctgcacagcccacaaggtgacccctgtggaccccaatgccctgtccttcagcctgctggtgggcggccaggagctggagggcgcccaggccctgggccctgaggtgcaggaggaggaggaggagccccagggagatgaagatgtgctcttccgggtgacagagcgctggaggctgccccccctgggcacccctgtgcccccagccctgtactgccaggccaccatgaggctgcccggcctggagctgagccaccggcaggccatccctgtgctgcacagccccaccagccctgagcccccagacaccaccagccctgagagcccagacaccaccagccctgagagcccagacaccaccagccaggagcccccagacaccaccagccctgagcccccagacaagaccagccctgagcccgccccccagcagggcagcacccacacccccaggagccctggcagcaccaggaccaggaggcctgagatcagccaggccggccccacccagggcgaggtgatccccaccggcagcagcaagccagctggggaccagctgcctgctgccctgtggaccagcagcgctgtgctgggcctgctgctgctggccctgcccacctaccacctgtggaagcgctgccgccacctggccgaggatgacacccaccccccagccagcctgcggctgctgccccaggtgtctgcctgggccggcctgcggggcaccggccaggtgggcatcagccccagctag

SEQ ID NO: 20508 - DNA, 1074 bp, synthetic construct
  misc_feature 1..1074: note = Description of Artificial Sequence: Synthetic coding sequence
  source 1..1074: mol_type = other DNA
atgagcagccccccaccagcccggagcggcttctaccggcaggaggtgaccaagacagcctgggaggtgcgggctgtgtacagagacctgcagcctgtgggcagcggggcctacggggctgtgtgcagcgctgtggatggccgcactggagccaaggtggccatcaagaagctgtaccggcccttccagagcgagctgtttgccaagagggcctaccgggagctgcggctgctgaagcacatgagacatgaaaatgtgattggcctgctggatgtgttcaccccagatgagaccctggatgacttcacagacttctacctggtgatgcccttcatgggcacagacctgggcaagctgatgaagcatgagaagctgggagaagatcgcatccagttcctggtgtaccagatgctgaagggcctgcgggacctgaagccaggcaacctggccgtgaatgaagactgtgagctgaagatcctggactttggcctggcccggcaggccgacagcgagatgacaggctacgtggtgacccgctggtaccgggcccctgaggtgatcctgaactggatgagatacacccagacagtggacatctggagcgtgggctgcatcatggccgagatgatcaccgggaagaccctcttcaagggcagtgaccacctggaccagctgaaggagatcatgaaggtgacaggcaccccacctgctgagtttgtgcagaggctgcagagtgatgaggccaagaactacatgaagggcctgcctgagctggagaagaaggactttgccagcatcctgaccaatgccagccccctggccgtgaacctgctggagaagatgctggtgctggatgctgagcagagggtgacagctggggaggccctggcccacccctactttgagagcctgcatgacacagaagatgagccccaggtgcagaagtatgatgacagctttgatgatgtggacaggaccctggatgagtggaagagggtgacctacaaggaggtgctgtccttcaagccaccccggcagctgggcgcccgggtgtccaaggagacccccctgtag

SEQ ID NO: 20509 - DNA, 837 bp, synthetic construct
  misc_feature 1..837: note = Description of Artificial Sequence: Synthetic coding sequence
  source 1..837: mol_type = other DNA
atggccctgctgcctgtgctcttcctggtgacagtgctgctgcccagcctgcctgctgagggcaaggaccctgccttcaccgccctgctgaccacccagctgcaggtgcagcgggagatcgtgaacaagcacaatgagctgaggaaggctgtgtccccaccagccagcaacatgctgaagatggagtggagccgggaggtgaccaccaatgcccagcgctgggccaacaagtgcaccctgcagcacagcgaccctgaggacaggaagaccagcacccgctgtggggagaacctgtacatgagcagtgaccccacctcctggagcagcgccatccagagctggtatgatgagatcctggactttgtgtatggagtgggccccaagagccccaatgctgtggtgggccactacacccagctggtgtggtacagcacctaccaggtgggctgcggcatcgcctactgccccaaccaggacagcctgaagtactactacgtgtgccagtactgcccagccatgaagacctacctgaacaagcgggagggcatcaacgtgtggaagtgcttcctgcggctgcggcacttccagctgctgcggggggagcagctgctgaccttcagcggcaacaacatgaacaggaagaacaccccctaccagcagggcaccccctgtgccggctgcccagatgactgtgacaagggcctgtgcaccaacagctgccagtaccaggacctgctgagcaactgtgacagcctgaagaacacagctggctgtgagcacgagctgctgaaggagaagtgcaaggccacctgcctgtgtgagaacaagatctactag

SEQ ID NO: 20510 - DNA, 459 bp, synthetic construct
  misc_feature 1..459: note = Description of Artificial Sequence: Synthetic coding sequence
  source 1..459: mol_type = other DNA
atgcagcatgaaaatgtgattggcctgctggatgtgttcaccccagccagcagcctgaggaacttctatgacttctacctggtgatgcccttcatgcagacagacctgcagaagatcatgggcatggagttcagcgaggagaagatccagtacctggtgtaccagatgctgaagggcctgaagtacatccacagcgctggggtggtgcaccgggacctgaagccaggcaacctggccgtgaatgaagactgtgagctgaagatcctggactttggcctggcccggcatgctgatgctgagatgacaggctacgtggtgacccgctggtaccgggcccctgaggtgatcctgtcctggatgcactacaaccagacaggccagatcctgcaccctgtgcctgccacagacccccaggagggcttccacagcgctgtgcccaccggccagcccccaggatag

SEQ ID NO: 20511 - DNA, 1068 bp, synthetic construct
  misc_feature 1..1068: note = Description of Artificial Sequence: Synthetic coding sequence
  source 1..1068: mol_type = other DNA
atgagcctcatcaggaagaagggcttctacaagcaggatgtgaacaagacagcctgggagctgcccaagacctacgtgagccccacccacgtgggcagcggggcctacggctctgtgtgcagcgccatcgacaagaggtctggagagaaggtggccatcaagaagctgagccggcccttccagagcgagatctttgccaagagggcctaccgggagctgctgctgctgaagcacatgcagcatgaaaatgtgattggcctgctggatgtgttcaccccagccagcagcctgaggaacttctatgacttctacctggtgatgcccttcatgcagacagacctgcagaagatcatgggcatggagttcagcgaggagaagatccagtacctggtgtaccagatgctgaagggcctgaaggacctgaagccaggcaacctggccgtgaatgaagactgtgagctgaagatcctggactttggcctggcccggcatgctgatgctgagatgacaggctacgtggtgacccgctggtaccgggcccctgaggtgatcctgtcctggatgcactacaaccagacagtggacatctggagcgtgggctgcatcatggccgagatgctgaccgggaagaccctcttcaagggcaaggactacctggaccagctgacccagatcctgaaggtgactggagtgcccggcacagaatttgtgcagaagctgaatgacaaggccgccaagagctacatccagagcctgccccagacccccaggaaggacttcacccagctgttcccccgggccagcccccaggccgctgacctgctggagaagatgctggagctggatgtggacaagaggctgacagctgcccaggccctgacccaccccttctttgagcccttccgggaccctgaggaggagacagaggcccagcagccctttgatgacagcctggagcacgagaagctgactgtggatgagtggaagcagcacatctacaaggagatcgtgaacttcagccccatcgccaggaaggacagcagaagaagaagtggcatgaagctgtag

SEQ ID NO: 20512 - DNA, 774 bp, synthetic construct
  misc_feature 1..774: note = Description of Artificial Sequence: Synthetic coding sequence
  source 1..774: mol_type = other DNA
atgagcctcatcaggaagaagggcttctacaagcaggatgtgaacaagacagcctgggagctgcccaagacctacgtgagccccacccacgtgggcagcggggcctacggctctgtgtgcagcgccatcgacaagaggtctggagagaaggtggccatcaagaagctgagccggcccttccagagcgagatctttgccaagagggcctaccgggagctgctgctgctgaagcacatgcagcatgaaaatgtgattggcctgctggatgtgttcaccccagccagcagcctgaggaacttctatgacttctacctggtgatgcccttcatgcagacagacctgcagaagatcatgggcatggagttcagcgaggagaagatccagtacctggtgtaccagatgctgaagggcctgaagtacatccacagcgctggggtggtgcaccgggacctgaagccaggcaacctggccgtgaatgaagactgtgagctgaagatcctggactttggcctggcccggcatgctgatgctgagatgacaggctacgtggtgacccgctggtaccgggcccctgaggtgatcctgtcctggatgcactacaaccagacaggccagatcctgcaccctgtgcctgccacagacccccaggagggcttccacagcgctgtgcccaccggccagcccccaggctgcggccctgctggggaggatgctggggcccggcggggccaggccccagatggccgggccggcccccaccccagcctgctgtag

SEQ ID NO: 20513 - DNA, 933 bp, synthetic construct
  misc_feature 1..933: note = Description of Artificial Sequence: Synthetic coding sequence
  source 1..933: mol_type = other DNA
atgagcctcatcaggaagaagggcttctacaagcaggatgtgaacaagacagcctgggagctgcccaagacctacgtgagccccacccacgtgggcagcggggcctacggctctgtgtgcagcgccatcgacaagaggtctggagagaaggtggccatcaagaagctgagccggcccttccagagcgagatctttgccaagagggcctaccgggagctgctgctgctgaagcacatgcagcatgaaaatgtgattggcctgctggatgtgttcaccccagccagcagcctgaggaacttctatgacttctacctggtgatgcccttcatgcagacagacctgcagaagatcatgggcatggagttcagcgaggagaagatccagtacctggtgtaccagatgctgaagggcctgaagtacatccacagcgctggggtggtgcaccgggacctgaagccaggcaacctggccgtgaatgaagactgtgagctgaagatcctggactttggcctggcccggcatgctgatgctgagatgacaggctacgtggtgacccgctggtaccgggcccctgaggtgatcctgtcctggatgcactacaaccagacagtggacatctggagcgtgggctgcatcatggccgagatgctgaccgggaagaccctcttcaagggcaaggactacctgctggagaagatgctggagctggatgtggacaagaggctgacagctgcccaggccctgacccaccccttctttgagcccttccgggaccctgaggaggagacagaggcccagcagccctttgatgacagcctggagcacgagaagctgactgtggatgagtggaagcagcacatctacaaggagatcgtgaacttcagccccatcgccaggaaggacagcagaagaagaagtggcatgaagctgtag

SEQ ID NO: 20514 - DNA, 1629 bp, synthetic construct
  misc_feature 1..1629: note = Description of Artificial Sequence: Synthetic coding sequence
  source 1..1629: mol_type = other DNA
atgcccctgagagatgagaccctgcgggaggtgtgggccagtgacagcggccacgaggaggagagcctgagccctgaggccccccggcggcccaagcagaggcctgccccagcccagaggctgaggaagaagaggacagaggcccctgagagcccctgccccaccggcagcaagcccaggaagccaggggccggccgcacaggccggccccgggaggagcccagcccagaccctgcccaggcccgggccccccagacagtgtatgcccgcttcctgcgggaccctgaggccaagaagagggacccccgggagaccttcctggtggcccgggccccagatgctgaagatgaggaggaggaggaggaggaggatgaggaggatgaggaggaggaggccgaggagaagaaggagaagatcctgctgccccccaagaagcccctgcgggagaagagcagcgctgacctgaaggagcggcgggccaaggcccagggccccaggggggacctgggcagcccagaccccccacccaagcccctgcgggtgaggaacaaggaggccccagctggggagggcaccaagatgaggaagaccaagaagaagggcagcggggaggccgacaaggaccccagcggcagccctgccagcgccaggaagagccctgctgccatgttcctggtgggggagggcagcccagacaagaaggccctgaagaagaagggcacccccaagggggccaggaaggaggaggaggaggaggaggaggccgccaccgtcatcaagaagagcaaccagaagggcaaggccaagggcaagggcaagaagaaggccaaggaggagcgggcccccagcccccctgtggaggtggatgagccccgggagtttgtgctgcggcctgccccccagggccgcacagtgcgctgccgcctgacccgggacaagaagggcatggaccggggcatgtaccccagctacttcctgcacctggacacagagaagaaggtgttcctgctggccggcaggaagaggaagaggagcaagacagccaactacctgatcagcattgaccccaccaacctgagccggggcggggagaacttcatcggcaagctgcggagcaacctgctgggcaaccgcttcaccgtgtttgacaatggccagaacccccagaggggctacagcaccaacgtggccagcctgcggcaggagctggccgctgtgatctatgagaccaacgtgctgggcttccggggccccaggaggatgaccgtcatcatccctggcatgtctgcagaaaatgaaagagtgcccatccggcccagaaatgccagtgatggcctgctggtgcgctggcagaacaagaccctggagagcctgattgagctgcacaacaagccccctgtgtggaatgatgacagcggcagctacaccctgaacttccagggccgggtgacccaggcctctgtgaagaacttccagatcgtgcatgctgatgatcctgactacatcgtgctgcagtttggccgggtggctgaagatgccttcaccctggactaccgctaccccctgtgtgccctgcaggcctttgccatcgccctgagcagctttgatggcaagctggcctgtgagtag

SEQ ID NO: 20515 - DNA, 1083 bp, synthetic construct
  misc_feature 1..1083: note = Description of Artificial Sequence: Synthetic coding sequence
  source 1..1083: mol_type = other DNA
atgagccaggagcggcccaccttctaccggcaggagctgaacaagaccatctgggaggtgcctgagcgctaccagaacctgagccctgtgggcagcggggcctacggctctgtgtgtgccgcctttgacaccaagacaggcctgcgggtggccgtgaagaagctgagccggcccttccagagcatcatccacgccaagaggacctaccgggagctgcggctgctgaagcacatgaagcatgaaaatgtcatcggcctgctggatgtgttcaccccagcccggagcctggaggagttcaatgatgtgtacctggtgacccacctgatgggcgctgacctgaacaacatcgtgaagtgccagaagctgacagatgaccacgtgcagttcctgatctaccagatcctgcggggcctgaagtacatccacagcgctgacatcatccaccgggacctgaagcccagcaacctggccgtgaatgaagactgtgagctgaagatcctggactttggcctggcccggcacacagatgatgagatgacaggctacgtggccacccgctggtaccgggcccctgagatcatgctgaactggatgcactacaaccagacagtggacatctggagcgtgggctgcatcatggccgagctgctgaccggccgcaccctcttccctggaacagaccacatcgaccagctgaagctgatcctgcggctggtgggcaccccaggagctgagctgctgaagaagatcagcagcgagagcgccaggaactacatccagagcctgacccagatgcccaagatgaactttgccaacgtgttcatcggggccaaccccctggccgtggacctgctggagaagatgctggtgctggacagcgacaagaggatcacagctgcccaggccctggcccacgcctactttgcccagtaccatgaccctgatgatgagcctgtggccgacccctatgaccagagctttgagagccgggacctgctgattgatgagtggaagagcctgacctatgatgaagtcatcagctttgtgcccccacccctggaccaggaggagatggagagctag

SEQ ID NO: 20516 - DNA, 924 bp, synthetic construct
  misc_feature 1..924: note = Description of Artificial Sequence: Synthetic coding sequence
  source 1..924: mol_type = other DNA
atgagccaggagcggcccaccttctaccggcaggagctgaacaagaccatctgggaggtgcctgagcgctaccagaacctgagccctgtgggcagcggggcctacggctctgtgtgtgccgcctttgacaccaagacaggcctgcgggtggccgtgaagaagctgagccggcccttccagagcatcatccacgccaagaggacctaccgggagctgcggctgctgaagcacatgaagcatgaaaatgtcatcggcctgctggatgtgttcaccccagcccggagcctggaggagttcaatgatgtgtacctggtgacccacctgatgggcgctgacctgaacaacatcgtgaagtgccagaagctgacagatgaccacgtgcagttcctgatctaccagatcctgcggggcctgaagtacatccacagcgctgacatcatccaccgggacctgaagcccagcaacctggccgtgaatgaagactgtgagctgaagatcctggactttggcctggcccggcacacagatgatgagatgacaggctacgtggccacccgctggtaccgggcccctgagatcatgctgaactggatgcactacaaccagacagtggacatctggagcgtgggctgcatcatggccgagctgctgaccggccgcaccctcttccctggaacagaccacatcgaccagctgaagctgatcctgcggctggtgggcaccccaggagctgagctgctgaagaagatcagcagcgagagcctgagcacctgctggaggcgctgcctgtactggacccagatccgggagctgcagaggcccaagcccctgcacatgcccaccctgctgagcaccaccatcctgatgatgaaccagtggcccatcctgatgatcagccccctgaaggccggcaccagcctgtag

SEQ ID NO: 20517 - DNA, 852 bp, synthetic construct
  misc_feature 1..852: note = Description of Artificial Sequence: Synthetic coding sequence
  source 1..852: mol_type = other DNA
atgaagcatgaaaatgtgattggcctgctggatgtgttcaccccagcccggagcctggaggagttcaatgatgtgtacctggtgacccacctgatgggcgctgacctgaacaacatcgtgaagtgccagaagctgacagatgaccacgtgcagttcctgatctaccagatcctgcggggcctgaagtacatccacagcgctgacatcatccaccgggacctgaagcccagcaacctggccgtgaatgaagactgtgagctgaagatcctggactttggcctggcccggcacacagatgatgagatgacaggctacgtggccacccgctggtaccgggcccctgagatcatgctgaactggatgcactacaaccagacagtggacatctggagcgtgggctgcatcatggccgagctgctgactggaagaaccctcttccctggaacagaccacatcgaccagctgaagctgatcctgcggctggtgggcaccccaggagctgagctgctgaagaagatcagcagcgagagcgccaggaactacatccagagcctgacccagatgcccaagatgaactttgccaacgtgttcatcggggccaaccccctggccgtggacctgctggagaagatgctggtgctggacagcgacaagaggatcacagctgcccaggccctggcccacgcctactttgcccagtaccatgaccctgatgatgagcctgtggccgacccctatgaccagagctttgagagccgggacctgctgattgatgagtggaagagcctgacctatgatgaggtgatcagctttgtgcccccacccctggaccaggaggagatggagagctag

SEQ ID NO: 20518 - DNA, 1140 bp, synthetic construct
  misc_feature 1..1140: note = Description of Artificial Sequence: Synthetic coding sequence
  source 1..1140: mol_type = other DNA
atggctgctgctgctgcccagggcggcggcggcggggagcccaggagaacagaaggagtgggccctggggtgcctggagaggtggagatggtgaagggccagccctttgatgtgggcccccgctacacccagctgcagtacatcggggagggcgcctacggcatggtgagcagcgcctatgaccacgtgaggaagaccagggtggccatcaagaagatcagcccctttgagcaccagacctactgccagaggaccctgcgggagatccagatcctgctgcgcttcagacatgaaaatgtgattggcatccgggacatcctgcgggccagcaccctggaggccatgagagatgtgtacatcgtgcaggacctgatggagacagacctgtacaagctgctgaagagccagcagctgagcaatgaccacatctgctacttcctgtaccagatcctgcggggcctgaagtacatccacagcgccaacgtgctgcaccgggacctgaagcccagcaacctgctgatcaacaccacctgtgacctgaagatctgtgactttggcctggccagaattgctgaccctgagcatgaccacacaggcttcctgacagaatatgtggccacccgctggtaccgggcccctgagatcatgctgaacagcaagggctacaccaagagcattgacatctggagcgtgggctgcatcctggccgagatgctgagcaaccggcccatcttccctgggaagcactacctggaccagctgaaccacatcctgggcatcctgggcagccccagccaggaggacctgaactgcatcatcaacatgaaggccaggaactacctgcagagcctgcccagcaagaccaaggtggcctgggccaagctgttccccaagagtgacagcaaggccctggacctgctggacaggatgctgaccttcaaccccaacaagaggatcaccgtggaggaggccctggcccacccctacctggagcagtactatgaccccacagatgagcctgtggccgaggagcccttcacctttgccatggagctggatgacctgcccaaggagcggctgaaggagctgatcttccaggagacagcccgcttccagcccggggtgctggaggccccctag

SEQ ID NO: 20519 - DNA, 1008 bp, synthetic construct
  misc_feature 1..1008: note = Description of Artificial Sequence: Synthetic coding sequence
  source 1..1008: mol_type = other DNA
atggctgctgctgctgcccagggcggcggcggcggggagcccaggagaacagaaggagtgggccctggggtgcctggagaggtggagatggtgaagggccagccctttgatgtgggcccccgctacacccagctgcagtacatcggggagggcgcctacggcatggtgagcagcgcctatgaccacgtgaggaagaccagggtggccatcaagaagatcagcccctttgagcaccagacctactgccagaggaccctgcgggagatccagatcctgctgcgcttcagacatgaaaatgtgattggcatccgggacatcctgcgggccagcaccctggaggccatgagagatgtgtacatcgtgcaggacctgatggagacagacctgtacaagctgctgaagagccagcagctgagcaatgaccacatctgctacttcctgtaccagatcctgcggggcctgaagtacatccacagcgccaacgtgctgcaccgggacctgaagcccagcaacctgctgatcaacaccacctgtgacctgaagatctgtgactttggcctggccagaattgctgaccctgagcatgaccacacaggcttcctgacagaatatgtggccacccgctggtaccgggcccctgagatcatgctgaacagcaagggctacaccaagagcattgacatctggagcgtgggctgcatcctggccgagatgctgagcaaccggcccatcttccctgggaagcactacctggaccagctgaaccacatcctggccctggacctgctggacaggatgctgaccttcaaccccaacaagaggatcaccgtggaggaggccctggcccacccctacctggagcagtactatgaccccacagatgagcctgtggccgaggagcccttcacctttgccatggagctggatgacctgcccaaggagcggctgaaggagctgatcttccaggagacagcccgcttccagcccggggtgctggaggccccctag

SEQ ID NO: 20520 - DNA, 936 bp, synthetic construct
  misc_feature 1..936: note = Description of Artificial Sequence: Synthetic coding sequence
  source 1..936: mol_type = other DNA
atggtgaagggccagccctttgatgtgggcccccgctacacccagctgcagtacatcggggagggcgcctacggcatggtgtcctctgcctatgaccacgtgaggaagaccagggtggccatcaagaagatcagcccctttgagcaccagacctactgccagaggaccctgcgggagatccagatcctgctgcgcttcagacatgaaaatgtcatcggcatccgggacatcctgcgggccagcaccctggaggccatgagagatgtgtacatcgtgcaggacctgatggagacagacctgtacaagctgctgaagagccagcagctgagcaatgaccacatctgctacttcctgtaccagatcctgcggggcctgaagtacatccacagcgccaacgtgctgcaccgggacctgaagcccagcaacctgctgatcaacaccacctgtgacctgaagggctacaccaagagcattgacatctggagcgtgggctgcatcctggccgagatgctgagcaaccggcccatcttccctgggaagcactacctggaccagctgaaccacatcctgggcatcctgggcagccccagccaggaggacctgaactgcatcatcaacatgaaggccaggaactacctgcagagcctgcccagcaagaccaaggtggcctgggccaagctgttccccaagagtgacagcaaggccctggacctgctggacaggatgctgaccttcaaccccaacaagaggatcaccgtggaggaggccctggcccacccctacctggagcagtactatgaccccacagatgagcctgtggccgaggagcccttcacctttgccatggagctggatgacctgcccaaggagcggctgaaggagctgatcttccaggagacagcccgcttccagcccggggtgctggaggccccctag

SEQ ID NO: 20521 - DNA, 1008 bp, synthetic construct; identical to SEQ ID NO: 20519
  misc_feature 1..1008: note = Description of Artificial Sequence: Synthetic coding sequence
  source 1..1008: mol_type = other DNA

SEQ ID NO: 20522 - DNA, 1074 bp, synthetic construct
  misc_feature 1..1074: note = Description of Artificial Sequence: Synthetic coding sequence
  source 1..1074: mol_type = other DNA
atggctgctgctgctgcccagggcggcggcggcggggagcccaggagaacagaaggagtgggccctggggtgcctggagaggtggagatggtgaagggccagccctttgatgtgggcccccgctacacccagctgcagtacatcggggagggcgcctacggcatggtgagcagcgcctatgaccacgtgaggaagaccagggtggccatcaagaagatcagcccctttgagcaccagacctactgccagaggaccctgcgggagatccagatcctgctgcgcttcagacatgaaaatgtgattggcatccgggacatcctgcgggccagcaccctggaggccatgagagatgtgtacatcgtgcaggacctgatggagacagacctgtacaagctgctgaagagccagcagctgagcaatgaccacatctgctacttcctgtaccagatcctgcggggcctgaagtacatccacagcgccaacgtgctgcaccgggacctgaagcccagcaacctgctgatcaacaccacctgtgacctgaagatctgtgactttggcctggccagaattgctgaccctgagcatgaccacacaggcttcctgacagaatatgtggccacccgctggtaccgggcccctgagatcatgctgaacagcaagggctacaccaagagcattgacatctggagcgtgggctgcatcctggccgagatgctgagcaaccggcccatcttccctgggaagcactacctggaccagctgaaccacatcctgggcatcctgggcagccccagccaggaggacctgaactgcatcatcaacatgaaggccaggaactacctgcagagcctgcccagcaagaccaaggtggcctgggccaagctgttccccaagagtgacagcaaggccctggacctgctggacaggatgctgaccttcaaccccaacaagaggatcaccgtggaggaggccctggcccacccctacctggagcagtactatgaccccacagatgaggtgggccagagccctgctgctgtgggcctgggcgctggggagcagggcggcacctag

SEQ ID NO: 20523 - DNA, 798 bp, synthetic construct
  misc_feature 1..798: note = Description of Artificial Sequence: Synthetic coding sequence
  source 1..798: mol_type = other DNA
atgagagatgtgtacatcgtgcaggacctgatggagacagacctgtacaagctgctgaagagccagcagctgagcaatgaccacatctgctacttcctgtaccagatcctgcggggcctgaagtacatccacagcgccaacgtgctgcaccgggacctgaagcccagcaacctgctgatcaacaccacctgtgacctgaagatctgtgactttggcctggccagaattgctgaccctgagcatgaccacacaggcttcctgacagaatatgtggccacccgctggtaccgggcccctgagatcatgctgaacagcaagggctacaccaagagcattgacatctggagcgtgggctgcatcctggccgagatgctgagcaaccggcccatcttccctgggaagcactacctggaccagctgaaccacatcctgggcatcctgggcagccccagccaggaggacctgaactgcatcatcaacatgaaggccaggaactacctgcagagcctgcccagcaagaccaaggtggcctgggccaagctgttccccaagagtgacagcaaggccctggacctgctggacaggatgctgaccttcaaccccaacaagaggatcaccgtggaggaggccctggcccacccctacctggagcagtactatgaccccacagatgagcctgtggccgaggagcccttcacctttgccatggagctggatgacctgcccaaggagcggctgaaggagctgatcttccaggagacagcccgcttccagcccggggtgctggaggccccctag

SEQ ID NO: 20524 - DNA, 1284 bp, synthetic construct
  misc_feature 1..1284: note = Description of Artificial Sequence: Synthetic coding sequence
  source 1..1284: mol_type = other DNA
atgagccgcagcaagagggacaacaacttctacagcgtggagattggagacagcaccttcaccgtgctgaagcgctaccagaacctgaagcccatcggcagcggggcccagggcatcgtgtgtgccgcctatgatgccatcctggagagaaatgtggccatcaagaagctgagccggcccttccagaaccagacccacgccaagagggcctaccgggagctggtgctgatgaagtgtgtgaaccacaagaacatcatcggcctgctgaatgtgttcaccccccagaagagcctggaggagttccaggatgtgtacatcgtgatggagctgatggatgccaacctgtgccaggtgatccagatggagctggaccacgagaggatgagctacctgctgtaccagatgctgtgtggcatcaagcacctgcacagcgctggcatcatccaccgggacctgaagcccagcaacatcgtggtgaagagtgactgcaccctgaagatcctggactttggcctggccaggacagctggcaccagcttcatgatgaccccctacgtggtgacccgctactaccgggcccctgaggtgatcctgggcatgggctacaaggaaaatgtggacctgtggagcgtgggctgcatcatgggagagatggtgtgccacaagatcctcttccctggccgggactacatcgaccagtggaacaaggtgattgagcagctgggcaccccctgcccagagttcatgaagaagctgcagcccaccgtgaggacctacgtggagaaccggcccaagtatgccggctacagctttgagaagctgttcccagatgtgctcttccctgctgacagcgagcacaacaagctgaaggccagccaggcccgggacctgctgagcaagatgctggtgattgatgccagcaagaggatctctgtggatgaggccctgcagcacccctacatcaacgtgtggtatgaccccagcgaggccgaggcccccccacccaagatcccagacaagcagctggatgagcgggagcacaccatcgaggagtggaaggagctgatctacaaggaggtgatggacctggaggagaggaccaagaatggagtcatccggggccagcccagccccctgggcgccgccgtcatcaatggcagccagcaccccagcagcagcagctctgtgaatgatgtgtcctccatgagcacagaccccaccctggccagtgacacagacagcagcctggaggccgccgccggccccctgggctgctgcaggtag

SEQ ID NO: 20525 - DNA, 657 bp, synthetic construct
  misc_feature 1..657: note = Description of Artificial Sequence: Synthetic coding sequence
  source 1..657: mol_type = other DNA
atgagccgcagcaagagggacaacaacttctacagcgtggagattggagacagcaccttcaccgtgctgaagcgctaccagaacctgaagcccatcggcagcggggcccagggcatcgtgtgtgccgcctatgatgccatcctggagagaaatgtggccatcaagaagctgagccggcccttccagaaccagacccacgccaagagggcctaccgggagctggtgctgatgaagtgtgtgaaccacaagaacatcatcggcctgctgaatgtgttcaccccccagaagagcctggaggagttccaggatgtgtacatcgtgatggagctgatggatgccaacctgtgccaggtgatccagatggagctggaccacgagaggatgagctacctgctgtaccagatgctgtgtggcatcaagcacctgcacagcgctggcatcatccaccgggacctgaagcccagcaacatcgtggtgaagagtgactgcaccctgaagatcctggactttggcctggccaggacagctggcaccagcttcatgatgaccccctacgtggtgacccgctactaccgggcccctgaggtgatcctgggcatgggctacaaggaaaatggaggccgcatgggcaagggcatcttcacccggctgcagtag

SEQ ID NO: 20526 - DNA, 1284 bp, synthetic construct
  misc_feature 1..1284: note = Description of Artificial Sequence: Synthetic coding sequence
  source 1..1284: mol_type = other DNA
atgagccgcagcaagagggacaacaacttctacagcgtggagattggagacagcaccttcaccgtgctgaagcgctaccagaacctgaagcccatcggcagcggggcccagggcatcgtgtgtgccgcctatgatgccatcctggagagaaatgtggccatcaagaagctgagccggcccttccagaaccagacccacgccaagagggcctaccgggagctggtgctgatgaagtgtgtgaaccacaagaacatcatcggcctgctgaatgtgttcaccccccagaagagcctggaggagttccaggatgtgtacatcgtgatggagctgatggatgccaacctgtgccaggtgatccagatggagctggaccacgagaggatgagctacctgctgtaccagatgctgtgtggcatcaagcacctgcacagcgctggcatcatccaccgggacctgaagcccagcaacatcgtggtgaagagtgactgcaccctgaagatcctggactttggcctggccaggacagctggcaccagcttcatgatgaccccctacgtggtgacccgctactaccgggcccctgaggtgatcctgggcatgggctacaaggaaaatgtggacatctggagcgtgggctgcatcatgggagagatgatcaagggcggcgtgctcttccctggaacagaccacatcgaccagtggaacaaggtgattgagcagctgggcaccccctgcccagagttcatgaagaagctgcagcccaccgtgaggacctacgtggagaaccggcccaagtatgccggctacagctttgagaagctgttcccagatgtgctcttccctgctgacagcgagcacaacaagctgaaggccagccaggcccgggacctgctgagcaagatgctggtgattgatgccagcaagaggatctctgtggatgaggccctgcagcacccctacatcaacgtgtggtatgaccccagcgaggccgaggcccccccacccaagatcccagacaagcagctggatgagcgggagcacaccatcgaggagtggaaggagctgatctacaaggaggtgatggacctggaggagaggaccaagaatggagtcatccggggccagcccagccccctgggcgccgccgtcatcaatggcagccagcaccccagcagcagcagctctgtgaatgatgtgtcctccatgagcacagaccccaccctggccagtgacacagacagcagcctggaggccgccgccggccccctgggctgctgcaggtag

SEQ ID NO: 20527 - DNA, 1155 bp, synthetic construct
  misc_feature 1..1155: note = Description of Artificial Sequence: Synthetic coding sequence
  source 1..1155: mol_type = other DNA
atgagccgcagcaagagggacaacaacttctacagcgtggagattggagacagcaccttcaccgtgctgaagcgctaccagaacctgaagcccatcggcagcggggcccagggcatcgtgtgtgccgcctatgatgccatcctggagagaaatgtggccatcaagaagctgagccggcccttccagaaccagacccacgccaagagggcctaccgggagctggtgctgatgaagtgtgtgaaccacaagaacatcatcggcctgctgaatgtgttcaccccccagaagagcctggaggagttccaggatgtgtacatcgtgatggagctgatggatgccaacctgtgccaggtgatccagatggagctggaccacgagaggatgagctacctgctgtaccagatgctgtgtggcatcaagcacctgcacagcgctggcatcatccaccgggacctgaagcccagcaacatcgtggtgaagagtgactgcaccctgaagatcctggactttggcctggccaggacagctggcaccagcttcatgatgaccccctacgtggtgacccgctactaccgggcccctgaggtgatcctgggcatgggctacaaggaaaatgtggacatctggagcgtgggctgcatcatgggagagatgatcaagggcggcgtgctcttccctggaacagaccacatcgaccagtggaacaaggtgattgagcagctgggcaccccctgcccagagttcatgaagaagctgcagcccaccgtgaggacctacgtggagaaccggcccaagtatgccggctacagctttgagaagctgttcccagatgtgctcttccctgctgacagcgagcacaacaagctgaaggccagccaggcccgggacctgctgagcaagatgctggtgattgatgccagcaagaggatctctgtggatgaggccctgcagcacccctacatcaacgtgtggtatgaccccagcgaggccgaggcccccccacccaagatcccagacaagcagctggatgagcgggagcacaccatcgaggagtggaaggagctgatctacaaggaggtgatggacctggaggagaggaccaagaatggagtcatccggggccagcccagccccctggcccaggtgcagcagtag

SEQ ID NO: 20528 - DNA, 1155 bp, synthetic construct
  misc_feature 1..1155: note = Description of Artificial Sequence: Synthetic coding sequence
  source 1..1155: mol_type = other DNA
atgagccgcagcaagagggacaacaacttctacagcgtggagattggagacagcaccttcaccgtgctgaagcgctaccagaacctgaagcccatcggcagcggggcccagggcatcgtgtgtgccgcctatgatgccatcctggagagaaatgtggccatcaagaagctgagccggcccttccagaaccagacccacgccaagagggcctaccgggagctggtgctgatgaagtgtgtgaaccacaagaacatcatcggcctgctgaatgtgttcaccccccagaagagcctggaggagttccaggatgtgtacatcgtgatggagctgatggatgccaacctgtgccaggtgatccagatggagctggaccacgagaggatgagctacctgctgtaccagatgctgtgtggcatcaagcacctgcacagcgctggcatcatccaccgggacctgaagcccagcaacatcgtggtgaagagtgactgcaccctgaagatcctggactttggcctggccaggacagctggcaccagcttcatgatgaccccctacgtggtgacccgctactaccgggcccctgaggtgatcctgggcatgggctacaaggaaaatgtggacctgtggagcgtgggctgcatcatgggagagatggtgtgccacaagatcctcttccctggccgggactacatcgaccagtggaacaaggtgattgagcagctgggcaccccctgcccagagttcatgaagaagctgcagcccaccgtgaggacctacgtggagaaccggcccaagtatgccggctacagctttgagaagctgttcccagatgtgctcttccctgctgacagcgagcacaacaagctgaaggccagccaggcccgggacctgctgagcaagatgctggtgattgatgccagcaagaggatctctgtggatgaggccctgcagcacccctacatcaacgtgtggtatgaccccagcgaggccgaggcccccccacccaagatcccagacaagcagctggatgagcgggagcacaccatcgaggagtggaaggagctgatctacaaggaggtgatggacctggaggagaggaccaagaatggagtcatccggggccagcccagccccctggcccaggtgcagcagtag

SEQ ID NO: 20529 - DNA, 1284 bp, synthetic construct; identical to SEQ ID NO: 20524
  misc_feature 1..1284: note = Description of Artificial Sequence: Synthetic coding sequence
  source 1..1284: mol_type = other DNA

SEQ ID NO: 20530 - DNA, 927 bp, synthetic construct
  misc_feature 1..927: note = Description of Artificial Sequence: Synthetic coding sequence
  source 1..927: mol_type = other DNA
atgagccgcagcaagagggacaacaacttctacagcgtggagattggagacagcaccttcaccgtgctgaagcgctaccagaacctgaagcccatcggcagcggggcccagggcatcgtgtgtgccgcctatgatgccatcctggagagaaatgtggccatcaagaagctgagccggcccttccagaaccagacccacgccaagagggcctaccgggagctggtgctgatgaagtgtgtgaaccacaagaacatcatcggcctgctgaatgtgttcaccccccagaagagcctggaggagttccaggatgtgtacatcgtgatggagctgatggatgccaacctgtgccaggtgatccagatggagctggaccacgagaggatgagctacctgctgtaccagatgctgtgtggcatcaagcacctgcacagcgctggcatcatccaccgggacctgaagcccagcaacatcgtggtgaagagtgactgcaccctgaagatcctggactttggcctggccaggacagctggcaccagcttcatgatgaccccctacgtggtgacccgctactaccgggcccctgaggtgatcctgggcatgggctacaaggaaaatgctgacagcgagcacaacaagctgaaggccagccaggcccgggacctgctgagcaagatgctggtgattgatgccagcaagaggatctctgtggatgaggccctgcagcacccctacatcaacgtgtggtatgaccccagcgaggccgaggcccccccacccaagatcccagacaagcagctggatgagcgggagcacaccatcgaggagtggaaggagctgatctacaaggaggtgatggacctggaggagaggaccaagaatggagtcatccggggccagcccagccccctggcccaggtgcagcagtag

SEQ ID NO: 20531 - DNA, 429 bp, synthetic construct
  misc_feature 1..429: note = Description of Artificial Sequence: Synthetic coding sequence
  source 1..429: mol_type = other DNA
atgagccgcagcaagagggacaacaacttctacagcgtggagattggagacagcaccttcaccgtgctgaagcgctaccagaacctgaagcccatcggcagcggggcccagggcatcgtgtgtgccgcctatgatgccatcctggagagaaatgtggccatcaagaagctgagccggcccttccagaaccagacccacgccaagagggcctaccgggagctggtgctgatgaagtgtgtgaaccacaagaacatcatcggcctgctgaatgtgttcaccccccagaagagcctggaggagttccaggatgtgtacatcgtgatggagctgatggatgccaacctgtgccaggtgatccagatggagctggaccacgagaggatgagctacctgctgtaccagatgctgtgtggcatcaagcacctgtag

SEQ ID NO: 20532 - DNA, 294 bp, synthetic construct
  misc_feature 1..294: note = Description of Artificial Sequence: Synthetic coding sequence
  source 1..294: mol_type = other DNA
atgatcatcggcctgctgaatgtgttcaccccccagaagagcctggaggagttccaggatgtgtacatcgtgatggagctgatggatgccaacctgtgccaggtgatccagatggagctggaccacgagaggatgagctacctgctgtaccagatgctgtgtggcatcaagcacctgcacagcgctggcatcatccaccgggacctgaagcccagcaacatcgtggtgaagagtgactgcaccctgaagatcctggactttggcctggccaggacagctggcaccagcttctag

SEQ ID NO: 20533 - DNA, 429 bp, synthetic construct; identical to SEQ ID NO: 20531
  misc_feature 1..429: note = Description of Artificial Sequence: Synthetic coding sequence
  source 1..429: mol_type = other DNA

SEQ ID NO: 20534 - DNA, 1182 bp, synthetic construct
  misc_feature 1..1182: note = Description of Artificial Sequence: Synthetic coding sequence
  source 1..1182: mol_type = other DNA
atgcccaagaagaagcccacccccatccagctgaacccagccccagatggcagcgctgtgaatggcaccagcagcgctgagaccaacctggaggccctgcagaagaagctggaggagctggagctggatgagcagcagaggaagaggctggaggccttcctgacccagaagcagaaggtgggggagctgaaggatgatgactttgagaagatcagcgagctgggcgctggaaatggaggagtggtgttcaaggtgagccacaagcccagcggcctggtgatggccaggaagctgatccacctggagatcaagccagccatccggaaccagatcatccgggagctgcaggtgctgcacgagtgcaacagcccctacatcgtgggcttctacggggccttctacagtgatggagagatcagcatctgcatggagcacatggatggcggcagcctggaccaggtgctgaagaaggccggccgcatccctgagcagatcctgggcaaggtgtccattgctgtgatcaagggcctgacctacctgcgggagaagcacaagatcatgcacagagatgtgaagcccagcaacatcctggtgaacagcagaggagagatcaagctgtgtgactttggagtgtctggccagctgattgacagcatggccaacagctttgtgggcaccaggagctacatgagccctgagcggctgcagggcacccactacagcgtgcagagcgacatctggagcatgggcctgagcctggtggagatggctgtgggccgctaccccatccccccaccagatgccaaggagctggagctgatgtttggctgccaggtggagggagatgctgctgagaccccaccccggcccaggaccccaggccggcccctgagcagctatggcatggacagccggccccccatggccatctttgagctgctggactacatcgtgaatgaacctccacccaagctgcccagcggggtcttcagcctggagttccaggactttgtgaacaagtgcctgatcaagaacccagctgagagagctgacctgaagcagctgatggtgcacgccttcatcaagagaagtgatgctgaggaggtggactttgctggctggctgtgcagcaccatcggcctgaaccagcccagcacccccacccacgccgccggcgtgtag

SEQ ID NO: 20535 - DNA, 1203 bp, synthetic construct
  misc_feature 1..1203: note = Description of Artificial Sequence: Synthetic coding sequence
  source 1..1203: mol_type = other DNA
atgctggcccggaggaagcctgtgctgcctgccctgaccatcaaccccaccatcgccgagggccccagccccaccagcgagggcgccagcgaggccaacctggtggacctgcagaagaagctggaggagctggagctggatgagcagcagaagaagaggctggaggccttcctgacccagaaggccaaggtgggggagctgaaggatgatgactttgagcgcatcagcgagctgggcgctggaaatggaggagtggtgaccaaggtgcagcaccggcccagcggcctcatcatggccaggaagctgatccacctggagatcaagccagccatccggaaccagatcatccgggagctgcaggtgctgcacgagtgcaacagcccctacatcgtgggcttctacggggccttctacagtgatggagagatcagcatctgcatggagcacatggatggcggcagcctggaccaggtgctgaaggaggccaagagaattcctgaggagatcctgggcaaggtgtccattgctgtgctgcggggcctggcctacctgcgggagaagcaccagatcatgcacagagatgtgaagcccagcaacatcctggtgaacagcagaggagagatcaagctgtgtgactttggagtgtctggccagctgattgacagcatggccaacagctttgtgggcaccaggagctacatggcccctgagcggctgcagggcacccactacagcgtgcagagcgacatctggagcatgggcctgagcctggtggagctggccgtgggccgctaccccatccccccaccagatgccaaggagctggaggccatcttcggccggcctgtggtggatggagaggagggggagccccacagcatcagcccccggccccggcccccaggccggcctgtgtctggccacggcatggacagcaggcctgccatggccatctttgagctgctggactacatcgtgaatgaacctccacccaagctgcccaatggagtcttcaccccagacttccaggagtttgtgaacaagtgcctgatcaagaacccagctgagagagctgacctgaagatgctgaccaaccacaccttcatcaagaggtctgaggtggaggaggtggactttgctggctggctgtgcaagaccctgcggctgaaccagcccggcacccccaccaggacagctgtgtag

SEQ ID NO: 20536 - DNA, 1056 bp, synthetic construct
  misc_feature 1..1056: note = Description of Artificial Sequence: Synthetic coding sequence
  source 1..1056: mol_type = other DNA
atgggcgtgcagggcaccctgatgagccgggaccagaccccccacctgctgagcatcctgggcaagagcaagaggaagaaggacctgcgcatcagctgcatgagcaagcccccagcccccaaccccaccccacccaggaacctggacagcaggaccttcatcaccatcggggacaggaactttgaggtggaggctgatgacctggtgaccatcagcgagctgggccgcggggcctatggagtggtggagaaggtgagacatgcccagagcggcaccatcatggctgtgaagaggatccgggccaccgtgaacagccaggagcagaagaggctgctgatggacctggacatcaacatgaggacagtggactgcttctacacagtgaccttctatggagccctcttccgggagggagatgtgtggatctgcatggagctgatggacaccagcctggacaagttctacaggaaggtgctggacaagaacatgaccatccctgaggacatcctgggggagattgctgtgtccatcgtgcgggccctggagcacctgcacagcaagctgagcgtcatccacagagatgtgaagcccagcaatgtgctgatcaacaaggagggccacgtgaagatgtgtgactttggcatcagcggctacctggtggacagcgtggccaagaccatggatgctggctgcaagccctacatggcccctgagcgcatcaaccctgagctgaaccagaagggctacaacgtgaagagtgatgtgtggagcctgggcatcaccatgattgagatggccatcctgcgcttcccctatgagagctggggcacccccttccagcagctgaagcaggtggtggaggagcccagcccccagctgcctgctgaccgcttcagccctgagtttgtggacttcaccgcccagtgcctgaggaagaacccagctgagaggatgagctacctggagctgatggagcaccccttcttcaccctgcacaagaccaagaagacagacattgctgcctttgtgaaggagatcctgggggaggacagctag

SEQ ID NO: 20537 - DNA, 1044 bp, synthetic construct
  misc_feature 1..1044: note = Description of Artificial Sequence: Synthetic coding sequence
  source 1..1044: mol_type = other DNA
atggagagccctgccagcagccagcctgcctccatgccccagagcaagggcaagagcaagaggaagaaggacctgcgcatcagctgcatgagcaagcccccagcccccaaccccaccccacccaggaacctggacagcaggaccttcatcaccatcggggacaggaactttgaggtggaggctgatgacctggtgaccatcagcgagctgggccgcggggcctatggagtggtggagaaggtgagacatgcccagagcggcaccatcatggctgtgaagaggatccgggccaccgtgaacagccaggagcagaagaggctgctgatggacctggacatcaacatgaggacagtggactgcttctacacagtgaccttctatggagccctcttccgggagggagatgtgtggatctgcatggagctgatggacaccagcctggacaagttctacaggaaggtgctggacaagaacatgaccatccctgaggacatcctgggggagattgctgtgtccatcgtgcgggccctggagcacctgcacagcaagctgagcgtcatccacagagatgtgaagcccagcaatgtgctgatcaacaaggagggccacgtgaagatgtgtgactttggcatcagcggctacctggtggacagcgtggccaagaccatggatgctggctgcaagccctacatggcccctgagcgcatcaaccctgagctgaaccagaagggctacaacgtgaagagtgatgtgtggagcctgggcatcaccatgattgagatggccatcctgcgcttcccctatgagagctggggcacccccttccagcagctgaagcaggtggtggaggagcccagcccccagctgcctgctgaccgcttcagccctgagtttgtggacttcaccgcccagtgcctgaggaagaacccagctgagaggatgagctacctggagctgatggagcaccccttcttcaccctgcacaagaccaagaagacagacattgctgcctttgtgaaggagatcctgggggaggacagctag

SEQ ID NO: 20538 - DNA, 957 bp, synthetic construct
  misc_feature 1..957: note = Description of Artificial Sequence: Synthetic coding sequence
  source 1..957: mol_type = other DNA
atgagcaagcccccagcccccaaccccaccccaccaagaaacctggacagcaggaccttcatcaccatcggggacaggaactttgaggtggaggctgatgacctggtgaccatcagcgagctgggccgcggggcctacggcgtggtggagaaggtgagacatgcccagagcggcaccatcatggctgtgaagaggatccgggccaccgtgaacagccaggagcagaagaggctgctgatggacctggacatcaacatgaggacagtggactgcttctacacagtgaccttctacggggccctcttccgggagggagatgtgtggatctgcatggagctgatggacaccagcctggacaagttctacaggaaggtgctggacaagaacatgaccatccctgaggacatcctgggggagattgctgtgtccatcgtgcgggccctggagcacctgcacagcaagctgagcgtcatccacagagatgtgaagcccagcaatgtgctgatcaacaaggagggccacgtgaagatgtgtgactttggcatcagcggctacctggtggacagcgtggccaagaccatggatgctggctgcaagccctacatggcccctgagcgcatcaaccctgagctgaaccagaagggctacaacgtgaagagtgatgtgtggagcctgggcatcaccatgattgagatggccatcctgcgcttcccctatgaatcctggggcacccccttccagcagctgaagcaggtggtggaggagcccagcccccagctgcctgctgaccgcttcagccctgagtttgtggacttcaccgcccagtgcctgaggaagaacccagctgagaggatgagctacctggagctgatggagcaccccttcttcaccctgcacaagaccaagaagacagacattgctgcctttgtgaaggagatcctgggggaggacagctag

SEQ ID NO: 20539 - DNA, 1113 bp, synthetic construct
  misc_feature 1..1113: note = Description of Artificial Sequence: Synthetic coding sequence
  source 1..1113: mol_type = other DNA
atgctgagcaacagccagggccagagcccccctgtgcccttccctgccccagcccccccaccccagccccccaccccagccctgccccaccccccagcccagcccccacctcctccaccccagcagttcccccagttccacgtgaagagcggcctgcagatcaagaagaatgccatcattgatgactacaaggtgaccagccaggtgctgggcctgggcatcaatggcaaggtgctgcagatcttcaacaagaggacccaggagaagtttgccctgaagatgctgcaggactgccccaaggcccggcgggaggtggagctgcactggagggccagccagtgcccccacatcgtgcgcatcgtggatgtgtatgagaacctgtatgccggcaggaagtgcctgctgattgtgatggagtgcctggatggaggagagctgttcagccgcatccaggacagaggagaccaggccttcacagagcgggaggccagcgagatcatgaagagcatcggggaggccatccagtacctgcacagcatcaacatcgcccacagagatgtgaagccagagaacctgctgtacaccagcaagaggcccaatgccatcctgaagctgacagactttggatttgccaaggagaccaccagccacaacagcctgaccaccccctgctacaccccctactacgtggcccctgaggtgctgggccctgagaagtatgacaagagctgtgacatgtggagcctgggcgtcatcatgtacatcctgctgtgtggctacccacccttctacagcaaccacggcctggccatcagccctggcatgaagacccgcatccgcatgggccagtatgagttccccaaccctgagtggagcgaggtgtctgaggaggtgaagatgctgatccggaacctgctgaagacagagcccacccagaggatgaccatcacagagttcatgaaccacccctggatcatgcagagcaccaaggtgccccagacccccctgcacaccagccgggtgctgaaggaggacaaggagcgctgggaggatgtgaagggctgcctgcatgacaagaacagcgaccaggccacctggctgacccggctgtag

SEQ ID NO: 20540 - DNA, 1203 bp, synthetic construct
  misc_feature 1..1203: note = Description of Artificial Sequence: Synthetic coding sequence
  source 1..1203: mol_type = other DNA
atgctgagcaacagccagggccagagcccccctgtgcccttccctgccccagcccccccaccccagccccccaccccagccctgccccaccccccagcccagcccccacctcctccaccccagcagttcccccagttccacgtgaagagcggcctgcagatcaagaagaatgccatcattgatgactacaaggtgaccagccaggtgctgggcctgggcatcaatggcaaggtgctgcagatcttcaacaagaggacccaggagaagtttgccctgaagatgctgcaggactgccccaaggcccggcgggaggtggagctgcactggagggccagccagtgcccccacatcgtgcgcatcgtggatgtgtatgagaacctgtatgccggcaggaagtgcctgctgattgtgatggagtgcctggatggaggagagctgttcagccgcatccaggacagaggagaccaggccttcacagagcgggaggccagcgagatcatgaagagcatcggggaggccatccagtacctgcacagcatcaacatcgcccacagagatgtgaagccagagaacctgctgtacaccagcaagaggcccaatgccatcctgaagctgacagactttggatttgccaaggagaccaccagccacaacagcctgaccaccccctgctacaccccctactacgtggcccctgaggtgctgggccctgagaagtatgacaagagctgtgacatgtggagcctgggcgtcatcatgtacatcctgctgtgtggctacccacccttctacagcaaccacggcctggccatcagccctggcatgaagacccgcatccgcatgggccagtatgagttccccaaccctgagtggagcgaggtgtctgaggaggtgaagatgctgatccggaacctgctgaagacagagcccacccagaggatgaccatcacagagttcatgaaccacccctggatcatgcagagcaccaaggtgccccagacccccctgcacaccagccgggtgctgaaggaggacaaggagcgctgggaggatgtgaaggaggagatgaccagcgccctggccaccatgagggtggactatgagcagatcaagatcaagaagattgaagatgccagcaaccccctgctgctgaagaggaggaagaaggcccgggccctggaggccgccgccctggcccactag

SEQ ID NO: 20541 - DNA, 1149 bp, synthetic construct
  misc_feature 1..1149: note = Description of Artificial Sequence: Synthetic coding sequence
  source 1..1149: mol_type = other DNA
atggatggagaaacagctgaggagcagggcggccctgtgcccccacctgtggcccctgggggccctggcctgggcggggcccctgggggcagaagagagcccaagaagtatgctgtgacagatgactaccagctgagcaagcaggtgctgggcctgggcgtgaatggcaaggtgctggagtgcttccacagaagaacaggccagaagtgtgccctgaagctgctgtatgacagccccaaggcccggcaggaggtggaccaccactggcaggccagcggcggcccccacatcgtgtgcatcctggatgtgtatgagaacatgcaccacggcaagcgctgcctgctgatcatcatggagtgcatggagggcggggagctgttcagccgcatccaggagcggggggaccaggccttcacagagcgggaggccgctgagatcatgagggacatcggcacagccatccagttcctgcacagccacaacatcgcccacagagatgtgaagccagagaacctgctgtacaccagcaaggagaaggatgctgtgctgaagctgacagactttggatttgccaaggagaccacccagaatgccctgcagaccccctgctacaccccctactacgtggcccctgaggtgctgggccctgagaagtatgacaagagctgtgacatgtggagcctgggcgtcatcatgtacatcctgctgtgtggcttcccccccttctacagcaacacaggccaggccatcagccctggcatgaagaggcgcatccggctgggccagtatggcttccccaaccctgagtggagcgaggtgtctgaagatgccaagcagctgatccggctgctgctgaagacagaccccacagagcggctgaccatcacccagttcatgaaccacccctggatcaaccagagcatggtggtgccccagacccccctgcacacagcccgggtgctgcaggaggacaaggaccactgggatgaggtgaaggaggagatgaccagcgccctggccaccatgagggtggactatgaccaggtgaagatcaaggacctgaagaccagcaacaaccggctgctgaacaagaggaggaagaagcaggccggcagcagcagcgccagccagggctgcaacaaccagtag

SEQ ID NO: 20542 - DNA, 999 bp, synthetic construct
  misc_feature 1..999: note = Description of Artificial Sequence: Synthetic coding sequence
  source 1..999: mol_type = other DNA
atggatggagaaacagctgaggagcagggcggccctgtgcccccacctgtggcccctgggggccctggcctgggcggggcccctgggggcagaagagagcccaagaagtatgctgtgacagatgactaccagctgagcaagcaggtgctgggcctgggcgtgaatggcaaggtgctggagtgcttccacagaagaacaggccagaagtgtgccctgaagctgctgtatgacagccccaaggcccggcaggaggtggaccaccactggcaggccagcggcggcccccacatcgtgtgcatcctggatgtgtatgagaacatgcaccacggcaagcgctgcctgctgatcatcatggagtgcatggagggcggggagctgttcagccgcatccaggagcggggggaccaggccttcacagagcgggaggccgctgagatcatgagggacatcggcacagccatccagttcctgcacagccacaacatcgcccacagagatgtgaagccagagaacctgctgtacaccagcaaggagaaggatgctgtgctgaagctgacagactttggatttgccaaggagaccacccagaatgccctgcagaccccctgctacaccccctactacgtggcccctgaggtgctgggccctgagaagtatgacaagagctgtgacatgtggagcctgggcgtcatcatgtacatcctgctgtgtggcttcccccccttctacagcaacacaggccaggccatcagccctggcatgaagaggcgcatccggctgggccagtatggcttccccaaccctgagtggagcgaggtgtctgaagatgccaagcagctgatccggctgctgctgaagacagaccccacagagcggctgaccatcacccagttcatgaaccacccctggatcaaccagagcatggtggtgccccagacccccctgcacacagcccgggtgctgcaggaggacaaggaccactgggatgaggtgaagtag

SEQ ID NO: 20543 - DNA, 1149 bp, synthetic construct; identical to SEQ ID NO: 20541
  misc_feature 1..1149: note = Description of Artificial Sequence: Synthetic coding sequence
  source 1..1149: mol_type = other DNA

SEQ ID NO: 20544 - DNA, 360 bp, synthetic construct
  misc_feature 1..360: note = Description of Artificial Sequence: Synthetic coding sequence
  source 1..360: mol_type = other DNA
atggatggagaaacagctgaggagcagggcggccctgtgcccccacctgtggcccctgggggccctggcctgggcggggcccctgggggcagaagagagcccaagaagtatgctgtgacagatgactaccagctgagcaagcaggtgctgggcctgggcgtgaatggcaaggtgctggagtgcttccacagaagaacaggccagaagtgtgccctgaagctgctgtatgacagccccaaggcccggcaggaggtggaccaccactggcaggccagcggcggcccccacatcgtgtgcatcctggatgtgtatgagaacatgcaccacggcaagcgctgcctgctgatcatcatggagtag

SEQ ID NO: 20545 - DNA, 1422 bp, synthetic construct
  misc_feature 1..1422: note = Description of Artificial Sequence: Synthetic coding sequence
  source 1..1422: mol_type = other DNA
atgtctgaggagagtgacatggacaaggccatcaaggagaccagcatcctggaggagtacagcatcaactggacccagaagctgggcgccggcatcagcggccctgtgcgggtgtgtgtgaagaagagcacccaggagagatttgccctgaagatcctgctggaccggcccaaggccagaaatgaggtgcggctgcacatgatgtgtgccacccaccccaacatcgtgcagatcatcgaggtgtttgccaacagcgtgcagttcccccatgagagcagcccccgggcccggctgctgattgtgatggagatgatggagggcggggagctgttccaccgcatcagccagcaccgccacttcacagagaagcaggccagccaggtgaccaagcagatcgccctggccctgcggcactgccacctgctgaacatcgcccaccgggacctgaagccagagaacctgctcttcaaggacaacagcctggatgcccctgtgaagctgtgtgactttggatttgccaagattgaccagggcgacctgatgaccccccagttcaccccctactacgtggccccccaggtgctggaggcccagaggaggcaccagaaggagaagagcggcatcatccccaccagccccaccccctacacctacaacaagagctgtgacctgtggagcctgggcgtcatcatctacgtgatgctgtgtggctacccacccttctacagcaagcaccacagcaggaccatccccaaggacatgaggaggaagatcatgacaggcagctttgagttccctgaggaggagtggagccagatcagcgagatggccaaggatgtggtgaggaagctgctgaaggtgaagccagaggagcggctgaccattgaaggagtgctggaccacccctggctgaacagcacagaggccctggacaacgtgctgcccagcgcccagctgatgatggacaaggctgtggtggccggcatccagcaggcccacgccgagcagctggccaacatgaggatccaggacctgaaggtgtccctgaagcccctgcacagcgtgaacaaccccatcctgaggaagaggaagctgctgggcaccaagcccaaggacagcgtgtacatccatgaccatgaaaatggagctgaggacagcaatgtggccctggagaagctgagagatgtgattgcccagtgcatcctgccccaggccgggaaaggagaaaatgaagatgagaagctgaatgaggtgatgcaggaggcctggaagtacaaccgggagtgcaagctgctgcgggacaccctgcagagcttctcctggaatggccggggcttcacagacaaggtggaccggctgaagctggccgagatcgtgaagcaggtgattgaggagcagaccaccagccatgagagccagtag

SEQ ID NO: 20546 - DNA, 1416 bp, synthetic construct
  misc_feature 1..1416: note = Description of Artificial Sequence: Synthetic coding sequence
  source 1..1416: mol_type = other DNA
atgtctgaggagagtgacatggacaaggccatcaaggagaccagcatcctggaggagtacagcatcaactggacccagaagctgggcgccggcatcagcggccctgtgcgggtgtgtgtgaagaagagcacccaggagagatttgccctgaagatcctgctggaccggcccaaggccagaaatgaggtgcggctgcacatgatgtgtgccacccaccccaacatcgtgcagatcatcgaggtgtttgccaacagcgtgcagttcccccatgagagcagcccccgggcccggctgctgattgtgatggagatgatggagggcggggagctgttccaccgcatcagccagcaccgccacttcacagagaagcaggccagccaggtgaccaagcagatcgccctggccctgcggcactgccacctgctgaacatcgcccaccgggacctgaagccagagaacctgctcttcaaggacaacagcctggatgcccctgtgaagctgtgtgactttggatttgccaagattgaccagggcgacctgatgaccccccagttcaccccctactacgtggccccccaggtgctggaggcccagaggaggcaccagaaggagaagagcggcatcatccccaccagccccaccccctacacctacaacaagagctgtgacctgtggagcctgggcgtcatcatctacgtgatgctgtgtggctacccacccttctacagcaagcaccacagcaggaccatccccaaggacatgaggaggaagatcatgacaggcagctttgagttccctgaggaggagtggagccagatcagcgagatggccaaggatgtggtgaggaagctgctgaaggtgaagccagaggagcggctgaccattgaaggagtgctggaccacccctggctgaacagcacagaggccctggacaacgtgctgcccagcgcccagctgatgatggacaaggctgtggtggccggcatccagcaggcccacgccgagcagctggccaacatgaggatccaggacctgaaggtgtccctgaagcccctgcacagcgtgaacaaccccatcctgaggaagaggaagctgctgggcaccaagcccaaggacagcgtgtacatccatgaccatgaaaatggagctgaggacagcaatgtggccctggagaagctgagagatgtgattgcccagtgcatcctgccccaggccggagaaaatgaagatgagaagctgaatgaggtgatgcaggaggcctggaagtacaaccgggagtgcaagctgctgcgggacaccctgcagagcttctcctggaatggccggggcttcacagacaaggtggaccggctgaagctggccgagatcgtgaagcaggtgattgaggagcagaccaccagccatgagagccagtag

SEQ ID NO: 20547 - DNA, 1416 bp, synthetic construct
  misc_feature 1..1416: note = Description of Artificial Sequence: Synthetic coding sequence
  source 1..1416: mol_type = other DNA
atgtctgaggagagtgacatggacaaggccatcaaggagaccagcatcctggaggagtacagcatcaactggacccagaagctgggcgccggcatcagcggccctgtgcgggtgtgtgtgaagaagagcacccaggagagatttgccctgaagatcctgctggaccggcccaaggccagaaatgaggtgcggctgcacatgatgtgtgccacccaccccaacatcgtgcagatcatcgaggtgtttgccaacagcgtgcagttcccccatgagagcagcccccgggcccggctgctgattgtgatggagatgatggagggcggggagctgttccaccgcatcagccagcaccgccacttcacagagaagcaggccagccaggtgaccaagcaggccaccctggccctgcggcactgccacctgctgaacatcgcccaccgggacctgaagccagagaacctgctcttcaaggacaacagcctggatgcccctgtgaagctgtgtgactttggatttgccaagattgaccagggcgacctgatgaccccccagttcaccccctactacgtggccccccaggtgctggaggcccagaggaggcaccagaaggagaagagcggcatcatccccaccagccccaccccctacacctacaacaagagctgtgacctgtggagcctgggcgtcatcatctacgtgatgctgtgtggctacccacccttctacagcaagcaccacagcaggaccatccccaaggacatgaggaggaagatcatgacaggcagctttgagttccctgaggaggagtggagccagatcagcgagatggccaaggatgtggtgaggaagctgctgaaggtgaagccagaggagcggctgaccattgaaggagtgctggaccacccctggctgaacagcacagaggccctggacaacgtgctgcccagcgcccagctgatgatggacaaggctgtggtggccggcatccagcaggcccacgccgagcagctggccaacatgaggatccaggacctgaaggtgtccctgaagcccctgcacagcgtgaacaaccccatcctgaggaagaggaagctgctgggcaccaagcccaaggacagcgtgtacatccatgaccatgaaaatggagctgaggacagcaatgtggccctggagaagctgagagatgtgattgcccagtgcatcctgccccaggccggagaaaatgaagatgagaagctgaatgaggtgatgcaggaggcctggaagtacaaccgggagtgcaagctgctgcgggacaccctgcagagcttctcctggaatggccggggcttcacagacaaggtggaccggctgaagctggccgagatcgtgaagcaggtgattgaggagcagaccaccagccatgagagccagtag

SEQ ID NO: 20548 - DNA, 1422 bp, synthetic construct
  misc_feature 1..1422: note = Description of Artificial Sequence: Synthetic coding sequence
  source 1..1422: mol_type = other DNA
atgtctgaggagagtgacatggacaaggccatcaaggagaccagcatcctggaggagtacagcatcaactggacccagaagctgggcgccggcatcagcggccctgtgcgggtgtgtgtgaagaagagcacccaggagagatttgccctgaagatcctgctggaccggcccaaggccagaaatgaggtgcggctgcacatgatgtgtgccacccaccccaacatcgtgcagatcatcgaggtgtttgccaacagcgtgcagttcccccatgagagcagcccccgggcccggctgctgattgtgatggagatgatggagggcggggagctgttccaccgcatcagccagcaccgccacttcacagagaagcaggccagccaggtgaccaagcaggccaccctggccctgcggcactgccacctgctgaacatcgcccaccgggacctgaagccagagaacctgctcttcaaggacaacagcctggatgcccctgtgaagctgtgtgactttggatttgccaagattgaccagggcgacctgatgaccccccagttcaccccctactacgtggccccccaggtgctggaggcccagaggaggcaccagaaggagaagagcggcatcatccccaccagccccaccccctacacctacaacaagagctgtgacctgtggagcctgggcgtcatcatctacgtgatgctgtgtggctacccacccttctacagcaagcaccacagcaggaccatccccaaggacatgaggaggaagatcatgacaggcagctttgagttccctgaggaggagtggagccagatcagcgagatggccaaggatgtggtgaggaagctgctgaaggtgaagccagaggagcggctgaccattgaaggagtgctggaccacccctggctgaacagcacagaggccctggacaacgtgctgcccagcgcccagctgatgatggacaaggctgtggtggccggcatccagcaggcccacgccgagcagctggccaacatgaggatccaggacctgaaggtgtccctgaagcccctgcacagcgtgaacaaccccatcctgaggaagaggaagctgctgggcaccaagcccaaggacagcgtgtacatccatgaccatgaaaatggagctgaggacagcaatgtggccctggagaagctgagagatgtgattgcccagtgcatcctgccccaggccgggaaaggagaaaatgaagatgagaagctgaatgaggtgatgcaggaggcctggaagtacaaccgggagtgcaagctgctgcgggacaccctgcagagcttctcctggaatggccggggcttcacagacaaggtggaccggctgaagctggccgagatcgtgaagcaggtgattgaggagcagaccaccagccatgagagccagtag

SEQ ID NO: 20549 - DNA, 2799 bp, synthetic construct
  misc_feature 1..2799: note = Description of Artificial Sequence: Synthetic coding sequence
  source 1..2799: mol_type = other DNA
atggctgctgctgctgctgtggaggccgccgcccccatgggcgccctgtggggcctggtgcatgactttgtggtgggccagcaggagggccctgctgaccaggtggccgcagatgtgaagagcggcaactacacagtgctgcaggtggtggaggccctgggcagcagcctggagaaccctgagcccaggacccgggcccgggccatccagctgctgagccaggtgctgctgcactgccacaccctgctgctggagaaggaggtggtgcacctgatcctcttctatgagaaccggctgaaggaccaccacctggtgatccccagcgtgctgcagggcctgaaggccctgagcctgtgtgtggccctgcccccaggcctggccgtgtctgtgctgaaggccatcttccaggaggtgcacgtgcagagcctgccccaggtggacagacacacagtgtacaacatcatcaccaacttcatgaggacccgggaggaggagctgaagagcctgggcgctgacttcaccttcggcttcatccaggtgatggatggagagaaggaccccaggaacctgctggtggccttccgcatcgtgcatgacctgatcagccgggactacagcctgggcccctttgtggaggagctgtttgaggtgaccagctgctacttccccatcgacttcaccccacctccaaatgacccccacggcatccagagagaagatctcatcctgagcctgcgggctgtgctggccagcacccccaggtttgctgagttcctgctgcccctgctgattgagaaggtggacagcgaggtgctgagcgccaagctggacagcctgcagaccctgaatgcctgctgtgctgtgtatggccagaaggagctgaaggacttcctgcccagcctgtgggccagcatccggcgggagagcagccagaggaggaccatcctggagatgctgctgggcttcctgaagctgcagcagaagtggagctatgaggacaaggaccagaggcccctgaatggcttcaaggaccagctgtgcagcctggtgttcatggccctgacagaccccagcacccagctgcagctggtgggcatccgcaccctgactgtgctgggcgcccagcctgacctgctgtcctatgaggacctggagctggccgtgggccacctgtaccgcctgtccttcctgaaggaggacagccagagctgccgggtggccgccctggaggccagcggcaccctggccgccctgtaccctgtggccttcagcagccacctggtgcccaagctggccgaggagctgcgggtgggggagagcaacctgaccaatggagatgagcccacccagtgcagccgccacctgtgctgcctgcaggccctgtctgctgtgtccacccaccccagcatcgtgaaggagaccctgcccctgctgctgcagcacctgtggcaggtgaacagaggcaacatggtggcccagagcagtgatgtgattgctgtgtgccagagcctgcggcagatggccgagaagtgccagcaggaccctgagagctgctggtacttccaccagacagccatcccctgcctgctggccctggccgtgcaggcctccatgcctgagaaggagcccagcgtgctgaggaaggtgctgctggaggatgaggtgctggccgccatggtgtctgtgattggaacagccaccacccacctgagccctgagctggccgcccagagcgtgacccacatcgtgcccctcttcctggatggaaatgtgtccttcctgcctgagaacagcttccccagccgcttccagcccttccaggacggcagcagcggccagaggcggctgattgccctgctgatggcctttgtgtgcagcctgcccagaaatgtggagatcccccagctgaaccagctgatgagggagctgctggagctgagctgctgccacagctgccccttcagcagcacagctgctgccaagtgctttgctggcctgctgaacaagcaccctgctggccagcagctggatgagttcctgcagctggccgtggacaaggtggaggccggcctgggcagcggcccctgccgcagccaggccttcaccctgctgctgtgggtgaccaaggccctggtgctgcgctaccaccccctgagcagctgcctgacagcccggctgatgggcctgctgagtgaccctgagctgggccctgctgctgctgatggcttcagcctgctgatgtctgactgcacagatgtgctgaccagggctggccacgccgaggtgcgcatcatgttccggcagcgcttcttcacagacaacgtgcctgccctggtgcagggcttccacgccgccccccaggatgtgaagcccaactacctgaagggcctgagccacgtgctgaaccggctgcccaagcctgtgctgctgcctgagctgcccaccctgctgagcctgctgctggaggccctgagctgcccagactgtgtggtgcagctgagcaccctgagctgcctgcagcccctgctgctggaggccccccaggtgatgagcctgcacgtggacaccctggtgaccaagttcctgaacctgagcagcagccccagcatggctgtgagaattgctgccctgcagtgcatgcacgccctgacccggctgcccacccctgtgctgctgccctacaagccccaggtgatccgggccctggccaagcccctggatgacaagaagaggctggtgaggaaggaggccgtgtctgcccggggggagtggttcctgctgggcagccctggcagctag

SEQ ID NO: 20550 - DNA, 1092 bp, synthetic construct
  misc_feature 1..1092: note = Description of Artificial Sequence: Synthetic coding sequence
  source 1..1092: mol_type = other DNA
atgctgctgggcttcctgaagctgcagcagaagtggagctatgaggacaaggaccagaggcccctgaatggcttcaaggaccagctgtgcagcctggtgttcatggccctgacagaccccagcacccagctgcagctggtgggcatccgcaccctgactgtgctgggcgcccagcctgacctgctgtcctatgaggacctggagctggccgtgggccacctgtaccgcctgtccttcctgaaggaggacagccagagctgccgggtggccgccctggaggccagcggcaccctggccgccctgtaccctgtggccttcagcagccacctggtgcccaagctggccgaggagctgcgggtgggggagagcaacctgaccaatggagatgagcccacccagtgcagccgccacctgtgctgcctgcaggccctgtctgctgtgtccacccaccccagcatcgtgaaggagaccctgcccctgctgctgcagcacctgtggcaggtgaacagaggcaacatggtggcccagagcagtgatgtgattgctgtgtgccagagcctgcggcagatggccgagaagtgccagcaggaccctgagagctgctggtacttccaccagacagccatcccctgcctgctggccctggccgtgcaggcctccatgcctgagaaggagcccagcgtgctgaggaaggtgctgctggaggatgaggtgctggccgccatggtgtctgtcatcggcacagccaccacccacctgagccctgagctggccgcccagagcgtgacccacatcgtgcccctcttcctggatggaaatgtgtccttcctgcctgaaaattccttccccagccgcttccagcccttccaggacggcagcagcggccagaggaggctcatcgccctgctgatggcctttgtgtgcagcctgcccagaaatgtggagatcccccagctgaaccagctgatgagggagctgctggagctgagctgcacagctgcccccttcctgccccccctgctgcccagcgccctgcaggacagcagcaccagcaccctgcagggcagctcctggatgaacagctacagctag

SEQ ID NO: 20551 - DNA, 1128 bp, synthetic construct
  misc_feature 1..1128: note = Description of Artificial Sequence: Synthetic coding sequence
  source 1..1128: mol_type = other DNA
atgaagctggtgtggcccagcgccaagctgctgcaggccgctgctggggccagcgcccgggcctgtgacagcgtgaccagcaatgtgctgcccctgctgctggagcagttccacaagcacagccagagcagccagaggaggaccatcctggagatgctgctgggcttcctgaagctgcagcagaagtggagctatgaggacaaggaccagaggcccctgaatggcttcaaggaccagctgtgcagcctggtgttcatggccctgacagaccccagcacccagctgcagctggtgggcatccgcaccctgactgtgctgggcgcccagcctgacctgctgtcctatgaggacctggagctggccgtgggccacctgtaccgcctgtccttcctgaaggaggacagccagagctgccgggtggccgccctggaggccagcggcaccctggccgccctgtaccctgtggccttcagcagccacctggtgcccaagctggccgaggagctgcgggtgggggagagcaacctgaccaatggagatgagcccacccagtgcagccgccacctgtgctgcctgcaggccctgtctgctgtgtccacccaccccagcatcgtgaaggagaccctgcccctgctgctgcagcacctgtggcaggtgaacagaggcaacatggtggcccagagcagtgatgtgattgctgtgtgccagagcctgcggcagatggccgagaagtgccagcaggaccctgagagctgctggtacttccaccagacagccatcccctgcctgctggccctggccgtgcaggcctccatgcctgagaaggagcccagcgtgctgaggaaggtgctgctggaggatgaggtgctggccgccatggtgtctgtgattggaacagccaccacccacctgagccctgagctggccgcccagagcgtgacccacatcgtgcccctcttcctggatggaaatgtgtccttcctgcctgagaacagcttccccagccgcttccagcccttccaggtgacagatggcagcagcggccagaggcggctgattgccctgctgatggcctttgtgtgcagcctgcccagaaatggcagctcctggatgaacagctacagctag

SEQ ID NO: 20552 - DNA, 1128 bp, synthetic construct; identical to SEQ ID NO: 20551
  misc_feature 1..1128: note = Description of Artificial Sequence: Synthetic coding sequence
  source 1..1128: mol_type = other DNA

SEQ ID NO: 20553 - DNA, 2964 bp, synthetic construct
  misc_feature 1..2964: note = Description of Artificial Sequence: Synthetic coding sequence
  source 1..2964: mol_type = other DNA
atggctgctgctgctgctgtggaggccgccgcccccatgggcgccctgtggggcctggtgcatgactttgtggtgggccagcaggagggccctgctgaccaggtggccgcagatgtgaagagcggcaactacacagtgctgcaggtggtggaggccctgggcagcagcctggagaaccctgagcccaggacccgggcccgggccatccagctgctgagccaggtgctgctgcactgccacaccctgctgctggagaaggaggtggtgcacctgatcctcttctatgagaaccggctgaaggaccaccacctggtgatccccagcgtgctgcagggcctgaaggccctgagcctgtgtgtggccctgcccccaggcctggccgtgtctgtgctgaaggccatcttccaggaggtgcacgtgcagagcctgccccaggtggacagacacacagtgtacaacatcatcaccaacttcatgaggacccgggaggagggcccctttgtggaggagctgtttgaggtgaccagctgctacttccccatcgacttcaccccacctccaaatgacccccacggcatccagcgggaggacctgatcctgagcctgcgggctgtgctggccagcacccccaggtttgctgagttcctgctgcccctgctgattgagaaggtggacagcgaggtgctgagcgccaagctggacagcctgcagaccctgaatgcctgctgtgctgtgtatggccagaaggagctgaaggacttcctgcccagcctgtgggccagcatcagaagagaggtgttccagacagccagcgagcgggtggaggccgagggcctggccgccctgcacagcctgacagcctgcctgagccgctctgtgctgcgggcagatgctgaggacctgctggacagcttcctgagcaacatcctgcaggactgccgccaccacctgtgtgagccagacatgaagctggtgtggcccagcgccaagctgctgcaggccgccgccggggccagcgcccgggcctgtgacagcgtgaccagcaatgtgctgcccctgctgctggagcagttccacaagcacagccagagcagccagaggaggaccatcctggagatgctgctgggcttcctgaagctgcagcagaagtggagctatgaggacaaggaccagaggcccctgaatggcttcaaggaccagctgtgcagcctggtgttcatggccctgacagaccccagcacccagctgcagctggtgggcatccgcaccctgactgtgctgggcgcccagcctgacctgctgtcctatgaggacctggagctggccgtgggccacctgtaccgcctgtccttcctgaaggaggacagccagagctgccgggtggccgccctggaggccagcggcaccctggccgccctgtaccctgtggccttcagcagccacctggtgcccaagctggccgaggagctgcgggtgggggagagcaacctgaccaatggagatgagcccacccagtgcagccgccacctgtgctgcctgcaggccctgtctgctgtgtccacccaccccagcatcgtgaaggagaccctgcccctgctgctgcagcacctgtggcaggtgaacagaggcaacatggtggcccagagcagtgatgtgattgctgtgtgccagagcctgcggcagatggccgagaagtgccagcaggaccctgagagctgctggtacttccaccagacagccatcccctgcctgctggccctggccgtgcaggcctccatgcctgagaaggagcccagcgtgctgaggaaggtgctgctggaggatgaggtgctggccgccatggtgtctgtcatcggcacagccaccacccacctgagccctgagctggccgcccagagcgtgacccacatcgtgcccctcttcctggatggaaatgtgtccttcctgcctgaaaattccttccccagccgcttccagcccttccaggacggcagcagcggccagaggaggctcatcgccctgctgatggcctttgtgtgcagcctgcccagaaatgtggagatcccccagctgaaccagctgatgagggagctgctggagctgagctgctgccacagctgccccttcagcagcacagctgctgccaagtgctttgctggcctgctgaacaagcaccctgctggccagcagctggatgagttcctgcagctggccgtggacaaggtggaggccggcctgggcagcggcccctgccgcagccaggccttcaccctgctgctgtgggtgaccaaggccctggtgctgcgctaccaccccctgagcagctgcctgacagcccggctgatgggcctgctgagtgaccctgagctgggccctgctgctgctgatggcttcagcctgctgatgtctgactgcacagatgtgctgacccgggccggccatgctgaggtgcgcatcatgttccggcagcgcttcttcacagacaacgtgcctgccctggtgcagggcttccacgccgccccccaggatgtgaagcccaactacctgaagggcctgagccacgtgctgaaccggctgcccaagcctgtgctgctgcctgagctgcccaccctgctgagcctgctgctggaggccctgagctgcccagactgtgtggtgcagctgagcaccctgagctgcctgcagcccctgctgctggaggccccccaggtgatgagcctgcacgtggacaccctggtgaccaagttcctgaacctgagcagcagccccagcatggctgtgagaattgctgccctgcagtgcatgcacgccctgacccggctgcccacccctgtgctgctgccctacaagccccaggtgatccgggccctggccaagcccctggatgacaagaagaggctggtgaggaaggaggccgtgtctgcccggggggagtggttcctgctgggcagccctggcagctag

SEQ ID NO: 20554 - DNA, 3093 bp, synthetic construct
  misc_feature 1..3093: note = Description of Artificial Sequence: Synthetic coding sequence
  source 1..3093: mol_type = other DNA
atggctgctgctgctgctgtggaggccgccgcccccatgggcgccctgtggggcctggtgcatgactttgtggtgggccagcaggagggccctgctgaccaggtggccgcagatgtgaagagcggcaactacacagtgctgcaggtggtggaggccctgggcagcagcctggagaaccctgagcccaggacccgggcccgggccatccagctgctgagccaggtgctgctgcactgccacaccctgctgctggagaaggaggtggtgcacctgatcctcttctatgagaaccggctgaaggaccaccacctggtgatccccagcgtgctgcagggcctgaaggccctgagcctgtgtgtggccctgcccccaggcctggccgtgtctgtgctgaaggccatcttccaggaggtgcacgtgcagagcctgccccaggtggacagacacacagtgtacaacatcatcaccaacttcatgaggacccgggaggaggagctgaagagcctgggcgctgacttcaccttcggcttcatccaggtgatggatggagagaaggaccccaggaacctgctggtggccttccgcatcgtgcatgacctgatcagccgggactacagcctgggcccctttgtggaggagctgtttgaggtgaccagctgctacttccccatcgacttcaccccacctccaaatgacccccacggcatccagagagaagatctcatcctgagcctgcgggctgtgctggccagcacccccaggtttgctgagttcctgctgcccctgctgattgagaaggtggacagcgaggtgctgagcgccaagctggacagcctgcagaccctgaatgcctgctgtgctgtgtatggccagaaggagctgaaggacttcctgcccagcctgtgggccagcatccggcgggaggtgttccagacagccagcgagcgggtggaggccgagggcctggccgccctgcacagcctgacagcctgcctgagccgctctgtgctgcgggcagatgctgaggacctgctggacagcttcctgagcaacatcctgcaggactgccgccaccacctgtgtgagccagacatgaagctggtgtggcccagcgccaagctgctgcaggccgctgctggggccagcgcccgggcctgtgacagcgtgaccagcaatgtgctgcccctgctgctggagcagttccacaagcacagccagagcagccagaggaggaccatcctggagatgctgctgggcttcctgaagctgcagcagaagtggagctatgaggacaaggaccagaggcccctgaatggcttcaaggaccagctgtgcagcctggtgttcatggccctgacagaccccagcacccagctgcagctggtgggcatccgcaccctgactgtgctgggcgcccagcctgacctgctgtcctatgaggacctggagctggccgtgggccacctgtaccgcctgtccttcctgaaggaggacagccagagctgccgggtggccgccctggaggccagcggcaccctggccgccctgtaccctgtggccttcagcagccacctggtgcccaagctggccgaggagctgcgggtgggggagagcaacctgaccaatggagatgagcccacccagtgcagccgccacctgtgctgcctgcaggccctgtctgctgtgtccacccaccccagcatcgtgaaggagaccctgcccctgctgctgcagcacctgtggcaggtgaacagaggcaacatggtggcccagagcagtgatgtgattgctgtgtgccagagcctgcggcagatggccgagaagtgccagcaggaccctgagagctgctggtacttccaccagacagccatcccctgcctgctggccctggccgtgcaggcctccatgcctgagaaggagcccagcgtgctgaggaaggtgctgctggaggatgaggtgctggccgccatggtgtctgtgattggaacagccaccacccacctgagccctgagctggccgcccagagcgtgacccacatcgtgcccctcttcctggatggaaatgtgtccttcctgcctgagaacagcttccccagccgcttccagcccttccaggacggcagcagcggccagaggcggctgattgccctgctgatggcctttgtgtgcagcctgcccagaaatgtggagatcccccagctgaaccagctgatgagggagctgctggagctgagctgctgccacagctgccccttcagcagcacagctgctgccaagtgctttgctggcctgctgaacaagcaccctgctggccagcagctggatgagttcctgcagctggccgtggacaaggtggaggccggcctgggcagcggcccctgccgcagccaggccttcaccctgctgctgtgggtgaccaaggccctggtgctgcgctaccaccccctgagcagctgcctgacagcccggctgatgggcctgctgagtgaccctgagctgggccctgctgctgctgatggcttcagcctgctgatgtctgactgcacagatgtgctgaccagggctggccacgccgaggtgcgcatcatgttccggcagcgcttcttcacagacaacgtgcctgccctggtgcagggcttccacgccgccccccaggatgtgaagcccaactacctgaagggcctgagccacgtgctgaaccggctgcccaagcctgtgctgctgcctgagctgcccaccctgctgagcctgctgctggaggccctgagctgcccagactgtgtggtgcagctgagcaccctgagctgcctgcagcccctgctgctggaggccccccaggtgatgagcctgcacgtggacaccctggtgaccaagttcctgaacctgagcagcagccccagcatggctgtgagaattgctgccctgcagtgcatgcacgccctgacccggctgcccacccctgtgctgctgccctacaagccccaggtgatccgggccctggccaagcccctggatgacaagaagaggctggtgaggaaggaggccgtgtctgcccggggggagtggttcctgctgggcagccctggcagctag

SEQ ID NO: 20555 - DNA, 3030 bp, synthetic construct
  misc_feature 1..3030: note = Description of Artificial Sequence: Synthetic coding sequence
  source 1..3030: mol_type = other DNA
atggctgctgctgctgctgtggaggccgccgcccccatgggcgccctgtggggcctggtgcatgactttgtggtgggccagcaggagggccctgctgaccaggtggccgccagcagcctggagaaccctgagcccaggacccgggcccgggccatccagctgctgagccaggtgctgctgcactgccacaccctgctgctggagaaggaggtggtgcacctgatcctcttctatgaaaatcggctgaaggaccaccacctggtgatccccagcgtgctgcagggcctgaaggccctgagcctgtgtgtggccctgcccccaggcctggccgtgtctgtgctgaaggccatcttccaggaggtgcacgtgcaggtggacagacacacagtgtacaacatcatcaccaacttcatgaggacccgggaggaggagctgaagagcctgggcgctgacttcaccttcggcttcatccaggtgatggatggagagaaggaccccaggaacctgctggtggccttcagaattgtgcatgacctgatcagccgggactacagcctgggcccctttgtggaggagctgtttgaggtgaccagctgctacttccccatcgacttcaccccacctccaaatgacccccacggcatccagcgggaggacctgatcctgagcctgcgggctgtgctggccagcacccccaggtttgctgagttcctgctgcccctgctgattgagaaggtggacagcgaggtgctgagcgccaagctggacagcctgcagaccctgaatgcctgctgtgctgtgtatggccagaaggagctgaaggacttcctgcccagcctgtgggccagcatcagaagagaggtgttccagacagccagcgagcgggtggaggccgagggcctggccgccctgcacagcctgacagcctgcctgagccgctctgtgctgcgggcagatgctgaggacctgctggacagcttcctgagcaacatcctgcaggactgccgccaccacctgtgtgagccagacatgaagctggtgtggcccagcgccaagctgctgcaggccgccgccggggccagcgcccgggcctgtgacagcgtgaccagcaatgtgctgcccctgctgctggagcagttccacaagcacagccagagcagccagaggaggaccatcctggagatgctgctgggcttcctgaagctgcagcagaagtggagctatgaggacaaggaccagaggcccctgaatggcttcaaggaccagctgtgcagcctggtgttcatggccctgacagaccccagcacccagctgcagctggtgggcatccgcaccctgactgtgctgggcgcccagcctgacctgctgtcctatgaggacctggagctggccgtgggccacctgtaccgcctgtccttcctgaaggaggacagccagagctgccgggtggccgccctggaggccagcggcaccctggccgccctgtaccctgtggccttcagcagccacctggtgcccaagctggccgaggagctgcgggtgggggagagcaacctgaccaatggagatgagcccacccagtgcagccgccacctgtgctgcctgcaggccctgtctgctgtgtccacccaccccagcatcgtgaaggagaccctgcccctgctgctgcagcacctgtggcaggtgaacagaggcaacatggtggcccagagcagtgatgtgattgctgtgtgccagagcctgcggcagatggccgagaagtgccagcaggaccctgagagctgctggtacttccaccagacagccatcccctgcctgctggccctggccgtgcaggcctccatgcctgagaaggagcccagcgtgctgaggaaggtgctgctggaggatgaggtgctggccgccatggtgtctgtcatcggcacagccaccacccacctgagccctgagctggccgcccagagcgtgacccacatcgtgcccctcttcctggatggaaatgtgtccttcctgcctgaaaattccttccccagccgcttccagcccttccaggacggcagcagcggccagaggaggctcatcgccctgctgatggcctttgtgtgcagcctgcccagaaatgtggagatcccccagctgaaccagctgatgagggagctgctggagctgagctgctgccacagctgccccttcagcagcacagctgctgccaagtgctttgctggcctgctgaacaagcaccctgctggccagcagctggatgagttcctgcagctggccgtggacaaggtggaggccggcctgggcagcggcccctgccgcagccaggccttcaccctgctgctgtgggtgaccaaggccctggtgctgcgctaccaccccctgagcagctgcctgacagcccggctgatgggcctgctgagtgaccctgagctgggccctgctgctgctgatggcttcagcctgctgatgtctgactgcacagatgtgctgacccgggccggccatgctgaggtgcgcatcatgttccggcagcgcttcttcacagacaacgtgcctgccctggtgcagggcttccacgccgccccccaggatgtgaagcccaactacctgaagggcctgagccacgtgctgaaccggctgcccaagcctgtgctgctgcctgagctgcccaccctgctgagcctgctgctggaggccctgagctgcccagactgtgtggtgcagctgagcaccctgagctgcctgcagcccctgctgctggaggccccccaggtgatgagcctgcacgtggacaccctggtgaccaagttcctgaacctgagcagcagccccagcatggctgtgagaattgctgccctgcagtgcatgcacgccctgacccggctgcccacccctgtgctgctgccctacaagccccaggtgatccgggccctggccaagcccctggatgacaagaagaggctggtgaggaaggaggccgtgtctgcccggggggagtggttcctgctgggcagccctggcagctag

SEQ ID NO: 20556 - DNA, 3093 bp, synthetic construct; identical to SEQ ID NO: 20554
  misc_feature 1..3093: note = Description of Artificial Sequence: Synthetic coding sequence
  source 1..3093: mol_type = other DNA

SEQ ID NO: 20557 - DNA, 1734 bp, synthetic construct
  misc_feature 1..1734: note = Description of Artificial Sequence: Synthetic coding sequence
  source 1..1734: mol_type = other DNA
atgcccaagaccatctctgtgcgggtgaccaccatggatgctgagctggagtttgccatccagcccaacaccaccgggaagcagctgtttgaccaggtggtgaagaccatcggcctgcgggaggtgtggttcttcggcctgcagtaccaggacaccaagggcttcagcacctggctgaagctgaacaagaaggtgacagcccaggatgtgaggaaggagagccccctgctcttcaagttccgggccaagttctacccagaagatgtgtctgaggagctgatccaggacatcacccagaggctcttcttcctgcaggtgaaggagggcatcctgaatgatgacatctactgccccccagagacagctgtgctgctggccagctatgctgtgcagagcaagtacggggacttcaacaaggaggtgcacaagagcggctacctggccggggacaagctgctgccccagagggtgctggagcagcacaagctgaacaaggaccagtgggaggagcgcatccaggtgtggcatgaggagcaccggggcatgctgagagaagatgctgtgctggagtacctgaagatcgcccaggacctggagatgtatggagtgaactacttcagcatcaagaacaagaagggcagcgagctgtggctgggcgtggatgccctgggcctgaacatctatgagcagaatgaccggctgacccccaagattggcttcccctggagcgagatccggaacatctccttcaatgacaagaagtttgtgatcaagcccatcgacaagaaggccccagactttgtgttctacgccccccggctgcgcatcaacaagaggatcctggccctgtgcatgggcaaccacgagctgtacatgagaagaaggaagccagacaccatcgaggtgcagcagatgaaggcccaggcccgggaggagaagcaccagaagcagatggagcgggccatgctggagaatgagaagaagaagcgggagatggccgagaaggagaaggagaagattgaaagagagaaggaggagctgatggagcggctgaagcagatcgaggagcagaccaagaaggcccagcaggagctggaggagcagacccggcgggccctggagctggagcaggagaggaagagggcccagagcgaggccgagaagctggccaaggagcggcaggaggccgaggaggccaaggaggccctgctgcaggccagccgggaccagaagaagacccaggagcagctggccctggagatggccgagctgacagcccgcatcagccagctggagatggcccggcagaagaaggagagcgaggccgtggagtggcagcagaaggcccagatggtgcaggaggacctggagaagaccagggctgagctgaagacagccatgagcacccctcatgtggccgagccagcagaaaatgagcaggatgagcaggatgaaaatggagctgaggccagcgctgacctgcgggcagatgccatggccaaggacagaagtgaggaggagaggaccacagaggccgagaagaatgaaagagtgcagaagcacctgaaggccctgaccagcgagctggccaatgccagagatgagagcaagaagacagccaatgacatgattcatgctgagaacatgaggctgggccgggacaagtacaagaccctgcggcagatccggcagggcaacaccaagcagagaattgatgaatttgagagcatgtag

SEQ ID NO: 20558 - DNA, 717 bp, synthetic construct
  misc_feature 1..717: note = Description of Artificial Sequence: Synthetic coding sequence
  source 1..717: mol_type = other DNA
atgaggttcaagaaccgcttccagcgcttcatgaaccaccgggccccagccaacggccgctacaagcccacctgctatgagcacgccgccaactgctacacccacgccttcctgattgtgcctgccatcgtgggcagcgccctgctgcaccggctgagtgatgactgctgggagaagatcacagcctggatctacggcatgggcctgtgtgccctcttcatcgtgtccacagtgttccacatcgtgtcctggaagaagagccacctgaggacagtggagcactgcttccacatgtgtgacaggatggtgatctacttcttcatcgccgccagctatgccccctggctgaacctgcgggagctgggccccctggccagccacatgcgctggttcatctggctgatggctgctgggggcaccatctacgtgttcctgtaccacgagaagtacaaggtggtggagctgttcttctacctgaccatgggcttctccccagccctggtggtgacctccatgaacaacacagatggcctgcaggagctggcctgtggcggcctcatctactgcctgggcgtggtgttcttcaagagtgatggcatcatcccctttgcccacgccatctggcacctgtttgtggccacagctgctgctgtgcactactatgccatctggaagtacctgtaccgcagccccacagacttcatgaggcacctgtag

SEQ ID NO: 20559 - DNA, 2127 bp, synthetic construct
  misc_feature 1..2127: note = Description of Artificial Sequence: Synthetic coding sequence
  source 1..2127: mol_type = other DNA
atgagcacagcagatgccctggatgatgagaacaccttcaagatcctggtggccacagacatccacctgggcttcatggagaaggatgctgtgagaggaaatgacacctttgtgaccctggatgagatcctgcggctggcccaggagaatgaggtggacttcatcctgctgggcggggacctcttccacgagaacaagcccagcaggaagaccctgcacacctgcctggagctgctgaggaagtactgcatgggagacaggcctgtgcagtttgagatcctgagtgaccagagcgtgaactttggcttcagcaagttcccctgggtgaactaccaggacggcaacctgaacatcagcatccctgtgttcagcatccacggcaaccatgatgaccccactggagcagatgccctgtgtgccctggacatcctgagctgtgccggctttgtgaaccacttcggccgctccatgtctgtggagaagattgacatcagccctgtgctgctgcagaagggcagcaccaagatcgccctgtatggcctgggcagcatcccagatgagcggctgtacaggatgtttgtgaacaagaaggtgaccatgctgcggcccaaggaggatgaaaattcctggttcaacctcttcgtcatccaccagaacagaagcaagcacggcagcaccaacttcatccctgagcagttcctggatgacttcatcgacctggtgatctggggccatgaacatgagtgcaagatcgcccccaccaagaatgagcagcagctgttctacatcagccagcccggcagctctgtggtgaccagcctgagccctggagaggccgtgaagaagcacgtgggcctgctgcgcatcaagggcaggaagatgaacatgcacaagatccccctgcacacagtgcggcagttcttcatggaggacatcgtgctggccaaccacccagacatcttcaacccagacaaccccaaggtgacccaggccatccagagcttctgcctggagaagattgaggagatgctggagaatgctgagcgggagcggctgggcaacagccaccagcctgagaagcccctggtgcggctgcgggtggactacagcggcggctttgagcccttctctgtgctgcgcttcagccagaagtttgtggacagagtggccaaccccaaggacatcatccacttcttccgccaccgggagcagaaggagaagacaggagaggagatcaactttgggaagctgatcaccaagcccagcgagggcaccaccctgcgggtggaggacctggtgaagcagtacttccagacagctgagaagaatgtgcagctgagcctgctgacagagcggggcatgggagaggccgtgcaggagtttgtggacaaggaggagaaggatgccatcgaggagctggtgaagtaccagctggagaagacccagcgcttcctgaaggagcggcacattgatgccctggaggacaagattgatgaggaggtgcggcgcttccgggagacccggcagaagaacaccaatgaagaagatgatgaggtgcgggaggccatgacccgggcccgggccctgcggagccagagcgaggagagcgccagcgccttcagcgcagatgacctgatgagcattgacctggccgagcagatggccaatgacagtgatgacagcatctctgctgccaccaacaagggccggggccggggccggggccggcggggcggccggggccagaacagcgccagccggggcggcagccagaggggccgggctgacaccggcctggagaccagcaccaggagcaggaacagcaagacagctgtgtctgccagcaggaacatgagcatcattgatgccttcaagagcacccggcagcagcccagcagaaatgtgaccaccaagaactacagcgaggtgattgaggtggatgaaagtgatgtggaggaggacatcttccccaccaccagcaagacagaccagcgctggagcagcaccagcagcagcaagatcatgagccagagccaggtgtccaagggcgtggactttgagagcagtgaagatgatgatgatgaccccttcatgaacaccagcagcctgcggaggaacagaagatag

SEQ ID NO: 20560 - DNA, 2043 bp, synthetic construct
  misc_feature 1..2043: note = Description of Artificial Sequence: Synthetic coding sequence
  source 1..2043: mol_type = other DNA
atgagcacagcagatgccctggatgatgagaacaccttcaagatcctggtggccacagacatccacctgggcttcatggagaaggatgctgtgagaggaaatgacacctttgtgaccctggatgagatcctgcggctggcccaggagaatgaggtggacttcatcctgctgggcggggacctcttccacgagaacaagcccagcaggaagaccctgcacacctgcctggagctgctgaggaagtactgcatgggagacaggcctgtgcagtttgagatcctgagtgaccagagcgtgaactttggcttcagcaagttcccctgggtgaactaccaggacggcaacctgaacatcagcatccctgtgttcagcatccacggcaaccatgatgaccccactggagcagatgccctgtgtgccctggacatcctgagctgtgccggctttgtgaaccacttcggccgctccatgtctgtggagaagattgacatcagccctgtgctgctgcagaagggcagcaccaagatcgccctgtatggcctgggcagcatcccagatgagcggctgtacaggatgtttgtgaacaagaaggtgaccatgctgcggcccaaggaggatgaaaattcctggttcaacctcttcgtcatccaccagaacagaagcaagcacggcagcaccaacttcatccctgagcagttcctggatgacttcatcgacctggtgatctggggccatgaacatgagtgcaagatcgcccccaccaagaatgagcagcagctgttctacatcagccagcccggcagctctgtggtgaccagcctgagccctggagaggccgtgaagaagcacgtgggcctgctgcgcatcaagggcaggaagatgaacatgcacaagatccccctgcacacagtgcggcagttcttcatggaggacatcgtgctggccaaccacccagacatcttcaacccagacaaccccaaggtgacccaggccatccagagcttctgcctggagaagattgaggagatgctggagaatgctgagcgggagcggctgggcaacagccaccagcctgagaagcccctggtgcggctgcgggtggactacagcggcggctttgagcccttctctgtgctgcgcttcagccagaagtttgtggacagagtggccaaccccaaggacatcatccacttcttccgccaccgggagcagaaggagaagacaggagaggagatcaactttgggaagctgatcaccaagcccagcgagggcaccaccctgcgggtggaggacctggtgaagcagtacttccagacagctgagaagaatgtgcagctgagcctgctgacagagcggggcatgggagaggccgtgcaggagtttgtggacaaggaggagaaggatgccatcgaggagctggtgaagtaccagctggagaagacccagcgcttcctgaaggagcggcacattgatgccctggaggacaagattgatgaggaggtgcggcgcttccgggagacccggcagaagaacaccaatgaagaagatgatgaggtgcgggaggccatgacccgggcccgggccctgcggagccagagcgaggagagcgccagcgccttcagcgcagatgacctgatgagcattgacctggccgagcagatggccaatgacagtgatgacagcatctctgctgccaccaacaagggccggggccggggccggggccggcggggcggccggggccagaacagcgccagccggggcggcagccagaggggccgggccttcaagagcacccggcagcagcccagcagaaatgtgaccaccaagaactacagcgaggtgattgaggtggatgaaagtgatgtggaggaggacatcttccccaccaccagcaagacagaccagcgctggagcagcaccagcagcagcaagatcatgagccagagccaggtgtccaagggcgtggactttgagagcagtgaagatgatgatgatgaccccttcatgaacaccagcagcctgcggaggaacagaagatag

SEQ ID NO: 20561 - DNA, 2124 bp, synthetic construct
  misc_feature 1..2124: note = Description of Artificial Sequence: Synthetic coding sequence
  source 1..2124: mol_type = other DNA
atgagcacagcagatgccctggatgatgagaacaccttcaagatcctggtggccacagacatccacctgggcttcatggagaaggatgctgtgagaggaaatgacacctttgtgaccctggatgagatcctgcggctggcccaggagaatgaggtggacttcatcctgctgggcggggacctcttccacgagaacaagcccagcaggaagaccctgcacacctgcctggagctgctgaggaagtactgcatgggagacaggcctgtgcagtttgagatcctgagtgaccagagcgtgaactttggcttcagcaagttcccctgggtgaactaccaggacggcaacctgaacatcagcatccctgtgttcagcatccacggcaaccatgatgaccccactggagcagatgccctgtgtgccctggacatcctgagctgtgccggctttgtgaaccacttcggccgctccatgtctgtggagaagattgacatcagccctgtgctgctgcagaagggcagcaccaagatcgccctgtatggcctgggcagcatcccagatgagcggctgtacaggatgtttgtgaacaagaaggtgaccatgctgcggcccaaggaggatgaaaattcctggttcaacctcttcgtcatccaccagaacagaagcaagcacggcagcaccaacttcatccctgagcagttcctggatgacttcatcgacctggtgatctggggccatgaacatgagtgcaagatcgcccccaccaagaatgagcagcagctgttctacatcagccagcccggcagctctgtggtgaccagcctgagccctggagaggccgtgaagaagcacgtgggcctgctgcgcatcaagggcaggaagatgaacatgcacaagatccccctgcacacagtgcggcagttcttcatggaggacatcgtgctggccaaccacccagacatcttcaacccagacaaccccaaggtgacccaggccatccagagcttctgcctggagaagattgaggagatgctggagaatgctgagcgggagcggctgggcaacagccaccagcctgagaagcccctggtgcggctgcgggtggactacagcggcggctttgagcccttctctgtgctgcgcttcagccagaagtttgtggacagagtggccaaccccaaggacatcatccacttcttccgccaccgggagcagaaggagaagacaggagaggagatcaactttgggaagctgatcaccaagcccagcgagggcaccaccctgcgggtggaggacctggtgaagcagtacttccagacagctgagaagaatgtgcagctgagcctgctgacagagcggggcatgggagaggccgtgcaggagtttgtggacaaggaggagaaggatgccatcgaggagctggtgaagtaccagctggagaagacccagcgcttcctgaaggagcggcacattgatgccctggaggacaagattgatgaggaggtgcggcgcttccgggagacccggcagaagaacaccaatgaagaagatgatgaggtgcgggaggccatgacccgggcccgggccctgcggagccagagcgaggagagcgccagcgccttcagcgcagatgacctgatgagcattgacctggccgagcagatggccaatgacagtgatgacagcatctctgctgccaccaacaagggccggggccggggccggggccggcggggcggccggggccagaacagcgccagccggggcggcagccagaggggccgggacaccggcctggagaccagcaccaggagcaggaacagcaagacagctgtgtctgccagcaggaacatgagcatcattgatgccttcaagagcacccggcagcagcccagcagaaatgtgaccaccaagaactacagcgaggtgattgaggtggatgaaagtgatgtggaggaggacatcttccccaccaccagcaagacagaccagcgctggagcagcaccagcagcagcaagatcatgagccagagccaggtgtccaaaggagtggactttgagagcagtgaagatgatgatgatgaccccttcatgaacaccagcagcctgcggaggaacagaagatag

SEQ ID NO: 20562 - DNA, 2136 bp, synthetic construct
  misc_feature 1..2136: note = Description of Artificial Sequence: Synthetic coding sequence
  source 1..2136: mol_type = other DNA
atgaacagaaacatcagccaccagaagggagatgatgagaacaccttcaagatcctggtggccacagacatccacctgggcttcatggagaaggatgctgtgagaggaaatgacacctttgtgaccctggatgagatcctgcggctggcccaggagaatgaggtggacttcatcctgctgggcggggacctcttccacgagaacaagcccagcaggaagaccctgcacacctgcctggagctgctgaggaagtactgcatgggagacaggcctgtgcagtttgagatcctgagtgaccagagcgtgaactttggcttcagcaagttcccctgggtgaactaccaggacggcaacctgaacatcagcatccctgtgttcagcatccacggcaaccatgatgaccccaccggggctgatgccctgtgtgccctggacatcctgagctgtgccggctttgtgaaccacttcggccgctccatgtctgtggagaagattgacatcagccctgtgctgctgcagaagggcagcaccaagatcgccctgtatggcctgggcagcatcccagatgagcggctgtacaggatgtttgtgaacaagaaggtgaccatgctgcggcccaaggaggatgagaacagctggttcaacctgtttgtgatccaccagaacagaagcaagcacggcagcaccaacttcatccctgagcagttcctggatgacttcatcgacctggtgatctggggccacgagcacgagtgcaagatcgcccccaccaagaatgagcagcagctgttctacatcagccagcccggcagctctgtggtgaccagcctgagccctggagaggccgtgaagaagcacgtgggcctgctgcgcatcaagggcaggaagatgaacatgcacaagatccccctgcacacagtgcggcagttcttcatggaggacatcgtgctggccaaccacccagacatcttcaacccagacaaccccaaggtgacccaggccatccagagcttctgcctggagaagattgaggagatgctggagaatgctgagcgggagcggctgggcaacagccaccagcctgagaagcccctggtgcggctgcgggtggactacagcggcggctttgagcccttctctgtgctgcgcttcagccagaagtttgtggacagagtggccaaccccaaggacatcatccacttcttccgccaccgggagcagaaggagaagacaggagaggagatcaactttgggaagctgatcaccaagcccagcgagggcaccaccctgcgggtggaggacctggtgaagcagtacttccagacagctgagaagaatgtgcagctgagcctgctgacagagcggggcatgggagaggccgtgcaggagtttgtggacaaggaggagaaggatgccatcgaggagctggtgaagtaccagctggagaagacccagcgcttcctgaaggagcggcacattgatgccctggaggacaagattgatgaggaggtgcggcgcttccgggagacccggcagaagaacaccaatgaggaggatgatgaggtgcgggaggccatgacccgggcccgggccctgcggagccagagcgaggagagcgccagcgccttcagcgcagatgacctgatgagcattgacctggccgagcagatggccaatgacagtgatgacagcatctctgctgccaccaacaagggccggggccggggccggggcagaagaggaggccggggccagaacagcgccagcagaggaggcagccagaggggccgggctgacaccggcctggagaccagcaccaggagcaggaacagcaagacagctgtgtctgccagcaggaacatgagcatcattgatgccttcaagagcacccggcagcagcccagcagaaatgtgaccaccaagaactacagcgaggtgattgaggtggatgaaagtgatgtggaggaggacatcttccccaccaccagcaagacagaccagcgctggagcagcaccagcagcagcaagatcatgagccagagccaggtgtccaaaggagtggactttgagagcagtgaagatgatgatgatgaccccttcatgaacaccagcagcctgcggaggaacagaagatag

SEQ ID NO: 20563 - DNA, 384 bp, synthetic construct
  misc_feature 1..384: note = Description of Artificial Sequence: Synthetic coding sequence
  source 1..384: mol_type = other DNA
atgagcacagcagatgccctggatgatgagaacaccttcaagatcctggtggccacagacatccacctgggcttcatggagaaggatgctgtgagaggaaatgacacctttgtgaccctggatgagatcctgcggctggcccaggagaatgaggtggacttcatcctgctgggcggggacctcttccacgagaacaagcccagcaggaagaccctgcacacctgcctggagctgctgaggaagtactgcatgggagacaggcctgtgcagtttgagatcctgagtgaccagagcgtgaactttggcttcagcaagttcccctgggtgaactaccaggacggcaacctgaacatcagcatccctgtgttcagcatccacggctag

SEQ ID NO: 20564 - DNA, 336 bp, synthetic construct
  misc_feature 1..336: note = Description of Artificial Sequence: Synthetic coding sequence
  source 1..336: mol_type = other DNA
atgagcacagcagatgccctggatgatgagaacaccttcaagatcctggtggccacagacatccacctgggcttcatggagaaggatgctgtgagaggaaatgacacctttgtgaccctggatgagatcctgcggctggcccaggagaatgaggtggacttcatcctgctgggcggggacctcttccacgagaacaagcccagcaggaagaccctgcacacctgcctggagctgctgaggaagtactgcatgggagacaggcctgtgcagtttgagatcctgagtgaccagagcgtgaactttggcttcagcaagttcccctgggtgaactactag

SEQ ID NO: 20565 - DNA, 666 bp, synthetic construct
  misc_feature 1..666: note = Description of Artificial Sequence: Synthetic coding sequence
  source 1..666: mol_type = other DNA
atgagcacagcagatgccctggatgatgagaacaccttcaagatcctggtggccacagacatccacctgggcttcatggagaaggatgctgtgagaggaaatgacacctttgtgaccctggatgagatcctgcggctggcccaggagaatgaggtggacttcatcctgctgggcggggacctcttccacgagaacaagcccagcaggaagaccctgcacacctgcctggagctgctgaggaagtactgcatgggagacaggcctgtgcagtttgagatcctgagtgaccagagcgtgaactttggcttcagcaagttcccctgggtgaactaccaggacggcaacctgaacatcagcatccctgtgttcagcatccacggcaaccatgatgaccccactggagcagatgccctgtgtgccctggacatcctgagctgtgccggctttgtgaaccacttcggccgctccatgtctgtggagaagattgacatcagccctgtgctgctgcagaagggcagcaccaagatcgccctgtatggcctgggcagcatcccagatgagcggctgtacaggatgtttgtgaacaagaaggtgaccatgctgcggcccaaggaggatgaaaattcctggttcaacctcttcgtcatccaccagaacagagtgtag

SEQ ID NO: 20566 - DNA, 822 bp, synthetic construct
  misc_feature 1..822: note = Description of Artificial Sequence: Synthetic coding sequence
  source 1..822: mol_type = other DNA
atgaccccaggcacccagagccccttcttcctgctgctgctgctgactgtgctgactgtggtgacaggcagcggccacgccagcagcaccccaggaggagagaaggagaccagcgccacccagaggagctctgtgcccagcagcacagagaagaatgccctgagcactggagtgtccttcttcttcctgtccttccacatcagcaacctgcagttcaacagcagcctggaggaccccagcacagactactaccaggagctgcagagggacatcagcgagatgttcctgcagatctacaagcagggcggcttcctgggcctgagcaacatcaagttccggcccggctctgtggtggtgcagctgaccctggccttccgggagggcaccatcaacgtgcatgatgtggagacccagttcaaccagtacaagacagaggccgccagccgctacaacctgaccatcagtgatgtgtctgtgtctgatgtgcccttccccttcagcgcccagagcggggccggcgtgcccggctggggcatcgccctgctggtgctggtgtgtgtgctggtggccctggccatcgtgtacctgattgccctggccgtgtgccagtgcaggaggaagaactacggccagctggacatcttccctgcccgggacacctaccaccccatgtctgagtaccccacctaccacacccacggccgctacgtgccccccagcagcacagacaggagcccctatgagaaggtgtctgctggaaatggaggcagcagcctgagctacaccaacccagctgtggccgccaccagcgccaacctgtag

SEQ ID NO: 20567 - DNA, 675 bp, synthetic construct
  misc_feature 1..675: note = Description of Artificial Sequence: Synthetic coding sequence
  source 1..675: mol_type = other DNA
atgaccccaggcacccagagccccttcttcctgctgctgctgctgactgtgctgacagccaccacagcccccaagccagccaccgtggtgactggaagtggccacgccagcagcaccccaggaggagagaaggagaccagcgccacccagaggagctctgtgcccagcagcacagagaagaatgccttccggcccggctctgtggtggtgcagctgaccctggccttccgggagggcaccatcaacgtgcatgatgtggagacccagttcaaccagtacaagacagaagctgccagccgctacaacctgaccatcagtgatgtgtctgtgtctgatgtgcccttccccttcagcgcccagagcggggccggcgtgcccggctggggcatcgccctgctggtgctggtgtgtgtgctggtggccctggccatcgtgtacctgattgccctggccgtgtgccagtgcaggaggaagaactacggccagctggacatcttccctgcccgggacacctaccaccccatgtctgagtaccccacctaccacacccacggccgctacgtgccccccagcagcacagacaggagcccctatgagaaggtgtctgctggaaatggaggcagcagcctgagctacaccaacccagctgtggccgccaccagcgccaacctgtag

SEQ ID NO: 20568 - DNA, 501 bp, synthetic construct
  misc_feature 1..501: note = Description of Artificial Sequence: Synthetic coding sequence
  source 1..501: mol_type = other DNA
atgaccccaggcacccagagccccttcttcctgctgctgctgctgactgtgctgacagccaccacagcccccaagccagccaccgtggtgactggaagtggccacgccagcagcaccccaggaggagagaaggagaccagcgccacccagaggagctctgtgcccagcagcacagagaagaatgccagcggggccggcgtgcccggctggggcatcgccctgctggtgctggtgtgtgtgctggtggccctggccatcgtgtacctgattgccctggccgtgtgccagtgcaggaggaagaactacggccagctggacatcttccctgcccgggacacctaccaccccatgtctgagtaccccacctaccacacccacggccgctacgtgccccccagcagcacagacaggagcccctatgagaaggtgtctgctggaaatggaggcagcagcctgagctacaccaacccagctgtggccgccaccagcgccaacctgtag

SEQ ID NO: 20569 - DNA, 612 bp, synthetic construct
  misc_feature 1..612: note = Description of Artificial Sequence: Synthetic coding sequence
  source 1..612: mol_type = other DNA
atgaccccaggcacccagagccccttcttcctgctgctgctgctgactgtgctgactgtggtgacaggcagcggccacgccagcagcaccccaggaggagagaaggagaccagcgccacccagaggagctctgtgcccagcagcacagagaagaatgccatcccagcccccaccaccaccaagagctgccgggagaccttcctgaagtgcttctgccgcttcatcaacaagggcgtcttctgggccagccccatcctgagctctgtgtctgatgtgcccttccccttcagcgcccagagcggggccggcgtgcccggctggggcatcgccctgctggtgctggtgtgtgtgctggtggccctggccatcgtgtacctgattgccctggccgtgtgccagtgcaggaggaagaactacggccagctggacatcttccctgcccgggacacctaccaccccatgtctgagtaccccacctaccacacccacggccgctacgtgccccccagcagcacagacaggagcccctatgagaaggtgtctgctggaaatggaggcagcagcctgagctacaccaacccagctgtggccgccaccagcgccaacctgtag

SEQ ID NO: 20570 - DNA, 507 bp, synthetic construct
  misc_feature 1..507: note = Description of Artificial Sequence: Synthetic coding sequence
  source 1..507: mol_type = other DNA
atgaccccaggcacccagagccccttcttcctgctgctgctgctgactgtgctgactgtggtgacaggcagcggccacgccagcagcaccccaggaggagagaaggagaccagcgccacccagaggagctctgtgcccagcagcacagagaagaatgccctgagcactggagtgtccttcttcttcctgtccttccacatcagcaacctgcagttcaacagcagcctggaggaccccagcacagactactaccaggagctgcagagggacatcagcgagatggctgtgtgccagtgcaggaggaagaactacggccagctggacatcttccctgcccgggacacctaccaccccatgtctgagtaccccacctaccacacccacggccgctacgtgccccccagcagcacagacaggagcccctatgagaaggtgtctgctggaaatggaggcagcagcctgagctacaccaacccagctgtggccgccaccagcgccaacctgtag

SEQ ID NO: 20571 - DNA, 768 bp, synthetic construct
  misc_feature 1..768: note = Description of Artificial Sequence: Synthetic coding sequence
  source 1..768: mol_type = other DNA
atgaccccaggcacccagagccccttcttcctgctgctgctgctgactgtgctgactgtggtgacaggcagcggccacgccagcagcaccccaggaggagagaaggagaccagcgccacccagaggagctctgtgcccagcagcacagagaagaatgccttcaacagcagcctggaggaccccagcacagactactaccaggagctgcagagggacatcagcgagatgttcctgcagatctacaagcagggcggcttcctgggcctgagcaacatcaagttccggcccggctctgtggtggtgcagctgaccctggccttccgggagggcaccatcaacgtgcatgatgtggagacccagttcaaccagtacaagacagaggccgccagccgctacaacctgaccatcagtgatgtgtctgtgtctgatgtgcccttccccttcagcgcccagagcggggccggcgtgcccggctggggcatcgccctgctggtgctggtgtgtgtgctggtggccctggccatcgtgtacctgattgccctggccgtgtgccagtgcaggaggaagaactacggccagctggacatcttccctgcccgggacacctaccaccccatgtctgagtaccccacctaccacacccacggccgctacgtgccccccagcagcacagacaggagcccctatgagaaggtgtctgctggaaatggaggcagcagcctgagctacaccaacccagctgtggccgccaccagcgccaacctgtag

SEQ ID NO: 20572 - DNA, 795 bp, synthetic construct
  misc_feature 1..795: note = Description of Artificial Sequence: Synthetic coding sequence
  source 1..795: mol_type = other DNA
atgaccccaggcacccagagccccttcttcctgctgctgctgctgactgtgctgacagccaccacagcccccaagccagccaccgtggtgactggaagtggccacgccagcagcaccccaggaggagagaaggagaccagcgccacccagaggagctctgtgcccagcagcacagagaagaatgccttcaacagcagcctggaggaccccagcacagactactaccaggagctgcagagggacatcagcgagatgttcctgcagatctacaagcagggcggcttcctgggcctgagcaacatcaagttccggcccggctctgtggtggtgcagctgaccctggccttccgggagggcaccatcaacgtgcatgatgtggagacccagttcaaccagtacaagacagaagctgccagccgctacaacctgaccatcagtgatgtgtctgtgtctgatgtgcccttccccttcagcgcccagagcggggccggcgtgcccggctggggcatcgccctgctggtgctggtgtgtgtgctggtggccctggccatcgtgtacctgattgccctggccgtgtgccagtgcaggaggaagaactacggccagctggacatcttccctgcccgggacacctaccaccccatgtctgagtaccccacctaccacacccacggccgctacgtgccccccagcagcacagacaggagcccctatgagaaggtgtctgctggaaatggaggcagcagcctgagctacaccaacccagctgtggccgccaccagcgccaacctgtag

SEQ ID NO: 20573 - DNA, 597 bp, synthetic construct
  misc_feature 1..597: note = Description of Artificial Sequence: Synthetic coding sequence
  source 1..597: mol_type = other DNA
atgaccccaggcacccagagccccttcttcctgctgctgctgctgactgtgctgactgtggtgacaggcagcggccacgccagcagcaccccaggaggagagaaggagaccagcgccacccagaggagctctgtgcccagcagcacagagaagaatgccctgagcactggagtgtccttcttcttcctgtccttccacatcagcaacctgcagttcaacagcagcctggaggaccccagcacagactactaccaggagctgcagagggacatcagcgagatgttcctgcagatctacaagcagggcggcttcctgggcctgagcaacatcaagttccggcccggctctgtggtggtgcagctgaccctggccttccgggagggcaccatcaacgtgcatgatgtggagacccagttcaaccagtacaagacagaggccgccagccgctacaacctgaccatcagtgatgtgtctggctgcctgtctgtgccccccaaggagctgcgggctgctggccacctgagcagccctggctacctgcccagctatgagcgggtgccccacctgccccacccctgggccctgtgtgccccctag

SEQ ID NO: 20574 - DNA, 1428 bp, synthetic construct
  misc_feature 1..1428: note = Description of Artificial Sequence: Synthetic coding sequence
  source 1..1428: mol_type = other DNA
atgaccccaggcacccagagccccttcttcctgctgctgctgctgactgtgctgactgtggtgacaggcagcggccacgccagcagcaccccaggaggagagaaggagaccagcgccacccagaggagctctgtgcccagcagcacagagaagaatgctgtgtccatgaccagctctgtgctgagcagccacagccctggcagcggcagcagcaccacccagggccaggatgtgaccctggccccagccacagagcccgccagcggcagcgctgccacctggggccaggatgtgacctctgtgcctgtgaccaggcctgccctgggcagcaccaccccaccagcccatgatgtgaccagcgccccagacaacaagccagcccctggcagcacagcccccccagcccacggcgtgaccagcgccccagacaccaggcctgcccctggcagcacagcccccccagcccacggcgtgaccagcgccccagacaacagacctgccctgggcagcacagcccctcctgtgcacaacgtgaccagcgccagcggcagcgccagcggcagcgccagcaccctggtgcacaacggcaccagcgcccgggccaccaccaccccagccagcaagagcacccccttcagcatccccagccaccacagcgacacccccaccaccctggccagccacagcaccaagacagatgccagcagcacccaccacagcacagtgccccccctgaccagcagcaaccacagcaccagcccccagctgagcactggagtgtccttcttcttcctgtccttccacatcagcaacctgcagttcaacagcagcctggaggaccccagcacagactactaccaggagctgcagagggacatcagcgagatgttcctgcagatctacaagcagggcggcttcctgggcctgagcaacatcaagttccggcccggctctgtggtggtgcagctgaccctggccttccgggagggcaccatcaacgtgcatgatgtggagacccagttcaaccagtacaagacagaggccgccagccgctacaacctgaccatcagtgatgtgtctgtgtctgatgtgcccttccccttcagcgcccagagcggggccggcgtgcccggctggggcatcgccctgctggtgctggtgtgtgtgctggtggccctggccatcgtgtacctgattgccctggccgtgtgccagtgcaggaggaagaactacggccagctggacatcttccctgcccgggacacctaccaccccatgtctgagtaccccacctaccacacccacggccgctacgtgccccccagcagcacagacaggagcccctatgagaaggtgtctgctggaaatggaggcagcagcctgagctacaccaacccagctgtggccgccaccagcgccaacctgtag

SEQ ID NO: 20575 - DNA, 480 bp, synthetic construct
  misc_feature 1..480: note = Description of Artificial Sequence: Synthetic coding sequence
  source 1..480: mol_type = other DNA
atgaccccaggcacccagagccccttcttcctgctgctgctgctgactgtgctgacagccaccacagcccccaagccagccaccgtggtgactggaagtggccacgccagcagcaccccaggaggagagaaggagaccagcgccacccagaggagctctgtgcccagcagcacagagaagaatgccttcaacagcagcctggaggaccccagcacagactactaccaggagctgcagagggacatcagcgagatggctgtgtgccagtgcaggaggaagaactacggccagctggacatcttccctgcccgggacacctaccaccccatgtctgagtaccccacctaccacacccacggccgctacgtgccccccagcagcacagacaggagcccctatgagaaggtgtctgctggaaatggaggcagcagcctgagctacaccaacccagctgtggccgccaccagcgccaacctgtag

SEQ ID NO: 20576 - DNA, 693 bp, synthetic construct
  misc_feature 1..693: note = Description of Artificial Sequence: Synthetic coding sequence
  source 1..693: mol_type = other DNA
atgaccccaggcacccagagccccttcttcctgctgctgctgctgactgtgctgactgtggtgacaggcagcggccacgccagcagcaccccaggaggagagaaggagaccagcgccacccagaggagctctgtgcccagcagcacagagaagaatgccatcccagcccccaccaccaccaagagctgccgggagaccttcctgaagtggccaggctctgtggtggtgcagctgaccctggccttccgggagggcaccatcaacgtgcatgatgtggagacccagttcaaccagtacaagacagaagctgccagccgctacaacctgaccatcagtgatgtgtctgtgtctgatgtgcccttccccttcagcgcccagagcggggccggcgtgcccggctggggcatcgccctgctggtgctggtgtgtgtgctggtggccctggccatcgtgtacctgattgccctggccgtgtgccagtgcaggaggaagaactacggccagctggacatcttccctgcccgggacacctaccaccccatgtctgagtaccccacctaccacacccacggccgctacgtgccccccagcagcacagacaggagcccctatgagaaggtgtctgctggaaatggaggcagcagcctgagctacaccaacccagctgtggccgccaccagcgccaacctgtag

SEQ ID NO: 20577 - DNA, 1686 bp, synthetic construct
  misc_feature 1..1686: note = Description of Artificial Sequence: Synthetic coding sequence
  source 1..1686: mol_type = other DNA
atgaccccaggcacccagagccccttcttcctgctgctgctgctgactgtgctgactgtggtgacaggcagcggccacgccagcagcaccccaggaggagagaaggagaccagcgccacccagaggagctctgtgcccagcagcacagagaagaatgctgtgtccatgaccagctctgtgctgagcagccacagccctggcagcggcagcagcaccacccagggccaggatgtgaccctggccccagccacagagcccgccagcggcagcgctgccacctggggccaggatgtgacctctgtgcctgtgaccaggcctgccctgggcagcaccaccccaccagcccatgatgtgaccagcgccccagacaccaggcctgcccctggcagcacagcccccccagcccacggcgtgaccagcgccccagacaccaggcctgcccctggcagcacagcccccccagcccacggcgtgaccagcgccccagacaccaggcctgcccctggcagcacagcccccccagcccacggcgtgaccagcgccccagacaccaggcctgcccctggcagcacagcccccccagcccacggcgtgaccagcgccccagacacccggcgggcccctggcagcaccccagcccctggcagcacagcccccccagcccacggcgtgaccagcgccccagacaccaggcctgcccctggcagcacagcccccccagcccacggcgtgaccagcgccccagacaacagacctgccctgggcagcacagcccctcctgtgcacaacgtgaccagcgccagcggcagcgccagcggcagcgccagcaccctggtgcacaacggcaccagcgcccgggccaccaccaccccagccagcaagagcacccccttcagcatccccagccaccacagcgacacccccaccaccctggccagccacagcaccaagacagatgccagcagcacccaccacagcacagtgccccccctgaccagcagcaaccacagcaccagcccccagctgagcactggagtgtccttcttcttcctgtccttccacatcagcaacctgcagttcaacagcagcctggaggaccccagcacagactactaccaggagctgcagagggacatcagcgagatgttcctgcagatctacaagcagggcggcttcctgggcctgagcaacatcaagttccggcccggctctgtggtggtgcagctgaccctggccttccgggagggcaccatcaacgtgcatgatgtggagacccagttcaaccagtacaagacagaggccgccagccgctacaacctgaccatcagtgatgtgtctgtgtctgatgtgcccttccccttcagcgcccagagcggggccggcgtgcccggctggggcatcgccctgctggtgctggtgtgtgtgctggtggccctggccatcgtgtacctgattgccctggccgtgtgccagtgcaggaggaagaactacggccagctggacatcttccctgcccgggacacctaccaccccatgtctgagtaccccacctaccacacccacggccgctacgtgccccccagcagcacagacaggagcccctatgagaaggtgtctgctggaaatggaggcagcagcctgagctacaccaacccagctgtggccgccaccagcgccaacctgtag

SEQ ID NO: 20578 - DNA, 690 bp, synthetic construct
  misc_feature 1..690: note = Description of Artificial Sequence: Synthetic coding sequence
  source 1..690: mol_type = other DNA
atgaccccaggcacccagagccccttcttcctgctgctgctgctgactgtgctgactgtggtgacaggcagcggccacgccagcagcaccccaggaggagagaaggagaccagcgccacccagaggagctctgtgcccagcagcacagagaagaatgccatctacaagcagggcggcttcctgggcctgagcaacatcaagttccggcccggctctgtggtggtgcagctgaccctggccttccgggagggcaccatcaacgtgcatgatgtggagacccagttcaaccagtacaagacagaggccgccagccgctacaacctgaccatcagtgatgtgtctgtgtctgatgtgcccttccccttcagcgcccagagcggggccggcgtgcccggctggggcatcgccctgctggtgctggtgtgtgtgctggtggccctggccatcgtgtacctgattgccctggccgtgtgccagtgcaggaggaagaactacggccagctggacatcttccctgcccgggacacctaccaccccatgtctgagtaccccacctaccacacccacggccgctacgtgccccccagcagcacagacaggagcccctatgagaaggtgtctgctggaaatggaggcagcagcctgagctacaccaacccagctgtggccgccaccagcgccaacctgtag

SEQ ID NO: 20579 - DNA, 780 bp, synthetic construct
  misc_feature 1..780: note = Description of Artificial Sequence: Synthetic coding sequence
  source 1..780: mol_type = other DNA
atgaccccaggcacccagagccccttcttcctgctgctgctgctgactgtgctgacagccaccacagcccccaagccagccaccgtggtgactggaagtggccacgccagcagcaccccaggaggagagaaggagaccagcgccacccagaggagctctgtgcccagcagcacagagaagaatgccttcaacagcagcctggaggaccccagcacagactactaccaggagctgcagagggacatcagcgagatgttcctgcagatctacaagcagggcggcttcctgggcctgagcaacatcaagttccggcccggctctgtggtggtgcagctgaccctggccttccgggagggcaccatcaacgtgcatgatgtggagacccagttcaaccagtacaagacagaagctgccagccgctacaacctgaccatcagtgatgtgtctgtgtctgatgtgcccttccccttcagcgcccagagcggggccggcgtgcccggctggggcatcgccctgctggtgctggtgtgtgtgctggtggccctggccatcgtgtacctgattgccctggccgtgtgccagtgcaggaggaagaactacggccagctggacatcttccctgcccgggacacctaccaccccatgtctgagtaccccacctaccacacccacggccgctacgtgccccccagcagcacagacaggagcccctatgagaagaggcagaatggctggagcaccatgcccaggggggccctgcctgaggagagccagggctag

SEQ ID NO: 20580 - DNA, 1833 bp, synthetic construct
  misc_feature 1..1833: note = Description of Artificial Sequence: Synthetic coding sequence
  source 1..1833: mol_type = other DNA
atgggcctgaaggccgcccagaagaccctcttccccctgcggagcattgatgatgtggtgcggctgtttgctgctgagctgggccgggaggagccagacctggtgctgctgagcctggtgctgggctttgtggagcacttcctggccgtgaacagagtcatccccaccaacgtgcctgagctgaccttccagcccagccctgccccagaccccccaggcggcctgacctacttccctgtggccgacctgagcatcatcgccgccctgtatgcccgcttcaccgcccagatcagaggagctgtggacctgagcctgtacccccgggagggcggcgtgagcagccgggagctggtgaagaaggtgtctgatgtgatctggaacagcctgagccgcagctacttcaaggaccgggcccacatccagagcctcttctccttcatcaccggcaccaagctggacagcagtggagtggcctttgctgtggtgggcgcctgccaggccctgggcctgagagatgtgcacctggccctgtctgaagatcatgcctgggtggtgtttggccccaatggagagcagacagctgaggtgacctggcatggaaaaggaaatgaagatcggcggggccagacagtgaatgccggcgtggccgagaggtcctggctgtacctgaagggcagctacatgagatgtgacaggaagatggaggtggccttcatggtgtgtgccatcaaccccagcattgacctgcacacagacagcctggagctgctgcagctgcagcagaagctgctgtggctgctgtatgacctgggccacctggagcgctaccccatggccctgggcaacctggccgacctggaggagctggagcccaccccaggccgcccagaccccctgaccctgtaccacaagggcatcgccagcgccaagacctactacagagatgagcacatctacccctacatgtacctggccggctaccactgcaggaacagaaatgtgcgggaggccctgcaggcctgggccgacacagccaccgtcatccaggactacaactactgccgggaggatgaggagatctacaaggagttctttgaggtggccaatgatgtgatccccaacctgctgaaggaggccgccagcctgctggaggccggggaggagaggcctggagagcagagccagggcacccagagccagggcagcgccctgcaggaccctgagtgctttgcccacctgctgcgcttctatgatggcatctgcaagtgggaggagggcagccccacccctgtgctgcacgtgggctgggccaccttcctggtgcagagcctgggccgctttgagggccaggtgcggcagaaggtgagaattgtgtcccgggaggccgaggccgctgaggccgaggagccctggggcgaggaggcccgggagggcagaagaagaggcccccggcgggagagcaagccagaggagcccccaccacccaagaagccagccctggacaagggcctgggcaccggccagggcgctgtgtctggcccccccaggaagcccccaggcaccgtggccggcacagcccggggccctgagggcggcagcacagcccaggtgcctgcccccacagccagccccccacctgagggccctgtgctgaccttccagagcgagaagatgaagggcatgaaggagctgctggtggccaccaagatcaacagcagcgccatcaagctgcagctgacagcccagagccaggtgcagatgaagaagcagaaggtgtccacccccagcgactacaccctgtccttcctgaagaggcagaggaagggcctgtag

SEQ ID NO: 20581 - DNA, 1833 bp, synthetic construct; identical to SEQ ID NO: 20580
  misc_feature 1..1833: note = Description of Artificial Sequence: Synthetic coding sequence
  source 1..1833: mol_type = other DNA

SEQ ID NO: 20582 - DNA, 1848 bp, synthetic construct
  misc_feature 1..1848: note = Description of Artificial Sequence: Synthetic coding sequence
  source 1..1848: mol_type = other DNA
atgggcctgaaggccgcccagaagaccctcttccccctgcggagcattgatgatgtggtgcggctgtttgctgctgagctgggccgggaggagccagacctggtgctgctgagcctggtgctgggctttgtggagcacttcctggccgtgaacagagtcatccccaccaacgtgcctgagctgaccttccagcccagccctgccccagaccccccaggcggcctgacctacttccctgtggccgacctgagcatcatcgccgccctgtatgcccgcttcaccgcccagatcagaggagctgtggacctgagcctgtacccccgggagggcggcgtgagcagccgggagctggtgaagaaggtgtctgatgtgatctggaacagcctgagccgcagctacttcaaggaccgggcccacatccagagcctcttctccttcatcaccggctggagccctgtgggcaccaagctggacagcagcggcgtggcctttgctgtggtgggcgcctgccaggccctgggcctgagagatgtgcacctggccctgtctgaggaccacgcctgggtggtgtttggccccaacggggagcagacagctgaggtgacctggcacggcaaaggaaatgaagatagaagaggccagacagtgaatgctggggtggccgagaggtcctggctgtacctgaagggcagctacatgagatgtgacaggaagatggaggtggccttcatggtgtgtgccatcaaccccagcattgacctgcacacagacagcctggagctgctgcagctgcagcagaagctgctgtggctgctgtatgacctgggccacctggagcgctaccccatggccctgggcaacctggccgacctggaggagctggagcccaccccaggccgcccagaccccctgaccctgtaccacaagggcatcgccagcgccaagacctactacagagatgagcacatctacccctacatgtacctggccggctaccactgcaggaacagaaatgtgcgggaggccctgcaggcctgggccgacacagccaccgtcatccaggactacaactactgcagagaagatgaggagatctacaaggagttctttgaggtggccaatgatgtgatccccaacctgctgaaggaggccgccagcctgctggaggccggggaggagaggcctggagagcagagccagggcacccagagccagggcagcgccctgcaggaccctgaatgttttgcccacctgctgcgcttctatgatggcatctgcaagtgggaggagggcagccccacccctgtgctgcacgtgggctgggccaccttcctggtgcagagcctgggccgctttgagggccaggtgcggcagaaggtgcgcatcgtgtcccgggaggccgaggccgctgaggccgaggagccctggggcgaggaggcccgggagggcagaagaagaggcccccggcgggagagcaagccagaggagcccccaccacccaagaagccagccctggacaagggcctgggcaccggccagggcgctgtgtctggcccccccaggaagcccccaggcaccgtggccggcacagcccggggccctgagggcggcagcacagcccaggtgcctgcccccacagccagccccccacctgagggccctgtgctgaccttccagagcgagaagatgaagggcatgaaggagctgctggtggccaccaagatcaacagcagcgccatcaagctgcagctgacagcccagagccaggtgcagatgaagaagcagaaggtgtccacccccagcgactacaccctgtccttcctgaagaggcagaggaagggcctgtag

SEQ ID NO: 20583 - DNA, 1848 bp, synthetic construct; identical to SEQ ID NO: 20582
  misc_feature 1..1848: note = Description of Artificial Sequence: Synthetic coding sequence
  source 1..1848: mol_type = other DNA

SEQ ID NO: 20584 - DNA, 1668 bp, synthetic construct
  misc_feature 1..1668: note = Description of Artificial Sequence: Synthetic coding sequence
  source 1..1668: mol_type = other DNA
atgggcctgaaggccgcccagaagaccctcttccccctgcggagcattgatgatgtggtgcggctgtttgctgctgagctgggccgggaggagccagacctggtgctgctgagcctggtgctgggctttgtggagcacttcctggccgtgaacagagtcatccccaccaacgtgcctgagctgaccttccagcccagccctgccccagaccccccaggcggcctgacctacttccctgtggccgacctgagcatcatcgccgccctgtatgcccgcttcaccgcccagatcagaggagctgtggacctgagcctgtacccccgggagggcggcgtgagcagccgggagctggtgaagaaggtgtctgatgtgatctggaacagcctgagccgcagctacttcaaggaccgggcccacatccagagcctcttctccttcatcaccggcaccaagctggacagcagtggagtggcctttgctgtggtgggcgcctgccaggccctgggcctgagagatgtgcacctggccctgtctgaagatcatgcctgggtggtgtttggccccaatggagagcagacagctgaggtgacctggcatggaaaaggaaatgaagatcggcggggccagacagtgaatgccggcgtggccgagaggtcctggctgtacctgaagggcagctacatgagatgtgacaggaagatggaggtggccttcatggtgtgtgccatcaaccccagcattgacctgcacacagacagcctggagctgctgcagctgcagcagaagctgctgtggctgctgtatgacctgggccacctggagcgctaccccatggccctgggcaacctggccgacctggaggagctggagcccaccccaggccgcccagaccccctgaccctgtaccacaagggcatcgccagcgccaagacctactacagagatgagcacatctacccctacatgtacctggccggctaccactgcaggaacagaaatgtgcgggaggccctgcaggcctgggccgacacagccaccgtcatccaggactacaactactgccgggaggatgaggagatctacaaggagttctttgaggtggccaatgatgtgatccccaacctgctgaaggaggccgccagcctgctggaggccggggaggagaggcctggagagcagagccaggtgcggcagaaggtgcgcatcgtgtcccgggaggccgaggccgctgaggccgaggagccctggggcgaggaggcccgggagggcagaagaagaggcccccggcgggagagcaagccagaggagcccccaccacccaagaagccagccctggacaagggcctgggcaccggccagggcgctgtgtctggcccccccaggaagcccccaggcaccgtggccggcacagcccggggccctgagggcggcagcacagcccaggtgcctgcccccacagccagccccccacctgagggccctgtgctgaccttccagagcgagaagatgaagggcatgaaggagctgctggtggccaccaagatcaacagcagcgccatcaagctgcagctgacagcccagagccaggtgcagatgaagaagcagaaggtgtccacccccagcgactacaccctgtccttcctgaagaggcagaggaagggcctgtag

SEQ ID NO: 20585 - DNA, 1728 bp, synthetic construct
  misc_feature 1..1728: note = Description of Artificial Sequence: Synthetic coding sequence
  source 1..1728: mol_type = other DNA
atgggcctgaaggccgcccagaagaccctcttccccctgcggagcattgatgatgtggtgcggctgtttgctgctgagctgggccgggaggagccagacctggtgctgctgagcctggtgctgggctttgtggagcacttcctggccgtgaacagagtcatccccaccaacgtgcctgagctgaccttccagcccagccctgccccagaccccccaggcggcctgacctacttccctgtggccgacctgagcatcatcgccgccctgtatgcccgcttcaccgcccagatcagaggagctgtggacctgagcctgtacccccgggagggcggcgtgagcagccgggagctggtgaagaaggtgtctgatgtgatctggaacagcctgagccgcagctacttcaaggaccgggcccacatccagagcctcttctccttcatcaccggcaccaagctggacagcagtggagtggcctttgctgtggtgggcgcctgccaggccctgggcctgagagatgtgcacctggccctgtctgaagatcatgcctggagctggctgtacctgaagggcagctacatgagatgtgacaggaagatggaggtggccttcatggtgtgtgccatcaaccccagcattgacctgcacacagacagcctggagctgctgcagctgcagcagaagctgctgtggctgctgtatgacctgggccacctggagcgctaccccatggccctgggcaacctggccgacctggaggagctggagcccaccccaggccgcccagaccccctgaccctgtaccacaagggcatcgccagcgccaagacctactacagagatgagcacatctacccctacatgtacctggccggctaccactgcaggaacagaaatgtgcgggaggccctgcaggcctgggccgacacagccaccgtcatccaggactacaactactgcagagaagatgaggagatctacaaggagttctttgaggtggccaatgatgtgatccccaacctgctgaaggaggccgccagcctgctggaggccggggaggagaggcctggagagcagagccagggcacccagagccagggcagcgccctgcaggaccctgaatgttttgcccacctgctgcgcttctatgatggcatctgcaagtgggaggagggcagccccacccctgtgctgcacgtgggctgggccaccttcctggtgcagagcctgggccgctttgagggccaggtgcggcagaaggtgcgcatcgtgtcccgggaggccgaggccgctgaggccgaggagccctggggcgaggaggcccgggagggcagaagaagaggcccccggcgggagagcaagccagaggagcccccaccacccaagaagccagccctggacaagggcctgggcaccggccagggcgctgtgtctggcccccccaggaagcccccaggcaccgtggccggcacagcccggggccctgagggcggcagcacagcccaggtgcctgcccccacagccagccccccacctgagggccctgtgctgaccttccagagcgagaagatgaagggcatgaaggagctgctggtggccaccaagatcaacagcagcgccatcaagctgcagctgacagcccagagccaggtgcagatgaagaagcagaaggtgtccacccccagcgactacaccctgtccttcctgaagaggcagaggaagggcctgtag

SEQ ID NO: 20586 - DNA, 1833 bp, synthetic construct; identical to SEQ ID NO: 20580
  misc_feature 1..1833: note = Description of Artificial Sequence: Synthetic coding sequence
  source 1..1833: mol_type = other DNA

SEQ ID NO: 20587 - DNA, 1848 bp, synthetic construct; identical to SEQ ID NO: 20582
  misc_feature 1..1848: note = Description of Artificial Sequence: Synthetic coding sequence
  source 1..1848: mol_type = other DNA

SEQ ID NO: 20588 - DNA, 1848 bp, synthetic construct; identical to SEQ ID NO: 20582
  misc_feature 1..1848: note = Description of Artificial Sequence: Synthetic coding sequence
  source 1..1848: mol_type = other DNA

SEQ ID NO: 20589 - DNA, 786 bp, synthetic construct
  misc_feature 1..786: note = Description of Artificial Sequence: Synthetic coding sequence
  source 1..786: mol_type = other DNA
atgggcctgaaggccgcccagaagaccctcttccccctgcggagcattgatgatgtggtgcggctgtttgctgctgagctgggccgggaggagccagacctggtgctgctgagcctggtgctgggctttgtggagcacttcctggccgtgaacagagtcatccccaccaacgtgcctgagctgaccttccagcccagccctgccccagaccccccaggcggcctgacctacttccctgtggccgacctgagcatcatcgccgccctgtatgcccgcttcaccgcccagatcagaggagctgtggacctgagcctgtacccccgggagggcggcgtgagcagccgggagctggtgaagaaggtgtctgatgtgatctggaacagcctgagccgcagctacttcaaggaccgggcccacatccagagcctcttctccttcatcaccggcaccaagctggacagcagtggagtggcctttgctgtggtgggcgcctgccaggccctgggcctgagagatgtgcacctggccctgtctgaagatcatgcctgggtggtgtttggccccaatggagagcagacagctgaggtgacctggcatggaaaaggaaatgaagatcggcggggccagacagtgaatgccggcgtggccgagaggtcctggctgtacctgaagggcagctacatgagatgtgacaggaagatggaggtggccttcatggtgtgtgccatcaaccccagcattgacctgcacacagacagcctggagctgctgcagctgcagcagtag

SEQ ID NO: 20590 - DNA, 441 bp, synthetic construct
  misc_feature 1..441: note = Description of Artificial Sequence: Synthetic coding sequence
  source 1..441: mol_type = other DNA
atgggcctgaaggccgcccagaagaccctcttccccctgcggagcattgatgatgtggtgcggctgtttgctgctgagctgggccgggaggagccagacctggtgctgctgagcctggtgctgggctttgtggagcacttcctggccgtgaacagagtcatccccaccaacgtgcctgagctgaccttccagcccagccctgccccagaccccccaggcggcctgacctacttccctgtggccgacctgagcatcatcgccgccctgtatgcccgcttcaccgcccagatcagaggagctgtggacctgagcctgtacccccgggagggcggcgtgagcagccgggagctggtgaagaaggtgtctgatgtgatctggaacagcctgagccgcagctacttcaaggaccgggcccacatccagagcctcttctccttctag

SEQ ID NO: 20591 - DNA, 441 bp, synthetic construct; identical to SEQ ID NO: 20590
  misc_feature 1..441: note = Description of Artificial Sequence: Synthetic coding sequence
  source 1..441: mol_type = other DNA

SEQ ID NO: 20592 - DNA, 1041 bp, synthetic construct
  misc_feature 1..1041: note = Description of Artificial Sequence: Synthetic coding sequence
  source 1..1041: mol_type = other DNA
atgggcctgaaggccgcccagaagaccctcttccccctgcggagcattgatgatgtggtgcggctgtttgctgctgagctgggccgggaggagccagacctggtgctgctgagcctggtgctgggctttgtggagcacttcctggccgtgaacagagtcatccccaccaacgtgcctgagctgaccttccagcccagccctgccccagaccccccaggcggcctgacctacttccctgtggccgacctgagcatcatcgccgccctgtatgcccgcttcaccgcccagatcagaggagctgtggacctgagcctgtacccccgggagggcggcgtgagcagccgggagctggtgaagaaggtgtctgatgtgatctggaacagcctgagccgcagctacttcaaggaccgggcccacatccagagcctcttctccttcatcaccggcaccaagctggacagcagtggagtggcctttgctgtggtgggcgcctgccaggccctgggcctgagagatgtgcacctggccctgtctgaagatcatgcctgggtggtgtttggccccaatggagagcagacagctgaggtgacctggcatggaaaaggaaatgaagatcggcggggccagacagtgaatgccggcgtggccgagaggtcctggctgtacctgaagggcagctacatgagatgtgacaggaagatggaggtggccttcatggtgtgtgccatcaaccccagcattgacctgcacacagacagcctggagctgctgcagctgcagcagaagctgctgtggctgctgtatgacctgggccacctggagcgctaccccatggccctgggcaacctggccgacctggaggagctggagcccaccccaggccgcccagaccccctgaccctgtaccacaagggcatcgccagcgccaagacctactacagagatgagcacatctacccctacatgtacctggccggctaccactgcaggaacagaaatgtgcgggaggccctgcaggcctgggccgacacagccacctag

SEQ ID NO: 20593 - DNA, 1848 bp, synthetic construct; identical to SEQ ID NO: 20582
  misc_feature 1..1848: note = Description of Artificial Sequence: Synthetic coding sequence
  source 1..1848: mol_type = other DNA

SEQ ID NO: 20594 - DNA, 846 bp, synthetic construct
  misc_feature 1..846: note = Description of Artificial Sequence: Synthetic coding sequence
  source 1..846: mol_type = other DNA
atgggcctgaaggccgcccagaagaccctcttccccctgcggagcattgatgatgtggtgcggctgtttgctgctgagctgggccgggaggagccagacctggtgctgctgagcctggtgctgggctttgtggagcacttcctggccgtgaacagagtcatccccaccaacgtgcctgagctgaccttccagcccagccctgccccagaccccccaggcggcctgacctacttccctgtggccgacctgagcatcatcgccgccctgtatgcccgcttcaccgcccagatcagaggagctgtggacctgagcctgtacccccgggagggcggcgtgagcagccgggagctggtgaagaaggtgtctgatgtgatctggaacagcctgagccgcagctacttcaaggaccgggcccacatccagagcctcttctccttcatcaccggcaccaagctggacagcagtggagtggcctttgctgtggtgggcgcctgccaggccctgggcctgagagatgtgcacctggccctgtctgaagatcatgcctgggtggtgtttggccccaatggagagcagacagctgaggtgacctggcatggaaaaggaaatgaagatcggcggggccagacagtgaatgccggcgtggccgagaggtcctggctgtacctgaagggcagctacatgagatgtgacaggaagatggaggtggccttcatggtgtgtgccatcaaccccagcattgacctgcacacagacagcctggagctgctgcagctgcagcagaagctgctgtggctgctgtatgacctgggccacctggagcgctaccccatggccctgggctag

SEQ ID NO: 20595 - DNA, 1656 bp, synthetic construct
  misc_feature 1..1656: note = Description of Artificial Sequence: Synthetic coding sequence
  source 1..1656: mol_type = other DNA
atggccgcccctgtgcggctgggcaggaagaggcccctgcctgcctgccccaaccccctgtttgtgcgctggctgacagagtggagagatgaggccaccaggagcagaagaaggaccaggtttgtgttccagaaggccctgcggagcctgcggcgctaccccctgcccctgcggagcggcaaggaggccaagatcctgcagcactttggagatggcctgtgcaggatgctggatgagcggctgcagaggcacaggaccagcggcggggaccacgccccagacagccccagcggggagaacagccctgccccccagggccgcctggccgaggtgcaggacagctccatgcctgtgcctgcccagcccaaggccggcggcagcggcagctactggccagcccggcacagcggggcccgggtcatcctgctggtgctgtaccgggagcacctgaaccccaacggccaccacttcctgaccaaggaggagctgctgcagagatgtgcccagaagagcccccgggtggcccctggcagcgcccggccctggccagccctgcggagcctgctgcacaggaacctggtgctgcggacccaccagcctgcccgctacagcctgaccccagagggcctggagctggcccagaagctggccgagagcgagggcctgagcctgctgaatgtgggcatcggccccaaggagcccccaggagaggagacagctgtgcctggggccgccagcgctgagctggccagcgaggccggcgtgcagcagcagcccctggagctgcggcctggagagtacagagtgctgctgtgtgtggacattggagagacccggggcggcggccacaggcctgagctgctgcgggagctgcagaggctgcacgtgacccacacagtgaggaagctgcacgtgggggactttgtgtgggtggcccaggagaccaacccccgggaccctgccaaccctggagagctggtgctggaccacatcgtggagaggaagaggctggatgacctgtgcagcagcatcattgatggccgcttccgggagcagaagttccggctgaagagatgtggcctggagaggagagtgtacctggtggaggagcacggctctgtgcacaacctgagcctgcctgagagcaccctgctgcaggccgtgaccaacacccaggtgattgatggcttctttgtgaagaggacagctgacatcaaggagagcgctgcctacctggccctgctgacccggggcctgcagaggctgtaccagggccacaccctgcggagccggccctggggcaccccaggcaaccctgagagcggggccatgaccagccccaaccccctgtgcagcctgctgaccttcagtgacttcaatgctggggccatcaagaacaaggcccagagcgtgcgggaggtgtttgcccggcagctgatgcaggtgcggggcgtgtctggagagaaggctgctgccctggtggaccgctacagcaccccagccagcctgctggccgcctatgatgcctgtgccacccccaaggagcaggagaccctgctgagcaccatcaagtgtggccgcctgcagaggaacctgggccctgccctgagcaggaccctgagccagctgtactgcagctatggccccctgacctag

SEQ ID NO: 20596 - DNA, 1656 bp, synthetic construct; identical to SEQ ID NO: 20595
  misc_feature 1..1656: note = Description of Artificial Sequence: Synthetic coding sequence
  source 1..1656: mol_type = other DNA

SEQ ID NO: 20597 - DNA, 2490 bp, synthetic construct
  misc_feature 1..2490: note = Description of Artificial Sequence: Synthetic coding sequence
  source 1..2490: mol_type = other DNA
atgaacagcggcgtggccatgaagtatggaaatgacagcagcgctgagctgtctgagctgcacagcgctgccctggccagcctgaagggggacatcgtggagctgaacaagaggctgcagcagacagagcgggagcgggacctgctggagaagaagctggccaaggcccagtgtgagcagagccacctgatgagggagcatgaagatgtgcaggagaggaccaccctgcgctatgaggagcgcatcacagagctgcacagcgtgattgctgagctgaacaagaagattgaccggctgcagggcaccaccatccgggaggaggatgagtacagcgagctgcggtctgagctgagccagagccagcacgaggtgaatgaagacagccgctccatggaccaggaccagacctctgtgtccatccctgagaaccagagcaccatggtgacagctgacatggacaactgcagcgacctgaacagcgagctgcagagggtgctgaccggcctggagaatgtggtgtgtggcaggaagaagagcagctgcagcctgtctgtggccgaggtggacaagcacatcgagcagctgaccacagccagcgagcactgtgacctggccatcaagacagtggaggagattgagggcgtgctgggccgggacctgtaccccaacctggccgaggagaggagccgctgggagaaggagctggccggcctgcgggaggagaatgaaagcctgacagccatgctgtgcagcaaggaggaggagctgaacagaaccaaggccaccatgaatgccatccgggaggagcgggaccggctgcggaggagagtgcgggagctgcagacccggctgcagagcgtgcaggccaccggccccagcagccctggccgcctgaccagcaccaaccggcccatcaaccccagcactggagagctgagcaccagcagcagcagcaatgacatccccatcgccaagattgctgagcgggtgaagctgagcaagaccaggtctgagagcagcagcagtgacaggcctgtgctgggcagcgagatcagcagcattggagtgagcagctctgtggccgagcacctggcccacagcctgcaggactgcagcaacatccaggagatcttccagaccctgtacagccacggcagcgccatcagcgagagcaagatccgggagtttgaggtggagacagagcggctgaacagcagaattgagcacctgaagagccagaatgacctgctgaccatcaccctggaggagtgcaagagcaatgctgagaggatgtccatgctggtgggcaagtatgagagcaatgccacagccctgcggctggccctgcagtacagcgagcagtgcatcgaggcctatgagctgctgctggccctggccgagagcgagcagagcctcatcctgggccagttccgggccgccggcgtgggcagcagccctggggaccagagcggagatgagaacatcacccagatgctgaagagggcccatgactgcaggaagacagcagaaaatgctgccaaggccctgctgatgaagctggatggcagctgtggcggggcctttgctgtggccggctgcagcgtgcagccctgggagagcctgagcagcaacagccacaccagcaccaccagcagcacagccagcagctgtgacacagagttcaccaaggaggatgagcagaggctgaaggactacatccagcagctgaagaatgacagagctgctgtgaagctgaccatgctggagctggagagcatccacatcgaccccctgtcctatgatgtgaagcccaggggggacagccagaggctggacctggagaatgctgtgctgatgcaggagctgatggccatgaaggaggagatggccgagctgaaggcccagctgtacctgctggagaaggagaagaaggccctggagctgaagctgagcacccgggaggcccaggagcaggcctacctggtgcacatcgagcacctgaagtctgaggtggaggagcagaaggagcagaggatgaggagcctgagcagcaccagcagcggcagcaaggacaagccaggcaaggaatgtgctgatgctgccagccctgccctgagcctggccgagctgcggaccacctgcagtgaaaatgagctggccgctgagttcaccaatgccatccggcgggagaagaagctgaaggcccgggtgcaggagctggtgtctgccctggagcggctgaccaagagcagcgagatccgccaccagcagagcgctgagtttgtgaatgacctgaagagggccaacagcaacctggtggccgcctatgagaaggccaagaagaagcaccagaacaagctgaagaagctggagagccagatgatggccatggtggagagacatgagacccaggtgaggatgctgaagcagagaattgccctgctggaggaggagaacagccggccccacaccaatgagaccagcctgtag

SEQ ID NO: 20598 - DNA, 2133 bp, synthetic construct
  misc_feature 1..2133: note = Description of Artificial Sequence: Synthetic coding sequence
  source 1..2133: mol_type = other DNA
atgaagctggtgttcctggtgctgctcttcctgggcgccctgggcctgtgcctggccggcagaagaagatctgtgcagtggtgtgctgtgtcccagcctgaggccaccaagtgcttccagtggcagaggaacatgaggaaggtgcggggcccccctgtgtcctgcatcaagagggacagccccatccagtgcatccaggccatcgccgagaacagagcagatgctgtgaccctggatggcggcttcatctatgaggccggcctggccccctacaagctgcggcctgtggccgctgaggtgtatggaacagagcggcagcccaggacccactactatgctgtggccgtggtgaagaagggcggcagcttccagctgaatgagctgcagggcctgaagagctgccacacaggcctgcggaggacagctggctggaatgtgcccatcggcaccctgcggcccttcctgaactggacaggccccccagagcccatcgaggccgctgtggcccgcttcttcagcgccagctgtgtgcctggagctgacaagggccagttccccaacctgtgccgcctgtgtgccggcactggagaaaataaatgtgccttcagcagccaggagccctacttctcctacagcggggccttcaagtgcctgagagatggagctggagatgtggccttcatccgggagagcacagtgtttgaggacctgagtgatgaagctgagagagatgaatatgagctgctgtgcccagacaacaccaggaagcctgtggacaagttcaaggactgccacctggcccgggtgcccagccatgctgtggtggcccggtctgtgaatggcaaggaggatgccatctggaacctgctgcggcaggcccaggagaagtttgggaaggacaagagccccaagttccagctgtttggcagccccagcggccagaaggacctgctcttcaaggacagcgccatcggcttcagccgggtgcccccaagaattgattctggcctgtacctgggcagcggctacttcaccgccatccagaacctgaggaagtctgaggaggaggtggccgcccggcgggcccgggtggtgtggtgtgctgtgggggagcaggagctgaggaagtgcaaccagtggagcggcctgtctgagggctctgtgacctgcagcagcgccagcaccacagaggactgcatcgccctggtgctgaagggggaggctgatgccatgagcctggatggcggctacgtgtacacagctggaaaatgtggcctggtgcctgtgctggccgagaactacaagagccagcagagcagtgaccctgaccccaactgtgtggacaggcctgtggagggctacctggccgtggccgtggtgagaagaagtgacaccagcctgacctggaacagcgtgaagggcaagaagagctgccacacagctgtggacagaacagctggctggaacatccccatgggcctgctcttcaaccagacaggcagctgcaagtttgatgagtacttcagccagagctgtgcccctggcagtgaccccaggagcaacctgtgtgccctgtgcattggagatgagcagggagaaaataaatgtgtgcccaacagcaatgaaagatactacggctacaccggggccttccgctgcctggccgagaatgctggagatgtggcctttgtgaaggatgtgacagtgctgcagaacacagatggcaacaacaatgaggcctgggccaaggacctgaagctggccgactttgccctgctgtgcctggatggcaagaggaagcctgtgacagaggcccggagctgccacctggccatggcccccaaccacgctgtggtgtccaggatggacaaggtggagcggctgaagcaggtgctgctgcaccagcaggccaagtttggaagaaatggaagtgactgcccagacaagttctgcctcttccagagcgagaccaagaacctgctcttcaatgacaacacagaatgtctggcccggctgcacggcaagaccacctatgagaagtacctgggcccccagtatgtggccggcatcaccaacctgaagaagtgcagcaccagccccctgctggaggcctgtgagttcctgaggaagtag

SEQ ID NO: 20599 - DNA, 1656 bp, synthetic construct
  misc_feature 1..1656: note = Description of Artificial Sequence: Synthetic coding sequence
  source 1..1656: mol_type = other DNA
aagcccctgctgaaccacgtgctggccatcaagggccccaggagccgctggaggaccttctacaacatcgccaccaggaggaaggccctgaagaaccccagcgaggagtatggcaagatcctggaggtggtgggccgctacagcgtgcacaatgccggcatctccttctctgtgaagaagcagggcgagaccgtggctgatgtgaggaccctgcccaatgccagcacagtggacaacatccgcagcatctttggaaatgctgtgtcccgggagctgattgaaattggctgtgaggacaagaccctggccttcaagatgaatggctacatcagcaatgccaactacagcgtgaagaagtgcatcttcctgctcttcatcaaccaccggctggtggagagcaccagcctgaggaaggccatcgagaccgtgtatgctgcctacctgcccaagaacacccaccccttcctgtacctgagcctggagatcagcccccagaatgtggatgtgaatgtgcaccccaccaagcatgaggtgcacttcctgcacgaggagagcatcctggagcgggtgcagcagcacatcgagagcaagctgctgggcagcaacagcagcaggatgtacttcacccagaccctgctgcccggcctggccggccccagcggggagatggtgaagagcaccaccagcctgaccagcagcagcaccagcggcagcagtgacaaggtgtatgcccaccagatggtgaggacagacagccgggagcagaagctggatgccttcctgcagcccctgagcaagcccctgagcagccagccccaggccatcgtgacagaggacaagacagacatcagcagcggccgggcccggcagcaggatgaggagatgctggagctgcctgccccagctgaggtggccgccaagaaccagagcctggagggggacaccaccaagggcaccagcgagatgtctgagaagaggggccccaccagcagcaaccccaggaagaggcacagagaagattctgatgtggagatggtggaggatgacagcaggaaggagatgacagctgcctgcaccccaagaagacgcatcatcaacctgacctctgtgctgagcctgcaggaggagatcaatgagcagggccacgaggtgctgcgggagatgctgcacaaccacagctttgtgggctgtgtgaacccccagtgggccctggcccagcaccagaccaagctgtacctgctgaacaccaccaagctgtctgaggagctgttctaccagatcctgatctatgactttgccaactttggagtgctgcggctgtctgagcccgcccccctgtttgacctggccatgctggccctggacagccctgagagcggctggacagaggaggatggccccaaggagggcctggccgagtacatcgtggagttcctgaagaagaaggccgagatgctggccgactacttcagcctggagattgatgaaagtgaggtgcccggcagcatccccaacagctggaagtggacagtggagcacatcgtgtacaaggccctgcggagccacatcctgccccccaagcacttcacagaagatggcaacatcctgcagctggccaacctgcctgacctgtacaaggtgtttgagcgctgctag

SEQ ID NO: 20600 - DNA, 351 bp, synthetic construct
  misc_feature 1..351: note = Description of Artificial Sequence: Synthetic coding sequence
  source 1..351: mol_type = other DNA
atgtctgagaagaggggccccaccagcagcaaccccaggaagaggcaccgggaggacagtgatgtggagatggtggaggatgacagcaggaaggagatgacagctgcctgcaccccccggcggcgcatcatcaacctgacctctgtgctgagcctgcaggaggagatcaatgagcagggccacgaggtgctgcgggagatgctgcacaaccacagctttgtgggctgtgtgaacccccagtgggccctggcccagcaccagaccaagctgtacctgctgaacaccaccaagctgcgggtgaagtgcctggcccccttccagaccccaggcagcggcctgtggaacacctag

SEQ ID NO: 20601 - DNA, 525 bp, synthetic construct
  misc_feature 1..525: note = Description of Artificial Sequence: Synthetic coding sequence
  source 1..525: mol_type = other DNA
atgtctgagaagaggggccccaccagcagcaaccccaggaagaggcaccgggaggacagtgatgtggagatggtggaggatgacagcaggaaggagatgacagctgcctgcaccccccggcggcgcatcatcaacctgacctctgtgctgagcctgcaggaggagatcaatgagcagggccacgaggtgctgcgggagatgctgcacaaccacagctttgtgggctgtgtgaacccccagccctggcacagcatcaagcccagctacaccttcagcaccccacccagcttcagcgaggagctgttctaccagatcctgatctatgactttgccaactttggagtgctgcggctgagcagcgaggtgcccggcagcatccccaacagctggaagtggacagtggagcacatcgtgtacaaggccctgcggagccacatcctgccccccaagcacttcacagaagatggcaacatcctgcagctggccaacctgcctgacctgtacaaggtgtttgagcgctgctag

SEQ ID NO: 20602 - DNA, 1977 bp, synthetic construct
  misc_feature 1..1977: note = Description of Artificial Sequence: Synthetic coding sequence
  source 1..1977: mol_type = other DNA
atggcctttgaggccctggccagcatcagccacgtggcccacgtgaccatcaccaccaagacagcagatggaaaatgtgcctaccgggccagctacagtgatggcaagctgaaggccccacccaagccctgtgccggcaaccagggcacccagatcaccgtggaggacctcttctacaacatcgccaccaggaggaaggccctgaagaaccccagcgaggagtatggcaagatcctggaggtggtgggccgctacagcgtgcacaatgccggcatctccttctctgtgaagaagcagggcgagaccgtggctgatgtgaggaccctgcccaatgccagcacagtggacaacatccgcagcatctttggaaatgctgtgtcccgggagctgattgaaattggctgtgaggacaagaccctggccttcaagatgaatggctacatcagcaatgccaactacagcgtgaagaagtgcatcttcctgctcttcatcaaccaccggctggtggagagcaccagcctgaggaaggccatcgagaccgtgtatgctgcctacctgcccaagaacacccaccccttcctgtacctgagcctggagatcagcccccagaatgtggatgtgaatgtgcaccccaccaagcatgaggtgcacttcctgcacgaggagagcatcctggagcgggtgcagcagcacatcgagagcaagctgctgggcagcaacagcagcaggatgtacttcacccagaccctgctgcccggcctggccggccccagcggggagatggtgaagagcaccaccagcctgaccagcagcagcaccagcggcagcagtgacaaggtgtatgcccaccagatggtgaggacagacagccgggagcagaagctggatgccttcctgcagcccctgagcaagcccctgagcagccagccccaggccatcgtgacagaggacaagacagacatcagcagcggccgggcccggcagcaggatgaggagatgctggagctgcctgccccagctgaggtggccgccaagaaccagagcctggagggggacaccaccaagggcaccagcgagatgtctgagaagaggggccccaccagcagcaaccccaggaagaggcacagagaagattctgatgtggagatggtggaggatgacagcaggaaggagatgacagctgcctgcaccccaagaagacgcatcatcaacctgacctctgtgctgagcctgcaggaggagatcaatgagcagggccacgaggtgctgcgggagatgctgcacaaccacagctttgtgggctgtgtgaacccccagtgggccctggcccagcaccagaccaagctgtacctgctgaacaccaccaagctgtctgaggagctgttctaccagatcctgatctatgactttgccaactttggagtgctgcggctgtctgagcccgcccccctgtttgacctggccatgctggccctggacagccctgagagcggctggacagaggaggatggccccaaggagggcctggccgagtacatcgtggagttcctgaagaagaaggccgagatgctggccgactacttcagcctggagattgatgaggagggcaacctgattggcctgcccctgctgattgacaactacgtgccccccctggagggcctgcccatcttcatcctgcggctggccacagaggtgaactgggatgaggagaaggaatgttttgagagcctgagcaaagaatgtgccatgttctacagcatcaggaagcagtacatcagcgaggagagcaccctgagcggccagcagagcgaggtgcccggcagcatccccaacagctggaagtggacagtggagcacatcgtgtacaaggccctgcggagccacatcctgccccccaagcacttcacagaagatggcaacatcctgcagctggccaacctgcctgacctgtacaaggtgtttgagcgctgctag

SEQ ID NO: 20603 - DNA, 960 bp, synthetic construct
  misc_feature 1..960: note = Description of Artificial Sequence: Synthetic coding sequence
  source 1..960: mol_type = other DNA
atgattgagaactgcctggatgccaagagcaccagcatccaggtgattgtgaaggagggcggcctgaagctgatccagatccaggacaatggcaccggcatcagaaaagaagacctggacatcgtgtgtgagcgcttcaccaccagcaagctgcagagctttgaggacctggccagcatcagcacctacggcttccggggggaggccctggccagcatcagccacgtggcccacgtgaccatcaccaccaagacagcagatggaaaatgtgcctaccgggccagctacagtgatggcaagctgaaggccccacccaagccctgtgccggcaaccagggcacccagatcaccgtggaggacctcttctacaacatcgccaccaggaggaaggccctgaagaaccccagcgaggagtatggcaagatcctggaggtggtgggccgctacagcgtgcacaatgccggcatctccttctctgtgaagaagcagggcgagaccgtggctgatgtgaggaccctgcccaatgccagcacagtggacaacatccgcagcatctttggaaatgctgtgtcccgggagctgattgaaattggctgtgaggacaagaccctggccttcaagatgaatggctacatcagcaatgccaactacagcgtgaagaagtgcatcttcctgctcttcatcaaccaccggctggtggagagcaccagcctgaggaaggccatcgagaccgtgtatgctgcctacctgcccaagaacacccaccccttcctgtacctgagcctggagatcagcccccagaatgtggatgtgaatgtgcaccccaccaagcatgaggtgcacttcctgcacgaggagagcatcctggagcgggtgcagcagcacatcgagagcaagctgctgggcagcaacagcagcaggatgtacttcacccagaaggagaccagcggccgcttctag

SEQ ID NO: 20604 - DNA, 1548 bp, synthetic construct
  misc_feature 1..1548: note = Description of Artificial Sequence: Synthetic coding sequence
  source 1..1548: mol_type = other DNA
atgaatggctacatcagcaatgccaactacagcgtgaagaagtgcatcttcctgctcttcatcaaccaccggctggtggagagcaccagcctgaggaaggccattgaaacagtgtatgctgcctacctgcccaagaacacccaccccttcctgtacctgagcctggagatcagcccccagaatgtggatgtgaatgtgcaccccaccaagcatgaggtgcacttcctgcacgaggagagcatcctggagcgggtgcagcagcacatcgagagcaagctgctgggcagcaacagcagcaggatgtacttcacccagaccctgctgcccggcctggccggccccagcggggagatggtgaagagcaccaccagcctgaccagcagcagcaccagcggcagcagtgacaaggtgtatgcccaccagatggtgaggacagacagccgggagcagaagctggatgccttcctgcagcccctgagcaagcccctgagcagccagccccaggccatcgtgacagaggacaagacagacatcagcagcggccgggcccggcagcaggatgaggagatgctggagctgcctgccccagctgaggtggccgccaagaaccagagcctggagggggacaccaccaagggcaccagcgagatgtctgagaagaggggccccaccagcagcaaccccaggaagaggcaccgggaggacagtgatgtggagatggtggaggatgacagcaggaaggagatgacagctgcctgcaccccccggcggcgcatcatcaacctgacctctgtgctgagcctgcaggaggagatcaatgagcagggccacgaggtgctgcgggagatgctgcacaaccacagctttgtgggctgtgtgaacccccagtgggccctggcccagcaccagaccaagctgtacctgctgaacaccaccaagctgtctgaggagctgttctaccagatcctgatctatgactttgccaactttggagtgctgcggctgtctgagcccgcccccctgtttgacctggccatgctggccctggacagccctgagagcggctggacagaagaagatggccccaaggagggcctggccgagtacatcgtggagttcctgaagaagaaggccgagatgctggccgactacttcagcctggagattgatgaggagggcaacctgattggcctgcccctgctgattgacaactacgtgccccccctggagggcctgcccatcttcatcctgcggctggccacagaggtgaactgggatgaggagaaggagtgctttgagagcctgagcaaagaatgtgccatgttctacagcatcaggaagcagtacatcagcgaggagagcaccctgagcggccagcagagcgaggtgcccggcagcatccccaacagctggaagtggacagtggagcacatcgtgtacaaggccctgcggagccacatcctgccccccaagcacttcacagaagatggcaacatcctgcagctggccaacctgcctgacctgtacaaggtgtttgagcgctgctag

SEQ ID NO: 20605 - DNA, 2040 bp, synthetic construct
  misc_feature 1..2040: note = Description of Artificial Sequence: Synthetic coding sequence
  source 1..2040: mol_type = other DNA
tgaagactggatgagaccgtggtgaacagaattgctgctggggaggtgatccagaggcctgccaatgccatcaaggagatgattgagaactgcctggatgccaagagcaccagcatccaggtgattgtgaaggagggcggcctgaagctgatccagatccaggacaatggcaccggcatcagaaaagaagacctggacatcgtgtgtgagcgcttcaccaccagcaagctgcagagctttgaggacctggccagcatcagcacctacggcttccggggggaggccctggccagcatcagccacgtggcccacgtgaccatcaccaccaagacagcagatggaaaatgtgcctaccgggccagctacagtgatggcaagctgaaggccccacccaagccctgtgccggcaaccagggcacccagatcaccgtggaggacctcttctacaacatcgccaccaggaggaaggccctgaagaaccccagcgaggagtatggcaagatcctggaggtggtgggccgctacagcgtgcacaatgccggcatctccttctctgtgaagaagcagggcgagaccgtggctgatgtgaggaccctgcccaatgccagcacagtggacaacatccgcagcatctttggaaatgctgtgtcccgggagctgattgaaattggctgtgaggacaagaccctggccttcaagatgaatggctacatcagcaatgccaactacagcgtgaagaagtgcatcttcctgctcttcatcaaccaccggctggtggagagcaccagcctgaggaaggccatcgagaccgtgtatgctgcctacctgcccaagaacacccaccccttcctgtacctgagcctggagatcagcccccagaatgtggatgtgaatgtgcaccccaccaagcatgaggtgcacttcctgcacgaggagagcatcctggagcgggtgcagcagcacatcgagagcaagctgctgggcagcaacagcagcaggatgtacttcacccagaccctgctgcccggcctggccggccccagcggggagatggtgaagagcaccaccagcctgaccagcagcagcaccagcggcagcagtgacaaggtgtatgcccaccagatggtgaggacagacagccgggagcagaagctggatgccttcctgcagcccctgagcaagcccctgagcagccagccccaggccatcgtgacagaggacaagacagacatcagcagcggccgggcccggcagcaggatgaggagatgctggagctgcctgccccagctgaggtggccgccaagaaccagagcctggagggggacaccaccaagggcaccagcgagatgtctgagaagaggggccccaccagcagcaaccccaggaagaggcacagagaagattctgatgtggagatggtggaggatgacagcaggaaggagatgacagctgcctgcaccccaagaagacgcatcatcaacctgacctctgtgctgagcctgcaggaggagatcaatgagcagggccacgaggtgctgcgggagatgctgcacaaccacagctttgtgggctgtgtgaacccccagtgggccctggcccagcaccagaccaagctgtacctgctgaacaccaccaagctgtctgaggagctgttctaccagatcctgatctatgactttgccaactttggagtgctgcggctgtctgagcccgcccccctgtttgacctggccatgctggccctggacagccctgagagcggctggacagaggaggatggccccaaggagggcctggccgagtacatcgtggagttcctgaagaagaaggccgagatgctggccgactacttcagcctggagattgatgaaagtgaggtgcccggcagcatccccaacagctggaagtggacagtggagcacatcgtgtacaaggccctgcggagccacatcctgccccccaagcacttcacagaagatggcaacatcctgcagctggccaacctgcctgacctgtacaaggtgtttgagcgctgctag

SEQ ID NO: 20606 - DNA, 1548 bp, synthetic construct; identical to SEQ ID NO: 20604
  misc_feature 1..1548: note = Description of Artificial Sequence: Synthetic coding sequence
  source 1..1548: mol_type = other DNA

SEQ ID NO: 20607 - DNA, 1383 bp, synthetic construct
  misc_feature 1..1383: note = Description of Artificial Sequence: Synthetic coding sequence
  source 1..1383: mol_type = other DNA
atgaatggctacatcagcaatgccaactacagcgtgaagaagtgcatcttcctgctcttcatcaaccaccggctggtggagagcaccagcctgaggaaggccattgaaacagtgtatgctgcctacctgcccaagaacacccaccccttcctgtacctgagcctggagatcagcccccagaatgtggatgtgaatgtgcaccccaccaagcatgaggtgcacttcctgcacgaggagagcatcctggagcgggtgcagcagcacatcgagagcaagctgctgggcagcaacagcagcaggatgtacttcacccagaccctgctgcccggcctggccggccccagcggggagatggtgaagagcaccaccagcctgaccagcagcagcaccagcggcagcagtgacaaggtgtatgcccaccagatggtgaggacagacagccgggagcagaagctggatgccttcctgcagcccctgagcaagcccctgagcagccagccccaggccatcgtgacagaggacaagacagacatcagcagcggccgggcccggcagcaggatgaggagatgctggagctgcctgccccagctgaggtggccgccaagaaccagagcctggagggggacaccaccaagggcaccagcgagatgtctgagaagaggggccccaccagcagcaaccccaggaagaggcaccgggaggacagtgatgtggagatggtggaggatgacagcaggaaggagatgacagctgcctgcaccccccggcggcgcatcatcaacctgacctctgtgctgagcctgcaggaggagatcaatgagcagggccacgaggtgctgcgggagatgctgcacaaccacagctttgtgggctgtgtgaacccccagtgggccctggcccagcaccagaccaagctgtacctgctgaacaccaccaagctgtctgaggagctgttctaccagatcctgatctatgactttgccaactttggagtgctgcggctgtctgagcccgcccccctgtttgacctggccatgctggccctggacagccctgagagcggctggacagaagaagatggccccaaggagggcctggccgagtacatcgtggagttcctgaagaagaaggccgagatgctggccgactacttcagcctggagattgatgaggagggcaacctgattggcctgcccctgctgattgacaactacgtgccccccctggagggcctgcccatcttcatcctgcggctggccacagaggtgaactgggatgaggagaaggagtgctttgagagcctgagcaaagaatgtgccatgttctacagcatcaggaagcagtacatcagcgaggagagcaccctgagcggccagcagtag

SEQ ID NO: 20608 - DNA, 843 bp, synthetic construct
  misc_feature 1..843: note = Description of Artificial Sequence: Synthetic coding sequence
  source 1..843: mol_type = other DNA
atgattgagaactgcctggatgccaagagcaccagcatccaggtgattgtgaaggagggcggcctgaagctgatccagatccaggacaatggcaccggcatcagaaaagaagacctggacatcgtgtgtgagcgcttcaccaccagcaagctgcagagctttgaggacctggccagcatcagcacctacggcttccggggggaggccctggccagcatcagccacgtggcccacgtgaccatcaccaccaagacagcagatggaaaatgtgcctaccgggccagctacagtgatggcaagctgaaggccccacccaagccctgtgccggcaaccagggcacccagatcaccgtggaggacctcttctacaacatcgccaccaggaggaaggccctgaagaaccccagcgaggagtatggcaagatcctggaggtggtgggccgctacagcgtgcacaatgccggcatctccttctctgtgaagaagcagggcgagaccgtggctgatgtgaggaccctgcccaatgccagcacagtggacaacatccgcagcatctttggaaatgctgtgtcccgggagctgattgaaattggctgtgaggacaagaccctggccttcaagatgaatggctacatcagcaatgccaactacagcgtgaagaagtgcatcttcctgctcttcatcaaccaccggctggtggagagcaccagcctgaggaaggccatcgagaccgtgtatgctgcctacctgcccaagaacacccaccccttcctgtacctgcggctgtgctaccaggacctgctggcccccctgggccgctggctgaacccccagcaggtgtag

SEQ ID NO: 20609 - DNA, 1548 bp, synthetic construct; identical to SEQ ID NO: 20604
  misc_feature 1..1548: note = Description of Artificial Sequence: Synthetic coding sequence
  source 1..1548: mol_type = other DNA

SEQ ID NO: 20610 - DNA, 4290 bp, synthetic construct
  misc_feature 1..4290: note = Description of Artificial Sequence: Synthetic coding sequence
  source 1..4290: mol_type = other DNA
atgatcaagtgcctgtctgtggaggtgcaggccaagctgcggagcggcctggccatcagcagcctgggccagtgtgtggaggagctggccctgaacagcattgatgctgaggccaagtgtgtggccgtgcgggtgaacatggagaccttccaggtgcaggtgattgacaatggatttggcatgggcagtgatgatgtggagaaggtgggcaaccgctacttcaccagcaagtgccacagcgtgcaggacctggagaacccccgcttctacggcttccggggggaggccctggccaacattgctgacatggccagcgctgtggagatcagcagcaagaagaacagaaccatgaagacctttgtgaagctgttccagagcggcaaggccctgaaggcctgtgaggctgatgtgacccgggccagcgctggcaccaccgtgacagtgtacaacctcttctaccagctgcctgtgcggaggaagtgcatggacccccggctggagtttgagaaggtgcggcagagaattgaggccctgagcctgatgcaccccagcatctccttcagcctgagaaatgatgtgtctggctccatggtgctgcagctgcccaagaccaaggatgtgtgcagccgcttctgccagatctacggcctgggcaagagccagaagctgcgggagatctccttcaagtacaaggagtttgagctgagcggctacatcagcagcgaggcccactacaacaagaacatgcagttcctgtttgtgaacaagaggctggtgctgcggaccaagctgcacaagctgattgacttcctgctgaggaaggagagcatcatctgcaagcccaagaatggccccaccagccggcagatgaacagcagcctgcggcacaggagcaccccagagctgtatggcatctacgtgatcaacgtgcagtgccagttctgtgaatatgatgtgtgcatggagcccgccaagaccctcatcgagttccagaactgggacaccctgctcttctgcatccaggagggcgtgaagatgttcctgaagcaggagaagctgtttgtggagctgagcggggaggacatcaaggagttctctgaagataatggcttcagcctgtttgatgccaccctgcagaagagggtgaccagtgatgagaggagcaacttccaggaggcctgcaacaacatcctggacagctatgagatgttcaacctgcagagcaaggctgtgaagaggaagaccacagcagaaaatgtgaacacccagagcagccgggacagcgaggccaccaggaagaacaccaatgatgccttcctgtacatctatgaaagtggcggccctggccacagcaagatgacagagcccagcctgcagaacaaggacagcagctgcagcgagagcaagatgctggagcaggagaccatcgtggccagcgaggccggagaaaatgagaagcacaagaagagcttcctggagcacagcagcctggagaacccctgtggcaccagcctggagatgttcctgagccccttccagaccccctgccactttgaggagagcggccaggacctggagatctggaaggagagcaccaccgtgaatggcatggccgccaacatcctgaagaacaaccgcatccagaaccagcccaagcgcttcaaggatgccacagaggtgggctgccagcccctgccctttgccaccaccctgtggggcgtgcacagcgcccagacagagaaggagaagaagaaggagagcagcaactgtggcagaagaaatgtgttctcctatggccgggtgaagctgtgcagcacaggcttcatcacccacgtggtgcagaatgagaagaccaagagcacagaaacagagcacagcttcaagaactacgtgcggcccggccccacccgggcccaggagaccttcggcaacagaaccaggcacagcgtggagaccccagacatcaaggacctggccagcaccctgagcaaggagagcggccagctgcccaacaagaagaactgcaggaccaacatctcctatggcctggagaatgagcccacagccacctacaccatgttttctgccttccaggagggcagcaagaagagccagacagactgcatcctgagtgacaccagccccagcttcccctggtaccgccacgtgtccaatgacagcaggaagacagacaagctgattggcttcagcaagcccatcgtgaggaagaagctgagcctgagcagccagctgggcagcctggagaagttcaagaggcagtatggcaaggtggagaaccccctggacacagaggtggaggagagcaatggagtgaccaccaacctgagcctgcaggtggagccagacatcctgctgaaggacaagaaccggctggagaacagtgatgtgtgcaagatcaccaccatggagcacagcgacagcgacagcagctgccagcctgccagccacatcctgaacagcgagaagttccccttcagcaaggatgaggactgcctggagcagcagatgcccagcctgcgggagagccccatgaccctgaaggagctgagcctcttcaacaggaagcccctggacctggagaagagcagcgagagcctggccagcaagctgagccggctgaagggcagcgagcgggagacccagaccatgggcatgatgagccgcttcaatgagctgcccaacagcgacagcagcaggaaggacagcaagctgtgcagcgtgctgacccaggacttctgcatgctgttcaacaacaagcatgagaagacagaaaatggagtcatccccaccagtgacagcgccacccaggacaacagcttcaacaagaacagcaagacccacagcaacagcaacaccacagagaactgtgtgatcagcgagacccccctggtgctgccctacaacaacagcaaggtgacaggcaaggacagtgatgtgctgatccgggccagcgagcagcagatcggcagcctggacagccccagcggcatgctgatgaaccctgtggaggatgccactggagaccagaatggcatctgcttccagagcgaggagagcaaggcccgggcctgcagcgagacagaggagagcaacacctgctgcagcgactggcagaggcactttgatgtggccctgggccgcatggtgtatgtgaacaagatgacaggcctgagcaccttcatcgcccccacagaggacatccaggccgcctgcaccaaggacctgaccaccgtggccgtggatgtggtgctggagaatggcagccagtaccgctgccagcccttcagaagtgacctggtgctgcccttcctgccccgggcccgggcagagaggacagtgatgaggcaggacaacagagacacagtggatgacacagtgtcctctgagagcctgcagagcctcttcagcgagtgggacaaccctgtgtttgcccgctacccagaggtggccgtggatgtgagcagcggccaggccgagagcctggccgtgaagatccacaacatcctgtacccctaccgcttcaccaagggcatgatccacagcatgcaggtgctgcagcaggtggacaacaagttcatcgcctgcctgatgagcaccaagacagaggagaatggagaggccgacagctatgagaagcagcaggcccagggcagcggcaggaagaagctgctgagcagcaccctcatcccccccctggagatcaccgtgacagaggagcagaggcggctgctgtggtgctaccacaagaacctggaggacctgggcctggagtttgtgtttcctgacaccagtgacagcctggtgctggtgggcaaggtgcccctgtgctttgtggagcgggaggccaatgagctgcggcggggccgcagcacagtgaccaagagcatcgtggaggagttcatccgggagcagctggagctgctgcagaccaccggcggcatccagggcaccctgcccctgactgtgcagaaggtgctggccagccaggcctgccacggggccatcaagttcaatgatggcctgagcctgcaggagagctgccgcctgattgaggccctgagcagctgccagctgcccttccagtgtgcccacggccggcccagcatgctgcccctggccgacatcgaccacctggagcaggagaagcagatcaagcccaacctgaccaagctgaggaagatggcccaggcctggaggctgtttgggaaggccgagtgtgacacccggcagagcctgcagcagagcatgccaccctgtgagcccccatag

SEQ ID NO: 20611 - DNA, 4362 bp, synthetic construct
  misc_feature 1..4362: note = Description of Artificial Sequence: Synthetic coding sequence
  source 1..4362: mol_type = other DNA
atgatcaagtgcctgtctgtggaggtgcaggccaagctgcggagcggcctggccatcagcagcctgggccagtgtgtggaggagctggccctgaacagcattgatgctgaggccaagtgtgtggccgtgcgggtgaacatggagaccttccaggtgcaggtgattgacaatggatttggcatgggcagtgatgatgtggagaaggtgggcaaccgctacttcaccagcaagtgccacagcgtgcaggacctggagaacccccgcttctacggcttccggggggaggccctggccaacattgctgacatggccagcgctgtggagatcagcagcaagaagaacagaaccatgaagacctttgtgaagctgttccagagcggcaaggccctgaaggcctgtgaggctgatgtgacccgggccagcgctggcaccaccgtgacagtgtacaacctcttctaccagctgcctgtgcggaggaagtgcatggacccccggctggagtttgagaaggtgcggcagagaattgaggccctgagcctgatgcaccccagcatctccttcagcctgagaaatgatgtgtctggctccatggtgctgcagctgcccaagaccaaggatgtgtgcagccgcttctgccagatctacggcctgggcaagagccagaagctgcgggagatctccttcaagtacaaggagtttgagctgagcggctacatcagcagcgaggcccactacaacaagaacatgcagttcctgtttgtgaacaagaggctggtgctgcggaccaagctgcacaagctgattgacttcctgctgaggaaggagagcatcatctgcaagcccaagaatggccccaccagccggcagatgaacagcagcctgcggcacaggagcaccccagagctgtatggcatctacgtgatcaacgtgcagtgccagttctgtgaatatgatgtgtgcatggagcccgccaagaccctcatcgagttccagaactgggacaccctgctcttctgcatccaggagggcgtgaagatgttcctgaagcaggagaagctgtttgtggagctgagcggggaggacatcaaggagttctctgaagataatggcttcagcctgtttgatgccaccctgcagaagagggtgaccagtgatgagaggagcaacttccaggaggcctgcaacaacatcctggacagctatgagatgttcaacctgcagagcaaggctgtgaagaggaagaccacagcagaaaatgtgaacacccagagcagccgggacagcgaggccaccaggaagaacaccaatgatgccttcctgtacatctatgaaagtggcggccctggccacagcaagatgacagagcccagcctgcagaacaaggacagcagctgcagcgagagcaagatgctggagcaggagaccatcgtggccagcgaggccggagaaaatgagaagcacaagaagagcttcctggagcacagcagcctggagaacccctgtggcaccagcctggagatgttcctgagccccttccagaccccctgccactttgaggagagcggccaggacctggagatctggaaggagagcaccaccgtgaatggcatggccgccaacatcctgaagaacaaccgcatccagaaccagcccaagcgcttcaaggatgccacagaggtgggctgccagcccctgccctttgccaccaccctgtggggcgtgcacagcgcccagacagagaaggagaagaagaaggagagcagcaactgtggcagaagaaatgtgttctcctatggccgggtgaagctgtgcagcacaggcttcatcacccacgtggtgcagaatgagaagaccaagagcacagaaacagagcacagcttcaagaactacgtgcggcccggccccacccgggcccaggagaccttcggcaacagaaccaggcacagcgtggagaccccagacatcaaggacctggccagcaccctgagcaaggagagcggccagctgcccaacaagaagaactgcaggaccaacatctcctatggcctggagaatgagcccacagccacctacaccatgttttctgccttccaggagggcagcaagaagagccagacagactgcatcctgagtgacaccagccccagcttcccctggtaccgccacgtgtccaatgacagcaggaagacagacaagctgattggcttcagcaagcccatcgtgaggaagaagctgagcctgagcagccagctgggcagcctggagaagttcaagaggcagtatggcaaggtggagaaccccctggacacagaggtggaggagagcaatggagtgaccaccaacctgagcctgcaggtggagccagacatcctgctgaaggacaagaaccggctggagaacagtgatgtgtgcaagatcaccaccatggagcacagcgacagcgacagcagctgccagcctgccagccacatcctgaacagcgagaagttccccttcagcaaggatgaggactgcctggagcagcagatgcccagcctgcgggagagccccatgaccctgaaggagctgagcctcttcaacaggaagcccctggacctggagaagagcagcgagagcctggccagcaagctgagccggctgaagggcagcgagcgggagacccagaccatgggcatgatgagccgcttcaatgagctgcccaacagcgacagcagcaggaaggacagcaagctgtgcagcgtgctgacccaggacttctgcatgctgttcaacaacaagcatgagaagacagaaaatggagtcatccccaccagtgacagcgccacccaggacaacagcttcaacaagaacagcaagacccacagcaacagcaacaccacagagaactgtgtgatcagcgagacccccctggtgctgccctacaacaacagcaaggtgacaggcaaggacagtgatgtgctgatccgggccagcgagcagcagatcggcagcctggacagccccagcggcatgctgatgaaccctgtggaggatgccactggagaccagaatggcatctgcttccagagcgaggagagcaaggcccgggcctgcagcgagacagaggagagcaacacctgctgcagcgactggcagaggcactttgatgtggccctgggccgcatggtgtatgtgaacaagatgacaggcctgagcaccttcatcgcccccacagaggacatccaggccgcctgcaccaaggacctgaccaccgtggccgtggatgtggtgctggagaatggcagccagtaccgctgccagcccttcagaagtgacctggtgctgcccttcctgccccgggcccgggcagagaggacagtgatgaggcaggacaacagagacacagtggatgacacagtgtcctctgagagcctgcagagcctcttcagcgagtgggacaaccctgtgtttgcccgctacccagaggtggccgtggatgtgagcagcggccaggccgagagcctggccgtgaagatccacaacatcctgtacccctaccgcttcaccaagggcatgatccacagcatgcaggtgctgcagcaggtggacaacaagttcatcgcctgcctgatgagcaccaagacagaggagaatggagaggccggcggcaacctgctggtgctggtggaccagcacgccgcccacgagcgcatccggctggagcagctgatcatcgacagctatgagaagcagcaggcccagggcagcggcaggaagaagctgctgagcagcaccctcatcccccccctggagatcaccgtgacagaggagcagaggcggctgctgtggtgctaccacaagaacctggaggacctgggcctggagtttgtgtttcctgacaccagtgacagcctggtgctggtgggcaaggtgcccctgtgctttgtggagcgggaggccaatgagctgcggcggggccgcagcacagtgaccaagagcatcgtggaggagttcatccgggagcagctggagctgctgcagaccaccggcggcatccagggcaccctgcccctgactgtgcagaaggtgctggccagccaggcctgccacggggccatcaagttcaatgatggcctgagcctgcaggagagctgccgcctgattgaggccctgagcagctgccagctgcccttccagtgtgcccacggccggcccagcatgctgcccctggccgacatcgaccacctggagcaggagaagcagatcaagcccaacctgaccaagctgaggaagatggcccaggcctggaggctgtttgggaaggccgagtgtgacacccggcagagcctgcagcagagcatgccaccctgtgagcccccatag

SEQ ID NO: 20612 - DNA, 1176 bp, synthetic construct
  misc_feature 1..1176: note = Description of Artificial Sequence: Synthetic coding sequence
  source 1..1176: mol_type = other DNA
atggtgtatgtgaacaagatgacaggcctgagcaccttcatcgcccccacagaggacatccaggccgcctgcaccaaggacctgaccaccgtggccgtggatgtggtgctggagaatggcagccagtaccgctgccagcccttcagaagtgacctggtgctgcccttcctgccccgggcccgggcagagaggacagtgatgaggcaggacaacagagacacagtggatgacacagtgtcctctgagagcctgcagagcctcttcagcgagtgggacaaccctgtgtttgcccgctacccagaggtggccgtggatgtgagcagcggccaggccgagagcctggccgtgaagatccacaacatcctgtacccctaccgcttcaccaagggcatgatccacagcatgcaggtgctgcagcaggtggacaacaagttcatcgcctgcctgatgagcaccaagacagaggagaatggagaggccggcggcaacctgctggtgctggtggaccagcacgccgcccacgagcgcatccggctggagcagctgatcatcgacagctatgagaagcagcaggcccagggcagcggcaggaagaagctgctgagcagcaccctcatcccccccctggagatcaccgtgacagaggagcagaggcggctgctgtggtgctaccacaagaacctggaggacctgggcctggagtttgtgtttcctgacaccagtgacagcctggtgctggtgggcaaggtgcccctgtgctttgtggagcgggaggccaatgagctgcggcggggccgcagcacagtgaccaagagcatcgtggagctgctgcagaccaccggcggcatccagggcaccctgcccctgactgtgcagaaggtgctggccagccaggcctgccacggggccatcaagttcaatgatggcctgagcctgcaggagagctgccgcctgattgaggccctgagcagctgccagctgcccttccagtgtgcccacggccggcccagcatgctgcccctggccgacatcgaccacctggagcaggagaagcagatcaagcccaacctgaccaagctgaggaagatggcccaggcctggaggctgtttgggaaggccgagtgtgacacccggcagagcctgcagcagagcatgccaccctgtgagcccccatag

SEQ ID NO: 20613 - DNA, 597 bp, synthetic construct
  misc_feature 1..597: note = Description of Artificial Sequence: Synthetic coding sequence
  source 1..597: mol_type = other DNA
atgaaccctgtggaggatgccaccggggaccagaatggcatctgcttccagagcgaggagagcaaggcccgggcctgcagcgagacagaggagagcaacacctgctgcagcgactggcagaggcactttgatgtggccctgggccgcatggtgtatgtgaacaagatgacaggcctgagcaccttcatcgcccccacagaggacatccaggccgcctgcaccaaggacctgaccaccgtggccgtggatgtggtgctggagaatggcagccagtaccgctgccagcccttcagaagtgacctggtgctgcccttcctgccccgggcccgggcagagaggacagtgatgaggcaggacaacagagacacagtggatgacacagtgagcagcgagagcctgcagagcctcttcagcgagtgggacaaccctgtgtttgcccgctacccagaggtgctgcagcaggtggacaacaagttcatcgcctgcctgatgagcaccaagacagaggagaatggagaggccgctgagctgatgatgctgcaggacccctgctgccggcagagccgggaggatgagaaccacgagttcagcctgtag

SEQ ID NO: 20614 - DNA, 489 bp, synthetic construct
  misc_feature 1..489: note = Description of Artificial Sequence: Synthetic coding sequence
  source 1..489: mol_type = other DNA
atgatcaagtgcctgtctgtggaggtgcaggccaagctgcggagcggcctggccatcagcagcctgggccagtgtgtggaggagctggccctgaacagcattgatgctgaggccaagtgtgtggccgtgcgggtgaacatggagaccttccaggtgcaggtgattgacaatggatttggcatgggcagtgatgatgtggagaaggtgggcaaccgctacttcaccagcaagtgccacagcgtgcaggacctggagaacccccgcttctacggcttccggggggaggccctggccaacattgctgacatggccagcgctgtggagatcagcagcaagaagaacagaaccatgaagacctttgtgaagctgttccagagcggcaaggccctgaaggcctgtgaggctgatgtgacccgggccagcgctggcaccaccgtgacagtgtacaacctcttctaccagctgcctgtgcggaggaagtgcatgtag

SEQ ID NO: 20615 - DNA, 4362 bp, synthetic construct; identical to SEQ ID NO: 20611
  misc_feature 1..4362: note = Description of Artificial Sequence: Synthetic coding sequence
  source 1..4362: mol_type = other DNA

SEQ ID NO: 20616 - DNA, 321 bp, synthetic construct
  misc_feature 1..321: note = Description of Artificial Sequence: Synthetic coding sequence
  source 1..321: mol_type = other DNA
atgatcaagtgcctgtctgtggaggtgcaggccaagctgcggagcggcctggccatcagcagcctgggccagtgtgtggaggagctggccctgaacagcattgatgctgaggccaagtgtgtggccgtgcgggtgaacatggagaccttccaggtgcaggtgattgacaatggatttggcatgggcagtgatgatgtggagaaggtgggcaaccgctacttcaccagcaagtgccacagcgtgcaggacctggagaacccccgcttctacggcttccggggggaggccctggccaacattgctgacatggccagcgcctag

SEQ ID NO: 20617 - DNA, 135 bp, synthetic construct
  misc_feature 1..135: note = Description of Artificial Sequence: Synthetic coding sequence
  source 1..135: mol_type = other DNA
atggctgacaagccagacatgggagagatcgccagctttgacaaggccaagctgaagaagacagagacccaggagaagaacaccctgcccaccaaggagaccatcgagcaggagaagaggtctgagatctcctag

SEQ ID NO: 20618 - DNA, 1026 bp, synthetic construct
  misc_feature 1..1026: note = Description of Artificial Sequence: Synthetic coding sequence
  source 1..1026: mol_type = other DNA
atggctgtgcagcccaaggagaccctgcagctggagagcgctgctgaggtgggctttgtgcgcttcttccagggcatgcctgagaagcccaccaccaccgtgcggctgtttgacagaggagacttctacacagcccacggggaggatgccctgctggccgcccgggaggtgttcaagacccagggcgtcatcaagtacatgggccctgctggggccaagaacctgcagagcgtggtgctgagcaagatgaactttgagagctttgtgaaggacctgctgctggtgcggcagtacagagtggaggtgtacaagaacagagctggcaacaaggccagcaaagaaaatgactggtacctggcctacaaggccagccctggcaacctgagccagtttgaggacatcctgtttggaaataatgacatgtctgccagcattggagtggtgggcgtgaagatgtctgctgtggatggccagaggcaggtgggcgtgggctacgtggacagcatccagaggaagctgggcctgtgtgagttcccagacaatgaccagttcagcaacctggaggccctgctgatccagatcggccccaaggaatgtgtgctgcccggcggggagacagctggggacatgggcaagctgcggcagatcatccagaggggcggcatcctgatcacagagaggaagaaggctgacttcagcaccaaggacatctaccaggacctgaaccggctgctgaagggcaagaagggggagcagatgaacagcgctgtgctgcctgagatggagaaccaggtggccgtgagcagcctgtctgctgtgatcaagttcctggagctgctgagtgatgacagcaactttggccagtttgagctgaccacctttgacttcagccagtacatgaagctggacattgctgctgtgcgggccctgaacctcttccagggctctgtggaggacaccaccggcagccagagcctggccgccctgctgaacaagtgcaagaccccccagggccagacctgctag

SEQ ID NO: 20619 - DNA, 2766 bp, synthetic construct
  misc_feature 1..2766: note = Description of Artificial Sequence: Synthetic coding sequence
  source 1..2766: mol_type = other DNA
atggctgtgcagcccaaggagaccctgcagctggagagcgctgctgaggtgggctttgtgcgcttcttccagggcatgcctgagaagcccaccaccaccgtgcggctgtttgacagaggagacttctacacagcccacggggaggatgccctgctggccgcccgggaggtgttcaagacccagggcgtcatcaagtacatgggccctgctggggccaagaacctgcagagcgtggtgctgagcaagatgaactttgagagctttgtgaaggacctgctgctggtgcggcagtacagagtggaggtgtacaagaacagagctggcaacaaggccagcaaagaaaatgactggtacctggcctacaaggccagccctggcaacctgagccagtttgaggacatcctgtttggaaataatgacatgtctgccagcattggagtggtgggcgtgaagatgtctgctgtggatggccagaggcaggtgggcgtgggctacgtggacagcatccagaggaagctgggcctgtgtgagttcccagacaatgaccagttcagcaacctggaggccctgctgatccagatcggccccaaggaatgtgtgctgcccggcggggagacagctggggacatgggcaagctgcggcagatcatccagaggggcggcatcctgatcacagagaggaagaaggctgacttcagcaccaaggacatctaccaggacctgaaccggctgctgaagggcaagaagggggagcagatgaacagcgctgtgctgcctgagatggagaaccaggtggccgtgagcagcctgtctgctgtgatcaagttcctggagctgctgagtgatgacagcaactttggccagtttgagctgaccacctttgacttcagccagtacatgaagctggacattgctgctgtgcgggccctgaacctcttccagggctctgtggaggacaccaccggcagccagagcctggccgccctgctgaacaagtgcaagaccccccagggccagaggctggtgaaccagtggatcaagcagcccctgatggacaagaaccgcatcgaggagcggctgaacctggtggaggcctttgtggaggatgctgagctgcggcagaccctgcaggaggacctgctgcggcgcttcccagacctgaaccggctggccaagaagttccagaggcaggccgccaacctgcaggactgctaccgcctgtaccagggcatcaaccagctgcccaacgtcatccaggccctggagaagcatgagggcaagcaccagaagctgctgctggccgtgtttgtgacccccctgacagacctgcggagtgacttcagcaagttccaggagatgattgagaccaccctggacatggaccaggtggagaaccacgagttcctggtgaagcccagctttgaccccaacctgtctgagctgcgggagatcatgaatgacctggagaagaagatgcagagcaccctcatctctgctgcccgggacctgggcctggaccccgggaagcagatcaagctggacagcagcgcccagtttggctactacttccgggtgacctgcaaggaggagaaggtgctgaggaacaacaagaacttcagcacagtggacatccagaagaatggagtgaagttcaccaacagcaagctgaccagcctgaatgaggagtacaccaagaacaagacagaatatgaggaggcccaggatgccatcgtgaaggagatcgtgaacatcagcagcggctacgtggagcccatgcagaccctgaatgatgtgctggcccagctggatgctgtggtgtcctttgcccacgtgtccaatggagcccctgtgccctacgtgcggcctgccatcctggagaagggccagggccgcatcatcctgaaggccagcagacatgcctgtgtggaggtgcaggatgagatcgccttcatccccaatgatgtgtactttgagaaggacaagcagatgttccacatcatcaccggccccaacatgggcggcaagagcacctacatccggcagacaggagtgattgtgctgatggcccagatcggctgctttgtgccctgtgagagcgctgaggtgtccatcgtggactgcatcctggcccgggtgggcgctggggacagccagctgaagggcgtgtccaccttcatggccgagatgctggagacagccagcatcctgcggagcgccaccaaggacagcctcatcatcattgatgagctgggccggggcaccagcacctatgatggcttcggcctggcctgggccatcagcgagtacatcgccaccaagatcggggccttctgcatgtttgccacccacttccacgagctgacagccctggccaaccagatccccaccgtgaacaacctgcacgtgacagccctgaccacagaggagaccctgaccatgctgtaccaggtgaagaagggcgtgtgtgaccagagctttggcatccacgtggccgagctggccaacttccccaagcacgtgattgaatgtgccaagcagaaggccctggagctggaggagttccagtacatcggggagagccagggctatgacatcatggagcctgctgccaagaagtgctacctggagcgggagaacctgcgggtgacagagcccaaggaccagtgcctgatcctgctgacctggaagaggaagctgcggggcggcaagaggtctgcctgcagcaggcctgagcggcagaaccagggcagcggggagctgtcctag

SEQ ID NO: 20620 - DNA, 2163 bp, synthetic construct
  misc_feature 1..2163: note = Description of Artificial Sequence: Synthetic coding sequence
  source 1..2163: mol_type = other DNA
atgattggcatctggcacatccggctgctgctggccatcagcctgagcctgaagaccttcagcctggtgaccatgatctgccagctgcccctggtgctgtgggtgctgaagtgcccccagctgatggcccgggacatgggcaagctgcggcagatcatccagaggggcggcatcctgatcacagagaggaagaaggctgacttcagcaccaaggacatctaccaggacctgaaccggctgctgaagggcaagaagggggagcagatgaacagcgctgtgctgcctgagatggagaaccagggctctgtggaggacaccaccggcagccagagcctggccgccctgctgaacaagtgcaagaccccccagggccagaggctggtgaaccagtggatcaagcagcccctgatggacaagaaccgcatcgaggagcggctgaacctggtggaggcctttgtggaggatgctgagctgcggcagaccctgcaggaggacctgctgcggcgcttcccagacctgaaccggctggccaagaagttccagaggcaggccgccaacctgcaggactgctaccgcctgtaccagggcatcaaccagctgcccaacgtcatccaggccctggagaagcatgagggcaagcaccagaagctgctgctggccgtgtttgtgacccccctgacagacctgcggagtgacttcagcaagttccaggagatgattgagaccaccctggacatggaccaggtggagaaccacgagttcctggtgaagcccagctttgaccccaacctgtctgagctgcgggagatcatgaatgacctggagaagaagatgcagagcaccctcatctctgctgcccgggacctgggcctggaccccgggaagcagatcaagctggacagcagcgcccagtttggctactacttccgggtgacctgcaaggaggagaaggtgctgaggaacaacaagaacttcagcacagtggacatccagaagaatggagtgaagttcaccaacagcaagctgaccagcctgaatgaggagtacaccaagaacaagacagaatatgaggaggcccaggatgccatcgtgaaggagatcgtgaacatcagcagcggctacgtggagcccatgcagaccctgaatgatgtgctggcccagctggatgctgtggtgtcctttgcccacgtgtccaatggagcccctgtgccctacgtgcggcctgccatcctggagaagggccagggccgcatcatcctgaaggccagcagacatgcctgtgtggaggtgcaggatgagatcgccttcatccccaatgatgtgtactttgagaaggacaagcagatgttccacatcatcaccggccccaacatgggcggcaagagcacctacatccggcagacaggagtgattgtgctgatggcccagatcggctgctttgtgccctgtgagagcgctgaggtgtccatcgtggactgcatcctggcccgggtgggcgctggggacagccagctgaagggcgtgtccaccttcatggccgagatgctggagacagccagcatcctgcggagcgccaccaaggacagcctcatcatcattgatgagctgggccggggcaccagcacctatgatggcttcggcctggcctgggccatcagcgagtacatcgccaccaagatcggggccttctgcatgtttgccacccacttccacgagctgacagccctggccaaccagatccccaccgtgaacaacctgcacgtgacagccctgaccacagaggagaccctgaccatgctgtaccaggtgaagaagggcgtgtgtgaccagagctttggcatccacgtggccgagctggccaacttccccaagcacgtgattgaatgtgccaagcagaaggccctggagctggaggagttccagtacatcggggagagccagggctatgacatcatggagcctgctgccaagaagtgctacctggagcgggagcagggcgagaagatcatccaggagttcctgagcaaggtgaagcagatgcccttcacagagatgtctgaggagaacatcaccatcaagctgaagcagctgaaggccgaggtgattgccaagaacaacagctttgtgaatgagatcatcagccgcatcaaggtgaccacctag

SEQ ID NO: 20621 - DNA, 2433 bp, synthetic construct
  misc_feature 1..2433: note = Description of Artificial Sequence: Synthetic coding sequence
  source 1..2433: mol_type = other DNA
atggctgtgcagcccaaggagaccctgcagctggagagcgctgctgaggtgggctttgtgcgcttcttccagggcatgcctgagaagcccaccaccaccgtgcggctgtttgacagaggagacttctacacagcccacggggaggatgccctgctggccgcccgggaggtgttcaagacccagggcgtcatcaagtacatgggccctgctggggccaagaacctgcagagcgtggtgctgagcaagatgaactttgagagctttgtgaaggacctgctgctggtgcggcagtacagagtggaggtgtacaagaacagagctggcaacaaggccagcaaagaaaatgactggtacctggcctacaaggccagccctggcaacctgagccagtttgaggacatcctgtttggaaataatgacatgtctgccagcattggagtggtgggcgtgaagatgtctgctgtggatggccagaggcaggtgggcgtgggctacgtggacagcatccagaggaagctgggcctgtgtgagttcccagacaatgaccagttcagcaacctggaggccctgctgatccagatcggccccaaggaatgtgtgctgcccggcggggagacagctggggacatgggcaagctgcggcagatcatccagaggggcggcatcctgatcacagagaggaagaaggctgacttcagcaccaaggacatctaccaggacctgaaccggctgctgaagggcaagaagggggagcagatgaacagcgctgtgctgcctgagatggagaaccaggtggccgtgagcagcctgtctgctgtgatcaagttcctggagctgctgagtgatgacagcaactttggccagtttgagctgaccacctttgacttcagccagtacatgaagctggacattgctgctgtgcgggccctgaacctcttccagggctctgtggaggacaccaccggcagccagagcctggccgccctgctgaacaagtgcaagaccccccagggccagaggctggtgaaccagtggatcaagcagcccctgatggacaagaaccgcatcgaggagcggctgaacctggtggaggcctttgtggaggatgctgagctgcggcagaccctgcaggaggacctgctgcggcgcttcccagacctgaaccggctggccaagaagttccagaggcaggccgccaacctgcaggactgctaccgcctgtaccagggcatcaaccagctgcccaacgtcatccaggccctggagaagcatgagggcaagcaccagaagctgctgctggccgtgtttgtgacccccctgacagacctgcggagtgacttcagcaagttccaggagatgattgagaccaccctggacatggaccaggtggagaaccacgagttcctggtgaagcccagctttgaccccaacctgtctgagctgcgggagatcatgaatgacctggagaagaagatgcagagcaccctcatctctgctgcccgggacctgggcctggaccccgggaagcagatcaagctggacagcagcgcccagtttggctactacttccgggtgacctgcaaggaggagaaggtgctgaggaacaacaagaacttcagcacagtggacatccagaagaatggagtgaagttcaccaacagcaagctgaccagcctgaatgaggagtacaccaagaacaagacagaatatgaggaggcccaggatgccatcgtgaaggagatcgtgaacatcagcagcggctacgtggagcccatgcagaccctgaatgatgtgctggcccagctggatgctgtggtgtcctttgcccacgtgtccaatggagcccctgtgccctacgtgcggcctgccatcctggagaagggccagggccgcatcatcctgaaggccagcagacatgcctgtgtggaggtgcaggatgagatcgccttcatccccaatgatgtgtactttgagaaggacaagcagatgttccacatcatcaccggccccaacatgggcggcaagagcacctacatccggcagacaggagtgattgtgctgatggcccagatcggctgctttgtgccctgtgagagcgctgaggtgtccatcgtggactgcatcctggcccgggtgggcgctggggacagccagctgaagggcgtgtccaccttcatggccgagatgctggagacagccagcatcctgcggagcgccaccaaggacagcctcatcatcattgatgagctgggccggggcaccagcacctatgatggcttcggcctggcctgggccatcagcgagtacatcgccaccaagatcggggccttctgcatgtttgccaccatcttcatgaacctgctgccctggcccatccgctaccagctgctgatcatctacatgagccagcacagccccctgaagaggccctag

SEQ ID NO: 20622 - DNA, 507 bp, synthetic construct
  misc_feature 1..507: note = Description of Artificial Sequence: Synthetic coding sequence
  source 1..507: mol_type = other DNA
atggacaagaaccgcatcgaggagcggctgaacctggtggaggcctttgtggaggatgctgagctgcggcagaccctgcaggaggacctgctgcggcgcttcccagacctgaaccggctggccaagaagttccagaggcaggccgccaacctgcaggactgctaccgcctgtaccagggcatcaaccagctgcccaacgtcatccaggccctggagaagcatgagggcaagcaccagaagctgctgctggccgtgtttgtgacccccctgacagacctgcggagtgacttcagcaagttccaggagatgattgagaccaccctggacatggaccaggtggagaaccacgagttcctggtgaagcccagctttgaccccaacctgtctgagctgcgggagatcatgaatgacctggagaagaagatgcagagcaccctcatctctgctgcccgggacctgggcggcagcctgcagcccaggagcagccggctggcctgtgccacctag

SEQ ID NO: 20623 - DNA, 1602 bp, synthetic construct
  misc_feature 1..1602: note = Description of Artificial Sequence: Synthetic coding sequence
  source 1..1602: mol_type = other DNA
atggctgtgcagcccaaggagaccctgcagctggagagcgctgctgaggtgggctttgtgcgcttcttccagggcatgcctgagaagcccaccaccaccgtgcggctgtttgacagaggagacttctacacagcccacggggaggatgccctgctggccgcccgggaggtgttcaagacccagggcgtcatcaagtacatgggccctgctggggccaagaacctgcagagcgtggtgctgagcaagatgaactttgagagctttgtgaaggacctgctgctggtgcggcagtacagagtggaggtgtacaagaacagagctggcaacaaggccagcaaagaaaatgactggtacctggcctacaaggccagccctggcaacctgagccagtttgaggacatcctgtttggaaataatgacatgtctgccagcattggagtggtgggcgtgaagatgtctgctgtggatggccagaggcaggtgggcgtgggctacgtggacagcatccagaggaagctgggcctgtgtgagttcccagacaatgaccagttcagcaacctggaggccctgctgatccagatcggccccaaggaatgtgtgctgcccggcggggagacagctggggacatgggcaagctgcggcagatcatccagaggggcggcatcctgatcacagagaggaagaaggctgacttcagcaccaaggacatctaccaggacctgaaccggctgctgaagggcaagaagggggagcagatgaacagcgctgtgctgcctgagatggagaaccaggtggccgtgagcagcctgtctgctgtgatcaagttcctggagctgctgagtgatgacagcaactttggccagtttgagctgaccacctttgacttcagccagtacatgaagctggacattgctgctgtgcgggccctgaacctcttccagggctctgtggaggacaccaccggcagccagagcctggccgccctgctgaacaagtgcaagaccccccagggccagaggctggtgaaccagtggatcaagcagcccctgatggacaagaaccgcatcgaggagcggctgaacctggtggaggcctttgtggaggatgctgagctgcggcagaccctgcaggaggacctgctgcggcgcttcccagacctgaaccggctggccaagaagttccagaggcaggccgccaacctgcaggactgctaccgcctgtaccagggcatcaaccagctgcccaacgtcatccaggccctggagaagcatgagggcaagcaccagaagctgctgctggccgtgtttgtgacccccctgacagacctgcggagtgacttcagcaagttccaggagatgattgagaccaccctggacatggaccaggtggagaaccacgagttcctggtgaagcccagctttgaccccaacctgtctgagctgcgggagatcatgaatgacctggagaagaagatgcagagcaccctcatctctgctgcccgggacctgggcctggaccccgggaagcagatcaagctggacagcagcgcccagtttggctactacttccgggtgacctgcaaggagaagagccccagctag

SEQ ID NO: 20624 - DNA, 1233 bp, synthetic construct
  misc_feature 1..1233: note = Description of Artificial Sequence: Synthetic coding sequence
  source 1..1233: mol_type = other DNA
atggctgtgcagcccaaggagaccctgcagctggagagcgctgctgaggtgggctttgtgcgcttcttccagggcatgcctgagaagcccaccaccaccgtgcggctgtttgacagaggagacttctacacagcccacggggaggatgccctgctggccgcccgggaggtgttcaagacccagggcgtcatcaagtacatgggccctgctggggccaagaacctgcagagcgtggtgctgagcaagatgaactttgagagctttgtgaaggacctgctgctggtgcggcagtacagagtggaggtgtacaagaacagagctggcaacaaggccagcaaagaaaatgactggtacctggcctacaaggccagccctggcaacctgagccagtttgaggacatcctgtttggaaataatgacatgtctgccagcattggagtggtgggcgtgaagatgtctgctgtggatggccagaggcaggtgggcgtgggctacgtggacagcatccagaggaagctgggcctgtgtgagttcccagacaatgaccagttcagcaacctggaggccctgctgatccagatcggccccaaggaatgtgtgctgcccggcggggagacagctggggacatgggcaagctgcggcagatcatccagaggggcggcatcctgatcacagagaggaagaaggctgacttcagcaccaaggacatctaccaggacctgaaccggctgctgaagggcaagaagggggagcagatgaacagcgctgtgctgcctgagatggagaaccaggtggccgtgagcagcctgtctgctgtgatcaagttcctggagctgctgagtgatgacagcaactttggccagtttgagctgaccacctttgacttcagccagtacatgaagctggacattgctgctgtgcgggccctgaacctcttccagggctctgtggaggacaccaccggcagccagagcctggccgccctgctgaacaagtgcaagaccccccagggccagaggctggtgaaccagtggatcaagcagcccctgatggacaagaaccgcatcgaggagcggctgaacctggtggaggcctttgtggaggatgctgagctgcggcagaccctgcaggaggactactttgtggacagccagatcctgacagacctgcccaggagcttcaaggacaagcagcagacctacaagatcgtgacagacagcatccgggtgtag

SEQ ID NO: 20625 - DNA, 1458 bp, synthetic construct
  misc_feature 1..1458: note = Description of Artificial Sequence: Synthetic coding sequence
  source 1..1458: mol_type = other DNA
atggctgtgcagcccaaggagaccctgcagctggagagcgctgctgaggtgggctttgtgcgcttcttccagggcatgcctgagaagcccaccaccaccgtgcggctgtttgacagaggagacttctacacagcccacggggaggatgccctgctggccgcccgggaggtgttcaagacccagggcgtcatcaagtacatgggccctgctggggccaagaacctgcagagcgtggtgctgagcaagatgaactttgagagctttgtgaaggacctgctgctggtgcggcagtacagagtggaggtgtacaagaacagagctggcaacaaggccagcaaagaaaatgactggtacctggcctacaaggccagccctggcaacctgagccagtttgaggacatcctgtttggaaataatgacatgtctgccagcattggagtggtgggcgtgaagatgtctgctgtggatggccagaggcaggtgggcgtgggctacgtggacagcatccagaggaagctgggcctgtgtgagttcccagacaatgaccagttcagcaacctggaggccctgctgatccagatcggccccaaggaatgtgtgctgcccggcggggagacagctggggacatgggcaagctgcggcagatcatccagaggggcggcatcctgatcacagagaggaagaaggctgacttcagcaccaaggacatctaccaggacctgaaccggctgctgaagggcaagaagggggagcagatgaacagcgctgtgctgcctgagatggagaaccaggtggccgtgagcagcctgtctgctgtgatcaagttcctggagctgctgagtgatgacagcaactttggccagtttgagctgaccacctttgacttcagccagtacatgaagctggacattgctgctgtgcgggccctgaacctcttccagggctctgtggaggacaccaccggcagccagagcctggccgccctgctgaacaagtgcaagaccccccagggccagaggctggtgaaccagtggatcaagcagcccctgatggacaagaaccgcatcgaggagcggctgaacctggtggaggcctttgtggaggatgctgagctgcggcagaccctgcaggaggacctgctgcggcgcttcccagacctgaaccggctggccaagaagttccagaggcaggccgccaacctgcaggactgctaccgcctgtaccagggcatcaaccagctgcccaacgtcatccaggccctggagaagcatgagggcaagcaccagaagctgctgctggccgtgtttgtgacccccctgacagacctgcggagtgacttcagcaagttccaggagatgattgagaccaccctggacatggaccaggtggagaaccacgagttcctggtgaagcccagctttgaccccaacctgtctgagctgaggaacaatgaatag

SEQ ID NO: 20626 - DNA, 2607 bp, synthetic construct
  misc_feature 1..2607: note = Description of Artificial Sequence: Synthetic coding sequence
  source 1..2607: mol_type = other DNA
atgggccctgctggggccaagaacctgcagagcgtggtgctgagcaagatgaactttgagagctttgtgaaggacctgctgctggtgcggcagtacagagtggaggtgtacaagaacagagctggcaacaaggccagcaaagaaaatgactggtacctggcctacaaggccagccctggcaacctgagccagtttgaggacatcctgtttggaaataatgacatgtctgccagcattggagtggtgggcgtgaagatgtctgctgtggatggccagaggcaggtgggcgtgggctacgtggacagcatccagaggaagctgggcctgtgtgagttcccagacaatgaccagttcagcaacctggaggccctgctgatccagatcggccccaaggaatgtgtgctgcccggcggggagacagctggggacatgggcaagctgcggcagatcatccagaggggcggcatcctgatcacagagaggaagaaggctgacttcagcaccaaggacatctaccaggacctgaaccggctgctgaagggcaagaagggggagcagatgaacagcgctgtgctgcctgagatggagaaccaggtggccgtgagcagcctgtctgctgtgatcaagttcctggagctgctgagtgatgacagcaactttggccagtttgagctgaccacctttgacttcagccagtacatgaagctggacattgctgctgtgcgggccctgaacctcttccagggctctgtggaggacaccaccggcagccagagcctggccgccctgctgaacaagtgcaagaccccccagggccagaggctggtgaaccagtggatcaagcagcccctgatggacaagaaccgcatcgaggagcggctgaacctggtggaggcctttgtggaggatgctgagctgcggcagaccctgcaggaggacctgctgcggcgcttcccagacctgaaccggctggccaagaagttccagaggcaggccgccaacctgcaggactgctaccgcctgtaccagggcatcaaccagctgcccaacgtcatccaggccctggagaagcatgagggcaagcaccagaagctgctgctggccgtgtttgtgacccccctgacagacctgcggagtgacttcagcaagttccaggagatgattgagaccaccctggacatggaccaggtggagaaccacgagttcctggtgaagcccagctttgaccccaacctgtctgagctgcgggagatcatgaatgacctggagaagaagatgcagagcaccctcatctctgctgcccgggacctgggcctggaccccgggaagcagatcaagctggacagcagcgcccagtttggctactacttccgggtgacctgcaaggaggagaaggtgctgaggaacaacaagaacttcagcacagtggacatccagaagaatggagtgaagttcaccaacagcaagctgaccagcctgaatgaggagtacaccaagaacaagacagaatatgaggaggcccaggatgccatcgtgaaggagatcgtgaacatcagcagcggctacgtggagcccatgcagaccctgaatgatgtgctggcccagctggatgctgtggtgtcctttgcccacgtgtccaatggagcccctgtgccctacgtgcggcctgccatcctggagaagggccagggccgcatcatcctgaaggccagcagacatgcctgtgtggaggtgcaggatgagatcgccttcatccccaatgatgtgtactttgagaaggacaagcagatgttccacatcatcaccggccccaacatgggcggcaagagcacctacatccggcagacaggagtgattgtgctgatggcccagatcggctgctttgtgccctgtgagagcgctgaggtgtccatcgtggactgcatcctggcccgggtgggcgctggggacagccagctgaagggcgtgtccaccttcatggccgagatgctggagacagccagcatcctgcggagcgccaccaaggacagcctcatcatcattgatgagctgggccggggcaccagcacctatgatggcttcggcctggcctgggccatcagcgagtacatcgccaccaagatcggggccttctgcatgtttgccacccacttccacgagctgacagccctggccaaccagatccccaccgtgaacaacctgcacgtgacagccctgaccacagaggagaccctgaccatgctgtaccaggtgaagaagggcgtgtgtgaccagagctttggcatccacgtggccgagctggccaacttccccaagcacgtgattgaatgtgccaagcagaaggccctggagctggaggagttccagtacatcggggagagccagggctatgacatcatggagcctgctgccaagaagtgctacctggagcgggagcagggcgagaagatcatccaggagttcctgagcaaggtgaagcagatgcccttcacagagatgtctgaggagaacatcaccatcaagctgaagcagctgaaggccgaggtgattgccaagaacaacagctttgtgaatgagatcatcagccgcatcaaggtgaccacctag

SEQ ID NO: 20627 - DNA, 3414 bp, synthetic construct
  misc_feature 1..3414: note = Description of Artificial Sequence: Synthetic coding sequence
  source 1..3414: mol_type = other DNA
atgagcaggaggaagccagccagcggcggcctggccgccagcagcagcgccccagcccggcaggccgtgctgagccgcttcttccagagcacaggcagcctgaagagcaccagcagcagcactggagctgctgaccaggtggaccctggagctgctgctgctgctgctgctgctgctgctgctgcccccccagcccccccagccccagccttccccccccagctgcccccccacatcgccacagaaattgacaggaggaagaagaggcccctggagaatgatggccctgtgaagaagaaggtgaagaaggtgcagcagaaggagggcggcagtgacctgggcatgagcggcaacagcgagcccaagaagtgcctgcggaccagaaatgtgtccaagagcctggagaagctgaaggagttctgctgtgacagcgccctgccccagagccgggtgcagacagagagcctgcaggagagatttgctgtgctgcccaagtgcacagactttgatgacatcagcctgctgcacgccaagaatgctgtgtcctctgaggacagcaagaggcagatcaaccagaaggacaccaccctgtttgacctgagccagtttggcagcagcaacaccagccatgagaacctgcagaagacagccagcaagagcgccaacaagaggagcaagagcatctacacccccctggagctgcagtacatcgagatgaagcagcagcacaaggatgctgtgctgtgtgtggagtgtggctacaagtaccgcttctttggagaagatgctgagattgctgcccgggagctgaacatctactgccacctggaccacaacttcatgacagccagcatccccacccaccggctgtttgtgcacgtgcggcggctggtggccaagggctacaaggtgggcgtggtgaagcagacagaaacagctgccctgaaggccatcggggacaacagaagcagcctcttcagcaggaagctgacagccctgtacaccaagagcaccctcatcggggaggatgtgaaccccctcatcaagctggatgatgctgtgaatgtggatgagatcatgacagacaccagcaccagctacctgctgtgcatcagcgagaacaaggaaaatgtgcgggacaagaagaagggcaacatcttcatcggcatcgtgggcgtgcagcctgccactggagaggtggtgtttgacagcttccaggacagcgccagccgctctgagctggagaccaggatgagcagcctgcagcctgtggagctgctgctgcccagcgccctgtctgagcagacagaggccctgatccaccgggccacctctgtgtctgtgcaggatgaccgcatccgggtggagaggatggacaacatctactttgagtacagccacgccttccaggccgtgacagagttctacgccaaggacacagtggacatcaagggcagccagatcatcagcggcatcgtgaacctggagaagcctgtgatctgcagcctggccgccatcatcaagtacctgaaggagttcaacctggagaagatgctgagcaagccagagaacttcaagcagctgagcagcaagatggagttcatgaccatcaatggcaccaccctgaggaacctggagatcctgcagaaccagacagacatgaagaccaagggcagcctgctgtgggtgctggaccacaccaagaccagctttggaagaaggaagctgaagaagtgggtgacccagcccctgctgaagctgcgggagatcaatgcccggctggatgctgtgtctgaggtgctgcacagcgagagctctgtgtttggccagatcgagaaccacctgaggaagctgcctgacatcgagcggggcctgtgcagcatctaccacaagaagtgcagcacccaggagttcttcctgattgtgaagaccctgtaccacctgaagtctgagttccaggccatcatcccagctgtgaacagccacatccagagcgacctgctgaggacagtcatcctggagatccctgagctgctgagccctgtggagcactacctgaagatcctgaatgagcaggccgccaaggtgggggacaagacagagctgttcaaggacctgagtgacttccccctcatcaagaagaggaaggatgagatccagggcgtgattgatgagatccgcatgcacctgcaggagatcaggaagatcctgaagaaccccagcgcccagtatgtgacagtgtctggccaggagttcatgattgagatcaagaacagcgctgtgtcctgcatccccacagactgggtgaaggtgggcagcaccaaggctgtgagccgcttccacagccccttcatcgtggagaactaccgccacctgaaccagctgcgggagcagctggtgctggactgcagcgctgagtggctggacttcctggagaagttcagcgagcactaccacagcctgtgcaaggctgtgcaccacctggccaccgtggactgcatcttcagcctggccaaggtggccaagcagggcgactactgccggcccaccgtgcaggaggagaggaagatcgtcatcaagaatggccgccaccctgtgattgatgtgctgctgggggagcaggaccagtatgtgcccaacaacacagacctgtctgaggacagcgagcgggtgatgatcatcaccggccccaacatgggcggcaagagcagctacatcaagcaggtggccctgatcaccatcatggcccagatcggcagctatgtgcctgctgaggaggccaccatcggcatcgtggatggcatcttcaccaggatgggcgctgctgacaacatctacaagggccagagcaccttcatggaggagctgacagacacagctgagatcatcaggaaggccaccagccagagcctggtgatcctggatgagctgggccggggcaccagcacccatgatggcatcgccatcgcctatgccaccctggagtacttcatcagagatgtgaagagcctgaccctgtttgtgacccactacccacctgtgtgtgagctggagaagaactacagccaccaggtgggcaactaccacatgggcttcctggtgtctgaagatgagagcaagctggaccctggagctgctgagcaggtgcctgactttgtgaccttcctgtaccagatcacccggggcattgctgcccggagctatggcctgaatgtggccaagctggctgatgtgcctggagagatcctgaagaaggccgcccacaagagcaaggagctggagggcctcatcaacaccaagaggaagaggctgaagtactttgccaagctgtggaccatgcacaatgcccaggacctgcagaagtggacagaggagttcaacatggaggagacccagaccagcctgctgcactag

SEQ ID NO: 20628 - DNA, 3387 bp, synthetic construct
  misc_feature 1..3387: note = Description of Artificial Sequence: Synthetic coding sequence
  source 1..3387: mol_type = other DNA
atgagcaggaggaagccagccagcggcggcctggccgccagcagcagcgccccagcccggcaggccgtgctgagccgcttcttccagagcacaggcagcctgaagagcaccagcagcagcactggagctgctgaccaggtggaccctggagctgctgctgctgctgcccccccagccccagccttccccccccagctgcccccccacatcgccacagaaattgacaggaggaagaagaggcccctggagaatgatggccctgtgaagaagaaggtgaagaaggtgcagcagaaggagggcggcagtgacctgggcatgagcggcaacagcgagcccaagaagtgcctgcggaccagaaatgtgtccaagagcctggagaagctgaaggagttctgctgtgacagcgccctgccccagagccgggtgcagacagagagcctgcaggagagatttgctgtgctgcccaagtgcacagactttgatgacatcagcctgctgcacgccaagaatgctgtgtcctctgaggacagcaagaggcagatcaaccagaaggacaccaccctgtttgacctgagccagtttggcagcagcaacaccagccatgagaacctgcagaagacagccagcaagagcgccaacaagaggagcaagagcatctacacccccctggagctgcagtacatcgagatgaagcagcagcacaaggatgctgtgctgtgtgtggagtgtggctacaagtaccgcttcttcggggaggatgctgagattgctgcccgggagctgaacatctactgccacctggaccacaacttcatgacagccagcatccccacccaccggctgtttgtgcacgtgcggcggctggtggccaagggctacaaggtgggcgtggtgaagcagacagaaacagctgccctgaaggccatcggggacaacagaagcagcctcttcagcaggaagctgacagccctgtacaccaagagcaccctgattggagaagatgtgaaccccctcatcaagctggatgatgctgtgaatgtggatgagatcatgacagacaccagcaccagctacctgctgtgcatcagcgagaacaaggaaaatgtgcgggacaagaagaagggcaacatcttcatcggcatcgtgggcgtgcagcctgccaccggggaggtggtgtttgacagcttccaggacagcgccagccgctctgagctggagaccaggatgagcagcctgcagcctgtggagctgctgctgcccagcgccctgtctgagcagacagaggccctgatccaccgggccacctctgtgtctgtgcaggatgaccgcatccgggtggagaggatggacaacatctactttgagtacagccacgccttccaggccgtgacagagttctacgccaaggacacagtggacatcaagggcagccagatcatctctggaattgtgaacctggagaagcctgtgatctgcagcctggccgccatcatcaagtacctgaaggagttcaacctggagaagatgctgagcaagccagagaacttcaagcagctgagcagcaagatggagttcatgaccatcaatggcaccaccctgaggaacctggagatcctgcagaaccagacagacatgaagaccaagggcagcctgctgtgggtgctggaccacaccaagaccagctttggccgcaggaagctgaagaagtgggtgacccagcccctgctgaagctgcgggagatcaatgcccggctggatgctgtgtctgaggtgctgcacagcgagagctctgtgtttggccagatcgagaaccacctgaggaagctgcctgacatcgagcggggcctgtgcagcatctaccacaagaagtgcagcacccaggagttcttcctgattgtgaagaccctgtaccacctgaagtctgagttccaggccatcatcccagctgtgaacagccacatccagagcgacctgctgaggacagtcatcctggagatccctgagctgctgagccctgtggagcactacctgaagatcctgaatgagcaggccgccaaggtgggggacaagacagagctgttcaaggacctgagtgacttccccctcatcaagaagaggaaggatgagatccagggcgtgattgatgagatccgcatgcacctgcaggagatcaggaagatcctgaagaaccccagcgcccagtatgtgacagtgtctggccaggagttcatgattgagatcaagaacagcgctgtgtcctgcatccccacagactgggtgaaggtgggcagcaccaaggctgtgagccgcttccacagccccttcatcgtggagaactaccgccacctgaaccagctgcgggagcagctggtgctggactgcagcgctgagtggctggacttcctggagaagttcagcgagcactaccacagcctgtgcaaggctgtgcaccacctggccaccgtggactgcatcttcagcctggccaaggtggccaagcagggcgactactgccggcccaccgtgcaggaggagaggaagatcgtcatcaagaatggccgccaccctgtgattgatgtgctgctgggggagcaggaccagtatgtgcccaacaacacagacctgtctgaagattctgagcgggtgatgatcatcaccggccccaacatgggcggcaagagcagctacatcaagcaggtggccctgatcaccatcatggcccagatcggcagctatgtgcctgctgaggaggccaccatcggcatcgtggatggcatcttcaccaggatgggcgctgctgacaacatctacaagggccagagcaccttcatggaggagctgacagacacagctgagatcatcaggaaggccaccagccagagcctggtgatcctggatgagctgggccggggcaccagcacccatgatggcatcgccatcgcctatgccaccctggagtacttcatcagagatgtgaagagcctgaccctgtttgtgacccactacccacctgtgtgtgagctggagaagaactacagccaccaggtgggcaactaccacatgggcttcctggtgtctgaagatgagagcaagctggaccccggggctgctgagcaggtgcctgactttgtgaccttcctgtaccagatcacccggggcattgctgcccggagctatggcctgaatgtggccaagctggctgatgtgcctggagagatcctgaagaaggccgcccacaagagcaaggagctggagggcctcatcaacaccaagaggaagaggctgaagtactttgccaagctgtggaccatgcacaatgcccaggacctgcagaagtggacagaggagttcaacatggaggagacccagaccagcctgctgcactag

SEQ ID NO: 20629 - DNA, 2811 bp, synthetic construct
  misc_feature 1..2811: note = Description of Artificial Sequence: Synthetic coding sequence
  source 1..2811: mol_type = other DNA
atgctgcggcctgagatcagcagcaccagccccagcgccccagctgtgagccccagcagcggggagaccaggagcccccagggcccccgctacaactttggcctgcaggagaccccccagagccggcccagcgtgcaggtggtgtctgccagcacctgccccggcaccagcggggccgccggggacaggagcagcagcagcagcagcctgccctgcccagcccccaacagcaggcctgcccagggcagctactttggaaacaagagggcctatgcagaaaatacagtggccagcaacttcaccttcggggccagcagcagcagcgcccgggacaccaactacccccagaccctgaagacccccctgagcacaggcaacccccagaggagcggctacaagtcctggaccccccaggtgggctacagcgccagcagcagcagcgccatcagcgcccacagccccagcgtgattgtggccgtggtggagggccggggcctggcccggggggagatcggcatggccagcattgacctgaagaacccccagatcatcctgagccagtttgctgacaacaccacctacgccaaggtgatcaccaagctgaagatcctgagccccctggagatcatcatgagcaacacagcctgtgctgtgggcaacagcaccaagctgttcaccctcatcacagagaacttcaagaatgtgaacttcaccaccatccagaggaagtacttcaatgagaccaagggcctggagtacatcgagcagctgtgcatcgccgagttcagcacagtgctgatggaggtgcagagcaagtactactgcctggccgctgtggccgccctgctgaagtatgtggagttcatccagaacagcgtgtatgcccccaagagcctgaagatctgcttccagggcagcgagcagacagccatgattgacagcagcagcgcccagaacctggagctgctgatcaacaaccaggactacagaaacaaccacaccctgtttggagtgctgaactacaccaagaccccaggcggcagccggcggctgcggagcaacatcctggagcccctggtggacatcgagaccatcaacatgaggctggactgtgtgcaggagctgctgcaggatgaggagctgttcttcggcctgcagagcgtcatcagccgcttcctggacacagagcagctgctgtctgtgctggtgcagatccccaagcaggacacagtgaatgctgctgagagcaagatcaccaacctgatctacctgaagcacaccctggagctggtggaccccctgaagatcgccatgaagaactgcaacacccccctgctgcgggcctactacggcagcctggaggacaagcgcttcggcatcatcctggagaagatcaagacagtcatcaatgatgatgcccgctacatgaagggctgcctgaacatgaggacccagaagtgctatgctgtgcgcagcaacatcaatgagttcctggacatcgcccggaggacctacacagagatcgtggatgacattgctggcatgatcagccagctgggggagaagtacagcctgcccctgcggaccagcttcagcagcgcccggggcttcttcatccagatgaccacagactgcatcgccctgcccagcgaccagctgcccagcgagttcatcaagatcagcaaggtgaagaacagctacagcttcaccagcgctgacctgatcaagatgaatgaacgctgccaggagagcctgcgggagatctaccacatgacctacatgattgtgtgcaagctgctgtctgagatctatgagcacatccactgcctgtacaagctgagtgacacagtgtccatgctggacatgctgctgagctttgcccacgcctgcaccctgagtgactatgtgcggcctgagttcacagacaccctggccatcaagcagggctggcaccccatcctggagaagatctctgctgagaagcccatcgccaacaacacctacgtgacagagggcagcaacttcctgatcatcaccggccccaacatgtctgggaagagcacctacctgaagcagatcgccctgtgccagatcatggcccagatcggcagctatgtgcctgctgagtacagcagcttcagaattgccaagcagatcttcacccgcatcagcacagatgatgacatcgagaccaacagcagcaccttcatgaaggagatgaaggagatcgcctacatcctgcacaatgccaatgacaagagcctcatcctgattgatgagctgggccggggcaccaacacagaggagggcatcggcatctgctatgctgtgtgtgagtacctgctgagcctgaaggccttcaccctgtttgccacccacttcctggagctgtgccacattgatgccctgtaccccaacgtggagaacatgcactttgaggtgcagcacgtgaagaacaccagcaggaacaaggaggccatcctgtacacctacaagctgagcaagggcctgacagaggagaagaactacggcctgaaggctgctgaggtgagcagcctgccccccagcatcgtgctggatgccaaggagatcaccacccagatcacccggcagatcctgcagaaccagaggagcaccccagagatggagcggcagagagctgtgtaccacctggccacccggctggtgcagacagccaggaacagccagctggaccctgacagcctgcgcatctacctgagcaacctgaagaagaagtacaaggaggacttccccaggacagagcaggtgcctgagaagacagaggagtag

SEQ ID NO: 20630 - DNA, 813 bp, synthetic construct
  misc_feature 1..813: note = Description of Artificial Sequence: Synthetic coding sequence
  source 1..813: mol_type = other DNA
atggccagcctgggcgccaaccccaggaggaccccccagggccccaggcctggagctgccagcagcggcttccccagccctgcccctgtgcccggcccccgggaggccgaggaggaggaggtggaggaggaggaggagctggccgagatccacctgtgtgtgctgtggaacagcggctacctgggcatcgcctactatgacaccagtgacagcaccatccacttcatgccagatgccccagaccacgagagcctgaagctgctgcagagggtgctggatgagatcaacccccagagcgtggtgaccagcgccaagcaggatgagaacatgacccgcttcctgggcaagctggccagccaggagcaccgggagcccaagaggcctgagatcatcttcctgcccagcgtggactttggcctggagatcagcaagcagaggctgctgagcggcaactacagcttcatcccagatgccatgacagccacagagaagatcctcttcctgagcagcatcatcccctttgactgcctgctgactgtgcgggccctgggcggcctgctgaagttcctgggcagaagaagaattggagtggagctggaggactacaacgtgtctgtgcccatcctgggcttcaagaagttcatgctgacccacctggtgaacatcgaccaggacacctacagcgtgctgcagatcttcaagtctgagagccaccccagcgtgtacaaggtggccagcggcctgaaggagggcctgagcctgtttggcatcctgaaccgctgccactgcaagtggggcgagaagctgctgtag

SEQ ID NO: 20631 - DNA, 813 bp, synthetic construct; identical to SEQ ID NO: 20630
  misc_feature 1..813: note = Description of Artificial Sequence: Synthetic coding sequence
  source 1..813: mol_type = other DNA

SEQ ID NO: 20632 - DNA, 585 bp, synthetic construct
  misc_feature 1..585: note = Description of Artificial Sequence: Synthetic coding sequence
  source 1..585: mol_type = other DNA
atggccagcctgggcgccaaccccaggaggaccccccagggccccaggcctggagctgccagcagcggcttccccagccctgcccctgtgcccggcccccgggaggccgaggaggaggaggtggaggaggaggaggagctggccgagatccacctgtgtgtgctgtggaacagcggctacctgggcatcgcctactatgacaccagtgacagcaccatccacttcatgccagatgccccagaccacgagagcctgaagctgctgcagagggtgctggatgagatcaacccccagagcgtggtgaccagcgccaagcaggatgagaacatgacccgcttcctgggcaagctggccagccaggagcaccgggagcccaagaggcctgagatcatcttcctgcccagcgtggactttggcctggagatcagcaagcagaggctgctgagcggcaactacagcttcatcccagatgccatgacagccacagagaagatcctcttcctgagcagcatcatcccctttgactgcctgctgactgtgcgggccctgggcggcctgctgaagttcctgggcagaagaagatag

SEQ ID NO: 20633 - DNA, 813 bp, synthetic construct; identical to SEQ ID NO: 20630
  misc_feature 1..813: note = Description of Artificial Sequence: Synthetic coding sequence
  source 1..813: mol_type = other DNA

SEQ ID NO: 20634 - DNA, 864 bp, synthetic construct
  misc_feature 1..864: note = Description of Artificial Sequence: Synthetic coding sequence
  source 1..864: mol_type = other DNA
atggccagcctgggcgccaaccccaggaggaccccccagggccccaggcctggagctgccagcagcggcttccccagccctgcccctgtgcccggcccccgggaggccgaggaggaggaggtggaggaggaggaggagctggccgagatccacctgtgtgtgctgtggaacagcggctacctgggcatcgcctactatgacaccagtgacagcaccatccacttcatgccagatgccccagaccacgagagcctgaagctgctgcagagggtgctggatgagatcaacccccagagcgtggtgaccagcgccaagcaggatgagaacatgacccgcttcctgggcaagctggccagccaggagcaccgggagcccaagaggcctgagatcatcttcctgcccagcgtggactttggcctggagatcagcaagcagaggctgctgagcggcaactacagcttcatcccagatgccatgacagccacagagaagatcctcttcctgagcagcatcatcccctttgactgcctgctgaccccacctggggacctgcgcttcacccccatccccctgctgatccccagccaggtgcgggccctgggcggcctgctgaagttcctgggcagaagacgcatcggcgtggagctggaggactacaacgtgtctgtgcccatcctgggcttcaagaagttcatgctgacccacctggtgaacatcgaccaggacacctacagcgtgctgcagatcttcaagtctgagagccaccccagcgtgtacaaggtggccagcggcctgaaggagggcctgagcctgtttggcatcctgaaccgctgccactgcaagtggggcgagaagctgctgtag

SEQ ID NO: 20635 - DNA, 324 bp, synthetic construct
  misc_feature 1..324: note = Description of Artificial Sequence: Synthetic coding sequence
  source 1..324: mol_type = other DNA
aagatcctcttcctgagcagcatcatcccctttgactgcctgctgactgtgcgggccctgggcggcctgctgaagttcctgggcagaagacgcatcggcgtggagctggaggactacaacgtgtctgtgcccatcctgggcttcaagaagttcatgctgacccacctggtgaacatcgaccaggacacctacagcgtgctgcagatcttcaagtctgagagccaccccagcgtgtacaaggtggccagcggcctgaaggagggcctgagcctgtttggcatcctgaaccgctgccactgcaagtggggcgagaagctgctgtag

SEQ ID NO: 20636 - DNA, 765 bp, synthetic construct
  misc_feature 1..765: note = Description of Artificial Sequence: Synthetic coding sequence
  source 1..765: mol_type = other DNA
atggccagcctgggcgccaaccccaggaggaccccccagggccccaggcctggagctgccagcagcggcttccccagccctgcccctgtgcccggcccccgggaggccgaggaggaggaggtggaggaggaggaggagctggccgagatccacctgtgtgtgctgtggaacagcggctacctgggcatcgcctactatgacaccagtgacagcaccatccacttcatgccagatgccccagaccacgagagcctgaagctgctgcagagggtgctggatgagatcaacccccagagcgtggtgaccagcgccaagcaggatgagaacatgacccgcttcctgggcaagctggccagccaggagcaccgggagcccaagaggcctgagatcatcttcctgcccagcgtggactttggcctggagatcagcaagcagaggctgctgagcggcaactacagcttcatcccagatgccatgacagccacagagaagatcctcttcctgagcagcatcatcccctttgactgcctgctgactgtgcgggccctgggcggcctgctgaagttcctgggcagaagaagaattggagtggagctggaggactacaacgtgtctgtgcccatcctgggcttcaagaagttcatgctgacccacctggtgaacatcgaccaggacacctaccgcctggagtgcaatggagccatcagcgcccagtgcaacctgtgcctgctgggcagcagtgacagccctgccagcgccagctag

SEQ ID NO: 20637 - DNA, 1542 bp, synthetic construct
  misc_feature 1..1542: note = Description of Artificial Sequence: Synthetic coding sequence
  source 1..1542: mol_type = other DNA
atggccatggagattgacagcaggcctgggggcctgcccggcagcagctgcaacctgggcgccgcccgggagcacatgcaggccgtgaccaggaactacatcacccacccccgggtgacctacagaacagtgtgcagcgtgaatggccccctggtggtgctggacagagtgaagtttgcccagtatgcagaaattgtgcacttcaccctgcctgatggcacccagaggagcggccaggtgctggaggtggccggcaccaaggccatcgtgcaggtgtttgagggcaccagcggcattgatgccaggaagaccacctgtgagttcaccggggacatcctgcggacccctgtgtctgaggacatgctgggccgggtcttcaatggaagtggcaagcccatcgacaagggccctgtggtgatggccgaggacttcctggacatcaatggccagcccatcaacccccacagccgcatctacccagaggagatgatccagacaggcatcagccccattgatgtgatgaacagcatcgcccggggccagaagatccccatcttctctgctgctggcctgccccacaatgaaattgctgcccagatctgccggcaggccggcctggtgaagaagagcaaggctgtgctggactaccatgatgacaactttgccatcgtgtttgctgccatgggcgtgaacatggagacagcccgcttcttcaagagtgactttgagcagaatggcaccatgggaaatgtgtgcctcttcctgaacctggccaatgaccccaccatcgagcgcatcatcaccccccggctggccctgaccacagctgagttcctggcctaccagtgtgagaagcacgtgctggtgatcctgacagacatgagcagctatgcagaggccctgcgggaggtgtctgctgcccgggaggaggtgcccggccggcggggcttccctggctacatgtacacagacctggccaccatctatgagcgggccggccgggtggagggccggggcggcagcatcacccagatccccatcctgaccatgcccaatgatgacatcacccaccccatcccagacctgaccggcttcatcacagagggccagatctacgtggaccggcagctgcacaaccggcagatctacccacccatcaacgtgctgcccagcctgagccggctgatgaagagcgccatcggggagggcatgaccaggaaggaccatggagatgtgagcaaccagctgtatgcctgctacgccatcggcaaggatgtgcaggccatgaaggctgtggtgggggaggaggccctgaccagcgaggacctgctgtacctggagttcctgcagaagtttgagaagaacttcatcaaccagggcccctatgaaaatagatctgtgtttgagagcctggacctgggctggaagctgctgcgcatcttccccaaggagatgctgaagaggatcccccaggccgtgattgatgagttctacagccgggagggcgccctgcaggacctggccccagacacagccctgtag

SEQ ID NO: 20638 - DNA, 759 bp, synthetic construct
  misc_feature 1..759: note = Description of Artificial Sequence: Synthetic coding sequence
  source 1..759: mol_type = other DNA
atgagccggcagagcaccctgtacagcttcttccccaagagccctgccctgagtgatgccaacaaggccagcgcccgggccagccgggagggcggccgggctgctgctgcccctggggccagccccagccctggaggagatgctgcctggagcgaggccggccctggcccccggcccctggcccggagcgccagcccccccaaggccaagaacctgaatggaggcctgcggcgctctgtggccccagctgcccccaccagctgtgacttcagccctggggacctggtgtgggccaagatggagggctacccctggtggccctgcctggtgtacaaccacccctttgatggcaccttcatccgggagaagggcaagtctgtgcgggtgcacgtgcagttctttgatgacagccccacccggggctgggtgtccaagaggctgctgaagccctacacaggcagcaagagcaaggaggcccagaagggcggccacttctacagcgccaagccagagatcctgcgggccatgcagagagcagatgaggccctgaacaaggacaagatcaagaggctggagctggccgtgtgtgatgagcccagcgagcctgaggaggaggaggagatggaggtgggcaccacctacgtgacagacaagtcagaagaagataatgaaattgaaagtgaggaggaggtgcagcccaagacccagggcagcagaagaagcagccggcagatcaagaagaggaggaagaagaggtag

SEQ ID NO: 20639 - DNA, 3177 bp, synthetic construct
  misc_feature 1..3177: note = Description of Artificial Sequence: Synthetic coding sequence
  source 1..3177: mol_type = other DNA
atggtgactggaaatggcagcctgaagaggaagagcagcaggaaggagaccccatctgccaccaagcaggccaccagcatcagcagcgagaccaagaacaccctgcgggccttcagcgccccccagaacagcgagagccaggcccacgtgtctggaggaggagatgacagcagccggcccaccgtgtggtaccacgagaccctggagtggctgaaggaggagaagagaagagatgagcacagaagaagaccagaccacccagactttgatgccagcaccctgtatgtgcctgaggacttcctgaacagctgcaccccaggcatgaggaagtggtggcagatcaagagccagaactttgacctggtgatctgctacaaggtgggcaagttctatgagctgtaccacatggatgccctgattggagtgtctgagctgggcctggtgttcatgaagggcaactgggcccacagcggcttccctgagatcgccttcggccgctacagcgacagcctggtgcagaagggctacaaggtggcccgggtggagcagacagagaccccagagatgatggaggcccgctgcaggaagatggcccacatcagcaaatatgacagagtggtgcggcgggagatctgccgcatcatcaccaagggcacccagacctacagcgtgctggagggggaccccagcgagaactacagcaagtacctgctgagcctgaaggagaaggaggaggacagcagcggccacacccgggcctacggcgtgtgctttgtggacaccagcctgggcaagttcttcatcggccagttcagtgatgacagacactgcagccgcttccgcaccctggtggcccactacccacctgtgcaggtgctgtttgagaagggcaacctgagcaaggagaccaagaccatcctgaagagcagcctgagctgcagcctgcaggagggcctcatccctggcagccagttctgggatgccagcaagaccctgcggaccctgctggaggaggagtacttccgggagaagctgagtgatggcattggagtgatgctgccccaggtgctgaagggcatgaccagcgagagtgacagcatcggcctgaccccaggagagaagtctgagctggccctgagcgccctgggcggctgtgtgttctacctgaagaagtgcctgattgaccaggagctgctgtccatggccaactttgaggagtacatccccctggacagcgacacagtgtccaccaccaggtctggggccatcttcaccaaggcctaccagaggatggtgctggatgctgtgaccctgaacaacctggagatcttcctgaatggcaccaacggcagcacagagggcaccctgctggagcgggtggacacctgccacaccccatttgggaagaggctgctgaagcagtggctgtgtgcccccctgtgcaaccactacgccatcaatgaccggctggatgccatcgaggacctgatggtggtgcctgacaagatcagcgaggtggtggagctgctgaagaagctgcctgacctggagcggctgctgagcaagatccacaacgtgggcagccccctgaagagccagaaccacccagacagccgggccatcatgtatgaggagaccacctacagcaagaagaagatcatcgacttcctgagcgccctggagggcttcaaggtgatgtgcaagatcatcggcatcatggaggaggtggctgatggcttcaagagcaagatcctgaagcaggtgatcagcctgcagaccaagaaccctgagggccgcttcccagacctgactgtggagctgaaccgctgggacacagcctttgaccacgagaaggccaggaagacaggcctcatcacccccaaggccggctttgacagcgactatgaccaggccctggccgacatccgggagaatgagcagagcctgctggagtacctggagaagcagaggaaccgcatcggctgcaggaccatcgtgtactggggcatcggcaggaaccgctaccagctggagatccctgagaacttcaccaccaggaacctgcctgaggagtatgagctgaagagcaccaagaagggctgcaagcgctactggaccaagaccatcgagaagaagctggccaacctgatcaatgctgaggagaggagagatgtgtccctgaaggactgcatgaggaggctcttctacaactttgacaagaactacaaggactggcagagcgctgtggagtgcatcgctgtgctggatgtgctgctgtgcctggccaactacagcagaggaggagatggccccatgtgcaggcctgtgatcctgctgcctgaggacaccccacccttcctggagctgaagggcagccgccacccctgcatcaccaagaccttctttggagatgacttcatccccaatgacatcctgattggctgtgaggaggaggagcaggagaatggcaaggcctactgtgtgctggtgacaggccccaacatgggcggcaagagcaccctgatgaggcaggccggcctgctggccgtgatggcccagatgggctgctacgtgcctgctgaggtgtgccgcctgacccccatcgacagagtcttcacccggctgggcgccagtgaccgcatcatgtctggagagagcaccttctttgtggagctgtctgaaacagccagcatcctgatgcacgccacagcccacagcctggtgctggtggatgagctgggccggggcacagccacctttgatggaacagccatcgccaatgctgtggtgaaggagctggccgagaccatcaagtgcaggaccctcttcagcacccactaccacagcctggtggaggactacagccagaatgtggccgtgcggctgggccacatggcctgcatggtggagaatgaatgtgaggaccccagccaggagaccatcaccttcctgtacaagttcatcaagggggcctgccccaagagctatggcttcaatgctgcccggctggccaacctgcctgaggaggtgatccagaagggccacaggaaggcccgggagtttgagaagatgaaccagagcctgcggctcttccgggaggtgtgcctggccagcgagaggagcacagtggatgctgaggccgtgcacaagctgctgaccctcatcaaggagctgtag

SEQ ID NO: 20640 - DNA, 3693 bp, synthetic construct
  misc_feature 1..3693: note = Description of Artificial Sequence: Synthetic coding sequence
  source 1..3693: mol_type = other DNA
atgagccggcagagcaccctgtacagcttcttccccaagagccctgccctgagtgatgccaacaaggccagcgcccgggccagccgggagggcggccgggctgctgctgcccctggggccagccccagccctggaggagatgctgcctggagcgaggccggccctggcccccggcccctggcccggagcgccagcccccccaaggccaagaacctgaatggaggcctgcggcgctctgtgggcaccacctacgtgacagacaagtcagaagaagataatgaaattgaaagtgaggaggaggtgcagcccaagacccagggcagcagaagaagcagccggcagatcaagaagagaagagtcatcagtgacagcgagagtgacatcggcggcagtgatgtggagttcaagccagacaccaaggaggagggcagcagtgatgagatcagcagcggcgtgggggacagcgagagcgagggcctgaacagccctgtgaaggtggccaggaagaggaagaggatggtgactggaaatggcagcctgaagaggaagagcagcaggaaggagaccccatctgccaccaagcaggccaccagcatcagcagcgagaccaagaacaccctgcgggccttcagcgccccccagaacagcgagagccaggcccacgtgtctggaggaggagatgacagcagccggcccaccgtgtggtaccacgagaccctggagtggctgaaggaggagaagagaagagatgagcacagaagaagaccagaccacccagactttgatgccagcaccctgtatgtgcctgaggacttcctgaacagctgcaccccaggcatgaggaagtggtggcagatcaagagccagaactttgacctggtgatctgctacaaggtgggcaagttctatgagctgtaccacatggatgccctgattggagtgtctgagctgggcctggtgttcatgaagggcaactgggcccacagcggcttccctgagatcgccttcggccgctacagcgacagcctggtgcagaagggctacaaggtggcccgggtggagcagacagagaccccagagatgatggaggcccgctgcaggaagatggcccacatcagcaaatatgacagagtggtgcggcgggagatctgccgcatcatcaccaagggcacccagacctacagcgtgctggagggggaccccagcgagaactacagcaagtacctgctgagcctgaaggagaaggaggaggacagcagcggccacacccgggcctacggcgtgtgctttgtggacaccagcctgggcaagttcttcatcggccagttcagtgatgacagacactgcagccgcttccgcaccctggtggcccactacccacctgtgcaggtgctgtttgagaagggcaacctgagcaaggagaccaagaccatcctgaagagcagcctgagctgcagcctgcaggagggcctcatccctggcagccagttctgggatgccagcaagaccctgcggaccctgctggaggaggagtacttccgggagaagctgagtgatggcattggagtgatgctgccccaggtgctgaagggcatgaccagcgagagtgacagcatcggcctgaccccaggagagaagtctgagctggccctgagcgccctgggcggctgtgtgttctacctgaagaagtgcctgattgaccaggagctgctgtccatggccaactttgaggagtacatccccctggacagcgacacagtgtccaccaccaggtctggggccatcttcaccaaggcctaccagaggatggtgctggatgctgtgaccctgaacaacctggagatcttcctgaatggcaccaacggcagcacagagggcaccctgctggagcgggtggacacctgccacaccccatttgggaagaggctgctgaagcagtggctgtgtgcccccctgtgcaaccactacgccatcaatgaccggctggatgccatcgaggacctgatggtggtgcctgacaagatcagcgaggtggtggagctgctgaagaagctgcctgacctggagcggctgctgagcaagatccacaacgtgggcagccccctgaagagccagaaccacccagacagccgggccatcatgtatgaggagaccacctacagcaagaagaagatcatcgacttcctgagcgccctggagggcttcaaggtgatgtgcaagatcatcggcatcatggaggaggtggctgatggcttcaagagcaagatcctgaagcaggtgatcagcctgcagaccaagaaccctgagggccgcttcccagacctgactgtggagctgaaccgctgggacacagcctttgaccacgagaaggccaggaagacaggcctcatcacccccaaggccggctttgacagcgactatgaccaggccctggccgacatccgggagaatgagcagagcctgctggagtacctggagaagcagaggaaccgcatcggctgcaggaccatcgtgtactggggcatcggcaggaaccgctaccagctggagatccctgagaacttcaccaccaggaacctgcctgaggagtatgagctgaagagcaccaagaagggctgcaagcgctactggaccaagaccatcgagaagaagctggccaacctgatcaatgctgaggagaggagagatgtgtccctgaaggactgcatgaggaggctcttctacaactttgacaagaactacaaggactggcagagcgctgtggagtgcatcgctgtgctggatgtgctgctgtgcctggccaactacagcagaggaggagatggccccatgtgcaggcctgtgatcctgctgcctgaggacaccccacccttcctggagctgaagggcagccgccacccctgcatcaccaagaccttctttggagatgacttcatccccaatgacatcctgattggctgtgaggaggaggagcaggagaatggcaaggcctactgtgtgctggtgacaggccccaacatgggcggcaagagcaccctgatgaggcaggccggcctgctggccgtgatggcccagatgggctgctacgtgcctgctgaggtgtgccgcctgacccccatcgacagagtcttcacccggctgggcgccagtgaccgcatcatgtctggagagagcaccttctttgtggagctgtctgaaacagccagcatcctgatgcacgccacagcccacagcctggtgctggtggatgagctgggccggggcacagccacctttgatggaacagccatcgccaatgctgtggtgaaggagctggccgagaccatcaagtgcaggaccctcttcagcacccactaccacagcctggtggaggactacagccagaatgtggccgtgcggctgggccacatggcctgcatggtggagaatgaatgtgaggaccccagccaggagaccatcaccttcctgtacaagttcatcaagggggcctgccccaagagctatggcttcaatgctgcccggctggccaacctgcctgaggaggtgatccagaagggccacaggaaggcccgggagtttgagaagatgaaccagagcctgcggctcttccgggaggtgtgcctggccagcgagaggagcacagtggatgctgaggccgtgcacaagctgctgaccctcatcaaggagctgtag

SEQ ID NO: 20641 - DNA, 975 bp, synthetic construct
  misc_feature 1..975: note = Description of Artificial Sequence: Synthetic coding sequence
  source 1..975: mol_type = other DNA
atgaggaggctcttctacaactttgacaagaactacaaggactggcagagcgctgtggagtgcatcgctgtgctggatgtgctgctgtgcctggccaactacagcagaggaggagatggccccatgtgcaggcctgtgatcctgctgcctgaggacaccccacccttcctggagctgaagggcagccgccacccctgcatcaccaagaccttctttggagatgacttcatccccaatgacatcctgattggctgtgaggaggaggagcaggagaatggcaagatcgtgtgcctgctgctggaccagatctggggcgccagcctgaggatgaggcaggccggcctgctggccgtgatggcccagatgggctgctacgtgcctgctgaggtgtgccgcctgacccccatcgacagagtcttcacccggctgggcgccagtgaccgcatcatgtctggagagagcaccttctttgtggagctgtctgaaacagccagcatcctgatgcacgccacagcccacagcctggtgctggtggatgagctgggccggggcacagccacctttgatggaacagccatcgccaatgctgtggtgaaggagctggccgagaccatcaagtgcaggaccctcttcagcacccactaccacatcagcagaagactcttcagcaagtgctgctgcctgggccacatggcctgcatggtggagaatgaatgtgaggaccccagccaggagaccatcaccttcctgtacaagttcatcaagggggcctgccccaagagctatggcttcaatgctgcccggctggccaacctgcctgaggaggtgatccagaagggccacaggaaggcccgggagtttgagaagatgaaccagagcctgcggctcttccgggaggtgtgcctggccagcgagaggagcacagtggatgctgaggccgtgcacaagctgctgaccctcatcaaggagctgtag

SEQ ID NO: 20642 - DNA, 3201 bp, synthetic construct
  misc_feature 1..3201: note = Description of Artificial Sequence: Synthetic coding sequence
  source 1..3201: mol_type = other DNA
atgagccggcagagcaccctgtacagcttcttccccaagagccctgccctgagtgatgccaacaaggccagcgcccgggccagccgggagggcggccgggccgcctgcccccggggcctgtccttcccccggcggggctgcggcctggagcggggctgggcctggaggcccctggcccggagcgccagcccccccaaggccaagaacctgaatggaggcctgcggcgctctgtggccccagctgcccccaccagctgtgacttcagccctggggacctggtgtgggccaagatggagggctacccctggtggccctgcctggtgtacaaccacccctttgatggcaccttcatccgggagaagggcaagtctgtgcgggtgcacgtgcagttctttgatgacagccccacccggggctgggtgtccaagaggctgctgaagccctacacaggcagcaagagcaaggaggcccagaagggcggccacttctacagcgccaagccagagatcctgcgggccatgcagagagcagatgaggccctgaacaaggacaagatcaagaggctggagctggccgtgtgtgatgagcccagcgagcctgaggaggaggaggagatggaggtgggcaccacctacgtgacagacaagtcagaagaagataatgaaattgaaagtgaggaggaggtgcagcccaagacccagggcagcagaagaagcagccggcagatcaagaagagaagagtcatcagtgacagcgagagtgacatcggcggcagtgatgtggagttcaagccagacaccaaggaggagggcagcagtgatgagatcagcagcggcgtgggggacagcgagagcgagggcctgaacagccctgtgaaggtggccaggaagaggaagaggatggtgactggaaatggcagcctgaagaggaagagcagcaggaaggagaccccatctgccaccaagcaggccaccagcatcagcagcgagaccaagaacaccctgcgggccttcagcgccccccagaacagcgagagccaggcccacgtgtctggaggaggagatgacagcagccggcccaccgtgtggtaccacgagaccctggagtggctgaaggaggagaagagaagagatgagcacagaagaagaccagaccacccagactttgatgccagcaccctgtatgtgcctgaggacttcctgaacagctgcaccccaggcatgaggaagtggtggcagatcaagagccagaactttgacctggtgatctgctacaaggtgggcaagttctatgagctgtaccacatggatgccctgattggagtgtctgagctgggcctggtgttcatgaagggcaactgggcccacagcggcttccctgagatcgccttcggccgctacagcgacagcctggtgcagaagggctacaaggtggcccgggtggagcagacagagaccccagagatgatggaggcccgctgcaggaagatggcccacatcagcaaatatgacagagtggtgcggcgggagatctgccgcatcatcaccaagggcacccagacctacagcgtgctggagggggaccccagcgagaactacagcaagtacctgctgagcctgaaggagaaggaggaggacagcagcggccacacccgggcctacggcgtgtgctttgtggacaccagcctgggcaagttcttcatcggccagttcagtgatgacagacactgcagccgcttccgcaccctggtggcccactacccacctgtgcaggtgctgtttgagaagggcaacctgagcaaggagaccaagaccatcctgaagagcagcctgagctgcagcctgcaggagggcctcatccctggcagccagttctgggatgccagcaagaccctgcggaccctgctggaggaggagtacttccgggagaagctgagtgatggcattggagtgatgctgccccaggtgctgaagggcatgaccagcgagagtgacagcatcggcctgaccccaggagagaagtctgagctggccctgagcgccctgggcggctgtgtgttctacctgaagaagtgcctgattgaccaggagctgctgtccatggccaactttgaggagtacatccccctggacagcgacacagtgtccaccaccaggtctggggccatcttcaccaaggcctaccagaggatggtgctggatgctgtgaccctgaacaacctggagatcttcctgaatggcaccaacggcagcacagagggcaccctgctggagcgggtggacacctgccacaccccatttgggaagaggctgctgaagcagtggctgtgtgcccccctgtgcaaccactacgccatcaatgaccggctggatgccatcgaggacctgatggtggtgcctgacaagatcagcgaggtggtggagctgctgaagaagctgcctgacctggagcggctgctgagcaagatccacaacgtgggcagccccctgaagagccagaaccacccagacagccgggccatcatgtatgaggagaccacctacagcaagaagaagatcatcgacttcctgagcgccctggagggcttcaaggtgatgtgcaagatcatcggcatcatggaggaggtggctgatggcttcaagagcaagatcctgaagcaggtgatcagcctgcagaccaagaaccctgagggccgcttcccagacctgactgtggagctgaaccgctgggacacagcctttgaccacgagaaggccaggaagacaggcctcatcacccccaaggccggctttgacagcgactatgaccaggccctggccgacatccgggagaatgagcagagcctgctggagtacctggagaagcagaggaaccgcatcggctgcaggaccatcgtgtactggggcatcggcaggaaccgctaccagctggagatccctgagaacttcaccaccaggaacctgcctgaggagtatgagctgaagagcaccaagaagggctgcaagcgctactggaccaagaccatcgagaagaagctggccaacctgatcaatgctgaggagaggagagatgtgtccctgaaggactgcatgaggaggctcttctacaactttgacaagaactacaaggactggcagagcgctgtggagtgcatcgctgtgctgggcaagaccctgaacaagctggtgctgcggctgtag

SEQ ID NO: 20643 - DNA, 1569 bp, synthetic construct
  misc_feature 1..1569: note = Description of Artificial Sequence: Synthetic coding sequence
  source 1..1569: mol_type = other DNA
atgaggaagcccagggctgctgtgggcagcggccacaggaagcaggccgccagccaggagggccggcagaagcacgccaagaacaacagccaggccaagcccagcgcctgtgatgctggcctggcccggcagcctgaggaggtggtgctgcaggcctctgtgagcagctaccacctgttcagagatgtggccgaggtgacagccttccggggcagcctgctgtcctggtatgaccaggagaagagggacctgccctggaggcggcgggcagaagatgagatggacctggaccggcgggcctatgctgtgtgggtgtctgaggtgatgctgcagcagacccaggtggccaccgtcatcaactactacacaggctggatgcagaagtggcccaccctgcaggacctggccagcgccagcctggaggaggtgaaccagctgtgggccggcctgggctactacagccggggccgccgcctgcaggagggcgccaggaaggtggtggaggagctgggcggccacatgcccaggacagctgagaccctgcagcagctgctgcccggggtgggccgctacacagctggggccatcgccagcatcgccttcggccaggccactggagtggtggatggaaatgtggcccgggtgctgtgccgggtgcgggccatcggggctgaccccagcagcaccctggtgtcccagcagctgtggggcctggcccagcagctggtggaccctgcccggcctggggacttcaaccaggccgccatggagctgggcgccaccgtgtgcaccccccagaggcccctgtgcagccagtgccctgtggagagcctgtgccgggcccggcagagggtggagcaggagcagctgctggccagcggcagcctgagcggcagcccagatgtggaggagtgtgcccccaacacaggccagtgccacctgtgcctgcccccatctgagccctgggaccagaccctgggcgtggtgaacttccccaggaaggccagcaggaagccaccccgggaggagagcagcgccacctgtgtgctggagcagcccggggccctgggcgcccagatcctgctggtgcagaggcccaacagcggcctgctggccggcctgtgggagttccccagcgtgacctgggagcccagcgagcagctgcagaggaaggccctgctgcaggagctgcagcgctgggccggccccctgcctgccacccacctgcggcacctgggggaggtggtgcacaccttcagccacatcaagctgacctaccaggtgtatggcctggccctggagggccagacccctgtgaccaccgtgcccccaggggcccgctggctgacccaggaggagttccacacagctgctgtgtccacagccatgaagaaggtgttccgggtgtaccagggccagcagcccggcacctgcatgggcagcaagaggagccaggtgagcagcccctgcagcaggaagaagcccaggatgggccagcaggtgctggacaacttcttccgcagccacatcagcacagatgcccacagcctgaacagcgctgcccagtag

SEQ ID NO: 20644 - DNA, 1566 bp, synthetic construct
  misc_feature 1..1566: note = Description of Artificial Sequence: Synthetic coding sequence
  source 1..1566: mol_type = other DNA
atgaggaagcccagggctgctgtgggcagcggccacaggaagcaggccgccagccaggagggccggcagaagcacgccaagaacaacagccaggccaagcccagcgcctgtgatggcctggcccggcagcctgaggaggtggtgctgcaggcctctgtgtcctcctaccacctgttcagagatgtggccgaggtgacagccttccggggcagcctgctgtcctggtatgaccaggagaagagggacctgccctggaggagaagagcagaagatgagatggacctggacagaagagcctatgctgtgtgggtgtctgaggtgatgctgcagcagacccaggtggccaccgtcatcaactactacacaggctggatgcagaagtggcccaccctgcaggacctggccagcgccagcctggaggaggtgaaccagctgtgggccggcctgggctactacagccggggccggcggctgcaggagggcgccaggaaggtggtggaggagctgggcggccacatgcccaggacagctgagaccctgcagcagctgctgcccggggtgggccgctacacagctggggccatcgccagcatcgccttcggccaggccaccggggtggtggatggaaatgtggcccgggtgctgtgccgggtgcgggccatcggggctgaccccagcagcaccctggtgtcccagcagctgtggggcctggcccagcagctggtggaccctgcccggcctggggacttcaaccaggccgccatggagctgggcgccaccgtgtgcaccccccagaggcccctgtgcagccagtgccctgtggagagcctgtgccgggcccggcagagggtggagcaggagcagctgctggccagcggcagcctgagcggcagcccagatgtggaggagtgtgcccccaacacaggccagtgccacctgtgcctgccccccagcgagccctgggaccagaccctgggcgtggtgaacttccccaggaaggccagcaggaagccaccccgggaggagagcagcgccacctgtgtgctggagcagcccggggccctgggcgcccagatcctgctggtgcagaggcccaacagcggcctgctggccggcctgtgggagttccccagcgtgacctgggagcccagcgagcagctgcagaggaaggccctgctgcaggagctgcagcgctgggccggccccctgcctgccacccacctgcggcacctgggggaggtggtgcacaccttcagccacatcaagctgacctaccaggtgtatggcctggccctggagggccagacccctgtgaccaccgtgcccccaggggcccgctggctgacccaggaggagttccacacagctgctgtgtccacagccatgaagaaggtgttccgggtgtaccagggccagcagcccggcacctgcatgggcagcaagaggagccaggtgagcagcccctgcagcaggaagaagcccaggatgggccagcaggtgctggacaacttcttccgcagccacatcagcacagatgcccacagcctgaacagcgctgcccagtag

SEQ ID NO: 20645 - DNA, 1641 bp, synthetic construct
  misc_feature 1..1641: note = Description of Artificial Sequence: Synthetic coding sequence
  source 1..1641: mol_type = other DNA
atgacccccctggtgtcccggctgagccggctgtgggccatcatgaggaagcccagggctgctgtgggcagcggccacaggaagcaggccgccagccaggagggccggcagaagcacgccaagaacaacagccaggccaagcccagcgcctgtgatggcatgattgctgaatgtcctggggccccagctggcctggcccggcagcctgaggaggtggtgctgcaggcctctgtgagcagctaccacctgttcagagatgtggccgaggtgacagccttccggggcagcctgctgtcctggtatgaccaggagaagagggacctgccctggaggcggcgggcagaagatgagatggacctggaccggcgggcctatgctgtgtgggtgtctgaggtgatgctgcagcagacccaggtggccaccgtcatcaactactacacaggctggatgcagaagtggcccaccctgcaggacctggccagcgccagcctggaggaggtgaaccagctgtgggccggcctgggctactacagccggggccgccgcctgcaggagggcgccaggaaggtggtggaggagctgggcggccacatgcccaggacagctgagaccctgcagcagctgctgcccggggtgggccgctacacagctggggccatcgccagcatcgccttcggccaggccactggagtggtggatggaaatgtggcccgggtgctgtgccgggtgcgggccatcggggctgaccccagcagcaccctggtgtcccagcagctgtggggcctggcccagcagctggtggaccctgcccggcctggggacttcaaccaggccgccatggagctgggcgccaccgtgtgcaccccccagaggcccctgtgcagccagtgccctgtggagagcctgtgccgggcccggcagagggtggagcaggagcagctgctggccagcggcagcctgagcggcagcccagatgtggaggagtgtgcccccaacacaggccagtgccacctgtgcctgcccccatctgagccctgggaccagaccctgggcgtggtgaacttccccaggaaggccagcaggaagccaccccgggaggagagcagcgccacctgtgtgctggagcagcccggggccctgggcgcccagatcctgctggtgcagaggcccaacagcggcctgctggccggcctgtgggagttccccagcgtgacctgggagcccagcgagcagctgcagaggaaggccctgctgcaggagctgcagcgctgggccggccccctgcctgccacccacctgcggcacctgggggaggtggtgcacaccttcagccacatcaagctgacctaccaggtgtatggcctggccctggagggccagacccctgtgaccaccgtgcccccaggggcccgctggctgacccaggaggagttccacacagctgctgtgtccacagccatgaagaaggtgttccgggtgtaccagggccagcagcccggcacctgcatgggcagcaagaggagccaggtgagcagcccctgcagcaggaagaagcccaggatgggccagcaggtgctggacaacttcttccgcagccacatcagcacagatgcccacagcctgaacagcgctgcccagtag

SEQ ID NO: 20646 - DNA, 1599 bp, synthetic construct
  misc_feature 1..1599: note = Description of Artificial Sequence: Synthetic coding sequence
  source 1..1599: mol_type = other DNA
atgaggaagcccagggctgctgtgggcagcggccacaggaagcaggccgccagccaggagggccggcagaagcacgccaagaacaacagccaggccaagcccagcgcctgtgatggcatgattgctgaatgtcctggggccccagctggcctggcccggcagcctgaggaggtggtgctgcaggcctctgtgagcagctaccacctgttcagagatgtggccgaggtgacagccttccggggcagcctgctgtcctggtatgaccaggagaagagggacctgccctggaggcggcgggcagaagatgagatggacctggaccggcgggcctatgctgtgtgggtgtctgaggtgatgctgcagcagacccaggtggccaccgtcatcaactactacacaggctggatgcagaagtggcccaccctgcaggacctggccagcgccagcctggaggaggtgaaccagctgtgggccggcctgggctactacagccggggccgccgcctgcaggagggcgccaggaaggtggtggaggagctgggcggccacatgcccaggacagctgagaccctgcagcagctgctgcccggggtgggccgctacacagctggggccatcgccagcatcgccttcggccaggccactggagtggtggatggaaatgtggcccgggtgctgtgccgggtgcgggccatcggggctgaccccagcagcaccctggtgtcccagcagctgtggggcctggcccagcagctggtggaccctgcccggcctggggacttcaaccaggccgccatggagctgggcgccaccgtgtgcaccccccagaggcccctgtgcagccagtgccctgtggagagcctgtgccgggcccggcagagggtggagcaggagcagctgctggccagcggcagcctgagcggcagcccagatgtggaggagtgtgcccccaacacaggccagtgccacctgtgcctgcccccatctgagccctgggaccagaccctgggcgtggtgaacttccccaggaaggccagcaggaagccaccccgggaggagagcagcgccacctgtgtgctggagcagcccggggccctgggcgcccagatcctgctggtgcagaggcccaacagcggcctgctggccggcctgtgggagttccccagcgtgacctgggagcccagcgagcagctgcagaggaaggccctgctgcaggagctgcagcgctgggccggccccctgcctgccacccacctgcggcacctgggggaggtggtgcacaccttcagccacatcaagctgacctaccaggtgtatggcctggccctggagggccagacccctgtgaccaccgtgcccccaggggcccgctggctgacccaggaggagttccacacagctgctgtgtccacagccatgaagaaggtgttccgggtgtaccagggccagcagcccggcacctgcatgggcagcaagaggagccaggtgagcagcccctgcagcaggaagaagcccaggatgggccagcaggtgctggacaacttcttccgcagccacatcagcacagatgcccacagcctgaacagcgctgcccagtag

SEQ ID NO: 20647 - DNA, 1566 bp, synthetic construct; identical to SEQ ID NO: 20644
  misc_feature 1..1566: note = Description of Artificial Sequence: Synthetic coding sequence
  source 1..1566: mol_type = other DNA

SEQ ID NO: 20648 - DNA, 1611 bp, synthetic construct
  misc_feature 1..1611: note = Description of Artificial Sequence: Synthetic coding sequence
  source 1..1611: mol_type = other DNA
atgacccccctggtgtcccggctgagccggctgtgggccatcatgaggaagcccagggctgctgtgggcagcggccacaggaagcaggccgccagccaggagggccggcagaagcacgccaagaacaacagccaggccaagcccagcgcctgtgatgctggcctggcccggcagcctgaggaggtggtgctgcaggcctctgtgagcagctaccacctgttcagagatgtggccgaggtgacagccttccggggcagcctgctgtcctggtatgaccaggagaagagggacctgccctggaggcggcgggcagaagatgagatggacctggaccggcgggcctatgctgtgtgggtgtctgaggtgatgctgcagcagacccaggtggccaccgtcatcaactactacacaggctggatgcagaagtggcccaccctgcaggacctggccagcgccagcctggaggaggtgaaccagctgtgggccggcctgggctactacagccggggccgccgcctgcaggagggcgccaggaaggtggtggaggagctgggcggccacatgcccaggacagctgagaccctgcagcagctgctgcccggggtgggccgctacacagctggggccatcgccagcatcgccttcggccaggccactggagtggtggatggaaatgtggcccgggtgctgtgccgggtgcgggccatcggggctgaccccagcagcaccctggtgtcccagcagctgtggggcctggcccagcagctggtggaccctgcccggcctggggacttcaaccaggccgccatggagctgggcgccaccgtgtgcaccccccagaggcccctgtgcagccagtgccctgtggagagcctgtgccgggcccggcagagggtggagcaggagcagctgctggccagcggcagcctgagcggcagcccagatgtggaggagtgtgcccccaacacaggccagtgccacctgtgcctgcccccatctgagccctgggaccagaccctgggcgtggtgaacttccccaggaaggccagcaggaagccaccccgggaggagagcagcgccacctgtgtgctggagcagcccggggccctgggcgcccagatcctgctggtgcagaggcccaacagcggcctgctggccggcctgtgggagttccccagcgtgacctgggagcccagcgagcagctgcagaggaaggccctgctgcaggagctgcagcgctgggccggccccctgcctgccacccacctgcggcacctgggggaggtggtgcacaccttcagccacatcaagctgacctaccaggtgtatggcctggccctggagggccagacccctgtgaccaccgtgcccccaggggcccgctggctgacccaggaggagttccacacagctgctgtgtccacagccatgaagaaggtgttccgggtgtaccagggccagcagcccggcacctgcatgggcagcaagaggagccaggtgagcagcccctgcagcaggaagaagcccaggatgggccagcaggtgctggacaacttcttccgcagccacatcagcacagatgcccacagcctgaacagcgctgcccagtag

SEQ ID NO: 20649 - DNA, 1608 bp, synthetic construct
  misc_feature 1..1608: note = Description of Artificial Sequence: Synthetic coding sequence
  source 1..1608: mol_type = other DNA
atgacccccctggtgtcccggctgagccggctgtgggccatcatgaggaagcccagggctgctgtgggcagcggccacaggaagcaggccgccagccaggagggccggcagaagcacgccaagaacaacagccaggccaagcccagcgcctgtgatggcctggcccggcagcctgaggaggtggtgctgcaggcctctgtgtcctcctaccacctgttcagagatgtggccgaggtgacagccttccggggcagcctgctgtcctggtatgaccaggagaagagggacctgccctggaggagaagagcagaagatgagatggacctggacagaagagcctatgctgtgtgggtgtctgaggtgatgctgcagcagacccaggtggccaccgtcatcaactactacacaggctggatgcagaagtggcccaccctgcaggacctggccagcgccagcctggaggaggtgaaccagctgtgggccggcctgggctactacagccggggccggcggctgcaggagggcgccaggaaggtggtggaggagctgggcggccacatgcccaggacagctgagaccctgcagcagctgctgcccggggtgggccgctacacagctggggccatcgccagcatcgccttcggccaggccaccggggtggtggatggaaatgtggcccgggtgctgtgccgggtgcgggccatcggggctgaccccagcagcaccctggtgtcccagcagctgtggggcctggcccagcagctggtggaccctgcccggcctggggacttcaaccaggccgccatggagctgggcgccaccgtgtgcaccccccagaggcccctgtgcagccagtgccctgtggagagcctgtgccgggcccggcagagggtggagcaggagcagctgctggccagcggcagcctgagcggcagcccagatgtggaggagtgtgcccccaacacaggccagtgccacctgtgcctgccccccagcgagccctgggaccagaccctgggcgtggtgaacttccccaggaaggccagcaggaagccaccccgggaggagagcagcgccacctgtgtgctggagcagcccggggccctgggcgcccagatcctgctggtgcagaggcccaacagcggcctgctggccggcctgtgggagttccccagcgtgacctgggagcccagcgagcagctgcagaggaaggccctgctgcaggagctgcagcgctgggccggccccctgcctgccacccacctgcggcacctgggggaggtggtgcacaccttcagccacatcaagctgacctaccaggtgtatggcctggccctggagggccagacccctgtgaccaccgtgcccccaggggcccgctggctgacccaggaggagttccacacagctgctgtgtccacagccatgaagaaggtgttccgggtgtaccagggccagcagcccggcacctgcatgggcagcaagaggagccaggtgagcagcccctgcagcaggaagaagcccaggatgggccagcaggtgctggacaacttcttccgcagccacatcagcacagatgcccacagcctgaacagcgctgcccagtag

SEQ ID NO: 20650 - DNA, 876 bp, synthetic construct
  misc_feature 1..876: note = Description of Artificial Sequence: Synthetic coding sequence
  source 1..876: mol_type = other DNA
atgaggaagcccagggctgctgtgggcagcggccacaggaagcaggccgccagccaggagggccggcagaagcacgccaagaacaacagccaggccaagcccagcgcctgtgatggcatgattgctgaatgtcctggggccccagctggcctggcccggcagcctgaggaggtggtgctgcaggcctctgtgagcagctaccacctgttcagagatgtggccgaggtgacagccttccggggcagcctgctgtcctggtatgaccaggagaagagggacctgccctggaggcggcgggcagaagatgagatggacctggaccggcgggcctatgctgtgtgggtgtctgaggtgatgctgcagcagacccaggtggccaccgtcatcaactactacacaggctggatgcagaagtggcccaccctgcaggacctggccagcgccagcctggaggaggtgaaccagctgtgggccggcctgggctactacagccggggccgccgcctgcaggagggcgccaggaaggtggtggaggagctgggcggccacatgcccaggacagctgagaccctgcagcagctgctgcccggggtgggccgctacacagctggggccatcgccagcatcgccttcggccaggccactggagtggtggatggaaatgtggcccgggtgctgtgccgggtgcgggccatcggggctgaccccagcagcaccctggtgtcccagcagctgtggggcctggcccagcagctggtggaccctgcccggcctggggacttcaaccaggccgccatggagctgggcgccaccgtgtgcaccccccagaggcccctgtgcagccagtgccctgtggagagcctgtgccgggcctag

SEQ ID NO: 20651 - DNA, 1599 bp, synthetic construct; identical to SEQ ID NO: 20646
  misc_feature 1..1599: note = Description of Artificial Sequence: Synthetic coding sequence
  source 1..1599: mol_type = other DNA

SEQ ID NO: 20652 - DNA, 1650 bp, synthetic construct
  misc_feature 1..1650: note = Description of Artificial Sequence: Synthetic coding sequence
  source 1..1650: mol_type = other DNA
atgacccccctggtgtcccggctgagccggctgtgggccatcatgaggaagcccagggctgctgtgggcagcggccacaggaagcaggccgccagccaggagggccggcagaagcacgccaagaacaacagccaggccaagcccagcgcctgtgatgcctgtgccggcatgattgctgagtgccctggggccccagctggcctggcccggcagcctgaggaggtggtgctgcaggcctctgtgtcctcctaccacctgttcagagatgtggccgaggtgacagccttccggggcagcctgctgtcctggtatgaccaggagaagagggacctgccctggaggagaagagcagaagatgagatggacctggacagaagagcctatgctgtgtgggtgtctgaggtgatgctgcagcagacccaggtggccaccgtcatcaactactacacaggctggatgcagaagtggcccaccctgcaggacctggccagcgccagcctggaggaggtgaaccagctgtgggccggcctgggctactacagccggggccggcggctgcaggagggcgccaggaaggtggtggaggagctgggcggccacatgcccaggacagctgagaccctgcagcagctgctgcccggggtgggccgctacacagctggggccatcgccagcatcgccttcggccaggccaccggggtggtggatggaaatgtggcccgggtgctgtgccgggtgcgggccatcggggctgaccccagcagcaccctggtgtcccagcagctgtggggcctggcccagcagctggtggaccctgcccggcctggggacttcaaccaggccgccatggagctgggcgccaccgtgtgcaccccccagaggcccctgtgcagccagtgccctgtggagagcctgtgccgggcccggcagagggtggagcaggagcagctgctggccagcggcagcctgagcggcagcccagatgtggaggagtgtgcccccaacacaggccagtgccacctgtgcctgccccccagcgagccctgggaccagaccctgggcgtggtgaacttccccaggaaggccagcaggaagccaccccgggaggagagcagcgccacctgtgtgctggagcagcccggggccctgggcgcccagatcctgctggtgcagaggcccaacagcggcctgctggccggcctgtgggagttccccagcgtgacctgggagcccagcgagcagctgcagaggaaggccctgctgcaggagctgcagcgctgggccggccccctgcctgccacccacctgcggcacctgggggaggtggtgcacaccttcagccacatcaagctgacctaccaggtgtatggcctggccctggagggccagacccctgtgaccaccgtgcccccaggggcccgctggctgacccaggaggagttccacacagctgctgtgtccacagccatgaagaaggtgttccgggtgtaccagggccagcagcccggcacctgcatgggcagcaagaggagccaggtgagcagcccctgcagcaggaagaagcccaggatgggccagcaggtgctggacaacttcttccgcagccacatcagcacagatgcccacagcctgaacagcgctgcccagtag

SEQ ID NO: 20653 - DNA, 1566 bp, synthetic construct; identical to SEQ ID NO: 20644
  misc_feature 1..1566: note = Description of Artificial Sequence: Synthetic coding sequence
  source 1..1566: mol_type = other DNA

SEQ ID NO: 20654 - DNA, 648 bp, synthetic construct
  misc_feature 1..648: note = Description of Artificial Sequence: Synthetic coding sequence
  source 1..648: mol_type = other DNA
atgacccccctggtgtcccggctgagccggctgtgggaggtgaaccagctgtgggccggcctgggctactacagccggggccggcggctgcaggagggcgccaggaaggtggtggaggagctgggcggccacatgcccaggacagctgagaccctgcagcagctgctgcccggggtgggccgctacacagctggggccatcgccagcatcgccttcggccaggccaccggggtggtggatggaaatgtggcccgggtgctgtgccgggtgcgggccatcggggctgaccccagcagcaccctggtgtcccagcagctgtggggcctggcccagcagctggtggaccctgcccggcctggggacttcaaccaggccgccatggagctgggcgccaccgtgtgcaccccccagaggcccctgtgcagccagtgccctgtggagagcctgtgccgggcccggcagagggtggagcaggagcagctgctggccagcggcagcctgagcggcagcccagatgtggaggagtgtgcccccaacacaggccagtgccacctgtgcctgccccccagcgagccctgggaccagaccctgggcgtggtgaacttccccaggaaggccagcaggaagccaccccgggaggagagctag

SEQ ID NO: 20655 - DNA, 693 bp, synthetic construct
  misc_feature 1..693: note = Description of Artificial Sequence: Synthetic coding sequence
  source 1..693: mol_type = other DNA
atgacccccctggtgtcccggctgagccggctgtgggccatcatgaggaagcccagggctgctgtgggcagcggccacaggaagcaggccgccagccaggagggccggcagaagcacgccaagaacaacagccaggccaagcccagcgcctgtgatggaggagagagcaccctgggctggccaggcctgctcttctcctggccagctgctgctgggggcagcagcgagggcctgctggccggcctgtgggagttccccagcgtgacctgggagcccagcgagcagctgcagaggaaggccctgctgcaggagctgcagcgctgggccggccccctgcctgccacccacctgcggcacctgggggaggtggtgcacaccttcagccacatcaagctgacctaccaggtgtatggcctggccctggagggccagacccctgtgaccaccgtgcccccaggggcccgctggctgacccaggaggagttccacacagctgctgtgtccacagccatgaagaaggtgttccgggtgtaccagggccagcagcccggcacctgcatgggcagcaagaggagccaggtgagcagcccctgcagcaggaagaagcccaggatgggccagcaggtgctggacaacttcttccgcagccacatcagcacagatgcccacagcctgaacagcgctgcccagtag

SEQ ID NO: 20656 - DNA, 291 bp, synthetic construct
  misc_feature 1..291: note = Description of Artificial Sequence: Synthetic coding sequence
  source 1..291: mol_type = other DNA
atgtctgacaatgatgacatcgaggtggagagtgatgaggagcagccccgcttccagagcgctgctgacaagagggcccaccacaatgccctggagaggaagagaagagaccacatcaaggacagcttccacagcctgcgggacagcgtgcccagcctgcagggcgagaagctgtacttcctgttctggaagctgtgcacccctgtgctgcaccggcagagcctgatgcagaagtgccacaccttcatcagcagctaccaggtgcacaagaagaaggagtgcaagatctag

SEQ ID NO: 20657 - DNA, 405 bp, synthetic construct
  misc_feature 1..405: note = Description of Artificial Sequence: Synthetic coding sequence
  source 1..405: mol_type = other DNA
atgtctgacaatgatgacatcgaggtggagagtgatgaggagcagccccgcttccagagcgctgctgacaagagggcccaccacaatgccctggagaggaagagaagagaccacatcaaggacagcttccacagcctgcgggacagcgtgcccagcctgcagggcgagaaggccagccgggcccagatcctggacaaggccacagagtacatccagtacatgaggaggaagaaccacacccaccagcaggacattgatgacctgaagaggcagaatgccctgctggagcagcagggcgagcaccccagctcctggggctcctggccctgctgtgccccagcccggagcggcttcggcacctgggcctgccgggtgcgggccagccatggagtgtgtgcccagtag

SEQ ID NO: 20658 - DNA, 252 bp, synthetic construct
  misc_feature 1..252: note = Description of Artificial Sequence: Synthetic coding sequence
  source 1..252: mol_type = other DNA
atgtctgacaatgatgacatcgaggtggagagtgatgaggagcagccccgcttccagagcgctgctgacaagagggcccaccacaatgccctggagaggaagagaagagaccacatcaaggacagcttccacagcctgcgggacagcgtgcccagcctgcagggcgagaagggcaccaagatgaagctgaccctgccccctgtgttcccctatgagcacctgcccttccccaccgtcttctgccacggctag

SEQ ID NO: 20659 - DNA, 456 bp, synthetic construct
  misc_feature 1..456: note = Description of Artificial Sequence: Synthetic coding sequence
  source 1..456: mol_type = other DNA
atgtctgacaatgatgacatcgaggtggagagtgatgctgacaagagggcccaccacaatgccctggagaggaagaggcgggaccacatcaaggacagcttccacagcctgcgggacagcgtgcccagcctgcagggcgagaaggccagccgggcccagatcctggacaaggccacagagtacatccagtacatgaggaggaagaaccacacccaccagcaggacattgatgacctgaagaggcagaatgccctgctggagcagcaggtgcgggccctggagaaggcccggagcagcgcccagctgcagaccaactaccccagcagtgacaacagcctgtacaccaatgccaagggcagcaccatcagcgcctttgatggcggcagtgacagcagcagcgagagcgagcctgaggagccccagagcaggaagaagctgaggatggaggccagctag

SEQ ID NO: 20660 - DNA, 483 bp, synthetic construct
  misc_feature 1..483: note = Description of Artificial Sequence: Synthetic coding sequence
  source 1..483: mol_type = other DNA
atgtctgacaatgatgacatcgaggtggagagtgatgaggagcagccccgcttccagagcgctgctgacaagagggcccaccacaatgccctggagaggaagagaagagaccacatcaaggacagcttccacagcctgcgggacagcgtgcccagcctgcagggcgagaaggccagccgggcccagatcctggacaaggccacagagtacatccagtacatgaggaggaagaaccacacccaccagcaggacattgatgacctgaagaggcagaatgccctgctggagcagcaggtgcgggccctggagaaggcccggagcagcgcccagctgcagaccaactaccccagcagtgacaacagcctgtacaccaatgccaagggcagcaccatcagcgcctttgatggcggcagtgacagcagcagcgagagcgagcctgaggagccccagagcaggaagaagctgaggatggaggccagctag

SEQ ID NO: 20661 - DNA, 426 bp, synthetic construct
  misc_feature 1..426: note = Description of Artificial Sequence: Synthetic coding sequence
  source 1..426: mol_type = other DNA
atgctgtctgtgaagatcaccagcatcttcagcatcttcttcttcctgctcttccaggaggagcagccccgcttccagagcgctgctgacaagagggcccaccacaatgccctggagaggaagaggcgggaccacatcaaggacagcttccacagcctgcgggacagcgtgcccagcctgcagggcgagaaggccagccgggcccagatcctggacaaggccacagagtacatccagtacatgaggaggaagaaccacacccaccagcaggacattgatgacctgaagaggcagaatgccctgctggagcagcagggcgagcaccccagctcctggggctcctggccctgctgtgccccagcccggagcggcttcggcacctgggcctgccgggtgcgggccagccacggcgtgtgtgcccagtag

SEQ ID NO: 20662 - DNA, 312 bp, synthetic construct
  misc_feature 1..312: note = Description of Artificial Sequence: Synthetic coding sequence
  source 1..312: mol_type = other DNA
atgtctgacaatgatgacatcgaggtggagagtgatgaggagcagccccgcttccagagcgctgctgacaagagggcccaccacaatgccctggagaggaagagaagagaccacatcaaggacagcttccacagcctgcgggacagcgtgcccagcctgcagggcgagaaggccagccgggcccagatcctggacaaggccacagagtacatccagtacatgaggaggaagaaccacacccaccagcaggacattgatgacctgaagaggcagaatgccctgctggagcagcagggcgagagcgagagctag

SEQ ID NO: 20663 - DNA, 312 bp, synthetic construct; identical to SEQ ID NO: 20662
  misc_feature 1..312: note = Description of Artificial Sequence: Synthetic coding sequence
  source 1..312: mol_type = other DNA

SEQ ID NO: 20664 - DNA, 13923 bp, synthetic construct
  misc_feature 1..13923: note = Description of Artificial Sequence: Synthetic coding sequence
  source 1..13923: mol_type = other DNA
atgcctgtgcctgatggctctgtggccgctgctggcctgggcctgggcctgcctgctgctgacagccggggccactaccagctgctgctgagcggccgggccctggccgaccgctaccgccgcatctacacagctgccctgaatgaccgggaccagggcggcggcagcgctggccacccagccagcaggaacaagaagatcctgaacaagaagaagctgaagaggaagcagaagagcaagagcaaggtgaagaccaggagcaagtctgagaacctggagaacacagtcatcatcccagacatcaagctgcacagcaaccccagcgccttcaacatctactgcaatgtgcgccactgtgtgctggagtggcagaagaaggagatcagcctggccgccgccagcaagaacagcgtgcagagcggggagagtgacagtgatgaggaggaggagagcaaggagccccccatcaagctgcccaagatcatcgaggtgggcctgtgtgaggtgtttgagctgatcaaggagacccgcttcagccaccccagcctgtgcctgcggagcctgcaggccctgctgaatgtgctgcagggccagcagcctgagggcctgcagagcgagcccccagaggtgctggagagcctcttccagctgctgctggagatcaccgtgcgcagcacaggcatgaatgacagcacaggccagagcctgacagccctgagctgtgcctgcctcttcagcctggtggcctcctggggcgagaccggccgcaccctgcaggccatcagcgccatcctgaccaacaacggcagccacgcctgccagaccatccaggtgcccaccatcctgaacagcctgcagaggtctgtgcaggccgtgctggtgggcaagatccagatccaggactggttcagcaatggcatcaagaaggccgccctgatgcacaagtggcccctgaaggagatctctgtggatgaagatgaccagtgcctgctgcagaatgatggcttcttcctgtacctgctgtgcaaggatggcctgtacaagattggcagcggctacagcggcaccgtgcggggccacatctacaacagcaccagccgcatccggaacaggaaggagaagaagtcctggctgggctacgcccagggctacctgctgtacagagatgtgaacaaccacagcatgacagccatccgcatcagccctgagaccctggagcaggacggcaccgtgatgctgcctgactgccacacagagggccagaacatcctcttcacagatggagagtacatcaaccagattgctgccagcagagatgatggctttgtggtgcgcatctttgccaccagcacagagcctgtgctgcagcaggagctgcagctgaagctggccaggaagtgcctgcacgcctgtggcatcagcctgtttgacctggagaaggacctgcacatcatcagcactggatttgatgaggagagcgccatcctgggcgccggccgggagtttgccctgatgaagacagccaacgggaagatctactacacaggcaagtaccagagcctgggcatcaagcagggcggccccagcgctgggaagtgggtggagctgcccatcaccaagagccccaagatcgtgcacttctctgtgggccatgatggcagccacgccctgctggtggctgaagatggcagcatcttcttcaccggcagcgccagcaaaggagaagatggagagagcaccaagagccggcggcagagcaagccctacaagcccaagaagatcatcaagatggagggcaagatcgtggtgtacacagcctgcaacaacggcagcagcagcgtcatcagcaaggatggagagctgtacatgtttgggaaggatgccatctacagcgacagcagcagcctggtgacagacctgaagggccactttgtgacccaggtggccatgggcaaggcccacacctgtgtgctgatgaagaatggagaggtgtggacctttggagtgaacaacaagggccagtgtggccgggacacaggagccatgaaccagggcggcaaaggatttggagtggagaacatggccacagccatggatgaggacctggaggaggagctggatgagaaggatgagaagtccatgatgtgccccccaggcatgcacaagtggaagctggagcagtgcatggtgtgcaccgtgtgtggggactgcaccggctacggggccagctgtgtgagcagcggccgcccagacagagtgcctgggggcatctgtggctgcggcagcggggagagcggctgtgctgtgtgtggctgctgcaaggcctgtgcccgggagctggatggccaggaggcccggcagaggggcatcctggatgctgtgaaggagatgatccccctggacctgctgctggccgtgcctgtgcctggggtgaacatcgaggagcacctgcagctgcggcaggaggagaagaggcagagggtcatccgccgccaccggctggaggagggccggggccccctggtgtttgctggccccatcttcatgaaccaccgggagcaggccctggcccggctgcggagccacccagcccagctgaagcacaagagggacaagcacaaggatggcagcggggagcggggggagaaggatgccagcaagatcaccacctacccacctggctctgtgcgctttgactgtgagctgcgggctgtgcaggtgtcctgtggcttccaccacagcgtggtgctgatggagaatggagatgtgtacaccttcggctacggccagcacggccagctgggccatggagatgtgaacagccggggctgccccaccctggtgcaggccctgcccggccccagcacccaggtgacagctggcagcaaccacacagctgtgctgctgatggatggccaggtgttcaccttcggcagcttcagcaagggccagctgggccggcccatcctggatgtgccctactggaatgccaagccagcccccatgcccaacatcggcagcaaatatggcaggaaggccacctggattggagccagcggggaccagaccttcctgagaattgatgaggccctgatcaacagccacgtgctggccaccagcgagatctttgccagcaagcacatcatcggcctggtgcctgccagcatcagcgagcccccacccttcaagtgcctgctgatcaacaaggtggatggcagctgcaagaccttcaatgacagcgagcaggaggacctgcagggcttcggcgtgtgcctggaccctgtgtatgatgtgatctggaggttccggcccaacacccgggagctgtggtgctacaatgctgtggtggctgatgcccggctgcccagcgctgctgacatgcagagccgctgcagcatcctgagccctgagctggccctgcccaccggcagccgggccctgaccaccaggagccatgctgccctgcacatcctgggctgcctggacaccctggccgccatgcaggacctgaagatgggcgtggccagcacagaggaggagacccaggccgtgatgaaggtgtacagcaaagaagactacagcgtggtgaacagatttgagagccacggcggcggctggggctacagcgcccacagcgtggaggccatccgcttctctgctgacacagacatcctgctgggcggcctgggcctgtttggaggccgcggggagtacacagccaagatcaagctgtttgagctgggcccagatggaggagaccacgagacagatggagacctgctggccgagacagatgtgctggcctatgactgtgccgcccgggagaagtatgccatgatgtttgatgagcctgtgctgctgcaggccggctggtggtacgtggcctgggcccgggtgtctggccccagcagtgactgtggcagccacggccaggccagcatcaccacagatgatggagtggtgttccagttcaagagcagcaagaagagcaacaacggcacagatgtgaatgccggccagatcccccagctgctgtaccgcctgcccaccagtgatggcagcgccagcaagggcaagcagcagaccagcgagcctgtgcacatcctgaagaggagctttgccaggacagtgtctgtggagtgctttgagagcctgctgagcatcctgcactggagctggaccaccctggtgctgggcgtggaggagctgcggggcctgaagggcttccagttcaccgccaccctgctggacctggagcggctgcgctttgtgggcacctgctgcctgcggctgctgcgggtgtacacctgtgagatctaccctgtgtctgccaccgggaaggctgtggtggaggagaccagcaagctggccgagtgcatcggcaagaccaggaccctgctgaggaagatcctgtctgagggcgtggaccactgcatggtgaagctggacaatgacccccagggctacctgagccagcccctgagcctgctggaggccgtgctgcaggagtgccacaacaccttcaccgcctgcttccacagcttctaccccaccccagccctgcagtgggcctgcctgtgtgacctgctgaactgcctggaccaggacatccaggaggccaacttcaagaccagcagcagccggctgctggccgctgtgatgtctgccctgtgccacacctctgtgaagctgaccagcatcttccccatcgcctatgatggagaggtgctgctgcggagcatcgtgaagcaggtgtccacagaaaatgacagcaccctggtgcaccgcttccccctgctggtggcccacatggagaagctgagccagagcgaggagaacatcagcggcatgaccagcttccgggaggtgctggagaagatgctggtgattgtggtgctgcctgtgaggaacagcctgcggcgggagaatgaactcttcagcagccacctggtgagcaacacctgtggcctgctggccagcatcgtgtctgagctgacagccagcgccctgggcagcgaggtggatggcctgaacagcctgcacagcgtgaaggccagcgccaaccgcttcaccaagaccagccagggccgctcctggaacacaggaaatggcagcccagatgccatctgcttctctgtggacaagccaggcatcgtggtggtgggcttctctgtgtatggaggcggcggcatccacgagtatgagctggaggtgctggtggatgattctgaacatgctggggacagcacccacagccaccgctggaccagcctggagctggtgaagggcacctacaccacagatgacagccccagcgacattgctgagatccggctggacaaggtggtgcccctgaaggaaaatgtgaagtatgctgtgcggctgaggaactacggcagcaggacagccaatggagatggcggcatgaccaccgtgcagtgcccagatggagtgaccttcaccttcagcacctgcagcctgagcagcaatggcaccaaccagacccggggccagatcccccagatcctgtactacagaagtgaatttgatggagacctgcagagccagctgctgagcaaggccaatgaggaggacaagaactgcagccgggccctgtctgtggtgtccacagtggtgcgggccagcaaggacctgctgcaccgggccctggccgtggatgctgatgacatccctgagctgctgagcagcagcagcctcttctccatgctgctgcccctcatcatcgcctacatcggccctgtggccgccgccatccccaaggtggccgtggaggtgtttggcctggtgcagcagctgctgcccagcgtggccatcctgaaccagaagtatgcccccccagccttcaaccccaaccagagcacagacagcaccactggaaaccagcctgagcagggcctgagcgcctgcaccaccagcagccactatgctgtgattgaaagtgagcacccctacaagccagcctgtgtgatgcactacaaggtgaccttcccagaatgtgtgcgctggatgaccatcgagtttgacccccagtgtggcacagcccagagtgaagatgtgctgcggctgctgatccctgtgaggacagtgcagaacagcggctacggccccaagctgacctctgtgcatgagaacctgaacagctggattgagctgaagaagttcagcggcagcagcggctggcccaccatggtgctggtgctgcctggaaatgaggccctcttcagcctggagacagccagtgactatgtgaaggatgacaaggccagcttctacggcttcaagtgctttgccatcggctatgagttcagccctggcccagatgagggcgtcatccagctggagaaggagctggccaacctgggcggcgtgtgtgccgccgccctgatgaagaaggacctggccctgcccatcggaaatgagctggaggaggacctggagatcctggaggaggccgccctgcaggtgtgcaagacccacagcggcatcctgggcaagggcctggccctgagccacagccccaccatcctggaggccctggagggcaacctgcccctgcagatccagagcaatgagcagagcttcctggatgacttcatcgcctgtgtgcccggcagcagcggcggccgcctggcccgctggctgcagcctgacagctatgctgacccccagaagaccagcctcatcctgaacaaggatgacatccgctgtggctggcccaccaccatcaccgtgcagaccaaggaccagtatggagatgtggtgcacgtgcccaacatgaaggtggaggtgaaggctgtgcctgtgtcccagaagaagatgagcctgcagcaggaccaggccaagaagccccagagaattcctggcagccctgctgtgacagctgccagcagcaacacagacatgacctacggcggcctggccagccccaagctggatgtgtcctatgagcccatgattgtgaaggaggcccgctacatcgccatcaccatgatgaaggtgtatgagaactacagctttgaggagctgcgctttgccagccccacccccaagaggcccagcgagaacatgctgatccgggtgaacaatgatggcacctactgtgccaactggacccctggggccatcggcctgtacaccctgcacgtgaccattgatggcatcgagattgatgctggcctggaggtgaaggtgaaggacccccccaagggcatgatccccccaggcacccagctggtgaagcccaagtctgagccccagcccaacaaggtgaggaagtttgtggccaaggacagcgctggcctgcgcatccgcagccaccccagcctgcagagcgagcagatcggcatcgtgaaggtgaatggcaccatcaccttcattgatgagatccacaatgatgatggagtgtggctgcggctgaatgatgagaccatcaagaagtatgtgcccaacatgaatggctacacagaggcctggtgcctgtccttcaaccagcacctgggcaagagcctgctggtgcctgtggatgagagcaagaccaacacagatgacttcttcaaggacatcaacagctgctgcccccaggaggccaccatgcaggagcaggacatgcccttcctgcggggcggccctggcatgtacaaggtggtgaagacaggccccagcggccacaacatccgcagctgccccaacctgcggggcatccccatcggcatgctggtgctgggcaacaaggtgaaggctgtgggggaggtgaccaacagcgagggcacctgggtgcagctggaccagaacagcatggtggagttctgtgagagtgatgaaggagaggcctggagcctggcccgggacagaggaggcaaccagtacctgcggcatgaagatgagcaggccctgctggaccagaacagccagaccccaccacccagccccttctctgtgcaggccttcaacaagggggccagctgcagcgcccagggctttgattatggcctgggcaacagcaaaggagaccggggcaacatcagcaccagcagcaagccagccagcaccagcggcaagtctgagctgagcagcaagcacagccgcagcctgaagccagatggccgcatgagcaggaccacagctgaccagaagaagccccggggcacagagagcctgagcgccagcgagagcctcatcctgaagagtgatgctgccaagctgcggagtgacagccacagccgcagcctgagccccaaccacaacaccctgcagaccctgaagagtgatggccgcatgcccagcagcagcagagctgagagccctggccctggcagccggctgagcagccccaagcccaagaccctgcctgccaacagaagcagccccagcggggccagcagccccaggagcagcagcccccatgacaagaacctgccccagaagagcacagcccctgtgaagaccaagctggaccccccccgggagaggagcaagagtgacagctacaccctggaccctgacaccctgaggaagaagaagatgcccctgacagagcccctgcggggccgcagcaccagccccaagcccaagtctgtgcccaaggacagcacagacagccctggctctgaaaatagagcccccagcccccacgtggtgcaggagaacctgcacagcgaggtggtggaggtgtgcaccagcagcaccctgaagaccaacagcctgacagacagcacctgtgatgacagcagcgagttcaagtctgtggatgagggcagcaacaaggtgcacttcagcatcggcaaggcccccctgaaggatgagcaggagatgagggccagccccaagatcagcaggaaatgtgccaacagacacacccggcccaagaaggagaagagcagcttcctgttcaagggagatggcagcaagcccctggagcccgccaagcaggccatgagccccagcgtggctgaatgtgcccgggctgtgtttgccagcttcctgtggcatgagggcatcgtgcatgatgccatggcctgcagcagcttcctgaagttccaccctgagctgagcaaggagcacgcccccatccgcagcagcctgaacagccagcagcccacagaggagaaggagaccaagctgaagaacagacacagcctggagatcagcagcgccctgaacatgttcaacatcgcccctcatggccctgacatcagcaagatgggcagcatcaacaagaacaaggtgctgtccatgctgaaggagccccccctgcacgagaagtgtgaagatggcaagacagagaccacctttgagatgtccatgcacaacaccatgaagagcaagagccccctgcccctgaccctgcagcacctggtggccttctgggaggacatcagcctggccaccatcaaggccgccagccagaacatgatcttccccagccctggcagctgtgctgtgctgaagaagaaggaatgtgagaaggagaacaagaagagcaagaaggagaagaagaagaaggagaaggccgaggtgcggccccggggcaacctgtttggagagatggcccagctggccgtgggcggccctgagaaggacaccatctgtgagctgtgtggggagagccacccctaccctgtgacctaccacatgaggcaggcccaccctggctgcggccgctatgccggcggccagggctacaacagcatcggccacttctgtggcggctgggccggcaactgtggagatggcggcattggaggcagcacctggtacctggtgtgtgaccgctgccgggagaagtacctgcgggagaagcaggccgccgcccgggagaaggtgaagcagagcaggaggaagcccatgcaggtgaagaccccccgggccctgcccaccatggaggcccaccaggtgatcaaggccaatgccctcttcctgctgagcctgagcagcgctgctgagcccagcatcctgtgctaccacccagccaagcccttccagagccagctgcccagcgtgaaggagggcatcagcgaggacctgcctgtgaagatgccctgcctgtacctgcagaccctggcccggcaccaccacgagaactttgtgggctaccaggatgacaacctcttccaggatgagatgagatacctgcggagcacctctgtgcctgccccctacatctctgtgaccccagatgccagccccaacgtgtttgaggagcctgagagcaacatgaagtccatgccacccagcctggagaccagccccatcacagacacagacctggccaagaggacagtgttccagaggagctacagcgtggtggcctctgaatatgacaagcagcacagcatcctgcctgcccgggtgaaggccatccccaggagaagagtgaacagcggggacacagaggtgggcagcagcctgctgcggcaccccagccctgagctgagccgcctcatcagcgcccacagcagcctgagcaagggggagaggaacttccagtggcctgtgctggccttcgtcatccagcaccacgacctggagggcctggagatcgccatgaagcaggccctgaggaagagcgcctgccgggtgtttgccatggaggccttcaactggctgctgtgcaacgtcatccagaccaccagcctgcatgacatcctgtggcactttgtggccagcctgaccccagcccctgtggagcctgaggaggaggaggatgaggagaacaagaccagcaaagaaaattctgagcaggagaaggacaccagggtgtgtgagcaccccctgagtgacatcgtgattgctggggaggccgcccaccccctgccccacaccttccaccggctgctgcagaccatcagtgacctgatgatgagcctgcccagcggcagcagcctgcagcagatggccctgcgctgctggagcctgaagttcaagcagagcgaccaccagttcctgcaccagagcaatgtgttccaccacatcaacaacatcctgagcaagagtgatgatggagacagcgaggagagcttcagcatcagcatccagagcggctttgaggccatgagccaggagctgtgcatcgtgatgtgcctgaaggacctgaccagcatcgtggacatcaagaccagcagcaggcctgccatgattggcagcctgacagatggcagcacagagaccttctgggagagcggagatgaggacaagaacaagaccaagaacatcaccatcaactgtgtgaagggcatcaatgcccgctacgtgtctgtgcacgtggacaacagccgggacctgggcaacaaggtgacctccatgaccttcctgaccgggaaggctgtggaggacctgtgccgcatcaagcaggtggacctggacagccgccacatcggctgggtgaccagcgagctgcccggcggggacaaccacatcatcaagattgagctgaagggccctgagaacaccctgcgggtgcggcaggtgaaggtgctgggctggaaggatggagagagcaccaagattgctggccagatcagcgcctctgtggcccagcagaggaactgtgaggccgagaccctgcgggtcttccgcctcatcaccagccaggtgtttgggaagctgatctctggagatgctgagcccaccccagagcaggaggagaaggccctgctgagcagccctgagggggaggagaaggtgtacaatgccaccagtgatgctgacctgaaggagcacatggtgggcatcatcttcagccgcagcaagctgaccaacctgcagaagcaggtgtgtgcccacatcgtgcaggccatccgcatggaggccaccagggtgcgggaggagtgggagcacgccatcagcagcaaagaaaatgccaacagccagcccaatgatgaagatgccagcagtgatgcctactgctttgagctgctgtccatggtgctggccctgagcggcagcaatgtgggccggcagtacctggcccagcagctgaccctgctgcaggacctcttcagcctgctgcacacagccagcccccgggtgcagaggcaggtgaccagcctgctgcggcgggtgctgcctgaggtgacccccagccggctggccagcatcatcggcgtgaagagcctgcccccagctgacatcagtgacatcatccacagcacagagaagggggactggaacaagctgggcatcctggacatgttcctgggctgcatcgccaaggccctgactgtgcagctgaaggccaagggcaccaccatcactggaacagctggcaccaccgtgggcaagggcgtgaccaccgtgaccctgcccatgatcttcaacagcagctacctgcggcggggggagagccactggtggatgaagggcagcacccccacccagatcagcgagatcatcatcaagctgatcaaggacatggccgccggccacctgtctgaggcctggagccgggtgaccaagaatgccatcgccgagaccatcatcgccctgaccaagatggaggaggagttccgcagccctgtgcgctgcatcgccaccacccggctgtggctggccctggccagcctgtgtgtgctggaccaggaccacgtggaccggctgagcagcggccgctggatgggcaaggatggccagcagaagcagatgcccatgtgtgacaaccatgatgatggagaaacagctgccatcatcctgtgcaatgtgtgtggcaacctgtgcacagactgtgaccgcttcctgcacctgcacaggaggaccaagacccaccagaggcaggtgttcaaggaggaggaggaggccatcaaggtggacctgcacgagggctgcggccgcaccaagctgttctggctgatggccctggccgacagcaagaccatgaaggccatggtggagttccgggagcacacaggcaagcccaccaccagcagcagcgaggcctgccgcttctgtggcagccgctctggaacagagctgtctgctgtgggctctgtgtgcagtgatgctgactgccaggagtatgccaagatcgcctgcagcaagacccacccctgtggccacccctgtggcggcgtgaagaatgaggagcactgcctgccctgcctgcacggctgtgacaagagcgccaccagcctgaagcaggatgctgatgacatgtgcatgatctgcttcacagaggccctgtctgctgccccagccatccagctggactgcagccacatcttccacctgcagtgctgccggcgggtgctggagaaccgctggctgggcccccgcatcaccttcggcttcatcagctgccccatctgcaagaacaagatcaaccacatcgtgctgaaggacctgctggaccccatcaaggagctgtatgaagatgtgcggaggaaggccctgatgaggctggagtatgagggcctgcacaagtctgaggccatcaccaccccaggagtgcgcttctacaatgaccctgctggctacgccatgaacagatatgcctactacgtgtgctacaagtgcaggaaggcctactttggaggagaggcccgctgtgatgctgaggccggcagaggagatgattatgacccccgggagctgatctgtggggcctgcagtgatgtgtcccgggcccagatgtgccccaagcacggcacagacttcctggagtacaagtgccgctactgctgcagcgtggccgtgttcttctgcttcggcaccacccacttctgcaatgcctgccatgatgacttccagaggatgaccagcatccccaaggaggagctgccccactgcccagctggccccaagggcaagcagctggagggcacagaatgtcccctgcacgtggtgcaccccccaactggagaggagtttgccctgggctgcggcgtgtgcagaaatgcccacaccttctag

SEQ ID NO: 20665 - DNA, 1542 bp, synthetic construct
  misc_feature 1..1542: note = Description of Artificial Sequence: Synthetic coding sequence
  source 1..1542: mol_type = other DNA
atgcaggagcaggacatgcccttcctgcggggcggccctggcatgtacaaggtggtgaagacaggccccagcggccacaacatccgcagctgccccaacctgcggggcatccccatcggcatgctggtgctgggcaacaaggtgaaggctgtgggggaggtgaccaacagcgagggcacctgggtgcagctggaccagaacagcatggtggagttctgtgagagtgatgaaggagaggcctggagcctggcccgggaccggggcggcaaccagtacctgcggcatgaagatgagcaggccctgctggaccagaacagccagaccccaccacccagccccttctctgtgcaggccttcaacaagggggccagctgcagcgcccagggctttgattatggcctgggcaacagcaaggtgctgactgtgctgcccacagctggggaccagctgagcgccatcctgaacagcatccagagccggcccaacctgcctgcccccagcatctttgaccaggccgccaagccacccagcagcctggtgcacagcccctttgtgtttggccagcccctgtccttccagcagccccagctgcagagcgaccggggcaacatcagcaccagcagcaagccagccagcaccagcggcaagtctgagctgagcagcaagcacagccgcagcctgaagccagatggccgcatgagcaggaccacagctgaccagaagaagccccggggcacagagagcctgagcgccagcgagagcctcatcctgaagagtgatgctgccaagctgcggagtgacagccacagccgcagcctgagccccaaccacaacaccctgcagaccctgaagagtgatggccgcatgcccagcagcagcagagctgagagccctggccctggcagccggctgagcagccccaagcccaagaccctgcctgccaacagaagcagccccagcggggccagcagccccaggagcagcagcccccatgacaagaacctgccccagaagagcacagcccctgtgaagaccaagctggaccccccccgggagaggagcaagagtgacagctacaccctggaccctgacaccctgaggaagaagaagatgcccctgacagagcccctgcggggccgcagcaccagccccaagcccaagtctgtgcccaaggacagcacagacagccctggcagcgagaacagagcccccagcccccacgtggtgcaggagaacctgcacagcgaggtggtggaggtgtgcaccagcagcaccctgaagaccaacagcctgacagacagcacctgtgatgacagcagcgagttcaagtctgtggatgagggcagcaacaaggtgcacttcagcatcggcaaggcccccctgaaggatgagcaggagatgagggccagccccaagatcagcaggaaatgtgccaacagacacacccggcccaagaggaagattgagttctccttccagaggcgctggatccaggccttccgggccagccaggccagccacgtgtccttctgtggccgctag

SEQ ID NO: 20666 - DNA, 14037 bp, synthetic construct
  misc_feature 1..14037: note = Description of Artificial Sequence: Synthetic coding sequence
  source 1..14037: mol_type = other DNA
atgatgatgtgtgccgccacagccagccctgctgctgccagcagcggcctgggcggagatggcttctacccagctgccaccttcagcagcagccctgcccctggggccctcttcatgcctgtgcctgatggctctgtggccgctgctggcctgggcctgggcctgcctgctgctgacagccggggccactaccagctgctgctgagcggccgggccctggccgaccgctaccgccgcatctacacagctgccctgaatgaccgggaccagggcggcggcagcgctggccacccagccagcaggaacaagaagatcctgaacaagaagaagctgaagaggaagcagaagagcaagagcaaggtgaagaccaggagcaagtctgagaacctggagaacacagtcatcatcccagacatcaagctgcacagcaaccccagcgccttcaacatctactgcaatgtgcgccactgtgtgctggagtggcagaagaaggagatcagcctggccgccgccagcaagaacagcgtgcagagcggggagagtgacagtgatgaggaggaggagagcaaggagccccccatcaagctgcccaagatcatcgaggtgggcctgtgtgaggtgtttgagctgatcaaggagacccgcttcagccaccccagcctgtgcctgcggagcctgcaggccctgctgaatgtgctgcagggccagcagcctgagggcctgcagagcgagcccccagaggtgctggagagcctcttccagctgctgctggagatcaccgtgcgcagcacaggcatgaatgacagcacaggccagagcctgacagccctgagctgtgcctgcctcttcagcctggtggcctcctggggcgagaccggccgcaccctgcaggccatcagcgccatcctgaccaacaacggcagccacgcctgccagaccatccaggtgcccaccatcctgaacagcctgcagaggtctgtgcaggccgtgctggtgggcaagatccagatccaggactggttcagcaatggcatcaagaaggccgccctgatgcacaagtggcccctgaaggagatctctgtggatgaagatgaccagtgcctgctgcagaatgatggcttcttcctgtacctgctgtgcaaggatggcctgtacaagattggcagcggctacagcggcaccgtgcggggccacatctacaacagcaccagccgcatccggaacaggaaggagaagaagtcctggctgggctacgcccagggctacctgctgtacagagatgtgaacaaccacagcatgacagccatccgcatcagccctgagaccctggagcaggacggcaccgtgatgctgcctgactgccacacagagggccagaacatcctcttcacagatggagagtacatcaaccagattgctgccagcagagatgatggctttgtggtgcgcatctttgccaccagcacagagcctgtgctgcagcaggagctgcagctgaagctggccaggaagtgcctgcacgcctgtggcatcagcctgtttgacctggagaaggacctgcacatcatcagcactggatttgatgaggagagcgccatcctgggcgccggccgggagtttgccctgatgaagacagccaacgggaagatctactacacaggcaagtaccagagcctgggcatcaagcagggcggccccagcgctgggaagtgggtggagctgcccatcaccaagagccccaagatcgtgcacttctctgtgggccatgatggcagccacgccctgctggtggctgaagatggcagcatcttcttcaccggcagcgccagcaaaggagaagatggagagagcaccaagagccggcggcagagcaagccctacaagcccaagaagatcatcaagatggagggcaagatcgtggtgtacacagcctgcaacaacggcagcagcagcgtcatcagcaaggatggagagctgtacatgtttgggaaggatgccatctacagcgacagcagcagcctggtgacagacctgaagggccactttgtgacccaggtggccatgggcaaggcccacacctgtgtgctgatgaagaatggagaggtgtggacctttggagtgaacaacaagggccagtgtggccgggacacaggagccatgaaccagggcggcaaaggatttggagtggagaacatggccacagccatggatgaggacctggaggaggagctggatgagaaggatgagaagtccatgatgtgccccccaggcatgcacaagtggaagctggagcagtgcatggtgtgcaccgtgtgtggggactgcaccggctacggggccagctgtgtgagcagcggccgcccagacagagtgcctgggggcatctgtggctgcggcagcggggagagcggctgtgctgtgtgtggctgctgcaaggcctgtgcccgggagctggatggccaggaggcccggcagaggggcatcctggatgctgtgaaggagatgatccccctggacctgctgctggccgtgcctgtgcctggggtgaacatcgaggagcacctgcagctgcggcaggaggagaagaggcagagggtcatccgccgccaccggctggaggagggccggggccccctggtgtttgctggccccatcttcatgaaccaccgggagcaggccctggcccggctgcggagccacccagcccagctgaagcacaagagggacaagcacaaggatggcagcggggagcggggggagaaggatgccagcaagatcaccacctacccacctggctctgtgcgctttgactgtgagctgcgggctgtgcaggtgtcctgtggcttccaccacagcgtggtgctgatggagaatggagatgtgtacaccttcggctacggccagcacggccagctgggccatggagatgtgaacagccggggctgccccaccctggtgcaggccctgcccggccccagcacccaggtgacagctggcagcaaccacacagctgtgctgctgatggatggccaggtgttcaccttcggcagcttcagcaagggccagctgggccggcccatcctggatgtgccctactggaatgccaagccagcccccatgcccaacatcggcagcaaatatggcaggaaggccacctggattggagccagcggggaccagaccttcctgagaattgatgaggccctgatcaacagccacgtgctggccaccagcgagatctttgccagcaagcacatcatcggcctggtgcctgccagcatcagcgagcccccacccttcaagtgcctgctgatcaacaaggtggatggcagctgcaagaccttcaatgacagcgagcaggaggacctgcagggcttcggcgtgtgcctggaccctgtgtatgatgtgatctggaggttccggcccaacacccgggagctgtggtgctacaatgctgtggtggctgatgcccggctgcccagcgctgctgacatgcagagccgctgcagcatcctgagccctgagctggccctgcccaccggcagccgggccctgaccaccaggagccatgctgccctgcacatcctgggctgcctggacaccctggccgccatgcaggacctgaagatgggcgtggccagcacagaggaggagacccaggccgtgatgaaggtgtacagcaaagaagactacagcgtggtgaacagatttgagagccacggcggcggctggggctacagcgcccacagcgtggaggccatccgcttctctgctgacacagacatcctgctgggcggcctgggcctgtttggaggccgcggggagtacacagccaagatcaagctgtttgagctgggcccagatggaggagaccacgagacagatggagacctgctggccgagacagatgtgctggcctatgactgtgccgcccgggagaagtatgccatgatgtttgatgagcctgtgctgctgcaggccggctggtggtacgtggcctgggcccgggtgtctggccccagcagtgactgtggcagccacggccaggccagcatcaccacagatgatggagtggtgttccagttcaagagcagcaagaagagcaacaacggcacagatgtgaatgccggccagatcccccagctgctgtaccgcctgcccaccagtgatggcagcgccagcaagggcaagcagcagaccagcgagcctgtgcacatcctgaagaggagctttgccaggacagtgtctgtggagtgctttgagagcctgctgagcatcctgcactggagctggaccaccctggtgctgggcgtggaggagctgcggggcctgaagggcttccagttcaccgccaccctgctggacctggagcggctgcgctttgtgggcacctgctgcctgcggctgctgcgggtgtacacctgtgagatctaccctgtgtctgccaccgggaaggctgtggtggaggagaccagcaagctggccgagtgcatcggcaagaccaggaccctgctgaggaagatcctgtctgagggcgtggaccactgcatggtgaagctggacaatgacccccagggctacctgagccagcccctgagcctgctggaggccgtgctgcaggagtgccacaacaccttcaccgcctgcttccacagcttctaccccaccccagccctgcagtgggcctgcctgtgtgacctgctgaactgcctggaccaggacatccaggaggccaacttcaagaccagcagcagccggctgctggccgctgtgatgtctgccctgtgccacacctctgtgaagctgaccagcatcttccccatcgcctatgatggagaggtgctgctgcggagcatcgtgaagcaggtgtccacagaaaatgacagcaccctggtgcaccgcttccccctgctggtggcccacatggagaagctgagccagagcgaggagaacatcagcggcatgaccagcttccgggaggtgctggagaagatgctggtgattgtggtgctgcctgtgaggaacagcctgcggcgggagaatgaactcttcagcagccacctggtgagcaacacctgtggcctgctggccagcatcgtgtctgagctgacagccagcgccctgggcagcgaggtggatggcctgaacagcctgcacagcgtgaaggccagcgccaaccgcttcaccaagaccagccagggccgctcctggaacacaggaaatggcagcccagatgccatctgcttctctgtggacaagccaggcatcgtggtggtgggcttctctgtgtatggaggcggcggcatccacgagtatgagctggaggtgctggtggatgattctgaacatgctggggacagcacccacagccaccgctggaccagcctggagctggtgaagggcacctacaccacagatgacagccccagcgacattgctgagatccggctggacaaggtggtgcccctgaaggaaaatgtgaagtatgctgtgcggctgaggaactacggcagcaggacagccaatggagatggcggcatgaccaccgtgcagtgcccagatggagtgaccttcaccttcagcacctgcagcctgagcagcaatggcaccaaccagacccggggccagatcccccagatcctgtactacagaagtgaatttgatggagacctgcagagccagctgctgagcaaggccaatgaggaggacaagaactgcagccgggccctgtctgtggtgtccacagtggtgcgggccagcaaggacctgctgcaccgggccctggccgtggatgctgatgacatccctgagctgctgagcagcagcagcctcttctccatgctgctgcccctcatcatcgcctacatcggccctgtggccgccgccatccccaaggtggccgtggaggtgtttggcctggtgcagcagctgctgcccagcgtggccatcctgaaccagaagtatgcccccccagccttcaaccccaaccagagcacagacagcaccactggaaaccagcctgagcagggcctgagcgcctgcaccaccagcagccactatgctgtgattgaaagtgagcacccctacaagccagcctgtgtgatgcactacaaggtgaccttcccagaatgtgtgcgctggatgaccatcgagtttgacccccagtgtggcacagcccagagtgaagatgtgctgcggctgctgatccctgtgaggacagtgcagaacagcggctacggccccaagctgacctctgtgcatgagaacctgaacagctggattgagctgaagaagttcagcggcagcagcggctggcccaccatggtgctggtgctgcctggaaatgaggccctcttcagcctggagacagccagtgactatgtgaaggatgacaaggccagcttctacggcttcaagtgctttgccatcggctatgagttcagccctggcccagatgagggcgtcatccagctggagaaggagctggccaacctgggcggcgtgtgtgccgccgccctgatgaagaaggacctggccctgcccatcggaaatgagctggaggaggacctggagatcctggaggaggccgccctgcaggtgtgcaagacccacagcggcatcctgggcaagggcctggccctgagccacagccccaccatcctggaggccctggagggcaacctgcccctgcagatccagagcaatgagcagagcttcctggatgacttcatcgcctgtgtgcccggcagcagcggcggccgcctggcccgctggctgcagcctgacagctatgctgacccccagaagaccagcctcatcctgaacaaggatgacatccgctgtggctggcccaccaccatcaccgtgcagaccaaggaccagtatggagatgtggtgcacgtgcccaacatgaaggtggaggtgaaggctgtgcctgtgtcccagaagaagatgagcctgcagcaggaccaggccaagaagccccagagaattcctggcagccctgctgtgacagctgccagcagcaacacagacatgacctacggcggcctggccagccccaagctggatgtgtcctatgagcccatgattgtgaaggaggcccgctacatcgccatcaccatgatgaaggtgtatgagaactacagctttgaggagctgcgctttgccagccccacccccaagaggcccagcgagaacatgctgatccgggtgaacaatgatggcacctactgtgccaactggacccctggggccatcggcctgtacaccctgcacgtgaccattgatggcatcgagattgatgctggcctggaggtgaaggtgaaggacccccccaagggcatgatccccccaggcacccagctggtgaagcccaagtctgagccccagcccaacaaggtgaggaagtttgtggccaaggacagcgctggcctgcgcatccgcagccaccccagcctgcagagcgagcagatcggcatcgtgaaggtgaatggcaccatcaccttcattgatgagatccacaatgatgatggagtgtggctgcggctgaatgatgagaccatcaagaagtatgtgcccaacatgaatggctacacagaggcctggtgcctgtccttcaaccagcacctgggcaagagcctgctggtgcctgtggatgagagcaagaccaacacagatgacttcttcaaggacatcaacagctgctgcccccaggaggccaccatgcaggagcaggacatgcccttcctgcggggcggccctggcatgtacaaggtggtgaagacaggccccagcggccacaacatccgcagctgccccaacctgcggggcatccccatcggcatgctggtgctgggcaacaaggtgaaggctgtgggggaggtgaccaacagcgagggcacctgggtgcagctggaccagaacagcatggtggagttctgtgagagtgatgaaggagaggcctggagcctggcccgggacagaggaggcaaccagtacctgcggcatgaagatgagcaggccctgctggaccagaacagccagaccccaccacccagccccttctctgtgcaggccttcaacaagggggccagctgcagcgcccagggctttgattatggcctgggcaacagcaaaggagaccggggcaacatcagcaccagcagcaagccagccagcaccagcggcaagtctgagctgagcagcaagcacagccgcagcctgaagccagatggccgcatgagcaggaccacagctgaccagaagaagccccggggcacagagagcctgagcgccagcgagagcctcatcctgaagagtgatgctgccaagctgcggagtgacagccacagccgcagcctgagccccaaccacaacaccctgcagaccctgaagagtgatggccgcatgcccagcagcagcagagctgagagccctggccctggcagccggctgagcagccccaagcccaagaccctgcctgccaacagaagcagccccagcggggccagcagccccaggagcagcagcccccatgacaagaacctgccccagaagagcacagcccctgtgaagaccaagctggaccccccccgggagaggagcaagagtgacagctacaccctggaccctgacaccctgaggaagaagaagatgcccctgacagagcccctgcggggccgcagcaccagccccaagcccaagtctgtgcccaaggacagcacagacagccctggctctgaaaatagagcccccagcccccacgtggtgcaggagaacctgcacagcgaggtggtggaggtgtgcaccagcagcaccctgaagaccaacagcctgacagacagcacctgtgatgacagcagcgagttcaagtctgtggatgagggcagcaacaaggtgcacttcagcatcggcaaggcccccctgaaggatgagcaggagatgagggccagccccaagatcagcaggaaatgtgccaacagacacacccggcccaagaaggagaagagcagcttcctgttcaagggagatggcagcaagcccctggagcccgccaagcaggccatgagccccagcgtggctgaatgtgcccgggctgtgtttgccagcttcctgtggcatgagggcatcgtgcatgatgccatggcctgcagcagcttcctgaagttccaccctgagctgagcaaggagcacgcccccatccgcagcagcctgaacagccagcagcccacagaggagaaggagaccaagctgaagaacagacacagcctggagatcagcagcgccctgaacatgttcaacatcgcccctcatggccctgacatcagcaagatgggcagcatcaacaagaacaaggtgctgtccatgctgaaggagccccccctgcacgagaagtgtgaagatggcaagacagagaccacctttgagatgtccatgcacaacaccatgaagagcaagagccccctgcccctgaccctgcagcacctggtggccttctgggaggacatcagcctggccaccatcaaggccgccagccagaacatgatcttccccagccctggcagctgtgctgtgctgaagaagaaggaatgtgagaaggagaacaagaagagcaagaaggagaagaagaagaaggagaaggccgaggtgcggccccggggcaacctgtttggagagatggcccagctggccgtgggcggccctgagaaggacaccatctgtgagctgtgtggggagagccacccctaccctgtgacctaccacatgaggcaggcccaccctggctgcggccgctatgccggcggccagggctacaacagcatcggccacttctgtggcggctgggccggcaactgtggagatggcggcattggaggcagcacctggtacctggtgtgtgaccgctgccgggagaagtacctgcgggagaagcaggccgccgcccgggagaaggtgaagcagagcaggaggaagcccatgcaggtgaagaccccccgggccctgcccaccatggaggcccaccaggtgatcaaggccaatgccctcttcctgctgagcctgagcagcgctgctgagcccagcatcctgtgctaccacccagccaagcccttccagagccagctgcccagcgtgaaggagggcatcagcgaggacctgcctgtgaagatgccctgcctgtacctgcagaccctggcccggcaccaccacgagaactttgtgggctaccaggatgacaacctcttccaggatgagatgagatacctgcggagcacctctgtgcctgccccctacatctctgtgaccccagatgccagccccaacgtgtttgaggagcctgagagcaacatgaagtccatgccacccagcctggagaccagccccatcacagacacagacctggccaagaggacagtgttccagaggagctacagcgtggtggcctctgaatatgacaagcagcacagcatcctgcctgcccgggtgaaggccatccccaggagaagagtgaacagcggggacacagaggtgggcagcagcctgctgcggcaccccagccctgagctgagccgcctcatcagcgcccacagcagcctgagcaagggggagaggaacttccagtggcctgtgctggccttcgtcatccagcaccacgacctggagggcctggagatcgccatgaagcaggccctgaggaagagcgcctgccgggtgtttgccatggaggccttcaactggctgctgtgcaacgtcatccagaccaccagcctgcatgacatcctgtggcactttgtggccagcctgaccccagcccctgtggagcctgaggaggaggaggatgaggagaacaagaccagcaaagaaaattctgagcaggagaaggacaccagggtgtgtgagcaccccctgagtgacatcgtgattgctggggaggccgcccaccccctgccccacaccttccaccggctgctgcagaccatcagtgacctgatgatgagcctgcccagcggcagcagcctgcagcagatggccctgcgctgctggagcctgaagttcaagcagagcgaccaccagttcctgcaccagagcaatgtgttccaccacatcaacaacatcctgagcaagagtgatgatggagacagcgaggagagcttcagcatcagcatccagagcggctttgaggccatgagccaggagctgtgcatcgtgatgtgcctgaaggacctgaccagcatcgtggacatcaagaccagcagcaggcctgccatgattggcagcctgacagatggcagcacagagaccttctgggagagcggagatgaggacaagaacaagaccaagaacatcaccatcaactgtgtgaagggcatcaatgcccgctacgtgtctgtgcacgtggacaacagccgggacctgggcaacaaggtgacctccatgaccttcctgaccgggaaggctgtggaggacctgtgccgcatcaagcaggtggacctggacagccgccacatcggctgggtgaccagcgagctgcccggcggggacaaccacatcatcaagattgagctgaagggccctgagaacaccctgcgggtgcggcaggtgaaggtgctgggctggaaggatggagagagcaccaagattgctggccagatcagcgcctctgtggcccagcagaggaactgtgaggccgagaccctgcgggtcttccgcctcatcaccagccaggtgtttgggaagctgatctctggagatgctgagcccaccccagagcaggaggagaaggccctgctgagcagccctgagggggaggagaaggtgtacaatgccaccagtgatgctgacctgaaggagcacatggtgggcatcatcttcagccgcagcaagctgaccaacctgcagaagcaggtgtgtgcccacatcgtgcaggccatccgcatggaggccaccagggtgcgggaggagtgggagcacgccatcagcagcaaagaaaatgccaacagccagcccaatgatgaagatgccagcagtgatgcctactgctttgagctgctgtccatggtgctggccctgagcggcagcaatgtgggccggcagtacctggcccagcagctgaccctgctgcaggacctcttcagcctgctgcacacagccagcccccgggtgcagaggcaggtgaccagcctgctgcggcgggtgctgcctgaggtgacccccagccggctggccagcatcatcggcgtgaagagcctgcccccagctgacatcagtgacatcatccacagcacagagaagggggactggaacaagctgggcatcctggacatgttcctgggctgcatcgccaaggccctgactgtgcagctgaaggccaagggcaccaccatcactggaacagctggcaccaccgtgggcaagggcgtgaccaccgtgaccctgcccatgatcttcaacagcagctacctgcggcggggggagagccactggtggatgaagggcagcacccccacccagatcagcgagatcatcatcaagctgatcaaggacatggccgccggccacctgtctgaggcctggagccgggtgaccaagaatgccatcgccgagaccatcatcgccctgaccaagatggaggaggagttccgcagccctgtgcgctgcatcgccaccacccggctgtggctggccctggccagcctgtgtgtgctggaccaggaccacgtggaccggctgagcagcggccgctggatgggcaaggatggccagcagaagcagatgcccatgtgtgacaaccatgatgatggagaaacagctgccatcatcctgtgcaatgtgtgtggcaacctgtgcacagactgtgaccgcttcctgcacctgcacaggaggaccaagacccaccagaggcaggtgttcaaggaggaggaggaggccatcaaggtggacctgcacgagggctgcggccgcaccaagctgttctggctgatggccctggccgacagcaagaccatgaaggccatggtggagttccgggagcacacaggcaagcccaccaccagcagcagcgaggcctgccgcttctgtggcagccgctctggaacagagctgtctgctgtgggctctgtgtgcagtgatgctgactgccaggagtatgccaagatcgcctgcagcaagacccacccctgtggccacccctgtggcggcgtgaagaatgaggagcactgcctgccctgcctgcacggctgtgacaagagcgccaccagcctgaagcaggatgctgatgacatgtgcatgatctgcttcacagaggccctgtctgctgccccagccatccagctggactgcagccacatcttccacctgcagtgctgccggcgggtgctggagaaccgctggctgggcccccgcatcaccttcggcttcatcagctgccccatctgcaagaacaagatcaaccacatcgtgctgaaggacctgctggaccccatcaaggagctgtatgaagatgtgcggaggaaggccctgatgaggctggagtatgagggcctgcacaagtctgaggccatcaccaccccaggagtgcgcttctacaatgaccctgctggctacgccatgaacagatatgcctactacgtgtgctacaagtgcaggaaggcctactttggaggagaggcccgctgtgatgctgaggccggcagaggagatgattatgacccccgggagctgatctgtggggcctgcagtgatgtgtcccgggcccagatgtgccccaagcacggcacagacttcctggagtacaagtgccgctactgctgcagcgtggccgtgttcttctgcttcggcaccacccacttctgcaatgcctgccatgatgacttccagaggatgaccagcatccccaaggaggagctgccccactgcccagctggccccaagggcaagcagctggagggcacagaatgtcccctgcacgtggtgcaccccccaactggagaggagtttgccctgggctgcggcgtgtgcagaaatgcccacaccttctag

SEQ ID NO: 20667 - DNA, 13923 bp, synthetic construct; identical to SEQ ID NO: 20664
  misc_feature 1..13923: note = Description of Artificial Sequence: Synthetic coding sequence
  source 1..13923: mol_type = other DNA

SEQ ID NO: 20668 - DNA, 930 bp, synthetic construct
  misc_feature 1..930: note = Description of Artificial Sequence: Synthetic coding sequence
  source 1..930: mol_type = other DNA
atgaggccagacagagctgaggcccctggccccccagccatggccgccggcggccctggagctggcagcgctgcccctgtgagcagcaccagcagcctgcccctggccgccctgaacatgagggtgagaagaaggctgagcctcttcctgaatgtgaggacccaggtggccgctgactggacagccctggccgaggagatggactttgagtacctggagatccggcagctggagacccaggccgaccccaccggccgcctgctggatgcctggcagggccggcctggggcctctgtgggccgcctgctggagctgctgaccaagctgggcagagatgatgtgctgctggagctgggccccagcattgaggaggactgccagaagtacatcctgaagcagcagcaggaggaggccgagaagcccctgcaggtggccgctgtggacagctctgtgcccaggacagctgagctggccggcatcaccaccctggatgaccccctgggccacatgcctgagagatttgatgccttcatctgctactgccccagcgacatccagtttgtgcaggagatgatccggcagctggagcagaccaactaccgcctgaagctgtgtgtgtctgacagagatgtgctgcccggcacctgtgtgtggagcatcgccagcgagctgattgagaagcgctgcaggaggatggtggtggtggtgtctgatgactacctgcagagcaaagaatgtgacttccagaccaagtttgccctgagcctgagccctggggcccaccagaagaggctcatccccatcaagtacaaggccatgaagaaggagttccccagcatcctgcgcttcatcaccgtgtgtgactacaccaacccctgcaccaagtcctggttctggacccggctggccaaggccctgagcctgccctag

SEQ ID NO: 20669 - DNA, 858 bp, synthetic construct
  misc_feature 1..858: note = Description of Artificial Sequence: Synthetic coding sequence
  source 1..858: mol_type = other DNA
atggctgctgggggccctggggccggcagcgctgcccctgtgagcagcaccagcagcctgcccctggccgccctgaacatgagggtgagaagaaggctgagcctcttcctgaatgtgaggacccaggtggccgctgactggacagccctggccgaggagatggactttgagtacctggagatccggcagctggagacccaggccgaccccactggagcctctgtgggccgcctgctggagctgctgaccaagctgggcagagatgatgtgctgctggagctgggccccagcattgaggaggactgccagaagtacatcctgaagcagcagcaggaggaggccgagaagcccctgcaggtggccgctgtggacagctctgtgcccaggacagctgagctggccggcatcaccaccctggatgaccccctgggccacatgcctgagagatttgatgccttcatctgctactgccccagcgacatccagtttgtgcaggagatgatccggcagctggagcagaccaactaccgcctgaagctgtgtgtgtctgacagagatgtgctgcccggcacctgtgtgtggagcatcgccagcgagctgattgagaagcgctgcaggaggatggtggtggtggtgtctgatgactacctgcagagcaaagaatgtgacttccagaccaagtttgccctgagcctgagccctggggcccaccagaagaggctcatccccatcaagtacaaggccatgaagaaggagttccccagcatcctgcgcttcatcaccgtgtgtgactacaccaacccctgcaccaagtcctggttctggacccggctggccaaggccctgagcctgccctag

SEQ ID NO: 20670 - DNA, 954 bp, synthetic construct
  misc_feature 1..954: note = Description of Artificial Sequence: Synthetic coding sequence
  source 1..954: mol_type = other DNA
atgaggccagacagagctgaggcccctggccccccagccatggccgccggcggccctggagctggcagcgctgcccctgtgagcagcaccagcagcctgcccctggccgccctgaacatgagggtgagaagaaggctgagcctcttcctgaatgtgaggacccaggtggccgctgactggacagccctggccgaggagatggactttgagtacctggagatccggcagctggagacccaggccgaccccaccggccgcctgctggatgcctggcagggccggcctggggcctctgtgggccgcctgctggagctgctgaccaagctgggcagagatgatgtgctgctggagctgggccccagcattgaggaggactgccagaagtacatcctgaagcagcagcaggaggaggccgagaagcccctgcaggtggccgctgtggacagctctgtgcccaggacagctgagctggccggcatcaccaccctggatgaccccctgggccacatgcctgagagatttgatgccttcatctgctactgccccagcgacatccagtttgtgcaggagatgatccggcagctggagcagaccaactaccgcctgaagctgtgtgtgtctgacagagatgtgctgcccggcacctgtgtgtggagcatcgccagcgagctgattgagaagaggctggcccggcggccccggggcggctgcaggaggatggtggtggtggtgtctgatgactacctgcagagcaaagaatgtgacttccagaccaagtttgccctgagcctgagccctggggcccaccagaagaggctcatccccatcaagtacaaggccatgaagaaggagttccccagcatcctgcgcttcatcaccgtgtgtgactacaccaacccctgcaccaagtcctggttctggacccggctggccaaggccctgagcctgccctag

SEQ ID NO: 20671 - DNA, 510 bp, synthetic construct
  misc_feature 1..510: note = Description of Artificial Sequence: Synthetic coding sequence
  source 1..510: mol_type = other DNA
atggctgctgggggccctggggccggcagcgctgcccctgtgagcagcaccagcagcctgcccctggccgccctgaacatgagggtgagaagaaggctgagcctcttcctgaatgtgaggacccaggtggccgctgactggacagccctggccgaggagatggactttgagtacctggagatccggcagctggagacccaggccgaccccaccggccgcctgctggatgcctggcagggccggcctggggcctctgtgggccgcctgctggagctgctgaccaagctgggcagagatgatgtgctgctggagctgggccccagcattgaggaggactgccagaagtacatcctgaagcagcagcaggaggaggccgagaagcccctgcaggtggccgctgtggacagctctgtgcccccccacctgatgaccccctggggcatctgcctgtctgtgtccatgcccagcagcgccatcgccccagccaccagcagcctgtgcagaagatag

SEQ ID NO: 20672 - DNA, 963 bp, synthetic construct
  misc_feature 1..963: note = Description of Artificial Sequence: Synthetic coding sequence
  source 1..963: mol_type = other DNA
atggagctgctgagcccccccctgagagatgtggacctgacagccccagatggcagcctgtgcagctttgccaccacagatgacttctatgatgacccctgctttgacagcccagacctgcgcttctttgaggacctggacccccggctgatgcacgtgggcgccctgctgaagccagaggagcacagccacttccctgctgctgtgcacccagcccctggggccagagaagatgagcacgtgcgggcccccagcggccaccaccaggccggccgctgcctgctgtgggcctgcaaggcctgcaagaggaagaccaccaatgctgacaggaggaaggccgccaccatgagggagcggcggcggctgagcaaggtgaatgaggcctttgagaccctgaagcgctgcaccagcagcaaccccaaccagaggctgcccaaggtggagatcctgagaaatgccatccgctacatcgagggcctgcaggccctgctgcgggaccaggatgctgcccctcctggagctgctgctgccttctacgcccctggccccctgcccccaggccggggcggggagcactacagcggggacagtgatgccagcagccccaggagcaactgcagtgatggcatgatggactacagcggcccccccagcggggccaggagaagaaactgctatgagggcgcctactacaatgaggcccccagcgagcccaggcctgggaagtctgctgctgtgagcagcctggactgcctgagcagcatcgtggagcgcatcagcacagagagccctgctgccccagccctgctgctggctgatgtgcccagcgagagccccccccggcggcaggaggccgccgcccccagcgagggggagagcagcggggaccccacccagagcccagatgctgccccccagtgcccagctggggccaaccccaaccccatctaccaggtgctgtag

SEQ ID NO: 20673 - DNA, 5538 bp, synthetic construct
  misc_feature 1..5538: note = Description of Artificial Sequence: Synthetic coding sequence
  source 1..5538: mol_type = other DNA
atgggagatgtgaagctggtggccagcagccacatcagcaagaccagcctgtctgtggaccccagccgggtggacagcatgcccctgacagaggccccagccttcatcctgccccccaggaacctgtgcatcaaggagggcgccacagccaagtttgagggccgggtgcggggctacccagagccccaggtgacctggcacagaaatggccagcccatcaccagcggcggccgcttcctgctggactgtggcatccggggcaccttcagcctggtgattcatgctgtgcatgaagaagatcggggcaagtacacctgtgaggccaccaacggcagcggggcccggcaggtgacagtggagctgactgtggagggcagctttgccaagcagctgggccagcctgtggtgtccaagaccctgggggaccgcttcagcgccccagctgtggagacccggcccagcatctggggcgagtgcccccccaagtttgccaccaagctgggccgggtggtggtgaaggagggccagatgggccgcttcagctgcaagatcaccggccggccccagccccaggtgacctggctgaagggaaatgtgcccctgcagcccagcgcccgggtgtctgtgtctgagaagaatggcatgcaggtgctggagatccatggagtgaaccaggatgatgtgggcgtgtacacctgcctggtggtgaatggaagtggcaaggcctccatgtctgctgagctgagcatccagggcctggacagcgccaacagaagctttgtgcgggagaccaaggccaccaacagtgatgtgaggaaggaggtgaccaacgtcatcagcaaggagagcaagctggacagcctggaggccgccgccaagagcaagaactgcagcagcccccagagaggaggcagccccccctgggccgccaacagccagccccagcccccccgggagagcaagctggagagctgcaaggacagccccaggacagccccccagacccctgtgctgcagaagaccagcagcagcatcaccctgcaggccgcccgggtgcagcctgagccccgggcccctggcctgggcgtgctgagccccagcggggaggagaggaagaggcctgccccacccaggcctgccaccttccccacccggcagcccggcctgggcagccaggatgtggtgtccaaggccgccaacagacgcatccccatggagggccagagggacagcgccttccccaagtttgagagcaagccccagagccaggaggtgaaggagaaccagacagtgaagttccgctgtgagggcctggccgtgatggaggtggcccccagcttcagctctgtgctgaaggactgtgctgtgattgagggccaggactttgtgctgcagtgcagcgtgcggggcacccctgtgccccgcatcacctggctgctgaatggccagcccatccagtatgcccggagcacctgtgaggccggcgtggccgagctgcacatccaggatgccctgcctgaagatcatggcacctacacctgcctggctgaaaatgccctgggccaggtgtcctgcagcgcctgggtgacagtgcatgagaagaagagcagcaggaagtctgagtacctgctgcctgtggcccccagcaagcccacagcccccatcttcctgcagggcctgagtgacctgaaggtgatggatggcagccaggtgaccatgacagtgcaggtgtctggcaaccccccacctgaggtgatctggctgcacaatggaaatgagatccaggagagcgaggacttccactttgagcagaggggcacccagcacagcctgtgcatccaggaggtgtttcctgaggacaccggcacctacacctgtgaggcctggaacagcgctggggaggtgaggacccaggccgtgctgactgtgcaggagccccatgatggcacccagccctggttcatcagcaagcccaggtctgtgacagccagcctgggccagagcgtgctgatcagctgtgccatcgccggggaccccttccccaccgtgcactggctgagagatggcaaggccctgtgcaaggacaccggccactttgaggtgctgcagaatgaagatgtgttcaccctggtgctgaagaaggtgcagccctggcacgccggccagtatgagatcctgctgaagaacagagtgggagaatgtagctgccaggtgtccctgatgctgcagaacagcagcgcccgggccctgccccggggccgggagcccgccagctgtgaggacctgtgtggcggcggcgtgggcgcagatggcggcggcagtgacagatatggcagcctgcggcccggctggccagcccggggccagggctggctggaggaggaggatggagaagatgtgcggggcgtgctgaagagaagagtggagacccggcagcacacagaggaggccatccggcagcaggaggtggagcagctggacttccgggacctgctgggcaagaaggtgtccaccaagaccctgtctgaagatgacctgaaggagatcccagctgagcagatggacttccgggccaacctgcagaggcaggtgaagcccaagacagtgtctgaggaggagaggaaggtgcacagcccccagcaggtggacttccgctctgtgctggccaagaagggcaccagcaagacccctgtgcctgagaaggtgcccccacccaagccagccaccccagacttccgctctgtgctgggcggcaagaagaagctgcctgcagaaaatggcagcagcagcgctgagaccctgaatgccaaggctgtggagagcagcaagcccctgagcaatgcccagcccagcggccccctgaagcctgtgggcaatgccaagccagctgagaccctgaagcccatgggaaatgccaagccagctgagaccctgaagcccatgggaaatgccaagccagatgagaacctgaagagcgccagcaaggaggagctgaagaaggatgtgaagaatgatgtgaactgcaagaggggccatgctggcaccacagacaatgagaagaggtctgagagccagggcacagccccagccttcaagcagaagctgcaggatgtgcacgtggccgagggcaagaagctgctgctgcagtgccaggtgtccagtgaccccccagccaccatcatctggaccctgaatggcaagaccctgaagaccaccaagttcatcatcctgagccaggagggcagcctgtgcagcgtgtccattgagaaggccctgcctgaggaccggggcctgtacaagtgtgtggccaagaatgatgctggccaggctgaatgtagctgccaggtgacagtggatgatgccccagccagcgagaacaccaaggcccctgagatgaagagcagaagacccaagagcagcctgccccctgtgctgggcacagaaagtgatgccaccgtgaagaagaagccagcccccaagaccccacccaaggccgccatgccaccccagatcatccagtttcctgaggaccagaaggtgcgggccggggagagcgtggagctgtttgggaaggtgacaggcacccagcccatcacctgcacctggatgaagttcaggaagcagatccaggagagcgagcacatgaaggtggagaacagtgaaaatggcagcaagctgaccatcctggccgcccggcaggagcactgcggctgctacaccctgctggtggagaacaagctgggcagccggcaggcccaggtgaacctgactgtggtggacaagccagaccccccagctggcaccccctgtgccagtgacatccgcagcagcagcctgaccctgtcctggtacggcagcagctatgatggcggcagcgctgtgcagagctacagcattgagatctgggacagcgccaacaagacctggaaggagctggccacctgccgcagcaccagcttcaacgtgcaggacctgctgcctgaccacgagtacaagttccgggtgcgggccatcaacgtgtatggcaccagcgagcccagccaggagagcgagctgaccaccgtgggggagaagccagaggagcccaaggatgaggtggaggtgtctgatgatgatgagaaggagcctgaggtggactacagaacagtgaccatcaacacagagcagaaggtgtctgacttctatgacatcgaggagcggctgggcagcggcaagtttggccaggtgttccggctggtggagaagaagaccaggaaggtgtgggccggcaagttcttcaaggcctacagcgccaaggagaaggagaacatccggcaggagatcagcatcatgaactgcctgcaccaccccaagctggtgcagtgtgtggatgcctttgaggagaaggccaacatcgtgatggtgctggagatcgtgtctggaggagagctgtttgagcgcatcattgatgaggactttgagctgacagagcgggagtgcatcaagtacatgaggcagatcagcgagggcgtggagtacatccacaagcagggcatcgtgcacctggacctgaagccagagaacatcatgtgtgtgaacaagacaggcacccgcatcaagctgattgactttggcctggcccggcggctggagaatgccggcagcctgaaggtgctgtttggcaccccagagtttgtggcccctgaggtgatcaactatgagcccatcggctacgccacagacatgtggagcattggagtcatctgctacatcctggtgtctggcctgagccccttcatgggagacaatgacaatgagaccctggccaacgtgaccagcgccacctgggactttgatgatgaggcctttgatgagatcagtgatgatgccaaggacttcatcagcaacctgctgaagaaggacatgaagaaccggctggactgcacccagtgcctgcagcacccctggctgatgaaggacaccaagaacatggaggccaagaagctgagcaaggacaggatgaagaagtacatggcccggaggaagtggcagaagacaggaaatgctgtgcgggccatcggccgcctgagctccatggccatgatcagcggcctgagcggcaggaagagcagcacaggcagccccaccagccccctgaatgctgagaagctggagagtgaagaagatgtgtcccaggccttcctggaggccgtggccgaggagaagccccacgtgaagccctacttcagcaagaccatccgggacctggaggtggtggagggcagcgctgccaggtttgactgcaagattgagggctacccagaccctgaggtggtgtggttcaaggatgaccagagcatccgggagagccgccacttccagattgattatgatgaagatggcaactgcagcctcatcatcagtgatgtgtgtggagatgatgatgccaagtacacctgcaaggctgtgaacagcctgggggaggccacctgcacagctgagctgattgtggagaccatggaggagggggagggggagggggaggaggaggaggagtag

SEQ ID NO: 20674 - DNA, 2145 bp, synthetic construct
  misc_feature 1..2145: note = Description of Artificial Sequence: Synthetic coding sequence
  source 1..2145: mol_type = other DNA
atgaagagccggcggcccaagagcagcctgccccctgtgctgggcacagaaagtgatgccaccgtgaagaagaagccagcccccaagaccccacccaaggccgccatgccaccccagatcatccagtttcctgaggaccagaaggtgcgggccggggagagcgtggagctgtttgggaaggtgacaggcacccagcccatcacctgcacctggatgaagttcaggaagcagatccaggagagcgagcacatgaaggtggagaacagtgaaaatggcagcaagctgaccatcctggccgcccggcaggagcactgcggctgctacaccctgctggtggagaacaagctgggcagccggcaggcccaggtgaacctgactgtggtggacaagccagaccccccagctggcaccccctgtgccagtgacatccgcagcagcagcctgaccctgtcctggtacggcagcagctatgatggcggcagcgctgtgcagagctacagcattgagatctgggacagcgccaacaagacctggaaggagctggccacctgccgcagcaccagcttcaacgtgcaggacctgctgcctgaccacgagtacaagttccgggtgcgggccatcaacgtgtatggcaccagcgagcccagccaggagagcgagctgaccaccgtgggggagaagccagaggagcccaaggatgaggtggaggtgtctgatgatgatgagaaggagcctgaggtggactacagaacagtgaccatcaacacagagcagaaggtgtctgacttctatgacatcgaggagcggctgggcagcggcaagtttggccaggtgttccggctggtggagaagaagaccaggaaggtgtgggccggcaagttcttcaaggcctacagcgccaaggagaaggagaacatccggcaggagatcagcatcatgaactgcctgcaccaccccaagctggtgcagtgtgtggatgcctttgaggagaaggccaacatcgtgatggtgctggagatcgtgtctggaggagagctgtttgagcgcatcattgatgaagattttgagctgacagaaagagagtgcatcaagtacatgaggcagatcagcgagggcgtggagtacatccacaagcagggcatcgtgcacctggacctgaagccagagaacatcatgtgtgtgaacaagacaggcacccgcatcaagctgattgactttggcctggcccggcggctggagaatgccggcagcctgaaggtgctgtttggcaccccagagtttgtggcccctgaggtgatcaactatgagcccatcggctacgccacagacatgtggagcattggagtcatctgctacatcctggtgtctggcctgagccccttcatgggagacaatgacaatgagaccctggccaacgtgaccagcgccacctgggactttgatgatgaggcctttgatgagatcagtgatgatgccaaggacttcatcagcaacctgctgaagaaggacatgaagaaccggctggactgcacccagtgcctgcagcacccctggctgatgaaggacaccaagaacatggaggccaagaagctgagcaaggacaggatgaagaagtacatggcccggaggaagtggcagaagacaggaaatgctgtgcgggccatcggccgcctgagctccatggccatgatcagcggcctgagcggcaggaagagcagcacaggcagccccaccagccccctgaatgctgagaagctggagagcgaggaggatgtgtcccaggccttcctggaggccgtggccgaggagaagccccacgtgaagccctacttcagcaagaccatccgggacctggaggtggtggagggcagcgctgccaggtttgactgcaagattgagggctacccagaccctgaggtggtgtggttcaaggatgaccagagcatccgggagagccgccacttccagattgattatgatgaagatggcaactgcagcctcatcatcagtgatgtgtgtggagatgatgatgccaagtacacctgcaaggctgtgaacagcctgggggaggccacctgcacagctgagctgattgtggagaccatggaggagggggagggggagggggaggaggaggaggagtag

SEQ ID NO: 20675 - DNA, 5592 bp, synthetic construct
  misc_feature 1..5592: note = Description of Artificial Sequence: Synthetic coding sequence
  source 1..5592: mol_type = other DNA
atgggagatgtgaagctggtggccagcagccacatcagcaagaccagcctgtctgtggaccccagccgggtggacagcatgcccctgacagaggccccagccttcatcctgccccccaggaacctgtgcatcaaggagggcgccacagccaagtttgagggccgggtgcggggctacccagagccccaggtgacctggcacagaaatggccagcccatcaccagcggcggccgcttcctgctggactgtggcatccggggcaccttcagcctggtgattcatgctgtgcatgaagaagatcggggcaagtacacctgtgaggccaccaacggcagcggggcccggcaggtgacagtggagctgactgtggagggcagctttgccaagcagctgggccagcctgtggtgtccaagaccctgggggaccgcttcagcgccccagctgtggagacccggcccagcatctggggcgagtgcccccccaagtttgccaccaagctgggccgggtggtggtgaaggagggccagatgggccgcttcagctgcaagatcaccggccggccccagccccaggtgacctggctgaagggaaatgtgcccctgcagcccagcgcccgggtgtctgtgtctgagaagaatggcatgcaggtgctggagatccatggagtgaaccaggatgatgtgggcgtgtacacctgcctggtggtgaatggaagtggcaaggcctccatgtctgctgagctgagcatccagggcctggacagcgccaacagaagctttgtgcgggagaccaaggccaccaacagtgatgtgaggaaggaggtgaccaacgtcatcagcaaggagagcaagctggacagcctggaggccgccgccaagagcaagaactgcagcagcccccagagaggaggcagccccccctgggccgccaacagccagccccagcccccccgggagagcaagctggagagctgcaaggacagccccaggacagccccccagacccctgtgctgcagaagaccagcagcagcatcaccctgcaggccgcccgggtgcagcctgagccccgggcccctggcctgggcgtgctgagccccagcggggaggagaggaagaggcctgccccacccaggcctgccaccttccccacccggcagcccggcctgggcagccaggatgtggtgtccaaggccgccaacagacgcatccccatggagggccagagggacagcgccttccccaagtttgagagcaagccccagagccaggaggtgaaggagaaccagacagtgaagttccgctgtgaggtgtctggcatccccaagccagaggtggcctggttcctggagggcacccctgtgcggcggcaggagggcagcattgaggtgtatgaagatgctggcagccactacctgtgcctgctgaaggcccggacccgggacagcggcacctacagctgcacagccagcaatgcccagggccagctgagctgctcctggaccctgcaggtggagcggctggccgtgatggaggtggcccccagcttcagctctgtgctgaaggactgtgccgtcatcgagggccaggactttgtgctgcagtgcagcgtgcggggcacccctgtgccccgcatcacctggctgctgaatggccagcccatccagtatgcccggagcacctgtgaggccggcgtggccgagctgcacatccaggatgccctgcctgaggaccacggcacctacacctgcctggccgagaatgccctgggccaggtgtcctgcagcgcctgggtgacagtgcatgagaagaagagcagcaggaagtctgagtacctgctgcctgtggcccccagcaagcccacagcccccatcttcctgcagggcctgagtgacctgaaggtgatggatggcagccaggtgaccatgacagtgcaggtgtctggcaaccccccacctgaggtgatctggctgcacaatggaaatgagatccaggagagcgaggacttccactttgagcagaggggcacccagcacagcctgtgcatccaggaggtgtttcctgaggacaccggcacctacacctgtgaggcctggaacagcgctggggaggtgaggacccaggccgtgctgactgtgcaggagccccatgatggcacccagccctggttcatcagcaagcccaggtctgtgacagccagcctgggccagagcgtgctgatcagctgtgccatcgccggggaccccttccccaccgtgcactggctgagagatggcaaggccctgtgcaaggacaccggccactttgaggtgctgcagaatgaagatgtgttcaccctggtgctgaagaaggtgcagccctggcatgctggccagtatgagatcctgctgaagaacagagtgggggagtgcagctgccaggtgtccctgatgctgcagaacagcagcgcccgggccctgccccggggccgggagcccgccagctgtgaggacctgtgtggcggcggcgtgggcgcagatggcggcggcagtgacagatatggcagcctgcggcccggctggccagcccggggccagggctggctggaggaggaggatggagaagatgtgcggggcgtgctgaagagaagagtggagacccggcagcacacagaggaggccatccggcagcaggaggtggagcagctggacttccgggacctgctgggcaagaaggtgtccaccaagaccctgtctgaagatgacctgaaggagatcccagctgagcagatggacttccgggccaacctgcagaggcaggtgaagcccaagacagtgtctgaggaggagaggaaggtgcacagcccccagcaggtggacttccgctctgtgctggccaagaagggcaccagcaagacccctgtgcctgagaaggtgcccccacccaagccagccaccccagacttccgctctgtgctgggcggcaagaagaagctgcctgcagaaaatggcagcagcagcgctgagaccctgaatgccaaggctgtggagagcagcaagcccctgagcaatgcccagcccagcggccccctgaagcctgtgggcaatgccaagccagctgagaccctgaagcccatgggaaatgccaagccagctgagaccctgaagcccatgggaaatgccaagccagatgagaacctgaagagcgccagcaaggaggagctgaagaaggatgtgaagaatgatgtgaactgcaagaggggccacgccggcaccacagacaatgagaagaggtctgagagccagggcacagccccagccttcaagcagaagctgcaggatgtgcacgtggccgagggcaagaagctgctgctgcagtgccaggtgtccagtgaccccccagccaccatcatctggaccctgaatggcaagaccctgaagaccaccaagttcatcatcctgagccaggagggcagcctgtgcagcgtgtccattgagaaggccctgcctgaagatcggggcctgtacaagtgtgtggccaagaatgatgctggccaggccgagtgcagctgccaggtgacagtggatgatgccccagccagcgagaacaccaaggcccctgagatgaagagccggcggcccaagagcagcctgccccctgtgctgggcacagaaagtgatgccaccgtgaagaagaagccagcccccaagaccccacccaaggccgccatgccaccccagatcatccagtttcctgaggaccagaaggtgcgggccggggagagcgtggagctgtttgggaaggtgacaggcacccagcccatcacctgcacctggatgaagttcaggaagcagatccaggagagcgagcacatgaaggtggagaacagtgaaaatggcagcaagctgaccatcctggccgcccggcaggagcactgcggctgctacaccctgctggtggagaacaagctgggcagccggcaggcccaggtgaacctgactgtggtggacaagccagaccccccagctggcaccccctgtgccagtgacatccgcagcagcagcctgaccctgtcctggtacggcagcagctatgatggcggcagcgctgtgcagagctacagcattgagatctgggacagcgccaacaagacctggaaggagctggccacctgccgcagcaccagcttcaacgtgcaggacctgctgcctgaccacgagtacaagttccgggtgcgggccatcaacgtgtatggcaccagcgagcccagccaggagagcgagctgaccaccgtgggggagaagccagaggagcccaaggatgaggtggaggtgtctgatgatgatgagaaggagcctgaggtggactacagaacagtgaccatcaacacagagcagaaggtgtctgacttctatgacatcgaggagcggctgggcagcggcaagtttggccaggtgttccggctggtggagaagaagaccaggaaggtgtgggccggcaagttcttcaaggcctacagcgccaaggagaaggagaacatccggcaggagatcagcatcatgaactgcctgcaccaccccaagctggtgcagtgtgtggatgcctttgaggagaaggccaacatcgtgatggtgctggagatcgtgtctggaggagagctgtttgagcgcatcattgatgaagattttgagctgacagaaagagagtgcatcaagtacatgaggcagatcagcgagggcgtggagtacatccacaagcagggcatcgtgcacctggacctgaagccagagaacatcatgtgtgtgaacaagacaggcacccgcatcaagctgattgactttggcctggcccggcggctggagaatgccggcagcctgaaggtgctgtttggcaccccagagtttgtggcccctgaggtgatcaactatgagcccatcggctacgccacagacatgtggagcattggagtcatctgctacatcctgaaccggctggactgcacccagtgcctgcagcacccctggctgatgaaggacaccaagaacatggaggccaagaagctgagcaaggacaggatgaagaagtacatggcccggaggaagtggcagaagacaggaaatgctgtgcgggccatcggccgcctgagctccatggccatgatcagcggcctgagcggcaggaagagcagcacaggcagccccaccagccccctgaatgctgagaagctggagagtgaagaagatgtgtcccaggccttcctggaggccgtggccgaggagaagccccacgtgaagccctacttcagcaagaccatccgggacctggaggtggtggagggcagcgctgccaggtttgactgcaagattgagggctacccagaccctgaggtggtgtggttcaaggatgaccagagcatccgggagagccgccacttccagattgattatgatgaagatggcaactgcagcctcatcatcagtgatgtgtgtggagatgatgatgccaagtacacctgcaaggctgtgaacagcctgggggaggccacctgcacagctgagctgattgtggagaccatggaggagggggagggggagggggaggaggaggaggagtag

SEQ ID NO: 20676 - DNA, 5745 bp, synthetic construct
  misc_feature 1..5745: note = Description of Artificial Sequence: Synthetic coding sequence
  source 1..5745: mol_type = other DNA
atgggagatgtgaagctggtggccagcagccacatcagcaagaccagcctgtctgtggaccccagccgggtggacagcatgcccctgacagaggccccagccttcatcctgccccccaggaacctgtgcatcaaggagggcgccacagccaagtttgagggccgggtgcggggctacccagagccccaggtgacctggcacagaaatggccagcccatcaccagcggcggccgcttcctgctggactgtggcatccggggcaccttcagcctggtgattcatgctgtgcatgaagaagatcggggcaagtacacctgtgaggccaccaacggcagcggggcccggcaggtgacagtggagctgactgtggagggcagctttgccaagcagctgggccagcctgtggtgtccaagaccctgggggaccgcttcagcgccccagctgtggagacccggcccagcatctggggcgagtgcccccccaagtttgccaccaagctgggccgggtggtggtgaaggagggccagatgggccgcttcagctgcaagatcaccggccggccccagccccaggtgacctggctgaagggaaatgtgcccctgcagcccagcgcccgggtgtctgtgtctgagaagaatggcatgcaggtgctggagatccatggagtgaaccaggatgatgtgggcgtgtacacctgcctggtggtgaatggaagtggcaaggcctccatgtctgctgagctgagcatccagggcctggacagcgccaacagaagctttgtgcgggagaccaaggccaccaacagtgatgtgaggaaggaggtgaccaacgtcatcagcaaggagagcaagctggacagcctggaggccgccgccaagagcaagaactgcagcagcccccagagaggaggcagccccccctgggccgccaacagccagccccagcccccccgggagagcaagctggagagctgcaaggacagccccaggacagccccccagacccctgtgctgcagaagaccagcagcagcatcaccctgcaggccgcccgggtgcagcctgagccccgggcccctggcctgggcgtgctgagccccagcggggaggagaggaagaggcctgccccacccaggcctgccaccttccccacccggcagcccggcctgggcagccaggatgtggtgtccaaggccgccaacagacgcatccccatggagggccagagggacagcgccttccccaagtttgagagcaagccccagagccaggaggtgaaggagaaccagacagtgaagttccgctgtgaggtgtctggcatccccaagccagaggtggcctggttcctggagggcacccctgtgcggcggcaggagggcagcattgaggtgtatgaagatgctggcagccactacctgtgcctgctgaaggcccggacccgggacagcggcacctacagctgcacagccagcaatgcccagggccagctgagctgctcctggaccctgcaggtggagcggctggccgtgatggaggtggcccccagcttcagctctgtgctgaaggactgtgccgtcatcgagggccaggactttgtgctgcagtgcagcgtgcggggcacccctgtgccccgcatcacctggctgctgaatggccagcccatccagtatgcccggagcacctgtgaggccggcgtggccgagctgcacatccaggatgccctgcctgaggaccacggcacctacacctgcctggccgagaatgccctgggccaggtgtcctgcagcgcctgggtgacagtgcatgagaagaagagcagcaggaagtctgagtacctgctgcctgtggcccccagcaagcccacagcccccatcttcctgcagggcctgagtgacctgaaggtgatggatggcagccaggtgaccatgacagtgcaggtgtctggcaaccccccacctgaggtgatctggctgcacaatggaaatgagatccaggagagcgaggacttccactttgagcagaggggcacccagcacagcctgtgcatccaggaggtgtttcctgaggacaccggcacctacacctgtgaggcctggaacagcgctggggaggtgaggacccaggccgtgctgactgtgcaggagccccatgatggcacccagccctggttcatcagcaagcccaggtctgtgacagccagcctgggccagagcgtgctgatcagctgtgccatcgccggggaccccttccccaccgtgcactggctgagagatggcaaggccctgtgcaaggacaccggccactttgaggtgctgcagaatgaagatgtgttcaccctggtgctgaagaaggtgcagccctggcatgctggccagtatgagatcctgctgaagaacagagtgggggagtgcagctgccaggtgtccctgatgctgcagaacagcagcgcccgggccctgccccggggccgggagcccgccagctgtgaggacctgtgtggcggcggcgtgggcgcagatggcggcggcagtgacagatatggcagcctgcggcccggctggccagcccggggccagggctggctggaggaggaggatggagaagatgtgcggggcgtgctgaagagaagagtggagacccggcagcacacagaggaggccatccggcagcaggaggtggagcagctggacttccgggacctgctgggcaagaaggtgtccaccaagaccctgtctgaagatgacctgaaggagatcccagctgagcagatggacttccgggccaacctgcagaggcaggtgaagcccaagacagtgtctgaggaggagaggaaggtgcacagcccccagcaggtggacttccgctctgtgctggccaagaagggcaccagcaagacccctgtgcctgagaaggtgcccccacccaagccagccaccccagacttccgctctgtgctgggcggcaagaagaagctgcctgcagaaaatggcagcagcagcgctgagaccctgaatgccaaggctgtggagagcagcaagcccctgagcaatgcccagcccagcggccccctgaagcctgtgggcaatgccaagccagctgagaccctgaagcccatgggaaatgccaagccagctgagaccctgaagcccatgggaaatgccaagccagatgagaacctgaagagcgccagcaaggaggagctgaagaaggatgtgaagaatgatgtgaactgcaagaggggccacgccggcaccacagacaatgagaagaggtctgagagccagggcacagccccagccttcaagcagaagctgcaggatgtgcacgtggccgagggcaagaagctgctgctgcagtgccaggtgtccagtgaccccccagccaccatcatctggaccctgaatggcaagaccctgaagaccaccaagttcatcatcctgagccaggagggcagcctgtgcagcgtgtccattgagaaggccctgcctgaagatcggggcctgtacaagtgtgtggccaagaatgatgctggccaggccgagtgcagctgccaggtgacagtggatgatgccccagccagcgagaacaccaaggcccctgagatgaagagccggcggcccaagagcagcctgccccctgtgctgggcacagaaagtgatgccaccgtgaagaagaagccagcccccaagaccccacccaaggccgccatgccaccccagatcatccagtttcctgaggaccagaaggtgcgggccggggagagcgtggagctgtttgggaaggtgacaggcacccagcccatcacctgcacctggatgaagttcaggaagcagatccaggagagcgagcacatgaaggtggagaacagtgaaaatggcagcaagctgaccatcctggccgcccggcaggagcactgcggctgctacaccctgctggtggagaacaagctgggcagccggcaggcccaggtgaacctgactgtggtggacaagccagaccccccagctggcaccccctgtgccagtgacatccgcagcagcagcctgaccctgtcctggtacggcagcagctatgatggcggcagcgctgtgcagagctacagcattgagatctgggacagcgccaacaagacctggaaggagctggccacctgccgcagcaccagcttcaacgtgcaggacctgctgcctgaccacgagtacaagttccgggtgcgggccatcaacgtgtatggcaccagcgagcccagccaggagagcgagctgaccaccgtgggggagaagccagaggagcccaaggatgaggtggaggtgtctgatgatgatgagaaggagcctgaggtggactacagaacagtgaccatcaacacagagcagaaggtgtctgacttctatgacatcgaggagcggctgggcagcggcaagtttggccaggtgttccggctggtggagaagaagaccaggaaggtgtgggccggcaagttcttcaaggcctacagcgccaaggagaaggagaacatccggcaggagatcagcatcatgaactgcctgcaccaccccaagctggtgcagtgtgtggatgcctttgaggagaaggccaacatcgtgatggtgctggagatcgtgtctggaggagagctgtttgagcgcatcattgatgaagattttgagctgacagaaagagagtgcatcaagtacatgaggcagatcagcgagggcgtggagtacatccacaagcagggcatcgtgcacctggacctgaagccagagaacatcatgtgtgtgaacaagacaggcacccgcatcaagctgattgactttggcctggcccggcggctggagaatgccggcagcctgaaggtgctgtttggcaccccagagtttgtggcccctgaggtgatcaactatgagcccatcggctacgccacagacatgtggagcattggagtcatctgctacatcctggtgtctggcctgagccccttcatgggagacaatgacaatgagaccctggccaacgtgaccagcgccacctgggactttgatgatgaggcctttgatgagatcagtgatgatgccaaggacttcatcagcaacctgctgaagaaggacatgaagaaccggctggactgcacccagtgcctgcagcacccctggctgatgaaggacaccaagaacatggaggccaagaagctgagcaaggacaggatgaagaagtacatggcccggaggaagtggcagaagacaggaaatgctgtgcgggccatcggccgcctgagctccatggccatgatcagcggcctgagcggcaggaagagcagcacaggcagccccaccagccccctgaatgctgagaagctggagagcgaggaggatgtgtcccaggccttcctggaggccgtggccgaggagaagccccacgtgaagccctacttcagcaagaccatccgggacctggaggtggtggagggcagcgctgccaggtttgactgcaagattgagggctacccagaccctgaggtggtgtggttcaaggatgaccagagcatccgggagagccgccacttccagattgattatgatgaagatggcaactgcagcctcatcatcagtgatgtgtgtggagatgatgatgccaagtacacctgcaaggctgtgaacagcctgggggaggccacctgcacagctgagctgattgtggagaccatggaggagggggagggggagggggaggaggaggaggagtag

SEQ ID NO: 20677 - DNA, 231 bp, synthetic construct
  misc_feature 1..231: note = Description of Artificial Sequence: Synthetic coding sequence
  source 1..231: mol_type = other DNA
atgggagatgtgaagctggtggccagcagccacatcagcaagaccagcctgtctgtggaccccagccgggtggacagcatgcccctgacagaggccccagccttcatcctgccccccaggaacctgtgcatcaaggagggcgccacagccaagtttgagggccgggtgcggggctacccagagccccaggtgacctggcacagaaatggccagcccatcaccagcggctag

SEQ ID NO: 20678 - DNA, 5592 bp, synthetic construct; identical to SEQ ID NO: 20675
  misc_feature 1..5592: note = Description of Artificial Sequence: Synthetic coding sequence
  source 1..5592: mol_type = other DNA

SEQ ID NO: 20679 - DNA, 465 bp, synthetic construct
  misc_feature 1..465: note = Description of Artificial Sequence: Synthetic coding sequence
  source 1..465: mol_type = other DNA
atggccatgatcagcggcctgagcggcaggaagagcagcacaggcagccccaccagccccctgaatgctgagaagctggagagcgaggaggatgtgtcccaggccttcctggaggccgtggccgaggagaagccccacgtgaagccctacttcagcaagaccatccgggacctggaggtggtggagggcagcgctgccaggtttgactgcaagattgagggctacccagaccctgaggtggtgtggttcaaggatgaccagagcatccgggagagccgccacttccagattgattatgatgaagatggcaactgcagcctcatcatcagtgatgtgtgtggagatgatgatgccaagtacacctgcaaggctgtgaacagcctgggggaggccacctgcacagctgagctgattgtggagaccatggaggagggggagggggagggggaggaggaggaggagtag

SEQ ID NO: 20680 - DNA, 5745 bp, synthetic construct; identical to SEQ ID NO: 20676
  misc_feature 1..5745: note = Description of Artificial Sequence: Synthetic coding sequence
  source 1..5745: mol_type = other DNA

SEQ ID NO: 20681 - DNA, 5931 bp, synthetic construct
  misc_feature 1..5931: note = Description of Artificial Sequence: Synthetic coding sequence
  source 1..5931: mol_type = other DNA
atggcccagaggacaggcctggaggaccctgagcgctacctgtttgtggacagagctgtgatctacaacccagccacccaggccgactggacagccaagaagctggtgtggatccccagcgagagacatggctttgaagctgccagcatcaaggaggagagaggagatgaggtgatggtggagctggccgagaatggcaagaaggccatggtgaacaaggatgacatccagaagatgaacccccccaagttcagcaaggtggaggacatggccgagctgacctgcctgaatgaggcctctgtgctgcacaacctgaaggaccgctactacagcggcctcatctacacctacagcggcctcttctgtgtggtgatcaacccctacaagaacctgcccatctacagcgagaacatcatcgagatgtaccggggcaagaagagacatgagatgccaccccacatctatgccatcagcgagagcgcctaccgctgcatgctgcaggaccgggaggaccagagcatcctgtgcacaggagagagcggggccggcaagacagagaacaccaagaaggtgatccagtacctggcccacgtggccagcagccacaagggcaggaaggaccacaacatccctggagagctggagcggcagctgctgcaggccaaccccatcctggagagctttggaaatgccaagacagtgaagaatgacaacagcagcagatttgggaagttcatccgcatcaactttgatgtgacaggctacatcgtgggcgccaacatcgagacctacctgctggagaagagcagagctgtgcggcaggccaaggatgagaggaccttccacatcttctaccagctgctgtctggagctggggagcacctgaagagtgacctgctgctggagggcttcaacaactaccgcttcctgagcaatggctacatccccatccctggccagcaggacaaggacaacttccaggagaccatggaggccatgcacatcatgggcttcagccatgaggagatcctgtccatgctgaaggtggtgtcctctgtgctgcagtttggaaacatctccttcaagaaggagaggaacacagaccaggcctccatgcctgagaacacagtggcccagaagctgtgccacctgctgggcatgaatgtgatggagttcacccgggccatcctgaccccccgcatcaaggtgggccgggactatgtgcagaaggcccagaccaaggagcaggccgactttgctgtggaggccctggccaaggccacctatgagcggctcttccgctggctggtgcaccgcatcaacaaggccctggacaggaccaagaggcagggcgccagcttcatcggcatcctggacattgctggctttgagatctttgagctgaacagctttgagcagctgtgcatcaactacaccaatgagaagctgcagcagctgttcaaccacaccatgttcatcctggagcaggaggagtaccagcgggagggcatcgagtggaacttcatcgactttggcctggacctgcagccctgcatcgacctgattgaaagacctgccaaccccccaggagtgctggccctgctggatgaggagtgctggttccccaaggccacagacaagacctttgtggagaagctggtgcaggagcagggcagccacagcaagttccagaagccccggcagctgaaggacaaggctgacttctgcatcatccactacgccggcaaggtggactacaaggcagatgagtggctgatgaagaacatggaccccctgaatgacaacgtggccaccctgctgcaccagagcagtgacagatttgtggccgagctgtggaaggatgtggacagaattgtgggcctggaccaggtgacaggcatgacagaaacagcctttggaagtgcctacaagaccaagaagggcatgttcagaacagtgggccagctgtacaaggagagcctgaccaagctgatggccaccctgaggaacaccaaccccaactttgtgcgctgcatcatccccaaccacgagaagagagctgggaagctggacccccacctggtgctggaccagctgcgctgcaatggagtgctggagggcatccgcatctgccggcagggcttccccaacagaattgtgttccaggagttccggcagagatatgagatcctgaccccaaatgccatccccaagggcttcatggatggcaagcaggcctgtgagaggatgatccgggccctggagctggaccccaacctgtacagaattggccagagcaagatcttcttccgggccggcgtgctggcccacctggaggaggagcgggacctgaagatcacagacatcatcatcttcttccaggccgtgtgccggggctacctggccaggaaggcctttgccaagaagcagcagcagctgagcgccctgaaggtgctgcagaggaactgtgccgcctacctgaagctgcggcactggcagtggtggagggtcttcaccaaggtgaagcccctgctgcaggtgacccggcaggaggaggagctgcaggccaaggatgaggagctgctgaaggtgaaggagaagcagaccaaggtggagggggagctggaggagatggagaggaagcaccagcagctgctggaggagaagaacatcctggccgagcagctgcaggccgagacagagctgtttgctgaggccgaggagatgagggcccggctggccgccaagaagcaggagctggaggagatcctgcatgacctggagagccgggtggaggaggaggaggagaggaaccagatcctgcagaatgagaagaagaagatgcaggcccacatccaggacctggaggagcagctggatgaggaggagggcgcccggcagaagctgcagctggagaaggtgacagctgaggccaagatcaagaagatggaggaggagatcctgctgctggaggaccagaacagcaagttcatcaaggagaagaagctgatggaggacagaattgctgagtgcagcagccagctggccgaggaggaggagaaggccaagaacctggccaagatccggaacaagcaggaggtgatgatcagtgacctggaggagcggctgaagaaggaggagaagacccggcaggagctggagaaggccaagaggaagctggatggagagaccacagacctgcaggaccagattgctgagctgcaggcccagattgatgagctgaagctgcagctggccaagaaggaggaggagctgcagggcgccctggcccggggagatgatgagaccctgcacaagaacaatgccctgaaggtggtgcgggagctgcaggcccagattgctgagctgcaggaggactttgaaagtgagaaggccagcaggaacaaggccgagaagcagaagagggacctgtctgaggagctggaggccctgaagacagagctggaggacaccctggacaccacagctgcccagcaggagctgcggaccaagcgggagcaggaggtggccgagctgaagaaggccctggaggaggagaccaagaaccacgaggcccagatccaggacatgaggcagagacatgccacagccctggaggagctgtctgagcagctggagcaggccaagcgcttcaaggccaacctggagaagaacaagcagggcctggagacagacaacaaggagctggcctgtgaggtgaaggtgctgcagcaggtgaaggccgagagcgagcacaagaggaagaagctggatgcccaggtgcaggagctgcacgccaaggtgtctgagggggaccggctgcgggtggagctggccgagaaggccagcaagctgcagaatgagctggacaacgtgtccaccctgctggaggaggccgagaagaagggcatcaagtttgccaaggatgctgccagcctggagagccagctgcaggacacccaggagctgctgcaggaggagacccggcagaagctgaacctgagcagccgcatccggcagctggaggaggagaagaacagcctgcaggagcagcaggaggaggaggaggaggccaggaagaacctggagaagcaggtgctggccctgcagagccagctggccgacaccaagaagaaggtggatgatgacctgggcaccatcgagagcctggaggaggccaagaagaagctgctgaaggatgctgaggccctgagccagaggctggaggagaaggccctggcctatgacaagctggagaagaccaagaaccggctgcagcaggagctggatgacctgactgtggacctggaccaccagaggcaggtggccagcaacctggagaagaagcagaagaagtttgaccagctgctggccgaggagaagagcatcagcgcccgctatgcagaggagcgggacagagctgaggccgaggcccgggagaaggagaccaaggccctgagcctggcccgggccctggaggaggccctggaggccaaggaggagtttgagcggcagaacaagcagctgcgggctgacatggaggacctgatgagcagcaaggatgatgtgggcaagaatgtgcatgagctggagaagagcaagagggccctggagcagcaggtggaggagatgaggacccagctggaggagctggaggatgagctgcaggccacagaagatgccaagctgcggctggaggtgaacatgcaggccatgaaggcccagtttgagcgggacctgcagaccagagatgagcagaatgaggagaagaagaggctgctgatcaagcaggtgcgggagctggaggccgagctggaggatgagaggaagcagagggccctggccgtggccagcaagaagaagatggagattgacctgaaggacctggaggcccagattgaagctgccaacaaggccagagatgaagtcatcaagcagctgaggaagctgcaggcccagatgaaggactaccagcgggagctggaggaggcccgggccagcagagatgagatctttgcccagagcaaggagagcgagaagaagctgaagagcctggaggccgagatcctgcagctgcaggaggagctggccagcagcgagcgggccaggagacatgctgagcaggagagagatgagctggctgatgagatcaccaacagcgccagcggcaagagcgccctgctggatgagaagaggcggctggaggcccgcatcgcccagctggaggaggagctggaggaggagcagagcaacatggagctgctgaatgaccgcttcaggaagaccaccctgcaggtggacaccctgaatgctgagctggccgctgagaggtctgctgcccagaagagtgacaatgcccggcagcagctggagcggcagaacaaggagctgaaggccaagctgcaggagctggagggcgctgtgaagagcaagttcaaggccaccatcagcgccctggaggccaagattggccagctggaggagcagctggagcaggaggccaaggagagagctgctgccaacaagctggtgagaagaacagagaagaagctgaaggagatcttcatgcaggtggaggatgagaggagacatgctgaccagtacaaggagcagatggagaaggccaatgccaggatgaagcagctgaagaggcagctggaggaggccgaggaggaggccacccgggccaatgccagcaggaggaagctgcagcgggagctggatgatgccacagaggccaatgaaggcctgagccgggaggtgtccaccctgaagaaccggctgcggcggggcggccccatctccttcagcagcagccgctctggaagacggcagctgcacctggagggcgccagcctggagctgagtgatgatgacacagagagcaagaccagtgatgtgaatgagacccagcccccccagagcgagtag

SEQ ID NO: 20682 - DNA, 6024 bp, synthetic construct
  misc_feature 1..6024: note = Description of Artificial Sequence: Synthetic coding sequence
  source 1..6024: mol_type = other DNA
atggcccagaggacaggcctggaggaccctgagcgctacctgtttgtggacagagctgtgatctacaacccagccacccaggccgactggacagccaagaagctggtgtggatccccagcgagagacatggctttgaagctgccagcatcaaggaggagagaggagatgaggtgatggtggagctggccgagaatggcaagaaggccatggtgaacaaggatgacatccagaagatgaacccccccaagttcagcaaggtggaggacatggccgagctgacctgcctgaatgaggcctctgtgctgcacaacctgaaggaccgctactacagcggcctcatctacacctacagcggcctcttctgtgtggtgatcaacccctacaagaacctgcccatctacagcgagaacatcatcgagatgtaccggggcaagaagagacatgagatgccaccccacatctatgccatcagcgagagcgcctaccgctgcatgctgcaggaccgggaggaccagagcatcctgtgcacaggagagagcggggccggcaagacagagaacaccaagaaggtgatccagtacctggcccacgtggccagcagccacaagggcaggaaggaccacaacatcccccaggagagccccaagcctgtgaagcaccagggcgagctggagcggcagctgctgcaggccaaccccatcctggagagctttggaaatgccaagacagtgaagaatgacaacagcagcagatttgggaagttcatccgcatcaactttgatgtgacaggctacatcgtgggcgccaacatcgagacctacctgctggagaagagcagagctgtgcggcaggccaaggatgagaggaccttccacatcttctaccagctgctgtctggagctggggagcacctgaagagtgacctgctgctggagggcttcaacaactaccgcttcctgagcaatggctacatccccatccctggccagcaggacaaggacaacttccaggagaccatggaggccatgcacatcatgggcttcagccatgaggagatcctgtccatgctgaaggtggtgtcctctgtgctgcagtttggaaacatctccttcaagaaggagaggaacacagaccaggcctccatgcctgagaacacagtggcccagaagctgtgccacctgctgggcatgaatgtgatggagttcacccgggccatcctgaccccccgcatcaaggtgggccgggactatgtgcagaaggcccagaccaaggagcaggccgactttgctgtggaggccctggccaaggccacctatgagcggctcttccgctggctggtgcaccgcatcaacaaggccctggacaggaccaagaggcagggcgccagcttcatcggcatcctggacattgctggctttgagatctttgagctgaacagctttgagcagctgtgcatcaactacaccaatgagaagctgcagcagctgttcaaccacaccatgttcatcctggagcaggaggagtaccagcgggagggcatcgagtggaacttcatcgactttggcctggacctgcagccctgcatcgacctgattgaaagacctgccaaccccccaggagtgctggccctgctggatgaggagtgctggttccccaaggccacagacaagacctttgtggagaagctggtgcaggagcagggcagccacagcaagttccagaagccccggcagctgaaggacaaggctgacttctgcatcatccactacgccggcaaggtggactacaaggcagatgagtggctgatgaagaacatggaccccctgaatgacaacgtggccaccctgctgcaccagagcagtgacagatttgtggccgagctgtggaaggatgagatccagaacatccagagggccagcttctatgacagcgtgtctggcctgcacgagccccctgtggaccgcatcgtgggcctggaccaggtgacaggcatgacagaaacagccttcggcagcgcctacaagaccaagaagggcatgttcagaacagtgggccagctgtacaaggagagcctgaccaagctgatggccaccctgaggaacaccaaccccaactttgtgcgctgcatcatccccaaccacgagaagagagctgggaagctggacccccacctggtgctggaccagctgcgctgcaatggagtgctggagggcatccgcatctgccggcagggcttccccaaccgcatcgtgttccaggagttccggcagagatatgagatcctgaccccaaatgccatccccaagggcttcatggatggcaagcaggcctgtgagaggatgatccgggccctggagctggaccccaacctgtaccgcatcggccagagcaagatcttcttccgggccggcgtgctggcccacctggaggaggagcgggacctgaagatcacagacatcatcatcttcttccaggccgtgtgccggggctacctggccaggaaggcctttgccaagaagcagcagcagctgagcgccctgaaggtgctgcagaggaactgtgccgcctacctgaagctgcggcactggcagtggtggagggtcttcaccaaggtgaagcccctgctgcaggtgacccggcaggaggaggagctgcaggccaaggatgaggagctgctgaaggtgaaggagaagcagaccaaggtggagggggagctggaggagatggagaggaagcaccagcagctgctggaggagaagaacatcctggccgagcagctgcaggccgagacagagctgtttgctgaggccgaggagatgagggcccggctggccgccaagaagcaggagctggaggagatcctgcatgacctggagagccgggtggaggaggaggaggagaggaaccagatcctgcagaatgagaagaagaagatgcaggcccacatccaggacctggaggagcagctggatgaggaggagggcgcccggcagaagctgcagctggagaaggtgacagctgaggccaagatcaagaagatggaggaggagatcctgctgctggaggaccagaacagcaagttcatcaaggagaagaagctgatggaggacagaattgctgaatgtagcagccagctggccgaggaggaggagaaggccaagaacctggccaagatccggaacaagcaggaggtgatgatcagtgacctggaggagcggctgaagaaggaggagaagacccggcaggagctggagaaggccaagaggaagctggatggagagaccacagacctgcaggaccagattgctgagctgcaggcccagattgatgagctgaagctgcagctggccaagaaggaggaggagctgcagggcgccctggcccggggagatgatgagaccctgcacaagaacaatgccctgaaggtggtgcgggagctgcaggcccagattgctgagctgcaggaggactttgagagcgagaaggccagcaggaacaaggccgagaagcagaagagggacctgtctgaggagctggaggccctgaagacagagctggaggacaccctggacaccacagctgcccagcaggagctgcggaccaagcgggagcaggaggtggccgagctgaagaaggccctggaggaggagaccaagaaccacgaggcccagatccaggacatgaggcagagacatgccacagccctggaggagctgtctgagcagctggagcaggccaagcgcttcaaggccaacctggagaagaacaagcagggcctggagacagacaacaaggagctggcctgtgaggtgaaggtgctgcagcaggtgaaggccgagagcgagcacaagaggaagaagctggatgcccaggtgcaggagctgcacgccaaggtgtctgagggggaccggctgcgggtggagctggccgagaaggccagcaagctgcagaatgagctggacaacgtgtccaccctgctggaggaggccgagaagaagggcatcaagtttgccaaggatgctgccagcctggagagccagctgcaggacacccaggagctgctgcaggaggagacccggcagaagctgaacctgagcagccgcatccggcagctggaggaggagaagaacagcctgcaggagcagcaggaggaggaggaggaggccaggaagaacctggagaagcaggtgctggccctgcagagccagctggccgacaccaagaagaaggtggatgatgacctgggcaccatcgagagcctggaggaggccaagaagaagctgctgaaggatgctgaggccctgagccagaggctggaggagaaggccctggcctatgacaagctggagaagaccaagaaccggctgcagcaggagctggatgacctgactgtggacctggaccaccagaggcaggtggccagcaacctggagaagaagcagaagaagtttgaccagctgctggccgaggagaagagcatcagcgcccgctatgcagaggagcgggacagagctgaggccgaggcccgggagaaggagaccaaggccctgagcctggcccgggccctggaggaggccctggaggccaaggaggagtttgagcggcagaacaagcagctgcgggctgacatggaggacctgatgagcagcaaggatgatgtgggcaagaatgtgcatgagctggagaagagcaagagggccctggagcagcaggtggaggagatgaggacccagctggaggagctggaggatgagctgcaggccacagaagatgccaagctgcggctggaggtgaacatgcaggccatgaaggcccagtttgagcgggacctgcagaccagagatgagcagaatgaggagaagaagaggctgctgatcaagcaggtgcgggagctggaggccgagctggaggatgagaggaagcagagggccctggccgtggccagcaagaagaagatggagattgacctgaaggacctggaggcccagatcgaggccgccaacaaggccagagatgaggtgatcaagcagctgaggaagctgcaggcccagatgaaggactaccagcgggagctggaggaggcccgggccagcagagatgagatctttgcccagagcaaggagagcgagaagaagctgaagagcctggaggccgagatcctgcagctgcaggaggagctggccagcagcgagcgggccaggagacatgctgagcaggagagagatgagctggctgatgagatcaccaacagcgccagcggcaagagcgccctgctggatgagaagaggcggctggaggccagaattgcccagctggaggaggagctggaggaggagcagagcaacatggagctgctgaatgaccgcttcaggaagaccaccctgcaggtggacaccctgaatgctgagctggccgctgagaggtctgctgcccagaagagtgacaatgcccggcagcagctggagcggcagaacaaggagctgaaggccaagctgcaggagctggagggcgctgtgaagagcaagttcaaggccaccatcagcgccctggaggccaagattggccagctggaggagcagctggagcaggaggccaaggagagagctgctgccaacaagctggtgcggaggacagagaagaagctgaaggagatcttcatgcaggtggaggatgaaagaagacatgctgaccagtacaaggagcagatggagaaggccaatgccaggatgaagcagctgaagaggcagctggaggaggccgaggaggaggccacccgggccaatgccagcaggaggaagctgcagcgggagctggatgatgccacagaggccaatgaaggcctgagccgggaggtgtccaccctgaagaaccggctgcggcggggcggccccatctccttcagcagcagccgcagcggccggcggcagctgcacctggagggcgccagcctggagctgagtgatgatgacacagagagcaagaccagtgatgtgaatgagacccagcccccccagagcgagtag

SEQ ID NO: 20683 - DNA, 5979 bp, synthetic construct
  misc_feature 1..5979: note = Description of Artificial Sequence: Synthetic coding sequence
  source 1..5979: mol_type = other DNA
atggcccagaggacaggcctggaggaccctgagcgctacctgtttgtggacagagctgtgatctacaacccagccacccaggccgactggacagccaagaagctggtgtggatccccagcgagagacatggctttgaagctgccagcatcaaggaggagagaggagatgaggtgatggtggagctggccgagaatggcaagaaggccatggtgaacaaggatgacatccagaagatgaacccccccaagttcagcaaggtggaggacatggccgagctgacctgcctgaatgaggcctctgtgctgcacaacctgaaggaccgctactacagcggcctcatctacacctacagcggcctcttctgtgtggtgatcaacccctacaagaacctgcccatctacagcgagaacatcatcgagatgtaccggggcaagaagagacatgagatgccaccccacatctatgccatcagcgagagcgcctaccgctgcatgctgcaggaccgggaggaccagagcatcctgtgcacaggagagagcggggccggcaagacagagaacaccaagaaggtgatccagtacctggcccacgtggccagcagccacaagggcaggaaggaccacaacatcccccaggagagccccaagcctgtgaagcaccaggccagcgccctgctgtatggagagctggagcggcagctgctgcaggccaaccccatcctggagagctttggaaatgccaagacagtgaagaatgacaacagcagcagatttgggaagttcatccgcatcaactttgatgtgacaggctacatcgtgggcgccaacatcgagacctacctgctggagaagagcagagctgtgcggcaggccaaggatgagaggaccttccacatcttctaccagctgctgtctggagctggggagcacctgaagagtgacctgctgctggagggcttcaacaactaccgcttcctgagcaatggctacatccccatccctggccagcaggacaaggacaacttccaggagaccatggaggccatgcacatcatgggcttcagccatgaggagatcctgtccatgctgaaggtggtgtcctctgtgctgcagtttggaaacatctccttcaagaaggagaggaacacagaccaggcctccatgcctgagaacacagtggcccagaagctgtgccacctgctgggcatgaatgtgatggagttcacccgggccatcctgaccccccgcatcaaggtgggccgggactatgtgcagaaggcccagaccaaggagcaggccgactttgctgtggaggccctggccaaggccacctatgagcggctcttccgctggctggtgcaccgcatcaacaaggccctggacaggaccaagaggcagggcgccagcttcatcggcatcctggacattgctggctttgagatctttgagctgaacagctttgagcagctgtgcatcaactacaccaatgagaagctgcagcagctgttcaaccacaccatgttcatcctggagcaggaggagtaccagcgggagggcatcgagtggaacttcatcgactttggcctggacctgcagccctgcatcgacctgattgaaagacctgccaaccccccaggagtgctggccctgctggatgaggagtgctggttccccaaggccacagacaagacctttgtggagaagctggtgcaggagcagggcagccacagcaagttccagaagccccggcagctgaaggacaaggctgacttctgcatcatccactacgccggcaaggtggactacaaggcagatgagtggctgatgaagaacatggaccccctgaatgacaacgtggccaccctgctgcaccagagcagtgacagatttgtggccgagctgtggaaggatgtggacagaattgtgggcctggaccaggtgacaggcatgacagaaacagcctttggaagtgcctacaagaccaagaagggcatgttcagaacagtgggccagctgtacaaggagagcctgaccaagctgatggccaccctgaggaacaccaaccccaactttgtgcgctgcatcatccccaaccacgagaagagagctgggaagctggacccccacctggtgctggaccagctgcgctgcaatggagtgctggagggcatccgcatctgccggcagggcttccccaacagaattgtgttccaggagttccggcagagatatgagatcctgaccccaaatgccatccccaagggcttcatggatggcaagcaggcctgtgagaggatgatccgggccctggagctggaccccaacctgtacagaattggccagagcaagatcttcttccgggccggcgtgctggcccacctggaggaggagcgggacctgaagatcacagacatcatcatcttcttccaggccgtgtgccggggctacctggccaggaaggcctttgccaagaagcagcagcagctgagcgccctgaaggtgctgcagaggaactgtgccgcctacctgaagctgcggcactggcagtggtggagggtcttcaccaaggtgaagcccctgctgcaggtgacccggcaggaggaggagctgcaggccaaggatgaggagctgctgaaggtgaaggagaagcagaccaaggtggagggggagctggaggagatggagaggaagcaccagcagctgctggaggagaagaacatcctggccgagcagctgcaggccgagacagagctgtttgctgaggccgaggagatgagggcccggctggccgccaagaagcaggagctggaggagatcctgcatgacctggagagccgggtggaggaggaggaggagaggaaccagatcctgcagaatgagaagaagaagatgcaggcccacatccaggacctggaggagcagctggatgaggaggagggcgcccggcagaagctgcagctggagaaggtgacagctgaggccaagatcaagaagatggaggaggagatcctgctgctggaggaccagaacagcaagttcatcaaggagaagaagctgatggaggacagaattgctgagtgcagcagccagctggccgaggaggaggagaaggccaagaacctggccaagatccggaacaagcaggaggtgatgatcagtgacctggaggagcggctgaagaaggaggagaagacccggcaggagctggagaaggccaagaggaagctggatggagagaccacagacctgcaggaccagattgctgagctgcaggcccagattgatgagctgaagctgcagctggccaagaaggaggaggagctgcagggcgccctggcccggggagatgatgagaccctgcacaagaacaatgccctgaaggtggtgcgggagctgcaggcccagattgctgagctgcaggaggactttgaaagtgagaaggccagcaggaacaaggccgagaagcagaagagggacctgtctgaggagctggaggccctgaagacagagctggaggacaccctggacaccacagctgcccagcaggagctgcggaccaagcgggagcaggaggtggccgagctgaagaaggccctggaggaggagaccaagaaccacgaggcccagatccaggacatgaggcagagacatgccacagccctggaggagctgtctgagcagctggagcaggccaagcgcttcaaggccaacctggagaagaacaagcagggcctggagacagacaacaaggagctggcctgtgaggtgaaggtgctgcagcaggtgaaggccgagagcgagcacaagaggaagaagctggatgcccaggtgcaggagctgcacgccaaggtgtctgagggggaccggctgcgggtggagctggccgagaaggccagcaagctgcagaatgagctggacaacgtgtccaccctgctggaggaggccgagaagaagggcatcaagtttgccaaggatgctgccagcctggagagccagctgcaggacacccaggagctgctgcaggaggagacccggcagaagctgaacctgagcagccgcatccggcagctggaggaggagaagaacagcctgcaggagcagcaggaggaggaggaggaggccaggaagaacctggagaagcaggtgctggccctgcagagccagctggccgacaccaagaagaaggtggatgatgacctgggcaccatcgagagcctggaggaggccaagaagaagctgctgaaggatgctgaggccctgagccagaggctggaggagaaggccctggcctatgacaagctggagaagaccaagaaccggctgcagcaggagctggatgacctgactgtggacctggaccaccagaggcaggtggccagcaacctggagaagaagcagaagaagtttgaccagctgctggccgaggagaagagcatcagcgcccgctatgcagaggagcgggacagagctgaggccgaggcccgggagaaggagaccaaggccctgagcctggcccgggccctggaggaggccctggaggccaaggaggagtttgagcggcagaacaagcagctgcgggctgacatggaggacctgatgagcagcaaggatgatgtgggcaagaatgtgcatgagctggagaagagcaagagggccctggagcagcaggtggaggagatgaggacccagctggaggagctggaggatgagctgcaggccacagaagatgccaagctgcggctggaggtgaacatgcaggccatgaaggcccagtttgagcgggacctgcagaccagagatgagcagaatgaggagaagaagaggctgctgatcaagcaggtgcgggagctggaggccgagctggaggatgagaggaagcagagggccctggccgtggccagcaagaagaagatggagattgacctgaaggacctggaggcccagattgaagctgccaacaaggccagagatgaagtcatcaagcagctgaggaagctgcaggcccagatgaaggactaccagcgggagctggaggaggcccgggccagcagagatgagatctttgcccagagcaaggagagcgagaagaagctgaagagcctggaggccgagatcctgcagctgcaggaggagctggccagcagcgagcgggccaggagacatgctgagcaggagagagatgagctggctgatgagatcaccaacagcgccagcggcaagagcgccctgctggatgagaagaggcggctggaggcccgcatcgcccagctggaggaggagctggaggaggagcagagcaacatggagctgctgaatgaccgcttcaggaagaccaccctgcaggtggacaccctgaatgctgagctggccgctgagaggtctgctgcccagaagagtgacaatgcccggcagcagctggagcggcagaacaaggagctgaaggccaagctgcaggagctggagggcgctgtgaagagcaagttcaaggccaccatcagcgccctggaggccaagattggccagctggaggagcagctggagcaggaggccaaggagagagctgctgccaacaagctggtgagaagaacagagaagaagctgaaggagatcttcatgcaggtggaggatgagaggagacatgctgaccagtacaaggagcagatggagaaggccaatgccaggatgaagcagctgaagaggcagctggaggaggccgaggaggaggccacccgggccaatgccagcaggaggaagctgcagcgggagctggatgatgccacagaggccaatgaaggcctgagccgggaggtgtccaccctgaagaaccggctgcggcggggcggccccatctccttcagcagcagccgctctggaagacggcagctgcacctggagggcgccagcctggagctgagtgatgatgacacagagagcaagaccagtgatgtgaatgagacccagcccccccagagcgagtag

SEQ ID NO: 20684 - DNA, 5994 bp, synthetic construct
  misc_feature 1..5994: note = Description of Artificial Sequence: Synthetic coding sequence
  source 1..5994: mol_type = other DNA
atggcccagaggacaggcctggaggaccctgagcgctacctgtttgtggacagagctgtgatctacaacccagccacccaggccgactggacagccaagaagctggtgtggatccccagcgagagacatggctttgaagctgccagcatcaaggaggagagaggagatgaggtgatggtggagctggccgagaatggcaagaaggccatggtgaacaaggatgacatccagaagatgaacccccccaagttcagcaaggtggaggacatggccgagctgacctgcctgaatgaggcctctgtgctgcacaacctgaaggaccgctactacagcggcctcatctacacctacagcggcctcttctgtgtggtgatcaacccctacaagaacctgcccatctacagcgagaacatcatcgagatgtaccggggcaagaagagacatgagatgccaccccacatctatgccatcagcgagagcgcctaccgctgcatgctgcaggaccgggaggaccagagcatcctgtgcacaggagagagcggggccggcaagacagagaacaccaagaaggtgatccagtacctggcccacgtggccagcagccacaagggcaggaaggaccacaacatccctggagagctggagcggcagctgctgcaggccaaccccatcctggagagctttggaaatgccaagacagtgaagaatgacaacagcagcagatttgggaagttcatccgcatcaactttgatgtgacaggctacatcgtgggcgccaacatcgagacctacctgctggagaagagcagagctgtgcggcaggccaaggatgagaggaccttccacatcttctaccagctgctgtctggagctggggagcacctgaagagtgacctgctgctggagggcttcaacaactaccgcttcctgagcaatggctacatccccatccctggccagcaggacaaggacaacttccaggagaccatggaggccatgcacatcatgggcttcagccatgaggagatcctgtccatgctgaaggtggtgtcctctgtgctgcagtttggaaacatctccttcaagaaggagaggaacacagaccaggcctccatgcctgagaacacagtggcccagaagctgtgccacctgctgggcatgaatgtgatggagttcacccgggccatcctgaccccccgcatcaaggtgggccgggactatgtgcagaaggcccagaccaaggagcaggccgactttgctgtggaggccctggccaaggccacctatgagcggctcttccgctggctggtgcaccgcatcaacaaggccctggacaggaccaagaggcagggcgccagcttcatcggcatcctggacattgctggctttgagatctttgagctgaacagctttgagcagctgtgcatcaactacaccaatgagaagctgcagcagctgttcaaccacaccatgttcatcctggagcaggaggagtaccagcgggagggcatcgagtggaacttcatcgactttggcctggacctgcagccctgcatcgacctgattgaaagacctgccaaccccccaggagtgctggccctgctggatgaggagtgctggttccccaaggccacagacaagacctttgtggagaagctggtgcaggagcagggcagccacagcaagttccagaagccccggcagctgaaggacaaggctgacttctgcatcatccactacgccggcaaggtggactacaaggcagatgagtggctgatgaagaacatggaccccctgaatgacaacgtggccaccctgctgcaccagagcagtgacagatttgtggccgagctgtggaaggatgagatccagaacatccagagggccagcttctatgacagcgtgtctggcctgcacgagccccctgtggaccgcatcgtgggcctggaccaggtgacaggcatgacagaaacagccttcggcagcgcctacaagaccaagaagggcatgttcagaacagtgggccagctgtacaaggagagcctgaccaagctgatggccaccctgaggaacaccaaccccaactttgtgcgctgcatcatccccaaccacgagaagagagctgggaagctggacccccacctggtgctggaccagctgcgctgcaatggagtgctggagggcatccgcatctgccggcagggcttccccaaccgcatcgtgttccaggagttccggcagagatatgagatcctgaccccaaatgccatccccaagggcttcatggatggcaagcaggcctgtgagaggatgatccgggccctggagctggaccccaacctgtaccgcatcggccagagcaagatcttcttccgggccggcgtgctggcccacctggaggaggagcgggacctgaagatcacagacatcatcatcttcttccaggccgtgtgccggggctacctggccaggaaggcctttgccaagaagcagcagcagctgagcgccctgaaggtgctgcagaggaactgtgccgcctacctgaagctgcggcactggcagtggtggagggtcttcaccaaggtgaagcccctgctgcaggtgacccggcaggaggaggagctgcaggccaaggatgaggagctgctgaaggtgaaggagaagcagaccaaggtggagggggagctggaggagatggagaggaagcaccagcagctgctggaggagaagaacatcctggccgagcagctgcaggccgagacagagctgtttgctgaggccgaggagatgagggcccggctggccgccaagaagcaggagctggaggagatcctgcatgacctggagagccgggtggaggaggaggaggagaggaaccagatcctgcagaatgagaagaagaagatgcaggcccacatccaggacctggaggagcagctggatgaggaggagggcgcccggcagaagctgcagctggagaaggtgacagctgaggccaagatcaagaagatggaggaggagatcctgctgctggaggaccagaacagcaagttcatcaaggagaagaagctgatggaggacagaattgctgaatgtagcagccagctggccgaggaggaggagaaggccaagaacctggccaagatccggaacaagcaggaggtgatgatcagtgacctggaggagcggctgaagaaggaggagaagacccggcaggagctggagaaggccaagaggaagctggatggagagaccacagacctgcaggaccagattgctgagctgcaggcccagattgatgagctgaagctgcagctggccaagaaggaggaggagctgcagggcgccctggcccggggagatgatgagaccctgcacaagaacaatgccctgaaggtggtgcgggagctgcaggcccagattgctgagctgcaggaggactttgagagcgagaaggccagcaggaacaaggccgagaagcagaagagggacctgtctgaggagctggaggccctgaagacagagctggaggacaccctggacaccacagctgcccagcaggagctgcggaccaagcgggagcaggaggtggccgagctgaagaaggccctggaggaggagaccaagaaccacgaggcccagatccaggacatgaggcagagacatgccacagccctggaggagctgtctgagcagctggagcaggccaagcgcttcaaggccaacctggagaagaacaagcagggcctggagacagacaacaaggagctggcctgtgaggtgaaggtgctgcagcaggtgaaggccgagagcgagcacaagaggaagaagctggatgcccaggtgcaggagctgcacgccaaggtgtctgagggggaccggctgcgggtggagctggccgagaaggccagcaagctgcagaatgagctggacaacgtgtccaccctgctggaggaggccgagaagaagggcatcaagtttgccaaggatgctgccagcctggagagccagctgcaggacacccaggagctgctgcaggaggagacccggcagaagctgaacctgagcagccgcatccggcagctggaggaggagaagaacagcctgcaggagcagcaggaggaggaggaggaggccaggaagaacctggagaagcaggtgctggccctgcagagccagctggccgacaccaagaagaaggtggatgatgacctgggcaccatcgagagcctggaggaggccaagaagaagctgctgaaggatgctgaggccctgagccagaggctggaggagaaggccctggcctatgacaagctggagaagaccaagaaccggctgcagcaggagctggatgacctgactgtggacctggaccaccagaggcaggtggccagcaacctggagaagaagcagaagaagtttgaccagctgctggccgaggagaagagcatcagcgcccgctatgcagaggagcgggacagagctgaggccgaggcccgggagaaggagaccaaggccctgagcctggcccgggccctggaggaggccctggaggccaaggaggagtttgagcggcagaacaagcagctgcgggctgacatggaggacctgatgagcagcaaggatgatgtgggcaagaatgtgcatgagctggagaagagcaagagggccctggagcagcaggtggaggagatgaggacccagctggaggagctggaggatgagctgcaggccacagaagatgccaagctgcggctggaggtgaacatgcaggccatgaaggcccagtttgagcgggacctgcagaccagagatgagcagaatgaggagaagaagaggctgctgatcaagcaggtgcgggagctggaggccgagctggaggatgagaggaagcagagggccctggccgtggccagcaagaagaagatggagattgacctgaaggacctggaggcccagatcgaggccgccaacaaggccagagatgaggtgatcaagcagctgaggaagctgcaggcccagatgaaggactaccagcgggagctggaggaggcccgggccagcagagatgagatctttgcccagagcaaggagagcgagaagaagctgaagagcctggaggccgagatcctgcagctgcaggaggagctggccagcagcgagcgggccaggagacatgctgagcaggagagagatgagctggctgatgagatcaccaacagcgccagcggcaagagcgccctgctggatgagaagaggcggctggaggccagaattgcccagctggaggaggagctggaggaggagcagagcaacatggagctgctgaatgaccgcttcaggaagaccaccctgcaggtggacaccctgaatgctgagctggccgctgagaggtctgctgcccagaagagtgacaatgcccggcagcagctggagcggcagaacaaggagctgaaggccaagctgcaggagctggagggcgctgtgaagagcaagttcaaggccaccatcagcgccctggaggccaagattggccagctggaggagcagctggagcaggaggccaaggagagagctgctgccaacaagctggtgcggaggacagagaagaagctgaaggagatcttcatgcaggtggaggatgaaagaagacatgctgaccagtacaaggagcagatggagaaggccaatgccaggatgaagcagctgaagaggcagctggaggaggccgaggaggaggccacccgggccaatgccagcaggaggaagctgcagcgggagctggatgatgccacagaggccaatgaaggcctgagccgggaggtgtccaccctgaagaaccggctgcggcggggcggccccatctccttcagcagcagccgcagcggccggcggcagctgcacctggagggcgccagcctggagctgagtgatgatgacacagagagcaagaccagtgatgtgaatgagacccagcccccccagagcgagtag

SEQ ID NO: 20685 - DNA, 567 bp, synthetic construct
  misc_feature 1..567: note = Description of Artificial Sequence: Synthetic coding sequence
  source 1..567: mol_type = other DNA
atggcccagaggacaggcctggaggaccctgagcgctacctgtttgtggacagagctgtgatctacaacccagccacccaggccgactggacagccaagaagctggtgtggatccccagcgagagacatggctttgaagctgccagcatcaaggaggagagaggagatgaggtgatggtggagctggccgagaatggcaagaaggccatggtgaacaaggatgacatccagaagatgaacccccccaagttcagcaaggtggaggacatggccgagctgacctgcctgaatgaggcctctgtgctgcacaacctgaaggaccgctactacagcggcctcatctacacctacagcggcctcttctgtgtggtgatcaacccctacaagaacctgcccatctacagcgagaacatcatcgagatgtaccggggcaagaagagacatgagatgccaccccacatctatgccatcagcgagagcgcctaccgctgcatgctgcaggaccgggaggaccagagcatcctgtgcacaggagagagcggggccggcaagacagagaacacctag

SEQ ID NO: 20686 - DNA, 1446 bp, synthetic construct
  misc_feature 1..1446: note = Description of Artificial Sequence: Synthetic coding sequence
  source 1..1446: mol_type = other DNA
atgtatgatgctgagcggggctggagcctgagctttgctggctgcggcttcctgggcttctaccacgtgggcgccacccgctgcctgtctgagcacgccccccacctgctgagagatgccaggatgctgtttggagccagcgctggggccctgcactgtgtgggcgtgctgagcggcatccccctggagcagaccctgcaggtgctgagtgacctggtgaggaaggcccggagcagaaatattggcatcttccaccccagcttcaacctgagcaagttcctgcggcagggcctgtgcaagtgcctgcctgccaacgtgcaccagctgatcagcggcaagattggcatcagcctgaccagggtgtctgatggagaaaatgtgctggtgtctgacttccgcagcaaggatgaggtggtggatgccctggtgtgcagctgcttcatccccttctacagcggcctcatcccccccagcttccggggcgtgcgctacgtggatggcggcgtgtctgacaacgtgcccttcattgatgccaagaccaccatcaccgtgagccccttctacggggagtatgacatctgccccaaggtgaagagcaccaacttcctgcacgtggacatcaccaagctgagcctgcggctgtgcaccggcaacctgtacctgctgagccgggcctttgtgcccccagacctgaaggtgctgggggagatctgcctgcggggctacctggatgccttccgcttcctggaggagaagggcatctgcaaccggccccagcccggcctgaagagcagcagcgagggcatggaccctgaggtggccatgcccagctgggccaacatgagcctggacagcagccctgagagcgctgccctggccgtgcggctggagggagatgagctgctggaccacctgcggctgagcatcctgccctgggatgagagcatcctggacaccctgagcccccggctggccacagccctgtctgaggagatgaaggacaagggcggctacatgagcaagatctgcaacctgctgcccatccgcatcatgtcctatgtgatgctgccctgcaccctgcctgtggagagcgccatcgccatcgtgcagaggctggtgacctggctgcctgacatgccagatgatgtgctgtggctgcagtgggtgaccagccaggtgttcaccagggtgctgatgtgcctgctgcctgccagccgcagccagatgcctgtgagcagccagcaggccagcccctgcaccccagagcaggactggccctgctggaccccctgcagccccaagggctgcccagctgagaccaaggccgaggccacccccaggagcatcctgcggagcagcctgaacttcttcctgggcaacaaggtgcctgctggagctgagggcctgagcaccttccccagcttcagcctggagaagagcctgtag

SEQ ID NO: 20687 - DNA, 4149 bp, synthetic construct
  misc_feature 1..4149: note = Description of Artificial Sequence: Synthetic coding sequence
  source 1..4149: mol_type = other DNA
atgtacaagggcaagaagagacatgagatgccaccccacatctatgccatcacagacacagcctaccgctccatgatgcaggaccgggaggaccagagcatcctgtgcacaggagagagcggggccggcaagacagagaacaccaagaaggtgatccagtacctggcctacgtggccagcagccacaagagcaagaaggaccagggcgagctggagcggcagctgctgcaggccaaccccatcctggaggcctttggaaatgccaagacagtgaagaatgacaacagcagcagatttgggaagttcatccgcatcaactttgatgtgaatggctacatcgtgggcgccaacatcgagacctacctgctggagaagagccgggccatccggcaggccaaggaggagaggaccttccacatcttctactacctgctgagcggggccggggagcacctgaagacagacctgctgctggagccctacaacaagtaccgcttcctgagcaatggacatgtgaccatccctggccagcaggacaaggacatgttccaggagaccatggaggccatgaggatcatgggcatccctgaggaggagcagatgggcctgctgcgggtcatcagcggcgtgctgcagctgggcaacatcgtgttcaagaaggagaggaacacagaccaggcctccatgccagacaacacagctgcccagaaggtgagccacctgctgggcatcaacgtgacagacttcacccggggcatcctgaccccccgcatcaaggtgggccgggactatgtgcagaaggcccagaccaaggagcaggccgactttgccatcgaggccctggccaaggccacctatgaaagaatgttccgctggctggtgctgcgcatcaacaaggccctggacaagaccaagaggcagggcgccagcttcatcggcatcctggacattgctggctttgagatctttgacctgaacagctttgagcagctgtgcatcaactacaccaatgagaagctgcagcagctgttcaaccacaccatgttcatcctggagcaggaggagtaccagcgggagggcatcgagtggaacttcatcgactttggcctggacctgcagccctgcatcgacctgattgagaagccagctggccccccaggcatcctggccctgctggatgaggagtgctggttccccaaggccacagacaagagctttgtggagaaggtgatgcaggagcagggcacccaccccaagttccagaagcccaagcagctgaaggacaaggctgacttctgcatcatccactacgccggcaaggtggactacaaggcagatgagtggctgatgaagaacatggaccccctgaatgacaacatcgccaccctgctgcaccagagcagtgacaagtttgtgtctgagctgtggaaggatgtggaccgcatcatcggcctggaccaggtggccggcatgtctgaaacagccctgcccggggccttcaagaccaggaagggcatgttcagaacagtgggccagctgtacaaggagcagctggccaagctgatggccaccctgaggaacaccaaccccaactttgtgcgctgcatcatccccaaccacgagaagaaggccggcaagctggacccccacctggtgctggaccagctgcgctgcaatggagtgctggagggcatccgcatctgccggcagggcttccccaacagagtggtgttccaggagttccggcagagatatgagatcctgacccccaacagcatccccaagggcttcatggatggcaagcaggcctgtgtgctgatgatcaaggccctggagctggacagcaacctgtaccgcatcggccagagcaaggtgttcttccgggccggcgtgctggcccacctggaggaggagcgggacctgaagatcacagatgtgatcatcggcttccaggcctgctgccggggctacctggccaggaaggcctttgccaagaggcagcagcagctgacagccatgaaggtgctgcagaggaactgtgccgcctacctgaagctgaggaactggcagtggtggaggctcttcaccaaggtgaagcccctgctgcaggtgtcccggcaggaggaggagatgatggccaaggaggaggagctggtgaaggtgcgggagaagcagctggccgcagaaaatcggctgacagagatggagaccctgcagagccagctgatggccgagaagctgcagctgcaggagcagctgcaggccgagacagagctgtgtgccgaggccgaggagctgcgggcccggctgacagccaagaagcaggagctggaggagatctgccacgacctggaggcccgggtggaggaggaggaggagcgctgccagcacctgcaggccgagaagaagaagatgcagcagaacatccaggagctggaggagcagctggaggaggaggagagcgcccggcagaagctgcagctggagaaggtgaccacagaggccaagctgaagaagctggaggaggagctggatgacctgctggtggacctggaccaccagaggcagagcgcctgcaacctggagaagaagcagaagaagtttgaccagctgctggccgaggagaagaccatcagcgccaagtatgcagaggagcgggacagagctgaggccgaggcccgggagaaggagaccaaggccctgagcctggcccgggccctggaggaggccatggagcagaaggccgagctggagcggctgaacaagcagttcagaacagagatggaggacctgatgagcagcaaggatgatgtgggcaagtctgtgcatgagctggagaagagcaagagggccctggagcagcaggtggaggagatgaagacccagctggaggagctggaggatgagctgcaggccacagaagatgccaagctgcggctggaggtgaacctgcaggccatgaaggcccagtttgagcgggacctgcagggcagagatgagcagagcgaggagaagaagaagcagctggtgcggcaggtgcgggagatggaggccgagctggaggatgagaggaagcagaggtccatggctgtggccgccaggaagaagctggagatggacctgaaggacctggaggcccacatcgacagcgccaacaagaacagagatgaggccatcaagcagctgaggaagctgcaggcccagatgaaggactgcatgagggagctggatgacacccgggccagccgggaggagatcctggcccaggccaaggaaaatgagaagaagctgaagtccatggaggccgagatgatccagctgcaggaggagctggccgctgctgagcgggccaagaggcaggcccagcaggagagagatgagctggctgatgagatcgccaacagcagcggcaagggggccctggccctggaggagaagaggcggctggaggccagaattgcccagctggaggaggagctggaggaggagcagggcaacacagagctgatcaatgaccggctgaagaaggccaacctgcagattgaccagatcaacacagacctgaacctggagaggagccacgcccagaagaatgaaaatgcccggcagcagctggagcggcagaacaaggagctgaaggtgaagctgcaggagatggagggcaccgtgaagagcaagtacaaggccagcatcacagccctggaggccaagatcgcccagctggaggagcagctggacaatgagaccaaggagcggcaggccgcctgcaagcaggtgcggaggacagagaagaagctgaaggatgtgctgctgcaggtggatgatgaaagaagaaatgctgagcagtacaaggaccaggccgacaaggccagcacccggctgaagcagctgaagaggcagctggaggaggccgaggaggaggcccagagggccaatgccagcaggaggaagctgcagcgggagctggaggatgccacagaaacagcagatgccatgaaccgggaggtgagcagcctgaagaacaagctgcggcggggggacctgccctttgtggtgcccaggaggatggccaggaaaggagctggagatggcagtgatgaggaggtggatggcaaggcagatggagctgaggccaagccagctgagtag

SEQ ID NO: 20688 - DNA, 1689 bp, synthetic construct
  misc_feature 1..1689: note = Description of Artificial Sequence: Synthetic coding sequence
  source 1..1689: mol_type = other DNA
gccagcggcacccggcggcgctggccacccaccacctcctggaggcggccccggcggggctgcagccgctcctggaccacctgctggtggacctggaccaccagcgcccgggcccgggccacctggaggaggagccgccgcagcctgaccagctcctggaggagaagaagacccagcctgcccagcatgcagaggtctgccaccggcctgcggcggcggcctgagaggagaagaccccggctgtgccgctggccaggccctgaggaggccatggagcagaaggccgagctggagcggctgaacaagcagttcagaacagagatggaggacctgatgagcagcaaggatgatgtgggcaagtctgtgcatgagctggagaagagcaagagggccctggagcagcaggtggaggagatgaagacccagctggaggagctggaggatgagctgcaggccacagaagatgccaagctgcggctggaggtgaacctgcaggccatgaaggcccagtttgagcgggacctgcagggcagagatgagcagagcgaggagaagaagaagcagctggtgcggcaggtgcgggagatggaggccgagctggaggatgagaggaagcagaggtccatggctgtggccgccaggaagaagctggagatggacctgaaggacctggaggcccacatcgacagcgccaacaagaacagagatgaggccatcaagcagctgaggaagctgcaggcccagatgaaggactgcatgagggagctggatgacacccgggccagccgggaggagatcctggcccaggccaaggaaaatgagaagaagctgaagtccatggaggccgagatgatccagctgcaggaggagctggccgctgctgagcgggccaagaggcaggcccagcaggagagagatgagctggctgatgagatcgccaacagcagcggcaagggggccctggccctggaggagaagaggcggctggaggccagaattgcccagctggaggaggagctggaggaggagcagggcaacacagagctgatcaatgaccggctgaagaaggccaacctgcagattgaccagatcaacacagacctgaacctggagaggagccacgcccagaagaatgaaaatgcccggcagcagctggagcggcagaacaaggagctgaaggtgaagctgcaggagatggagggcaccgtgaagagcaagtacaaggccagcatcacagccctggaggccaagatcgcccagctggaggagcagctggacaatgagaccaaggagcggcaggccgcctgcaagcaggtgcggaggacagagaagaagctgaaggatgtgctgctgcaggtggatgatgaaagaagaaatgctgagcagtacaaggaccaggccgacaaggccagcacccggctgaagcagctgaagaggcagctggaggaggccgaggaggaggcccagagggccaatgccagcaggaggaagctgcagcgggagctggaggatgccacagaaacagcagatgccatgaaccgggaggtgagcagcctgaagaacaagctgcggcggggggacctgccctttgtggtgcccaggaggatggccaggaaaggagctggagatggcagtgatgaggaggtggatggcaaggcagatggagctgaggccaagccagctgagtag

SEQ ID NO: 20689 - DNA, 657 bp, synthetic construct
  misc_feature 1..657: note = Description of Artificial Sequence: Synthetic coding sequence
  source 1..657: mol_type = other DNA
atggcccagcaggccgctgacaagtacctgtatgtggacaagaacttcatcaacaaccccctggcccaggccgactgggccgccaagaagctggtgtgggtgcccagcgacaagagcggctttgagcccgccagcctgaaggaggaggtgggggaggaggccatcgtggagctggtggagaatggcaagaaggtgaaggtgaacaaggatgacatccagaagatgaacccccccaagttcagcaaggtggaggacatggccgagctgacctgcctgaatgaggcctctgtgctgcacaacctgaaggagcgctactacagcggcctcatctacacctacagcggcctcttctgtgtggtgatcaacccctacaagaacctgcccatctacagcgaggagatcgtggagatgtacaagggcaagaagagacatgagatgccaccccacatctatgccatcacagacacagcctaccgctccatgatgcaggaccgggaggaccagagcatcctgtgcacaggagagagcggggccggcaagacagagaacaccaagaaggtgatccagtacctggcctacgtggccagcagccacaagagcaagaaggaccaggaggcctacttcaagaacagagctgtgcggctgggcgtgctgtag

SEQ ID NO: 20690 - DNA, 312 bp, synthetic construct
  misc_feature 1..312: note = Description of Artificial Sequence: Synthetic coding sequence
  source 1..312: mol_type = other DNA
atggcccagcaggccgctgacaagtacctgtatgtggacaagaacttcatcaacaaccccctggcccaggccgactgggccgccaagaagctggtgtgggtgcccagcgacaagagcggctttgagcccgccagcctgaaggaggaggtgggggaggaggccatcgtggagctggtggagaatggcaagaaggtgaaggtgaacaaggatgacatccagaagatgaacccccccaagttcagcaaggtggaggacatggccgagctgacctgcctgaatgaggcctctgtgctgcacaacctgaaggagtag

SEQ ID NO: 20691 - DNA, 519 bp, synthetic construct
  misc_feature 1..519: note = Description of Artificial Sequence: Synthetic coding sequence
  source 1..519: mol_type = other DNA
atgagcagcaagagggccaaggccaagaccaccaagaagaggccccagagggccaccagcaatgtgtttgccatgtttgaccagagccagatccaggagttcaaggaggccttcaacatgattgaccagaacagagatggcttcatcgacaaggaggacctgcatgacatgctggccagcctgggcaagaaccccacagatgagtacctggagggcatgatgtctgaggcccctggccccatcaacttcaccatgttcctgaccatgtttggagagaagctgaatggaacagatcctgaagatgtgatcagaaatgcctttgcctgctttgatgaggaggccagcggcttcatccacgaggaccacctgcgggagctgctgaccaccatgggagaccgcttcacagatgaggaggtggatgagatgtaccgggaggcccccatcgacaagaagggcaacttcaactacgtggagttcacccgcatcctgaagcatggagccaaggacaaggatgactag

SEQ ID NO: 20692 - DNA, 357 bp, synthetic construct
  misc_feature 1..357: note = Description of Artificial Sequence: Synthetic coding sequence
  source 1..357: mol_type = other DNA
atgagcagcaagagggccaaggccaagaccaccaagaagaggccccagagggccaccagcaatgtgtttgccatgtttgaccagagccagatccaggagttcaaggaggccttcaacatgattgaccagaacagagatggcttcatcgacaaggaggacctgcatgacatgctggccagcctgggcttcatccacgaggaccacctgcgggagctgctgaccaccatgggagaccgcttcacagatgaggaggtggatgagatgtaccgggaggcccccatcgacaagaagggcaacttcaactacgtggagttcacccgcatcctgaagcatggagccaaggacaaggatgactag

SEQ ID NO: 20693 - DNA, 927 bp, synthetic construct
  misc_feature 1..927: note = Description of Artificial Sequence: Synthetic coding sequence
  source 1..927: mol_type = other DNA
atgcaggagctgaccctgagccctggccctgccaagctgacccccaccctggaccccacccacaggatggagctgatcctgagcaccagccctgctgagctgaccctggaccctgcctgccagcccaagctgcccctggacagcacctgccagcctgagatgaccttcaaccctggccccacagagctgaccctggaccctgagcaccagcctgaggagaccccagcccccagcctggccgagctgaccctggagcctgtgcacagaagacctgagctgctggatgcctgtgccgacctgatcaatgaccagtggcccaggagcaggaccagccggctgcacagcctgggccagagcagtgatgccttccccctgtgcctgatgctgctgagcccccaccccaccctggaggccgcccctgtggtggtgggccacgcccggctgagccgggtgctgaaccagccccagagcctgctggtggagaccgtggtggtggcccgggccctgcggggccggggcttcggccggcggctgatggagggcctggaggtgtttgcccgggcccggggcttcaggaagctgcacctgaccacccatgaccaggtgcacttctacacccacctgggctaccagctgggggagcctgtgcagggcctggtgttcaccagccggcggctgcctgccaccctgctgaatgccttccccacagcccccagcccccggccccccaggaaggcccccaacctgacagcccaggccgccccccggggccccaagggcccccccctgcccccacctccacccctgcctgaatgtctgaccatcagcccccctgtgcccagcggcccccccagcaagagcctgctggagacccagtaccagaatgtgcggggccggcccatcttctggatggagaaggacatctag

SEQ ID NO: 20694 - DNA, 861 bp, synthetic construct
  misc_feature 1..861: note = Description of Artificial Sequence: Synthetic coding sequence
  source 1..861: mol_type = other DNA
atggagctgatcctgagcaccagccctgctgagctgaccctggaccctgcctgccagcccaagctgcccctggacagcacctgccagcctgagatgaccttcaaccctggccccacagagctgaccctggaccctgagcaccagcctgaggagaccccagcccccagcctggccgagctgaccctggagcctgtgcacagaagacctgagctgctggatgcctgtgccgacctgatcaatgaccagtggcccaggagcaggaccagccggctgcacagcctgggccagagcagtgatgccttccccctgtgcctgatgctgctgagcccccaccccaccctggaggccgcccctgtggtggtgggccacgcccggctgagccgggtgctgaaccagccccagagcctgctggtggagaccgtggtggtggcccgggccctgcggggccggggcttcggccggcggctgatggagggcctggaggtgtttgcccgggcccggggcttcaggaagctgcacctgaccacccatgaccaggtgcacttctacacccacctgggctaccagctgggggagcctgtgcagggcctggtgttcaccagccggcggctgcctgccaccctgctgaatgccttccccacagcccccagcccccggccccccaggaaggcccccaacctgacagcccaggccgccccccggggccccaagggcccccccctgcccccacctccacccctgcctgaatgtctgaccatcagcccccctgtgcccagcggcccccccagcaagagcctgctggagacccagtaccagaatgtgcggggccggcccatcttctggatggagaaggacatctag

SEQ ID NO: 20695 - DNA, 174 bp, synthetic construct
  misc_feature 1..174: note = Description of Artificial Sequence: Synthetic coding sequence
  source 1..174: mol_type = other DNA
atggagctgatcctgagcaccagccctgctgagctgaccctggaccctgcctgccagcccaagctgcccctggacagcacctgccagcctgagatgaccttcaaccctggccccacagagctgaccctggaccctgagcaccagcctgaggagaccccagcccccagcctgtag

SEQ ID NO: 20696 - DNA, 861 bp, synthetic construct; identical to SEQ ID NO: 20694
  misc_feature 1..861: note = Description of Artificial Sequence: Synthetic coding sequence
  source 1..861: mol_type = other DNA

SEQ ID NO: 20697 - DNA, 861 bp, synthetic construct; identical to SEQ ID NO: 20694
  misc_feature 1..861: note = Description of Artificial Sequence: Synthetic coding sequence
  source 1..861: mol_type = other DNA

SEQ ID NO: 20698 - DNA, 261 bp, synthetic construct
  misc_feature 1..261: note = Description of Artificial Sequence: Synthetic coding sequence
  source 1..261: mol_type = other DNA
atggagctgatcctgagcaccagccctgctgagctgaccctggaccctgcctgccagcccaagctgcccctggacagcacctgccagcctgagatgaccttcaaccctggccccacagagctgaccctggaccctgagcaccagcctgaggagaccccagcccccagcctggccgagctgaccctggagcctgtgcacagaagacctgagctgctggatgcctgtgccgacctgatcaatgaccagtggcccaggagctag

SEQ ID NO: 20699 - DNA, 30 bp, synthetic construct; identical to SEQ ID NO: 11723
  misc_feature 1..30: note = Description of Artificial Sequence: Synthetic coding sequence
  source 1..30: mol_type = other DNA

SEQ ID NO: 20700 - DNA, 987 bp, synthetic construct
  misc_feature 1..987: note = Description of Artificial Sequence: Synthetic coding sequence
  source 1..987: mol_type = other DNA
atggccgagctgcaggaggtgcagatcacagaggagaagcccctgctgcccggccagaccccagaggccgccaagacccacagcgtggagaccccctacggctctgtgaccttcaccgtgtatggcacccccaagcccaagaggcctgccatcctgacctaccatgatgtgggcctgaactacaagagctgcttccagcccctcttccagtttgaggacatgcaggagatcatccagaactttgtgcgggtgcacgtggatgcccctggcatggaggagggcgcccctgtgttccccctgggctaccagtaccccagcctggaccagctggccgacatgatcccctgtgtgctgcagtacctgaacttcagcaccatcattggagtgggcgtgggcgctggggcctacatcctggcccgctatgccctgaccggcctgaccagcagcatccctgagatgatcctgggccacctgttcagccaggaggagctgagcggcaacagcgagctgatccagaagtacagaaacatcatcacccacgcccccaacctggacaacatcgagctgtactggaacagctacaacaacagaagagacctgaactttgagcggggcggggacatcaccctgcgctgccctgtgatgctggtggtgggggaccaggcccctcatgaagatgctgtggtggagtgcaacagcaagctggaccccacccagaccagcttcctgaagatggctgacagcggcggccagccccagctgacccagcccgggaagctgacagaggccttcaagtacttcctgcagggcatgggctacatggccagcagctgcatgacccggctgagccgcagcaggacagccagcctgaccagcgctgcctctgtggatggcaacagaagccgcagcaggaccctgagccagagcagcgagagcggcaccctgagcagcggccccccaggccacaccatggaggtgtcctgctag

SEQ ID NO: 20701 - DNA, 1116 bp, synthetic construct
  misc_feature 1..1116: note = Description of Artificial Sequence: Synthetic coding sequence
  source 1..1116: mol_type = other DNA
atggccgagctgcaggaggtgcagatcacagaggagaagcccctgctgcccggccagaccccagaggccgccaaggaggccgagctggccgcccgcatcctgctggaccagggccagacccacagcgtggagaccccctacggctctgtgaccttcaccgtgtatggcacccccaagcccaagaggcctgccatcctgacctaccatgatgtgggcctgaactacaagagctgcttccagcccctcttccagtttgaggacatgcaggagatcatccagaactttgtgcgggtgcacgtggatgcccctggcatggaggagggcgcccctgtgttccccctgggctaccagtaccccagcctggaccagctggccgacatgatcccctgtgtgctgcagtacctgaacttcagcaccatcattggagtgggcgtgggcgctggggcctacatcctggcccgctatgccctgaaccacccagacacagtggagggcctggtgctgatcaacatcgaccccaatgccaagggctggatggactgggccgcccacaagctgaccggcctgaccagcagcatccctgagatgatcctgggccacctgttcagccaggaggagctgagcggcaacagcgagctgatccagaagtacagaaacatcatcacccacgcccccaacctggacaacatcgagctgtactggaacagctacaacaacagaagagacctgaactttgagcggggcggggacatcaccctgcgctgccctgtgatgctggtggtgggggaccaggcccctcatgaagatgctgtggtggagtgcaacagcaagctggaccccacccagaccagcttcctgaagatggctgacagcggcggccagccccagctgacccagcccgggaagctgacagaggccttcaagtacttcctgcagggcatgggctacatggccagcagctgcatgacccggctgagccgcagcaggacagccagcctgaccagcgctgcctctgtggatggcaacagaagccgcagcaggaccctgagccagagcagcgagagcggcaccctgagcagcggccccccaggccacaccatggaggtgtcctgctag

SEQ ID NO: 20702 - DNA, 1074 bp, synthetic construct
  misc_feature 1..1074: note = Description of Artificial Sequence: Synthetic coding sequence
  source 1..1074: mol_type = other DNA
atggccgagctgcaggaggtgcagatcacagaggagaagcccctgctgcccggccagaccccagaggccgccaagacccacagcgtggagaccccctacggctctgtgaccttcaccgtgtatggcacccccaagcccaagaggcctgccatcctgacctaccatgatgtgggcctgaactacaagagctgcttccagcccctcttccagtttgaggacatgcaggagatcatccagaactttgtgcgggtgcacgtggatgcccctggcatggaggagggcgcccctgtgttccccctgggctaccagtaccccagcctggaccagctggccgacatgatcccctgtgtgctgcagtacctgaacttcagcaccatcattggagtgggcgtgggcgctggggcctacatcctggcccgctatgccctgaaccacccagacacagtggagggcctggtgctgatcaacatcgaccccaatgccaagggctggatggactgggccgcccacaagctgaccggcctgaccagcagcatccctgagatgatcctgggccacctgttcagccaggaggagctgagcggcaacagcgagctgatccagaagtacagaaacatcatcacccacgcccccaacctggacaacatcgagctgtactggaacagctacaacaacagaagagacctgaactttgagcggggcggggacatcaccctgcgctgccctgtgatgctggtggtgggggaccaggcccctcatgaagatgctgtggtggagtgcaacagcaagctggaccccacccagaccagcttcctgaagatggctgacagcggcggccagccccagctgacccagcccgggaagctgacagaggccttcaagtacttcctgcagggcatgggctacatggccagcagctgcatgacccggctgagccgcagcaggacagccagcctgaccagcgctgcctctgtggatggcaacagaagccgcagcaggaccctgagccagagcagcgagagcggcaccctgagcagcggccccccaggccacaccatggaggtgtcctgctag

SEQ ID NO: 20703 - DNA, 1074 bp, synthetic construct; identical to SEQ ID NO: 20702
  misc_feature 1..1074: note = Description of Artificial Sequence: Synthetic coding sequence
  source 1..1074: mol_type = other DNA

SEQ ID NO: 20704 - DNA, 1026 bp, synthetic construct
  misc_feature 1..1026: note = Description of Artificial Sequence: Synthetic coding sequence
  source 1..1026: mol_type = other DNA
atggccgagctgcaggaggtgcagatcacagaggagaagcccctgctgcccggccagaccccagaggccgccaagacccacagcgtggagaccccctacggctctgtgaccttcaccgtgtatggcacccccaagcccaagaggcctgccatcctgacctaccatgatgtgggcctgaactacaagagctgcttccagcccctcttccagtttgaggacatgcaggagatcatccagaactttgtgcgggtgcacgtggatgcccctggcatggaggagggcgcccctgtgttccccctgggctaccagtaccccagcctggaccagctggccgacatgatcccctgtgtgctgcagtacctgaacttcagcaccatcattggagtgggcgtgggcgctggggcctacatcctggcccgctatgccctgaaccacccagacacagtggagggcctggtgctgatcaacatcgaccccaatgccaagggctggatggactgggccgcccacaagctgaccggcctgaccagcagcatccctgagatgatcctgggccacctgttcagccaggaggagctgagcggcaacagcgagctgatccagaagtacagaaacatcatcacccacgcccccaacctggacaacatcgagctgtactggaacagctacaacaacagaagagacctgaactttgagcggggcggggacatcaccctgcgctgccctgtgatgctggtggtgggggaccaggcccctcatgaagatgctgtgatggctgacagcggcggccagccccagctgacccagcccgggaagctgacagaggccttcaagtacttcctgcagggcatgggctacatggccagcagctgcatgacccggctgagccgcagcaggacagccagcctgaccagcgctgcctctgtggatggcaacagaagccgcagcaggaccctgagccagagcagcgagagcggcaccctgagcagcggccccccaggccacaccatggaggtgtcctgctag

SEQ ID NO: 20705 - DNA, 1083 bp, synthetic construct
  misc_feature 1..1083: note = Description of Artificial Sequence: Synthetic coding sequence
  source 1..1083: mol_type = other DNA
atggccgagctgcaggaggtgcagatcacagaggagaagcccctgctgcccggccagaccccagaggccgccaaggaggccgagctggccgcccgcatcctgctggaccagggccagacccacagcgtggagaccccctacggctctgtgaccttcaccgtgtatggcacccccaagcccaagaggcctgccatcctgacctaccatgatgtgggcctgaactacaagagctgcttccagcccctcttccagtttgaggacatgcaggagatcatccagaactttgtgcgggtgcacgtggatgcccctggcatggaggagggcgcccctgtgttccccctgggctaccagtaccccagcctggaccagctggccgacatgatcccctgtgtgctgcagtacctgaacttcagcaccatcattggagtgggcgtgggcgctggggcctacatcctggcccgctatgccctgaaccacccagacacagtggagggcctggtgctgatcaacatcgaccccaatgccaagggctggatggactgggccgcccacaagctgaccggcctgaccagcagcatccctgagatgatcctgggccacctgttcagccaggaggagctgagcggcaacagcgagctgatccagaagtacagaaacatcatcacccacgcccccaacctggacaacatcgagctgtactggaacagctacaacaacagaagagacctgaactttgagcggggcggggacatcaccctgcgctgccctgtgatgctggtggtggagtgcaacagcaagctggaccccacccagaccagcttcctgaagatggctgacagcggcggccagccccagctgacccagcccgggaagctgacagaggccttcaagtacttcctgcagggcatgggctacatggccagcagctgcatgacccggctgagccgcagcaggacagccagcctgaccagcgctgcctctgtggatggcaacagaagccgcagcaggaccctgagccagagcagcgagagcggcaccctgagcagcggccccccaggccacaccatggaggtgtcctgctag

SEQ ID NO: 20706 - DNA, 1116 bp, synthetic construct; identical to SEQ ID NO: 20701
  misc_feature 1..1116: note = Description of Artificial Sequence: Synthetic coding sequence
  source 1..1116: mol_type = other DNA

SEQ ID NO: 20707 - DNA, 1116 bp, synthetic construct; identical to SEQ ID NO: 20701
  misc_feature 1..1116: note = Description of Artificial Sequence: Synthetic coding sequence
  source 1..1116: mol_type = other DNA

SEQ ID NO: 20708 - DNA, 987 bp, synthetic construct; identical to SEQ ID NO: 20700
  misc_feature 1..987: note = Description of Artificial Sequence: Synthetic coding sequence
  source 1..987: mol_type = other DNA

SEQ ID NO: 20709 - DNA, 1026 bp, synthetic construct; identical to SEQ ID NO: 20704
  misc_feature 1..1026: note = Description of Artificial Sequence: Synthetic coding sequence
  source 1..1026: mol_type = other DNA

SEQ ID NO: 20710 - DNA, 1116 bp, synthetic construct; identical to SEQ ID NO: 20701
  misc_feature 1..1116: note = Description of Artificial Sequence: Synthetic coding sequence
  source 1..1116: mol_type = other DNA

SEQ ID NO: 20711 - DNA, 1104 bp, synthetic construct
  misc_feature 1..1104: note = Description of Artificial Sequence: Synthetic coding sequence
  source 1..1104: mol_type = other DNA
atggagaatggaggctccatgcaggccaccatggccgagctgcaggaggtgcagatcacagaggagaagcccctgctgcccggccagaccccagaggccgccaagacccacagcgtggagaccccctacggctctgtgaccttcaccgtgtatggcacccccaagcccaagaggcctgccatcctgacctaccatgatgtgggcctgaactacaagagctgcttccagcccctcttccagtttgaggacatgcaggagatcatccagaactttgtgcgggtgcacgtggatgcccctggcatggaggagggcgcccctgtgttccccctgggctaccagtaccccagcctggaccagctggccgacatgatcccctgtgtgctgcagtacctgaacttcagcaccatcattggagtgggcgtgggcgctggggcctacatcctggcccgctatgccctgaaccacccagacacagtggagggcctggtgctgatcaacatcgaccccaatgccaagggctggatggactgggccgcccacaagctgaccggcctgaccagcagcatccctgagatgatcctgggccacctgttcagccaggaggagctgagcggcaacagcgagctgatccagaagtacagaaacatcatcacccacgcccccaacctggacaacatcgagctgtactggaacagctacaacaacagaagagacctgaactttgagcggggcggggacatcaccctgcgctgccctgtgatgctggtggtgggggaccaggcccctcatgaagatgctgtggtggagtgcaacagcaagctggaccccacccagaccagcttcctgaagatggctgacagcggcggccagccccagctgacccagcccgggaagctgacagaggccttcaagtacttcctgcagggcatgggctacatggccagcagctgcatgacccggctgagccgcagcaggacagccagcctgaccagcgctgcctctgtggatggcaacagaagccgcagcaggaccctgagccagagcagcgagagcggcaccctgagcagcggccccccaggccacaccatggaggtgtcctgctag

SEQ ID NO: 20712 - DNA, 504 bp, synthetic construct
  misc_feature 1..504: note = Description of Artificial Sequence: Synthetic coding sequence
  source 1..504: mol_type = other DNA
atggccgagctgcaggaggtgcagatcacagaggagaagcccctgctgcccggccagaccccagaggccgccaagacccacagcgtggagaccccctacggctctgtgaccttcaccgtgtatggcacccccaagcccaagaggcctgccatcctgacctaccatgatgtgggcctgaactacaagagctgcttccagcccctcttccagtttgaggacatgcaggagatcatccagaactttgtgcgggtgcacgtggatgcccctggcatggaggagggcgcccctgtgttccccctgggctaccagtaccccagcctggaccagctggccgacatgatcccctgtgtgctgcagtacctgaacttcagcaccatcattggagtgggcgtgggcgctggggcctacatcctggcccgctatgccctgaaccacccagacacagtggagggcctggtgctgatcaacatcgaccccaatgccaagggctggatggactggtag

SEQ ID NO: 20713 - DNA, 1074 bp, synthetic construct; identical to SEQ ID NO: 20702
  misc_feature 1..1074: note = Description of Artificial Sequence: Synthetic coding sequence
  source 1..1074: mol_type = other DNA

SEQ ID NO: 20714 - DNA, 522 bp, synthetic construct
  misc_feature 1..522: note = Description of Artificial Sequence: Synthetic coding sequence
  source 1..522: mol_type = other DNA
atggccgagctgcaggaggtgcagatcacagaggagaagcccctgctgcccggccagaccccagaggccgccaaggaggccgagctggccgcccgcatcctgctggaccagggccagacccacagcgtggagaccccctacggctctgtgaccttcaccgtgtatggcacccccaagcccaagaggcctgccatcctgacctaccatgatgtgggcctgaactacaagagctgcttccagcccctcttccagtttgaggacatgcaggagatcatccagaactttgtgcgggtgcacgtggatgcccctggcatggaggagggcgcccctgtgttccccctgggctaccagtaccccagcctggaccagctggccgacatgatcccctgtgtgctgcagtacctgaacttcagcaccatcattggagtgggcgtgggcgctggggcctacatcctggcccgctatgccctgaaccacccagacacagtggagggcctggtgctgatcaacatcgacccctag

SEQ ID NO: 20715 - DNA, 759 bp, synthetic construct
  misc_feature 1..759: note = Description of Artificial Sequence: Synthetic coding sequence
  source 1..759: mol_type = other DNA
atggccgagctgcaggaggtgcagatcacagaggagaagcccctgctgcccggccagaccccagaggccgccaaggaggccgagctggccgcccgcatcctgctggaccagggccagacccacagcgtggagaccccctacggctctgtgaccttcaccgtgtatggcacccccaagcccaagaggcctgccatcctgacctaccatgatgtgggcctgaactacaagagctgcttccagcccctcttccagtttgaggacatgcaggagatcatccagaactttgtgcgggtgcacgtggatgcccctggcatggaggagggcgcccctgtgttccccctgggctaccagtaccccagcctggaccagctggccgacatgatcccctgtgtgctgcagtacctgaacttcagcaccatcattggagtgggcgtgggcgctggggcctacatcctggcccgctatgccctgaaccacccagacacagtggagggcctggtgctgatcaacatcgaccccaatgccaagggctggatggactgggccgcccacaagctgaccggcctgaccagcagcatccctgagatgatcctgggccacctgttcagccaggaggagctgagcggcaacagcgagctgatccagaagtacagaaacatcatcacccacgcccccaacctggacaacatcgagctgtactggaacagctacaacaacagaagagacctgaactttgagcggggcggggacatcacctag

SEQ ID NO: 20716 - DNA, 525 bp, synthetic construct
  misc_feature 1..525: note = Description of Artificial Sequence: Synthetic coding sequence
  source 1..525: mol_type = other DNA
atggccgagctgcaggaggtgcagatcacagaggagaagcccctgctgcccggccagaccccagaggccgccaagacccacagcgtggagaccccctacggctctgtgaccttcaccgtgtatggcacccccaagcccaagaggcctgccatcctgacctaccatgatgtgggcctgaactacaagagctgcttccagcccctcttccagtttgaggacatgcaggagatcatccagaactttgtgcgggtgcacgtggatgcccctggcatggaggagggcgcccctgtgttccccctgggctaccagtaccccagcctggaccagctggccgacatgatcccctgtgtgctgcagtacctgaacttcagcaccatcattggagtgggcgtgggcgctggggcctacatcctggcccgctatgccctgaaccacccagacacagtggagggcctggtgctgatcaacatcgaccccaatgccaagggctggatggactgggccgcccacaagctgactggatag

SEQ ID NO: 20717 - DNA, 1074 bp, synthetic construct; identical to SEQ ID NO: 20702
  misc_feature 1..1074: note = Description of Artificial Sequence: Synthetic coding sequence
  source 1..1074: mol_type = other DNA

SEQ ID NO: 20718 - DNA, 450 bp, synthetic construct
  misc_feature 1..450: note = Description of Artificial Sequence: Synthetic coding sequence
  source 1..450: mol_type = other DNA
atggccgagctgcaggaggtgcagatcacagaggagaagcccctgctgcccggccagaccccagaggccgccaaggaggccgagctggccgcccgcatcctgctggaccagggccagacccacagcgtggagaccccctacggctctgtgaccttcaccgtgtatggcacccccaagcccaagaggcctgccatcctgacctaccatgatgtgggcctgaactacaagagctgcttccagcccctcttccagtttgaggacatgcaggagatcatccagaactttgtgcgggtgcacgtggatgcccctggcatggaggagggcgcccctgtgttccccctgggctaccagtaccccagcctggaccagctggccgacatgatcccctgtgtgctgcagtacctgaacttcagcaccatcattggagtgggcgtgggcgctggggcctag

SEQ ID NO: 20719 - DNA, 261 bp, synthetic construct
  misc_feature 1..261: note = Description of Artificial Sequence: Synthetic coding sequence
  source 1..261: mol_type = other DNA
atggccgagctgcaggaggtgcagatcacagaggagaagcccctgctgcccggccagaccccagaggccgccaaggaggccgagctggccgcccgcatcctgctggaccagggccagacccacagcgtggagaccccctacggctctgtgaccttcaccgtgtatggcacccccaagcccaagaggcctgccatcctgacctaccatgatgtgggcctgaactacaagagctgcttccagcccctcttccagtttgaatag

SEQ ID NO: 20720 - DNA, 390 bp, synthetic construct
  misc_feature 1..390: note = Description of Artificial Sequence: Synthetic coding sequence
  source 1..390: mol_type = other DNA
atggccgagctgcaggaggtgcagatcacagaggagaagcccctgctgcccggccagaccccagaggccgccaaggaggccgagctggccgcccgcatcctgctggaccagggccagacccacagcgtggagaccccctacggctctgtgaccttcaccgtgtatggcacccccaagcccaagaggcctgccatcctgacctaccatgatgtgggcctgaactacaagagctgcttccagcccctcttccagtttgaggacatgcaggagatcatccagaactttgtgcgggtgcacgtggatgcccctggcatggaggagggcgcccctgtgttccccctgggctaccagtaccccagcctggaccagctggccgacatgatcccctag

SEQ ID NO: 20721 - DNA, 447 bp, synthetic construct
  misc_feature 1..447: note = Description of Artificial Sequence: Synthetic coding sequence
  source 1..447: mol_type = other DNA
atggccgagctgcaggaggtgcagatcacagaggagaagcccctgctgcccggccagaccccagaggccgccaaggaggccgagctggccgcccgcatcctgctggaccagggccagacccacagcgtggagaccccctacggctctgtgaccttcaccgtgtatggcacccccaagcccaagaggcctgccatcctgacctaccatgatgtgggcctgaactacaagagctgcttccagcccctcttccagtttgaggacatgcaggagatcatccagaactttgtgcgggtgcacgtggatgcccctggcatggaggagggcgcccctgtgttccccctgggctaccagtaccccagcctggaccagctggccgacatgatcccctgtgtgctgcagtacctgaacttcagcaccatcattggagtgggcgtgggcgccggctag

SEQ ID NO: 20722 - DNA, 405 bp, synthetic construct
  misc_feature 1..405: note = Description of Artificial Sequence: Synthetic coding sequence
  source 1..405: mol_type = other DNA
atggccgagctgcaggaggtgcagatcacagaggagaagcccctgctgcccggccagaccccagaggccgccaagacccacagcgtggagaccccctacggctctgtgaccttcaccgtgtatggcacccccaagcccaagaggcctgccatcctgacctaccatgatgtgggcctgaactacaagagctgcttccagcccctcttccagtttgaggacatgcaggagatcatccagaactttgtgcgggtgcacgtggatgcccctggcatggaggagggcgcccctgtgttccccctgggctaccagtaccccagcctggaccagctggccgacatgatcccctgtgtgctgcagtacctgaacttcagcaccatcattggagtgggcgtgggcgccggctag

SEQ ID NO: 20723 - DNA, 327 bp, synthetic construct
  misc_feature 1..327: note = Description of Artificial Sequence: Synthetic coding sequence
  source 1..327: mol_type = other DNA
atggccgagctgcaggaggtgcagatcacagaggagaagcccctgctgcccggccagaccccagaggccgccaagacccacagcgtggagaccccctacggctctgtgaccttcaccgtgtatggcacccccaagcccaagaggcctgccatcctgacctaccatgatgtgggcctgaactacaagagctgcttccagcccctcttccagtttgaggacatgcaggagatcatccagaactttgtgcgggtgcacgtggatgcccctggcatggaggagggcgcccctgtgttccccctgggctaccagtaccccagcctggactag

SEQ ID NO: 20724 - DNA, 363 bp, synthetic construct
  misc_feature 1..363: note = Description of Artificial Sequence: Synthetic coding sequence
  source 1..363: mol_type = other DNA
atggccgagctgcaggaggtgcagatcacagaggagaagcccctgctgcccggccagaccccagaggccgccaagacccacagcgtggagaccccctacggctctgtgaccttcaccgtgtatggcacccccaagcccaagaggcctgccatcctgacctaccatgatgtgggcctgaactacaagagctgcttccagcccctcttccagtttgaggacatgcaggagatcatccagaactttgtgcgggtgcacgtggatgcccctggcatggaggagggcgcccctgtgttccccctgggctaccagtaccccagcctggaccagctggccgacatgatcccctgtgtgctgcagtactag

SEQ ID NO: 20725 - DNA, 300 bp, synthetic construct
  misc_feature 1..300: note = Description of Artificial Sequence: Synthetic coding sequence
  source 1..300: mol_type = other DNA
atggccgagctgcaggaggtgcagatcacagaggagaagcccctgctgcccggccagaccccagaggccgccaaggaggccgagctggccgcccgcatcctgctggaccagggccagacccacagcgtggagaccccctacggctctgtgaccttcaccgtgtatggcacccccaagcccaagaggcctgccatcctgacctaccatgatgtgggcctgaactacaagagctgcttccagcccctcttccagtttgaggacatgcaggagatcatccagaactttgtgcgggtgcactag

SEQ ID NO: 20726 - DNA, 279 bp, synthetic construct
  misc_feature 1..279: note = Description of Artificial Sequence: Synthetic coding sequence
  source 1..279: mol_type = other DNA
atggccgagctgcaggaggtgcagatcacagaggagaagcccctgctgcccggccagaccccagaggccgccaagacccacagcgtggagaccccctacggctctgtgaccttcaccgtgtatggcacccccaagcccaagaggcctgccatcctgacctaccatgatgtgggcctgaactacaagagctgcttccagcccctcttccagtttgaggacatgcaggagatcatccagaactttgtgcgggtgcacgtggatgcccctggcatggagtag

SEQ ID NO: 20727 - DNA, 462 bp, synthetic construct
  misc_feature 1..462: note = Description of Artificial Sequence: Synthetic coding sequence
  source 1..462: mol_type = other DNA
atggccgagctgcaggaggtgcagatcacagaggagaagcccctgctgcccggccagaccccagaggccgccaagacccacagcgtggagaccccctacggctctgtgaccttcaccgtgtatggcacccccaagcccaagaggcctgccatcctgacctaccatgatgtgggcctgaactacaagagctgcttccagcccctcttccagtttgaggacatgcaggagatcatccagaactttgtgcgggtgcacgtggatgcccctggcatggaggagggcgcccctgtgttccccctgggctaccagtaccccagcctggaccagctggccgacatgatcccctgtgtgctgcagtacctgaacttcagcaccatcattggagtgggcgtgggcgctggggcctacatcctggcccgctatgccctgaaccacccagacacagtggagggcctggtgtag

SEQ ID NO: 20728 - DNA, 1074 bp, synthetic construct; identical to SEQ ID NO: 20702
  misc_feature 1..1074: note = Description of Artificial Sequence: Synthetic coding sequence
  source 1..1074: mol_type = other DNA

SEQ ID NO: 20729 - DNA, 585 bp, synthetic construct
  misc_feature 1..585: note = Description of Artificial Sequence: Synthetic coding sequence
  source 1..585: mol_type = other DNA
atggccgagctgcaggaggtgcagatcacagaggagaagcccctgctgcccggccagaccccagaggccgccaaggaggccgagctggccgcccgcatcctgctggaccagggccagacccacagcgtggagaccccctacggctctgtgaccttcaccgtgtatggcacccccaagcccaagaggcctgccatcctgacctaccatgatgtgggcctgaactacaagagctgcttccagcccctcttccagtttgaggacatgcaggagatcatccagaactttgtgcgggtgcacgtggatgcccctggcatggaggagggcgcccctgtgttccccctgggctaccagtaccccagcctggaccagctggccgacatgatcccctgtgtgctgcagtacctgaacttcagcaccatcattggagtgggcgtgggcgctggggcctacatcctggcccgctatgccctgaaccacccagacacagtggagggcctggtgctgatcaacatcgaccccaatgccaagggctggatggactgggccgcccacaagctgaccggcctgaccagcagcatcccctag

SEQ ID NO: 20730 - DNA, 387 bp, synthetic construct
  misc_feature 1..387: note = Description of Artificial Sequence: Synthetic coding sequence
  source 1..387: mol_type = other DNA
atggccgagctgcaggaggtgcagatcacagaggagaagcccctgctgcccggccagaccccagaggccgccaagacccacagcgtggagaccccctacggctctgtgaccttcaccgtgtatggcacccccaagcccaagaggcctgccatcctgacctaccatgatgtgggcctgaactacaagagctgcttccagcccctcttccagtttgaggacatgcaggagatcatccagaactttgtgcgggtgcacgtggatgcccctggcatggaggagggcgcccctgtgttccccctgggctaccagtaccccagcctggaccagctggccgacatgatcccctgtgtgctgcagtacctgaacttcagcaccatcattggatag

SEQ ID NO: 20731 - DNA, 660 bp, synthetic construct
  misc_feature 1..660: note = Description of Artificial Sequence: Synthetic coding sequence
  source 1..660: mol_type = other DNA
atggccgagctgcaggaggtgcagatcacagaggagaagcccctgctgcccggccagaccccagaggccgccaaggaggccgagctggccgcccgcatcctgctggaccagggccagacccacagcgtggagaccccctacggctctgtgaccttcaccgtgtatggcacccccaagcccaagaggcctgccatcctgacctaccatgatgtgggcctgaactacaagagctgcttccagcccctcttccagtttgaggacatgcaggagatcatccagaactttgtgcgggtgcacgtggatgcccctggcatggaggagggcgcccctgtgttccccctgggctaccagtaccccagcctggaccagctggccgacatgatcccctgtgtgctgcagtacctgaacttcagcaccatcattggagtgggcgtgggcgctggggcctacatcctggcccgctatgccctgaaccacccagacacagtggagggcctggtgctgatcaacatcgaccccaatgccaagggctggatggactgggccgcccacaagctgaccggcctgaccagcagcatccctgagatgatcctgggccacctgttcagccaggaggagctgagcggcaacagcgagctgatccagaagtacagaaattag

SEQ ID NO: 20732 - DNA, 666 bp, synthetic construct
  misc_feature 1..666: note = Description of Artificial Sequence: Synthetic coding sequence
  source 1..666: mol_type = other DNA
atggccgagctgcaggaggtgcagatcacagaggagaagcccctgctgcccggccagaccccagaggccgccaagacccacagcgtggagaccccctacggctctgtgaccttcaccgtgtatggcacccccaagcccaagaggcctgccatcctgacctaccatgatgtgggcctgaactacaagagctgcttccagcccctcttccagtttgaggacatgcaggagatcatccagaactttgtgcgggtgcacgtggatgcccctggcatggaggagggcgcccctgtgttccccctgggctaccagtaccccagcctggaccagctggccgacatgatcccctgtgtgctgcagtacctgaacttcagcaccatcattggagtgggcgtgggcgctggggcctacatcctggcccgctatgccctgaaccacccagacacagtggagggcctggtgctgatcaacatcgaccccaatgccaagggctggatggactgggccgcccacaagctgaccggcctgaccagcagcatccctgagatgatcctgggccacctgttcagccaggaggagctgagcggcaacagcgagctgatccagaagtacagaaacatcatcacccacgcccccaacctggacaacatcgagctgtactggaactag

SEQ ID NO: 20733 - DNA, 1116 bp, synthetic construct; identical to SEQ ID NO: 20701
  misc_feature 1..1116: note = Description of Artificial Sequence: Synthetic coding sequence
  source 1..1116: mol_type = other DNA

SEQ ID NO: 20734 - DNA, 432 bp, synthetic construct
  misc_feature 1..432: note = Description of Artificial Sequence: Synthetic coding sequence
  source 1..432: mol_type = other DNA
atggccgagctgcaggaggtgcagatcacagaggagaagcccctgctgcccggccagaccccagaggccgccaagacccacagcgtggagaccccctacggctctgtgaccttcaccgtgtatggcacccccaagcccaagaggcctgccatcctgacctaccatgatgtgggcctgaactacaagagctgcttccagcccctcttccagtttgaggacatgcaggagatcatccagaactttgtgcgggtgcacgtggatgcccctggcatggaggagggcgcccctgtgttccccctgggctaccagtaccccagcctggaccagctggccgacatgatcccctgtgtgctgcagtacctgaacttcagcaccatcattggagtgggcgtgggcgctggggcctacatcctggcccgctatgccctgtag

SEQ ID NO: 20735 - DNA, 483 bp, synthetic construct
  misc_feature 1..483: note = Description of Artificial Sequence: Synthetic coding sequence
  source 1..483: mol_type = other DNA
atggccgagctgcaggaggtgcagatcacagaggagaagcccctgctgcccggccagaccccagaggccgccaagacccacagcgtggagaccccctacggctctgtgaccttcaccgtgtatggcacccccaagcccaagaggcctgccatcctgacctaccatgatgtgggcctgaactacaagagctgcttccagcccctcttccagtttgaggacatgcaggagatcatccagaactttgtgcgggtgcacgtggatgcccctggcatggaggagggcgcccctgtgttccccctgggctaccagtaccccagcctggaccagctggccgacatgatcccctgtgtgctgcagtacctgaacttcagcaccatcattggagtgggcgtgggcgctggggcctacatcctggcccgctatgccctgaaccacccagacacagtggagggcctggtgctgatcaacatcgaccccaactag

SEQ ID NO: 20736 - DNA, 426 bp, synthetic construct
  misc_feature 1..426: note = Description of Artificial Sequence: Synthetic coding sequence
  source 1..426: mol_type = other DNA
atggccgagctgcaggaggtgcagatcacagaggagaagcccctgctgcccggccagaccccagaggccgccaaggaggccgagctggccgcccgcatcctgctggaccagggccagacccacagcgtggagaccccctacggctctgtgaccttcaccgtgtatggcacccccaagcccaagaggcctgccatcctgacctaccatgatgtgggcctgaactacaagagctgcttccagcccctcttccagtttgaggacatgcaggagatcatccagaactttgtgcgggtgcacgtggatgcccctggcatggaggagggcgcccctgtgttccccctgggctaccagtaccccagcctggaccagctggccgacatgatcccctgtgtgctgcagtacctgaacttcagcaccatcatctag

SEQ ID NO: 20737 - DNA, 357 bp, synthetic construct
  misc_feature 1..357: note = Description of Artificial Sequence: Synthetic coding sequence
  source 1..357: mol_type = other DNA
atggccgagctgcaggaggtgcagatcacagaggagaagcccctgctgcccggccagaccccagaggccgccaaggaggccgagctggccgcccgcatcctgctggaccagggccagacccacagcgtggagaccccctacggctctgtgaccttcaccgtgtatggcacccccaagcccaagaggcctgccatcctgacctaccatgatgtgggcctgaactacaagagctgcttccagcccctcttccagtttgaggacatgcaggagatcatccagaactttgtgcgggtgcacgtggatgcccctggcatggaggagggcgcccctgtgttccccctgggctaccagtactag

SEQ ID NO: 20738 - DNA, 423 bp, synthetic construct
  misc_feature 1..423: note = Description of Artificial Sequence: Synthetic coding sequence
  source 1..423: mol_type = other DNA
atggccgagctgcaggaggtgcagatcacagaggagaagcccctgctgcccggccagaccccagaggccgccaaggaggccgagctggccgcccgcatcctgctggaccagggccagacccacagcgtggagaccccctacggctctgtgaccttcaccgtgtatggcacccccaagcccaagaggcctgccatcctgacctaccatgatgtgggcctgaactacaagagctgcttccagcccctcttccagtttgaggacatgcaggagatcatccagaactttgtgcgggtgcacgtggatgcccctggcatggaggagggcgcccctgtgttccccctgggctaccagtaccccagcctggaccagctggccgacatgatcccctgtgtgctgcagtacctgaacttcagcaccatctag

SEQ ID NO: 20739 - DNA, 435 bp, synthetic construct
  misc_feature 1..435: note = Description of Artificial Sequence: Synthetic coding sequence
  source 1..435: mol_type = other DNA
atggccgagctgcaggaggtgcagatcacagaggagaagcccctgctgcccggccagaccccagaggccgccaagacccacagcgtggagaccccctacggctctgtgaccttcaccgtgtatggcacccccaagcccaagaggcctgccatcctgacctaccatgatgtgggcctgaactacaagagctgcttccagcccctcttccagtttgaggacatgcaggagatcatccagaactttgtgcgggtgcacgtggatgcccctggcatggaggagggcgcccctgtgttccccctgggctaccagtaccccagcctggaccagctggccgacatgatcccctgtgtgctgcagtacctgaacttcagcaccatcattggagtgggcgtgggcgctggggcctacatcctggcccgctatgccctgaactag

SEQ ID NO: 20740 - DNA, 462 bp, synthetic construct; identical to SEQ ID NO: 20727
  misc_feature 1..462: note = Description of Artificial Sequence: Synthetic coding sequence
  source 1..462: mol_type = other DNA

SEQ ID NO: 20741 - DNA, 675 bp, synthetic construct
  misc_feature 1..675: note = Description of Artificial Sequence: Synthetic coding sequence
  source 1..675: mol_type = other DNA
atggccgagctgcaggaggtgcagatcacagaggagaagcccctgctgcccggccagaccccagaggccgccaagacccacagcgtggagaccccctacggctctgtgaccttcaccgtgtatggcacccccaagcccaagaggcctgccatcctgacctaccatgatgtgggcctgaactacaagagctgcttccagcccctcttccagtttgaggacatgcaggagatcatccagaactttgtgcgggtgcacgtggatgcccctggcatggaggagggcgcccctgtgttccccctgggctaccagtaccccagcctggaccagctggccgacatgatcccctgtgtgctgcagtacctgaacttcagcaccatcattggagtgggcgtgggcgctggggcctacatcctggcccgctatgccctgaaccacccagacacagtggagggcctggtgctgatcaacatcgaccccaatgccaagggctggatggactgggccgcccacaagctgaccggcctgaccagcagcatccctgagatgatcctgggccacctgttcagccaggaggagctgagcggcaacagcgagctgatccagaagtacagaaacatcatcacccacgcccccaacctggacaacatcgagctgtactggaacagctacaactag

SEQ ID NO: 20742 - DNA, 453 bp, synthetic construct
  misc_feature 1..453: note = Description of Artificial Sequence: Synthetic coding sequence
  source 1..453: mol_type = other DNA
atggccgagctgcaggaggtgcagatcacagaggagaagcccctgctgcccggccagaccccagaggccgccaagacccacagcgtggagaccccctacggctctgtgaccttcaccgtgtatggcacccccaagcccaagaggcctgccatcctgacctaccatgatgtgggcctgaactacaagagctgcttccagcccctcttccagtttgaggacatgcaggagatcatccagaactttgtgcgggtgcacgtggatgcccctggcatggaggagggcgcccctgtgttccccctgggctaccagtaccccagcctggaccagctggccgacatgatcccctgtgtgctgcagtacctgaacttcagcaccatcattggagtgggcgtgggcgctggggcctacatcctggcccgctatgccctgaaccacccagacacagtggagtag

SEQ ID NO: 20743 - DNA, 384 bp, synthetic construct
  misc_feature 1..384: note = Description of Artificial Sequence: Synthetic coding sequence
  source 1..384: mol_type = other DNA
atggccgagctgcaggaggtgcagatcacagaggagaagcccctgctgcccggccagaccccagaggccgccaagacccacagcgtggagaccccctacggctctgtgaccttcaccgtgtatggcacccccaagcccaagaggcctgccatcctgacctaccatgatgtgggcctgaactacaagagctgcttccagcccctcttccagtttgaggacatgcaggagatcatccagaactttgtgcgggtgcacgtggatgcccctggcatggaggagggcgcccctgtgttccccctgggctaccagtaccccagcctggaccagctggccgacatgatcccctgtgtgctgcagtacctgaacttcagcaccatcatctag

SEQ ID NO: 20744 - DNA, 450 bp, synthetic construct
  misc_feature 1..450: note = Description of Artificial Sequence: Synthetic coding sequence
  source 1..450: mol_type = other DNA
atggccgagctgcaggaggtgcagatcacagaggagaagcccctgctgcccggccagaccccagaggccgccaagacccacagcgtggagaccccctacggctctgtgaccttcaccgtgtatggcacccccaagcccaagaggcctgccatcctgacctaccatgatgtgggcctgaactacaagagctgcttccagcccctcttccagtttgaggacatgcaggagatcatccagaactttgtgcgggtgcacgtggatgcccctggcatggaggagggcgcccctgtgttccccctgggctaccagtaccccagcctggaccagctggccgacatgatcccctgtgtgctgcagtacctgaacttcagcaccatcattggagtgggcgtgggcgctggggcctacatcctggcccgctatgccctgaaccacccagacacagtgtag

SEQ ID NO: 20745 - DNA, 1128 bp, synthetic construct
  misc_feature 1..1128: note = Description of Artificial Sequence: Synthetic coding sequence
  source 1..1128: mol_type = other DNA
atggatgagctgcaggatgtgcagctgacagagatcaagcccctgctgaatgacaagaatggcaccaggaacttccaggactttgactgccaggagcatgacatcgagaccacccatggagtggtgcacgtgaccatccggggcctgcccaagggcaacagacctgtgatcctgacctaccatgacatcggcctgaaccacaagagctgcttcaatgccttcttcaactttgaggacatgcaggagatcacccagcactttgctgtgtgccacgtggatgcccctggccagcaggagggcgcccccagcttccccaccggctaccagtaccccaccatggatgagctggccgagatgctgccccctgtgctgacccacctgagcctgaagagcatcattggaattggagtgggcgctggggcctacatcctgagcagatttgccctgaaccaccctgagctggtggagggcctggtgctgatcaacgtggacccctgtgccaagggctggattgactgggccgccagcaagctgagcggcctgaccaccaacgtggtggacatcatcctggcccaccacttcggccaggaggagctgcaggccaacctggacctgatccagacctacaggatgcacatcgcccaggacatcaaccaggacaacctgcagctgttcctgaacagctacaacggccggcgggacctggagattgagcggcccatcctgggccagaatgacaacaagagcaagaccctgaagtgcagcaccctgctggtggtgggggacaacagccctgctgtggaggccgtggtggagtgcaacagccggctgaaccccatcaacaccaccctgctgaagatggctgactgtggcggcctgccccaggtggtgcagcccgggaagctgacagaggccttcaagtacttcctgcagggcatgggctacatccccagcgcctccatgacccggctggcccggagcaggacccacagcaccagcagcagcctgggcagcggggagagccccttcagccgctctgtgaccagcaaccagagtgatggcacccaggagagctgtgagagcccagatgtgctggacagacaccagaccatggaggtgtcctgctag

SEQ ID NO: 20746 - DNA, 1092 bp, synthetic construct
  misc_feature 1..1092: note = Description of Artificial Sequence: Synthetic coding sequence
  source 1..1092: mol_type = other DNA
atggatgagctgcaggatgtgcagctgacagagatcaagcccctgctgaatgacaaggagcatgacatcgagaccacccatggagtggtgcacgtgaccatccggggcctgcccaagggcaacagacctgtgatcctgacctaccatgacatcggcctgaaccacaagagctgcttcaatgccttcttcaactttgaggacatgcaggagatcacccagcactttgctgtgtgccacgtggatgcccctggccagcaggagggcgcccccagcttccccaccggctaccagtaccccaccatggatgagctggccgagatgctgccccctgtgctgacccacctgagcctgaagagcatcattggaattggagtgggcgctggggcctacatcctgagcagatttgccctgaaccaccctgagctggtggagggcctggtgctgatcaacgtggacccctgtgccaagggctggattgactgggccgccagcaagctgagcggcctgaccaccaacgtggtggacatcatcctggcccaccacttcggccaggaggagctgcaggccaacctggacctgatccagacctacaggatgcacatcgcccaggacatcaaccaggacaacctgcagctgttcctgaacagctacaacggccggcgggacctggagattgagcggcccatcctgggccagaatgacaacaagagcaagaccctgaagtgcagcaccctgctggtggtgggggacaacagccctgctgtggaggccgtggtggagtgcaacagccggctgaaccccatcaacaccaccctgctgaagatggctgactgtggcggcctgccccaggtggtgcagcccgggaagctgacagaggccttcaagtacttcctgcagggcatgggctacatccccagcgcctccatgacccggctggcccggagcaggacccacagcaccagcagcagcctgggcagcggggagagccccttcagccgctctgtgaccagcaaccagagtgatggcacccaggagagctgtgagagcccagatgtgctggacagacaccagaccatggaggtgtcctgctag

SEQ ID NO: 20747 - DNA, 843 bp, synthetic construct
  misc_feature 1..843: note = Description of Artificial Sequence: Synthetic coding sequence
  source 1..843: mol_type = other DNA
atggtgcaggagaccagcaggaccctgactgtgcgctaccagtaccccaccatggatgagctggccgagatgctgccccctgtgctgacccacctgagcctgaagagcatcatcggcatcggcgtgggcgctggggcctacatcctgagcagatttgccctgaaccaccctgagctggtggagggcctggtgctgatcaacgtggacccctgtgccaagggctggattgactgggccgccagcaagctgagcggcctgaccaccaacgtggtggacatcatcctggcccaccacttcggccaggaggagctgcaggccaacctggacctgatccagacctacaggatgcacatcgcccaggacatcaaccaggacaacctgcagctgttcctgaacagctacaatggaagaagagacctggagattgaaagacccatcctgggccagaatgacaacaagagcaagaccctgaagtgcagcaccctgctggtggtgggggacaacagccctgctgtggaggccgtggtggagtgcaacagccggctgaaccccatcaacaccaccctgctgaagatggctgactgtggcggcctgccccaggtggtgcagcccgggaagctgacagaggccttcaagtacttcctgcagggcatgggctacatccccagcgcctccatgacccggctggcccggagcaggacccacagcaccagcagcagcctgggcagcggggagagccccttcagccgctctgtgaccagcaaccagagtgatggcacccaggagagctgtgagagcccagatgtgctggacagacaccagaccatggaggtgtcctgctag

SEQ ID NO: 20748 - DNA, 816 bp, synthetic construct
  misc_feature 1..816: note = Description of Artificial Sequence: Synthetic coding sequence
  source 1..816: mol_type = other DNA
atgatccgctaccagtaccccaccatggatgagctggccgagatgctgccccctgtgctgacccacctgagcctgaagagcatcattggaattggagtgggcgctggggcctacatcctgagcagatttgccctgaaccaccctgagctggtggagggcctggtgctgatcaacgtggacccctgtgccaagggctggattgactgggccgccagcaagctgagcggcctgaccaccaacgtggtggacatcatcctggcccaccacttcggccaggaggagctgcaggccaacctggacctgatccagacctacaggatgcacatcgcccaggacatcaaccaggacaacctgcagctgttcctgaacagctacaacggccggcgggacctggagattgagcggcccatcctgggccagaatgacaacaagagcaagaccctgaagtgcagcaccctgctggtggtgggggacaacagccctgctgtggaggccgtggtggagtgcaacagccggctgaaccccatcaacaccaccctgctgaagatggctgactgtggcggcctgccccaggtggtgcagcccgggaagctgacagaggccttcaagtacttcctgcagggcatgggctacatccccagcgcctccatgacccggctggcccggagcaggacccacagcaccagcagcagcctgggcagcggggagagccccttcagccgctctgtgaccagcaaccagagtgatggcacccaggagagctgtgagagcccagatgtgctggacagacaccagaccatggaggtgtcctgctag

SEQ ID NO: 20749 - DNA, 420 bp, synthetic construct
  misc_feature 1..420: note = Description of Artificial Sequence: Synthetic coding sequence
  source 1..420: mol_type = other DNA
atgcctgagggccctgagctgcacctggccagccagtttgtgaatgaggcctgccgggccctggtgtttggaggctgtgtggagaagagctctgtgtccaggaaccctgaggtgccctttgagagcagcgcctaccgcatcagcgccagcgcccggggcaaggagctgcggctcatcctgagccccctgcccggggcccagccccagcaggagccccgggcccccaggggggccgccaccccctgccccccagccctgctgcacggccctgcctggcccccagcccggcccatgttccggggccacccccctgtgcggcccctgggcccctggggcaaggtggccgccggcccccgggccctgtgcctggccggcgtgcctgctgtgcagggagaatgtgccaccaagcccagcggctag

SEQ ID NO: 20750 - DNA, 1173 bp, synthetic construct
  misc_feature 1..1173: note = Description of Artificial Sequence: Synthetic coding sequence
  source 1..1173: mol_type = other DNA
atgcctgagggccctgagctgcacctggccagccagtttgtgaatgaggcctgccgggccctggtgtttggaggctgtgtggagaagagctctgtgtccaggaaccctgaggtgccctttgagagcagcgcctaccgcatcagcgccagcgcccggggcaaggagctgcggctcatcctgagccccctgcccggggcccagccccagcaggagcccctggccctggtgttccgcttcggcatgagcggcagcttccagctggtgccccgggaggagctgcccaggcatgcccacctgcgcttctacacagcccctcctggcccccggctggccctgtgctttgtggacatccgccgcttcggccgctgggacctgggcggcaagtggcagcccggccggggcccctgtgtgctgcaggagtaccagcagttccgggagaatgtgctgaggaacctggccgacaaggcctttgaccggcccatctgtgaggccctgctggaccagcgcttcttcaacggcatcggcaactacctgcgggcagagatcctgtaccgcctgaagatccccccatttgagaaggcccggtctgtgctggaggccctgcagcagcaccggcccagccctgagctgaccctgagccagaagatccgcaccaagctgcagaacccagacctgctggagctgtgccacagcgtgcccaaggaggtggtgcagctgggcggcaagggctacggcagcgagagcggggaggaggactttgctgccttccgggcctggctgcgctgctacggcatgcctggcatgagcagcctgcaggacagacatggccgcaccatctggttccagggcgaccccggccccctggcccccaagggcaggaagagcaggaagaagaagagcaaggccacccagctgagccctgaggacagagtggaggatgccctgccccccagcaaggcccccagcaggacccggcgggccaagagggacctgcccaagaggacagccacccagaggcctgagggcaccagcctgcagcaggaccctgaggcccccaccgtgcccaagaagggccgcaggaagggccggcaggccgccagcggccactgccggcccaggaaggtgaaggctgacatccccagcctggagcctgagggcaccagcgccagctag

SEQ ID NO: 20751 - DNA, 1173 bp, synthetic construct; identical to SEQ ID NO: 20750
  misc_feature 1..1173: note = Description of Artificial Sequence: Synthetic coding sequence
  source 1..1173: mol_type = other DNA

SEQ ID NO: 20752 - DNA, 999 bp, synthetic construct
  misc_feature 1..999: note = Description of Artificial Sequence: Synthetic coding sequence
  source 1..999: mol_type = other DNA
atgcctgagggccccctggtgaggaagttccaccacctggtgagcccctttgtgggccagcaggtggtgaagacaggaggcagcagcaagaagctgcagcctgccagcctgcagagcctgtggctgcaggacacccaggtgcacggcaagaagctgttcctgcgctttgacctggatgaggagatgggccccccaggcagcagccccaccccagagcccccccagaaggaggtgcagaaggagggcgctgctgaccccaagcaggtgggggagcccagcggccagaagaccctggatggcagcagccgctctgctgagctggtgccccagggagaagatgattctgagtacctggagagagatgccccagctggagatgctggccgctggctgcgggtgtcctttggcctgtttggatctgtgtgggtgaatgacttcagccgggccaagaaggccaacaagagaggagactggagggaccccagcccccggctggtgctgcactttggaggcggcggcttcctggccttctacaactgccagctgtcctggagcagcagccctgtggtgacccccacctgtgacatcctgtctgagaagttccaccggggccaggccctggaggccctgggccaggcccagcctgtgtgctacaccctgctggaccagcgctacttcagcggcctgggcaacatcatcaagaatgaggccctgtacagagctggcatccaccccctgagcctgggctctgtgctgagcgccagccggcgggaggtgctggtggaccacgtggtggagttcagcacagcctggctgcagggcaagttccagggccggccccagcacacccaggtgtaccagaaggagcagtgcccagctggccaccaggtgatgaaggaggccttcggcccagaagatggcctgcagaggctgacctggtggtgcccccagtgccagccccagctgtctgaggagcctgagcagtgccagttctcctag

SEQ ID NO: 20753 - DNA, 954 bp, synthetic construct
  misc_feature 1..954: note = Description of Artificial Sequence: Synthetic coding sequence
  source 1..954: mol_type = other DNA
atgcctgagggccccctggtgaggaagttccaccacctggtgagcccctttgtgggccagcaggtggtgaagacaggaggcagcagcaagaagctgcagcctgccagcctgcagagcctgtggctgcaggacacccaggtgcacggcaagaagctgttcctgcgctttgacctggatgaggagatgggccccccaggcagcagccccaccccagagcccccccagaaggaggtgcagaagaagaccctggatggcagcagccgctctgctgagctggtgccccagggagaagatgacagcgagtacctggagagagatgccccagctggagatgctggccgctggctgcgggtgtcctttggcctgtttggatctgtgtgggtgaatgacttcagccgggccaagaaggccaacaagagaggagactggagggaccccagcccccggctggtgctgcactttggaggcggcggcttcctggccttctacaactgccagctgtcctggagcagcagccctgtggtgacccccacctgtgacatcctgtctgagaagttccaccggggccaggccctggaggccctgggccaggcccagcctgtgtgctacaccctgctggaccagcgctacttcagcggcctgggcaacatcatcaagaatgaggccctgtaccgggccggcatccaccccctgagcctgggctctgtgctgagcgccagcagaagagaggtgctggtggaccacgtggtggagttcagcacagcctggctgcagggcaagttccagggccggccccagcacacccaggtgtaccagaaggagcagtgcccagctggccaccaggtgatgaaggaggcctttggaccagaagatggcctgcagaggctgacctggtggtgcccccagtgccagccccagctgtctgaggagcctgagcagtgccagttctcctag

SEQ ID NO: 20754 - DNA, 816 bp, synthetic construct
  misc_feature 1..816: note = Description of Artificial Sequence: Synthetic coding sequence
  source 1..816: mol_type = other DNA
atgggccccccaggcagcagccccaccccagagcccccccagaaggaggtgcagaaggagggcgctgctgaccccaagcaggtgggggagcccagcggccagaagaccctggatggcagcagccgctctgctgagctggtgccccagggagaagatgacagcgagtacctggagagagatgccccagctggagatgctggccgctggctgcgggtgtcctttggcctgtttggatctgtgtgggtgaatgacttcagccgggccaagaaggccaacaagagaggagactggagggaccccagcccccggctggtgctgcactttggaggcggcggcttcctggccttctacaactgccagctgtcctggagcagcagccctgtggtgacccccacctgtgacatcctgtctgagaagttccaccggggccaggccctggaggccctgggccaggcccagcctgtgtgctacaccctgctggaccagcgctacttcagcggcctgggcaacatcatcaagaatgaggccctgtaccgggccggcatccaccccctgagcctgggctctgtgctgagcgccagcagaagagaggtgctggtggaccacgtggtggagttcagcacagcctggctgcagggcaagttccagggccggccccagcacacccaggtgtaccagaaggagcagtgcccagctggccaccaggtgatgaaggaggcctttggaccagaagatggcctgcagaggctgacctggtggtgcccccagtgccagccccagctgtctgaggagcctgagcagtgccagttctcctag

SEQ ID NO: 20755 - DNA, 999 bp, synthetic construct; identical to SEQ ID NO: 20752
  misc_feature 1..999: note = Description of Artificial Sequence: Synthetic coding sequence
  source 1..999: mol_type = other DNA

SEQ ID NO: 20756 - DNA, 999 bp, synthetic construct; identical to SEQ ID NO: 20752
  misc_feature 1..999: note = Description of Artificial Sequence: Synthetic coding sequence
  source 1..999: mol_type = other DNA

SEQ ID NO: 20757 - DNA, 651 bp, synthetic construct
  misc_feature 1..651: note = Description of Artificial Sequence: Synthetic coding sequence
  source 1..651: mol_type = other DNA
atgcctgagggccccctggtgaggaagttccaccacctggtgagcccctttgtgggccagcaggtggtgaagacaggaggcagcagcaagaagctgcagcctgccagcctgcagagcctgtggctgcaggacacccaggtgcggctggtgctgcactttggaggcggcggcttcctggccttctacaactgccagctgtcctggagcagcagccctgtggtgacccccacctgtgacatcctgtctgagaagttccaccggggccaggccctggaggccctgggccaggcccagcctgtgtgctacaccctgctggaccagcgctacttcagcggcctgggcaacatcatcaagaatgaggccctgtacagagctggcatccaccccctgagcctgggctctgtgctgagcgccagccggcgggaggtgctggtggaccacgtggtggagttcagcacagcctggctgcagggcaagttccagggccggccccagcacacccaggtgtaccagaaggagcagtgcccagctggccaccaggtgatgaaggaggccttcggcccagaagatggcctgcagaggctgacctggtggtgcccccagtgccagccccagctgtctgaggagcctgagcagtgccagttctcctag

SEQ ID NO: 20758 - DNA, 1818 bp, synthetic construct
  misc_feature 1..1818: note = Description of Artificial Sequence: Synthetic coding sequence
  source 1..1818: mol_type = other DNA
atggtggagggccctggctgcaccctgaatggagagaagatccgggcccgggtgctgcccggccaggccgtgactggagtgcggggcagcgccctgcggagcctgcagggccgggccctgcggctggccgccagcacagtggtggtgagcccccaggccgccgccctgaacaatgacagcagccagaatgtgctgagcctcttcaacggctacgtgtacagcggcgtggagaccctgggcaaggagctgttcatgtacttcggccccaaggccctgcgcatccacttcggcatgaagggcttcatcatgatcaaccccctggagtacaagtacaagaatggagccagccctgtgctggaggtgcagctgaccaaggacctgatctgcttctttgacagctctgtggagctgaggaacagcatggagagccagcagaggatccgcatgatgaaggagctggatgtgtgcagccctgagttctccttcctgcgggcagagagcgaggtgaagaagcagaagggccgcatgctgggagatgtgctgatggaccagaatgtgctgcccggggtgggcaacatcatcaagaatgaggccctgtttgacagcggcctgcaccctgctgtgaaggtgtgccagctgacagatgagcagatccaccacctgatgaagatgatccgggacttcagcatcctcttctaccgctgcaggaaggccggcctggccctgagcaagcactacaaggtgtacaagaggcccaactgtggccagtgccactgccgcatcaccgtgtgccgctttggagacaacaacaggatgacctacttctgcccccactgccagaaggagaacccccagcacgtggacatctgcaagctgcccaccaggaacaccatcatctcctggaccagcagccgggtggaccacgtgatggacagcgtggccaggaagtctgaggagcactggacctgtgtggtgtgcaccctcatcaacaagcccagcagcaaggcctgtgatgcctgcctgaccagccggcccatcgacagcgtgctgaagtctgaggagaacagcacagtgttcagccacctgatgaagtacccctgcaacaccttcggcaagccccacacagaggtgaagatcaacaggaagacagccttcggcaccaccaccctggtgctgacagacttcagcaacaagagcagcaccctggagaggaagaccaagcagaaccagatcctggatgaggagttccagaacagccccccagcctctgtgtgcctgaatgacatccagcaccccagcaagaagaccaccaatgacatcacccagcccagcagcaaggtgaacatcagccccaccatcagcagcgagagcaagctgttcagccctgcccacaagaagcccaagacagcccagtacagcagccctgagctgaagagctgcaaccctggctacagcaacagcgagctgcagatcaacatgacagatggccccaggaccctgaacccagacagcccccgctgcagcaagcacaaccggctgtgcatcctgcgggtggtgggcaaggatggagagaacaagggccggcagttctacgcctgccccctgccccgggaggcccagtgtggcttctttgagtgggccgacctgtccttccccttctgcaaccacggcaagaggagcaccatgaagacagtgctgaagattggccccaacaacgggaagaacttctttgtgtgccccctgggcaaggagaagcagtgcaacttcttccagtgggccgagaatggacctggcatcaagatcatccctggctgctag

SEQ ID NO: 20759 - DNA, 1743 bp, synthetic construct
  misc_feature 1..1743: note = Description of Artificial Sequence: Synthetic coding sequence
  source 1..1743: mol_type = other DNA
atgcctggctggccctggggcctgctgctgacagctggcaccctgtttgctgccctgagccctggccccccagccccagctgacccctgccatgatgagggcggggccccccggggctgtgtgcccggcctggtgaatgctgccctgggccgggaggtgctggccagcagcacctgtggccggcctgccacccgggcctgtgatgccagtgacccccggcgggcccacagccctgccctgctgaccagccctgggggcacagccagccccctgtgctggaggtctgagagcctgccccgggcccccctgaatgtgaccctgactgtgcccctgggcaaggcctttgagctggtgtttgtgtccctgcgcttctgcagcgcccccccagcctctgtggccctgctgaagagccaggaccacggccgctcctgggcccccctgggcttcttcagcagccactgtgacctggactatggccgcctgcctgccccagccaacggccctgctggccctggccctgaggccctgtgcttccctgcccccctggcccagccagatggcagcggcctgctggccttctccatgcaggacagcagccccccaggcctggacctggacagcagccctgtgctgcaggactgggtgacagccacagatgtgcgggtggtgctgacccggcccagcacagctggggacccccgggacatggaggccgtggtgccctacagctatgctgccacagacctgcaggtgggcggccgctgcaagtgcaatggccacgccagccgctgcctgctggacacccagggccacctgatctgtgactgccgccacggcacagagggccctgactgtggccgctgcaagcccttctactgtgaccggccctggcagagggccacagcccgggagagccacgcctgcctggcctgcagctgcaatggccacgcccggcgctgccgcttcaacatggagctgtaccgcctgagcggccgccgcagcggcggcgtgtgcctgaactgccgccacaacacagctggccgccactgccactactgccgggagggcttctacagagatcctggccgggccctgagtgaccggcgggcctgccgggcctgtgactgccaccctgtgggcgccgccggcaagacctgcaaccagaccaccggccagtgcccctgcaaggatggagtgacaggcctgacctgcaacagatgtgcccctggcttccagcagagccgcagccctgtggccccctgtgtgaagacccccatccctggccccacagaggacagcagccctgtgcagccccaggactgtgacagccactgcaagccagcccggggcagctaccgcatcagcctgaagaagttctgcaagaaggactatgctgtgcaggtggccgtgggcgcccggggggaggcccggggggcctggacccgcttccctgtggccgtgctggccgtgttccgctctggagaggagcgggcccggcggggcagcagcgccctgtgggtgcctgctggagatgctgcctgtggctgcccccggctgctgcctggaagacgctacctgctgctgggcggcggccctggagctgctgctgggggcgccggcggccggggccctggcctgattgctgcccggggcagcctggtgctgccctggagagatgcctggacccggcggctgcggcggctgcagaggcgggagcggcggggccgctgcagcgctgcctag

SEQ ID NO: 20760 - DNA, 2547 bp, synthetic construct
  misc_feature 1..2547: note = Description of Artificial Sequence: Synthetic coding sequence
  source 1..2547: mol_type = other DNA
ctcttctgctttgtgttttctgtgtccctgcaggtggacatcgtgcccagccagggcgagatctctgtgggggagagcaagttcttcctgtgccaggtggccggagatgccaaggacaaggacatctcctggttcagccccaacggggagaagctgacccccaaccagcagaggatctctgtggtgtggaatgatgacagcagcagcaccctgaccatctacaatgccaacattgatgatgctggcatctacaagtgtgtggtgactggagaagatggcagcgagagcgaggccaccgtgaatgtgaagatcttccagaagctgatgttcaagaatgcccccaccccccaggagttccgggagggagaagatgctgtgattgtgtgtgatgtggtgagcagcctgccccccaccatcatctggaagcacaagggcagagatgtgatcctgaagaaggatgtgcgcttcatcgtgctgagcaacaactacctgcagatccggggcatcaagaagacagatgagggcacctaccgctgtgagggccgcatcctggcccggggggagatcaacttcaaggacatccaggtgattgtgaatgtgccccccaccatccaggcccggcagaacatcgtgaatgccacagccaacctgggccagagcgtgaccctggtgtgtgatgctgagggcttccctgagcccaccatgtcctggaccaaggatggagagcagatcgagcaggaggaggatgatgagaagtacatcttcagtgatgacagcagccagctgaccatcaagaaggtggacaagaatgatgaagctgagtacatctgcatcgccgagaacaaggccggggagcaggatgccaccatccacctgaaggtgtttgccaagcccaagatcacctacgtggagaaccagacagccatggagctggaggagcaggtgaccctgacctgtgaggccagcggggaccccatccccagcatcacctggaggaccagcaccaggaacatcagcagcgaggagaaggcctcctggaccaggcctgagaagcaggagaccctggatggccacatggtggtgcgcagccacgcccgggtgagcagcctgaccctgaagagcatccagtacacagatgctggggagtacatctgcacagccagcaacaccatcggccaggacagccagagcatgtacctggaggtgcagtatgcccccaagctgcagggccctgtggccgtgtacacctgggagggcaaccaggtgaacatcacctgtgaggtgtttgcctaccccagcgccaccatctcctggttcagagatggccagctgctgcccagcagcaactacagcaacatcaagatctacaacacccccagcgccagctacctggaggtgaccccagacagtgaaaatgactttggaaactacaactgcacagctgtgaacagaattggccaggagagcctggagttcatcctggtgcaggccgacacccccagcagccccagcattgaccaggtggagccctacagcagcacagcccaggtgcagtttgatgagcctgaggccactggaggagtgcccatcctgaagtacaaggccgagtggagggctgtgggggaggaggtgtggcacagcaagtggtatgatgccaaggaggcctccatggagggcatcgtgaccatcgtgggcctgaagccagagaccacctatgctgtgcggctggccgccctgaatggcaagggcctgggggagatctctgctgccagcgagttcaagacccagcctgtgcctggagagcccagcgcccccaagctggagggccagatgggagaagatggcaacagcatcaaggtgaacctgatcaagcaggatgatggcggcagccccatccgccactacctggtgcgctaccgggccctgagcagcgagtggaagccagagatccggctgcccagcggcagtgaccacgtgatgctgaagagcctggactggaatgcagaatatgaggtgtatgtggtggccgagaaccagcagggcaagagcaaggccgcccactttgtgttccgcaccagcgcccagcccacagccatcccagccaacggcagccccaccagcggcctgagcactggagccatcgtgggcatcctgattgtcatctttgtgctgctgctggtggtggtggacatcacctgctacttcctgaacaagtgtggcctcttcatgtgcatcgctgtgaacctgtgtgggaaggccggccctggggccaagggcaaggacatggaggagggcaaggccgccttcagcaaggatgagagcaaggagcccatcgtggaggtgaggacagaggaggagaggacccccaaccatgatggcggcaagcacacagagcccaatgagaccacccccctgacagagcctgagaagggccctgtggaggccaagccagagtgccaggagacagagaccaagccagccccagctgaggtgaagacagtgcccaatgatgccacccagaccaaggaaaatgaaagcaaggcctag

SEQ ID NO: 20761 - DNA, 1995 bp, synthetic construct
  misc_feature 1..1995: note = Description of Artificial Sequence: Synthetic coding sequence
  source 1..1995: mol_type = other DNA
atcaccatcagagatgagatctgggtgctcttctgctttgtgttttctgtgtccctgcaggtggacatcgtgcccagccagggcgagatctctgtgggggagagcaagttcttcctgtgccaggtggccggagatgccaaggacaaggacatctcctggttcagccccaatggagagaagctgacccccaaccagcagaggatctctgtggtgtggaatgatgacagcagcagcaccctgaccatctacaatgccaacattgatgatgctggcatctacaagtgtgtggtgactggagaagatggcagcgagagcgaggccaccgtgaatgtgaagatcttccagaagctgatgttcaagaatgcccccaccccccaggagttccgggagggggaggatgctgtgattgtgtgtgatgtggtgagcagcctgccccccaccatcatctggaagcacaagggcagagatgtgatcctgaagaaggatgtgcgcttcatcgtgctgagcaacaactacctgcagatccggggcatcaagaagacagatgagggcacctaccgctgtgagggccgcatcctggcccggggggagatcaacttcaaggacatccaggtgattgtgaatgtgccccccaccatccaggcccggcagaacatcgtgaatgccacagccaacctgggccagagcgtgaccctggtgtgtgatgctgagggcttccctgagcccaccatgtcctggaccaaggatggagagcagatcgagcaggaggaggatgatgagaagtacatcttcagtgatgacagcagccagctgaccatcaagaaggtggacaagaatgatgaggccgagtacatctgcatcgccgagaacaaggccggggagcaggatgccaccatccacctgaaggtgtttgccaagcccaagatcacctacgtggagaaccagacagccatggagctggaggagcaggtgaccctgacctgtgaggccagcggggaccccatccccagcatcacctggaggaccagcaccaggaacatcagcagcgaggagaaggcctcctggaccaggcctgagaagcaggagaccctggatggccacatggtggtgcgcagccacgcccgggtgagcagcctgaccctgaagagcatccagtacacagatgctggggagtacatctgcacagccagcaacaccatcggccaggacagccagagcatgtacctggaggtgcagtatgcccccaagctgcagggccctgtggccgtgtacacctgggagggcaaccaggtgaacatcacctgtgaggtgtttgcctaccccagcgccaccatctcctggttcagagatggccagctgctgcccagcagcaactacagcaacatcaagatctacaacaccccatctgccagctacctggaggtgaccccagattctgaaaatgactttggaaactacaactgcacagctgtgaaccgcatcggccaggagagcctggagttcatcctggtgcaggccgacacccccagcagccccagcattgaccaggtggagccctacagcagcacagcccaggtgcagtttgatgagcctgaggccaccggcggcgtgcccatcctgaagtacaaggccgagtggagggctgtgggggaggaggtgtggcacagcaagtggtatgatgccaaggaggcctccatggagggcatcgtgaccatcgtgggcctgaagccagagaccacctatgctgtgcggctggccgccctgaatggcaagggcctgggggagatctctgctgccagcgagttcaagacccagcctgtgcaggcccccccacccacagccagcgccagcagcagcacccctgtgcccctgagccccccagacaccacctggcccctgcctgccctggccaccacagagcccgccaagaacatcgcccagaaccactgctgcaacatgttccaggccggcctgcacaatgccctgatgaagtag

SEQ ID NO: 20762 - DNA, 942 bp, synthetic construct
  misc_feature 1..942: note = Description of Artificial Sequence: Synthetic coding sequence
  source 1..942: mol_type = other DNA
atggagggcatcgtgaccatcgtgggcctgaagccagagaccacctatgctgtgcggctggccgccctgaatggcaagggcctgggggagatctctgctgccagcgagttcaagacccagcctgtgcacagccccccacctccagccagcgccagcagcagcacccctgtgcccctgagccccccagacaccggggagcccagcgcccccaagctggagggccagatgggagaagatggcaacagcatcaaggtgaacctgatcaagcaggatgatggcggcagccccatccgccactacctggtgcgctaccgggccctgagcagcgagtggaagccagagatccggctgcccagcggcagtgaccacgtgatgctgaagagcctggactggaatgcagaatatgaggtgtatgtggtggccgagaaccagcagggcaagagcaaggccgcccactttgtgttccgcaccagcgcccagcccacagccatcccagccaacggcagccccaccagcggcctgagcactggagccatcgtgggcatcctgattgtcatctttgtgctgctgctggtggtggtggacatcacctgctacttcctgaacaagtgtggcctcttcatgtgcatcgctgtgaacctgtgtgggaaggccggccctggggccaagggcaaggacatggaggagggcaaggccgccttcagcaaggatgagagcaaggagcccatcgtggaggtgaggacagaggaggagaggacccccaaccatgatggcggcaagcacacagagcccaatgagaccacccccctgacagagcctgagaagggccctgtggaggccaagccagagtgccaggagacagagaccaagccagccccagctgaggtgaagacagtgcccaatgatgccacccagaccaaggaaaatgaaagcaaggcctag

SEQ ID NO: 20763 - DNA, 570 bp, synthetic construct
  misc_feature 1..570: note = Description of Artificial Sequence: Synthetic coding sequence
  source 1..570: mol_type = other DNA
atgacagagtacaagctggtggtggtgggcgctgggggcgtgggcaagagcgccctgaccatccagctgatccagaaccactttgtggatgaatatgaccccaccattgaagattcctacaggaagcaggtggtgattgatggagagacctgcctgctggacatcctggacacagctggccaggaggagtacagcgccatgagggaccagtacatgaggactggagagggcttcctgtgtgtgtttgccatcaacaacagcaagagctttgctgacatcaacctgtaccgggagcagatcaagagggtgaaggacagtgatgatgtgcccatggtgctggtgggcaacaagtgtgacctgcccaccaggacagtggacaccaagcaggcccacgagctggccaagagctatggcatccccttcatcgagaccagcgccaagacccggcagggcgtggaggatgccttctacaccctggtgcgggagatccggcagtacaggatgaagaagctgaacagcagtgatgatggcacccagggctgcatgggcctgccctgtgtggtgatgtag

SEQ ID NO: 20764 - DNA, 651 bp, synthetic construct
  misc_feature 1..651: note = Description of Artificial Sequence: Synthetic coding sequence
  source 1..651: mol_type = other DNA
atgcctggcaacctgatgagccagaccagcagagctgtgtccatctggaagtttcctgccaagctgggcaagacccacggccaccgggccctggaggccaccggcatgatgctgcgggtgctggtgggcgctgtgctgcctgccatgctgctggccgcccccccacccatcaacaagctggccctcttcccagacaagagcgcctggtgtgaggccaagaacatcacccagatcgtgggccacagcggctgtgaggccaagagcatccagaacagagcctgcctgggccagtgcttctcctacagcgtgcccaacaccttcccccagagcacagagagcctggtgcactgtgacagctgcatgcctgcccagagcatgtgggagatcgtgaccctggagtgccccggccacgaggaggtgccccgggtggacaagctggtggagaagatcctgcactgcagctgccaggcctgtgggaaggagcccagccatgagggcctgtctgtgtatgtgcagggagaagatggccctggcagccagcccggcacccacccccacccccacccccacccccaccctgggggccagaccccagagccagaagatcctcctggggccccccacacagaggaggagggcgcagaagattag

SEQ ID NO: 20765 - DNA, 546 bp, synthetic construct
  misc_feature 1..546: note = Description of Artificial Sequence: Synthetic coding sequence
  source 1..546: mol_type = other DNA
atgatgctgcgggtgctggtgggcgctgtgctgcctgccatgctgctggccgcccccccacccatcaacaagctggccctcttcccagacaagagcgcctggtgtgaggccaagaacatcacccagatcgtgggccacagcggctgtgaggccaagagcatccagaacagagcctgcctgggccagtgcttctcctacagcgtgcccaacaccttcccccagagcacagagagcctggtgcactgtgacagctgcatgcctgcccagagcatgtgggagatcgtgaccctggagtgccccggccacgaggaggtgccccgggtggacaagctggtggagaagatcctgcactgcagctgccaggcctgtgggaaggagcccagccatgagggcctgtctgtgtatgtgcagggagaagatggccctggcagccagcccggcacccacccccacccccacccccacccccaccctgggggccagaccccagagcctgaggaccccccaggggccccccacacagaggaggagggcgctgaggactag

SEQ ID NO: 20766 - DNA, 351 bp, synthetic construct
  misc_feature 1..351: note = Description of Artificial Sequence: Synthetic coding sequence
  source 1..351: mol_type = other DNA
atgatgctgcgggtgctggtgggcgctgtgctgcctgccatgctgctggccgcccccccacccatcaacaagctggccctcttcccagacaagagcgcctggtgtgaggccaagaacatcacccagatcgtgggccacagcggctgtgaggccaagagcatccagaacagagcctgcctgggccagtgcttctcctacagcgtgcccaacaccttcccccagagcacagagagcctggtgcactgtgacagctgcatgcctgcccagagcatgtgggagatcgtgaccctggagtgccccggccacgaggaggtgccccgggtggacaagctggtggagaagatcctgtag

SEQ ID NO: 20767 - DNA, 492 bp, synthetic construct
  misc_feature 1..492: note = Description of Artificial Sequence: Synthetic coding sequence
  source 1..492: mol_type = other DNA
atgctgcgggtgctggtgggcgctgtgctgcctgccatgctgctggccgcccccccacccatcaacaagctggccctcttcccagacaagagcgcctggtgtgaggccaagaacatcacccagatcgtgggccacagcggctgtgaggccaagagcatccagaacagagcctgcctgggccagtgcttctcctacagcgtgcccaacaccttcccccagagcacagagagcctggtgcactgtgacagctgcatgcctgcccagagcatgtgggagatcgtgaccctggagtgccccggccacgaggaggtgccccgggtggacaagctggtggagaagatcctgcactgcagctgccaggcctgtgggaaggagcccagccatgagggcctgtctgtgtatgtgcagggagaagatggccctggcagccagcccggcacccacccccacccccacccccacccccaccctgggggccagaccccagagtag

SEQ ID NO: 20768 - DNA, 354 bp, synthetic construct
  misc_feature 1..354: note = Description of Artificial Sequence: Synthetic coding sequence
  source 1..354: mol_type = other DNA
atgatgctgcgggtgctggtgggcgctgtgctgcctgccatgctgctggccgcccccccacccatcaacaagctggccctcttcccagacaagagcgcctggtgtgaggccaagaacatcacccagatcgtgggccacagcggctgtgaggccaagagcatccagaacagagcctgcctgggccagtgcttctcctacagcgtgcccaacaccttcccccagagcacagagagcctggtgcactgtgacagctgcatgcctgcccagagcatgtgggagatcgtgaccctggagtgccccggccacgaggaggtgccccgggtggacaagctggtggagaagatcctgcactag

SEQ ID NO: 20769 - DNA, 330 bp, synthetic construct
  misc_feature 1..330: note = Description of Artificial Sequence: Synthetic coding sequence
  source 1..330: mol_type = other DNA
atgatgctgcgggtgctggtgggcgctgtgctgcctgccatgctgctggccgcccccccacccatcaacaagctggccctcttcccagacaagagcgcctggtgtgaggccaagaacatcacccagatcgtgggccacagcggctgtgaggccaagagcatccagaacagagcctgcctgggccagtgcttctcctacagcgtgcccaacaccttcccccagagcacagagagcctggtgcactgtgacagctgcatgcctgcccagagcatgtgggagatcgtgaccctggagtgccccggccacgaggaggtgccccgggtggactag

SEQ ID NO: 20770 - DNA, 387 bp, synthetic construct
  misc_feature 1..387: note = Description of Artificial Sequence: Synthetic coding sequence
  source 1..387: mol_type = other DNA
atgatgctgcgggtgctggtgggcgctgtgctgcctgccatgctgctggccgcccccccacccatcaacaagctggccctcttcccagacaagagcgcctggtgtgaggccaagaacatcacccagatcgtgggccacagcggctgtgaggccaagagcatccagaacagagcctgcctgggccagtgcttctcctacagcgtgcccaacaccttcccccagagcacagagagcctggtgcactgtgacagctgcatgcctgcccagagcatgtgggagatcgtgaccctggagtgccccggccacgaggaggtgccccgggtggacaagctggtggagaagatcctgcactgcagctgccaggcctgtgggaaggagcccagctag

SEQ ID NO: 20771 - DNA, 543 bp, synthetic construct
  misc_feature 1..543: note = Description of Artificial Sequence: Synthetic coding sequence
  source 1..543: mol_type = other DNA
atgctgcgggtgctggtgggcgctgtgctgcctgccatgctgctggccgcccccccacccatcaacaagctggccctcttcccagacaagagcgcctggtgtgaggccaagaacatcacccagatcgtgggccacagcggctgtgaggccaagagcatccagaacagagcctgcctgggccagtgcttctcctacagcgtgcccaacaccttcccccagagcacagagagcctggtgcactgtgacagctgcatgcctgcccagagcatgtgggagatcgtgaccctggagtgccccggccacgaggaggtgccccgggtggacaagctggtggagaagatcctgcactgcagctgccaggcctgtgggaaggagcccagccatgagggcctgtctgtgtatgtgcagggagaagatggccctggcagccagcccggcacccacccccacccccacccccacccccaccctgggggccagaccccagagccagaagatcctcctggggccccccacacagaggaggagggcgcagaagattag

SEQ ID NO: 20772 - DNA, 8457 bp, synthetic construct
  misc_feature 1..8457: note = Description of Artificial Sequence: Synthetic coding sequence
  source 1..8457: mol_type = other DNA
atggccgcccacaggcctgtggagtgggtgcaggccgtggtgtccagatttgatgagcagctgcccatcaagacaggccagcagaacacccacaccaaggtgtccacagagcacaacaaggaatgtctcatcaacatcagcaagtacaagttcagcctggtgatcagcggcctgaccaccatcctgaagaatgtgaacaacatgaggatctttggagaggccgctgagaagaacctgtacctgagccagctgatcatcctggacaccctggagaagtgcctggccggccagcccaaggacaccatgaggctggatgagaccatgctggtgaagcagctgctgcctgagatctgccacttcctgcacacctgccgggagggcaaccagcacgccgctgagctgagaaattctgccagcggcgtgctcttcagcctgagctgcaacaacttcaatgctgtgttcagccgcatcagcacccggctgcaggagctgactgtgtgcagtgaagataatgtggatgtgcatgacatcgagctgctgcagtacatcaacgtggactgtgccaagctgaagaggctgctgaaggagacagccttcaagttcaaggccctgaagaaggtggcccagctggccgtcatcaacagcctggagaaggccttctggaactgggtggagaactacccagatgagttcaccaagctgtaccagatcccccagacagacatggccgagtgtgccgagaagctgtttgacctggtggatggctttgctgagagcaccaagaggaaggctgctgtgtggcccctgcagatcatcctgctgatcctgtgcccagagatcatccaggacatcagcaaggatgtggtggatgagaacaacatgaacaagaagctgttcctggacagcctgaggaaggccctggccggccacggcggcagccggcagctgacagaatctgctgccatcgcctgtgtgaagctgtgcaaggccagcacctacatcaactgggaggacaacagcgtcatcttcctgctggtgcagagcatggtggtggacctgaagaacctgctcttcaaccccagcaagcccttcagccggggcagccagcctgcagatgtggacctgatgattgactgcctggtgtcctgcttccgcatcagcccccacaacaaccagcacttcaagatctgcctggcccagaacagccccagcaccttccactacgtgctggtgaacagcctgcaccgcatcatcaccaacagcgccctggactggtggcccaagattgatgctgtgtactgccacagcgtggagctgaggaacatgtttggagagaccctgcacaaggctgtgcagggctgtggggcccacccagccatccgcatggcccccagcctgaccttcaaggagaaggtgaccagcctgaagttcaaggagaagcccacagacctggagaccaggagctacaagtacctgctgctgtccatggtgaagctgattcatgctgaccccaagctgctgctgtgcaaccccaggaagcagggccctgagacccagggcagcacagctgagctgatcaccggcctggtgcagctggtgccccagagccacatgcctgagatcgcccaggaggccatggaggccctgctggtgctgcaccagctggacagcattgacctgtggaacccagatgcccctgtggagaccttctgggagatcagcagccagatgctgttctacatctgcaagaagctgaccagccaccagatgctgagcagcacagagatcctgaagtggctgcgggagatcctgatctgcaggaacaagttcctgctgaagaacaagcaggccgacaggagcagctgccacttcctgctcttctacggcgtgggctgtgacatccccagcagcggcaacaccagccagatgtccatggaccacgaggagctgctgcggacccctggggccagcctgaggaagggcaagggcaacagctccatggattctgctgctggctgcagcggcaccccacccatctgccggcaggcccagaccaagctggaggtggccctgtacatgttcctgtggaacccagacacagaggccgtgctggtggccatgagctgcttccgccacctgtgtgaggaggccgacatccgctgtggggtggatgaggtgtctgtgcacaacctgctgcccaactacaacaccttcatggagtttgcctctgtgagcaacatgatgagcacaggccgggccgccctgcagaagagggtgatggccctgctgcggcgcatcgagcaccccacagctggcaacacagaggcctgggaggacacccacgccaagtgggagcaggccaccaagctgatcctgaactaccccaaggccaagatggaggatggccaggccgctgagagcctgcacaagaccatcgtgaagaggaggatgagccacgtgtctgggggcggcagcattgacctgagtgacacagacagcctgcaggagtggatcaacatgacaggcttcctgtgtgccctgggcggcgtgtgcctgcagcagaggagcaacagcggcctggccacctacagcccccccatgggccctgtgtctgagaggaagggctccatgatctctgtgatgagcagcgagggcaatgctgacacccctgtgtccaagttcatggaccggctgctgagcctgatggtgtgcaaccacgagaaggtgggcctgcagatccgcaccaacgtgaaggacctggtgggcctggagctgagccctgccctgtaccccatgctgttcaacaagctgaagaacaccatcagcaagttctttgacagccagggccaggtgctgctgacagacaccaacacccagtttgtggagcagaccatcgccatcatgaagaacctgctggacaaccacacagagggcagcagcgagcacctgggccaggccagcattgagaccatgatgctgaacctggtgcgctacgtgcgggtgctgggcaacatggtgcacgccatccagatcaagaccaagctgtgccagctggtggaggtgatgatggccaggagagatgacctgtccttctgccaggagatgaagttcaggaacaagatggtggagtacctgacagactgggtgatgggcaccagcaaccaggccgcagatgatgatgtgaagtgcctgacccgggacctggaccaggcctccatggaggccgtggtgtccctgctggccggcctgcccctgcagcctgaggagggagatggagtggagctgatggaggccaagagccagctgttcctgaagtacttcaccctcttcatgaacctgctgaatgactgcagcgaggtggaggatgagagcgcccagacaggaggcaggaagaggggcatgagccggcggctggccagcctgcggcactgcaccgtgctggccatgagcaacctgctgaatgccaacgtggacagcggcctgatgcacagcatcggcctgggctaccacaaggacctgcagacccgggccaccttcatggaggtgctgaccaagatcctgcagcagggcacagaatttgacaccctggccgagaccgtgctggccgacagatttgagcggctggtggagctggtgaccatgatgggagaccagggcgagctgcccatcgccatggccctggccaacgtggtgccctgcagccagtgggatgagctggcccgggtgctggtgaccctgtttgacagccgccacctgctgtaccagctgctgtggaacatgttcagcaaggaggtggagctggccgacagcatgcagaccctcttccggggcaacagcctggccagcaagatcatgaccttctgcttcaaggtgtatggagccacctacctgcagaagctgctggaccccctgctgagaattgtcatcaccagcagtgactggcagcacgtgtcctttgaggtggaccccacccggctggagcccagcgagagcctggaggagaaccagaggaacctgctgcagatgacagagaagttcttccacgccatcatcagcagcagcagcgagttccccccccagctgcggtctgtgtgccactgcctgtaccaggtggtgtcccagcgcttcccccagaacagcattggagctgtgggcagcgccatgttcctgcgcttcatcaacccagccatcgtgagcccctatgaagctggcatcctggacaagaagcccccaccccgcatcgagcggggcctgaagctgatgagcaagatcctgcagagcatcgccaaccacgtgctcttcaccaaggaggagcacatgaggcccttcaatgactttgtgaagagcaactttgatgctgcccggcgcttcttcctggacatcgccagtgactgccccaccagtgatgctgtgaaccacagcctgtccttcatcagtgatggaaatgtgctggccctgcaccggctgctgtggaacaaccaggagaagattggccagtacctgagcagcaacagagaccacaaggctgtgggccggcggccctttgacaagatggccaccctgctggcctacctgggccccccagagcacaagcctgtggccgacacccactggagcagcctgaacctgaccagcagcaagtttgaggagttcatgaccaggcaccaggtgcatgagaaggaggagttcaaggccctgaagaccctgagcatcttctaccaggccggcaccagcaaggccggcaaccccatcttctactacgtggcccggcgcttcaagacaggccagatcaacggggacctgctgatctaccacgtgctgctgaccctgaagccctactatgccaagccctatgagatcgtggtggacctgacccacacaggccccagcaaccgcttcaagacagacttcctgagcaagtggtttgtggtgtttcctggctttgcctatgacaacgtgtctgctgtgtacatctacaactgcaacagctgggtgcgggagtacaccaagtaccacgagcggctgctgaccggcctgaagggcagcaagaggctggtgttcatcgactgccctgggaagctggccgagcacatcgagcacgagcagcagaagctgcctgctgccaccctggccctggaggaggacctgaaggtgttccacaatgccctgaagctggcccacaaggacaccaaggtgtccatcaaggtgggcagcacagctgtgcaggtgaccagcgctgagaggaccaaggtgctgggccagagcgtcttcctgaatgacatctactatgccagcgagattgaggagatctgcctggtggatgagaaccagttcaccctgaccatcgccaaccagggcacccccctgaccttcatgcaccaggagtgtgaggccatcgtgcagagcatcatccacatccgcacccgctgggagctgagccagcctgacagcatcccccagcacaccaagatccggcccaaggatgtgcccggcaccctgctgaacatcgccctgctgaacctgggcagcagtgaccccagcctgcggtctgctgcctacaacctgctgtgtgccctgacctgcaccttcaacctgaagattgagggccagctgctggagaccagcggcctgtgcatcccagccaacaacaccctcttcatcgtgtccatcagcaagaccctggccgccaatgagccccacctgaccctggagttcctggaggagtgcatcagcggcttcagcaagagcagcattgagctgaagcacctgtgcctggagtacatgaccccctggctgagcaacctggtgcgcttctgcaagcacaatgatgatgccaagaggcagagggtgacagccatcctggacaagctgatcaccatgaccatcaatgagaagcagatgtaccccagcatccaggccaagatctggggcagcctgggccagatcacagacctgctggatgtggtgctggacagcttcatcaagaccagcgccactggaggcctgggcagcatcaaggccgaggtgatggctgacacagctgtggccctggccagcggaaatgtgaagctggtgagcagcaaggtgattggccgcatgtgcaagatcatcgacaagacctgcctgagccccacccccaccctggagcagcacctgatgtgggatgacatcgccatcctggcccgctacatgctgatgctgtccttcaacaacagcctggatgtggccgcccacctgccctacctgttccacgtggtgaccttcctggtggccaccggccccctgagcctgcgggccagcacccacggcctggtgatcaacatcatccacagcctgtgcacctgcagccagctgcacttcagcgaggagaccaagcaggtgctgcggctgagcctgacagagttcagcctgcccaagttctacctgctgtttggcatcagcaaggtgaagtctgctgctgtgattgccttccgcagcagctacagagaccgctccttcagccctggcagctatgagcgggagacctttgccctgaccagcctggagaccgtgacagaggccctgctggagatcatggaggcctgcatgagggacatccccacctgcaagtggctggaccagtggacagagctggcccagagatttgccttccagtacaaccccagcctgcagccccgggccctggtggtgtttggctgcatcagcaagagggtgagccacggccagatcaagcagatcatccgcatcctgagcaaggccctggagagctgcctgaagggccctgacacctacaacagccaggtgctgattgaggccaccgtgattgccctgaccaagctgcagcccctgctgaacaaggacagccccctgcacaaggccctcttctgggtggccgtggccgtgctgcagctggatgaggtgaacctgtacagcgctggaacagccctgctggagcagaacctgcacaccctggacagcctgcgcatcttcaatgacaagagccctgaggaggtgttcatggccatccggaaccccctggagtggcactgcaagcagatggaccactttgtgggcctgaacttcaacagcaacttcaactttgccctggtgggccacctgctgaagggctaccgccaccccagccctgccatcgtggccaggacagtgcgcatcctgcacaccctgctgaccctggtgaacaagcacaggaactgtgacaagtttgaggtgaacacccagagcgtggcctacctggccgccctgctgactgtgtctgaggaggtgcgcagccgctgcagcctgaagcacaggaagagcctgctgctgacagacatctccatggagaatgtgcccatggacacctaccccatccaccacggggaccccagctaccgcaccctgaaggagacccagccctggagcagccccaagggcagcgagggctacctggccgccacctaccccaccgtgggccagaccagcccccgggccaggaagtccatgagcctggacatgggccagcccagccaggccaacaccaagaagctgctgggcaccaggaagagctttgaccacctgatcagtgacaccaaggcccccaagaggcaggagatggagagcggcatcaccaccccacccaagatgagaagagtggccgagacagattatgagatggagacccagaggatcagcagcagccagcagcacccccacctgaggaaggtgtctgtgtctgagagcaatgtgctgctggatgaggaggtgctgacagaccccaagatccaggccctgctgctgactgtgctggccaccctggtgaagtacaccacagatgaatttgaccagaggatcctgtatgagtacctggccgaggcctctgtggtgttccccaaggtgtttcctgtggtgcacaacctgctggacagcaagatcaacaccctgctgagcctgtgccaggaccccaacctgctgaaccccatccatggaattgtgcagagcgtggtgtaccacgaggagagccccccccagtaccagaccagctacctgcagagctttggcttcaacggcctgtggaggtttgctggccccttcagcaagcagacccagatcccagactatgcagagctgattgtgaagttcctggatgccctgattgacacctacctgcccggcattgatgaggagaccagcgaggagagcctgctgacccccaccagcccctaccccccagccctgcagagccagctgagcatcacagccaacctgaacctgagcaacagcatgaccagcctggccaccagccagcacagccctggcatcgacaaggaaaatgtggagctgagccccaccaccggccactgcaacagcggccgcaccaggcatggcagcgccagccaggtgcagaagcagaggtctgctggcagcttcaagagaaattccatcaagaagatcgtgtag

SEQ ID NO: 20773 - DNA, 8520 bp, synthetic construct
  misc_feature 1..8520: note = Description of Artificial Sequence: Synthetic coding sequence
  source 1..8520: mol_type = other DNA
atggccgcccacaggcctgtggagtgggtgcaggccgtggtgtccagatttgatgagcagctgcccatcaagacaggccagcagaacacccacaccaaggtgtccacagagcacaacaaggaatgtctcatcaacatcagcaagtacaagttcagcctggtgatcagcggcctgaccaccatcctgaagaatgtgaacaacatgaggatctttggagaggccgctgagaagaacctgtacctgagccagctgatcatcctggacaccctggagaagtgcctggccggccagcccaaggacaccatgaggctggatgagaccatgctggtgaagcagctgctgcctgagatctgccacttcctgcacacctgccgggagggcaaccagcacgccgctgagctgagaaattctgccagcggcgtgctcttcagcctgagctgcaacaacttcaatgctgtgttcagccgcatcagcacccggctgcaggagctgactgtgtgcagtgaagataatgtggatgtgcatgacatcgagctgctgcagtacatcaacgtggactgtgccaagctgaagaggctgctgaaggagacagccttcaagttcaaggccctgaagaaggtggcccagctggccgtcatcaacagcctggagaaggccttctggaactgggtggagaactacccagatgagttcaccaagctgtaccagatcccccagacagacatggccgagtgtgccgagaagctgtttgacctggtggatggctttgctgagagcaccaagaggaaggctgctgtgtggcccctgcagatcatcctgctgatcctgtgcccagagatcatccaggacatcagcaaggatgtggtggatgagaacaacatgaacaagaagctgttcctggacagcctgaggaaggccctggccggccacggcggcagccggcagctgacagaatctgctgccatcgcctgtgtgaagctgtgcaaggccagcacctacatcaactgggaggacaacagcgtcatcttcctgctggtgcagagcatggtggtggacctgaagaacctgctcttcaaccccagcaagcccttcagccggggcagccagcctgcagatgtggacctgatgattgactgcctggtgtcctgcttccgcatcagcccccacaacaaccagcacttcaagatctgcctggcccagaacagccccagcaccttccactacgtgctggtgaacagcctgcaccgcatcatcaccaacagcgccctggactggtggcccaagattgatgctgtgtactgccacagcgtggagctgaggaacatgtttggagagaccctgcacaaggctgtgcagggctgtggggcccacccagccatccgcatggcccccagcctgaccttcaaggagaaggtgaccagcctgaagttcaaggagaagcccacagacctggagaccaggagctacaagtacctgctgctgtccatggtgaagctgattcatgctgaccccaagctgctgctgtgcaaccccaggaagcagggccctgagacccagggcagcacagctgagctgatcaccggcctggtgcagctggtgccccagagccacatgcctgagatcgcccaggaggccatggaggccctgctggtgctgcaccagctggacagcattgacctgtggaacccagatgcccctgtggagaccttctgggagatcagcagccagatgctgttctacatctgcaagaagctgaccagccaccagatgctgagcagcacagagatcctgaagtggctgcgggagatcctgatctgcaggaacaagttcctgctgaagaacaagcaggccgacaggagcagctgccacttcctgctcttctacggcgtgggctgtgacatccccagcagcggcaacaccagccagatgtccatggaccacgaggagctgctgcggacccctggggccagcctgaggaagggcaagggcaacagctccatggattctgctgctggctgcagcggcaccccacccatctgccggcaggcccagaccaagctggaggtggccctgtacatgttcctgtggaacccagacacagaggccgtgctggtggccatgagctgcttccgccacctgtgtgaggaggccgacatccgctgtggggtggatgaggtgtctgtgcacaacctgctgcccaactacaacaccttcatggagtttgcctctgtgagcaacatgatgagcacaggccgggccgccctgcagaagagggtgatggccctgctgcggcgcatcgagcaccccacagctggcaacacagaggcctgggaggacacccacgccaagtgggagcaggccaccaagctgatcctgaactaccccaaggccaagatggaggatggccaggccgctgagagcctgcacaagaccatcgtgaagaggaggatgagccacgtgtctgggggcggcagcattgacctgagtgacacagacagcctgcaggagtggatcaacatgacaggcttcctgtgtgccctgggcggcgtgtgcctgcagcagaggagcaacagcggcctggccacctacagcccccccatgggccctgtgtctgagaggaagggctccatgatctctgtgatgagcagcgagggcaatgctgacacccctgtgtccaagttcatggaccggctgctgagcctgatggtgtgcaaccacgagaaggtgggcctgcagatccgcaccaacgtgaaggacctggtgggcctggagctgagccctgccctgtaccccatgctgttcaacaagctgaagaacaccatcagcaagttctttgacagccagggccaggtgctgctgacagacaccaacacccagtttgtggagcagaccatcgccatcatgaagaacctgctggacaaccacacagagggcagcagcgagcacctgggccaggccagcattgagaccatgatgctgaacctggtgcgctacgtgcgggtgctgggcaacatggtgcacgccatccagatcaagaccaagctgtgccagctggtggaggtgatgatggccaggagagatgacctgtccttctgccaggagatgaagttcaggaacaagatggtggagtacctgacagactgggtgatgggcaccagcaaccaggccgcagatgatgatgtgaagtgcctgacccgggacctggaccaggcctccatggaggccgtggtgtccctgctggccggcctgcccctgcagcctgaggagggagatggagtggagctgatggaggccaagagccagctgttcctgaagtacttcaccctcttcatgaacctgctgaatgactgcagcgaggtggaggatgagagcgcccagacaggaggcaggaagaggggcatgagccggcggctggccagcctgcggcactgcaccgtgctggccatgagcaacctgctgaatgccaacgtggacagcggcctgatgcacagcatcggcctgggctaccacaaggacctgcagacccgggccaccttcatggaggtgctgaccaagatcctgcagcagggcacagaatttgacaccctggccgagaccgtgctggccgacagatttgagcggctggtggagctggtgaccatgatgggagaccagggcgagctgcccatcgccatggccctggccaacgtggtgccctgcagccagtgggatgagctggcccgggtgctggtgaccctgtttgacagccgccacctgctgtaccagctgctgtggaacatgttcagcaaggaggtggagctggccgacagcatgcagaccctcttccggggcaacagcctggccagcaagatcatgaccttctgcttcaaggtgtatggagccacctacctgcagaagctgctggaccccctgctgagaattgtcatcaccagcagtgactggcagcacgtgtcctttgaggtggaccccacccggctggagcccagcgagagcctggaggagaaccagaggaacctgctgcagatgacagagaagttcttccacgccatcatcagcagcagcagcgagttccccccccagctgcggtctgtgtgccactgcctgtaccaggccacctgccacagcctgctgaacaaggccaccgtgaaggagaagaaggagaacaagaagtctgtggtgtcccagcgcttcccccagaacagcatcggggctgtgggcagcgccatgttcctgcgcttcatcaacccagccatcgtgagcccctatgaggccggcatcctggacaagaagcccccaccaagaattgagcggggcctgaagctgatgagcaagatcctgcagagcatcgccaaccacgtgctcttcaccaaggaggagcacatgaggcccttcaatgactttgtgaagagcaactttgatgctgcccggcgcttcttcctggacatcgccagtgactgccccaccagtgatgctgtgaaccacagcctgtccttcatcagtgatggaaatgtgctggccctgcaccggctgctgtggaacaaccaggagaagattggccagtacctgagcagcaacagagaccacaaggctgtgggcagaagaccatttgacaagatggccaccctgctggcctacctgggccccccagagcacaagcctgtggccgacacccactggagcagcctgaacctgaccagcagcaagtttgaggagttcatgaccaggcaccaggtgcatgagaaggaggagttcaaggccctgaagaccctgagcatcttctaccaggccggcaccagcaaggccggcaaccccatcttctactacgtggcccggcgcttcaagacaggccagatcaatggagacctgctgatctaccacgtgctgctgaccctgaagccctactatgccaagccctatgaaattgtggtggacctgacccacacaggccccagcaaccgcttcaagacagacttcctgagcaagtggtttgtggtgtttcctggctttgcctatgacaacgtgtctgctgtgtacatctacaactgcaacagctgggtgcgggagtacaccaagtaccacgagcggctgctgaccggcctgaagggcagcaagaggctggtgttcatcgactgccctgggaagctggccgagcacattgaacatgagcagcagaagctgcctgctgccaccctggccctggaggaggacctgaaggtgttccacaatgccctgaagctggcccacaaggacaccaaggtgtccatcaaggtgggcagcacagctgtgcaggtgaccagcgctgagaggaccaaggtgctgggccagagcgtcttcctgaatgacatctactatgccagcgagattgaggagatctgcctggtggatgagaaccagttcaccctgaccatcgccaaccagggcacccccctgaccttcatgcaccaggagtgtgaggccatcgtgcagagcatcatccacatccgcacccgctgggagctgagccagcctgacagcatcccccagcacaccaagatccggcccaaggatgtgcccggcaccctgctgaacatcgccctgctgaacctgggcagcagtgaccccagcctgcggtctgctgcctacaacctgctgtgtgccctgacctgcaccttcaacctgaagattgagggccagctgctggagaccagcggcctgtgcatcccagccaacaacaccctcttcatcgtgtccatcagcaagaccctggccgccaatgagccccacctgaccctggagttcctggaggagtgcatcagcggcttcagcaagagcagcattgagctgaagcacctgtgcctggagtacatgaccccctggctgagcaacctggtgcgcttctgcaagcacaatgatgatgccaagaggcagagggtgacagccatcctggacaagctgatcaccatgaccatcaatgagaagcagatgtaccccagcatccaggccaagatctggggcagcctgggccagatcacagacctgctggatgtggtgctggacagcttcatcaagaccagcgccaccggcggcctgggcagcatcaaggccgaggtgatggctgacacagctgtggccctggccagcggaaatgtgaagctggtgagcagcaaggtgattggaaggatgtgcaagatcatcgacaagacctgcctgagccccacccccaccctggagcagcacctgatgtgggatgacatcgccatcctggcccgctacatgctgatgctgtccttcaacaacagcctggatgtggccgcccacctgccctacctgttccacgtggtgaccttcctggtggccaccggccccctgagcctgcgggccagcacccacggcctggtgatcaacatcatccacagcctgtgcacctgcagccagctgcacttcagcgaggagaccaagcaggtgctgcggctgagcctgacagagttcagcctgcccaagttctacctgctgtttggcatcagcaaggtgaagtctgctgctgtgattgccttccgcagcagctacagagacaggagcttcagccctggcagctatgaaagagagacctttgccctgaccagcctggagaccgtgacagaggccctgctggagatcatggaggcctgcatgagggacatccccacctgcaagtggctggaccagtggacagagctggcccagagatttgccttccagtacaaccccagcctgcagccccgggccctggtggtgtttggctgcatcagcaagagggtgagccacggccagatcaagcagatcatccgcatcctgagcaaggccctggagagctgcctgaagggccctgacacctacaacagccaggtgctgattgaggccaccgtcatcgccctgaccaagctgcagcccctgctgaacaaggacagccccctgcacaaggccctcttctgggtggccgtggccgtgctgcagctggatgaggtgaacctgtacagcgctggaacagccctgctggagcagaacctgcacaccctggacagcctgcgcatcttcaatgacaagagccctgaggaggtgttcatggccatccggaaccccctggagtggcactgcaagcagatggaccactttgtgggcctgaacttcaacagcaacttcaactttgccctggtgggccacctgctgaagggctaccgccaccccagccctgccatcgtggccaggacagtgcgcatcctgcacaccctgctgaccctggtgaacaagcacaggaactgtgacaagtttgaggtgaacacccagagcgtggcctacctggccgccctgctgactgtgtctgaggaggtgcgcagccgctgcagcctgaagcacaggaagagcctgctgctgacagacatctccatggagaatgtgcccatggacacctaccccatccaccacggggaccccagctaccgcaccctgaaggagacccagccctggagcagccccaagggcagcgagggctacctggccgccacctaccccaccgtgggccagaccagcccccgggccaggaagtccatgagcctggacatgggccagcccagccaggccaacaccaagaagctgctgggcaccaggaagagctttgaccacctgatcagtgacaccaaggcccccaagaggcaggagatggagagcggcatcaccaccccacccaagatgagaagagtggccgagacagattatgagatggagacccagaggatcagcagcagccagcagcacccccacctgaggaaggtgtctgtgtctgagagcaatgtgctgctggatgaggaggtgctgacagaccccaagatccaggccctgctgctgactgtgctggccaccctggtgaagtacaccacagatgaatttgaccagaggatcctgtatgagtacctggccgaggcctctgtggtgttccccaaggtgtttcctgtggtgcacaacctgctggacagcaagatcaacaccctgctgagcctgtgccaggaccccaacctgctgaaccccatccacggcatcgtgcagagcgtggtgtaccacgaggagagccccccccagtaccagaccagctacctgcagagctttggcttcaacggcctgtggaggtttgctggccccttcagcaagcagacccagatcccagactatgcagagctgattgtgaagttcctggatgccctgattgacacctacctgcccggcattgatgaggagaccagcgaggagagcctgctgacccccaccagcccctaccccccagccctgcagagccagctgagcatcacagccaacctgaacctgagcaacagcatgaccagcctggccaccagccagcacagccctggcatcgacaaggaaaatgtggagctgagccccaccaccggccactgcaacagcggccgcaccaggcatggcagcgccagccaggtgcagaagcagaggtctgctggcagcttcaagaggaacagcatcaagaagatcgtgtag

SEQ ID NO: 20774 - DNA, 615 bp, synthetic construct
  misc_feature 1..615: note = Description of Artificial Sequence: Synthetic coding sequence
  source 1..615: mol_type = other DNA
atgcatgagcgctacagcaatgtgcaggtggccggccctgtggacaggaccagcagcaaggacagccccctgcacaaggccctcttctgggtggccgtggccgtgctgcagctggatgaggtgaacctgtacagcgctggaacagccctgctggagcagaacctgcacaccctggacagcctgcgcatcttcaatgacaagagccctgaggaggtgttcatggccatccggaaccccctggagtggcactgcaagcagatggaccactttgtgggcctgaacttcaacagcaacttcaactttgccctggtgggccacctgctgaagggctaccgccaccccagccctgccatcgtggccaggacagtgcgcatcctgcacaccctgctgaccctggtgaacaagcacaggaactgtgacaagtttgaggtgaacacccagagcgtggcctacctggccgccctgctgactgtgtctgaggaggtgcgcagccgctgcagcctgaagcacaggaagagcctgctgctgacagacatctccatggagaatgtgcccatggacacctaccccatccaccacggggaccccagctacagaaacaaggagaagttctag

SEQ ID NO: 20775 - DNA, 1782 bp, synthetic construct
  misc_feature 1..1782: note = Description of Artificial Sequence: Synthetic coding sequence
  source 1..1782: mol_type = other DNA
atggccgcccacaggcctgtggagtgggtgcaggccgtggtgtccagatttgatgagcagctgcccatcaagacaggccagcagaacacccacaccaaggtgtccacagagcacaacaaggaatgtctcatcaacatcagcaagtacaagttcagcctggtgatcagcggcctgaccaccatcctgaagaatgtgaacaacatgaggatctttggagaggccgctgagaagaacctgtacctgagccagctgatcatcctggacaccctggagaagtgcctggccggccagcccaaggacaccatgaggctggatgagaccatgctggtgaagcagctgctgcctgagatctgccacttcctgcacacctgccgggagggcaaccagcacgccgctgagctgagaaattctgccagcggcgtgctcttcagcctgagctgcaacaacttcaatgctgtgttcagccgcatcagcacccggctgcaggagctgactgtgtgcagtgaagataatgtggatgtgcatgacatcgagctgctgcagtacatcaacgtggactgtgccaagctgaagaggctgctgaaggagacagccttcaagttcaaggccctgaagaaggtggcccagctggccgtcatcaacagcctggagaaggccttctggaactgggtggagaactacccagatgagttcaccaagctgtaccagatcccccagacagacatggccgagtgtgccgagaagctgtttgacctggtggatggctttgctgagagcaccaagaggaaggctgctgtgtggcccctgcagatcatcctgctgatcctgtgcccagagatcatccaggacatcagcaaggatgtggtggatgagaacaacatgaacaagaagctgttcctggacagcctgaggaaggccctggccggccacggcggcagccggcagctgacagaatctgctgccatcgcctgtgtgaagctgtgcaaggccagcacctacatcaactgggaggacaacagcgtcatcttcctgctggtgcagagcatggtggtggacctgaagaacctgctcttcaaccccagcaagcccttcagccggggcagccagcctgcagatgtggacctgatgattgactgcctggtgtcctgcttccgcatcagcccccacaacaaccagcacttcaagatctgcctggcccagaacagccccagcaccttccactacgtgctggtgaacagcctgcaccgcatcatcaccaacagcgccctggactggtggcccaagattgatgctgtgtactgccacagcgtggagctgaggaacatgtttggagagaccctgcacaaggctgtgcagggctgtggggcccacccagccatccgcatggcccccagcctgaccttcaaggagaaggtgaccagcctgaagttcaaggagaagcccacagacctggagaccaggagctacaagtacctgctgctgtccatggtgaagctgattcatgctgaccccaagctgctgctgtgcaaccccaggaagcagggccctgagacccagggcagcacagctgagctgatcaccggcctggtgcagctggtgccccagagccacatgcctgagatcgcccaggaggccatggaggccctgctggtgctgcaccagctggacagcattgacctgtggaacccagatgcccctgtggagaccttctgggagatccgctacatgtacttctacttcctgaacagcaccttcaagttctactttgtgttcctgtcctag

SEQ ID NO: 20776 - DNA, 1917 bp, synthetic construct
  misc_feature 1..1917: note = Description of Artificial Sequence: Synthetic coding sequence
  source 1..1917: mol_type = other DNA
atgcatgagcgctacagcaatgtgcaggtggccggccctgtggacaggaccagcagcaagttctgtggcagcttcaactgccgctttgccttccagtacaaccccagcctgcagccccgggccctggtggtgtttggctgcatcagcaagagggtgagccacggccagatcaagcagatcatccgcatcctgagcaaggccctggagagctgcctgaagggccctgacacctacaacagccaggtgctgattgaggccaccgtgattgccctgaccaagctgcagcccctgctgaacaaggacagccccctgcacaaggccctcttctgggtggccgtggccgtgctgcagctggatgaggtgaacctgtacagcgctggaacagccctgctggagcagaacctgcacaccctggacagcctgcgcatcttcaatgacaagagccctgaggaggtgttcatggccatccggaaccccctggagtggcactgcaagcagatggaccactttgtgggcctgaacttcaacagcaacttcaactttgccctggtgggccacctgctgaagggctaccgccaccccagccctgccatcgtggccaggacagtgcgcatcctgcacaccctgctgaccctggtgaacaagcacaggaactgtgacaagtttgaggtgaacacccagagcgtggcctacctggccgccctgctgactgtgtctgaggaggtgcgcagccgctgcagcctgaagcacaggaagagcctgctgctgacagacatctccatggagaatgtgcccatggacacctaccccatccaccacggggaccccagctaccgcaccctgaaggagacccagccctggagcagccccaagggcagcgagggctacctggccgccacctaccccaccgtgggccagaccagcccccgggccaggaagtccatgagcctggacatgggccagcccagccaggccaacaccaagaagctgctgggcaccaggaagagctttgaccacctgatcagtgacaccaaggcccccaagaggcaggagatggagagcggcatcaccaccccacccaagatgagaagagtggccgagacagattatgagatggagacccagaggatcagcagcagccagcagcacccccacctgaggaaggtgtctgtgtctgagagcaatgtgctgctggatgaggaggtgctgacagaccccaagatccaggccctgctgctgactgtgctggccaccctggtgaagtacaccacagatgaatttgaccagaggatcctgtatgagtacctggccgaggcctctgtggtgttccccaaggtgtttcctgtggtgcacaacctgctggacagcaagatcaacaccctgctgagcctgtgccaggaccccaacctgctgaaccccatccatggaattgtgcagagcgtggtgtaccacgaggagagccccccccagtaccagaccagctacctgcagagctttggcttcaacggcctgtggaggtttgctggccccttcagcaagcagacccagatcccagactatgcagagctgattgtgaagttcctggatgccctgattgacacctacctgcccggcattgatgaggagaccagcgaggagagcctgctgacccccaccagcccctaccccccagccctgcagagccagctgagcatcacagccaacctgaacctgagcaacagcatgaccagcctggccaccagccagcacagccctggcatcgacaaggaaaatgtggagctgagccccaccaccggccactgcaacagcggccgcaccaggcatggcagcgccagccaggtgcagaagcagaggtctgctggcagcttcaagctggccctgctgaacctgctgacagcccaccagaacagcctgtag

SEQ ID NO: 20777 - DNA, 7509 bp, synthetic construct
  misc_feature 1..7509: note = Description of Artificial Sequence: Synthetic coding sequence
  source 1..7509: mol_type = other DNA
aactgggaggacaacagcgtcatcttcctgctggtgcagagcatggtggtggacctgaagaacctgctcttcaaccccagcaagcccttcagccggggcagccagcctgcagatgtggacctgatgattgactgcctggtgtcctgcttccgcatcagcccccacaacaaccagcacttcaagatctgcctggcccagaacagccccagcaccttccactacgtgctggtgaacagcctgcaccgcatcatcaccaacagcgccctggactggtggcccaagattgatgctgtgtactgccacagcgtggagctgaggaacatgtttggagagaccctgcacaaggctgtgcagggctgtggggcccacccagccatccgcatggcccccagcctgaccttcaaggagaaggtgaccagcctgaagttcaaggagaagcccacagacctggagaccaggagctacaagtacctgctgctgtccatggtgaagctgattcatgctgaccccaagctgctgctgtgcaaccccaggaagcagggccctgagacccagggcagcacagctgagctgatcaccggcctggtgcagctggtgccccagagccacatgcctgagatcgcccaggaggccatggaggccctgctggtgctgcaccagctggacagcattgacctgtggaacccagatgcccctgtggagaccttctgggagatcagcagccagatgctgttctacatctgcaagaagctgaccagccaccagatgctgagcagcacagagatcctgaagtggctgcgggagatcctgatctgcaggaacaagttcctgctgaagaacaagcaggccgacaggagcagctgccacttcctgctcttctacggcgtgggctgtgacatccccagcagcggcaacaccagccagatgtccatggaccacgaggagctgctgcggacccctggggccagcctgaggaagggcaagggcaacagctccatggattctgctgctggctgcagcggcaccccacccatctgccggcaggcccagaccaagctggaggtggccctgtacatgttcctgtggaacccagacacagaggccgtgctggtggccatgagctgcttccgccacctgtgtgaggaggccgacatccgctgtggggtggatgaggtgtctgtgcacaacctgctgcccaactacaacaccttcatggagtttgcctctgtgagcaacatgatgagcacaggccgggccgccctgcagaagagggtgatggccctgctgcggcgcatcgagcaccccacagctggcaacacagaggcctgggaggacacccacgccaagtgggagcaggccaccaagctgatcctgaactaccccaaggccaagatggaggatggccaggccgctgagagcctgcacaagaccatcgtgaagaggaggatgagccacgtgtctgggggcggcagcattgacctgagtgacacagacagcctgcaggagtggatcaacatgacaggcttcctgtgtgccctgggcggcgtgtgcctgcagcagaggagcaacagcggcctggccacctacagcccccccatgggccctgtgtctgagaggaagggctccatgatctctgtgatgagcagcgagggcaatgctgacacccctgtgtccaagttcatggaccggctgctgagcctgatggtgtgcaaccacgagaaggtgggcctgcagatccgcaccaacgtgaaggacctggtgggcctggagctgagccctgccctgtaccccatgctgttcaacaagctgaagaacaccatcagcaagttctttgacagccagggccaggtgctgctgacagacaccaacacccagtttgtggagcagaccatcgccatcatgaagaacctgctggacaaccacacagagggcagcagcgagcacctgggccaggccagcattgagaccatgatgctgaacctggtgcgctacgtgcgggtgctgggcaacatggtgcacgccatccagatcaagaccaagctgtgccagctggtggaggtgatgatggccaggagagatgacctgtccttctgccaggagatgaagttcaggaacaagatggtggagtacctgacagactgggtgatgggcaccagcaaccaggccgcagatgatgatgtgaagtgcctgacccgggacctggaccaggcctccatggaggccgtggtgtccctgctggccggcctgcccctgcagcctgaggagggagatggagtggagctgatggaggccaagagccagctgttcctgaagtacttcaccctcttcatgaacctgctgaatgactgcagcgaggtggaggatgagagcgcccagacaggaggcaggaagaggggcatgagccggcggctggccagcctgcggcactgcaccgtgctggccatgagcaacctgctgaatgccaacgtggacagcggcctgatgcacagcatcggcctgggctaccacaaggacctgcagacccgggccaccttcatggaggtgctgaccaagatcctgcagcagggcacagaatttgacaccctggccgagaccgtgctggccgacagatttgagcggctggtggagctggtgaccatgatgggagaccagggcgagctgcccatcgccatggccctggccaacgtggtgccctgcagccagtgggatgagctggcccgggtgctggtgaccctgtttgacagccgccacctgctgtaccagctgctgtggaacatgttcagcaaggaggtggagctggccgacagcatgcagaccctcttccggggcaacagcctggccagcaagatcatgaccttctgcttcaaggtgtatggagccacctacctgcagaagctgctggaccccctgctgagaattgtcatcaccagcagtgactggcagcacgtgtcctttgaggtggaccccacccggctggagcccagcgagagcctggaggagaaccagaggaacctgctgcagatgacagagaagttcttccacgccatcatcagcagcagcagcgagttccccccccagctgcggtctgtgtgccactgcctgtaccaggtggtgtcccagcgcttcccccagaacagcattggagctgtgggcagcgccatgttcctgcgcttcatcaacccagccatcgtgagcccctatgaagctggcatcctggacaagaagcccccaccccgcatcgagcggggcctgaagctgatgagcaagatcctgcagagcatcgccaaccacgtgctcttcaccaaggaggagcacatgaggcccttcaatgactttgtgaagagcaactttgatgctgcccggcgcttcttcctggacatcgccagtgactgccccaccagtgatgctgtgaaccacagcctgtccttcatcagtgatggaaatgtgctggccctgcaccggctgctgtggaacaaccaggagaagattggccagtacctgagcagcaacagagaccacaaggctgtgggccggcggccctttgacaagatggccaccctgctggcctacctgggccccccagagcacaagcctgtggccgacacccactggagcagcctgaacctgaccagcagcaagtttgaggagttcatgaccaggcaccaggtgcatgagaaggaggagttcaaggccctgaagaccctgagcatcttctaccaggccggcaccagcaaggccggcaaccccatcttctactacgtggcccggcgcttcaagacaggccagatcaacggggacctgctgatctaccacgtgctgctgaccctgaagccctactatgccaagccctatgagatcgtggtggacctgacccacacaggccccagcaaccgcttcaagacagacttcctgagcaagtggtttgtggtgtttcctggctttgcctatgacaacgtgtctgctgtgtacatctacaactgcaacagctgggtgcgggagtacaccaagtaccacgagcggctgctgaccggcctgaagggcagcaagaggctggtgttcatcgactgccctgggaagctggccgagcacatcgagcacgagcagcagaagctgcctgctgccaccctggccctggaggaggacctgaaggtgttccacaatgccctgaagctggcccacaaggacaccaaggtgtccatcaaggtgggcagcacagctgtgcaggtgaccagcgctgagaggaccaaggtgctgggccagagcgtcttcctgaatgacatctactatgccagcgagattgaggagatctgcctggtggatgagaaccagttcaccctgaccatcgccaaccagggcacccccctgaccttcatgcaccaggagtgtgaggccatcgtgcagagcatcatccacatccgcacccgctgggagctgagccagcctgacagcatcccccagcacaccaagatccggcccaaggatgtgcccggcaccctgctgaacatcgccctgctgaacctgggcagcagtgaccccagcctgcggtctgctgcctacaacctgctgtgtgccctgacctgcaccttcaacctgaagattgagggccagctgctggagaccagcggcctgtgcatcccagccaacaacaccctcttcatcgtgtccatcagcaagaccctggccgccaatgagccccacctgaccctggagttcctggaggagtgcatcagcggcttcagcaagagcagcattgagctgaagcacctgtgcctggagtacatgaccccctggctgagcaacctggtgcgcttctgcaagcacaatgatgatgccaagaggcagagggtgacagccatcctggacaagctgatcaccatgaccatcaatgagaagcagatgtaccccagcatccaggccaagatctggggcagcctgggccagatcacagacctgctggatgtggtgctggacagcttcatcaagaccagcgccactggaggcctgggcagcatcaaggccgaggtgatggctgacacagctgtggccctggccagcggaaatgtgaagctggtgagcagcaaggtgattggccgcatgtgcaagatcatcgacaagacctgcctgagccccacccccaccctggagcagcacctgatgtgggatgacatcgccatcctggcccgctacatgctgatgctgtccttcaacaacagcctggatgtggccgcccacctgccctacctgttccacgtggtgaccttcctggtggccaccggccccctgagcctgcgggccagcacccacggcctggtgatcaacatcatccacagcctgtgcacctgcagccagctgcacttcagcgaggagaccaagcaggtgctgcggctgagcctgacagagttcagcctgcccaagttctacctgctgtttggcatcagcaaggtgaagtctgctgctgtgattgccttccgcagcagctacagagaccgctccttcagccctggcagctatgagcgggagacctttgccctgaccagcctggagaccgtgacagaggccctgctggagatcatggaggcctgcatgagggacatccccacctgcaagtggctggaccagtggacagagctggcccagagatttgccttccagtacaaccccagcctgcagccccgggccctggtggtgtttggctgcatcagcaagagggtgagccacggccagatcaagcagatcatccgcatcctgagcaaggccctggagagctgcctgaagggccctgacacctacaacagccaggtgctgattgaggccaccgtgattgccctgaccaagctgcagcccctgctgaacaaggacagccccctgcacaaggccctcttctgggtggccgtggccgtgctgcagctggatgaggtgaacctgtacagcgctggaacagccctgctggagcagaacctgcacaccctggacagcctgcgcatcttcaatgacaagagccctgaggaggtgttcatggccatccggaaccccctggagtggcactgcaagcagatggaccactttgtgggcctgaacttcaacagcaacttcaactttgccctggtgggccacctgctgaagggctaccgccaccccagccctgccatcgtggccaggacagtgcgcatcctgcacaccctgctgaccctggtgaacaagcacaggaactgtgacaagtttgaggtgaacacccagagcgtggcctacctggccgccctgctgactgtgtctgaggaggtgcgcagccgctgcagcctgaagcacaggaagagcctgctgctgacagacatctccatggagaatgtgcccatggacacctaccccatccaccacggggaccccagctaccgcaccctgaaggagacccagccctggagcagccccaagggcagcgagggctacctggccgccacctaccccaccgtgggccagaccagcccccgggccaggaagtccatgagcctggacatgggccagcccagccaggccaacaccaagaagctgctgggcaccaggaagagctttgaccacctgatcagtgacaccaaggcccccaagaggcaggagatggagagcggcatcaccaccccacccaagatgagaagagtggccgagacagattatgagatggagacccagaggatcagcagcagccagcagcacccccacctgaggaaggtgtctgtgtctgagagcaatgtgctgctggatgaggaggtgctgacagaccccaagatccaggccctgctgctgactgtgctggccaccctggtgaagtacaccacagatgaatttgaccagaggatcctgtatgagtacctggccgaggcctctgtggtgttccccaaggtgtttcctgtggtgcacaacctgctggacagcaagatcaacaccctgctgagcctgtgccaggaccccaacctgctgaaccccatccatggaattgtgcagagcgtggtgtaccacgaggagagccccccccagtaccagaccagctacctgcagagctttggcttcaacggcctgtggaggtttgctggccccttcagcaagcagacccagatcccagactatgcagagctgattgtgaagttcctggatgccctgattgacacctacctgcccggcattgatgaggagaccagcgaggagagcctgctgacccccaccagcccctaccccccagccctgcagagccagctgagcatcacagccaacctgaacctgagcaacagcatgaccagcctggccaccagccagcacagccctgccagcctgccctgcagcaagtctgctgtgttcatgcagctgttcccccaccagggcatcgacaaggaaaatgtggagctgagccccaccaccggccactgcaacagcggccgcaccaggcatggcagcgccagccaggtgcagaagcagaggtctgctggcagcttcaagagaaattccatcaagaagatcgtgtag

SEQ ID NO: 20778 - DNA, 1524 bp, synthetic construct
  misc_feature 1..1524: note = Description of Artificial Sequence: Synthetic coding sequence
  source 1..1524: mol_type = other DNA
atggccggggccatcgccagcaggatgtccttcagcagcctgaagaggaagcagcccaagaccttcaccgtgcgcatcgtgaccatggatgctgagatggagttcaactgtgaggtgaagaagcagatcctggatgagaagatctactgccccccagaggcctctgtgctgctggccagctatgctgtgcaggccaagtatggagactatgaccccagcgtgcacaagaggggcttcctggcccaggaggagctgctgcccaagagggtcatcaacctgtaccagatgaccccagagatgtgggaggagcgcatcacagcctggtacgccgagcaccggggccgggccagagatgaggccgagatggagtacctgaagatcgcccaggacctggagatgtatggagtgaactactttgccatccggaacaagaagggcacagagctgctgctgggcgtggatgccctgggcctgcacatctatgaccctgagaaccggctgacccccaagatctccttcccctggaatgagatccggaacatctcctacagcgacaaggagttcaccatcaagcccctggacaagaagattgatgtgttcaagttcaacagcagcaagctgcgggtgaacaagctgatcctgcagctgtgcatcggcaaccacgacctcttcatgagaagaaggaaggctgacagcctggaggtgcagcagatgaaggcccaggcccgggaggagaaggccaggaagcagatggagcggcagaggctggcccgggagaagcagatgagggaggaggccgagaggaccagagatgagctggagcggcggctgctgcagatgaaggaggaggccaccatggccaatgaggccctgatgaggtctgaggagacagctgacctgctggccgagaaggcccagatcacagaggaggaggccaagctgctggcccagaaggctgctgaggccgagcaggagatgcagaggatcaaggccacagccatcagaacagaggaggagaagaggctgatggagcagaaggtgctggaggccgaggtgctggccctgaagatggccgaggagagcgagcggcgggccaaggaggccgaccagctgaagcaggacctgcaggaggcccgggaggccgagcggcgggccaagcagaagctgctggagatcgccaccaagcccacctacccacccatgaaccccatcccagcccccctgcccccagacatccccagcttcaacctgattggagacagcctgagctttgacttcaaggacacagacatgaagaggctgtccatggagattgagaaggagaaggtggagtacatggagaagagcaagcacctgcaggagcagctgaatgagctgaagacagaaattgaggccctgaagctgaaggagcgggagacagccctggacatcctgcacaatgaaaattctgaccggggcggcagcagcaagcacaacaccatcaagaagccccaggcccagggccggcggcccatctgcatctag

SEQ ID NO: 20779 - DNA, 1788 bp, synthetic construct
  misc_feature 1..1788: note = Description of Artificial Sequence: Synthetic coding sequence
  source 1..1788: mol_type = other DNA
atggccggggccatcgccagcaggatgtccttcagcagcctgaagaggaagcagcccaagaccttcaccgtgcgcatcgtgaccatggatgctgagatggagttcaactgtgagatgaagtggaagggcaaggacctgtttgacctggtgtgcaggaccctgggcctgcgggagacctggttcttcggcctgcagtacaccatcaaggacacagtggcctggctgaagatggacaagaaggtgctggaccatgatgtgtccaaggaggagcctgtgaccttccacttcctggccaagttctacccagaaaatgctgaggaggagctggtgcaggagatcacccagcacctgttcttcctgcaggtgaagaagcagatcctggatgagaagatctactgccccccagaggcctctgtgctgctggccagctatgctgtgcaggccaagtacggggactatgaccccagcgtgcacaagaggggcttcctggcccaggaggagctgctgcccaagagggtcatcaacctgtaccagatgaccccagagatgtgggaggagcgcatcacagcctggtatgcagagcaccggggccgggccagagatgaagctgagatggagtacctgaagatcgcccaggacctggagatgtatggagtgaactactttgccatccggaacaagaagggcacagagctgctgctgggcgtggatgccctgggcctgcacatctatgaccctgaaaatcggctgacccccaagatctccttcccctggaatgagatccggaacatctcctacagcgacaaggagttcaccatcaagcccctggacaagaagattgatgtgttcaagttcaacagcagcaagctgcgggtgaacaagctgatcctgcagctgtgcatcggcaaccacgacctcttcatgagaagaaggaaggctgacagcctggaggtgcagcagatgaaggcccaggcccgggaggagaaggccaggaagcagatggagcggcagaggctggcccgggagaagcagatgagggaggaggccgagaggaccagagatgagctggagcggcggctgctgcagatgaaggaggaggccaccatggccaatgaggccctgatgaggtctgaggagacagctgacctgctggccgagaaggcccagatcacagaggaggaggccaagctgctggcccagaaggctgctgaggccgagcaggagatgcagaggatcaaggccacagccatcagaacagaggaggagaagaggctgatggagcagaaggtgctggaggccgaggtgctggccctgaagatggccgaggagagcgagcggcgggccaaggaggccgaccagctgaagcaggacctgcaggaggcccgggaggccgagcggcgggccaagcagaagctgctggagatcgccaccaagcccacctacccacccatgaaccccatcccagcccccctgcccccagacatccccagcttcaacctgattggagacagcctgagctttgacttcaaggacacagacatgaagaggctgtccatggagattgagaaggagaaggtggagtacatggagaagagcaagcacctgcaggagcagctgaatgagctgaagacagaaattgaggccctgaagctgaaggagcgggagacagccctggacatcctgcacaatgaaaacagcgacagaggaggcagcagcaagcacaacaccatcaagaagctgaccctgcagagcgccaagagccgggtggccttctttgaggagctgtag

SEQ ID NO: 20780 - DNA, 663 bp, synthetic construct
  misc_feature 1..663: note = Description of Artificial Sequence: Synthetic coding sequence
  source 1..663: mol_type = other DNA
atggccggggccatcgccagcaggatgtccttcagcagcctgaagaggaagcagcccaagaccttcaccgtgcgcatcgtgaccatggatgctgagatggagttcaactgtgaggtgaagaagcagatcctggatgagaagatctactgccccccagaggcctctgtgctgctggccagctatgctgtgcaggccaagaacaagaagggcacagagctgctgctgggcgtggatgccctgggcctgcacatctatgaccctgagaaccggctgacccccaagatctccttcccctggaatgagatccggaacatctcctacagcgacaaggagttcaccatcaagcccctggacaagaagattgatgtgttcaagttcaacagcagcaagctgcgggtgaacaagctgatcctgcagctgtgcatcggcaaccacgacctcttcatgagaagaaggaaggctgacagcctggaggtgcagcagatgaaggcccaggcccgggaggagaaggccaggaagcagggccagaggggccgctctgctgaggccggccctgctggcagcacccggggcggggccaagagccaggccgaggcccctggggactgccaccaggcccacgtgcctgcccacgagcccaacagcagcacagtggccagctag

SEQ ID NO: 20781 - DNA, 1524 bp, synthetic construct; identical to SEQ ID NO: 20778
  misc_feature 1..1524: note = Description of Artificial Sequence: Synthetic coding sequence
  source 1..1524: mol_type = other DNA

SEQ ID NO: 20782 - DNA, 1773 bp, synthetic construct
  misc_feature 1..1773: note = Description of Artificial Sequence: Synthetic coding sequence
  source 1..1773: mol_type = other DNA
atggccggggccatcgccagcaggatgtccttcagcagcctgaagaggaagcagcccaagaccttcaccgtgcgcatcgtgaccatggatgctgagatggagttcaactgtgagatgaagtggaagggcaaggacctgtttgacctggtgtgcaggaccctgggcctgcgggagacctggttcttcggcctgcagtacaccatcaaggacacagtggcctggctgaagatggacaagaaggtgctggaccatgatgtgtccaaggaggagcctgtgaccttccacttcctggccaagttctacccagaaaatgctgaggaggagctggtgcaggagatcacccagcacctgttcttcctgcaggtgaagaagcagatcctggatgagaagatctactgccccccagaggcctctgtgctgctggccagctatgctgtgcaggccaagtacggggactatgaccccagcgtgcacaagaggggcttcctggcccaggaggagctgctgcccaagagggtcatcaacctgtaccagatgaccccagagatgtgggaggagcgcatcacagcctggtatgcagagcaccggggccgggccagagatgaagctgagatggagtacctgaagatcgcccaggacctggagatgtatggagtgaactactttgccatccggaacaagaagggcacagagctgctgctgggcgtggatgccctgggcctgcacatctatgaccctgaaaatcggctgacccccaagatctccttcccctggaatgagatccggaacatctcctacagcgacaaggagttcaccatcaagcccctggacaagaagattgatgtgttcaagttcaacagcagcaagctgcgggtgaacaagctgatcctgcagctgtgcatcggcaaccacgacctcttcatgagaagaaggaaggctgacagcctggaggtgcagcagatgaaggcccaggcccgggaggagaaggccaggaagcagatggagcggcagaggctggcccgggagaagcagatgagggaggaggccgagaggaccagagatgagctggagcggcggctgctgcagatgaaggaggaggccaccatggccaatgaggccctgatgaggtctgaggagacagctgacctgctggccgagaaggcccagatcacagaggaggaggccaagctgctggcccagaaggctgctgaggccgagcaggagatgcagaggatcaaggccacagccatcagaacagaggaggagaagaggctgatggagcagaaggtgctggaggccgaggtgctggccctgaagatggccgaggagagcgagcggcgggccaaggaggccgaccagctgaagcaggacctgcaggaggcccgggaggccgagcggcgggccaagcagaagctgctggagatcgccaccaagcccacctacccacccatgaaccccatcccagcccccctgcccccagacatccccagcttcaacctgattggagacagcctgagctttgacttcaaggacacagacatgaagaggctgtccatggagattgagaaggagaaggtggagtacatggagaagagcaagcacctgcaggagcagctgaatgagctgaagacagaaattgaggccctgaagctgaaggagcgggagacagccctggacatcctgcacaatgaaaacagcgacagaggaggcagcagcaagcacaacaccatcaagaagccccaggcccagggcagaagacccatctgcatctag

SEQ ID NO: 20783 - DNA, 1650 bp, synthetic construct
  misc_feature 1..1650: note = Description of Artificial Sequence: Synthetic coding sequence
  source 1..1650: mol_type = other DNA
atggccggggccatcgccagcaggatgtccttcagcagcctgaagaggaagcagcccaagaccttcaccgtgcgcatcgtgaccatggatgctgagatggagttcaactgtgagatgaagtggaagggcaaggacctgtttgacctggtgtgcaggaccctgggcctgcgggagacctggttcttcggcctgcagtacaccatcaaggacacagtggcctggctgaagatggacaagaaggtgaagaagcagatcctggatgagaagatctactgccccccagaggcctctgtgctgctggccagctatgctgtgcaggccaagtatggagactatgaccccagcgtgcacaagaggggcttcctggcccaggaggagctgctgcccaagagggtcatcaacctgtaccagatgaccccagagatgtgggaggagcgcatcacagcctggtacgccgagcaccggggccgggccagagatgaggccgagatggagtacctgaagatcgcccaggacctggagatgtatggagtgaactactttgccatccggaacaagaagggcacagagctgctgctgggcgtggatgccctgggcctgcacatctatgaccctgagaaccggctgacccccaagatctccttcccctggaatgagatccggaacatctcctacagcgacaaggagttcaccatcaagcccctggacaagaagattgatgtgttcaagttcaacagcagcaagctgcgggtgaacaagctgatcctgcagctgtgcatcggcaaccacgacctcttcatgagaagaaggaaggctgacagcctggaggtgcagcagatgaaggcccaggcccgggaggagaaggccaggaagcagatggagcggcagaggctggcccgggagaagcagatgagggaggaggccgagaggaccagagatgagctggagcggcggctgctgcagatgaaggaggaggccaccatggccaatgaggccctgatgaggtctgaggagacagctgacctgctggccgagaaggcccagatcacagaggaggaggccaagctgctggcccagaaggctgctgaggccgagcaggagatgcagaggatcaaggccacagccatcagaacagaggaggagaagaggctgatggagcagaaggtgctggaggccgaggtgctggccctgaagatggccgaggagagcgagcggcgggccaaggaggccgaccagctgaagcaggacctgcaggaggcccgggaggccgagcggcgggccaagcagaagctgctggagatcgccaccaagcccacctacccacccatgaaccccatcccagcccccctgcccccagacatccccagcttcaacctgattggagacagcctgagctttgacttcaaggacacagacatgaagaggctgtccatggagattgagaaggagaaggtggagtacatggagaagagcaagcacctgcaggagcagctgaatgagctgaagacagaaattgaggccctgaagctgaaggagcgggagacagccctggacatcctgcacaatgaaaattctgaccggggcggcagcagcaagcacaacaccatcaagaagccccaggcccagggccggcggcccatctgcatctag

SEQ ID NO: 20784 - DNA, 1647 bp, synthetic construct
  misc_feature 1..1647: note = Description of Artificial Sequence: Synthetic coding sequence
  source 1..1647: mol_type = other DNA
atggccggggccatcgccagcaggatgtccttcagcagcctgaagaggaagcagcccaagaccttcaccgtgcgcatcgtgaccatggatgctgagatggagttcaactgtgaggtgctggaccatgatgtgtccaaggaggagcctgtgaccttccacttcctggccaagttctacccagaaaatgctgaggaggagctggtgcaggagatcacccagcacctgttcttcctgcaggtgaagaagcagatcctggatgagaagatctactgccccccagaggcctctgtgctgctggccagctatgctgtgcaggccaagtacggggactatgaccccagcgtgcacaagaggggcttcctggcccaggaggagctgctgcccaagagggtcatcaacctgtaccagatgaccccagagatgtgggaggagcgcatcacagcctggtatgcagagcaccggggccgggccagagatgaagctgagatggagtacctgaagatcgcccaggacctggagatgtatggagtgaactactttgccatccggaacaagaagggcacagagctgctgctgggcgtggatgccctgggcctgcacatctatgaccctgaaaatcggctgacccccaagatctccttcccctggaatgagatccggaacatctcctacagcgacaaggagttcaccatcaagcccctggacaagaagattgatgtgttcaagttcaacagcagcaagctgcgggtgaacaagctgatcctgcagctgtgcatcggcaaccacgacctcttcatgagaagaaggaaggctgacagcctggaggtgcagcagatgaaggcccaggcccgggaggagaaggccaggaagcagatggagcggcagaggctggcccgggagaagcagatgagggaggaggccgagaggaccagagatgagctggagcggcggctgctgcagatgaaggaggaggccaccatggccaatgaggccctgatgaggtctgaggagacagctgacctgctggccgagaaggcccagatcacagaggaggaggccaagctgctggcccagaaggctgctgaggccgagcaggagatgcagaggatcaaggccacagccatcagaacagaggaggagaagaggctgatggagcagaaggtgctggaggccgaggtgctggccctgaagatggccgaggagagcgagcggcgggccaaggaggccgaccagctgaagcaggacctgcaggaggcccgggaggccgagcggcgggccaagcagaagctgctggagatcgccaccaagcccacctacccacccatgaaccccatcccagcccccctgcccccagacatccccagcttcaacctgattggagacagcctgagctttgacttcaaggacacagacatgaagaggctgtccatggagattgagaaggagaaggtggagtacatggagaagagcaagcacctgcaggagcagctgaatgagctgaagacagaaattgaggccctgaagctgaaggagcgggagacagccctggacatcctgcacaatgaaaacagcgacagaggaggcagcagcaagcacaacaccatcaagaagccccaggcccagggcagaagacccatctgcatctag

SEQ ID NO: 20785 - DNA, 1773 bp, synthetic construct; identical to SEQ ID NO: 20782
  misc_feature 1..1773: note = Description of Artificial Sequence: Synthetic coding sequence
  source 1..1773: mol_type = other DNA

SEQ ID NO: 20786 - DNA, 1806 bp, synthetic construct
  misc_feature 1..1806: note = Description of Artificial Sequence: Synthetic coding sequence
  source 1..1806: mol_type = other DNA
atggccggggccatcgccagcaggatgtccttcagcagcctgaagaggaagcagcccaagaccttcaccgtgcgcatcgtgaccatggatgctgagatggagttcaactgtgagatgaagtggaagggcaaggacctgtttgacctggtgtgcaggaccctgggcctgcgggagacctggttcttcggcctgcagtacaccatcaaggacacagtggcctggctgaagatggacaagaaggtgctggaccatgatgtgtccaaggaggagcctgtgaccttccacttcctggccaagttctacccagaaaatgctgaggaggagctggtgcaggagatcacccagcacctgttcttcctgcaggtgaagaagcagatcctggatgagaagatctactgccccccagaggcctctgtgctgctggccagctatgctgtgcaggccaagtacggggactatgaccccagcgtgcacaagaggggcttcctggcccaggaggagctgctgcccaagagggtcatcaacctgtaccagatgaccccagagatgtgggaggagcgcatcacagcctggtatgcagagcaccggggccgggccagagatgaagctgagatggagtacctgaagatcgcccaggacctggagatgtatggagtgaactactttgccatccggaacaagaagggcacagagctgctgctgggcgtggatgccctgggcctgcacatctatgaccctgaaaatcggctgacccccaagatctccttcccctggaatgagatccggaacatctcctacagcgacaaggagttcaccatcaagcccctggacaagaagattgatgtgttcaagttcaacagcagcaagctgcgggtgaacaagctgatcctgcagctgtgcatcggcaaccacgacctcttcatgagaagaaggaaggctgacagcctggaggtgcagcagatgaaggcccaggcccgggaggagaaggccaggaagcagatggagcggcagaggctggcccgggagaagcagatgagggaggaggccgagaggaccagagatgagctggagcggcggctgctgcagatgaaggaggaggccaccatggccaatgaggccctgatgaggtctgaggaggccgagcaggagatgcagaggatcaaggccacagccatcagaacagaggaggagaagaggctgatggagcagaaggtgctggaggccgaggtgctggccctgaagatggccgaggagagcgagcggcgggccaaggaggccgaccagctgaagcaggacctgcaggaggcccgggaggccgagcggcgggccaagcagaagctgctggagatcgccaccaagcccacctacccacccatgaaccccatcccagcccccctgcccccagacatccccagcttcaacctgattggagacagcctgagctttgacttcaaggacacagacatgaagaggctgtccatggagattgagaaggagaaggtggagtacatggagaagagcaagcacctgcaggagcagctgaatgagctgaagacagaaattgaggccctgaagctgaaggagcgggagacagccctggacatcctgcacaatgaaaattctgaccggggcggcagcagcaagcacaacaccatcaagaagggcatgttcctgttcttcttcatcctcttctgctggttcagcctgaagcccaaggccgaggacctgagcgcctttgagcccagcaacagcccctgccgggcccccagccctgagtggcccagcctgaagagcagcagcaggtag

SEQ ID NO: 20787 - DNA, 1686 bp, synthetic construct
  misc_feature 1..1686: note = Description of Artificial Sequence: Synthetic coding sequence
  source 1..1686: mol_type = other DNA
atggccggggccatcgccagcaggatgtccttcagcagcctgaagaggaagcagcccaagaccttcaccgtgcgcatcgtgaccatggatgctgagatggagttcaactgtgagatgaagtggaagggcaaggacctgtttgacctggtgtgcaggaccctgggcctgcgggagacctggttcttcggcctgcagtacaccatcaaggacacagtggcctggctgaagatggacaagaaggtgctggaccatgatgtgtccaaggaggagcctgtgaccttccacttcctggccaagttctacccagaaaatgctgaggaggagctggtgcaggagatcacccagcacctgttcttcctgcaggtgaagaagcagatcctggatgagaagatctactgccccccagaggcctctgtgctgctggccagctatgctgtgcaggccaagtacggggactatgaccccagcgtgcacaagaggggcttcctggcccaggaggagctgctgcccaagagggtcatcaacctgtaccagatgaccccagagatgtgggaggagcgcatcacagcctggtatgcagagcaccggggccgggccagagatgaagctgagatggagtacctgaagatcgcccaggacctggagatgtatggagtgaactactttgccatccggaacaagaagggcacagagctgctgctgggcgtggatgccctgggcctgcacatctatgaccctgaaaatcggctgacccccaagatctccttcccctggaatgagatccggaacatctcctacagcgacaaggagttcaccatcaagcccctggacaagaagattgatgtgttcaagttcaacagcagcaagctgcgggtgaacaagctgatcctgcagctgtgcatcggcaaccacgacctcttcatgagaagaaggaaggctgacagcctggaggtgcagcagatgaaggcccaggcccgggaggagaaggccaggaagcagatgaaggaggaggccaccatggccaatgaggccctgatgaggtctgaggagacagctgacctgctggccgagaaggcccagatcacagaggaggaggccaagctgctggcccagaaggctgctgaggccgagcaggagatgcagaggatcaaggccacagccatcagaacagaggaggagaagaggctgatggagcagaaggtgctggaggccgaggtgctggccctgaagatggccgaggagagcgagcggcgggccaaggaggccgaccagctgaagcaggacctgcaggaggcccgggaggccgagcggcgggccaagcagaagctgctggagatcgccaccaagcccacctacccacccatgaaccccatcccagcccccctgcccccagacatccccagcttcaacctgattggagacagcctgagctttgacttcaaggacacagacatgaagaggctgtccatggagattgagaaggagaaggtggagtacatggagaagagcaagcacctgcaggagcagctgaatgagctgaagacagaaattgaggccctgaagctgaaggagcgggagacagccctggacatcctgcacaatgaaaattctgaccggggcggcagcagcaagcacaacaccatcaagaagccccaggcccagggccggcggcccatctgcatctag

SEQ ID NO: 20788 - DNA, 1773 bp, synthetic construct; identical to SEQ ID NO: 20782
  misc_feature 1..1773: note = Description of Artificial Sequence: Synthetic coding sequence
  source 1..1773: mol_type = other DNA

SEQ ID NO: 20789 - DNA, 498 bp, synthetic construct
  misc_feature 1..498: note = Description of Artificial Sequence: Synthetic coding sequence
  source 1..498: mol_type = other DNA
atggccggggccatcgccagcaggatgtccttcagcagcctgaagaggaagcagcccaagaccttcaccgtgcgcatcgtgaccatggatgctgagatggagttcaactgtgagatgaagtggaagggcaaggacctgtttgacctggtgtgcaggaccctgggcctgcgggagacctggttcttcggcctgcagtacaccatcaaggacacagtggcctggctgaagatggacaagaaggtgctggaccatgatgtgtccaaggaggagcctgtgaccttccacttcctggccaagttctacccagaaaatgctgaggaggagctggtgcaggagatcacccagcacctgttcttcctgcaggtgaagaagcagatcctggatgagaagatctactgccccccagaggcctctgtgctgctggccagctatgctgtgcaggccaagctgaccctgcagagcgccaagagccgggtggccttctttgaggagctgtag

SEQ ID NO: 20790 - DNA, 663 bp, synthetic construct; identical to SEQ ID NO: 20780
  misc_feature 1..663: note = Description of Artificial Sequence: Synthetic coding sequence
  source 1..663: mol_type = other DNA

SEQ ID NO: 20791 - DNA, 2772 bp, synthetic construct
  misc_feature 1..2772: note = Description of Artificial Sequence: Synthetic coding sequence
  source 1..2772: mol_type = other DNA
atggagcggggcctgcccctgctgtgtgctgtgctggccctggtgctggccccagctggggccttcagaaatgacaagtgtggggacaccatcaagattgagagccctggctacctgaccagccctggctacccccacagctaccaccccagcgagaagtgtgagtggctgatccaggccccagacccctaccagaggatcatgatcaacttcaacccccactttgacctggaggaccgggactgcaagtatgactatgtggaggtgtttgatggagaaaatgaaaatggccacttccggggcaagttctgtgggaagatcgcccctcctcctgtggtgagcagcggccccttcctgttcatcaagtttgtgtctgactatgagacccacggggccggcttcagcatccgctatgagatcttcaagaggggccctgagtgcagccagaactacaccaccccatctggagtcatcaagagccctggcttccctgagaagtaccccaacagcctggagtgcacctacatcgtgtttgtgcccaagatgtctgagatcatcctggagtttgagagctttgacctggagccagacagcaaccccccaggcggcatgttctgccgctatgaccggctggagatctgggatggcttcccagatgtgggcccccacatcggccgctactgcggccagaagaccccaggccgcatccgcagcagcagcggcatcctgtccatggtgttctacacagattctgccatcgccaaggagggcttcagcgccaactacagcgtgctgcagagctctgtgtctgaggacttcaagtgcatggaggccctgggcatggagagcggggagatccacagcgaccagatcacagccagcagccagtacagcaccaactggagcgctgagaggagccggctgaactacccagaaaatggctggaccccaggagaagattcctaccgggagtggatccaggtggacctgggcctgctgcgctttgtgacagctgtgggcacccagggcgccatcagcaaggagaccaagaagaagtactacgtgaagacctacaagattgatgtgagcagcaatggagaggactggatcaccatcaaggagggcaacaagcctgtgctcttccagggcaacaccaaccccacagatgtggtggtggccgtgttccccaagcccctcatcaccaggtttgtgcgcatcaagccagccacctgggagaccggcatctccatgagatttgaggtgtatggctgcaagatcacagactacccctgcagcggcatgctgggcatggtgtctggcctcatcagtgacagccagatcaccagcagcaaccagggcgacaggaactggatgcctgagaacatccggctggtgaccagccgcagcggctgggccctgcccccagccccccacagctacatcaatgagtggctgcagattgacctgggggaggagaagatcgtgcggggcatcatcatccagggcggcaagcaccgggagaacaaggtgttcatgaggaagttcaagattggctacagcaacaacggcagtgactggaagatgatcatggatgacagcaagaggaaggccaagagctttgagggcaacaacaactatgacaccccagagctgcggaccttccctgccctgagcacccgcttcatccgcatctacccagagcgggccacccatggaggcctgggcctgaggatggagctgctgggctgtgaggtggaggcccccacagctggccccaccacccccaacggcaacctggtggatgaatgtgatgatgaccaggccaactgccacagcggcactggagatgacttccagctgactggaggcaccaccgtgctggccacagagaagcccaccgtgattgacagcaccatccagagcgagttccccacctacggcttcaactgtgaatttggctggggcagccacaagaccttctgccactgggagcatgacaaccacgtgcagctgaagtggagcgtgctgaccagcaagacaggccccatccaggaccacactggagatggcaacttcatctacagccaggctgatgagaaccagaagggcaaggtggcccggctggtgtcccctgtggtgtacagccagaacagcgcccactgcatgaccttctggtaccacatgagcggcagccacgtgggcaccctgcgggtgaagctgcgctaccagaagccagaggagtatgaccagctggtgtggatggccatcggccaccagggcgaccactggaaggagggccgggtgctgctgcacaagagcctgaagctgtaccaggtgatctttgaaggagaaattggaaaaggaaacctgggcggcattgctgtggatgacatcagcatcaacaaccacatcagccaggaggactgtgccaagccagctgacctggacaagaagaaccctgagatcaagattgatgaaacaggcagcaccccaggctatgaaggagagggggagggggacaagaacatcagcaggaagccaggaaatgtgctgaagaccctggaccccatcctgatcaccatcatcgccatgtctgccctgggcgtgctgctgggcgctgtgtgtggggtggtgctgtactgtgcctgctggcacaacggcatgtctgaaagaaacctgagcgccctggagaactacaactttgagctggtggatggagtgaagctgaagaaggacaagctgaacacccagagcacctacagcgaggcctag

SEQ ID NO: 20792 - DNA, 420 bp, synthetic construct
  misc_feature 1..420: note = Description of Artificial Sequence: Synthetic coding sequence
  source 1..420: mol_type = other DNA
atggatgacagcaagaggaaggccaagagctttgagggcaacaacaactatgacaccccagagctgcggaccttccctgccctgagcacccgcttcatccgcatctacccagagcgggccacccacggcggcctgggcctgaggatggagctgctgggctgtgaggtggaggcccccacagctggccccaccaccccaaatggaaacctggtggatgaatgtgatgatgaccaggccaactgccacagcggcactggagatgacttccagctgaccggcggcaccaccgtgctggccacagagaagcccaccgtcatcgacagcaccatccagagcggcagccgcttcttcaagcaccaccacaagcagcagagcatgaggccccagaacctgcaccacaacagcatcctgctgctgtag

SEQ ID NO: 20793 - DNA, 1926 bp, synthetic construct
  misc_feature 1..1926: note = Description of Artificial Sequence: Synthetic coding sequence
  source 1..1926: mol_type = other DNA
atggagcggggcctgcccctgctgtgtgctgtgctggccctggtgctggccccagctggggccttcagaaatgacaagtgtggggacaccatcaagattgagagccctggctacctgaccagccctggctacccccacagctaccaccccagcgagaagtgtgagtggctgatccaggccccagacccctaccagaggatcatgatcaacttcaacccccactttgacctggaggaccgggactgcaagtatgactatgtggaggtgtttgatggagaaaatgaaaatggccacttccggggcaagttctgtgggaagatcgcccctcctcctgtggtgagcagcggccccttcctgttcatcaagtttgtgtctgactatgagacccacggggccggcttcagcatccgctatgagatcttcaagaggggccctgagtgcagccagaactacaccaccccatctggagtcatcaagagccctggcttccctgagaagtaccccaacagcctggagtgcacctacatcgtgtttgtgcccaagatgtctgagatcatcctggagtttgagagctttgacctggagccagacagcaaccccccaggcggcatgttctgccgctatgaccggctggagatctgggatggcttcccagatgtgggcccccacatcggccgctactgcggccagaagaccccaggccgcatccgcagcagcagcggcatcctgtccatggtgttctacacagattctgccatcgccaaggagggcttcagcgccaactacagcgtgctgcagagctctgtgtctgaggacttcaagtgcatggaggccctgggcatggagagcggggagatccacagcgaccagatcacagccagcagccagtacagcaccaactggagcgctgagaggagccggctgaactacccagaaaatggctggaccccaggagaagattcctaccgggagtggatccaggtggacctgggcctgctgcgctttgtgacagctgtgggcacccagggcgccatcagcaaggagaccaagaagaagtactacgtgaagacctacaagattgatgtgagcagcaatggagaggactggatcaccatcaaggagggcaacaagcctgtgctcttccagggcaacaccaaccccacagatgtggtggtggccgtgttccccaagcccctcatcaccaggtttgtgcgcatcaagccagccacctgggagaccggcatctccatgagatttgaggtgtatggctgcaagatcacagactacccctgcagcggcatgctgggcatggtgtctggcctcatcagtgacagccagatcaccagcagcaaccagggcgacaggaactggatgcctgagaacatccggctggtgaccagccgcagcggctgggccctgcccccagccccccacagctacatcaatgagtggctgcagattgacctgggggaggagaagatcgtgcggggcatcatcatccagggcggcaagcaccgggagaacaaggtgttcatgaggaagttcaagattggctacagcaacaacggcagtgactggaagatgatcatggatgacagcaagaggaaggccaagagctttgagggcaacaacaactatgacaccccagagctgcggaccttccctgccctgagcacccgcttcatccgcatctacccagagcgggccacccatggaggcctgggcctgaggatggagctgctgggctgtgaggtggagggcaccatcaacacagaccaggagtgcccctgtgcccgggccctggccaaggatgccaagaagaagaagcgctgggccgacagcacccactgccgctgtgtgcgcagcatccacggggagatgtggagcagcggcaagggcgtgtgcagcctggatgccaacctgtag

SEQ ID NO: 20794 - DNA, 567 bp, synthetic construct
  misc_feature 1..567: note = Description of Artificial Sequence: Synthetic coding sequence
  source 1..567: mol_type = other DNA
atgtctgagatcatcctggagtttgagagctttgacctggagccagacagcaaccccccaggcggcatgttctgccgctatgaccggctggagatctgggatggcttcccagatgtgggcccccacatcggccgctactgcggccagaagaccccaggccgcatccgcagcagcagcggcatcctgtccatggtgttctacacagacagcgccatcgccaaggagggcttcagcgccaactacagcgtgctgcagagctctgtgtctgaggacttcaagtgcatggaggccctgggcatggagagcggggagatccacagcgaccagatcacagccagcagccagtacagcaccaactggagcgctgagaggagccggctgaactacccagaaaatggctggaccccaggagaggacagctaccgggagtggatccaggatgccaagtaccgcctgcgggtgtctgtggtgcgcagcaagagcagcagcagcagcaccagcctggagccccggcccctgagcagcctgaagctgtccttcttctcctacaagatcaagatcacctag

SEQ ID NO: 20795 - DNA, 1830 bp, synthetic construct
  misc_feature 1..1830: note = Description of Artificial Sequence: Synthetic coding sequence
  source 1..1830: mol_type = other DNA
atggagcggggcctgcccctgctgtgtgctgtgctggccctggtgctggccccagctggggccttcagaaatgacaagtgtggggacaccatcaagattgagagccctggctacctgaccagccctggctacccccacagctaccaccccagcgagaagtgtgagtggctgatccaggccccagacccctaccagaggatcatgatcaacttcaacccccactttgacctggaggaccgggactgcaagtatgactatgtggaggtgtttgatggagaaaatgaaaatggccacttccggggcaagttctgtgggaagatcgcccctcctcctgtggtgagcagcggccccttcctgttcatcaagtttgtgtctgactatgagacccacggggccggcttcagcatccgctatgagatcttcaagaggggccctgagtgcagccagaactacaccaccccatctggagtcatcaagagccctggcttccctgagaagtaccccaacagcctggagtgcacctacatcgtgtttgtgcccaagatgtctgagatcatcctggagtttgagagctttgacctggagccagacagcaaccccccaggcggcatgttctgccgctatgaccggctggagatctgggatggcttcccagatgtgggcccccacatcggccgctactgcggccagaagaccccaggccgcatccgcagcagcagcggcatcctgtccatggtgttctacacagattctgccatcgccaaggagggcttcagcgccaactacagcgtgctgcagagctctgtgtctgaggacttcaagtgcatggaggccctgggcatggagagcggggagatccacagcgaccagatcacagccagcagccagtacagcaccaactggagcgctgagaggagccggctgaactacccagaaaatggctggaccccaggagaagattcctaccgggagtggatccaggtggacctgggcctgctgcgctttgtgacagctgtgggcacccagggcgccatcagcaaggagaccaagaagaagtactacgtgaagacctacaagattgatgtgagcagcaatggagaggactggatcaccatcaaggagggcaacaagcctgtgctcttccagggcaacaccaaccccacagatgtggtggtggccgtgttccccaagcccctcatcaccaggtttgtgcgcatcaagccagccacctgggagaccggcatctccatgagatttgaggtgtatggctgcaagatcacagactacccctgcagcggcatgctgggcatggtgtctggcctcatcagtgacagccagatcaccagcagcaaccagggcgacaggaactggatgcctgagaacatccggctggtgaccagccgcagcggctgggccctgcccccagccccccacagctacatcaatgagtggctgcagattgacctgggggaggagaagatcgtgcggggcatcatcatccagggcggcaagcaccgggagaacaaggtgttcatgaggaagttcaagattggctacagcaacaacggcagtgactggaagatgatcatggatgacagcaagaggaaggccaagagctttgagggcaacaacaactatgacaccccagagctgcggaccttccctgccctgagcacccgcttcatccgcatctacccagagcgggccacccatggaggcctgggcctgaggatggagctgctgggctgtgaggtggagggcggcaccaccgtgctggccacagagaagcccaccgtcatcgacagcaccatccagagcggcatcaagtag

SEQ ID NO: 20796 - DNA, 1935 bp, synthetic construct
  misc_feature 1..1935: note = Description of Artificial Sequence: Synthetic coding sequence
  source 1..1935: mol_type = other DNA
atggagcggggcctgcccctgctgtgtgctgtgctggccctggtgctggccccagctggggccttcagaaatgacaagtgtggggacaccatcaagattgagagccctggctacctgaccagccctggctacccccacagctaccaccccagcgagaagtgtgagtggctgatccaggccccagacccctaccagaggatcatgatcaacttcaacccccactttgacctggaggaccgggactgcaagtatgactatgtggaggtgtttgatggagaaaatgaaaatggccacttccggggcaagttctgtgggaagatcgcccctcctcctgtggtgagcagcggccccttcctgttcatcaagtttgtgtctgactatgagacccacggggccggcttcagcatccgctatgagatcttcaagaggggccctgagtgcagccagaactacaccaccccatctggagtcatcaagagccctggcttccctgagaagtaccccaacagcctggagtgcacctacatcgtgtttgtgcccaagatgtctgagatcatcctggagtttgagagctttgacctggagccagacagcaaccccccaggcggcatgttctgccgctatgaccggctggagatctgggatggcttcccagatgtgggcccccacatcggccgctactgcggccagaagaccccaggccgcatccgcagcagcagcggcatcctgtccatggtgttctacacagattctgccatcgccaaggagggcttcagcgccaactacagcgtgctgcagagctctgtgtctgaggacttcaagtgcatggaggccctgggcatggagagcggggagatccacagcgaccagatcacagccagcagccagtacagcaccaactggagcgctgagaggagccggctgaactacccagaaaatggctggaccccaggagaagattcctaccgggagtggatccaggtggacctgggcctgctgcgctttgtgacagctgtgggcacccagggcgccatcagcaaggagaccaagaagaagtactacgtgaagacctacaagattgatgtgagcagcaatggagaggactggatcaccatcaaggagggcaacaagcctgtgctcttccagggcaacaccaaccccacagatgtggtggtggccgtgttccccaagcccctcatcaccaggtttgtgcgcatcaagccagccacctgggagaccggcatctccatgagatttgaggtgtatggctgcaagatcacagactacccctgcagcggcatgctgggcatggtgtctggcctcatcagtgacagccagatcaccagcagcaaccagggcgacaggaactggatgcctgagaacatccggctggtgaccagccgcagcggctgggccctgcccccagccccccacagctacatcaatgagtggctgcagattgacctgggggaggagaagatcgtgcggggcatcatcatccagggcggcaagcaccgggagaacaaggtgttcatgaggaagttcaagattggctacagcaacaacggcagtgactggaagatgatcatggatgacagcaagaggaaggccaagagctttgagggcaacaacaactatgacaccccagagctgcggaccttccctgccctgagcacccgcttcatccgcatctacccagagcgggccacccatggaggcctgggcctgaggatggagctgctgggctgtgaggtggaggcccccacagctggccccaccacccccaacggcaacctggtggatgaatgtgatgatgaccaggccaactgccacagcggcactggagatgacttccagctgactggaggcaccaccgtgctggccacagagaagcccaccgtgattgacagcaccatccagagcggcatcaagtag

SEQ ID NO: 20797 - DNA, 2115 bp, synthetic construct
  misc_feature 1..2115: note = Description of Artificial Sequence: Synthetic coding sequence
  source 1..2115: mol_type = other DNA
atggagcggggcctgcccctgctgtgtgctgtgctggccctggtgctggccccagctggggccttcagaaatgacaagtgtggggacaccatcaagattgagagccctggctacctgaccagccctggctacccccacagctaccaccccagcgagaagtgtgagtggctgatccaggccccagacccctaccagaggatcatgatcaacttcaacccccactttgacctggaggaccgggactgcaagtatgactatgtggaggtgtttgatggagaaaatgaaaatggccacttccggggcaagttctgtgggaagatcgcccctcctcctgtggtgagcagcggccccttcctgttcatcaagtttgtgtctgactatgagacccacggggccggcttcagcatccgctatgagatcttcaagaggggccctgagtgcagccagaactacaccaccccatctggagtcatcaagagccctggcttccctgagaagtaccccaacagcctggagtgcacctacatcgtgtttgtgcccaagatgtctgagatcatcctggagtttgagagctttgacctggagccagacagcaaccccccaggcggcatgttctgccgctatgaccggctggagatctgggatggcttcccagatgtgggcccccacatcggccgctactgcggccagaagaccccaggccgcatccgcagcagcagcggcatcctgtccatggtgttctacacagattctgccatcgccaaggagggcttcagcgccaactacagcgtgctgcagagctctgtgtctgaggacttcaagtgcatggaggccctgggcatggagagcggggagatccacagcgaccagatcacagccagcagccagtacagcaccaactggagcgctgagaggagccggctgaactacccagaaaatggctggaccccaggagaagattcctaccgggagtggatccaggtggacctgggcctgctgcgctttgtgacagctgtgggcacccagggcgccatcagcaaggagaccaagaagaagtactacgtgaagacctacaagattgatgtgagcagcaatggagaggactggatcaccatcaaggagggcaacaagcctgtgctcttccagggcaacaccaaccccacagatgtggtggtggccgtgttccccaagcccctcatcaccaggtttgtgcgcatcaagccagccacctgggagaccggcatctccatgagatttgaggtgtatggctgcaagatcacagactacccctgcagcggcatgctgggcatggtgtctggcctcatcagtgacagccagatcaccagcagcaaccagggcgacaggaactggatgcctgagaacatccggctggtgaccagccgcagcggctgggccctgcccccagccccccacagctacatcaatgagtggctgcagattgacctgggggaggagaagatcgtgcggggcatcatcatccagggcggcaagcaccgggagaacaaggtgttcatgaggaagttcaagattggctacagcaacaacggcagtgactggaagatgatcatggatgacagcaagaggaaggccaagagctttgagggcaacaacaactatgacaccccagagctgcggaccttccctgccctgagcacccgcttcatccgcatctacccagagcgggccacccatggaggcctgggcctgaggatggagctgctgggctgtgaggtggaggcccccacagctggccccaccacccccaacggcaacctggtggatgaatgtgatgatgaccaggccaactgccacagcggcactggagatgacttccagctgactggagctgagaccatcttcatccccctgctgtaccacttcagcagctgcctgtcctgggaccagctgacccctgtgtgtgtgctggtgacccctcatggccgggagctgcccaggaacagaagctgcctggcccggacccgggccagcagcttcccccacgtgatctggattgatgagctgttcctgattgccaccaccatctgcaacaacaacctgagccactttgagagccagaggctgggcctgtcctag

SEQ ID NO: 20798 - DNA, 261 bp, synthetic construct
  misc_feature 1..261: note = Description of Artificial Sequence: Synthetic coding sequence
  source 1..261: mol_type = other DNA
atggagctgctgggctgtgaggtggaggcccccacagctggccccaccaccccaaatggaaacctggtggatgaatgtgatgatgaccaggccaactgccacagcggcactggagatgacttccagctgaccggcggcaccaccgtgctggccacagagaagcccaccgtcatcgacagcaccatccagagcgcccggctggaggtgtccaccctgaacctgagcctgcacaaccccccccagcagaaggccctgatctag

SEQ ID NO: 20799 - DNA, 2772 bp, synthetic construct; identical to SEQ ID NO: 20791
  misc_feature 1..2772: note = Description of Artificial Sequence: Synthetic coding sequence
  source 1..2772: mol_type = other DNA

SEQ ID NO: 20800 - DNA, 2208 bp, synthetic construct
  misc_feature 1..2208: note = Description of Artificial Sequence: Synthetic coding sequence
  source 1..2208: mol_type = other DNA
atgtctgagatcatcctggagtttgagagctttgacctggagccagacagcaaccccccaggcggcatgttctgccgctatgaccggctggagatctgggatggcttcccagatgtgggcccccacatcggccgctactgcggccagaagaccccaggccgcatccgcagcagcagcggcatcctgtccatggtgttctacacagacagcgccatcgccaaggagggcttcagcgccaactacagcgtgctgcagagctctgtgtctgaggacttcaagtgcatggaggccctgggcatggagagcggggagatccacagcgaccagatcacagccagcagccagtacagcaccaactggagcgctgagaggagccggctgaactacccagaaaatggctggaccccaggagaggacagctaccgggagtggatccaggtggacctgggcctgctgcgctttgtgacagctgtgggcacccagggcgccatcagcaaggagaccaagaagaagtactacgtgaagacctacaagattgatgtgagcagcaatggagaggactggatcaccatcaaggagggcaacaagcctgtgctcttccagggcaacaccaaccccacagatgtggtggtggccgtgttccccaagcccctcatcaccaggtttgtgcgcatcaagccagccacctgggagaccggcatctccatgagatttgaggtgtatggctgcaagatcacagactacccctgcagcggcatgctgggcatggtgtctggcctcatcagtgacagccagatcaccagcagcaaccagggcgacaggaactggatgcctgagaacatccggctggtgaccagccgcagcggctgggccctgcccccagccccccacagctacatcaatgagtggctgcagattgacctgggggaggagaagatcgtgcggggcatcatcatccagggcggcaagcaccgggagaacaaggtgttcatgaggaagttcaagattggctacagcaacaatggaagtgactggaagatgatcatggatgacagcaagaggaaggccaagagctttgagggcaacaacaactatgacaccccagagctgcggaccttccctgccctgagcacccgcttcatccgcatctacccagagcgggccacccacggcggcctgggcctgaggatggagctgctgggctgtgaggtggaggcccccacagctggccccaccaccccaaatggaaacctggtggatgaatgtgatgatgaccaggccaactgccacagcggcactggaggcaccaccgtgctggccacagagaagcccaccgtgattgacagcaccatccagagcgagttccccacctacggcttcaactgtgaatttggctggggcagccacaagaccttctgccactgggagcatgacaaccacgtgcagctgaagtggagcgtgctgaccagcaagacaggccccatccaggaccacactggagatggcaacttcatctacagccaggctgatgagaaccagaagggcaaggtggcccggctggtgtcccctgtggtgtacagccagaacagcgcccactgcatgaccttctggtaccacatgagcggcagccacgtgggcaccctgcgggtgaagctgcgctaccagaagccagaggagtatgaccagctggtgtggatggccatcggccaccagggcgaccactggaaggagggccgggtgctgctgcacaagagcctgaagctgtaccaggtgatctttgaaggagaaattggaaaaggaaacctgggcggcattgctgtggatgacatcagcatcaacaaccacatcagccaggaggactgtgccaagccagctgacctggacaagaagaaccctgagatcaagattgatgaaacaggcagcaccccaggctatgaaggagagggggagggggacaagaacatcagcaggaagccaggaaatgtgctgaagaccctggaccccatcctgatcaccatcatcgccatgtctgccctgggcgtgctgctgggcgctgtgtgtggggtggtgctgtactgtgcctgctggcacaacggcatgtctgaaagaaacctgagcgccctggagaactacaactttgagctggtggatggagtgaagctgaagaaggacaagctgaacacccagagcacctacagcgaggcctag

SEQ ID NO: 20801 - DNA, 2721 bp, synthetic construct
  misc_feature 1..2721: note = Description of Artificial Sequence: Synthetic coding sequence
  source 1..2721: mol_type = other DNA
atggagcggggcctgcccctgctgtgtgctgtgctggccctggtgctggccccagctggggccttcagaaatgacaagtgtggggacaccatcaagattgagagccctggctacctgaccagccctggctacccccacagctaccaccccagcgagaagtgtgagtggctgatccaggccccagacccctaccagaggatcatgatcaacttcaacccccactttgacctggaggaccgggactgcaagtatgactatgtggaggtgtttgatggagaaaatgaaaatggccacttccggggcaagttctgtgggaagatcgcccctcctcctgtggtgagcagcggccccttcctgttcatcaagtttgtgtctgactatgagacccacggggccggcttcagcatccgctatgagatcttcaagaggggccctgagtgcagccagaactacaccaccccatctggagtcatcaagagccctggcttccctgagaagtaccccaacagcctggagtgcacctacatcgtgtttgtgcccaagatgtctgagatcatcctggagtttgagagctttgacctggagccagacagcaaccccccaggcggcatgttctgccgctatgaccggctggagatctgggatggcttcccagatgtgggcccccacatcggccgctactgcggccagaagaccccaggccgcatccgcagcagcagcggcatcctgtccatggtgttctacacagattctgccatcgccaaggagggcttcagcgccaactacagcgtgctgcagagctctgtgtctgaggacttcaagtgcatggaggccctgggcatggagagcggggagatccacagcgaccagatcacagccagcagccagtacagcaccaactggagcgctgagaggagccggctgaactacccagaaaatggctggaccccaggagaagattcctaccgggagtggatccaggtggacctgggcctgctgcgctttgtgacagctgtgggcacccagggcgccatcagcaaggagaccaagaagaagtactacgtgaagacctacaagattgatgtgagcagcaatggagaggactggatcaccatcaaggagggcaacaagcctgtgctcttccagggcaacaccaaccccacagatgtggtggtggccgtgttccccaagcccctcatcaccaggtttgtgcgcatcaagccagccacctgggagaccggcatctccatgagatttgaggtgtatggctgcaagatcacagactacccctgcagcggcatgctgggcatggtgtctggcctcatcagtgacagccagatcaccagcagcaaccagggcgacaggaactggatgcctgagaacatccggctggtgaccagccgcagcggctgggccctgcccccagccccccacagctacatcaatgagtggctgcagattgacctgggggaggagaagatcgtgcggggcatcatcatccagggcggcaagcaccgggagaacaaggtgttcatgaggaagttcaagattggctacagcaacaacggcagtgactggaagatgatcatggatgacagcaagaggaaggccaagagctttgagggcaacaacaactatgacaccccagagctgcggaccttccctgccctgagcacccgcttcatccgcatctacccagagcgggccacccatggaggcctgggcctgaggatggagctgctgggctgtgaggtggaggcccccacagctggccccaccacccccaacggcaacctggtggatgaatgtgatgatgaccaggccaactgccacagcggcactggagatgacttccagctgactggaggcaccaccgtgctggccacagagaagcccaccgtgattgacagcaccatccagagcgagttccccacctacggcttcaactgtgaatttggctggggcagccacaagaccttctgccactgggagcatgacaaccacgtgcagctgaagtggagcgtgctgaccagcaagacaggccccatccaggaccacactggagatggcaacttcatctacagccaggctgatgagaaccagaagggcaaggtggcccggctggtgtcccctgtggtgtacagccagaacagcgcccactgcatgaccttctggtaccacatgagcggcagccacgtgggcaccctgcgggtgaagctgcgctaccagaagccagaggagtatgaccagctggtgtggatggccatcggccaccagggcgaccactggaaggagggccgggtgctgctgcacaagagcctgaagctgtaccaggtgatctttgaaggagaaattggaaaaggaaacctgggcggcattgctgtggatgacatcagcatcaacaaccacatcagccaggaggactgtgcccggagcaccccaggctatgaaggagagggggagggggacaagaacatcagcaggaagccaggaaatgtgctgaagaccctggaccccatcctgatcaccatcatcgccatgtctgccctgggcgtgctgctgggcgctgtgtgtggggtggtgctgtactgtgcctgctggcacaacggcatgtctgagaggaacctgagcgccctggagaactacaactttgagctggtggatggagtgaagctgaagaaggacaagctgaacacccagagcacctacagcgaggcctag

SEQ ID NO: 20802 - DNA, 318 bp, synthetic construct
  misc_feature 1..318: note = Description of Artificial Sequence: Synthetic coding sequence
  source 1..318: mol_type = other DNA
aaccacatcagccaggaggactgtgcccggagcaccccaggctatgaaggagagggggagggggacaagaacatcagcaggaagccaggaaatgtgctgaagaccctggaccccatcctgatcaccatcatcgccatgtctgccctgggcgtgctgctgggcgctgtgtgtggggtggtgctgtactgtgcctgctggcacaacggcatgtctgaaagaaacctgagcgccctggagaactacaactttgagctggtggatggagtgaagctgaagaaggacaagctgaacacccagagcacctacagcgaggcctag

SEQ ID NO: 20803 - DNA, 234 bp, synthetic construct
  misc_feature 1..234: note = Description of Artificial Sequence: Synthetic coding sequence
  source 1..234: mol_type = other DNA
tgacccacagctggccccaccacccccaacggcaacctggtggatgaatgtgatgatgaccaggccaactgccacagcggcactggagatgacttccagctgactggaggcaccaccgtgctggccacagagaagcccaccgtgattgacagcaccatccagagcgcccggctggaggtgtccaccctgaacctgagcctgcacaaccccccccagcagaaggccctgatctag

SEQ ID NO: 20804 - DNA, 303 bp, synthetic construct
  misc_feature 1..303: note = Description of Artificial Sequence: Synthetic coding sequence
  source 1..303: mol_type = other DNA
tgaacacatggaggcctgggcctgaggatggagctgctgggctgtgaggtggaggcccccacagctggccccaccacccccaacggcaacctggtggatgaatgtgatgatgaccaggccaactgccacagcggcactggagatgacttccagctgactggaggcaccaccgtgctggccacagagaagcccaccgtgattgacagcaccatccagagcggcagccgcttcttcaagcaccaccacaagcagcagagcatgaggccccagaacctgcaccacaacagcatcctgctgctgtag

SEQ ID NO: 20805 - DNA, 711 bp, synthetic construct
  misc_feature 1..711: note = Description of Artificial Sequence: Synthetic coding sequence
  source 1..711: mol_type = other DNA
gtggacctgggcctgctgcgctttgtgacagctgtgggcacccagggcgccatcagcaaggagaccaagaagaagtactacgtgaagacctacaagattgatgtgagcagcaatggagaggactggatcaccatcaaggagggcaacaagcctgtgctcttccagggcaacaccaaccccacagatgtggtggtggccgtgttccccaagcccctcatcaccaggtttgtgcgcatcaagccagccacctgggagaccggcatctccatgagatttgaggtgtatggctgcaagatcacagactacccctgcagcggcatgctgggcatggtgtctggcctcatcagtgacagccagatcaccagcagcaaccagggcgacaggaactggatgcctgagaacatccggctggtgaccagccgcagcggctgggccctgcccccagccccccacagctacatcaatgagtggctgcagattgacctgggggaggagaagatcgtgcggggcatcatcatccagggcggcaagcaccgggagaacaaggtgttcatgaggaagttcaagattggctacagcaacaatggaagtgactggaagatgatcatggatgacagcaagaggaaggccaaggtgcgggccggggactgggaggaggtgatcccctacgtgctggacttcaaccagggccccctggccttcagcaggtag

SEQ ID NO: 20806 - DNA, 513 bp, synthetic construct
  misc_feature 1..513: note = Description of Artificial Sequence: Synthetic coding sequence
  source 1..513: mol_type = other DNA
tgaccaggcggcatgttctgccgctatgaccggctggagatctgggatggcttcccagatgtgggcccccacatcggccgctactgcggccagaagaccccaggccgcatccgcagcagcagcggcatcctgtccatggtgttctacacagacagcgccatcgccaaggagggcttcagcgccaactacagcgtgctgcagagctctgtgtctgaggacttcaagtgcatggaggccctgggcatggagagcggggagatccacagcgaccagatcacagccagcagccagtacagcaccaactggagcgctgagaggagccggctgaactacccagaaaatggctggaccccaggagaggacagctaccgggagtggatccaggatgccaagtaccgcctgcgggtgtctgtggtgcgcagcaagagcagcagcagcagcaccagcctggagccccggcccctgagcagcctgaagctgtccttcttctcctacaagatcaagatcacctag

SEQ ID NO: 20807 - DNA, 2721 bp, synthetic construct
  misc_feature 1..2721: note = Description of Artificial Sequence: Synthetic coding sequence
  source 1..2721: mol_type = other DNA
atggacatgttccccctgacctgggtgttcctggccctgtacttcagccgccaccaggtgcggggccagcctgaccccccctgtggcggccgcctgaacagcaaggatgctggctacatcaccagccctggctacccccaggactaccccagccaccagaactgtgagtggatcgtgtatgcccctgagcccaaccagaagatcgtgctgaacttcaacccccactttgaaattgagaagcatgactgcaagtatgacttcatcgagatcagagatggagacagcgagagcgctgacctgctgggcaagcactgcggcaacatcgccccacccaccatcatcagcagcggctccatgctgtacatccgcttcaccagtgactatgcccggcagggcgccggcttcagcctgcgctatgagatcttcaagacaggcagcgaggactgcagcaagaacttcaccagccccaacggcaccatcgagagccctggcttccctgagaagtacccccacaacctggactgcaccttcaccatcctggccaagcccaagatggagatcatcctgcagttcctgatctttgacctggagcatgaccccctgcaggtgggggagggggactgcaagtatgactggctggacatctgggatggcatcccccacgtgggccccctcatcggcaagtactgcggcaccaagacccccagcgagctgcggagcagcacaggcatcctgagcctgaccttccacacagacatggctgtggccaaggatggcttcagcgcccgctactacctggtgcaccaggagcccctggagaacttccagtgcaatgtgcccctgggcatggagagcggccgcatcgccaatgagcagatcagcgccagcagcacctacagtgatggccgctggaccccccagcagagccggctgcatggagatgacaatggctggacccccaacctggacagcaacaaggagtacctgcaggtggacctgcgcttcctgaccatgctgacagccatcgccacccagggcgccatcagccgggagacccagaatggctactacgtgaagagctacaagctggaggtgtccaccaacggggaggactggatggtgtacagacatggcaagaaccacaaggtgttccaggccaacaatgatgccacagaggtggtgctgaacaagctgcacgcccccctgctgaccaggtttgtgcgcatccggccccagacctggcacagcggcatcgccctgcggctggagctgtttggctgccgggtgacagatgccccctgcagcaacatgctgggcatgctgagcggcctgattgctgacagccagatcagcgccagcagcacccaggagtacctgtggagccccagcgctgcccggctggtgagcagccgcagcggctggttcccccgcatcccccaggcccagcctggagaggagtggctgcaggtggacctgggcacccccaagacagtgaagggcgtcatcatccagggcgcccggggcggggacagcatcacagctgtggaggcccgggcctttgtgaggaagttcaaggtgtcctacagcctgaatggcaaggactgggagtacatccaggaccccaggacccagcagcccaagctgtttgagggcaacatgcactatgacaccccagacatcagaagatttgaccccatcccagcccagtatgtgcgggtgtacccagagcgctggagccctgctggcatcggcatgaggctggaggtgctgggctgtgactggacagacagcaagcccaccgtggagaccctgggccccaccgtgaagtctgaggagaccaccaccccctaccccacagaggaggaggccacagaatgtggggagaactgcagctttgaagatgacaaggacctgcagctgcccagcggcttcaactgcaactttgacttcctggaggagccctgtggctggatgtatgaccacgccaagtggctgcggaccacctgggccagcagcagcagccccaatgacaggaccttcccagatgacaggaacttcctgcggctgcagagcgacagccagcgggagggccagtatgcccggctcatcagcccccctgtgcacctgcccaggagccctgtgtgcatggagttccagtaccaggccactggaggccggggcgtggccctgcaggtggtgcgggaggccagccaggagagcaagctgctgtgggtgatccgggaggaccagggcggggagtggaagcacggccgcatcatcctgcccagctatgacatggagtaccagatcgtgtttgagggcgtcatcggcaagggccgctctggagagatcgccattgatgacatccgcatcagcacagatgtgcccctggagaactgcatggagcccatcagcgcctttgctggggagaacttcaagggcggcaccctgctgcctggaacagagcccaccgtggacacagtgcccatgcagcccatcccagcctactggtactacgtgatggctgctggaggagctgtgctggtgctggtgtctgtggccctggccctggtgctgcactaccaccgcttccgctatgctgccaagaagacagaccacagcatcacctacaagaccagccactacaccaacggggcccccctggccgtggagcccaccctgaccatcaagctggagcaggaccggggcagccactgctag

SEQ ID NO: 20808 - DNA, 300 bp, synthetic construct
  misc_feature 1..300: note = Description of Artificial Sequence: Synthetic coding sequence
  source 1..300: mol_type = other DNA
atggacatgttccccctgacctgggtgttcctggccctgtacttcagccgccaccaggtgcggggccagcctgaccccccctgtggcggccgcctgaacagcaaggatgctggctacatcaccagccctggctacccccaggactaccccagccaccagaactgtgagtggatcgtgtatgcccctgagcccaaccagaagatcgtgctgaacttcaacccccactttgaaattgagaagcatgactgcaacctgctgagcgcctggaagatcagcctgaccagccgcagctttgcctag

SEQ ID NO: 20809 - DNA, 1668 bp, synthetic construct
  misc_feature 1..1668: note = Description of Artificial Sequence: Synthetic coding sequence
  source 1..1668: mol_type = other DNA
atggacatgttccccctgacctgggtgttcctggccctgtacttcagccgccaccaggtgcggggccagcctgaccccccctgtggcggccgcctgaacagcaaggatgctggctacatcaccagccctggctacccccaggactaccccagccaccagaactgtgagtggatcgtgtatgcccctgagcccaaccagaagatcgtgctgaacttcaacccccactttgaaattgagaagcatgactgcaagtatgacttcatcgagatcagagatggagacagcgagagcgctgacctgctgggcaagcactgcggcaacatcgccccacccaccatcatcagcagcggctccatgctgtacatccgcttcaccagtgactatgcccggcagggcgccggcttcagcctgcgctatgagatcttcaagacaggcagcgaggactgcagcaagaacttcaccagccccaacggcaccatcgagagccctggcttccctgagaagtacccccacaacctggactgcaccttcaccatcctggccaagcccaagatggagatcatcctgcagttcctgatctttgacctggagcatgaccccctgcaggtgggggagggggactgcaagtatgactggctggacatctgggatggcatcccccacgtgggccccctcatcggcaagtactgcggcaccaagacccccagcgagctgcggagcagcacaggcatcctgagcctgaccttccacacagacatggctgtggccaaggatggcttcagcgcccgctactacctggtgcaccaggagcccctggagaacttccagtgcaatgtgcccctgggcatggagagcggccgcatcgccaatgagcagatcagcgccagcagcacctacagtgatggccgctggaccccccagcagagccggctgcatggagatgacaatggctggacccccaacctggacagcaacaaggagtacctgcaggtggacctgcgcttcctgaccatgctgacagccatcgccacccagggcgccatcagccgggagacccagaatggctactacgtgaagagctacaagctggaggtgtccaccaacggggaggactggatggtgtacagacatggcaagaaccacaaggtgttccaggccaacaatgatgccacagaggtggtgctgaacaagctgcacgcccccctgctgaccaggtttgtgcgcatccggccccagacctggcacagcggcatcgccctgcggctggagctgtttggctgccgggtgacagatgccccctgcagcaacatgctgggcatgctgagcggcctgattgctgacagccagatcagcgccagcagcacccaggagtacctgtggagccccagcgctgcccggctggtgagcagccgcagcggctggttcccccgcatcccccaggcccagcctggagaggagtggctgcaggtggacctgggcacccccaagacagtgaagggcgtcatcatccagggcgcccggggcggggacagcatcacagctgtggaggcccgggcctttgtgaggaagttcaaggtgtcctacagcctgaatggcaaggactgggagtacatccaggaccccaggacccagcagcccaaggtgggctgctcctggaggcccctgtag

SEQ ID NO: 20810 - DNA, 2706 bp, synthetic construct
  misc_feature 1..2706: note = Description of Artificial Sequence: Synthetic coding sequence
  source 1..2706: mol_type = other DNA
atggacatgttccccctgacctgggtgttcctggccctgtacttcagccgccaccaggtgcggggccagcctgaccccccctgtggcggccgcctgaacagcaaggatgctggctacatcaccagccctggctacccccaggactaccccagccaccagaactgtgagtggatcgtgtatgcccctgagcccaaccagaagatcgtgctgaacttcaacccccactttgaaattgagaagcatgactgcaagtatgacttcatcgagatcagagatggagacagcgagagcgctgacctgctgggcaagcactgcggcaacatcgccccacccaccatcatcagcagcggctccatgctgtacatccgcttcaccagtgactatgcccggcagggcgccggcttcagcctgcgctatgagatcttcaagacaggcagcgaggactgcagcaagaacttcaccagccccaacggcaccatcgagagccctggcttccctgagaagtacccccacaacctggactgcaccttcaccatcctggccaagcccaagatggagatcatcctgcagttcctgatctttgacctggagcatgaccccctgcaggtgggggagggggactgcaagtatgactggctggacatctgggatggcatcccccacgtgggccccctcatcggcaagtactgcggcaccaagacccccagcgagctgcggagcagcacaggcatcctgagcctgaccttccacacagacatggctgtggccaaggatggcttcagcgcccgctactacctggtgcaccaggagcccctggagaacttccagtgcaatgtgcccctgggcatggagagcggccgcatcgccaatgagcagatcagcgccagcagcacctacagtgatggccgctggaccccccagcagagccggctgcatggagatgacaatggctggacccccaacctggacagcaacaaggagtacctgcaggtggacctgcgcttcctgaccatgctgacagccatcgccacccagggcgccatcagccgggagacccagaatggctactacgtgaagagctacaagctggaggtgtccaccaacggggaggactggatggtgtacagacatggcaagaaccacaaggtgttccaggccaacaatgatgccacagaggtggtgctgaacaagctgcacgcccccctgctgaccaggtttgtgcgcatccggccccagacctggcacagcggcatcgccctgcggctggagctgtttggctgccgggtgacagatgccccctgcagcaacatgctgggcatgctgagcggcctgattgctgacagccagatcagcgccagcagcacccaggagtacctgtggagccccagcgctgcccggctggtgagcagccgcagcggctggttcccccgcatcccccaggcccagcctggagaggagtggctgcaggtggacctgggcacccccaagacagtgaagggcgtcatcatccagggcgcccggggcggggacagcatcacagctgtggaggcccgggcctttgtgaggaagttcaaggtgtcctacagcctgaatggcaaggactgggagtacatccaggaccccaggacccagcagcccaagctgtttgagggcaacatgcactatgacaccccagacatcagaagatttgaccccatcccagcccagtatgtgcgggtgtacccagagcgctggagccctgctggcatcggcatgaggctggaggtgctgggctgtgactggacagacagcaagcccaccgtggagaccctgggccccaccgtgaagtctgaggagaccaccaccccctaccccacagaggaggaggccacagaatgtggggagaactgcagctttgaagatgacaaggacctgcagctgcccagcggcttcaactgcaactttgacttcctggaggagccctgtggctggatgtatgaccacgccaagtggctgcggaccacctgggccagcagcagcagccccaatgacaggaccttcccagatgacaggaacttcctgcggctgcagagcgacagccagcgggagggccagtatgcccggctcatcagcccccctgtgcacctgcccaggagccctgtgtgcatggagttccagtaccaggccactggaggccggggcgtggccctgcaggtggtgcgggaggccagccaggagagcaagctgctgtgggtgatccgggaggaccagggcggggagtggaagcacggccgcatcatcctgcccagctatgacatggagtaccagatcgtgtttgagggcgtcatcggcaagggccgctctggagagatcgccattgatgacatccgcatcagcacagatgtgcccctggagaactgcatggagcccatcagcgcctttgctgggggcaccctgctgcccggcacagagcccaccgtggacacagtgcccatgcagcccatcccagcctactggtactacgtgatggccgccggcggcgctgtgctggtgctggtgtctgtggccctggccctggtgctgcactaccaccgcttccgctatgctgccaagaagacagaccacagcatcacctacaagaccagccactacaccaatggagcccccctggccgtggagcccaccctgaccatcaagctggagcaggaccggggcagccactgctag

SEQ ID NO: 20811 - DNA, 2781 bp, synthetic construct
  misc_feature 1..2781: note = Description of Artificial Sequence: Synthetic coding sequence
  source 1..2781: mol_type = other DNA
atggacatgttccccctgacctgggtgttcctggccctgtacttcagccgccaccaggtgcggggccagcctgaccccccctgtggcggccgcctgaacagcaaggatgctggctacatcaccagccctggctacccccaggactaccccagccaccagaactgtgagtggatcgtgtatgcccctgagcccaaccagaagatcgtgctgaacttcaacccccactttgaaattgagaagcatgactgcaagtatgacttcatcgagatcagagatggagacagcgagagcgctgacctgctgggcaagcactgcggcaacatcgccccacccaccatcatcagcagcggctccatgctgtacatccgcttcaccagtgactatgcccggcagggcgccggcttcagcctgcgctatgagatcttcaagacaggcagcgaggactgcagcaagaacttcaccagccccaacggcaccatcgagagccctggcttccctgagaagtacccccacaacctggactgcaccttcaccatcctggccaagcccaagatggagatcatcctgcagttcctgatctttgacctggagcatgaccccctgcaggtgggggagggggactgcaagtatgactggctggacatctgggatggcatcccccacgtgggccccctcatcggcaagtactgcggcaccaagacccccagcgagctgcggagcagcacaggcatcctgagcctgaccttccacacagacatggctgtggccaaggatggcttcagcgcccgctactacctggtgcaccaggagcccctggagaacttccagtgcaatgtgcccctgggcatggagagcggccgcatcgccaatgagcagatcagcgccagcagcacctacagtgatggccgctggaccccccagcagagccggctgcatggagatgacaatggctggacccccaacctggacagcaacaaggagtacctgcaggtggacctgcgcttcctgaccatgctgacagccatcgccacccagggcgccatcagccgggagacccagaatggctactacgtgaagagctacaagctggaggtgtccaccaacggggaggactggatggtgtacagacatggcaagaaccacaaggtgttccaggccaacaatgatgccacagaggtggtgctgaacaagctgcacgcccccctgctgaccaggtttgtgcgcatccggccccagacctggcacagcggcatcgccctgcggctggagctgtttggctgccgggtgacagatgccccctgcagcaacatgctgggcatgctgagcggcctgattgctgacagccagatcagcgccagcagcacccaggagtacctgtggagccccagcgctgcccggctggtgagcagccgcagcggctggttcccccgcatcccccaggcccagcctggagaggagtggctgcaggtggacctgggcacccccaagacagtgaagggcgtcatcatccagggcgcccggggcggggacagcatcacagctgtggaggcccgggcctttgtgaggaagttcaaggtgtcctacagcctgaatggcaaggactgggagtacatccaggaccccaggacccagcagcccaagctgtttgagggcaacatgcactatgacaccccagacatcagaagatttgaccccatcccagcccagtatgtgcgggtgtacccagagcgctggagccctgctggcatcggcatgaggctggaggtgctgggctgtgactggacagacagcaagcccaccgtggagaccctgggccccaccgtgaagtctgaggagaccaccaccccctaccccacagaggaggaggccacagaatgtggggagaactgcagctttgaagatgacaaggacctgcagctgcccagcggcttcaactgcaactttgacttcctggaggagccctgtggctggatgtatgaccacgccaagtggctgcggaccacctgggccagcagcagcagccccaatgacaggaccttcccagatgacaggaacttcctgcggctgcagagcgacagccagcgggagggccagtatgcccggctcatcagcccccctgtgcacctgcccaggagccctgtgtgcatggagttccagtaccaggccactggaggccggggcgtggccctgcaggtggtgcgggaggccagccaggagagcaagctgctgtgggtgatccgggaggaccagggcggggagtggaagcacggccgcatcatcctgcccagctatgacatggagtaccagatcgtgtttgagggcgtcatcggcaagggccgctctggagagatcgccattgatgacatccgcatcagcacagatgtgcccctggagaactgcatggagcccatcagcgcctttgctgtggacatccctgagatccacgagcgggagggctatgaagatgaaattgatgatgaatatgaggtggactggagcaacagcagcagcgccaccagcggcagcggggcccccagcacagacaaggagaagtcctggctgtacaccctggaccccatcctgatcaccatcatcgccatgagcagcctgggcgtgctgctgggcgccacctgtgccggcctgctgctgtactgcacctgcagctacagcggcctgagcagccgcagctgcaccaccctggagaactacaactttgagctgtatgatggcctgaagcacaaggtgaagatgaaccaccagaagtgctgcagcgaggcctag

SEQ ID NO: 20812 - DNA, 2796 bp, synthetic construct
  misc_feature 1..2796: note = Description of Artificial Sequence: Synthetic coding sequence
  source 1..2796: mol_type = other DNA
atggacatgttccccctgacctgggtgttcctggccctgtacttcagccgccaccaggtgcggggccagcctgaccccccctgtggcggccgcctgaacagcaaggatgctggctacatcaccagccctggctacccccaggactaccccagccaccagaactgtgagtggatcgtgtatgcccctgagcccaaccagaagatcgtgctgaacttcaacccccactttgaaattgagaagcatgactgcaagtatgacttcatcgagatcagagatggagacagcgagagcgctgacctgctgggcaagcactgcggcaacatcgccccacccaccatcatcagcagcggctccatgctgtacatccgcttcaccagtgactatgcccggcagggcgccggcttcagcctgcgctatgagatcttcaagacaggcagcgaggactgcagcaagaacttcaccagccccaacggcaccatcgagagccctggcttccctgagaagtacccccacaacctggactgcaccttcaccatcctggccaagcccaagatggagatcatcctgcagttcctgatctttgacctggagcatgaccccctgcaggtgggggagggggactgcaagtatgactggctggacatctgggatggcatcccccacgtgggccccctcatcggcaagtactgcggcaccaagacccccagcgagctgcggagcagcacaggcatcctgagcctgaccttccacacagacatggctgtggccaaggatggcttcagcgcccgctactacctggtgcaccaggagcccctggagaacttccagtgcaatgtgcccctgggcatggagagcggccgcatcgccaatgagcagatcagcgccagcagcacctacagtgatggccgctggaccccccagcagagccggctgcatggagatgacaatggctggacccccaacctggacagcaacaaggagtacctgcaggtggacctgcgcttcctgaccatgctgacagccatcgccacccagggcgccatcagccgggagacccagaatggctactacgtgaagagctacaagctggaggtgtccaccaacggggaggactggatggtgtacagacatggcaagaaccacaaggtgttccaggccaacaatgatgccacagaggtggtgctgaacaagctgcacgcccccctgctgaccaggtttgtgcgcatccggccccagacctggcacagcggcatcgccctgcggctggagctgtttggctgccgggtgacagatgccccctgcagcaacatgctgggcatgctgagcggcctgattgctgacagccagatcagcgccagcagcacccaggagtacctgtggagccccagcgctgcccggctggtgagcagccgcagcggctggttcccccgcatcccccaggcccagcctggagaggagtggctgcaggtggacctgggcacccccaagacagtgaagggcgtcatcatccagggcgcccggggcggggacagcatcacagctgtggaggcccgggcctttgtgaggaagttcaaggtgtcctacagcctgaatggcaaggactgggagtacatccaggaccccaggacccagcagcccaagctgtttgagggcaacatgcactatgacaccccagacatcagaagatttgaccccatcccagcccagtatgtgcgggtgtacccagagcgctggagccctgctggcatcggcatgaggctggaggtgctgggctgtgactggacagacagcaagcccaccgtggagaccctgggccccaccgtgaagtctgaggagaccaccaccccctaccccacagaggaggaggccacagaatgtggggagaactgcagctttgaagatgacaaggacctgcagctgcccagcggcttcaactgcaactttgacttcctggaggagccctgtggctggatgtatgaccacgccaagtggctgcggaccacctgggccagcagcagcagccccaatgacaggaccttcccagatgacaggaacttcctgcggctgcagagcgacagccagcgggagggccagtatgcccggctcatcagcccccctgtgcacctgcccaggagccctgtgtgcatggagttccagtaccaggccactggaggccggggcgtggccctgcaggtggtgcgggaggccagccaggagagcaagctgctgtgggtgatccgggaggaccagggcggggagtggaagcacggccgcatcatcctgcccagctatgacatggagtaccagatcgtgtttgagggcgtcatcggcaagggccgctctggagagatcgccattgatgacatccgcatcagcacagatgtgcccctggagaactgcatggagcccatcagcgcctttgctggggagaacttcaaggtggacatccctgagatccacgagcgggagggctatgaagatgaaattgatgatgaatatgaggtggactggagcaacagcagcagcgccaccagcggcagcggggcccccagcacagacaaggagaagtcctggctgtacaccctggaccccatcctgatcaccatcatcgccatgagcagcctgggcgtgctgctgggcgccacctgtgccggcctgctgctgtactgcacctgcagctacagcggcctgagcagccgcagctgcaccaccctggagaactacaactttgagctgtatgatggcctgaagcacaaggtgaagatgaaccaccagaagtgctgcagcgaggcctag

SEQ ID NO: 20813 - DNA, 2730 bp, synthetic construct
  misc_feature 1..2730: note = Description of Artificial Sequence: Synthetic coding sequence
  source 1..2730: mol_type = other DNA
atggacatgttccccctgacctgggtgttcctggccctgtacttcagccgccaccaggtgcggggccagcctgaccccccctgtggcggccgcctgaacagcaaggatgctggctacatcaccagccctggctacccccaggactaccccagccaccagaactgtgagtggatcgtgtatgcccctgagcccaaccagaagatcgtgctgaacttcaacccccactttgaaattgagaagcatgactgcaagtatgacttcatcgagatcagagatggagacagcgagagcgctgacctgctgggcaagcactgcggcaacatcgccccacccaccatcatcagcagcggctccatgctgtacatccgcttcaccagtgactatgcccggcagggcgccggcttcagcctgcgctatgagatcttcaagacaggcagcgaggactgcagcaagaacttcaccagccccaacggcaccatcgagagccctggcttccctgagaagtacccccacaacctggactgcaccttcaccatcctggccaagcccaagatggagatcatcctgcagttcctgatctttgacctggagcatgaccccctgcaggtgggggagggggactgcaagtatgactggctggacatctgggatggcatcccccacgtgggccccctcatcggcaagtactgcggcaccaagacccccagcgagctgcggagcagcacaggcatcctgagcctgaccttccacacagacatggctgtggccaaggatggcttcagcgcccgctactacctggtgcaccaggagcccctggagaacttccagtgcaatgtgcccctgggcatggagagcggccgcatcgccaatgagcagatcagcgccagcagcacctacagtgatggccgctggaccccccagcagagccggctgcatggagatgacaatggctggacccccaacctggacagcaacaaggagtacctgcaggtggacctgcgcttcctgaccatgctgacagccatcgccacccagggcgccatcagccgggagacccagaatggctactacgtgaagagctacaagctggaggtgtccaccaacggggaggactggatggtgtacagacatggcaagaaccacaaggtgttccaggccaacaatgatgccacagaggtggtgctgaacaagctgcacgcccccctgctgaccaggtttgtgcgcatccggccccagacctggcacagcggcatcgccctgcggctggagctgtttggctgccgggtgacagatgccccctgcagcaacatgctgggcatgctgagcggcctgattgctgacagccagatcagcgccagcagcacccaggagtacctgtggagccccagcgctgcccggctggtgagcagccgcagcggctggttcccccgcatcccccaggcccagcctggagaggagtggctgcaggtggacctgggcacccccaagacagtgaagggcgtcatcatccagggcgcccggggcggggacagcatcacagctgtggaggcccgggcctttgtgaggaagttcaaggtgtcctacagcctgaatggcaaggactgggagtacatccaggaccccaggacccagcagcccaagctgtttgagggcaacatgcactatgacaccccagacatcagaagatttgaccccatcccagcccagtatgtgcgggtgtacccagagcgctggagccctgctggcatcggcatgaggctggaggtgctgggctgtgactggacagacagcaagcccaccgtggagaccctgggccccaccgtgaagtctgaggagaccaccaccccctaccccacagaggaggaggccacagaatgtggggagaactgcagctttgaagatgacaaggacctgcagctgcccagcggcttcaactgcaactttgacttcctggaggagccctgtggctggatgtatgaccacgccaagtggctgcggaccacctgggccagcagcagcagccccaatgacaggaccttcccagatgacaggaacttcctgcggctgcagagcgacagccagcgggagggccagtatgcccggctcatcagcccccctgtgcacctgcccaggagccctgtgtgcatggagttccagtaccaggccactggaggccggggcgtggccctgcaggtggtgcgggaggccagccaggagagcaagctgctgtgggtgatccgggaggaccagggcggggagtggaagcacggccgcatcatcctgcccagctatgacatggagtaccagatcgtgtttgagggcgtcatcggcaagggccgctctggagagatcgccattgatgacatccgcatcagcacagatgtgcccctggagaactgcatggagcccatcagcgcctttgctgatgaatatgaggtggactggagcaacagcagcagcgccaccagcggcagcggggcccccagcacagacaaggagaagtcctggctgtacaccctggaccccatcctgatcaccatcatcgccatgagcagcctgggcgtgctgctgggcgccacctgtgccggcctgctgctgtactgcacctgcagctacagcggcctgagcagccgcagctgcaccaccctggagaactacaactttgagctgtatgatggcctgaagcacaaggtgaagatgaaccaccagaagtgctgcagcgaggcctag

SEQ ID NO: 20814 - DNA, 1668 bp, synthetic construct; identical to SEQ ID NO: 20809
  misc_feature 1..1668: note = Description of Artificial Sequence: Synthetic coding sequence
  source 1..1668: mol_type = other DNA

SEQ ID NO: 20815 - DNA, 309 bp, synthetic construct
  misc_feature 1..309: note = Description of Artificial Sequence: Synthetic coding sequence
  source 1..309: mol_type = other DNA
atggacatgttccccctgacctgggtgttcctggccctgtacttcagccgccaccaggtgcggggccagcctgaccccccctgtggcggccgcctgaacagcaaggatgctggctacatcaccagccctggctacccccaggactaccccagccaccagaactgtgagtggatcgtgtatgcccctgagcccaaccagaagatcgtgctgaacttcaacccccactttgaaattgagaagcatgactgcaagtatgacttcatcgagatcagagatggagacagcgagagcgctgacctgctgggctag

SEQ ID NO: 20816 - DNA, 2781 bp, synthetic construct
  misc_feature 1..2781: note = Description of Artificial Sequence: Synthetic coding sequence
  source 1..2781: mol_type = other DNA
atggacatgttccccctgacctgggtgttcctggccctgtacttcagccgccaccaggtgcggggccagcctgaccccccctgtggcggccgcctgaacagcaaggatgctggctacatcaccagccctggctacccccaggactaccccagccaccagaactgtgagtggatcgtgtatgcccctgagcccaaccagaagatcgtgctgaacttcaacccccactttgaaattgagaagcatgactgcaagtatgacttcatcgagatcagagatggagacagcgagagcgctgacctgctgggcaagcactgcggcaacatcgccccacccaccatcatcagcagcggctccatgctgtacatccgcttcaccagtgactatgcccggcagggcgccggcttcagcctgcgctatgagatcttcaagacaggcagcgaggactgcagcaagaacttcaccagccccaacggcaccatcgagagccctggcttccctgagaagtacccccacaacctggactgcaccttcaccatcctggccaagcccaagatggagatcatcctgcagttcctgatctttgacctggagcatgaccccctgcaggtgggggagggggactgcaagtatgactggctggacatctgggatggcatcccccacgtgggccccctcatcggcaagtactgcggcaccaagacccccagcgagctgcggagcagcacaggcatcctgagcctgaccttccacacagacatggctgtggccaaggatggcttcagcgcccgctactacctggtgcaccaggagcccctggagaacttccagtgcaatgtgcccctgggcatggagagcggccgcatcgccaatgagcagatcagcgccagcagcacctacagtgatggccgctggaccccccagcagagccggctgcatggagatgacaatggctggacccccaacctggacagcaacaaggagtacctgcaggtggacctgcgcttcctgaccatgctgacagccatcgccacccagggcgccatcagccgggagacccagaatggctactacgtgaagagctacaagctggaggtgtccaccaacggggaggactggatggtgtacagacatggcaagaaccacaaggtgttccaggccaacaatgatgccacagaggtggtgctgaacaagctgcacgcccccctgctgaccaggtttgtgcgcatccggccccagacctggcacagcggcatcgccctgcggctggagctgtttggctgccgggtgacagatgccccctgcagcaacatgctgggcatgctgagcggcctgattgctgacagccagatcagcgccagcagcacccaggagtacctgtggagccccagcgctgcccggctggtgagcagccgcagcggctggttcccccgcatcccccaggcccagcctggagaggagtggctgcaggtggacctgggcacccccaagacagtgaagggcgtcatcatccagggcgcccggggcggggacagcatcacagctgtggaggcccgggcctttgtgaggaagttcaaggtgtcctacagcctgaatggcaaggactgggagtacatccaggaccccaggacccagcagcccaagctgtttgagggcaacatgcactatgacaccccagacatcagaagatttgaccccatcccagcccagtatgtgcgggtgtacccagagcgctggagccctgctggcatcggcatgaggctggaggtgctgggctgtgactggacagacagcaagcccaccgtggagaccctgggccccaccgtgaagtctgaggagaccaccaccccctaccccacagaggaggaggccacagaatgtggggagaactgcagctttgaagatgacaaggacctgcagctgcccagcggcttcaactgcaactttgacttcctggaggagccctgtggctggatgtatgaccacgccaagtggctgcggaccacctgggccagcagcagcagccccaatgacaggaccttcccagatgacaggaacttcctgcggctgcagagcgacagccagcgggagggccagtatgcccggctcatcagcccccctgtgcacctgcccaggagccctgtgtgcatggagttccagtaccaggccactggaggccggggcgtggccctgcaggtggtgcgggaggccagccaggagagcaagctgctgtgggtgatccgggaggaccagggcggggagtggaagcacggccgcatcatcctgcccagctatgacatggagtaccagatcgtgtttgagggcgtcatcggcaagggccgctctggagagatcgccattgatgacatccgcatcagcacagatgtgcccctggagaactgcatggccaccgtgtctgccagcatcgtggacatccctgagatccacgagcgggagggctatgaagatgaaattgatgatgaatatgaggtggactggagcaacagcagcagcgccaccagcggcagcggggcccccagcacagacaaggagaagtcctggctgtacaccctggaccccatcctgatcaccatcatcgccatgagcagcctgggcgtgctgctgggcgccacctgtgccggcctgctgctgtactgcacctgcagctacagcggcctgagcagccgcagctgcaccaccctggagaactacaactttgagctgtatgatggcctgaagcacaaggtgaagatgaaccaccagaagtgctgcagcgaggcctag

SEQ ID NO: 20817 - DNA, 2730 bp, synthetic construct
  misc_feature 1..2730: note = Description of Artificial Sequence: Synthetic coding sequence
  source 1..2730: mol_type = other DNA
atggacatgttccccctgacctgggtgttcctggccctgtacttcagccgccaccaggtgcggggccagcctgaccccccctgtggcggccgcctgaacagcaaggatgctggctacatcaccagccctggctacccccaggactaccccagccaccagaactgtgagtggatcgtgtatgcccctgagcccaaccagaagatcgtgctgaacttcaacccccactttgaaattgagaagcatgactgcaagtatgacttcatcgagatcagagatggagacagcgagagcgctgacctgctgggcaagcactgcggcaacatcgccccacccaccatcatcagcagcggctccatgctgtacatccgcttcaccagtgactatgcccggcagggcgccggcttcagcctgcgctatgagatcttcaagacaggcagcgaggactgcagcaagaacttcaccagccccaacggcaccatcgagagccctggcttccctgagaagtacccccacaacctggactgcaccttcaccatcctggccaagcccaagatggagatcatcctgcagttcctgatctttgacctggagcatgaccccctgcaggtgggggagggggactgcaagtatgactggctggacatctgggatggcatcccccacgtgggccccctcatcggcaagtactgcggcaccaagacccccagcgagctgcggagcagcacaggcatcctgagcctgaccttccacacagacatggctgtggccaaggatggcttcagcgcccgctactacctggtgcaccaggagcccctggagaacttccagtgcaatgtgcccctgggcatggagagcggccgcatcgccaatgagcagatcagcgccagcagcacctacagtgatggccgctggaccccccagcagagccggctgcatggagatgacaatggctggacccccaacctggacagcaacaaggagtacctgcaggtggacctgcgcttcctgaccatgctgacagccatcgccacccagggcgccatcagccgggagacccagaatggctactacgtgaagagctacaagctggaggtgtccaccaacggggaggactggatggtgtacagacatggcaagaaccacaaggtgttccaggccaacaatgatgccacagaggtggtgctgaacaagctgcacgcccccctgctgaccaggtttgtgcgcatccggccccagacctggcacagcggcatcgccctgcggctggagctgtttggctgccgggtgacagatgccccctgcagcaacatgctgggcatgctgagcggcctgattgctgacagccagatcagcgccagcagcacccaggagtacctgtggagccccagcgctgcccggctggtgagcagccgcagcggctggttcccccgcatcccccaggcccagcctggagaggagtggctgcaggtggacctgggcacccccaagacagtgaagggcgtcatcatccagggcgcccggggcggggacagcatcacagctgtggaggcccgggcctttgtgaggaagttcaaggtgtcctacagcctgaatggcaaggactgggagtacatccaggaccccaggacccagcagcccaagctgtttgagggcaacatgcactatgacaccccagacatcagaagatttgaccccatcccagcccagtatgtgcgggtgtacccagagcgctggagccctgctggcatcggcatgaggctggaggtgctgggctgtgactggacagacagcaagcccaccgtggagaccctgggccccaccgtgaagtctgaggagaccaccaccccctaccccacagaggaggaggccacagaatgtggggagaactgcagctttgaagatgacaaggacctgcagctgcccagcggcttcaactgcaactttgacttcctggaggagccctgtggctggatgtatgaccacgccaagtggctgcggaccacctgggccagcagcagcagccccaatgacaggaccttcccagatgacaggaacttcctgcggctgcagagcgacagccagcgggagggccagtatgcccggctcatcagcccccctgtgcacctgcccaggagccctgtgtgcatggagttccagtaccaggccactggaggccggggcgtggccctgcaggtggtgcgggaggccagccaggagagcaagctgctgtgggtgatccgggaggaccagggcggggagtggaagcacggccgcatcatcctgcccagctatgacatggagtaccagatcgtgtttgagggcgtcatcggcaagggccgctctggagagatcgccattgatgacatccgcatcagcacagatgtgcccctggagaactgcatgggccccaaggcctgcatcgcagatgaatatgaggtggactggagcaacagcagcagcgccaccagcggcagcggggcccccagcacagacaaggagaagtcctggctgtacaccctggaccccatcctgatcaccatcatcgccatgagcagcctgggcgtgctgctgggcgccacctgtgccggcctgctgctgtactgcacctgcagctacagcggcctgagcagccgcagctgcaccaccctggagaactacaactttgagctgtatgatggcctgaagcacaaggtgaagatgaaccaccagaagtgctgcagcgaggcctag

SEQ ID NO: 20818 - DNA, 462 bp, synthetic construct
  misc_feature 1..462: note = Description of Artificial Sequence: Synthetic coding sequence
  source 1..462: mol_type = other DNA
atgaccaagatcaaggctgaccctgatggccctgaggcccaggccgaggcctgcagcggggagaggacctaccaggagctgctggtgaaccagaaccccatcgcccagcccctggccagccggcggctgaccaggaagctgtacaagtgcatcaagaaggctgtgaagcagaagcagatcagaagaggagtgaaggaggtgcagaagtttgtgaacaagggggagaagggcatcatggtgctggccggggacaccctgcccatcgaggtgtactgccacctgcctgtgatgtgtgaagatagaaacctgccctacgtgtacatccccagcaagacagacctgggcgctgctgctggcagcaagaggcccacctgtgtgatcatggtgaagccccatgaggagtaccaggaggcctatgatgaatgtctggaggaggtgcagagcctgcccctgcccctgtag

SEQ ID NO: 20819 - DNA, 273 bp, synthetic construct
  misc_feature 1..273: note = Description of Artificial Sequence: Synthetic coding sequence
  source 1..273: mol_type = other DNA
atgaccaagatcaaggctgaccctgatggccctgaggcccaggccgaggcctgcagcggggagaggacctaccaggagctgctggtgaaccagaaccccatcgcccagcccctggccagccggcggctgaccaggaagctgtacaagtgcatcaagaaggctgtgaagcagaagcagatcagaagaggagtgaaggaggtgcagaagtttgtgaacaagggggagaagggcacctgggtgcagccccaggcccccagcgcccctcctgtgtag

SEQ ID NO: 20820 - DNA, 2265 bp, synthetic construct
  misc_feature 1..2265: note = Description of Artificial Sequence: Synthetic coding sequence
  source 1..2265: mol_type = other DNA
atgtggaagctgctgcctgctgctggccctgctggaggagagccctaccgcctgctgactggagtggagtatgtggtgggcaggaagaactgtgccatcctgattgaaaatgaccagagcatcagcagaaatcatgctgtgctgacagccaacttctctgtgaccaacctgagccagacagatgagatccctgtgctgaccctgaaggacaacagcaaatatggcacctttgtgaatgaggagaagatgcagaatggcttcagcaggaccctgaagtctggagatggcatcacctttggagtgtttggcagcaagttccgcatcgagtatgagcccctggtggcctgcagcagctgcctggatgtgtctgggaagacagccctgaaccaggccatcctgcagctgggcggcttcaccgtgaacaactggacagaggagtgcacccacctggtgatggtgtctgtgaaggtgaccatcaagaccatctgtgccctgatctgtggccggcccatcgtgaagccagagtacttcacagagttcctgaaggctgtggagagcaagaagcagcccccccagatcgagagcttctacccacccctggatgagcccagcatcggcagcaagaatgtggacctgagcggccggcaggagaggaagcagatcttcaagggcaagaccttcatcttcctgaatgccaagcagcacaagaagctgagcagcgctgtggtgtttggaggaggagaggcccggctcatcacagaagaaaatgaggaggagcacaacttcttcctggcccctggcacctgtgtggtggacaccggcatcaccaacagccagaccctcatcccagactgccagaagaagtggatccagagcatcatggacatgctgcagaggcagggcctgcggcccatccctgaggccgagatcggcctggccgtcatcttcatgaccaccaagaactactgtgacccccagggccaccccagcacaggcctgaagaccaccaccccaggccccagcctgagccagggcgtgtctgtggatgagaagctgatgcccagcgcccctgtgaacaccaccacctacgtggccgacacagaaagtgagcaggccgacacctgggacctgtctgagcggcccaaggagatcaaggtgtccaagatggagcagaagttcaggatgctgagccaggatgcccccaccgtgaaggagagctgcaagaccagcagcaacaacaacagcatggtgagcaacaccctggccaagatgaggatccccaactaccagctgagccccaccaagctgcccagcatcaacaagagcaaggaccgggccagccagcagcagcagaccaacagcatccggaactacttccagcccagcaccaagaagcgggagagagatgaggagaaccaggagatgagcagctgcaagagcgccagaattgagaccagctgcagcctgctggagcagacccagcctgccacccccagcctgtggaagaacaaggagcagcacctgtctgaaaatgaacctgtggacaccaacagcgacaacaacctcttcacagacacagacctgaagagcatcgtgaagaacagcgccagcaagagccatgctgctgagaagctgcggagcaacaagaagcgggagatggatgatgtggccattgaagatgaggtgctggagcagctgttcaaggacaccaagccagagctggagattgatgtgaaggtgcagaagcaggaggaggatgtgaatgtgaggaagaggcccaggatggacatcgagaccaatgacaccttcagtgatgaagctgtgcctgagagcagcaagatcagccaggagaatgagatcggcaagaagcgggagctgaaggaggacagcctgtggagcgccaaggagatcagcaacaatgacaagctgcaggatgattctgagatgctgcccaagaagctgctgctgacagagttccgcagcctggtgatcaagaacagcaccagcaggaaccccagcggcatcaatgatgattatggccagctgaagaacttcaagaagttcaagaaggtgacctacccaggggccggcaagctgccccacatcattggaggcagtgacctgattgcccaccacgccaggaagaacacagagctggaggagtggctgcggcaggagatggaggtgcagaaccagcacgccaaggaggagagcctggctgatgacctcttccgctacaacccctacctgaagagaagaagatag

SEQ ID NO: 20821 - DNA, 1437 bp, synthetic construct
  misc_feature 1..1437: note = Description of Artificial Sequence: Synthetic coding sequence
  source 1..1437: mol_type = other DNA
atgtggaagctgctgcctgctgctggccctgctggaggagagccctaccgcctgctgactggagtggagtatgtggtgggcaggaagaactgtgccatcctgattgaaaatgaccagagcatcagcagaaatcatgctgtgctgacagccaacttctctgtgaccaacctgagccagacagatgagatccctgtgctgaccctgaaggacaacagcaaatatggcacctttgtgaatgaggagaagatgcagaatggcttcagcaggaccctgaagtctggagatggcatcacctttggagtgtttggcagcaagttccgcatcgagtatgagcccctggtggcctgcagcagctgcctggatgtgtctgggaagacagccctgaaccaggccatcctgcagctgggcggcttcaccgtgaacaactggacagaggagtgcacccacctggtgatggtgtctgtgaaggtgaccatcaagaccatctgtgccctgatctgtggccggcccatcgtgaagccagagtacttcacagagttcctgaaggctgtggagagcaagaagcagcccccccagatcgagagcttctacccacccctggatgagcccagcatcggcagcaagaatgtggacctgagcggccggcaggagaggaagcagatcttcaagggcaagaccttcatcttcctgaatgccaagcagcacaagaagctgagcagcgctgtggtgtttggaggaggagaggcccggctcatcacagaagaaaatgaggaggagcacaacttcttcctggcccctggcacctgtgtggtggacaccggcatcaccaacagccagaccctcatcccagactgccagaagaagtggatccagagcatcatggacatgctgcagaggcagggcctgcggcccatccctgaggccgagatcggcctggccgtcatcttcatgaccaccaagaactactgtgacccccagggccaccccagcacaggcctgaagaccaccaccccaggccccagcctgagccagggcgtgtctgtggatgagaagctgatgcccagcgcccctgtgaacaccaccacctacgtggccgacacagaaagtgagcaggccgacacctgggacctgtctgagcggcccaaggagatcaaggtgtccaagatggagcagaagttcaggatgctgagccaggatgcccccaccgtgaaggagagctgcaagaccagcagcaacaacaacagcatggtgagcaacaccctggccaagatgaggatccccaactaccagctgagccccaccaagctgcccagcatcaacaagagcaaggaccgggccagccagcagcagcagaccaacagcatccggaactacttccagcccagcaccaagaagcgggagcggctgcacctgaagaagaagaagaagaagaagtag

SEQ ID NO: 20822 - DNA, 333 bp, synthetic construct
  misc_feature 1..333: note = Description of Artificial Sequence: Synthetic coding sequence
  source 1..333: mol_type = other DNA
atgggcgccagcggcagcaaggcccggggcctgtggccctttgccagcgctgctgggggcggcggcagcgaggccgccggggctgagcaggccctggtgcggccccggggccgggctgtgcccccatttgtgttcacccggcggggctccatgttttatgatgaagatggagacctggcccacgagttctatgaggagaccatcgtgaccaagaatggccagaagagggccaagctgcggcgggtgcacaagaacctgatcccccagggcatcgtgaagctggaccacccccgcatccacgtggacttccctgtgatcctgtatgaggtgtag

SEQ ID NO: 20823 - DNA, 1206 bp, synthetic construct
  misc_feature 1..1206: note = Description of Artificial Sequence: Synthetic coding sequence
  source 1..1206: mol_type = other DNA
atgtggagcggcggcagcggcaaggcccggggctgggaggccgccgccggcggccgcagcagccctggccgcctgagcagaagacgcatcatgtccatgagccccaagcacaccacccccttctctgtgtctgacatcctgagccccctggaggagagctacaagaaggtgggcatggagggcggcggcctgggcgcccccctggccgcctaccggcagggccaggccgccccacccacagctgccatgcagcagcacgctgtgggccaccacggggctgtgacagctgcctaccacatgacagctgctggggtgccccagctgagccacagcgctgtgggcggctactgcaatggaaacctgggcaacatgtctgagctgcccccctaccaggacaccatgagaaattctgccagcggccctggctggtacggggccaacccagacccccgcttccctgccatcagccgcttcatgggccctgccagcggcatgaacatgagcggcatgggcggcctgggcagcctgggagatgtgtccaagaacatggcccccctgcccagcgcccccaggaggaagagaagagtgctcttcagccaggcccaggtgtatgagctggagcggcgcttcaagcagcagaagtacctgagcgcccctgagcgggagcacctggcctccatgatccacctgacccccacccaggtgaagatctggttccagaaccaccgctacaagatgaagaggcaggccaaggacaaggccgcccagcagcagctgcagcaggacagcggcggcggcggcggcggcggcggcaccggctgcccccagcagcagcaggcccagcagcagagcccccggcgggtggccgtgcctgtgctggtgaaggatggcaagccctgccaggccggggccccagcccctggagctgccagcctgcagggccacgcccagcagcaggcccagcaccaggcccaggccgcccaggccgctgctgctgccatctctgtgggcagcggcggggccggcctgggcgcccaccctggccaccagcccggcagcgctggccagagcccagacctggcccaccacgccgccagccctgctgccctgcagggccaggtgagcagcctgagccacctgaacagcagcggcagtgactatggcaccatgagctgcagcaccctgctgtatggccgcacctggtag

SEQ ID NO: 20824 - DNA, 1116 bp, synthetic construct
  misc_feature 1..1116: note = Description of Artificial Sequence: Synthetic coding sequence
  source 1..1116: mol_type = other DNA
atgtccatgagccccaagcacaccacccccttctctgtgtctgacatcctgagccccctggaggagagctacaagaaggtgggcatggagggcggcggcctgggcgcccccctggccgcctaccggcagggccaggccgccccacccacagctgccatgcagcagcacgctgtgggccaccacggggctgtgacagctgcctaccacatgacagctgctggggtgccccagctgagccacagcgctgtgggcggctactgcaatggaaacctgggcaacatgtctgagctgcccccctaccaggacaccatgagaaattctgccagcggccctggctggtacggggccaacccagacccccgcttccctgccatcagccgcttcatgggccctgccagcggcatgaacatgagcggcatgggcggcctgggcagcctgggagatgtgtccaagaacatggcccccctgcccagcgcccccaggaggaagagaagagtgctcttcagccaggcccaggtgtatgagctggagcggcgcttcaagcagcagaagtacctgagcgcccctgagcgggagcacctggcctccatgatccacctgacccccacccaggtgaagatctggttccagaaccaccgctacaagatgaagaggcaggccaaggacaaggccgcccagcagcagctgcagcaggacagcggcggcggcggcggcggcggcggcaccggctgcccccagcagcagcaggcccagcagcagagcccccggcgggtggccgtgcctgtgctggtgaaggatggcaagccctgccaggccggggccccagcccctggagctgccagcctgcagggccacgcccagcagcaggcccagcaccaggcccaggccgcccaggccgctgctgctgccatctctgtgggcagcggcggggccggcctgggcgcccaccctggccaccagcccggcagcgctggccagagcccagacctggcccaccacgccgccagccctgctgccctgcagggccaggtgagcagcctgagccacctgaacagcagcggcagtgactatggcaccatgagctgcagcaccctgctgtatggccgcacctggtag

SEQ ID NO: 20825 - DNA, 1116 bp, synthetic construct; identical to SEQ ID NO: 20824
  misc_feature 1..1116: note = Description of Artificial Sequence: Synthetic coding sequence
  source 1..1116: mol_type = other DNA

SEQ ID NO: 20826 - DNA, 1116 bp, synthetic construct; identical to SEQ ID NO: 20824
  misc_feature 1..1116: note = Description of Artificial Sequence: Synthetic coding sequence
  source 1..1116: mol_type = other DNA

SEQ ID NO: 20827 - DNA, 105 bp, synthetic construct
  misc_feature 1..105: note = Description of Artificial Sequence: Synthetic coding sequence
  source 1..105: mol_type = other DNA
atgtggagcggcggcagcggcaaggcccggggctgggaggccgccgccggcggccgcagcagccctggccgcctgagcgcctatgccccacccctggtggcctag

SEQ ID NO: 20828 - DNA, 573 bp, synthetic construct
  misc_feature 1..573: note = Description of Artificial Sequence: Synthetic coding sequence
  source 1..573: mol_type = other DNA
atgctgcgggtgcctgagcccaggcctggagaggccaaggccgagggcgccgccccacccacccccagcaagcccctgaccagcttcctgatccaggacatcctgagagatggagcccctgaggaggccgagaccctggccgagacagagcctgagcggcacctgggcagctacctgctggacagcgagaacaccagcggggccctgccccggctgccccagacccccaagcagccccagaagaggagcagagctgccttcagccacacccaggtgattgagctggagaggaagttcagccaccagaagtacctgagcgcccctgagcgggcccacctggccaagaacctgaagctgacagagacccaggtgaagatctggttccagaacagacgctacaagaccaagaggaagcagctgagcagcgagctgggggacctggagaagcacagcagcctgcctgccctgaaggaggaggccttcagccgggccagcctggtgtctgtgtacaacagctacccctactacccctacctgtactgtgtgggctcctggagccctgccttctggtag

SEQ ID NO: 20829 - DNA, 705 bp, synthetic construct
  misc_feature 1..705: note = Description of Artificial Sequence: Synthetic coding sequence
  source 1..705: mol_type = other DNA
atgctgcgggtgcctgagcccaggcctggagaggccaaggccgagggcgccgccccacccacccccagcaagcccctgaccagcttcctgatccaggacatcctgagagatggagcccagaggcagggcggccgcaccagcagccagaggcagagggaccctgagcctgagcctgagcctgagcctgagggcggccgcagcagagctggggcccagaatgaccagctgagcacaggcccccgggccgcccctgaggaggccgagaccctggccgagacagagcctgagcggcacctgggcagctacctgctggacagcgagaacaccagcggggccctgccccggctgccccagacccccaagcagccccagaagaggagcagagctgccttcagccacacccaggtgattgagctggagaggaagttcagccaccagaagtacctgagcgcccctgagcgggcccacctggccaagaacctgaagctgacagagacccaggtgaagatctggttccagaacagacgctacaagaccaagaggaagcagctgagcagcgagctgggggacctggagaagcacagcagcctgcctgccctgaaggaggaggccttcagccgggccagcctggtgtctgtgtacaacagctacccctactacccctacctgtactgtgtgggctcctggagccctgccttctggtag

SEQ ID NO: 20830 - DNA, 480 bp, synthetic construct
  misc_feature 1..480: note = Description of Artificial Sequence: Synthetic coding sequence
  source 1..480: mol_type = other DNA
atgctgcgggtgcctgagcccaggcctggagaggccgagaccctggccgagacagagcctgagcggcacctgggcagctacctgctggacagcgagaacaccagcggggccctgccccggctgccccagacccccaagcagccccagaagaggagccgggccgccttcagccacacccaggtgattgagctggagaggaagttcagccaccagaagtacctgagcgcccctgagcgggcccacctggccaagaacctgaagctgacagagacccaggtgaagatctggttccagaacagacgctacaagaccaagaggaagcagctgagcagcgagctgggggacctggagaagcacagcagcctgcctgccctgaaggaggaggccttcagccgggccagcctggtgtctgtgtacaacagctacccctactacccctacctgtactgtgtgggctcctggagccctgccttctggtag

SEQ ID NO: 20831 - DNA, 4212 bp, synthetic construct
  misc_feature 1..4212: note = Description of Artificial Sequence: Synthetic coding sequence
  source 1..4212: mol_type = other DNA
atggccacccagcagaaggccagtgatgagcgcatcagccagtttgaccacaacctgctgcctgagctgagcgccctgctgggcctggatgctgtgcagctggccaaggagctggaggaggaggagcagaaggagcgggccaagatgcagaagggctacaacagccagatgaggtctgaggccaagaggctgaagacctttgtgacctatgagccctacagctcctggatcccccaggagatggctgctgctggcttctacttcaccggggtgaagagcggcatccagtgcttctgctgcagcctcatcctgtttggagctggcctgacccggctgcccatcgaggaccacaagcgcttccacccagactgtggcttcctgctgaacaaggatgtgggcaacatcgccaagtatgacatccgggtgaagaacctgaagagccggctgcggggcggcaagatgagataccaggaggaggaggcccggctggccagcttcaggaactggcccttctacgtgcagggcatcagcccctgtgtgctgtctgaggccggctttgtgttcaccgggaagcaggacacagtgcagtgcttcagctgtggcggctgcctgggcaactgggaggagggagatgacccctggaaggagcacgccaagtggttccccaagtgtgagttcctgcggagcaagaagagcagcgaggagatcacccagtacatccagagctacaagggctttgtggacatcaccggggagcactttgtgaacagctgggtgcagcgggagctgcccatggccagcgcctactgcaatgacagcatctttgcctatgaggagctgcggctggacagcttcaaggactggccccgggagagcgctgtgggcgtggccgccctggccaaggccggcctcttctacacaggcatcaaggacatcgtgcagtgcttcagctgtggcggctgcctggagaagtggcaggagggagatgaccccctggatgaccacacccgctgcttccccaactgccccttcctgcagaacatgaagagcagcgctgaggtgaccccagacctgcagagcagaggagagctgtgtgagctgctggagaccaccagcgagagcaacctggaggacagcattgctgtgggccccatcgtgcctgagatggcccagggcgaggcccagtggttccaggaggccaagaacctgaatgagcagctgcgggccgcctacaccagcgccagcttccgccacatgagcctgctggacatcagcagtgacctggccacagaccacctgctgggctgtgacctgagcatcgccagcaagcacatcagcaagcctgtgcaggagcccctggtgctgcctgaggtgtttggaaacctgaacagcgtgatgtgtgtggagggggaggccggcagcggcaagacagtgctgctgaagaagatcgccttcctgtgggccagcggctgctgccccctgctgaaccgcttccagctggtgttctacctgagcctgagcagcaccaggccagatgagggcctggccagcatcatctgtgaccagctgctggagaaggagggctctgtgacagagatgtgtgtgaggaacatcatccagcagctgaagaaccaggtgctcttcctgctggatgactacaaggagatctgcagcatcccccaggtgattggcaagctgatccagaagaaccacctgagcaggacctgcctgctgattgctgtgaggaccaacagagcccgggacatccgccgctacctggagaccatcctggagatcaaggccttccccttctacaacacagtgtgcatcctgaggaagctgttcagccacaacatgacccggctgaggaagttcatggtgtactttgggaagaaccagagcctgcagaagatccagaagacccccctgtttgtggccgccatctgtgcccactggttccagtacccctttgaccccagctttgatgatgtggccgtgttcaagagctacatggagcggctgagcctgaggaacaaggccacagctgagatcctgaaggccaccgtgagcagctgtggggagctggccctgaagggcttcttcagctgctgctttgagttcaatgatgatgacctggccgaggccggcgtggatgaagatgaggacctgaccatgtgcctgatgagcaagttcaccgcccagaggctgcggcccttctaccgcttcctgagccctgccttccaggagttcctggccggcatgaggctgattgagctgctggacagcgaccggcaggagcaccaggacctgggcctgtaccacctgaagcagatcaacagccccatgatgacagtgtctgcctacaacaacttcctgaactacgtgagcagcctgcccagcaccaaggccggccccaagatcgtgagccacctgctgcacctggtggacaacaaggagagcctggagaacatcagtgaaaatgatgactacctgaagcaccagcctgagatcagcctgcagatgcagctgctgcggggcctgtggcagatctgcccccaggcctacttctccatggtgtctgagcacctgctggtgctggccctgaagacagcctaccagagcaacacagtggccgcctgcagcccctttgtgctgcagttcctgcagggccgcaccctgaccctgggcgccctgaacctgcagtacttctttgaccaccctgagagcctgagcctgctgcggagcatccacttccccatccggggcaacaagaccagcccccgggcccacttctctgtgctggagacctgctttgacaagagccaggtgcccaccatcgaccaggactatgccagcgcctttgagcccatgaatgagtgggagaggaacctggccgagaaggaggacaacgtgaagagctacatggacatgcagaggcgggccagcccagacctgagcacaggctactggaagctgagccccaagcagtacaagatcccctgcctggaggtggatgtgaatgacattgatgtggtgggccaggacatgctggagatcctgatgaccgtcttcagcgccagccagagaattgagctgcacctgaaccacagccggggcttcatcgagagcatccggcctgccctggagctgagcaaggcctctgtgaccaagtgcagcatcagcaagctggagctgtctgctgctgagcaggagctgctgctgaccctgcccagcctggagagcctggaggtgtctggcaccatccagagccaggaccagatcttccccaacctggacaagttcctgtgcctgaaggagctgtctgtggacctggagggcaacatcaacgtgttttctgtcatccctgaggagttccccaacttccaccacatggagaagctgctgatccagatctctgcagaatatgaccccagcaagctggtgaagctgatccagaacagccccaacctgcacgtgttccacctgaagtgcaacttcttcagtgactttggcagcctgatgaccatgctggtgtcctgcaagaagctgacagagatcaagttcagtgacagcttcttccaggccgtgccctttgtggccagcctgcccaacttcatcagcctgaagatcctgaacctggagggccagcagttcccagatgaggagaccagcgagaagtttgcctacatcctgggcagcctgagcaacctggaggagctgatcctgcccactggagatggcatctacagagtggccaagctgatcatccagcagtgccagcagctgcactgcctgcgggtgctgtccttcttcaagaccctgaatgatgacagcgtggtggagatcgccaaggtggccatcagcggcggcttccagaagctggagaacctgaagctgagcatcaaccacaagatcacagaggagggctacagaaacttcttccaggccctggacaacatgcccaacctgcaggagctggacatcagccgccacttcacagagtgcatcaaggcccaggccaccaccgtgaagagcctgagccagtgtgtgctgcggctgcccaggctcatccggctgaacatgctgtcctggctgctggatgctgatgacatcgccctgctgaatgtgatgaaggagcggcacccccagagcaagtacctgaccatcctgcagaagtggatcctgcccttcagccccatcatccagaagtag

SEQ ID NO: 20832 - DNA, 3726 bp, synthetic construct
  misc_feature 1..3726: note = Description of Artificial Sequence: Synthetic coding sequence
  source 1..3726: mol_type = other DNA
atgcccctgcacatcggggactttgtgtgggacagcaaggtgcacagcctgcagagcagcctgaacatcttcagcctgctgcccaccaagggccgcacagagcacctgttcttcagccacatcctgtccttccactggccagccttcagcagcatccggctggagctgtggatcaacctgcgctgtgagttcctgcggagcaagaagagcagcgaggagatcacccagtacatccagagctacaagggctttgtggacatcaccggggagcactttgtgaacagctgggtgcagcgggagctgcccatggccagcgcctactgcaatgacagcatctttgcctatgaggagctgcggctggacagcttcaaggactggccccgggagagcgctgtgggcgtggccgccctggccaaggccggcctcttctacacaggcatcaaggacatcgtgcagtgcttcagctgtggcggctgcctggagaagtggcaggagggagatgaccccctggatgaccacacccgctgcttccccaactgccccttcctgcagaacatgaagagcagcgctgaggtgaccccagacctgcagagcagaggagagctgtgtgagctgctggagaccaccagcgagagcaacctggaggacagcattgctgtgggccccatcgtgcctgagatggcccagggcgaggcccagtggttccaggaggccaagaacctgaatgagcagctgcgggccgcctacaccagcgccagcttccgccacatgagcctgctggacatcagcagtgacctggccacagaccacctgctgggctgtgacctgagcatcgccagcaagcacatcagcaagcctgtgcaggagcccctggtgctgcctgaggtgtttggaaacctgaacagcgtgatgtgtgtggagggggaggccggcagcggcaagacagtgctgctgaagaagatcgccttcctgtgggccagcggctgctgccccctgctgaaccgcttccagctggtgttctacctgagcctgagcagcaccaggccagatgagggcctggccagcatcatctgtgaccagctgctggagaaggagggctctgtgacagagatgtgtgtgaggaacatcatccagcagctgaagaaccaggtgctcttcctgctggatgactacaaggagatctgcagcatcccccaggtgattggcaagctgatccagaagaaccacctgagcaggacctgcctgctgattgctgtgaggaccaacagagcccgggacatccgccgctacctggagaccatcctggagatcaaggccttccccttctacaacacagtgtgcatcctgaggaagctgttcagccacaacatgacccggctgaggaagttcatggtgtactttgggaagaaccagagcctgcagaagatccagaagacccccctgtttgtggccgccatctgtgcccactggttccagtacccctttgaccccagctttgatgatgtggccgtgttcaagagctacatggagcggctgagcctgaggaacaaggccacagctgagatcctgaaggccaccgtgagcagctgtggggagctggccctgaagggcttcttcagctgctgctttgagttcaatgatgatgacctggccgaggccggcgtggatgaagatgaggacctgaccatgtgcctgatgagcaagttcaccgcccagaggctgcggcccttctaccgcttcctgagccctgccttccaggagttcctggccggcatgaggctgattgagctgctggacagcgaccggcaggagcaccaggacctgggcctgtaccacctgaagcagatcaacagccccatgatgacagtgtctgcctacaacaacttcctgaactacgtgagcagcctgcccagcaccaaggccggccccaagatcgtgagccacctgctgcacctggtggacaacaaggagagcctggagaacatcagtgaaaatgatgactacctgaagcaccagcctgagatcagcctgcagatgcagctgctgcggggcctgtggcagatctgcccccaggcctacttctccatggtgtctgagcacctgctggtgctggccctgaagacagcctaccagagcaacacagtggccgcctgcagcccctttgtgctgcagttcctgcagggccgcaccctgaccctgggcgccctgaacctgcagtacttctttgaccaccctgagagcctgagcctgctgcggagcatccacttccccatccggggcaacaagaccagcccccgggcccacttctctgtgctggagacctgctttgacaagagccaggtgcccaccatcgaccaggactatgccagcgcctttgagcccatgaatgagtgggagaggaacctggccgagaaggaggacaacgtgaagagctacatggacatgcagaggcgggccagcccagacctgagcacaggctactggaagctgagccccaagcagtacaagatcccctgcctggaggtggatgtgaatgacattgatgtggtgggccaggacatgctggagatcctgatgaccgtcttcagcgccagccagagaattgagctgcacctgaaccacagccggggcttcatcgagagcatccggcctgccctggagctgagcaaggcctctgtgaccaagtgcagcatcagcaagctggagctgtctgctgctgagcaggagctgctgctgaccctgcccagcctggagagcctggaggtgtctggcaccatccagagccaggaccagatcttccccaacctggacaagttcctgtgcctgaaggagctgtctgtggacctggagggcaacatcaacgtgttttctgtcatccctgaggagttccccaacttccaccacatggagaagctgctgatccagatctctgcagaatatgaccccagcaagctggtgaagctgatccagaacagccccaacctgcacgtgttccacctgaagtgcaacttcttcagtgactttggcagcctgatgaccatgctggtgtcctgcaagaagctgacagagatcaagttcagtgacagcttcttccaggccgtgccctttgtggccagcctgcccaacttcatcagcctgaagatcctgaacctggagggccagcagttcccagatgaggagaccagcgagaagtttgcctacatcctgggcagcctgagcaacctggaggagctgatcctgcccactggagatggcatctacagagtggccaagctgatcatccagcagtgccagcagctgcactgcctgcgggtgctgtccttcttcaagaccctgaatgatgacagcgtggtggagatcgccaaggtggccatcagcggcggcttccagaagctggagaacctgaagctgagcatcaaccacaagatcacagaggagggctacagaaacttcttccaggccctggacaacatgcccaacctgcaggagctggacatcagccgccacttcacagagtgcatcaaggcccaggccaccaccgtgaagagcctgagccagtgtgtgctgcggctgcccaggctcatccggctgaacatgctgtcctggctgctggatgctgatgacatcgccctgctgaatgtgatgaaggagcggcacccccagagcaagtacctgaccatcctgcagaagtggatcctgcccttcagccccatcatccagaagtag

SEQ ID NO: 20833 - DNA, 4212 bp, synthetic construct; identical to SEQ ID NO: 20831
  misc_feature 1..4212: note = Description of Artificial Sequence: Synthetic coding sequence
  source 1..4212: mol_type = other DNA

SEQ ID NO: 20834 - DNA, 3726 bp, synthetic construct; identical to SEQ ID NO: 20832
  misc_feature 1..3726: note = Description of Artificial Sequence: Synthetic coding sequence
  source 1..3726: mol_type = other DNA

SEQ ID NO: 20835 - DNA, 678 bp, synthetic construct
  misc_feature 1..678: note = Description of Artificial Sequence: Synthetic coding sequence
  source 1..678: mol_type = other DNA
atgctgggcctggatgcctgtgagctgggcgcccagctgctggagctgctgcggctggccctgtgtgcccgggtgctgctggccgacaaggagggcggccccccagctgtggatgaggtgctggatgaggccgtgcctgagtaccgggcccctggcaggaagagcctgctggagatccggcagctggaccctgatgacaggagcctggccaagtacaagagggtgctgctgggccccctgcccccagctgtggaccccagcctgcccaacgtgcaggtgacccggctgaccctgctgtctgagcaggcccctggccctgtggtgatggacctgaccggggacctggccgtgctgaaggaccaggtgtttgtgctgaaggagggcgtggactacagagtgaagatctccttcaaggtgcaccgggagatcgtgtctggcctgaagtgcctgcaccacacctacagaagaggcctgcgggtggacaagacagtgtacatggtgggcagctatggccccagcgcccaggagtatgaatttgtgacccctgtggaggaggcccccaggggggccctggtgcggggcccctacctggtggtgtccctcttcacagatgatgacaggacccaccacctgtcctgggagtggggcctgtgcatctgccaggactggaaggactag

SEQ ID NO: 20836 - DNA, 882 bp, synthetic construct
  misc_feature 1..882: note = Description of Artificial Sequence: Synthetic coding sequence
  source 1..882: mol_type = other DNA
atgcctgcccggagcggggcccagttctgcaggaggatgggccagaagaagcagaggcctgcccgggccggccagccccacagcagcagtgatgctgcccaggccccagctgagcagccccacagcagcagtgatgctgcccaggccccctgcccccgggagcgctgcctgggcccccccaccaccccaggcccctaccgcagcatctacttcagcagccccaagggccacctgacccggctgggcctggagttctttgaccagcctgctgtgcccctggcccgggccttcctgggccaggtgctggtgcggcggctgcccaacggcacagagctgcggggccgcatcgtggagacagaggcctacctgggcccagaagatgaagctgcccacagccggggcggccggcagacccccaggaacagaggcatgttcatgaagccaggcaccctgtatgtgtacatcatctacggcatgtacttctgcatgaacatcagcagccagggagatggagcctgtgtgctgctgcgggccctggagcccctggagggcctggagaccatgaggcagctgcggagcaccctgaggaaaggaacagccagccgggtgctgaaggaccgggagctgtgcagcggccccagcaagctgtgccaggccctggccatcaacaagagctttgaccagagggacctggcccaggatgaggccgtgtggctggagcggggccccctggagcccagcgagcctgctgtggtggccgccgcccgggtgggcgtgggccacgccggggagtgggccaggaagcccctgcgcttctacgtgcggggcagcccctgggtgtctgtggtggacagagtggccgagcaggacacccaggcctag

SEQ ID NO: 20837 - DNA, 846 bp, synthetic construct
  misc_feature 1..846: note = Description of Artificial Sequence: Synthetic coding sequence
  source 1..846: mol_type = other DNA
atgggccagaagaagcagaggcctgcccgggccggccagccccacagcagcagtgatgctgcccaggccccagctgagcagccccacagcagcagtgatgctgcccaggccccctgcccccgggagcgctgcctgggcccccccaccaccccaggcccctaccgcagcatctacttcagcagccccaagggccacctgacccggctgggcctggagttctttgaccagcctgctgtgcccctggcccgggccttcctgggccaggtgctggtgcggcggctgcccaacggcacagagctgcggggccgcatcgtggagacagaggcctacctgggcccagaagatgaagctgcccacagccggggcggccggcagacccccaggaacagaggcatgttcatgaagccaggcaccctgtatgtgtacatcatctacggcatgtacttctgcatgaacatcagcagccagggagatggagcctgtgtgctgctgcgggccctggagcccctggagggcctggagaccatgaggcagctgcggagcaccctgaggaaaggaacagccagccgggtgctgaaggaccgggagctgtgcagcggccccagcaagctgtgccaggccctggccatcaacaagagctttgaccagagggacctggcccaggatgaggccgtgtggctggagcggggccccctggagcccagcgagcctgctgtggtggccgccgcccgggtgggcgtgggccacgccggggagtgggccaggaagcccctgcgcttctacgtgcggggcagcccctgggtgtctgtggtggacagagtggccgagcaggacacccaggcctag

SEQ ID NO: 20838 - DNA, 756 bp, synthetic construct
  misc_feature 1..756: note = Description of Artificial Sequence: Synthetic coding sequence
  source 1..756: mol_type = other DNA
atgggccagaagaagcagaggcctgcccgggccggccagccccacagcagcagtgatgctgcccaggccccagctgagcagccccacagcagcagtgatgctgcccaggccccctgcccccgggagcgctgcctgggcccccccaccaccccaggcccctaccgcagcatctacttcagcagccccaagggccacctgacccggctgggcctggagttctttgaccagcctgctgtgcccctggcccgggccttcctgggccaggtgctggtgcggcggctgcccaacggcacagagctgcggggccgcatcgtggagacagaggcctacctgggcccagaagatgaagctgcccacagccggggcggccggcagacccccaggaacagaggcatgttcatgaagccaggcaccctgtatgtgtacatcatctacggcatgtacttctgcatgaacatcagcagccagggagatggagcctgtgtgctgctgcgggccctggagcccctggagggcctggagaccatgaggcagctgcggagcaccctgaggaaaggaacagccagccgggtgctgaaggaccgggagctgtgcagcggccccagcaagctgtgccaggccctggccatcaacaagagctttgaccagagggacctggcccaggatgaggccgtgtggctggagcggggccccctggagcccagcgagcctgctgtggtggccgccgcccgggtgggcgtgggccacgccggctag

SEQ ID NO: 20839 - DNA, 1044 bp, synthetic construct
  misc_feature 1..1044: note = Description of Artificial Sequence: Synthetic coding sequence
  source 1..1044: mol_type = other DNA
atgcacgcccactgcctgcccttcctgctgcacgcctggtgggccctgctgcaggccggggccgccaccgtggccacagccctgctgcggacccggggccagcccagcagccccagccccctggcctacatgctgagcctgtacagagaccccctgcccagggctgacatcatccgcagcctgcaggccgaggatgtggccgtggatggccagaactggacctttgcctttgacttctccttcctgagccagcaggaggacctggcctgggccgagctgcggctgcagctgagcagccctgtggacctgcccacagagggcagcctggccatcgagatcttccaccagcccaagccagacacagagcaggccagtgacagctgcctggagcgcttccagatggacctcttcaccgtgaccctgagccaggtgaccttcagcctgggctccatggtgctggaggtgacccggcccctgagcaagtggctgaagcaccctggggccctggagaagcagatgagccgggtggccggggagtgctggccccggccccccaccccaccagccaccaacgtgctgctgatgctgtacagcaacctgagccaggagcagaggcagctgggcggcagcaccctgctgtgggaggccgagagctcctggagggcccaggagggccagctgtcctgggagtggggcaagaggcaccggcggcaccacctgcctgacaggagccagctgtgcaggaaggtgaagttccaggtggacttcaacctgattggctggggctcctggatcatctaccccaagcagtacaatgcctaccgctgtgaaggagaatgtcccaaccctgtgggggaggagttccaccccaccaaccacgcctacatccagagcctgctgaagcgctaccagccccaccgggtgcccagcacctgctgtgcccctgtgaagaccaagcccctgtccatgctgtatgtggacaatggccgggtgctgctggaccaccacaaggacatgattgtggaggagtgtggctgcctgtag

SEQ ID NO: 20840 - DNA, 879 bp, synthetic construct
  misc_feature 1..879: note = Description of Artificial Sequence: Synthetic coding sequence
  source 1..879: mol_type = other DNA
gaccagcagctgggcatccagaccaaggatgtggccgtggatggccagaactggacctttgcctttgacttctccttcctgagccagcaggaggacctggcctgggccgagctgcggctgcagctgagcagccctgtggacctgcccacagagggcagcctggccatcgagatcttccaccagcccaagccagacacagagcaggccagtgacagctgcctggagcgcttccagatggacctcttcaccgtgaccctgagccaggtgaccttcagcctgggctccatggtgctggaggtgacccggcccctgagcaagtggctgaagcaccctggggccctggagaagcagatgagccgggtggccggggagtgctggcccaggcctcccaccccaccagccaccaacgtgctgctgatgctgtacagcaacctgagccaggagcagaggcagctgggcggcagcaccctgctgtgggaggccgagagctcctggagggcccaggagggccagctgtcctgggagtggggcaagaggcacagaagacaccacctgcctgacaggagccagctgtgcaggaaggtgaagttccaggtggacttcaacctgattggctggggctcctggatcatctaccccaagcagtacaatgcctaccgctgtgagggggagtgccccaaccctgtgggggaggagttccaccccaccaaccacgcctacatccagagcctgctgaagcgctaccagccccaccgggtgcccagcacctgctgtgcccctgtgaagaccaagcccctgtccatgctgtatgtggacaatggccgggtgctgctggaccaccacaaggacatgattgtggaggagtgtggctgcctgtag

SEQ ID NO: 20841 - DNA, 534 bp, synthetic construct
  misc_feature 1..534: note = Description of Artificial Sequence: Synthetic coding sequence
  source 1..534: mol_type = other DNA
atggtgctgctgagcaccctgggcatcgtgttccagggcgagggcccccccatcagcagctgtgacaccggcaccatggccaactgtgagaggaccttcatcgccatcaagccagatggagtgcagaggggcctggtgggggagatcatcaagagatttgagcagaagggcttccggctggtgggcctgaagttcatgcaggccagcgaggacctgctgaaggagcactacgtggacctgaaggaccggcccttctttgctggcctggtgaagtacatgcacagcggccctgtggtggccatggtgtgggagggcctgaatgtggtgaagacaggccgggtgatgctgggggagaccaacccagctgacagcaagccaggcaccatccggggggacttctgcatccaggtgggcaggaacatcatccacggcagtgacagcgtggagagcgctgagaaggagatcggcctgtggttccaccctgaggagctggtggactacaccagctgtgcccagaactggatctatgaatag

SEQ ID NO: 20842 - DNA, 534 bp, synthetic construct; identical to SEQ ID NO: 20841
  misc_feature 1..534: note = Description of Artificial Sequence: Synthetic coding sequence
  source 1..534: mol_type = other DNA

SEQ ID NO: 20843 - DNA, 459 bp, synthetic construct
  misc_feature 1..459: note = Description of Artificial Sequence: Synthetic coding sequence
  source 1..459: mol_type = other DNA
atggccaactgtgagaggaccttcatcgccatcaagccagatggagtgcagaggggcctggtgggggagatcatcaagagatttgagcagaagggcttccggctggtgggcctgaagttcatgcaggccagcgaggacctgctgaaggagcactacgtggacctgaaggaccggcccttctttgctggcctggtgaagtacatgcacagcggccctgtggtggccatggtgtgggagggcctgaatgtggtgaagacaggccgggtgatgctgggggagaccaacccagctgacagcaagccaggcaccatccggggggacttctgcatccaggtgggcaggaacatcatccacggcagtgacagcgtggagagcgctgagaaggagatcggcctgtggttccaccctgaggagctggtggactacaccagctgtgcccagaactggatctatgaatag

SEQ ID NO: 20844 - DNA, 183 bp, synthetic construct
  misc_feature 1..183: note = Description of Artificial Sequence: Synthetic coding sequence
  source 1..183: mol_type = other DNA
atggtgctgctgagcaccctgggcatcgtgttccagggcgagggcccccccatcagcagctgtgacaccggcaccatggccaactgtgagaggaccttcatcgccatcaagccagatggagtgcagaggggcctggtgggggagatcatcaagagatttgagcagaagggcttccggctgtag

SEQ ID NO: 20845 - DNA, 1443 bp, synthetic construct
  misc_feature 1..1443: note = Description of Artificial Sequence: Synthetic coding sequence
  source 1..1443: mol_type = other DNA
atggccaccgtgcccggcctgcagcccctgcccaccctggagcaggacctggagcaggaggagatcctgattgtgaaggtggaggaggacttctgcctggaggaggagcccagcgtggagacagaggaccccagccctgagaccttccggcagctgttccgcctcttctgctaccaggaggtggccggcccccgggaggccctgagccggctgtgggagctgtgctgccgctggctgcggcctgagctgcggaccaaggagcagatcctggagctgctggtgctggagcagttcctgactgtgctgcctggagagatccaggcccgggtgcgggagcagcagcctgagagcggggaggaggccgtggtgctggtggagggcctgcagaggaagcccaggaagcaccggcagaggggcagcgagctgctgagtgatgatgaggtgcccctgggcatcggcggccagttcctgaagcaccaggccgaggcccagcctgaggacctgagcctggaggaggaggcccgcttcagcagccagcagcccccagcccagctgagccaccggccccagaggggccccctgctgtggccagagcggggccccccagcccccaggcaccaggagatggccagcgccagccccttcctgagcgcctggagccaggtgcctgtgaacctggaggatgtggccgtgtacctgagcggggaggagccccgctgcatggaccctgcccagagagatgcccccctggagaatgaaggacctggcatccagctggaggatggaggagatggaagagaagatgcccccctgaggatggagtggtacagagtgctgagcgcccgctgccagggccctggccaccccctgcccggccagaggcctgcccctgtgcggggcctggtgcggccagaccagccccggggcggccccccacctggaagaagagccagccatggagctgacaagccctacacctgcccagaatgtgggaagggcttcagcaagaccagccacctgaccaagcaccagaggacccacactggagagcggccctacaagtgcctggtgtgtgggaagggcttcagtgacaggagcaacttcagcacccaccagagggtgcacactggagagaagccctacccctgcccagaatgtgggaagcgcttcagccagagcagcagcctggtgatccacaggaggacccacagcggggagcggccctatgcctgcacccagtgtgggaagcgcttcaacaacagcagccacttcagcgcccacaggaggacccacactggagagaagccctacacctgcccagcctgtggccggggcttcagaagaggaacagacctgcacaagcaccagaggacccacatgggcgccggcagcctgcccaccctgcagcctgtggcccctgggggccctggggccaaggcctag

SEQ ID NO: 20846 - DNA, 588 bp, synthetic construct
  misc_feature 1..588: note = Description of Artificial Sequence: Synthetic coding sequence
  source 1..588: mol_type = other DNA
atgggcggcctcttctggaggtctgccctgcggggcctgcgctgtggcccccgggcccctggccccagcctgctggtgcgccacggcagcggcctgcccccatctgccctgaagaggggccccagctggacccgggagaggaccctggtggccgtgaagccagatggagtgcagaggcggctggtgggagatgtgatccagagatttgaaagaagaggcttcaccctggtgggcatgaagatgctgcaggcccctgagagcgtgctggccgagcactaccaggacctgcggaggaagcccttctacccagccctgatccgctacatgagcagcggccctgtggtggccatggtgtgggagggctacaacgtggtgcgggccagccgggccatgattggccacacagattctgctgaggccgcccctggcaccatccggggggacttctctgtgcacatcagcagaaatgtcatccacgccagtgacagcgtggagggcgcccagcgggagatccagctgtggttccagagcagcgagctggtgtcctgggcagatggcggccagcacagcagcatccacccagcctag

SEQ ID NO: 20847 - DNA, 354 bp, synthetic construct
  misc_feature 1..354: note = Description of Artificial Sequence: Synthetic coding sequence
  source 1..354: mol_type = other DNA
atgaagatgctgcaggcccctgagagcgtgctggccgagcactaccaggacctgcggaggaagcccttctacccagccctgatccgctacatgagcagcggccctgtggtggccatggtgtgggagggctacaacgtggtgcgggccagccgggccatgattggccacacagattctgctgaggccgcccctggcaccatccggggggacttctctgtgcacatcagcagaaatgtcatccacgccagtgacagcgtggagggcgcccagcgggagatccagctgtggttccagagcagcgagctggtgtcctgggcagatggcggccagcacagcagcatccacccagcctag

SEQ ID NO: 20848 - DNA, 510 bp, synthetic construct
  misc_feature 1..510: note = Description of Artificial Sequence: Synthetic coding sequence
  source 1..510: mol_type = other DNA
tgatggaggtctgccctgcggggcctgcgctgtggcccccgggcccctggccccagcctgctggtgcgccacggcagcggcggccccagctggacccgggagaggaccctggtggccgtgaagccagatggagtgcagaggcggctggtgggagatgtgatccagagatttgaaagaagaggcttcaccctggtgggcatgaagatgctgcaggcccctgagagcgtgctggccgagcactaccaggacctgcggaggaagcccttctacccagccctgatccgctacatgagcagcggccctgtggtggccatggtgtgggagggctacaacgtggtgcgggccagccgggccatgattggccacacagattctgctgaggccgcccctggcaccatccggggggacttctctgtgcacatcagcagccaccggctggcccccctggaccggggccagcgggagcagcagatggtgcccggcatcccccagggcgcccacgaggcctag

SEQ ID NO: 20849 - DNA, 702 bp, synthetic construct
  misc_feature 1..702: note = Description of Artificial Sequence: Synthetic coding sequence
  source 1..702: mol_type = other DNA
atgggcggcctcttctggaggtctgccctgcggggcctgcgctgtggcccccgggcccctggccccagcctgctggtgcgccacggcagcggcggccccagctggacccgggagaggaccctggtggccgtgaagccagatggagtgcagaggcggctggtgggagatgtgatccagagatttgaaagaagaggcttcaccctggtgggcatgaagatgctgcaggcccctgagagcgtgctggccgagcactaccaggacctgcggaggaagcccttctacccagccctgatccgctacatgagcagcggccctgtggtggccatggtgtgggagggctacaacgtggtgcgggccagccgggccatgattggccacacagattctgctgaggccgcccctggcaccatccggggggacttctctgtgcacatcagcagaaatgtcatccacgccagtgacagcgtggagggcgcccagcgggagatccagctgtggttccagagcagcgagctgagccccactggagccccctggcccagccggcggcccacctggaggggcaccaccgtgagccccaggacagccaccagcagcgcccggacctgctgcggcaccaagtggcccagcagccaggaggccgccctgggcctgggcagcggcctgctgcgcttcagctgtggcacagctgccatcagatag

SEQ ID NO: 20850 - DNA, 354 bp, synthetic construct; identical to SEQ ID NO: 20847
  misc_feature 1..354: note = Description of Artificial Sequence: Synthetic coding sequence
  source 1..354: mol_type = other DNA

SEQ ID NO: 20851 - DNA, 114 bp, synthetic construct
  misc_feature 1..114: note = Description of Artificial Sequence: Synthetic coding sequence
  source 1..114: mol_type = other DNA
atgaagatgctgcaggcccctgagagcgtgctggccgagcactaccaggacctgcggaggaagcccttctacccagccctgatccgctacatgagcagcggccctgtggtgtag

SEQ ID NO: 20852 - DNA, 195 bp, synthetic construct
  misc_feature 1..195: note = Description of Artificial Sequence: Synthetic coding sequence
  source 1..195: mol_type = other DNA
atgttcctgcagtactacctgaatgagcagggcgacagagtgtacaccctgaagaagtttgaccccatgggccagcagacctgcagcgcccacccagcccgcttctccccagatgacaagtacagccgccaccgcatcaccatcaagaagcgcttcaaggtgctgatgacccagcagcccaggcctgtgctgtag

SEQ ID NO: 20853 - DNA, 7668 bp, synthetic construct
  misc_feature 1..7668: note = Description of Artificial Sequence: Synthetic coding sequence
  source 1..7668: mol_type = other DNA
atgccacccctgctggcccccctgctgtgcctggccctgctgcctgccctggccgcccggggcccccgctgcagccagcctggagagacctgcctgaatggaggaaaatgtgaggccgccaatggaacagaggcctgtgtgtgtggcggggcctttgtgggcccccgctgccaggaccccaacccctgcctgagcaccccctgcaagaatgccggcacctgccacgtggtggacagaagaggagtggccgactatgcctgcagctgtgccctgggcttcagcggccccctgtgcctgacccccctggacaatgcctgcctgaccaacccctgcagaaatggaggcacctgtgacctgctgaccctgacagagtacaagtgccgctgccccccaggctggagcggcaagagctgccagcaggccgacccctgtgccagcaacccctgtgccaatggaggccagtgcctgccctttgaggccagctacatctgccactgccccccatccttccacggccccacctgccggcaggatgtgaatgaatgtggccagaagccaggcctgtgcagacatggaggcacctgccacaatgaggtgggcagctaccgctgtgtgtgccgggccacccacacaggccccaactgtgagcggccctacgtgccctgcagccccagcccctgccagaatggaggcacctgccggcccactggagatgtgacccatgaatgtgcctgcctgcccggcttcaccggccagaactgtgaggagaacattgatgactgccccggcaacaactgcaagaatggaggagcctgtgtggatggagtgaacacctacaactgccgctgccccccagagtggacaggccagtactgcacagaagatgtggatgagtgccagctgatgcccaatgcctgccagaatggaggcacctgccacaacacccacggcggctacaactgtgtgtgtgtgaatggctggacaggagaggactgcagcgagaacattgatgactgtgccagcgctgcctgcttccacggggccacctgccacgacagagtggccagcttctactgtgagtgcccccacggccgcacaggcctgctgtgccacctgaatgatgcctgcatcagcaacccctgcaatgaaggcagcaactgtgacaccaaccctgtgaatggcaaggccatctgcacctgccccagcggctacacaggccctgcctgcagccaggatgtggatgaatgttccctgggcgccaacccctgtgaacatgctgggaagtgcatcaacaccctgggcagctttgagtgccagtgcctgcagggctacacaggcccccgctgtgaaattgatgtgaatgaatgtgtgagcaacccctgccagaatgatgccacctgcctggaccagattggagagttccagtgcatctgcatgcctggctatgagggcgtgcactgtgaggtgaacacagatgaatgtgccagcagcccctgcctgcacaacggccgctgcctggacaagatcaatgagttccagtgtgaatgtcccaccggcttcaccggccacctgtgccagtatgatgtggatgaatgtgccagcaccccctgcaagaatggagccaagtgcctggatggccccaacacctacacctgtgtgtgcacagagggctacacaggcacccactgtgaggtggacattgatgaatgtgaccctgacccctgccactacggcagctgcaaggatggagtggccaccttcacctgcctgtgcaggcctggctacacaggccaccactgtgagaccaacatcaatgaatgtagcagccagccctgccgccacggcggcacctgccaggaccgggacaatgcctacctgtgcttctgcctgaagggcaccaccggccccaactgtgagatcaacctggatgactgtgccagcagcccctgtgacagcggcacctgcctggacaagattgatggctatgaatgtgcctgtgagcccggctacacaggctccatgtgcaacatcaacattgatgaatgtgccggcaacccctgccacaatggaggcacctgtgaagatggcatcaatggcttcacctgccgctgcccagagggctaccatgaccccacctgcctgtctgaggtgaatgaatgcaacagcaacccctgtgtgcatggagcctgccgggacagcctgaatggctacaagtgtgactgtgaccccggctggagcggcaccaactgtgacatcaacaacaatgaatgtgagagcaacccctgtgtgaatggaggcacctgcaaggacatgaccagcggctacgtgtgcacctgccgggagggcttcagcggccccaactgccagaccaacatcaatgaatgtgccagcaacccctgcctgaaccagggcacctgcattgatgatgtggccggctacaagtgcaactgcctgctgccctacaccggggccacctgtgaggtggtgctggccccctgtgcccccagcccctgcagaaatggaggagaatgtcggcagagcgaggactatgagagcttcagctgtgtgtgccccaccggctggcagggccagacctgtgaggtggacatcaatgaatgtgtgctgagcccctgccgccacggggccagctgccagaacacccacggcggctaccgctgccactgccaggccggctacagcggcaggaactgtgaaacagacattgatgactgccggcccaacccctgccacaacggcggcagctgcacagatggcatcaacacagccttctgtgactgcctgcccggcttccggggcaccttctgtgaggaggacatcaatgaatgtgccagtgacccctgcagaaatggagccaactgcacagactgtgtggacagctacacctgcacctgcccagctggcttcagcggcatccactgtgagaacaacaccccagactgcacagagagcagctgcttcaacggcggcacctgtgtggatggcatcaacagcttcacctgcctgtgccccccaggcttcaccggcagctactgccagcatgatgtgaatgaatgtgacagccagccctgcctgcacggcggcacctgccaggacggctgcggcagctaccgctgcacctgcccccagggctacacaggccccaactgccagaacctggtgcactggtgtgacagcagcccctgcaagaatggaggcaagtgctggcagacccacacccagtaccgctgtgagtgccccagcggctggacaggcctgtactgtgatgtgcccagcgtgtcctgtgaggtggccgcccagaggcagggcgtggatgtggcccggctgtgccagcacggcggcctgtgtgtggatgctggcaacacccaccactgccgctgccaggccggctacacaggcagctactgtgaggacctggtggatgagtgcagccccagcccctgccagaatggagccacctgcacagactacctgggcggctacagctgcaagtgtgtggccggctaccacggcgtgaactgcagcgaggagattgatgagtgcctgagccacccctgccagaatggaggcacctgcctggacctgcccaacacctacaagtgcagctgcccccggggcacccagggcgtgcactgtgagatcaacgtggatgactgcaacccccctgtggaccctgtgagccgcagccccaagtgcttcaacaacggcacctgtgtggaccaggtgggcggctacagctgcacctgccccccaggctttgtgggggagcgctgtgaaggagatgtgaatgaatgtctgagcaacccctgtgatgcccggggcacccagaactgtgtgcagagggtgaatgacttccactgtgagtgcagagctggccacacaggccgccgctgtgagagcgtcatcaatggctgcaagggcaagccctgcaagaatggaggcacctgtgctgtggccagcaacacagcccggggcttcatctgcaagtgcccagctggctttgagggcgccacctgtgaaaatgatgcccggacctgtggcagcctgcgctgcctgaatggaggcacctgcatcagcggccccaggagccccacctgcctgtgcctgggccccttcaccggccctgagtgccagtttcctgccagcagcccctgcctgggcggcaacccctgctacaaccagggcacctgtgagcccaccagcgagagccccttctaccgctgcctgtgcccagccaagttcaacggcctgctgtgccacatcctggactacagctttggaggaggagctggccgggacatccccccacccctgattgaggaggcctgtgagctgcctgagtgccaggaggatgctggcaacaaggtgtgcagcctgcagtgcaacaaccacgcctgtggctgggatggaggagactgcagcctgaacttcaatgacccctggaagaactgcacccagagcctgcagtgctggaagtacttcagtgatggccactgtgacagccagtgcaacagcgctggctgcctgtttgatggctttgactgccagagagctgagggccagtgcaaccccctgtatgaccagtactgcaaggaccacttcagtgatggccactgtgaccagggctgcaacagcgcagaatgtgagtgggatggcctggactgtgccgagcacgtgcctgagcggctggccgccggcaccctggtggtggtggtgctgatgcctcctgagcagctgaggaacagcagcttccacttcctgcgggagctgagccgggtgctgcacaccaacgtggtgttcaagagagatgcccacggccagcagatgatcttcccctactacggccgggaggaggagctgaggaagcaccccatcaagagagctgctgagggctgggccgccccagatgccctgctgggccaggtgaaggccagcctgctgcccggcggcagcgagggcggcagaagaagaagagagctggaccccatggatgtgcggggcagcatcgtgtacctggagattgacaaccggcagtgtgtgcaggccagcagccagtgcttccagagcgccacagatgtggccgccttcctgggcgccctggccagcctgggcagcctgaacatcccctacaagattgaggccgtgcagagcgagaccgtggagcccccacctccagcccagctgcacttcatgtatgtggccgccgccgcctttgtgctgctcttctttgtgggctgcggcgtgctgctgagcaggaagagaagacggcagcacggccagctgtggttccctgagggcttcaaggtgtctgaggccagcaagaagaagagaagagagcccctgggagaagattctgtgggcctgaagcccctgaagaatgccagtgatggagccctgatggatgacaaccagaatgagtggggagatgaggacctggagaccaagaagttccgctttgaggagcctgtggtgctgcctgacctggatgaccagacagaccaccggcagtggacccagcagcacctggatgctgctgacctgaggatgtctgccatggcccccaccccaccccagggcgaggtggatgctgactgcatggatgtgaatgtgcggggcccagatggcttcacccccctgatgattgccagctgcagcggcggcggcctggagactggaaacagcgaggaggaggaggatgccccagctgtgatcagtgacttcatctaccagggcgccagcctgcacaaccagacagacagaactggagaaacagccctgcacctggccgcccgctacagcagaagtgatgctgccaagaggctgctggaggccagcgcagatgccaacatccaggacaacatgggccgcacccccctgcatgctgctgtgtctgcagatgcccagggcgtcttccagatcctgatccggaacagagccacagacctggatgccaggatgcatgatggcaccacccccctcatcctggccgcccggctggccgtggagggcatgctggaggacctgatcaacagccatgctgatgtgaatgctgtggatgacctgggcaagagcgccctgcactgggccgctgctgtgaacaacgtggatgctgctgtggtgctgctgaagaatggagccaacaaggacatgcagaacaaccgggaggagacccccctcttcctggccgcccgggagggcagctatgaaacagccaaggtgctgctggaccactttgccaacagagacatcacagaccacatggaccggctgccccgggacatcgcccaggagaggatgcaccacgacatcgtgcggctgctggatgagtacaacctggtgcgcagcccccagctgcatggagcccccctgggcggcacccccaccctgagcccccccctgtgcagccccaacggctacctgggcagcctgaagccaggagtgcagggcaagaaggtgaggaagcccagcagcaagggcctggcctgtggcagcaaggaggccaaggacctgaaggcccggaggaagaagagccaggacggcaagggctgcctgctggacagcagcggcatgctgagccctgtggacagcctggagagcccccacggctacctgagtgatgtggccagcccccccctgctgcccagccccttccagcagagccccagcgtgcccctgaaccacctgcccggcatgccagacacccacctgggcatcggccacctgaatgtggccgccaagccagagatggccgccctgggcggcggcggccgcctggcctttgagaccggccccccccggctgagccacctgcctgtggccagcggcaccagcacagtgctgggcagcagcagcggcggggccctgaacttcaccgtgggcggcagcaccagcctgaatggccagtgtgagtggctgagccggctgcagagcggcatggtgcccaaccagtacaaccccctgcggggctctgtggcccctggccccctgagcacccaggcccccagcctgcagcacggcatggtgggccccctgcacagcagcctggccgccagcgccctgagccagatgatgagctaccagggcctgcccagcacccggctggccacccagccccacctggtgcagacccagcaggtgcagccccagaacctgcagatgcagcagcagaacctgcagcctgccaacatccagcagcagcagagcctgcagcccccacctcctccaccccagccccacctgggcgtgtcctctgctgccagcggccacctgggccgctccttcctgtctggagagcccagccaggctgatgtgcagcccctgggccccagcagcctggccgtgcacaccatcctgccccaggagagccctgccctgcccaccagcctgcccagcagcctggtgccccctgtgacagctgcccagttcctgaccccacccagccagcacagctacagcagccctgtggacaacacccccagccaccagctgcaggtgcctgagcaccccttcctgacccccagccctgagagcccagaccagtggagcagcagcagcccccacagcaatgtgtctgactggagcgagggcgtgagcagcccccccacctccatgcagagccagatcgcccgcatccctgaggccttcaagtag

SEQ ID NO: 20854 - DNA, 6012 bp, synthetic construct
  misc_feature 1..6012: note = Description of Artificial Sequence: Synthetic coding sequence
  source 1..6012: mol_type = other DNA
atgcagccccccagcctgctgctgctgctgctgctgctgctgctgctgtgtgtgtctgtggtgcggccccggggcctgctgtgtggcagcttccctgagccctgtgccaatggaggcacctgcctgagcctgagcctgggccagggcacctgccagtgtgcccctggcttcctgggggagacctgccagttcccagacccctgccagaatgcccagctgtgccagaatggaggcagctgccaggccctgctgcctgcccccctgggcctgcccagcagccccagccccctgacccccagcttcctgtgcacctgcctgcccggcttcaccggggagcgctgccaggccaagctggaggacccctgccccccatccttctgcagcaagaggggccgctgccacatccaggccagcggccggccccagtgcagctgcatgcctggctggacaggagagcagtgccagctgcgggacttctgcagcgccaacccctgtgtgaatggaggagtgtgcctggccacctacccccagatccagtgccactgccccccaggctttgagggccacgcctgtgaaagagatgtgaatgaatgcttccaggaccccggcccctgccccaagggcaccagctgccacaacaccctgggcagcttccagtgcctgtgccctgtgggccaggagggcccccgctgtgagctgcgggccggcccctgccccccccggggctgcagcaatggaggcacctgccagctgatgcctgagaaggacagcaccttccacctgtgcctgtgccccccaggcttcatcggccctgactgtgaggtgaacccagacaactgtgtgagccaccagtgccagaatggaggcacctgccaggacggcctggacacctacacctgcctgtgcccagagacctggacaggctgggactgcagtgaagatgtggatgaatgtgagacccagggccccccccactgcagaaatggaggcacctgccagaacagcgctggcagcttccactgtgtgtgtgtgtctggctggggcggcaccagctgtgaggagaacctggatgactgcatcgccgccacctgtgcccctggcagcacctgcatcgacagagtgggcagcttcagctgcctgtgccccccaggccgcacaggcctgctgtgccacctggaggacatgtgcctgagccagccctgccacggagatgcccagtgcagcaccaaccccctgaccggcagcaccctgtgcctgtgccagcccggctacagcggccccacctgccaccaggacctggatgaatgtctgatggcccagcagggccccagcccctgtgagcacggcggcagctgcctgaacaccccaggcagcttcaactgcctgtgccccccaggctacacaggcagccgctgtgaggccgaccacaatgaatgtctgagccagccctgccaccctggcagcacctgcctggacctgctggccaccttccactgcctgtgccccccaggcctggagggccagctgtgtgaggtggagaccaatgaatgtgccagcgccccctgcctgaaccacgccgactgccacgacctgctgaatggcttccagtgcatctgcctgcccggcttcagcggcacccgctgtgaggaggacattgatgagtgccgcagcagcccctgtgccaacggcggccagtgccaggaccagcccggggccttccactgcaagtgcctgcccggctttgagggcccccgctgccagacagaggtggatgagtgcctgagtgacccctgccctgtgggcgccagctgcctggacctgcccggggccttcttctgcctgtgccccagcggcttcaccggccagctgtgtgaggtgcccctgtgtgcccccaacctgtgccagcccaagcagatctgcaaggaccagaaggacaaggccaactgcctgtgcccagatggcagccctggctgtgcccctcctgaggacaactgcacctgccaccacggccactgccagaggagcagctgtgtgtgtgatgtgggctggacaggcccagaatgtgaggccgagctgggcggctgcatcagcgccccctgtgcccacggcggcacctgctacccccagcccagcggctacaactgcacctgccccaccggctacacaggccccacctgcagcgaggagatgacagcctgccacagcggcccctgcctgaatggaggcagctgcaaccccagccctgggggctactactgcacctgcccccccagccacacaggcccccagtgccagaccagcacagactactgtgtgtctgccccctgcttcaacggcggcacctgtgtgaaccggcccggcaccttcagctgcctgtgtgccatgggcttccagggcccccgctgtgagggcaagctgcggcccagctgtgccgacagcccctgcaggaacagagccacctgccaggacagcccccagggcccccgctgcctgtgccccaccgtgtacacaggaggcagctgccagaccctgatggacctgtgtgcccagaagccctgccccaggaacagccactgcctgcagacaggccccagcttccactgcctgtgcctgcagggctggacaggccccctgtgcaacctgcccctgagcagctgccagaaggccgccctgagccagggcattgatgtgagcagcctgtgccacaatggaggcctgtgtgtggacagcggccccagctacttctgccactgccccccaggcttccagggcagcctgtgccaggaccacgtgaacccctgtgagagccggccctgccagaatggagccacctgcatggcccagcccagcggctacctgtgccagtgtgcccctggctatgatggccagaactgcagcaaggagctggatgcctgccagagccagccctgccacaaccacggcacctgcacccccaagccaggcggcttccactgtgcctgccccccaggctttgtgggcctgcgctgtgaaggagatgtggatgaatgtctggaccagccctgccaccccaccggcacagctgcctgccacagcctggccaatgccttctactgccagtgcctgcccggccacacaggccagtggtgtgaggtggagattgacccctgccacagccagccctgcttccatggaggcacctgtgaggccacagctggcagccccctgggcttcatctgccactgccccaagggctttgagggccccacctgcagccaccgggcccccagctgtggcttccaccactgccaccacggcggcctgtgcctgcccagccccaagccaggcttccccccaagatgtgcctgcctgagcggctacggcggccctgactgcctgaccccaccagcccccaagggctgcggcccccccagcccctgcctgtacaacggcagctgcagcgagaccaccggcctgggcggccctggcttccgctgcagctgcccccacagcagccctggcccccgctgccagaagccaggggccaagggctgtgagggccgctctggagatggagcctgtgatgctggctgcagcggccctgggggcaactgggatggaggagactgcagcctgggcgtgcctgacccctggaagggctgccccagccacagccgctgctggctgctcttcagagatggccagtgccacccccagtgtgacagtgaagaatgtctgtttgatggctatgactgtgagaccccaccagcctgcaccccagcctatgaccagtactgccacgaccacttccacaacggccactgtgagaagggctgcaacacagcagaatgtggctgggatggaggagactgcaggccagaagatggagaccctgagtggggccccagcctggccctgctggtggtgctgagccccccagccctggaccagcagctgtttgccctggcccgggtgctgagcctgaccctgcgggtgggcctgtgggtgaggaaggacagagatggccgggacatggtgtacccctacccaggggcccgggcagaggagaagctgggcggcacccgggaccccacctaccaggagagagctgccccccagacccagcccctgggcaaggagacagacagcctgtctgctggctttgtggtggtgatgggcgtggacctgagccgctgtggccctgaccacccagccagccgctgcccctgggaccccggcctgctgctgcgcttcctggccgccatggctgctgtgggcgccctggagcccctgctgcccggccccctgctggccgtgcacccccacgccggcacagcccccccagccaaccagctgccctggcctgtgctgtgcagccctgtggccggggtcatcctgctggccctgggcgccctgctggtgctgcagctgatcagaagaagaagaagagagcacggggccctgtggctgcccccaggcttcacccggcggcccaggacccagagcgccccccacagaagaagaccacccctgggggaggacagcatcggcctgaaggccctgaagcccaaggccgaggtggatgaagatggagtggtgatgtgcagcggccctgaggagggggaggaggtgggccaggccgaggagactggaccacccagcacctgccagctgtggagcctgagcggcggctgtggggccctgccccaggccgccatgctgaccccaccccaggagagcgagatggaggccccagacctggacacccggggcccagatggagtgacccccctgatgtctgctgtgtgctgcggggaggtgcagagcggcaccttccagggcgcctggctgggctgcccagagccctgggagcccctgctggatggaggagcctgcccccaggcccacacagtgggcactggagagacccccctgcacctggccgcccgcttcagccggcccacagctgcccggcggctgctggaggccggggccaaccccaaccagcctgaccgggccggccgcacccccctgcatgctgctgtggccgcagatgcccgggaggtgtgccagctgctgctgcggagccggcagacagctgtggatgccaggacagaagatggcaccacccccctgatgctggccgcccggctggccgtggaggacctggtggaggagctgattgctgcccaggctgatgtgggcgcccgggacaagtggggcaagacagccctgcactgggccgctgctgtgaacaatgcccgggccgcccggagcctgctgcaggccggggctgacaaggatgcccaggacaaccgggagcagacccccctcttcctggccgcccgggagggcgctgtggaggtggcccagctgctgctgggcctgggcgccgcccgggagctgcgggaccaggccggcctggccccagcagatgtggcccaccagaggaaccactgggacctgctgaccctgctggagggcgccggccccccagaggcccggcacaaggccaccccaggccgggaggccggccccttcccccgggccaggacagtgtctgtgtctgtgccccctcatggaggaggagccctgccccgctgcaggaccctgtctgctggggccggcccccggggcggcggggcctgcctgcaggcccggacctggagcgtggacctggccgcccggggcggcggggcctacagccactgccgcagcctgtctggagtgggcgccggcggcggccccaccccccggggccgccgcttctctgctggcatgaggggcccccggcccaacccagccatcatgaggggccgctatggagtggccgccggccggggcggccgggtgtccacagatgactggccctgtgactgggtggccctgggcgcctgtggcagcgccagcaacatccccatccccccaccctgcctgacccccagccctgagcggggcagcccccagctggactgtggccccccagccctgcaggagatgcccatcaaccagggcggggagggcaagaagtag

SEQ ID NO: 20855 - DNA, 561 bp, synthetic construct
  misc_feature 1..561: note = Description of Artificial Sequence: Synthetic coding sequence
  source 1..561: mol_type = other DNA
atgtctgctgtgtgctgcggggaggtgcagagcggcaccttccagggcgcctggctgggctgcccagagccctgggagcccctgctggatggaggagcctgcccccaggcccacacagtgggcaccggggagacccccctgcacctggccgcccgcttcagccggcccacagctgcccggcggctgctggaggccggggccaaccccaaccagcctgacagagctggccgcacccccctgcacgccgctgtggccgcagatgcccgggaggtgtgccagctgctgctgcggagccggcagacagctgtggatgccaggacagaagatggcaccacccccctgatgctggccgcccggctggccgtggaggacctggtggaggagctgattgctgcccaggctgatgtgggcgcccgggacaagtggggcgcagatgctgccatccctggaggagctggccgcagcggcggcagcagccctgccacagctggagctgggggcagccccagggctgctggccctggctgggccagcgctgggggccgccgcagccccacctag

SEQ ID NO: 20856 - DNA, 1734 bp, synthetic construct
  misc_feature 1..1734: note = Description of Artificial Sequence: Synthetic coding sequence
  source 1..1734: mol_type = other DNA
atgcactggctgaggaaggtgcagggcctgtgcaccctgtggggcacccagatgagcagcaggaccctgtacatcaacagccggcagctggtgtccctgcagtggggccaccaggaggtgcctgccaagttcaactttgccagtgatgtgctggaccactgggccgacatggagaaggccggcaagaggctgcccagccctgccctgtggtgggtgaatggcaagggcaaggagctgatgtggaacttccgggagctgtctgagaacagccagcaggccgccaacgtgctgagcggggcctgtggcctgcagagaggagacagagtggccgtggtgctgccccgggtgcctgagtggtggctggtgatcctgggctgcatccgggccggcctcatcttcatgcctggcaccatccagatgaagagcacagacatcctgtaccgcctgcagatgagcaaggccaaggccatcgtggccggagatgaagtcatccaggaggtggacacagtggcctctgaatgtcccagcctgcgcatcaagctgctggtgtctgagaagagctgtgatggctggctgaacttcaagaagctgctgaatgaggccagcaccacccaccactgtgtggagaccggcagccaggaggccagcgccatctacttcaccagcggcaccagcggcctgcccaagatggccgagcacagctacagcagcctgggcctgaaggccaagatggatgctggctggacaggcctgcaggccagtgacatcatgtggaccatcagtgacaccggctggatcctgaacatcctgtgcagcctgatggagccctgggccctgggcgcctgcacctttgtgcacctgctgcccaagtttgaccccctggtgatcctgaagaccctgagcagctaccccatcaagtccatgatgggcgcccccatcgtgtacaggatgctgctgcagcaggacctgagcagctacaagttcccccacctgcagaactgtgtgacagtgggggagagcctgctgcctgagaccctggagaactggagggcccagacaggcctggacatccgggagagctatggccagacagagaccggcctgacctgcatggtgtccaagaccatgaagatcaagccaggctacatgggcacagctgccagctgctatgatgtgcagatcattgatgacaagggaaatgtgctgcccccaggcacagaaggagacatcggcatccgggtgaagcccatccggcccatcggcatcttcagcggctacgtggacaacccagacaagacagctgccaacatccggggggacttctggctgctgggggaccggggcatcaaggatgaagatggctacttccagttcatgggccgggccaatgacatcatcaacagcagcggctacagaattggccccagcgaggtggagaatgccctgatggagcaccctgctgtggtggagacagctgtgatcagcagcccagaccctgtgcggggggaggtggtgaaggcctttgtggtgctggccagccagttcctgagccatgaccctgagcagctgaccaaggagctgcagcagcacgtgaagtctgtgacagccccctacaagtaccccaggaagattgaatttgtgctgaacctgcccaagacagtgacaggcaagatccagagggccaagctgcgggacaaggagtggaagatgtctgggaaggcccgggcccagtag

SEQ ID NO: 20857 - DNA, 4368 bp, synthetic construct
  misc_feature 1..4368: note = Description of Artificial Sequence: Synthetic coding sequence
  source 1..4368: mol_type = other DNA
atgggcggggcctgcagcagcttcaccaccagcagcagccccaccatctacagcacctctgtgacagacagcaaggccatgcaggtggagagctgcagcagcgctgtgggcgtgagcaacagaggagtgtctgagaagcagctgaccagcaacacagtgcagcagcaccccagcacccccaagaggcacacagtgctgtacatcagccccccacctgaggacctgctggacaacagcaggatgagctgccaggatgagggctgcggcctggagagcgagcagagctgcagcatgtggatggaggacagccccagcaacttcagcaacatgagcaccagcagctacaatgacaacacagaggtgcccaggaagagcaggaagaggaaccccaagcagaggcctggggtgaagaggcgggactgtgaggagagcaacatggacatctttgatgctgacagcgccaaggccccccactacgtgctgagccagctgaccacagacaacaagggcaacagcaaggctggaaatggcaccctggagaaccagaagggcactggagtgaagaagagccccatgctgtgtggccagtaccctgtgaagtctgagggcaaggagctgaagatcgtggtgcagcctgagacccagcaccgggcccgctacctgacagagggcagccggggctctgtgaaggacaggacccagcagggcttccccaccgtgaagctggagggccacaatgaacctgtggtgctgcaggtgtttgtgggcaatgattctggccgggtgaagccccacggcttctaccaggcctgccgggtgacaggcaggaacaccaccccctgcaaggaggtggacatcgagggcaccaccgtcatcgaggtgggcctggaccccagcaacaacatgaccctggccgtggactgtgtgggcatcctgaagctgagaaatgctgatgtggaggccagaattggaattgctggcagcaagaagaagagcacccgggcccggctggtgttccgggtgaacatcatgaggaaggatggcagcaccctgaccctgcagacccccagcagccccatcctgtgcacccagcctgctggggtgcctgagatcctgaagaagagcctgcacagctgcagcgtgaagggggaggaggaggtgttcctgattggcaagaacttcctgaagggcaccaaggtgatcttccaggagaatgtgtctgatgaaaattcctggaagtctgaggccgagattgacatggagctgttccaccagaaccacctgattgtgaaggtgcccccctaccatgaccagcacatcaccctgcctgtgtctgtgggcatctacgtggtgaccaatgccggccgcagccatgatgtgcagcccttcacctacaccccagaccctgctgctgctggggccctgaatgtgaatgtgaagaaggagatcagcagccctgcccggccctgcagctttgaggaggccatgaaggccatgaagaccaccggctgcaacctggacaaggtgaacatcatccccaatgccctgatgacccccctcatccccagctccatgatcaagtcagaagatgtgacccccatggaggtgacagctgagaagaggagcagcaccatcttcaagaccaccaagtctgtgggcagcacccagcagaccctggagaacatcagcaacattgctggaaatggcagcttcagcagccccagcagcagccacctgcccagtgaaaatgagaagcagcagcagatccagcccaaggcctacaaccctgagaccctgaccaccatccagacccaggacatcagccagcccggcaccttccctgctgtgtctgccagcagccagctgcccaacagtgatgccctgctgcagcaggccacccagttccagacccgggagacccagagccgggagatcctgcagagtgatggcaccgtggtgaacctgagccagctgacagaggccagccagcagcagcagcagagccccctgcaggagcaggcccagaccctgcagcagcagatcagcagcaacatcttccccagccccaacagcgtgtcccagctgcagaacaccatccagcagctgcaggccggcagcttcaccggcagcacagccagcggcagcagcggctctgtggacctggtgcagcaggtgctggaggcccagcagcagctgagctctgtgctcttcagcgccccagatggaaatgaaaatgtgcaggagcagctgtctgctgacatcttccagcaggtgtcccagatccagagcggcgtgtccccaggcatgttcagcagcacagagcccaccgtgcacaccaggccagacaacctgctgcccggccgggcagagagcgtgcacccccagagcgagaacaccctgagcaaccagcagcagcagcagcagcagcagcagcaggtgatggagagcagcgctgccatggtgatggagatgcagcagagcatctgccaggccgccgcccagatccagagcgagctgttccccagcacagccagcgccaatggaaacctgcagcagagccctgtgtaccagcagaccagccacatgatgtctgccctgagcaccaatgaagacatgcagatgcagtgtgagctgttcagcagccccccagctgtgtctggaaatgagaccagcaccaccaccacccagcaggtggccaccccaggcaccaccatgttccagaccagcagcagtggagatggagaggagaccggcacccaggccaagcagatccagaacagcgtcttccagaccatggtgcagatgcagcacagcggggacaaccagccccaggtgaacctcttcagcagcaccaagtccatgatgtctgtgcagaacagcggcacccagcagcagggcaatggcctcttccagcagggcaatgagatgatgagcctgcagagcggcaacttcctgcagcagagcagccacagccaggcccagctgttccacccccagaaccccatcgcagatgcccagaacctgagccaggagacccagggcagcctcttccacagccccaaccccatcgtgcacagccagaccagcaccaccagcagcgagcagatgcagccccccatgttccacagccagagcaccatcgctgtgctgcagggcagctctgtgccccaggaccagcagagcaccaacatcttcctgagccagagccccatgaacaacctgcagaccaacacagtggcccaggaggccttctttgctgcccccaacagcatcagccccctgcagagcaccagcaacagcgagcagcaggccgccttccagcagcaggcccccatcagccacatccagacccccatgctgagccaggagcaggcccagcccccccagcagggcctcttccagccccaggtggccctgggcagcctgccccccaaccccatgccccagagccagcagggcaccatgttccagagccagcacagcatcgtggccatgcagagcaacagccccagccaggagcagcagcagcagcagcagcagcagcagcagcagcagcagcagcagcagcagagcatcctcttcagcaaccagaacaccatggccaccatggccagccccaagcagcccccacccaacatgatcttcaaccccaaccagaaccccatggccaaccaggagcagcagaaccagagcatcttccaccagcagagcaacatggcccccatgaaccaggagcagcagcccatgcagttccagagccagagcacagtgagcagcctgcagaaccctggccccacccagagcgagagcagccagacccccctcttccacagcagcccccagatccagctggtgcagggcagccccagcagccaggagcagcaggtgaccctcttcctgagccctgcctccatgtctgccctgcagaccagcatcaaccagcaggacatgcagcagagccccctgtacagcccccagaacaacatgcctggcatccagggcgccaccagcagcccccagccccaggccaccctcttccacaacacagctgggggcaccatgaaccagctgcagaacagccctggcagcagccagcagaccagcggcatgttcctgtttggcatccagaacaactgcagccagctgctgaccagcggccctgccaccctgcctgaccagctgatggccatcagccagcccggccagccccagaatgaaggccagccccctgtgaccaccctgctgagccagcagatgcctgagaacagccccctggccagcagcatcaacaccaaccagaacatcgagaagattgacctgctggtgtccctgcagaaccagggcaacaacctgaccggcagcttctag

SEQ ID NO: 20858 - DNA, 4647 bp, synthetic construct
  misc_feature 1..4647: note = Description of Artificial Sequence: Synthetic coding sequence
  source 1..4647: mol_type = other DNA
atgcccagcgacttcatcagcctgctgtctgctgacctggacctggagagccccaagagcctgtacagccgggacagcctgaagctgcaccccagccagaacttccaccgggccggcctgctggaggagagcgtgtatgacctgctgcccaaggagctgcagctgccccccagccgggagacctctgtggcctccatgagccagaccagcggcggggaggccggcagccccccacctgctgtggtggccgcagatgccagcagcgcccccagcagcagctccatgggcggggcctgcagcagcttcaccaccagcagcagccccaccatctacagcacctctgtgacagacagcaaggccatgcaggtggagagctgcagcagcgctgtgggcgtgagcaacagaggagtgtctgagaagcagctgaccagcaacacagtgcagcagcaccccagcacccccaagaggcacacagtgctgtacatcagccccccacctgaggacctgctggacaacagcaggatgagctgccaggatgagggctgcggcctggagagcgagcagagctgcagcatgtggatggaggacagccccagcaacttcagcaacatgagcaccagcagctacaatgacaacacagaggtgcccaggaagagcaggaagaggaaccccaagcagaggcctggggtgaagaggcgggactgtgaggagagcaacatggacatctttgatgctgacagcgccaaggccccccactacgtgctgagccagctgaccacagacaacaagggcaacagcaaggctggaaatggcaccctggagaaccagaagggcactggagtgaagaagagccccatgctgtgtggccagtaccctgtgaagtctgagggcaaggagctgaagatcgtggtgcagcctgagacccagcaccgggcccgctacctgacagagggcagccggggctctgtgaaggacaggacccagcagggcttccccaccgtgaagctggagggccacaatgaacctgtggtgctgcaggtgtttgtgggcaatgattctggccgggtgaagccccacggcttctaccaggcctgccgggtgacaggcaggaacaccaccccctgcaaggaggtggacatcgagggcaccaccgtcatcgaggtgggcctggaccccagcaacaacatgaccctggccgtggactgtgtgggcatcctgaagctgagaaatgctgatgtggaggccagaattggaattgctggcagcaagaagaagagcacccgggcccggctggtgttccgggtgaacatcatgaggaaggatggcagcaccctgaccctgcagacccccagcagccccatcctgtgcacccagcctgctggggtgcctgagatcctgaagaagagcctgcacagctgcagcgtgaagggggaggaggaggtgttcctgattggcaagaacttcctgaagggcaccaaggtgatcttccaggagaatgtgtctgatgaaaattcctggaagtctgaggccgagattgacatggagctgttccaccagaaccacctgattgtgaaggtgcccccctaccatgaccagcacatcaccctgcctgtgtctgtgggcatctacgtggtgaccaatgccggccgcagccatgatgtgcagcccttcacctacaccccagaccctgctgctggggccctgaatgtgaatgtgaagaaggagatcagcagccctgcccggccctgcagctttgaggaggccatgaaggccatgaagaccaccggctgcaacctggacaaggtgaacatcatccccaatgccctgatgacccccctcatccccagctccatgatcaagtcagaagatgtgacccccatggaggtgacagctgagaagaggagcagcaccatcttcaagaccaccaagtctgtgggcagcacccagcagaccctggagaacatcagcaacattgctggaaatggcagcttcagcagccccagcagcagccacctgcccagtgaaaatgagaagcagcagcagatccagcccaaggcctacaaccctgagaccctgaccaccatccagacccaggacatcagccagcccggcaccttccctgctgtgtctgccagcagccagctgcccaacagtgatgccctgctgcagcaggccacccagttccagacccgggagacccagagccgggagatcctgcagagtgatggcaccgtggtgaacctgagccagctgacagaggccagccagcagcagcagcagagccccctgcaggagcaggcccagaccctgcagcagcagatcagcagcaacatcttccccagccccaacagcgtgtcccagctgcagaacaccatccagcagctgcaggccggcagcttcaccggcagcacagccagcggcagcagcggctctgtggacctggtgcagcaggtgctggaggcccagcagcagctgagctctgtgctcttcagcgccccagatggaaatgaaaatgtgcaggagcagctgtctgctgacatcttccagcaggtgtcccagatccagagcggcgtgtccccaggcatgttcagcagcacagagcccaccgtgcacaccaggccagacaacctgctgcccggccgggcagagagcgtgcacccccagagcgagaacaccctgagcaaccagcagcagcagcagcagcagcagcagcaggtgatggagagcagcgctgccatggtgatggagatgcagcagagcatctgccaggccgccgcccagatccagagcgagctgttccccagcacagccagcgccaacggcaacctgcagcagagccctgtgtaccagcagaccagccacatgatgtctgccctgagcaccaatgaagacatgcagatgcagtgtgagctgttcagcagccccccagctgtgtctggaaatgagaccagcaccaccaccacccagcaggtggccaccccaggcaccaccatgttccagaccagcagcagtggagatggagaggagaccggcacccaggccaagcagatccagaacagcgtcttccagaccatggtgcagatgcagcacagcggggacaaccagccccaggtgaacctcttcagcagcaccaagtccatgatgtctgtgcagaacagcggcacccagcagcagggcaatggcctcttccagcagggcaatgagatgatgagcctgcagagcggcaacttcctgcagcagagcagccacagccaggcccagctgttccacccccagaaccccatcgcagatgcccagaacctgagccaggagacccagggcagcctcttccacagccccaaccccatcgtgcacagccagaccagcaccaccagcagcgagcagatgcagccccccatgttccacagccagagcaccatcgctgtgctgcagggcagctctgtgccccaggaccagcagagcaccaacatcttcctgagccagagccccatgaacaacctgcagaccaacacagtggcccaggaggccttctttgctgcccccaacagcatcagccccctgcagagcaccagcaacagcgagcagcaggccgccttccagcagcaggcccccatcagccacatccagacccccatgctgagccaggagcaggcccagcccccccagcagggcctcttccagccccaggtggccctgggcagcctgccccccaaccccatgccccagagccagcagggcaccatgttccagagccagcacagcatcgtggccatgcagagcaacagccccagccaggagcagcagcagcagcagcagcagcagcagcagcagcagcagcagcagcagcagagcatcctcttcagcaaccagaacaccatggccaccatggccagccccaagcagcccccacccaacatgatcttcaaccccaaccagaaccccatggccaaccaggagcagcagaaccagagcatcttccaccagcagagcaacatggcccccatgaaccaggagcagcagcccatgcagttccagagccagagcacagtgagcagcctgcagaaccctggccccacccagagcgagagcagccagacccccctcttccacagcagcccccagatccagctggtgcagggcagccccagcagccaggagcagcaggtgaccctcttcctgagccctgcctccatgtctgccctgcagaccagcatcaaccagcaggacatgcagcagagccccctgtacagcccccagaacaacatgcctggcatccagggcgccaccagcagcccccagccccaggccaccctcttccacaacacagctgggggcaccatgaaccagctgcagaacagccctggcagcagccagcagaccagcggcatgttcctgtttggcatccagaacaactgcagccagctgctgaccagcggccctgccaccctgcctgaccagctgatggccatcagccagcccggccagccccagaatgaaggccagccccctgtgaccaccctgctgagccagcagatgcctgagaacagccccctggccagcagcatcaacaccaaccagaacatcgagaagattgacctgctggtgtccctgcagaaccagggcaacaacctgaccggcagcttctag

SEQ ID NO: 20859 - DNA, 4368 bp, synthetic construct; identical to SEQ ID NO: 20857
  misc_feature 1..4368: note = Description of Artificial Sequence: Synthetic coding sequence
  source 1..4368: mol_type = other DNA

SEQ ID NO: 20860 - DNA, 4596 bp, synthetic construct
  misc_feature 1..4596: note = Description of Artificial Sequence: Synthetic coding sequence
  source 1..4596: mol_type = other DNA
atgcccagcgacttcatcagcctgctgtctgctgacctggacctggagagccccaagagcctgtacagccgggagagcgtgtatgacctgctgcccaaggagctgcagctgccccccagccgggagacctctgtggcctccatgagccagaccagcggcggggaggccggcagccccccacctgctgtggtggccgcagatgccagcagcgcccccagcagcagctccatgggcggggcctgcagcagcttcaccaccagcagcagccccaccatctacagcacctctgtgacagacagcaaggccatgcaggtggagagctgcagcagcgctgtgggcgtgagcaacagaggagtgtctgagaagcagctgaccagcaacacagtgcagcagcaccccagcacccccaagaggcacacagtgctgtacatcagccccccacctgaggacctgctggacaacagcaggatgagctgccaggatgagggctgcggcctggagagcgagcagagctgcagcatgtggatggaggacagccccagcaacttcagcaacatgagcaccagcagctacaatgacaacacagaggtgcccaggaagagcaggaagaggaaccccaagcagaggcctggggtgaagaggcgggactgtgaggagagcaacatggacatctttgatgctgacagcgccaaggccccccactacgtgctgagccagctgaccacagacaacaagggcaacagcaaggctggaaatggcaccctggagaaccagaagggcactggagtgaagaagagccccatgctgtgtggccagtaccctgtgaagtctgagggcaaggagctgaagatcgtggtgcagcctgagacccagcaccgggcccgctacctgacagagggcagccggggctctgtgaaggacaggacccagcagggcttccccaccgtgaagctggagggccacaatgaacctgtggtgctgcaggtgtttgtgggcaatgattctggccgggtgaagccccacggcttctaccaggcctgccgggtgacaggcaggaacaccaccccctgcaaggaggtggacatcgagggcaccaccgtcatcgaggtgggcctggaccccagcaacaacatgaccctggccgtggactgtgtgggcatcctgaagctgagaaatgctgatgtggaggccagaattggaattgctggcagcaagaagaagagcacccgggcccggctggtgttccgggtgaacatcatgaggaaggatggcagcaccctgaccctgcagacccccagcagccccatcctgtgcacccagcctgctggggtgcctgagatcctgaagaagagcctgcacagctgcagcgtgaagggggaggaggaggtgttcctgattggcaagaacttcctgaagggcaccaaggtgatcttccaggagaatgtgtctgatgaaaattcctggaagtctgaggccgagattgacatggagctgttccaccagaaccacctgattgtgaaggtgcccccctaccatgaccagcacatcaccctgcctgtgtctgtgggcatctacgtggtgaccaatgccggccgcagccatgatgtgcagcccttcacctacaccccagaccctgctgctgctggggccctgaatgtgaatgtgaagaaggagatcagcagccctgcccggccctgcagctttgaggaggccatgaaggccatgaagaccaccggctgcaacctggacaaggtgaacatcatccccaatgccctgatgacccccctcatccccagctccatgatcaagtcagaagatgtgacccccatggaggtgacagctgagaagaggagcagcaccatcttcaagaccaccaagtctgtgggcagcacccagcagaccctggagaacatcagcaacattgctggaaatggcagcttcagcagccccagcagcagccacctgcccagtgaaaatgagaagcagcagcagatccagcccaaggcctacaaccctgagaccctgaccaccatccagacccaggacatcagccagcccggcaccttccctgctgtgtctgccagcagccagctgcccaacagtgatgccctgctgcagcaggccacccagttccagacccgggagacccagagccgggagatcctgcagagtgatggcaccgtggtgaacctgagccagctgacagaggccagccagcagcagcagcagagccccctgcaggagcaggcccagaccctgcagcagcagatcagcagcaacatcttccccagccccaacagcgtgtcccagctgcagaacaccatccagcagctgcaggccggcagcttcaccggcagcacagccagcggcagcagcggctctgtggacctggtgcagcaggtgctggaggcccagcagcagctgagctctgtgctcttcagcgccccagatggaaatgaaaatgtgcaggagcagctgtctgctgacatcttccagcaggtgtcccagatccagagcggcgtgtccccaggcatgttcagcagcacagagcccaccgtgcacaccaggccagacaacctgctgcccggccgggcagagagcgtgcacccccagagcgagaacaccctgagcaaccagcagcagcagcagcagcagcagcagcaggtgatggagagcagcgctgccatggtgatggagatgcagcagagcatctgccaggccgccgcccagatccagagcgagctgttccccagcacagccagcgccaatggaaacctgcagcagagccctgtgtaccagcagaccagccacatgatgtctgccctgagcaccaatgaagacatgcagatgcagtgtgagctgttcagcagccccccagctgtgtctggaaatgagaccagcaccaccaccacccagcaggtggccaccccaggcaccaccatgttccagaccagcagcagtggagatggagaggagaccggcacccaggccaagcagatccagaacagcgtcttccagaccatggtgcagatgcagcacagcggggacaaccagccccaggtgaacctcttcagcagcaccaagtccatgatgtctgtgcagaacagcggcacccagcagcagggcaatggcctcttccagcagggcaatgagatgatgagcctgcagagcggcaacttcctgcagcagagcagccacagccaggcccagctgttccacccccagaaccccatcgcagatgcccagaacctgagccaggagacccagggcagcctcttccacagccccaaccccatcgtgcacagccagaccagcaccaccagcagcgagcagatgcagccccccatgttccacagccagagcaccatcgctgtgctgcagggcagctctgtgccccaggaccagcagagcaccaacatcttcctgagccagagccccatgaacaacctgcagaccaacacagtggcccaggaggccttctttgctgcccccaacagcatcagccccctgcagagcaccagcaacagcgagcagcaggccgccttccagcagcaggcccccatcagccacatccagacccccatgctgagccaggagcaggcccagcccccccagcagggcctcttccagccccaggtggccctgggcagcctgccccccaaccccatgccccagagccagcagggcaccatgttccagagccagcacagcatcgtggccatgcagagcaacagccccagccaggagcagcagcagcagcagcagcagcagcagcagcagcagcagcagcagcagcagagcatcctcttcagcaaccagaacaccatggccaccatggccagccccaagcagcccccacccaacatgatcttcaaccccaaccagaaccccatggccaaccaggagcagcagaaccagagcatcttccaccagcagagcaacatggcccccatgaaccaggagcagcagcccatgcagttccagagccagagcacagtgagcagcctgcagaaccctggccccacccagagcgagagcagccagacccccctcttccacagcagcccccagatccagctggtgcagggcagccccagcagccaggagcagcaggtgaccctcttcctgagccctgcctccatgtctgccctgcagaccagcatcaaccagcaggacatgcagcagagccccctgtacagcccccagaacaacatgcctggcatccagggcgccaccagcagcccccagccccaggccaccctcttccacaacacagctgggggcaccatgaaccagctgcagaacagccctggcagcagccagcagaccagcggcatgttcctgtttggcatccagaacaactgcagccagctgctgaccagcggccctgccaccctgcctgaccagctgatggccatcagccagcccggccagccccagaatgaaggccagccccctgtgaccaccctgctgagccagcagatgcctgagaacagccccctggccagcagcatcaacaccaaccagaacatcgagaagattgacctgctggtgtccctgcagaaccagggcaacaacctgaccggcagcttctag

SEQ ID NO: 20861 - DNA, 4368 bp, synthetic construct; identical to SEQ ID NO: 20857
  misc_feature 1..4368: note = Description of Artificial Sequence: Synthetic coding sequence
  source 1..4368: mol_type = other DNA

SEQ ID NO: 20862 - DNA, 4647 bp, synthetic construct; identical to SEQ ID NO: 20858
  misc_feature 1..4647: note = Description of Artificial Sequence: Synthetic coding sequence
  source 1..4647: mol_type = other DNA

SEQ ID NO: 20863 - DNA, 4650 bp, synthetic construct
  misc_feature 1..4650: note = Description of Artificial Sequence: Synthetic coding sequence
  source 1..4650: mol_type = other DNA
atgcccagcgacttcatcagcctgctgtctgctgacctggacctggagagccccaagagcctgtacagccgggacagcctgaagctgcaccccagccagaacttccaccgggccggcctgctggaggagagcgtgtatgacctgctgcccaaggagctgcagctgccccccagccgggagacctctgtggcctccatgagccagaccagcggcggggaggccggcagccccccacctgctgtggtggccgcagatgccagcagcgcccccagcagcagctccatgggcggggcctgcagcagcttcaccaccagcagcagccccaccatctacagcacctctgtgacagacagcaaggccatgcaggtggagagctgcagcagcgctgtgggcgtgagcaacagaggagtgtctgagaagcagctgaccagcaacacagtgcagcagcaccccagcacccccaagaggcacacagtgctgtacatcagccccccacctgaggacctgctggacaacagcaggatgagctgccaggatgagggctgcggcctggagagcgagcagagctgcagcatgtggatggaggacagccccagcaacttcagcaacatgagcaccagcagctacaatgacaacacagaggtgcccaggaagagcaggaagaggaaccccaagcagaggcctggggtgaagaggcgggactgtgaggagagcaacatggacatctttgatgctgacagcgccaaggccccccactacgtgctgagccagctgaccacagacaacaagggcaacagcaaggctggaaatggcaccctggagaaccagaagggcactggagtgaagaagagccccatgctgtgtggccagtaccctgtgaagtctgagggcaaggagctgaagatcgtggtgcagcctgagacccagcaccgggcccgctacctgacagagggcagccggggctctgtgaaggacaggacccagcagggcttccccaccgtgaagctggagggccacaatgaacctgtggtgctgcaggtgtttgtgggcaatgattctggccgggtgaagccccacggcttctaccaggcctgccgggtgacaggcaggaacaccaccccctgcaaggaggtggacatcgagggcaccaccgtcatcgaggtgggcctggaccccagcaacaacatgaccctggccgtggactgtgtgggcatcctgaagctgagaaatgctgatgtggaggccagaattggaattgctggcagcaagaagaagagcacccgggcccggctggtgttccgggtgaacatcatgaggaaggatggcagcaccctgaccctgcagacccccagcagccccatcctgtgcacccagcctgctggggtgcctgagatcctgaagaagagcctgcacagctgcagcgtgaagggggaggaggaggtgttcctgattggcaagaacttcctgaagggcaccaaggtgatcttccaggagaatgtgtctgatgaaaattcctggaagtctgaggccgagattgacatggagctgttccaccagaaccacctgattgtgaaggtgcccccctaccatgaccagcacatcaccctgcctgtgtctgtgggcatctacgtggtgaccaatgccggccgcagccatgatgtgcagcccttcacctacaccccagaccctgctgctgctggggccctgaatgtgaatgtgaagaaggagatcagcagccctgcccggccctgcagctttgaggaggccatgaaggccatgaagaccaccggctgcaacctggacaaggtgaacatcatccccaatgccctgatgacccccctcatccccagctccatgatcaagtcagaagatgtgacccccatggaggtgacagctgagaagaggagcagcaccatcttcaagaccaccaagtctgtgggcagcacccagcagaccctggagaacatcagcaacattgctggaaatggcagcttcagcagccccagcagcagccacctgcccagtgaaaatgagaagcagcagcagatccagcccaaggcctacaaccctgagaccctgaccaccatccagacccaggacatcagccagcccggcaccttccctgctgtgtctgccagcagccagctgcccaacagtgatgccctgctgcagcaggccacccagttccagacccgggagacccagagccgggagatcctgcagagtgatggcaccgtggtgaacctgagccagctgacagaggccagccagcagcagcagcagagccccctgcaggagcaggcccagaccctgcagcagcagatcagcagcaacatcttccccagccccaacagcgtgtcccagctgcagaacaccatccagcagctgcaggccggcagcttcaccggcagcacagccagcggcagcagcggctctgtggacctggtgcagcaggtgctggaggcccagcagcagctgagctctgtgctcttcagcgccccagatggaaatgaaaatgtgcaggagcagctgtctgctgacatcttccagcaggtgtcccagatccagagcggcgtgtccccaggcatgttcagcagcacagagcccaccgtgcacaccaggccagacaacctgctgcccggccgggcagagagcgtgcacccccagagcgagaacaccctgagcaaccagcagcagcagcagcagcagcagcagcaggtgatggagagcagcgctgccatggtgatggagatgcagcagagcatctgccaggccgccgcccagatccagagcgagctgttccccagcacagccagcgccaatggaaacctgcagcagagccctgtgtaccagcagaccagccacatgatgtctgccctgagcaccaatgaagacatgcagatgcagtgtgagctgttcagcagccccccagctgtgtctggaaatgagaccagcaccaccaccacccagcaggtggccaccccaggcaccaccatgttccagaccagcagcagtggagatggagaggagaccggcacccaggccaagcagatccagaacagcgtcttccagaccatggtgcagatgcagcacagcggggacaaccagccccaggtgaacctcttcagcagcaccaagtccatgatgtctgtgcagaacagcggcacccagcagcagggcaatggcctcttccagcagggcaatgagatgatgagcctgcagagcggcaacttcctgcagcagagcagccacagccaggcccagctgttccacccccagaaccccatcgcagatgcccagaacctgagccaggagacccagggcagcctcttccacagccccaaccccatcgtgcacagccagaccagcaccaccagcagcgagcagatgcagccccccatgttccacagccagagcaccatcgctgtgctgcagggcagctctgtgccccaggaccagcagagcaccaacatcttcctgagccagagccccatgaacaacctgcagaccaacacagtggcccaggaggccttctttgctgcccccaacagcatcagccccctgcagagcaccagcaacagcgagcagcaggccgccttccagcagcaggcccccatcagccacatccagacccccatgctgagccaggagcaggcccagcccccccagcagggcctcttccagccccaggtggccctgggcagcctgccccccaaccccatgccccagagccagcagggcaccatgttccagagccagcacagcatcgtggccatgcagagcaacagccccagccaggagcagcagcagcagcagcagcagcagcagcagcagcagcagcagcagcagcagagcatcctcttcagcaaccagaacaccatggccaccatggccagccccaagcagcccccacccaacatgatcttcaaccccaaccagaaccccatggccaaccaggagcagcagaaccagagcatcttccaccagcagagcaacatggcccccatgaaccaggagcagcagcccatgcagttccagagccagagcacagtgagcagcctgcagaaccctggccccacccagagcgagagcagccagacccccctcttccacagcagcccccagatccagctggtgcagggcagccccagcagccaggagcagcaggtgaccctcttcctgagccctgcctccatgtctgccctgcagaccagcatcaaccagcaggacatgcagcagagccccctgtacagcccccagaacaacatgcctggcatccagggcgccaccagcagcccccagccccaggccaccctcttccacaacacagctgggggcaccatgaaccagctgcagaacagccctggcagcagccagcagaccagcggcatgttcctgtttggcatccagaacaactgcagccagctgctgaccagcggccctgccaccctgcctgaccagctgatggccatcagccagcccggccagccccagaatgaaggccagccccctgtgaccaccctgctgagccagcagatgcctgagaacagccccctggccagcagcatcaacaccaaccagaacatcgagaagattgacctgctggtgtccctgcagaaccagggcaacaacctgaccggcagcttctag

SEQ ID NO: 20864 - DNA, 2151 bp, synthetic construct
  misc_feature 1..2151: note = Description of Artificial Sequence: Synthetic coding sequence
  source 1..2151: mol_type = other DNA
atgcccagcaccagcttccctgtgcccagcaagttccccctgggccctgctgctgctgtgtttggccgcggggagaccctgggccctgcccccagggctgggggcaccatgaagtctgctgaggaggagcactacggctacgccagcagcaatgtgtccccagccctgcccctgcccacagcccacagcaccctgcctgccccctgccacaacctgcagaccagcaccccaggcatcatccccccagctgaccaccccagcggctatggagctgccctggatggcggccctgctggctacttcctgagcagcggccacaccaggccagatggagccccagccctggagagcccccgcatcgagatcaccagctgcctgggcctgtaccacaacaacaaccagttcttccatgatgtggaggtggaggatgtgctgcccagcagcaagaggagccccagcacagccaccctgagcctgcccagcctggaggcctacagagaccccagctgcctgagccctgccagcagcctgagcagccgcagctgcaacagcgaggccagcagctatgagagcaactacagctacccctatgccagcccccagaccagcccctggcagagcccctgtgtgagccccaagaccacagatcctgaggagggcttcccccggggcctgggcgcctgcaccctgctgggcagccccaggcacagccccagcaccagcccccgggcctctgtgacagaggagagctggctgggcgcccggagcagcaggcctgccagcccctgcaacaagaggaagtacagcctgaatggccggcagcccccctacagcccccaccacagccccacccccagcccccacggcagcccccgggtgtctgtgacagatgacagctggctgggcaacaccacccagtacaccagcagcgccatcgtggccgccatcaatgccctgaccacagacagcagcctggacctgggagatggagtgcctgtgaagagcaggaagaccaccctggagcagcccccatctgtggccctgaaggtggagcctgtgggggaggacctgggcagccccccacctcctgctgactttgcccctgaggactacagcagcttccagcacatcagaaaaggaggcttctgtgaccagtacctggccgtgccccagcacccctaccagtgggccaagcccaagcccctgagccccaccagctacatgagccccaccctgcctgccctggactggcagctgcccagccacagcggcccctatgagctgcgcatcgaggtgcagcccaagagccaccaccgggcccactatgaaacagagggcagcagaggagctgtgaaggccagcgctgggggccaccccatcgtgcagctgcacggctacctggagaatgagcccctgatgctgcagctgttcatcggcacagcagatgaccggctgctgcggccccacgccttctaccaggtgcaccgcatcaccgggaagacagtgtccaccaccagccatgaggccatcctgagcaacaccaaggtgctggagatccccctgctgcctgagaacagcatgagagctgtgattgactgtgccggcatcctgaagctgaggaacagcgacatcgagctgaggaagggggagacagacattggaaggaagaacaccagggtgcggctggtgttccgggtgcacgtgccccagcccagcggccgcaccctgagcctgcaggtggccagcaaccccatcgagtgcagccagaggtctgcccaggagctgcccctggtggagaagcagagcacagacagctaccctgtggtgggcggcaagaagatggtgctgagcggccacaacttcctgcaggacagcaaggtgatctttgtggagaaggccccagatggccaccacgtgtgggagatggaggccaagacagaccgggacctgtgcaagcccaacagcctggtggtggagatcccccccttcaggaaccagaggatcaccagccctgtgcacgtgtccttctacgtgtgcaatggcaagaggaagaggagccagtaccagcgcttcacctacctgcctgccaatggaaatgccatcttcctgactgtgtcccgggagcacgagcgggtgggctgcttcttctag

SEQ ID NO: 20865 - DNA, 2478 bp, synthetic construct
  misc_feature 1..2478: note = Description of Artificial Sequence: Synthetic coding sequence
  source 1..2478: mol_type = other DNA
atgcccagcaccagcttccctgtgcccagcaagttccccctgggccctgctgctgctgtgtttggccgcggggagaccctgggccctgcccccagggctgggggcaccatgaagtctgctgaggaggagcactacggctacgccagcagcaatgtgtccccagccctgcccctgcccacagcccacagcaccctgcctgccccctgccacaacctgcagaccagcaccccaggcatcatccccccagctgaccaccccagcggctatggagctgccctggatggcggccctgctggctacttcctgagcagcggccacaccaggccagatggagccccagccctggagagcccccgcatcgagatcaccagctgcctgggcctgtaccacaacaacaaccagttcttccatgatgtggaggtggaggatgtgctgcccagcagcaagaggagccccagcacagccaccctgagcctgcccagcctggaggcctacagagaccccagctgcctgagccctgccagcagcctgagcagccgcagctgcaacagcgaggccagcagctatgagagcaactacagctacccctatgccagcccccagaccagcccctggcagagcccctgtgtgagccccaagaccacagatcctgaggagggcttcccccggggcctgggcgcctgcaccctgctgggcagccccaggcacagccccagcaccagcccccgggcctctgtgacagaggagagctggctgggcgcccggagcagcaggcctgccagcccctgcaacaagaggaagtacagcctgaatggccggcagcccccctacagcccccaccacagccccacccccagcccccacggcagcccccgggtgtctgtgacagatgacagctggctgggcaacaccacccagtacaccagcagcgccatcgtggccgccatcaatgccctgaccacagacagcagcctggacctgggagatggagtgcctgtgaagagcaggaagaccaccctggagcagcccccatctgtggccctgaaggtggagcctgtgggggaggacctgggcagccccccacctcctgctgactttgcccctgaggactacagcagcttccagcacatcagaaaaggaggcttctgtgaccagtacctggccgtgccccagcacccctaccagtgggccaagcccaagcccctgagccccaccagctacatgagccccaccctgcctgccctggactggcagctgcccagccacagcggcccctatgagctgcgcatcgaggtgcagcccaagagccaccaccgggcccactatgaaacagagggcagcagaggagctgtgaaggccagcgctgggggccaccccatcgtgcagctgcacggctacctggagaatgagcccctgatgctgcagctgttcatcggcacagcagatgaccggctgctgcggccccacgccttctaccaggtgcaccgcatcaccgggaagacagtgtccaccaccagccatgaggccatcctgagcaacaccaaggtgctggagatccccctgctgcctgagaacagcatgagagctgtgattgactgtgccggcatcctgaagctgaggaacagcgacatcgagctgaggaagggggagacagacattggaaggaagaacaccagggtgcggctggtgttccgggtgcacgtgccccagcccagcggccgcaccctgagcctgcaggtggccagcaaccccatcgagtgcagccagaggtctgcccaggagctgcccctggtggagaagcagagcacagacagctaccctgtggtgggcggcaagaagatggtgctgagcggccacaacttcctgcaggacagcaaggtgatctttgtggagaaggccccagatggccaccacgtgtgggagatggaggccaagacagaccgggacctgtgcaagcccaacagcctggtggtggagatcccccccttcaggaaccagaggatcaccagccctgtgcacgtgtccttctacgtgtgcaatggcaagaggaagaggagccagtaccagcgcttcacctacctgcctgccaacgtgcccatcatcaagacagagcccacagatgattatgagcccgcccccacctgtggccctgtgtcccagggcctgagccccctgccccggccctactacagccagcagctggccatgcccccagaccccagcagctgcctggtggccggcttccccccctgcccccagaggagcaccctgatgcctgctgcccctggggtgagccccaagctgcatgacctgagccctgctgcctacaccaagggcgtggccagccctggccactgccacctgggcctgccccagcctgctggggaggccccagctgtgcaggatgtgcccaggcctgtggccacccaccctggcagccctggccagcccccaccagccctgctgccccagcagtag

SEQ ID NO: 20866 - DNA, 2832 bp, synthetic construct
  misc_feature 1..2832: note = Description of Artificial Sequence: Synthetic coding sequence
  source 1..2832: mol_type = other DNA
atgcccagcaccagcttccctgtgcccagcaagttccccctgggccctgctgctgctgtgtttggccgcggggagaccctgggccctgcccccagggctgggggcaccatgaagtctgctgaggaggagcactacggctacgccagcagcaatgtgtccccagccctgcccctgcccacagcccacagcaccctgcctgccccctgccacaacctgcagaccagcaccccaggcatcatccccccagctgaccaccccagcggctatggagctgccctggatggcggccctgctggctacttcctgagcagcggccacaccaggccagatggagccccagccctggagagcccccgcatcgagatcaccagctgcctgggcctgtaccacaacaacaaccagttcttccatgatgtggaggtggaggatgtgctgcccagcagcaagaggagccccagcacagccaccctgagcctgcccagcctggaggcctacagagaccccagctgcctgagccctgccagcagcctgagcagccgcagctgcaacagcgaggccagcagctatgagagcaactacagctacccctatgccagcccccagaccagcccctggcagagcccctgtgtgagccccaagaccacagatcctgaggagggcttcccccggggcctgggcgcctgcaccctgctgggcagccccaggcacagccccagcaccagcccccgggcctctgtgacagaggagagctggctgggcgcccggagcagcaggcctgccagcccctgcaacaagaggaagtacagcctgaatggccggcagcccccctacagcccccaccacagccccacccccagcccccacggcagcccccgggtgtctgtgacagatgacagctggctgggcaacaccacccagtacaccagcagcgccatcgtggccgccatcaatgccctgaccacagacagcagcctggacctgggagatggagtgcctgtgaagagcaggaagaccaccctggagcagcccccatctgtggccctgaaggtggagcctgtgggggaggacctgggcagccccccacctcctgctgactttgcccctgaggactacagcagcttccagcacatcagaaaaggaggcttctgtgaccagtacctggccgtgccccagcacccctaccagtgggccaagcccaagcccctgagccccaccagctacatgagccccaccctgcctgccctggactggcagctgcccagccacagcggcccctatgagctgcgcatcgaggtgcagcccaagagccaccaccgggcccactatgaaacagagggcagcagaggagctgtgaaggccagcgctgggggccaccccatcgtgcagctgcacggctacctggagaatgagcccctgatgctgcagctgttcatcggcacagcagatgaccggctgctgcggccccacgccttctaccaggtgcaccgcatcaccgggaagacagtgtccaccaccagccatgaggccatcctgagcaacaccaaggtgctggagatccccctgctgcctgagaacagcatgagagctgtgattgactgtgccggcatcctgaagctgaggaacagcgacatcgagctgaggaagggggagacagacattggaaggaagaacaccagggtgcggctggtgttccgggtgcacgtgccccagcccagcggccgcaccctgagcctgcaggtggccagcaaccccatcgagtgcagccagaggtctgcccaggagctgcccctggtggagaagcagagcacagacagctaccctgtggtgggcggcaagaagatggtgctgagcggccacaacttcctgcaggacagcaaggtgatctttgtggagaaggccccagatggccaccacgtgtgggagatggaggccaagacagaccgggacctgtgcaagcccaacagcctggtggtggagatcccccccttcaggaaccagaggatcaccagccctgtgcacgtgtccttctacgtgtgcaatggcaagaggaagaggagccagtaccagcgcttcacctacctgcctgccaacgtgcccatcatcaagacagagcccacagatgattatgagcccgcccccacctgtggccctgtgtcccagggcctgagccccctgccccggccctactacagccagcagctggccatgcccccagaccccagcagctgcctggtggccggcttccccccctgcccccagaggagcaccctgatgcctgctgcccctggggtgagccccaagctgcatgacctgagccctgctgcctacaccaagggcgtggccagccctggccactgccacctgggcctgccccagcctgctggggaggccccagctgtgcaggatgtgcccaggcctgtggccacccaccctggcagccctggccagcccccaccagccctgctgccccagcaggtgtctgccccacccagcagcagctgccccccaggcctggagcacagcctgtgccccagcagccccagcccccccctgcccccagccacccaggagcccacctgcctgcagccctgcagccctgcctgccccccagccaccggccggccccagcacctgcccagcacagtgagaagagatgagagccccacagctggcccccggctgctgcctgaggtgcatgaagatggcagccccaacctggcccccatccctgtgacagtgaagcgggagcctgaggagctggaccagctgtacctggatgatgtgaatgagatcatcagaaatgacctgagcagcaccagcacccacagctag

SEQ ID NO: 20867 - DNA, 2793 bp, synthetic construct
  misc_feature 1..2793: note = Description of Artificial Sequence: Synthetic coding sequence
  source 1..2793: mol_type = other DNA
atgacaggcctggaggaccaggagtttgattttgagttcctgtttgagttcaaccagagagatgaaggagctgctgctgctgcccctgagcactacggctacgccagcagcaatgtgtccccagccctgcccctgcccacagcccacagcaccctgcctgccccctgccacaacctgcagaccagcaccccaggcatcatccccccagctgaccaccccagcggctacggggccgccctggatggcggccctgctggctacttcctgagcagcggccacaccaggccagatggagccccagccctggagagccccagaattgagatcaccagctgcctgggcctgtaccacaacaacaaccagttcttccatgatgtggaggtggaggatgtgctgcccagcagcaagaggagccccagcacagccaccctgagcctgcccagcctggaggcctacagagaccccagctgcctgagccctgccagcagcctgagcagccgcagctgcaacagcgaggccagcagctatgagagcaactacagctacccctatgccagcccccagaccagcccctggcagagcccctgtgtgagccccaagaccacagatcctgaggagggcttcccccggggcctgggcgcctgcaccctgctgggcagccccaggcacagccccagcaccagcccccgggcctctgtgacagaggagagctggctgggcgcccggagcagcaggcctgccagcccctgcaacaagaggaagtacagcctgaatggccggcagcccccctacagcccccaccacagccccacccccagcccccacggcagcccccgggtgtctgtgacagatgacagctggctgggcaacaccacccagtacaccagcagcgccatcgtggccgccatcaatgccctgaccacagacagcagcctggacctgggagatggagtgcctgtgaagagcaggaagaccaccctggagcagccccccagcgtggccctgaaggtggagcctgtgggggaggacctgggcagccccccacctcctgctgactttgcccctgaggactacagcagcttccagcacatcaggaagggcggcttctgtgaccagtacctggccgtgccccagcacccctaccagtgggccaagcccaagcccctgagccccaccagctacatgagccccaccctgcctgccctggactggcagctgcccagccacagcggcccctatgagctgagaattgaggtgcagcccaagagccaccaccgggcccactatgaaacagagggcagcagaggagctgtgaaggccagcgctgggggccaccccatcgtgcagctgcacggctacctggagaatgagcccctgatgctgcagctgttcatcggcacagcagatgaccggctgctgcggccccacgccttctaccaggtgcaccgcatcaccgggaagacagtgtccaccaccagccatgaggccatcctgagcaacaccaaggtgctggagatccccctgctgcctgaaaattccatgagagctgtgattgactgtgccggcatcctgaagctgaggaacagcgacatcgagctgaggaaaggagaaacagacatcggcaggaagaacaccagggtgcggctggtgttccgggtgcacgtgccccagcccagcggccgcaccctgagcctgcaggtggccagcaaccccattgaatgttcccagaggtctgcccaggagctgcccctggtggagaagcagagcacagacagctaccctgtggtgggcggcaagaagatggtgctgagcggccacaacttcctgcaggacagcaaggtgatctttgtggagaaggccccagatggccaccacgtgtgggagatggaggccaagacagaccgggacctgtgcaagcccaacagcctggtggtggagatcccccccttcaggaaccagaggatcaccagccctgtgcacgtgtccttctacgtgtgcaatggcaagaggaagaggagccagtaccagcgcttcacctacctgcctgccaacgtgcccatcatcaagacagagcccacagatgattatgagcccgcccccacctgtggccctgtgtcccagggcctgagccccctgccccggccctactacagccagcagctggccatgcccccagaccccagcagctgcctggtggccggcttccccccctgcccccagaggagcaccctgatgcctgctgcccctggggtgagccccaagctgcatgacctgagccctgctgcctacaccaagggcgtggccagccctggccactgccacctgggcctgccccagcctgctggggaggccccagctgtgcaggatgtgcccaggcctgtggccacccaccctggcagccctggccagcccccaccagccctgctgccccagcaggtgtctgccccacccagcagcagctgccccccaggcctggagcacagcctgtgccccagcagccccagcccccccctgcccccagccacccaggagcccacctgcctgcagccctgcagccctgcctgccccccagccaccggccggccccagcacctgcccagcacagtgagaagagatgagagccccacagctggcccccggctgctgcctgaggtgcatgaagatggcagccccaacctggcccccatccctgtgacagtgaagcgggagcctgaggagctggaccagctgtacctggatgatgtgaatgagatcatcagaaatgacctgagcagcaccagcacccacagctag

SEQ ID NO: 20868 - DNA, 1062 bp, synthetic construct
  misc_feature 1..1062: note = Description of Artificial Sequence: Synthetic coding sequence
  source 1..1062: mol_type = other DNA
atgctgcagctgttcatcggcacagcagatgaccggctgctgcggccccacgccttctaccaggtgcaccgcatcaccgggaagacagtgtccaccaccagccatgaggccatcctgagcaacaccaaggtgctggagatccccctgctgcctgagaacagcatgagagctgtgattgactgtgccggcatcctgaagctgaggaacagcgacatcgagctgaggaagggggagacagacattggaaggaagaacaccagggtgcggctggtgttccgggtgcacgtgccccagcccagcggccgcaccctgagcctgcaggtggccagcaaccccatcgagtgcagccagaggtctgcccaggagctgcccctggtggagaagcagagcacagacagctaccctgtggtgggcggcaagaagatggtgctgagcggccacaacttcctgcaggacagcaaggtgatctttgtggagaaggccccagatggccaccacgtgtgggagatggaggccaagacagaccgggacctgtgcaagcccaacagcctggtggtggagatcccccccttcaggaaccagaggatcaccagccctgtgcacgtgtccttctacgtgtgcaatggcaagaggaagaggagccagtaccagcgcttcacctacctgcctgccaacgtgcccatcatcaagacagagcccacagatgattatgagcccgcccccacctgtggccctgtgtcccagggcctgagccccctgccccggccctactacagccagcagctggccatgcccccagaccccagcagctgcctggtggccggcttccccccctgcccccagaggagcaccctgatgcctgctgcccctggggtgagccccaagctgcatgacctgagccctgctgcctacaccaagggcgtggccagccctggccactgccacctgggcctgccccagcctgctggggaggccccagctgtgcaggatgtgcccaggcctgtggccacccaccctggcagccctggccagcccccaccagccctgctgccccagcagtag

SEQ ID NO: 20869 - DNA, 2724 bp, synthetic construct
  misc_feature 1..2724: note = Description of Artificial Sequence: Synthetic coding sequence
  source 1..2724: mol_type = other DNA
atgaagagcggcaccctggagcactacggctacgccagcagcaatgtgtccccagccctgcccctgcccacagcccacagcaccctgcctgccccctgccacaacctgcagaccagcaccccaggcatcatccccccagctgaccaccccagcggctatggagctgccctggatggcggccctgctggctacttcctgagcagcggccacaccaggccagatggagccccagccctggagagcccccgcatcgagatcaccagctgcctgggcctgtaccacaacaacaaccagttcttccatgatgtggaggtggaggatgtgctgcccagcagcaagaggagccccagcacagccaccctgagcctgcccagcctggaggcctacagagaccccagctgcctgagccctgccagcagcctgagcagccgcagctgcaacagcgaggccagcagctatgagagcaactacagctacccctatgccagcccccagaccagcccctggcagagcccctgtgtgagccccaagaccacagatcctgaggagggcttcccccggggcctgggcgcctgcaccctgctgggcagccccaggcacagccccagcaccagcccccgggcctctgtgacagaggagagctggctgggcgcccggagcagcaggcctgccagcccctgcaacaagaggaagtacagcctgaatggccggcagcccccctacagcccccaccacagccccacccccagcccccacggcagcccccgggtgtctgtgacagatgacagctggctgggcaacaccacccagtacaccagcagcgccatcgtggccgccatcaatgccctgaccacagacagcagcctggacctgggagatggagtgcctgtgaagagcaggaagaccaccctggagcagcccccatctgtggccctgaaggtggagcctgtgggggaggacctgggcagccccccacctcctgctgactttgcccctgaggactacagcagcttccagcacatcagaaaaggaggcttctgtgaccagtacctggccgtgccccagcacccctaccagtgggccaagcccaagcccctgagccccaccagctacatgagccccaccctgcctgccctggactggcagctgcccagccacagcggcccctatgagctgcgcatcgaggtgcagcccaagagccaccaccgggcccactatgaaacagagggcagcagaggagctgtgaaggccagcgctgggggccaccccatcgtgcagctgcacggctacctggagaatgagcccctgatgctgcagctgttcatcggcacagcagatgaccggctgctgcggccccacgccttctaccaggtgcaccgcatcaccgggaagacagtgtccaccaccagccatgaggccatcctgagcaacaccaaggtgctggagatccccctgctgcctgagaacagcatgagagctgtgattgactgtgccggcatcctgaagctgaggaacagcgacatcgagctgaggaagggggagacagacattggaaggaagaacaccagggtgcggctggtgttccgggtgcacgtgccccagcccagcggccgcaccctgagcctgcaggtggccagcaaccccatcgagtgcagccagaggtctgcccaggagctgcccctggtggagaagcagagcacagacagctaccctgtggtgggcggcaagaagatggtgctgagcggccacaacttcctgcaggacagcaaggtgatctttgtggagaaggccccagatggccaccacgtgtgggagatggaggccaagacagaccgggacctgtgcaagcccaacagcctggtggtggagatcccccccttcaggaaccagaggatcaccagccctgtgcacgtgtccttctacgtgtgcaatggcaagaggaagaggagccagtaccagcgcttcacctacctgcctgccaacgtgcccatcatcaagacagagcccacagatgattatgagcccgcccccacctgtggccctgtgtcccagggcctgagccccctgccccggccctactacagccagcagctggccatgcccccagaccccagcagctgcctggtggccggcttccccccctgcccccagaggagcaccctgatgcctgctgcccctggggtgagccccaagctgcatgacctgagccctgctgcctacaccaagggcgtggccagccctggccactgccacctgggcctgccccagcctgctggggaggccccagctgtgcaggatgtgcccaggcctgtggccacccaccctggcagccctggccagcccccaccagccctgctgccccagcaggtgtctgccccacccagcagcagctgccccccaggcctggagcacagcctgtgccccagcagccccagcccccccctgcccccagccacccaggagcccacctgcctgcagccctgcagccctgcctgccccccagccaccggccggccccagcacctgcccagcacagtgagaagagatgagagccccacagctggcccccggctgctgcctgaggtgcatgaagatggcagccccaacctggcccccatccctgtgacagtgaagcgggagcctgaggagctggaccagctgtacctggatgatgtgaatgagatcatcagaaatgacctgagcagcaccagcacccacagctag

SEQ ID NO: 20870 - DNA, 2745 bp, synthetic construct
  misc_feature 1..2745: note = Description of Artificial Sequence: Synthetic coding sequence
  source 1..2745: mol_type = other DNA
atgacaggcctggaggaccaggagtttgattttgagttcctgtttgagttcaaccagagagatgaaggagctgctgctgctgcccctgagcactacggctacgccagcagcaatgtgtccccagccctgcccctgcccacagcccacagcaccctgcctgccccctgccacaacctgcagaccagcaccccaggcatcatccccccagctgaccaccccagcggctacggggccgccctggatggcggccctgctggctacttcctgagcagcggccacaccaggccagatggagccccagccctggagagccccagaattgagatcaccagctgcctgggcctgtaccacaacaacaaccagttcttccatgatgtggaggtggaggatgtgctgcccagcagcaagaggagccccagcacagccaccctgagcctgcccagcctggaggcctacagagaccccagctgcctgagccctgccagcagcctgagcagccgcagctgcaacagcgaggccagcagctatgagagcaactacagctacccctatgccagcccccagaccagcccctggcagagcccctgtgtgagccccaagaccacagatcctgaggagggcttcccccggggcctgggcgcctgcaccctgctgggcagccccaggcacagccccagcaccagcccccgggcctctgtgacagaggagagctggctgggcgcccggagcagcaggcctgccagcccctgcaacaagaggaagtacagcctgaatggccggcagcccccctacagcccccaccacagccccacccccagcccccacggcagcccccgggtgtctgtgacagatgacagctggctgggcaacaccacccagtacaccagcagcgccatcgtggccgccatcaatgccctgaccacagacagcagcctggacctgggagatggagtgcctgtgaagagcaggaagaccaccctggagcagccccccagcgtggccctgaaggtggagcctgtgggggaggacctgggcagccccccacctcctgctgactttgcccctgaggactacagcagcttccagcacatcaggaagggcggcttctgtgaccagtacctggccgtgccccagcacccctaccagtgggccaagcccaagcccctgagccccaccagctacatgagccccaccctgcctgccctggactggcagctgcccagccacagcggcccctatgagctgagaattgaggtgcagcccaagagccaccaccgggcccactatgaaacagagggcagcagaggagctgtgaaggccagcgctgggggccaccccatcgtgcagctgcacggctacctggagaatgagcccctgatgctgcagctgttcatcggcacagcagatgaccggctgctgcggccccacgccttctaccaggtgcaccgcatcaccgggaagacagtgtccaccaccagccatgaggccatcctgagcaacaccaaggtgctggagatccccctgctgcctgaaaattccatgagagctgtgattgactgtgccggcatcctgaagctgaggaacagcgacatcgagctgaggaaaggagaaacagacatcggcaggaagaacaccagggtgcggctggtgttccgggtgcacgtgccccagcccagcggccgcaccctgagcctgcaggtggccagcaaccccattgaatgttcccagaggtctgcccaggagctgcccctggtggagaagcagagcacagacagctaccctgtggtgggcggcaagaagatggtgctgagcggccacaacttcctgcaggacagcaaggtgatctttgtggagaaggccccagatggccaccacgtgtgggagatggaggccaagacagaccgggacctgtgcaagcccaacagcctggtggtggagatcccccccttcaggaaccagaggatcaccagccctgtgcacgtgtccttctacgtgtgcaatggcaagaggaagaggagccagtaccagcgcttcacctacctgcctgccaacgtgcccatcatcaagacagagcccacagatgattatgagcccgcccccacctgtggccctgtgtcccagggcctgagccccctgccccggccctactacagccagcagctggccatgcccccagaccccagcagctgcctggtggccggcttccccccctgcccccagaggagcaccctgatgcctgctgcccctggggtgagccccaagctgcatgacctgagccctgctgcctacaccaagggcgtggccagccctggccactgccacctgggcctgccccagcctgctggggaggccccagctgtgcaggatgtgcccaggcctgtggccacccaccctggcagccctggccagcccccaccagccctgctgccccagcaggtgtctgccccacccagcagcagctgccccccaggcctggagcacagcctgtgccccagcagccccagcccccccctgcccccagccacccaggagcccacctgcctgcagccctgcagccctgcctgccccccagccaccggccggccccagcacctgcccagcacagtgagaagagatgagagccccacagctggcccccggctgctgcctgaggtgcatgaagatggcagccccaacctggcccccatccctgtgacagtgaagcgggagcctgaggagctggaccagctgtacctggatgactag

SEQ ID NO: 20871 - DNA, 2142 bp, synthetic construct
  misc_feature 1..2142: note = Description of Artificial Sequence: Synthetic coding sequence
  source 1..2142: mol_type = other DNA
atgcccagcaccagcttccctgtgcccagcaagttccccctgggccctgctgctgctgtgtttggccgcggggagaccctgggccctgcccccagggctgggggcaccatgaagtctgctgaggaggagcactacggctacgccagcagcaatgtgtccccagccctgcccctgcccacagcccacagcaccctgcctgccccctgccacaacctgcagaccagcaccccaggcatcatccccccagctgaccaccccagcggctatggagctgccctggatggcggccctgctggctacttcctgagcagcggccacaccaggccagatggagccccagccctggagagcccccgcatcgagatcaccagctgcctgggcctgtaccacaacaacaaccagttcttccatgatgtggaggtggaggatgtgctgcccagcagcaagaggagccccagcacagccaccctgagcctgcccagcctggaggcctacagagaccccagctgcctgagccctgccagcagcctgagcagccgcagctgcaacagcgaggccagcagctatgagagcaactacagctacccctatgccagcccccagaccagcccctggcagagcccctgtgtgagccccaagaccacagatcctgaggagggcttcccccggggcctgggcgcctgcaccctgctgggcagccccaggcacagccccagcaccagcccccgggcctctgtgacagaggagagctggctgggcgcccggagcagcaggcctgccagcccctgcaacaagaggaagtacagcctgaatggccggcagcccccctacagcccccaccacagccccacccccagcccccacggcagcccccgggtgtctgtgacagatgacagctggctgggcaacaccacccagtacaccagcagcgccatcgtggccgccatcaatgccctgaccacagacagcagcctggacctgggagatggagtgcctgtgaagagcaggaagaccaccctggagcagcccccatctgtggccctgaaggtggagcctgtgggggaggacctgggcagccccccacctcctgctgactttgcccctgaggactacagcagcttccagcacatcagaaaaggaggcttctgtgaccagtacctggccgtgccccagcacccctaccagtgggccaagcccaagcccctgagccccaccagctacatgagccccaccctgcctgccctggactggcagctgcccagccacagcggcccctatgagctgcgcatcgaggtgcagcccaagagccaccaccgggcccactatgaaacagagggcagcagaggagctgtgaaggccagcgctgggggccaccccatcgtgcagctgcacggctacctggagaatgagcccctgatgctgcagctgttcatcggcacagcagatgaccggctgctgcggccccacgccttctaccaggtgcaccgcatcaccgggaagacagtgtccaccaccagccatgaggccatcctgagcaacaccaaggtgctggagatccccctgctgcctgagaacagcatgagagctgtgattgactgtgccggcatcctgaagctgaggaacagcgacatcgagctgaggaagggggagacagacattggaaggaagaacaccagggtgcggctggtgttccgggtgcacgtgccccagcccagcggccgcaccctgagcctgcaggtggccagcaaccccatcgagtgcagccagaggtctgcccaggagctgcccctggtggagaagcagagcacagacagctaccctgtggtgggcggcaagaagatggtgctgagcggccacaacttcctgcaggacagcaaggtgatctttgtggagaaggccccagatggccaccacgtgtgggagatggaggccaagacagaccgggacctgtgcaagcccaacagcctggtggtggagatcccccccttcaggaaccagaggatcaccagccctgtgcacgtgtccttctacgtgtgcaatggcaagaggaagaggagccagtaccagcgcttcacctacctgcctgccaacgtgaatgagatcatcagaaatgacctgagcagcaccagcacccacagctag

SEQ ID NO: 20872 - DNA, 1416 bp, synthetic construct
  misc_feature 1..1416: note = Description of Artificial Sequence: Synthetic coding sequence
  source 1..1416: mol_type = other DNA
atgctgcagctgttcatcggcacagcagatgaccggctgctgcggccccacgccttctaccaggtgcaccgcatcaccgggaagacagtgtccaccaccagccatgaggccatcctgagcaacaccaaggtgctggagatccccctgctgcctgagaacagcatgagagctgtgattgactgtgccggcatcctgaagctgaggaacagcgacatcgagctgaggaagggggagacagacattggaaggaagaacaccagggtgcggctggtgttccgggtgcacgtgccccagcccagcggccgcaccctgagcctgcaggtggccagcaaccccatcgagtgcagccagaggtctgcccaggagctgcccctggtggagaagcagagcacagacagctaccctgtggtgggcggcaagaagatggtgctgagcggccacaacttcctgcaggacagcaaggtgatctttgtggagaaggccccagatggccaccacgtgtgggagatggaggccaagacagaccgggacctgtgcaagcccaacagcctggtggtggagatcccccccttcaggaaccagaggatcaccagccctgtgcacgtgtccttctacgtgtgcaatggcaagaggaagaggagccagtaccagcgcttcacctacctgcctgccaacgtgcccatcatcaagacagagcccacagatgattatgagcccgcccccacctgtggccctgtgtcccagggcctgagccccctgccccggccctactacagccagcagctggccatgcccccagaccccagcagctgcctggtggccggcttccccccctgcccccagaggagcaccctgatgcctgctgcccctggggtgagccccaagctgcatgacctgagccctgctgcctacaccaagggcgtggccagccctggccactgccacctgggcctgccccagcctgctggggaggccccagctgtgcaggatgtgcccaggcctgtggccacccaccctggcagccctggccagcccccaccagccctgctgccccagcaggtgtctgccccacccagcagcagctgccccccaggcctggagcacagcctgtgccccagcagccccagcccccccctgcccccagccacccaggagcccacctgcctgcagccctgcagccctgcctgccccccagccaccggccggccccagcacctgcccagcacagtgagaagagatgagagccccacagctggcccccggctgctgcctgaggtgcatgaagatggcagccccaacctggcccccatccctgtgacagtgaagcgggagcctgaggagctggaccagctgtacctggatgatgtgaatgagatcatcagaaatgacctgagcagcaccagcacccacagctag

SEQ ID NO: 20873 - DNA, 2766 bp, synthetic construct
  misc_feature 1..2766: note = Description of Artificial Sequence: Synthetic coding sequence
  source 1..2766: mol_type = other DNA
atgaatgcccctgagcggcagccccagccagatggaggagatgcccctggccacgagcccggcggcagcccccaggatgagctggacttcagcatcctgtttgattatgagtacctgaaccccaatgaggaggagcccaatgcccacaaggtggccagcccccccagcggccctgcctacccagatgatgtgctggactatggcctgaagccctacagccccctggccagcctgtctggagagcccccaggccgctttggagagccagacagagtgggcccccagaagttcctgtctgctgccaagccagctggggccagcggcctgagccccagaattgagatcacccccagccatgagctgatccaggccgtgggccccctgaggatgagagatgctggcctgctggtggagcagccccccctggccggcgtggccgccagcccccgcttcaccctgcctgtgcccggctttgagggctaccgggagcccctgtgcctgagccctgccagcagcggcagcagcgccagcttcatcagtgacaccttcagcccctacaccagcccctgtgtgagccccaacaatggaggcccagatgacctgtgcccccagttccagaacatcccagcccactacagccccaggaccagccccatcatgagccccaggaccagcctggccgaggacagctgcctgggccgccacagccctgtgcccaggcctgccagccgcagcagcagccctggggccaagaggaggcacagctgtgccgaggccctggtggccctgcccccaggggccagcccccagaggagccgcagccccagcccccagcccagcagccacgtggccccccaggaccacggcagccctgctggctacccacctgtggccggcagcgctgtgatcatggatgccctgaacagcctggccacagacagcccctgtggcatcccccccaagatgtggaagaccagcccagaccccagccctgtgtctgctgcccccagcaaggccggcctgcccaggcacatctacccagctgtggagttcctgggcccctgtgagcagggcgagaggagaaattctgcccctgagagcatcctgctggtgccccccacctggcccaagcccctggtgcctgccatccccatctgcagcatccctgtgacagccagcctgccccccctggagtggcccctgagcagccagagcggcagctatgagctgcgcatcgaggtgcagcccaagccccaccaccgggcccactatgaaacagagggcagcagaggagctgtgaaggcccccactggaggccaccctgtggtgcagctgcacggctacatggagaacaagcccctgggcctgcagatcttcatcggcacagcagatgagcgcatcctgaagccccacgccttctaccaggtgcaccgcatcaccgggaagacagtgaccaccaccagctatgagaagatcgtgggcaacaccaaggtgctggagatccccctggagcccaagaacaacatgagggccaccatcgactgtgccggcatcctgaagctgagaaatgctgacatcgagctgaggaagggggagacagacattggaaggaagaacaccagggtgcggctggtgttccgggtgcacatccctgagagcagcggcagaattgtgtccctgcagacagccagcaaccccatcgagtgcagccagaggtctgcccacgagctgcccatggtggagcggcaggacacagacagctgcctggtgtatggaggccagcagatgatcctgaccggccagaacttcaccagcgagagcaaggtggtgttcacagagaagaccacagatggccagcagatctgggagatggaggccaccgtggacaaggacaagagccagcccaacatgctgtttgtggagatccctgagtacagaaacaagcacatccgcacccctgtgaaggtgaacttctacgtgatcaacgggaagaggaagaggagccagccccagcacttcacctaccaccctgtgcctgccatcaagacagagcccacagatgaatatgaccccaccctcatctgcagccccacccatggaggcctgggcagccagccctactacccccagcaccccatggtggccgagagccccagctgcctggtggccaccatggccccctgccagcagttcagaacaggcctgagcagcccagatgcccgctaccagcagcagaacccagctgctgtgctgtaccagaggagcaagagcctgagccccagcctgctgggctaccagcagcctgccctgatggccgcccccctgagcctggctgatgcccacaggtctgtgctggtgcacgccggcagccagggccagagcagcgccctgctgcaccccagccccaccaaccagcaggccagccctgtgatccactacagccccaccaaccagcagctgcgctgtggcagccaccaggagttccagcacatcatgtactgtgaaaattttgcccctggcaccacccggcccggccccccacctgtgtcccagggccagaggctgagccctggcagctaccccaccgtcatccagcagcagaatgccaccagccagagagctgccaagaatggacctcctgtgtctgaccagaaggaggtgctgcctgctggggtgaccatcaagcaggagcagaacctggaccagacctacctggatgatgagctgattgacacccacctgtcctggatccagaacatcctgtag

SEQ ID NO: 20874 - DNA, 978 bp, synthetic construct
  misc_feature 1..978: note = Description of Artificial Sequence: Synthetic coding sequence
  source 1..978: mol_type = other DNA
atgagccccaggaccagcctggccgaggacagctgcctgggccgccacagccctgtgcccaggcctgccagccgcagcagcagccctggggccaagagaagacacagctgtgccgaggccctggtggccctgcccccaggggccagcccccagaggagccgcagccccagcccccagcccagcagccacgtggccccccaggaccacggcagccctgctggctacccacctgtggccggcagcgctgtgatcatggatgccctgaacagcctggccacagacagcccctgtggcatcccccccaagatgtggaagaccagcccagaccccagccctgtgtctgctgcccccagcaaggccggcctgcccaggcacatctacccagctgtggagttcctgggcccctgtgagcagggcgagaggaggaacagcgcccctgagagcatcctgctggtgccccccacctggcccaagcccctggtgcctgccatccccatctgcagcatccctgtgacagccagcctgccccccctggagtggcccctgagcagccagagcggcagctatgagctgagaattgaggtgcagcccaagccccaccaccgggcccactatgaaacagagggcagcagaggagctgtgaaggcccccaccggcggccaccctgtggtgcagctgcacggctacatggagaacaagcccctgggcctgcagatcttcatcggcacagcagatgagcgcatcctgaagccccacgccttctaccaggtgcaccgcatcaccgggaagacagtgaccaccaccagctatgagaagatcgtgggcaacaccaaggtgctggagatccccctggagcccagcacagccccccacctgctgagccccttcatgttcatcagccagcccggggtgcacacccgcatcaacgtgtgggccctgagcggcctgagcctgaaggagctggccaccagcctgtag

SEQ ID NO: 20875 - DNA, 2778 bp, synthetic construct
  misc_feature 1..2778: note = Description of Artificial Sequence: Synthetic coding sequence
  source 1..2778: mol_type = other DNA
atgaatgcccctgagcggcagccccagccagatggaggagatgcccctggccacgagcccggcggcagcccccaggatgagctggacttcagcatcctgtttgattatgagtacctgaaccccaatgaggaggagcccaatgcccacaaggtggccagcccccccagcggccctgcctacccagatgatgtgctggactatggcctgaagccctacagccccctggccagcctgtctggagagcccccaggccgctttggagagccagacagagtgggcccccagaagttcctgtctgctgccaagccagctggggccagcggcctgagccccagaattgagatcacccccagccatgagctgatccaggccgtgggccccctgaggatgagagatgctggcctgctggtggagcagccccccctggccggcgtggccgccagcccccgcttcaccctgcctgtgcccggctttgagggctaccgggagcccctgtgcctgagccctgccagcagcggcagcagcgccagcttcatcagtgacaccttcagcccctacaccagcccctgtgtgagccccaacaatggaggcccagatgacctgtgcccccagttccagaacatcccagcccactacagccccaggaccagccccatcatgagccccaggaccagcctggccgaggacagctgcctgggccgccacagccctgtgcccaggcctgccagccgcagcagcagccctggggccaagaggaggcacagctgtgccgaggccctggtggccctgcccccaggggccagcccccagaggagccgcagccccagcccccagcccagcagccacgtggccccccaggaccacggcagccctgctggctacccacctgtggccggcagcgctgtgatcatggatgccctgaacagcctggccacagacagcccctgtggcatcccccccaagatgtggaagaccagcccagaccccagccctgtgtctgctgcccccagcaaggccggcctgcccaggcacatctacccagctgtggagttcctgggcccctgtgagcagggcgagaggagaaattctgcccctgagagcatcctgctggtgccccccacctggcccaagcccctggtgcctgccatccccatctgcagcatccctgtgacagccagcctgccccccctggagtggcccctgagcagccagagcggcagctatgagctgcgcatcgaggtgcagcccaagccccaccaccgggcccactatgaaacagagggcagcagaggagctgtgaaggcccccactggaggccaccctgtggtgcagctgcacggctacatggagaacaagcccctgggcctgcagatcttcatcggcacagcagatgagcgcatcctgaagccccacgccttctaccaggtgcaccgcatcaccgggaagacagtgaccaccaccagctatgagaagatcgtgggcaacaccaaggtgctggagatccccctggagcccaagaacaacatgagggccaccatcgactgtgccggcatcctgaagctgagaaatgctgacatcgagctgaggaagggggagacagacattggaaggaagaacaccagggtgcggctggtgttccgggtgcacatccctgagagcagcggcagaattgtgtccctgcagacagccagcaaccccatcgagtgcagccagaggtctgcccacgagctgcccatggtggagcggcaggacacagacagctgcctggtgtatggaggccagcagatgatcctgaccggccagaacttcaccagcgagagcaaggtggtgttcacagagaagaccacagatggccagcagatctgggagatggaggccaccgtggacaaggacaagagccagcccaacatgctgtttgtggagatccctgagtacagaaacaagcacatccgcacccctgtgaaggtgaacttctacgtgatcaacgggaagaggaagaggagccagccccagcacttcacctaccaccctgtgcctgccatcaagacagagcccacagatgaatatgaccccaccctcatctgcagccccacccatggaggcctgggcagccagccctactacccccagcaccccatggtggccgagagccccagctgcctggtggccaccatggccccctgccagcagttcagaacaggcctgagcagcccagatgcccgctaccagcagcagaacccagctgctgtgctgtaccagaggagcaagagcctgagccccagcctgctgggctaccagcagcctgccctgatggccgcccccctgagcctggctgatgcccacaggtctgtgctggtgcacgccggcagccagggccagagcagcgccctgctgcaccccagccccaccaaccagcaggccagccctgtgatccactacagccccaccaaccagcagctgcgctgtggcagccaccaggagttccagcacatcatgtactgtgaaaattttgcccctggcaccacccggcccggccccccacctgtgtcccagggccagaggctgagccctggcagctaccccaccgtcatccagcagcagaatgccaccagccagagagctgccaagaatggacctcctgtgtctgaccagaaggaggtgctgcctgctggggtgaccatcaagcaggagcagaacctggaccagacctacctggatgatgtgaatgagatcatcaggaaggagttcagcggccccccagccaggaaccagacctag

SEQ ID NO: 20876 - DNA, 2706 bp, synthetic construct
  misc_feature 1..2706: note = Description of Artificial Sequence: Synthetic coding sequence
  source 1..2706: mol_type = other DNA
atgcagcgggaggccgccttccggctgggccactgccaccccctgcgcatcatgggctctgtggaccaggaggagcccaatgcccacaaggtggccagcccccccagcggccctgcctacccagatgatgtgctggactatggcctgaagccctacagccccctggccagcctgtctggagagcccccaggccgctttggagagccagacagagtgggcccccagaagttcctgtctgctgccaagccagctggggccagcggcctgagccccagaattgagatcacccccagccatgagctgatccaggccgtgggccccctgaggatgagagatgctggcctgctggtggagcagccccccctggccggcgtggccgccagcccccgcttcaccctgcctgtgcccggctttgagggctaccgggagcccctgtgcctgagccctgccagcagcggcagcagcgccagcttcatcagtgacaccttcagcccctacaccagcccctgtgtgagccccaacaatggaggcccagatgacctgtgcccccagttccagaacatcccagcccactacagccccaggaccagccccatcatgagccccaggaccagcctggccgaggacagctgcctgggccgccacagccctgtgcccaggcctgccagccgcagcagcagccctggggccaagaggaggcacagctgtgccgaggccctggtggccctgcccccaggggccagcccccagaggagccgcagccccagcccccagcccagcagccacgtggccccccaggaccacggcagccctgctggctacccacctgtggccggcagcgctgtgatcatggatgccctgaacagcctggccacagacagcccctgtggcatcccccccaagatgtggaagaccagcccagaccccagccctgtgtctgctgcccccagcaaggccggcctgcccaggcacatctacccagctgtggagttcctgggcccctgtgagcagggcgagaggagaaattctgcccctgagagcatcctgctggtgccccccacctggcccaagcccctggtgcctgccatccccatctgcagcatccctgtgacagccagcctgccccccctggagtggcccctgagcagccagagcggcagctatgagctgcgcatcgaggtgcagcccaagccccaccaccgggcccactatgaaacagagggcagcagaggagctgtgaaggcccccactggaggccaccctgtggtgcagctgcacggctacatggagaacaagcccctgggcctgcagatcttcatcggcacagcagatgagcgcatcctgaagccccacgccttctaccaggtgcaccgcatcaccgggaagacagtgaccaccaccagctatgagaagatcgtgggcaacaccaaggtgctggagatccccctggagcccaagaacaacatgagggccaccatcgactgtgccggcatcctgaagctgagaaatgctgacatcgagctgaggaagggggagacagacattggaaggaagaacaccagggtgcggctggtgttccgggtgcacatccctgagagcagcggcagaattgtgtccctgcagacagccagcaaccccatcgagtgcagccagaggtctgcccacgagctgcccatggtggagcggcaggacacagacagctgcctggtgtatggaggccagcagatgatcctgaccggccagaacttcaccagcgagagcaaggtggtgttcacagagaagaccacagatggccagcagatctgggagatggaggccaccgtggacaaggacaagagccagcccaacatgctgtttgtggagatccctgagtacagaaacaagcacatccgcacccctgtgaaggtgaacttctacgtgatcaacgggaagaggaagaggagccagccccagcacttcacctaccaccctgtgcctgccatcaagacagagcccacagatgaatatgaccccaccctcatctgcagccccacccatggaggcctgggcagccagccctactacccccagcaccccatggtggccgagagccccagctgcctggtggccaccatggccccctgccagcagttcagaacaggcctgagcagcccagatgcccgctaccagcagcagaacccagctgctgtgctgtaccagaggagcaagagcctgagccccagcctgctgggctaccagcagcctgccctgatggccgcccccctgagcctggctgatgcccacaggtctgtgctggtgcacgccggcagccagggccagagcagcgccctgctgcaccccagccccaccaaccagcaggccagccctgtgatccactacagccccaccaaccagcagctgcgctgtggcagccaccaggagttccagcacatcatgtactgtgaaaattttgcccctggcaccacccggcccggccccccacctgtgtcccagggccagaggctgagccctggcagctaccccaccgtcatccagcagcagaatgccaccagccagagagctgccaagaatggacctcctgtgtctgaccagaaggaggtgctgcctgctggggtgaccatcaagcaggagcagaacctggaccagacctacctggatgatgagctgattgacacccacctgtcctggatccagaacatcctgtag

SEQ ID NO: 20877 - DNA, 3207 bp, synthetic construct
  misc_feature 1..3207: note = Description of Artificial Sequence: Synthetic coding sequence
  source 1..3207: mol_type = other DNA
atgaccacagccaactgtggggcccatgatgagctggacttcaagctggtgtttggagaagatggagccccagcccctcctcctcctggcagcaggcctgctgacctggagccagatgactgtgccagcatctacatcttcaacgtggaccccccacccagcaccctgaccacccccctgtgcctgccccaccacggcctgcccagccacagctctgtgctgagccccagcttccagctgcagagccacaagaactatgagggcacctgtgagatccctgagagcaagtacagccccctgggcggccccaagccctttgaatgtcccagcatccagatcaccagcatcagccccaactgccaccaggagctggatgcccatgaagatgacctgcagatcaatgaccctgagcgggagttcctggagcggcccagccgggaccacctgtacctgcccctggagcccagctaccgggagagcagcctgagccccagccctgccagcagcatcagcagccgctcctggttcagtgatgccagcagctgtgagagcctgagccacatctatgatgatgtggacagcgagctgaatgaagctgctgcccgcttcaccctgggcagccccctgaccagccctgggggcagccctgggggctgccctggagaggagacctggcaccagcagtatggcctgggccacagcctgagcccccggcagagcccctgccacagccccaggagctctgtgacagatgagaactggctgagccccaggcctgccagcggccccagcagccggcccaccagcccctgtgggaagaggaggcacagcagcgctgaggtgtgctacgccggcagcctgagcccccaccacagccctgtgcccagccctggccacagcccccggggctctgtgacagaggacacctggctgaatgcctctgtgcacggcggcagcggcctgggccctgctgtgttccccttccagtactgtgtggagacagacatccccctgaagaccaggaagaccagcgaggaccaggccgccatcctgcccgggaagctggagctgtgcagtgatgaccagggcagcctgagccctgcccgggagaccagcattgatgatggcctgggcagccagtaccccctgaagaaggacagctgtggggaccagttcctgtctgtgcccagccccttcacctggagcaagcccaagccaggccacacccccatcttccgcaccagcagcctgccccccctggactggcccctgcctgcccacttcggccagtgtgagctgaagattgaggtgcagcccaagacccaccaccgggcccactatgaaacagagggcagcagaggagctgtgaaggccagcactggaggccaccctgtggtgaagctgctgggctacaatgagaagcccatcaacctgcagatgttcatcggcacagcagatgaccgctacctgcggccccacgccttctaccaggtgcaccgcatcaccgggaagacagtggccacagccagccaggagatcatcatcgccagcaccaaggtgctggagatccccctgctgcctgagaacaacatgtctgccagcattgactgtgccggcatcctgaagctgaggaacagcgacatcgagctgaggaagggggagacagacattggaaggaagaacaccagggtgcggctggtgttccgggtgcacatcccccagcccagcggcaaggtgctgagcctgcagatcgccagcatccctgtggagtgcagccagaggtctgcccaggagctgccccacatcgagaagtacagcatcaacagctgcagcgtgaatggaggccacgagatggtggtgacaggcagcaacttcctgcctgagagcaagatcatcttcctggagaagggccaggacggccggccccagtgggaggtggagggcaagatcatccgggagaagtgccagggcgcccacatcgtgctggaggtgcccccctaccacaacccagctgtgacagctgctgtgcaggtgcacttctacctgtgcaatggcaagaggaagaagagccagagccagcgcttcacctacacccctgtgctgatgaagcaggagcaccgggaggagattgacctgagctctgtgcccagcctgcctgtgccccacccagcccagacccagaggcccagcagtgacagcggctgcagccatgattctgtgctgagcggccagaggagcctcatctgcagcatcccccagacctacgcctccatggtgaccagcagccacctgccccagctgcagtgcagagatgaatctgtgtccaaggagcagcacatgatccccagccccatcgtgcaccagcccttccaggtgacccccaccccacctgtgggcagcagctaccagcccatgcagaccaacgtggtgtacaacggccccacctgcctgcccatcaatgctgccagcagccaggagtttgattctgtgctcttccagcaggatgccaccctgagcggcctggtgaacctgggctgccagcccctgagcagcatccccttccacagcagcaacagcggcagcacaggccacctgctggcccacaccccccacagcgtgcacaccctgccccacctgcagagcatgggctaccactgcagcaacacaggccagaggagcctgagcagccctgtggccgaccagatcaccggccagcccagcagccagctgcagcccatcacctacggccccagccacagcggcagcgccaccacagccagccctgctgccagccaccccctggccagcagccccctgagcggcccccccagcccccagctgcagcccatgccctaccagagccccagcagcggcacagccagcagccccagccctgccaccaggatgcacagcggccagcacagcacccaggcccagagcacaggccagggcggcctgagcgcccccagcagcctcatctgccacagcctgtgtgaccctgccagcttccccccagatggagccaccgtgtccatcaagccagagccagaagatcgggagcccaactttgccaccatcggcctgcaggacatcaccctggatgatgaccagttcatcagtgacctggagcaccagcccagcggcagcgctgagaagtggcccaaccacagcgtgctgagctgcccagcccccttctggaggatctag

SEQ ID NO: 20878 - DNA, 3228 bp, synthetic construct
  misc_feature 1..3228: note = Description of Artificial Sequence: Synthetic coding sequence
  source 1..3228: mol_type = other DNA
atgaccacagccaactgtggggcccatgatgagctggacttcaagctggtgtttggagaagatggagccccagcccctcctcctcctggcagcaggcctgctgacctggagccagatgactgtgccagcatctacatcttcaacgtggaccccccacccagcaccctgaccacccccctgtgcctgccccaccacggcctgcccagccacagctctgtgctgagccccagcttccagctgcagagccacaagaactatgagggcacctgtgagatccctgagagcaagtacagccccctgggcggccccaagccctttgaatgtcccagcatccagatcaccagcatcagccccaactgccaccaggagctggatgcccatgaagatgacctgcagatcaatgaccctgagcgggagttcctggagcggcccagccgggaccacctgtacctgcccctggagcccagctaccgggagagcagcctgagccccagccctgccagcagcatcagcagccgctcctggttcagtgatgccagcagctgtgagagcctgagccacatctatgatgatgtggacagcgagctgaatgaagctgctgcccgcttcaccctgggcagccccctgaccagccctgggggcagccctgggggctgccctggagaggagacctggcaccagcagtatggcctgggccacagcctgagcccccggcagagcccctgccacagccccaggagctctgtgacagatgagaactggctgagccccaggcctgccagcggccccagcagccggcccaccagcccctgtgggaagaggaggcacagcagcgctgaggtgtgctacgccggcagcctgagcccccaccacagccctgtgcccagccctggccacagcccccggggctctgtgacagaggacacctggctgaatgcctctgtgcacggcggcagcggcctgggccctgctgtgttccccttccagtactgtgtggagacagacatccccctgaagaccaggaagaccagcgaggaccaggccgccatcctgcccgggaagctggagctgtgcagtgatgaccagggcagcctgagccctgcccgggagaccagcattgatgatggcctgggcagccagtaccccctgaagaaggacagctgtggggaccagttcctgtctgtgcccagccccttcacctggagcaagcccaagccaggccacacccccatcttccgcaccagcagcctgccccccctggactggcccctgcctgcccacttcggccagtgtgagctgaagattgaggtgcagcccaagacccaccaccgggcccactatgaaacagagggcagcagaggagctgtgaaggccagcactggaggccaccctgtggtgaagctgctgggctacaatgagaagcccatcaacctgcagatgttcatcggcacagcagatgaccgctacctgcggccccacgccttctaccaggtgcaccgcatcaccgggaagacagtggccacagccagccaggagatcatcatcgccagcaccaaggtgctggagatccccctgctgcctgagaacaacatgtctgccagcattgactgtgccggcatcctgaagctgaggaacagcgacatcgagctgaggaagggggagacagacattggaaggaagaacaccagggtgcggctggtgttccgggtgcacatcccccagcccagcggcaaggtgctgagcctgcagatcgccagcatccctgtggagtgcagccagaggtctgcccaggagctgccccacatcgagaagtacagcatcaacagctgcagcgtgaatggaggccacgagatggtggtgacaggcagcaacttcctgcctgagagcaagatcatcttcctggagaagggccaggacggccggccccagtgggaggtggagggcaagatcatccgggagaagtgccagggcgcccacatcgtgctggaggtgcccccctaccacaacccagctgtgacagctgctgtgcaggtgcacttctacctgtgcaatggcaagaggaagaagagccagagccagcgcttcacctacacccctgtgctgatgaagcaggagcaccgggaggagattgacctgagctctgtgcccagcctgcctgtgccccacccagcccagacccagaggcccagcagtgacagcggctgcagccatgattctgtgctgagcggccagaggagcctcatctgcagcatcccccagacctacgcctccatggtgaccagcagccacctgccccagctgcagtgcagagatgaatctgtgtccaaggagcagcacatgatccccagccccatcgtgcaccagcccttccaggtgacccccaccccacctgtgggcagcagctaccagcccatgcagaccaacgtggtgtacaacggccccacctgcctgcccatcaatgctgccagcagccaggagtttgattctgtgctcttccagcaggatgccaccctgagcggcctggtgaacctgggctgccagcccctgagcagcatccccttccacagcagcaacagcggcagcacaggccacctgctggcccacaccccccacagcgtgcacaccctgccccacctgcagagcatgggctaccactgcagcaacacaggccagaggagcctgagcagccctgtggccgaccagatcaccggccagcccagcagccagctgcagcccatcacctacggccccagccacagcggcagcgccaccacagccagccctgctgccagccaccccctggccagcagccccctgagcggcccccccagcccccagctgcagcccatgccctaccagagccccagcagcggcacagccagcagccccagccctgccaccaggatgcacagcggccagcacagcacccaggcccagagcacaggccagggcggcctgagcgcccccagcagcctcatctgccacagcctgtgtgaccctgccagcttccccccagatggagccaccgtgtccatcaagccagagccagaagatcgggagcccaactttgccaccatcggcctgcaggacatcaccctggatgatgtgaatgagatcatcggccgggacatgagccagatctctgtgtcccagggcgccggcgtgtcccggcaggcccccctgcccagccctgagagcctggacctgggccgcagtgatggcctgtag

SEQ ID NO: 20879 - DNA, 3198 bp, synthetic construct
  misc_feature 1..3198: note = Description of Artificial Sequence: Synthetic coding sequence
  source 1..3198: mol_type = other DNA
atgaccacagccaactgtggggcccatgatgagctggacttcaagctggtgtttggagaagatggagccccagcccctcctcctcctggcagcaggcctgctgacctggagccagatgactgtgccagcatctacatcttcaacgtggaccccccacccagcaccctgaccacccccctgtgcctgccccaccacggcctgcccagccacagctctgtgctgagccccagcttccagctgcagagccacaagaactatgagggcacctgtgagatccctgagagcaagtacagccccctgggcggccccaagccctttgaatgtcccagcatccagatcaccagcatcagccccaactgccaccaggagctggatgcccatgaagatgacctgcagatcaatgaccctgagcgggagttcctggagcggcccagccgggaccacctgtacctgcccctggagcccagctaccgggagagcagcctgagccccagccctgccagcagcatcagcagccgctcctggttcagtgatgccagcagctgtgagagcctgagccacatctatgatgatgtggacagcgagctgaatgaagctgctgcccgcttcaccctgggcagccccctgaccagccctgggggcagccctgggggctgccctggagaggagacctggcaccagcagtatggcctgggccacagcctgagcccccggcagagcccctgccacagccccaggagctctgtgacagatgagaactggctgagccccaggcctgccagcggccccagcagccggcccaccagcccctgtgggaagaggaggcacagcagcgctgaggtgtgctacgccggcagcctgagcccccaccacagccctgtgcccagccctggccacagcccccggggctctgtgacagaggacacctggctgaatgcctctgtgcacggcggcagcggcctgggccctgctgtgttccccttccagtactgtgtggagacagacatccccctgaagaccaggaagaccagcgaggaccaggccgccatcctgcccgggaagctggagctgtgcagtgatgaccagggcagcctgagccctgcccgggagaccagcattgatgatggcctgggcagccagtaccccctgaagaaggacagctgtggggaccagttcctgtctgtgcccagccccttcacctggagcaagcccaagccaggccacacccccatcttccgcaccagcagcctgccccccctggactggcccctgcctgcccacttcggccagtgtgagctgaagattgaggtgcagcccaagacccaccaccgggcccactatgaaacagagggcagcagaggagctgtgaaggccagcactggaggccaccctgtggtgaagctgctgggctacaatgagaagcccatcaacctgcagatgttcatcggcacagcagatgaccgctacctgcggccccacgccttctaccaggtgcaccgcatcaccgggaagacagtggccacagccagccaggagatcatcatcgccagcaccaaggtgctggagatccccctgctgcctgagaacaacatgtctgccagcattgactgtgccggcatcctgaagctgaggaacagcgacatcgagctgaggaagggggagacagacattggaaggaagaacaccagggtgcggctggtgttccgggtgcacatcccccagcccagcggcaaggtgctgagcctgcagatcgccagcatccctgtggagtgcagccagaggtctgcccaggagctgccccacatcgagaagtacagcatcaacagctgcagcgtgaatggaggccacgagatggtggtgacaggcagcaacttcctgcctgagagcaagatcatcttcctggagaagggccaggacggccggccccagtgggaggtggagggcaagatcatccgggagaagtgccagggcgcccacatcgtgctggaggtgcccccctaccacaacccagctgtgacagctgctgtgcaggtgcacttctacctgtgcaatggcaagaggaagaagagccagagccagcgcttcacctacacccctgtgctgatgaagcaggagcaccgggaggagattgacctgagctctgtgcccagcctgcctgtgccccacccagcccagacccagaggcccagcagtgacagcggctgcagccatgattctgtgctgagcggccagaggagcctcatctgcagcatcccccagacctacgcctccatggtgaccagcagccacctgccccagctgcagtgcagagatgaatctgtgtccaaggagcagcacatgatccccagccccatcgtgcaccagcccttccaggtgacccccaccccacctgtgggcagcagctaccagcccatgcagaccaacgtggtgtacaacggccccacctgcctgcccatcaatgctgccagcagccaggagtttgattctgtgctcttccagcaggatgccaccctgagcggcctggtgaacctgggctgccagcccctgagcagcatccccttccacagcagcaacagcggcagcacaggccacctgctggcccacaccccccacagcgtgcacaccctgccccacctgcagagcatgggctaccactgcagcaacacaggccagaggagcctgagcagccctgtggccgaccagatcaccggccagcccagcagccagctgcagcccatcacctacggccccagccacagcggcagcgccaccacagccagccctgctgccagccaccccctggccagcagccccctgagcggcccccccagcccccagctgcagcccatgccctaccagagccccagcagcggcacagccagcagccccagccctgccaccaggatgcacagcggccagcacagcacccaggcccagagcacaggccagggcggcctgagcgcccccagcagcctcatctgccacagcctgtgtgaccctgccagcttccccccagatggagccaccgtgtccatcaagccagagccagaagatcgggagcccaactttgccaccatcggcctgcaggacatcaccctggatgatgacctcttcaccagcaacaactttgacctgctgcagctgcggcccaccttctggcctgtgcctgctggccgctacctgaggaacctggagtag

SEQ ID NO: 20880 - DNA, 1770 bp, synthetic construct
  misc_feature 1..1770: note = Description of Artificial Sequence: Synthetic coding sequence
  source 1..1770: mol_type = other DNA
atgtttattggaacagcagatgaccgctacctgcggccccacgccttctaccaggtgcaccgcatcaccgggaagacagtggccacagccagccaggagatcatcatcgccagcaccaaggtgctggagatccccctgctgcctgagaacaacatgtctgccagcattgactgtgccggcatcctgaagctgaggaacagcgacatcgagctgaggaaaggagaaacagacatcggcaggaagaacaccagggtgcggctggtgttccgggtgcacatcccccagcccagcggcaaggtgctgagcctgcagatcgccagcatccctgtggagtgcagccagaggtctgcccaggagctgccccacatcgagaagtacagcatcaacagctgcagcgtgaatggaggccacgagatggtggtgacaggcagcaacttcctgcctgagagcaagatcatcttcctggagaagggccaggacggccggccccagtgggaggtggagggcaagatcatccgggagaagtgccagggcgcccacatcgtgctggaggtgcccccctaccacaacccagctgtgacagctgctgtgcaggtgcacttctacctgtgcaatggcaagaggaagaagagccagagccagcgcttcacctacacccctgtgctgatgaagcaggagcaccgggaggagattgacctgagctctgtgcccagcctgcctgtgccccacccagcccagacccagaggcccagcagtgacagcggctgcagccatgacagcgtgctgagcggccagaggagcctcatctgcagcatcccccagacctacgcctccatggtgaccagcagccacctgccccagctgcagtgcagagatgagagcgtgtccaaggagcagcacatgatccccagccccatcgtgcaccagcccttccaggtgacccccaccccacctgtgggcagcagctaccagcccatgcagaccaacgtggtgtacaacggccccacctgcctgcccatcaatgctgccagcagccaggagtttgacagcgtgctcttccagcaggatgccaccctgagcggcctggtgaacctgggctgccagcccctgagcagcatccccttccacagcagcaacagcggcagcacaggccacctgctggcccacaccccccacagcgtgcacaccctgccccacctgcagagcatgggctaccactgcagcaacacaggccagaggagcctgagcagccctgtggccgaccagatcaccggccagcccagcagccagctgcagcccatcacctacggccccagccacagcggcagcgccaccacagccagccctgctgccagccaccccctggccagcagccccctgagcggcccccccagcccccagctgcagcccatgccctaccagagccccagcagcggcacagccagcagccccagccctgccaccaggatgcacagcggccagcacagcacccaggcccagagcacaggccagggcggcctgagcgcccccagcagcctcatctgccacagcctgtgtgaccctgccagcttccccccagatggagccaccgtgtccatcaagccagagcctgaggaccgggagcccaactttgccaccatcggcctgcaggacatcaccctggatgatgaccagttcatcagtgacctggagcaccagcccagcggcagcgctgagaagtggcccaaccacagcgtgctgagctgcccagcccccttctggaggatctag

SEQ ID NO: 20881 - DNA, 2709 bp, synthetic construct
  misc_feature 1..2709: note = Description of Artificial Sequence: Synthetic coding sequence
  source 1..2709: mol_type = other DNA
atgggcgccgccagctgtgaagatgaggagctggagttcaagctggtgtttggagaggagaaggaggccccacccctgggcgctgggggcctgggggaggagctggacagtgaagatgccccaccctgctgccgcctggccctgggggagcccccaccctacggggccgcccccatcggcatcccccggcccccaccacccaggcctggcatgcacagccccccacccaggcctgcccccagccctggcacctgggagagccagcctgcccggtctgtgcggctgggcggccctgggggcggggccggcggggccggcggcggccgggtgctggagtgccccagcatccgcatcaccagcatcagccccaccccagagcccccagctgccctggaggacaacccagatgcctggggagatggcagcccccgggactacccacctcctgagggctttggaggctaccgggaggccggcggccagggcggcggggccttcttcagccccagccctggcagcagcagcctgagctcctggagcttcttcagtgatgccagtgatgaagctgccctgtatgctgcctgtgatgaggtggagagcgagctgaatgaagctgccagcagatttggcctgggcagccccctgcccagcccccgggccagcccccggccctggaccccagaggacccctggagcctgtatggccccagccctgggggccggggccctgaggacagctggctgctgctgagcgcccctggccccaccccagccagccccaggcctgccagcccctgtgggaagaggcgctacagcagcagcggcacccccagcagcgccagccctgccctgagccggcggggcagcctgggggaggagggcagcgagcccccacctcctccacccctgcccctggcccgggaccccggcagccctggcccctttgattatgtgggcgcccctcctgctgagagcatcccccagaagaccaggaggaccagcagcgagcaggccgtggccctgcccaggtctgaggagcccgccagctgcaatggcaagctgcccctgggcgctgaggagagcgtggcccctcctgggggcagcaggaaggaggtggccggcatggactacctggccgtgcccagccccctggcctggagcaaggccagaattggaggccacagccccatcttccgcaccagcgccctgccccccctggactggcccctgcccagccagtatgagcagctggagctgagaattgaggtgcagccccgggcccaccaccgggcccactatgaaacagagggcagcagaggagctgtgaaggccgcccctgggggccaccctgtggtgaagctgctgggctacagcgagaagcccctgaccctgcagatgttcatcggcacagcagatgagaggaacctgcggccccacgccttctaccaggtgcaccgcatcaccgggaagatggtggccacagccagctatgaagctgtggtgtctggcaccaaggtgctggagatgaccctgctgcctgagaacaacatggccgccaacatcgactgtgccggcatcctgaagctgaggaacagcgacatcgagctgaggaagggggagacagacattggaaggaagaacaccagggtgcggctggtgttccgggtgcacgtgccccagggcggcggcaaggtggtgtctgtgcaggccgcctctgtgcccatcgagtgcagccagaggtctgcccaggagctgccccaggtggaggcctacagccccagcgcctgcagcgtgcggggcggggaggagctggtgctgaccggcagcaacttcctgcctgacagcaaggtggtgttcatcgagcggggcccagatggcaagctgcagtgggaggaggaggccaccgtgaaccggctgcagagcaatgaggtgaccctgaccctgactgtgcctgagtacagcaacaagagggtgtccaggcctgtgcaggtgtacttctacgtgtccaatggccgcaggaagaggagccccacccagagcttccgcttcctgcctgtgatctgcaaggaggagcccctgcctgacagcagcctgcggggcttccccagcgccagcgccaccccatttggaacagacatggacttcagccccccccggcccccctaccccagctacccccatgaggaccctgcctgtgagaccccctacctgtctgagggcttcggctacggcatgccacccctgtacccccagacaggccccccacccagctaccggcccggcctgaggatgtttcctgagacccggggcaccaccggctgtgcccagcccccagctgtgtccttcctgccccggcccttccccagcgacccctacggcggccggggcagcagcttcagcctgggcctgcccttcagccccccagcccccttccggcccccacccctgcctgccagcccccccctggagggccccttccccagccagagtgatgtgcaccccctgcctgctgagggctacaacaaggtgggccctggctacggccctggagagggcgcccctgagcaggagaagagcagaggaggctacagcagcggcttccgggacagcgtgcccatccagggcatcaccctggaggaggtgtctgagatcatcggccgggacctgagcggcttccctgcccctcctggagaggagcccccagcctag

SEQ ID NO: 20882 - DNA, 2895 bp, synthetic construct
  misc_feature 1..2895: note = Description of Artificial Sequence: Synthetic coding sequence
  source 1..2895: mol_type = other DNA
atgatcaccaccctgcccagcctgctgcctgccagcctggccagcatcagccaccgggtgaccaacctgcccagcaacagcctgagccacaaccctggcctgagcaagccagacttccctggcaacagcagccctggcctgcccagcagcagcagccctggccgggacctgggcgccccagctggctccatgggcgccgccagctgtgaagatgaggagctggagttcaagctggtgtttggagaggagaaggaggccccacccctgggcgccggcggcctgggggaggagctggacagtgaagatgccccaccctgctgccgcctggccctgggggagcccccaccctatggagctgcccccatcggcatccccaggcctcctccaccccggcccggcatgcacagccccccacccaggcctgcccccagccctggcacctgggagagccagcctgcccggtctgtgcggctgggcggccctgggggcggggccggcggggccggcggcggccgggtgctggagtgccccagcatccgcatcaccagcatcagccccaccccagagcccccagctgccctggaggacaacccagatgcctggggagatggcagcccccgggactacccacctcctgagggctttggaggctaccgggaggccggcggccagggcggcggggccttcttcagccccagccctggcagcagcagcctgagctcctggagcttcttcagtgatgccagtgatgaggccgccctgtatgctgcctgtgatgaggtggagagcgagctgaatgaggccgccagccgcttcggcctgggcagccccctgcccagcccccgggccagcccccggccctggaccccagaggacccctggagcctgtatggccccagccctgggggccggggcccagaagattcctggctgctgctgagcgcccctggccccaccccagccagccccaggcctgccagcccctgtgggaagaggcgctacagcagcagcggcacccccagcagcgccagccctgccctgagcagaagaggcagcctgggggaggagggcagcgagcccccacctcctccacccctgcccctggcccgggaccccggcagccctggcccctttgattatgtgggcgcccccccagctgagagcatcccccagaagaccaggaggaccagcagcgagcaggccgtggccctgcccaggtctgaggagcccgccagctgcaatggcaagctgcccctgggcgctgaggagagcgtggcccctcctgggggcagcaggaaggaggtggccggcatggactacctggccgtgcccagccccctggcctggagcaaggcccgcatcggcggccacagccccatcttccgcaccagcgccctgccccccctggactggcccctgcccagccagtatgagcagctggagctgcgcatcgaggtgcagccccgggcccaccaccgggcccactatgaaacagagggcagcagaggagctgtgaaggccgcccctgggggccaccctgtggtgaagctgctgggctacagcgagaagcccctgaccctgcagatgtttattggaacagcagatgaaagaaacctgcggccccacgccttctaccaggtgcaccgcatcaccgggaagatggtggccacagccagctatgaggccgtggtgtctggcaccaaggtgctggagatgaccctgctgcctgagaacaacatggccgccaacatcgactgtgccggcatcctgaagctgaggaacagcgacatcgagctgaggaaaggagaaacagacatcggcaggaagaacaccagggtgcggctggtgttccgggtgcacgtgccccagggcggcggcaaggtggtgtctgtgcaggccgcctctgtgcccattgaatgttcccagaggtctgcccaggagctgccccaggtggaggcctacagccccagcgcctgcagcgtgcggggcggggaggagctggtgctgaccggcagcaacttcctgcctgacagcaaggtggtgttcatcgagcggggcccagatggcaagctgcagtgggaggaggaggccaccgtgaaccggctgcagagcaatgaggtgaccctgaccctgactgtgcctgagtacagcaacaagagggtgtccaggcctgtgcaggtgtacttctacgtgtccaatggaagaaggaagaggagccccacccagagcttccgcttcctgcccgtcatctgcaaggaggagcccctgcctgacagcagcctgcggggcttccccagcgccagcgccacccccttcggcacagacatggacttcagcccccccaggcctccctaccccagctacccccatgaagatcctgcctgtgagaccccctacctgtctgagggcttcggctacggcatgccacccctgtacccccagacaggccccccacccagctacagacctggcctgaggatgtttcctgagacccggggcaccaccggctgtgcccagcccccagctgtgtccttcctgccccggcccttccccagcgacccctatggaggccggggcagcagcttcagcctgggcctgcccttcagccccccagcccccttccggcccccacccctgcctgccagcccccccctggagggccccttccccagccagagtgatgtgcaccccctgcctgctgagggctacaacaaggtgggccctggctacggccctggagagggcgcccctgagcaggagaagagccggggcggctacagcagcggcttccgggacagcgtgcccatccagggcatcaccctggaggagggcggctgcggcaccggcggctgtgaatgtgaatgtgtgcaggagatcgccctgcacgtgtgctag

SEQ ID NO: 20883 - DNA, 2670 bp, synthetic construct
  misc_feature 1..2670: note = Description of Artificial Sequence: Synthetic coding sequence
  source 1..2670: mol_type = other DNA
atgcctgccagcatcagcagcatcttccctggccccaccctgctgctgagctgtggcagcgaggagctggacagtgaagatgccccaccctgctgccgcctggccctgggggagcccccaccctacggggccgcccccatcggcatcccccggcccccaccacccaggcctggcatgcacagccccccacccaggcctgcccccagccctggcacctgggagagccagcctgcccggtctgtgcggctgggcggccctgggggcggggccggcggggccggcggcggccgggtgctggagtgccccagcatccgcatcaccagcatcagccccaccccagagcccccagctgccctggaggacaacccagatgcctggggagatggcagcccccgggactacccacctcctgagggctttggaggctaccgggaggccggcggccagggcggcggggccttcttcagccccagccctggcagcagcagcctgagctcctggagcttcttcagtgatgccagtgatgaagctgccctgtatgctgcctgtgatgaggtggagagcgagctgaatgaagctgccagcagatttggcctgggcagccccctgcccagcccccgggccagcccccggccctggaccccagaggacccctggagcctgtatggccccagccctgggggccggggccctgaggacagctggctgctgctgagcgcccctggccccaccccagccagccccaggcctgccagcccctgtgggaagaggcgctacagcagcagcggcacccccagcagcgccagccctgccctgagccggcggggcagcctgggggaggagggcagcgagcccccacctcctccacccctgcccctggcccgggaccccggcagccctggcccctttgattatgtgggcgcccctcctgctgagagcatcccccagaagaccaggaggaccagcagcgagcaggccgtggccctgcccaggtctgaggagcccgccagctgcaatggcaagctgcccctgggcgctgaggagagcgtggcccctcctgggggcagcaggaaggaggtggccggcatggactacctggccgtgcccagccccctggcctggagcaaggccagaattggaggccacagccccatcttccgcaccagcgccctgccccccctggactggcccctgcccagccagtatgagcagctggagctgagaattgaggtgcagccccgggcccaccaccgggcccactatgaaacagagggcagcagaggagctgtgaaggccgcccctgggggccaccctgtggtgaagctgctgggctacagcgagaagcccctgaccctgcagatgttcatcggcacagcagatgagaggaacctgcggccccacgccttctaccaggtgcaccgcatcaccgggaagatggtggccacagccagctatgaagctgtggtgtctggcaccaaggtgctggagatgaccctgctgcctgagaacaacatggccgccaacatcgactgtgccggcatcctgaagctgaggaacagcgacatcgagctgaggaagggggagacagacattggaaggaagaacaccagggtgcggctggtgttccgggtgcacgtgccccagggcggcggcaaggtggtgtctgtgcaggccgcctctgtgcccatcgagtgcagccagaggtctgcccaggagctgccccaggtggaggcctacagccccagcgcctgcagcgtgcggggcggggaggagctggtgctgaccggcagcaacttcctgcctgacagcaaggtggtgttcatcgagcggggcccagatggcaagctgcagtgggaggaggaggccaccgtgaaccggctgcagagcaatgaggtgaccctgaccctgactgtgcctgagtacagcaacaagagggtgtccaggcctgtgcaggtgtacttctacgtgtccaatggccgcaggaagaggagccccacccagagcttccgcttcctgcctgtgatctgcaaggaggagcccctgcctgacagcagcctgcggggcttccccagcgccagcgccaccccatttggaacagacatggacttcagccccccccggcccccctaccccagctacccccatgaggaccctgcctgtgagaccccctacctgtctgagggcttcggctacggcatgccacccctgtacccccagacaggccccccacccagctaccggcccggcctgaggatgtttcctgagacccggggcaccaccggctgtgcccagcccccagctgtgtccttcctgccccggcccttccccagcgacccctacggcggccggggcagcagcttcagcctgggcctgcccttcagccccccagcccccttccggcccccacccctgcctgccagcccccccctggagggccccttccccagccagagtgatgtgcaccccctgcctgctgagggctacaacaaggtgggccctggctacggccctggagagggcgcccctgagcaggagaagagcagaggaggctacagcagcggcttccgggacagcgtgcccatccagggcatcaccctggaggagggcggctgcggcactggaggctgtgaatgtgaatgtgtgcaggagatcgccctgcacgtgtgctag

SEQ ID NO: 20884 - DNA, 2745 bp, synthetic construct
  misc_feature 1..2745: note = Description of Artificial Sequence: Synthetic coding sequence
  source 1..2745: mol_type = other DNA
atgctgagcggccgggacctgggcgccccagctggctccatgggcgccgccagctgtgaagatgaggagctggagttcaagctggtgtttggagaggagaaggaggccccacccctgggcgccggcggcctgggggaggagctggacagtgaagatgccccaccctgctgccgcctggccctgggggagcccccaccctatggagctgcccccatcggcatccccaggcctcctccaccccggcccggcatgcacagccccccacccaggcctgcccccagccctggcacctgggagagccagcctgcccggtctgtgcggctgggcggccctgggggcggggccggcggggccggcggcggccgggtgctggagtgccccagcatccgcatcaccagcatcagccccaccccagagcccccagctgccctggaggacaacccagatgcctggggagatggcagcccccgggactacccacctcctgagggctttggaggctaccgggaggccggcggccagggcggcggggccttcttcagccccagccctggcagcagcagcctgagctcctggagcttcttcagtgatgccagtgatgaggccgccctgtatgctgcctgtgatgaggtggagagcgagctgaatgaggccgccagccgcttcggcctgggcagccccctgcccagcccccgggccagcccccggccctggaccccagaggacccctggagcctgtatggccccagccctgggggccggggcccagaagattcctggctgctgctgagcgcccctggccccaccccagccagccccaggcctgccagcccctgtgggaagaggcgctacagcagcagcggcacccccagcagcgccagccctgccctgagcagaagaggcagcctgggggaggagggcagcgagcccccacctcctccacccctgcccctggcccgggaccccggcagccctggcccctttgattatgtgggcgcccccccagctgagagcatcccccagaagaccaggaggaccagcagcgagcaggccgtggccctgcccaggtctgaggagcccgccagctgcaatggcaagctgcccctgggcgctgaggagagcgtggcccctcctgggggcagcaggaaggaggtggccggcatggactacctggccgtgcccagccccctggcctggagcaaggcccgcatcggcggccacagccccatcttccgcaccagcgccctgccccccctggactggcccctgcccagccagtatgagcagctggagctgcgcatcgaggtgcagccccgggcccaccaccgggcccactatgaaacagagggcagcagaggagctgtgaaggccgcccctgggggccaccctgtggtgaagctgctgggctacagcgagaagcccctgaccctgcagatgtttattggaacagcagatgaaagaaacctgcggccccacgccttctaccaggtgcaccgcatcaccgggaagatggtggccacagccagctatgaggccgtggtgtctggcaccaaggtgctggagatgaccctgctgcctgagaacaacatggccgccaacatcgactgtgccggcatcctgaagctgaggaacagcgacatcgagctgaggaaaggagaaacagacatcggcaggaagaacaccagggtgcggctggtgttccgggtgcacgtgccccagggcggcggcaaggtggtgtctgtgcaggccgcctctgtgcccattgaatgttcccagaggtctgcccaggagctgccccaggtggaggcctacagccccagcgcctgcagcgtgcggggcggggaggagctggtgctgaccggcagcaacttcctgcctgacagcaaggtggtgttcatcgagcggggcccagatggcaagctgcagtgggaggaggaggccaccgtgaaccggctgcagagcaatgaggtgaccctgaccctgactgtgcctgagtacagcaacaagagggtgtccaggcctgtgcaggtgtacttctacgtgtccaatggaagaaggaagaggagccccacccagagcttccgcttcctgcccgtcatctgcaaggaggagcccctgcctgacagcagcctgcggggcttccccagcgccagcgccacccccttcggcacagacatggacttcagcccccccaggcctccctaccccagctacccccatgaagatcctgcctgtgagaccccctacctgtctgagggcttcggctacggcatgccacccctgtacccccagacaggccccccacccagctacagacctggcctgaggatgtttcctgagacccggggcaccaccggctgtgcccagcccccagctgtgtccttcctgccccggcccttccccagcgacccctatggaggccggggcagcagcttcagcctgggcctgcccttcagccccccagcccccttccggcccccacccctgcctgccagcccccccctggagggccccttccccagccagagtgatgtgcaccccctgcctgctgagggctacaacaaggtgggccctggctacggccctggagagggcgcccctgagcaggagaagagccggggcggctacagcagcggcttccgggacagcgtgcccatccagggcatcaccctggaggagggcggctgcggcaccggcggctgtgaatgtgaatgtgtgcaggagatcgccctgcacgtgtgctag

SEQ ID NO: 20885 - DNA, 2802 bp, synthetic construct
  misc_feature 1..2802: note = Description of Artificial Sequence: Synthetic coding sequence
  source 1..2802: mol_type = other DNA
atggctgatggaggagctgacagcgctgcccagaggctgcctgagggccctggccgggtggcccctggccgggacctgggcgccccagctggctccatgggcgccgccagctgtgaagatgaggagctggagttcaagctggtgtttggagaggagaaggaggccccacccctgggcgctgggggcctgggggaggagctggacagtgaagatgccccaccctgctgccgcctggccctgggggagcccccaccctacggggccgcccccatcggcatcccccggcccccaccacccaggcctggcatgcacagccccccacccaggcctgcccccagccctggcacctgggagagccagcctgcccggtctgtgcggctgggcggccctgggggcggggccggcggggccggcggcggccgggtgctggagtgccccagcatccgcatcaccagcatcagccccaccccagagcccccagctgccctggaggacaacccagatgcctggggagatggcagcccccgggactacccacctcctgagggctttggaggctaccgggaggccggcggccagggcggcggggccttcttcagccccagccctggcagcagcagcctgagctcctggagcttcttcagtgatgccagtgatgaagctgccctgtatgctgcctgtgatgaggtggagagcgagctgaatgaagctgccagcagatttggcctgggcagccccctgcccagcccccgggccagcccccggccctggaccccagaggacccctggagcctgtatggccccagccctgggggccggggccctgaggacagctggctgctgctgagcgcccctggccccaccccagccagccccaggcctgccagcccctgtgggaagaggcgctacagcagcagcggcacccccagcagcgccagccctgccctgagccggcggggcagcctgggggaggagggcagcgagcccccacctcctccacccctgcccctggcccgggaccccggcagccctggcccctttgattatgtgggcgcccctcctgctgagagcatcccccagaagaccaggaggaccagcagcgagcaggccgtggccctgcccaggtctgaggagcccgccagctgcaatggcaagctgcccctgggcgctgaggagagcgtggcccctcctgggggcagcaggaaggaggtggccggcatggactacctggccgtgcccagccccctggcctggagcaaggccagaattggaggccacagccccatcttccgcaccagcgccctgccccccctggactggcccctgcccagccagtatgagcagctggagctgagaattgaggtgcagccccgggcccaccaccgggcccactatgaaacagagggcagcagaggagctgtgaaggccgcccctgggggccaccctgtggtgaagctgctgggctacagcgagaagcccctgaccctgcagatgttcatcggcacagcagatgagaggaacctgcggccccacgccttctaccaggtgcaccgcatcaccgggaagatggtggccacagccagctatgaagctgtggtgtctggcaccaaggtgctggagatgaccctgctgcctgagaacaacatggccgccaacatcgactgtgccggcatcctgaagctgaggaacagcgacatcgagctgaggaagggggagacagacattggaaggaagaacaccagggtgcggctggtgttccgggtgcacgtgccccagggcggcggcaaggtggtgtctgtgcaggccgcctctgtgcccatcgagtgcagccagaggtctgcccaggagctgccccaggtggaggcctacagccccagcgcctgcagcgtgcggggcggggaggagctggtgctgaccggcagcaacttcctgcctgacagcaaggtggtgttcatcgagcggggcccagatggcaagctgcagtgggaggaggaggccaccgtgaaccggctgcagagcaatgaggtgaccctgaccctgactgtgcctgagtacagcaacaagagggtgtccaggcctgtgcaggtgtacttctacgtgtccaatggccgcaggaagaggagccccacccagagcttccgcttcctgcctgtgatctgcaaggaggagcccctgcctgacagcagcctgcggggcttccccagcgccagcgccaccccatttggaacagacatggacttcagccccccccggcccccctaccccagctacccccatgaggaccctgcctgtgagaccccctacctgtctgagggcttcggctacggcatgccacccctgtacccccagacaggccccccacccagctaccggcccggcctgaggatgtttcctgagacccggggcaccaccggctgtgcccagcccccagctgtgtccttcctgccccggcccttccccagcgacccctacggcggccggggcagcagcttcagcctgggcctgcccttcagccccccagcccccttccggcccccacccctgcctgccagcccccccctggagggccccttccccagccagagtgatgtgcaccccctgcctgctgagggctacaacaaggtgggccctggctacggccctggagagggcgcccctgagcaggagaagagcagaggaggctacagcagcggcttccgggacagcgtgcccatccagggcatcaccctggaggagggcggctgcggcactggaggctgtgaatgtgaatgtgtgcaggagatcgccctgcacgtgtgctag

SEQ ID NO: 20886 - DNA, 2481 bp, synthetic construct
  misc_feature 1..2481: note = Description of Artificial Sequence: Synthetic coding sequence
  source 1..2481: mol_type = other DNA
atggctgatggaggagctgacagcgctgcccagaggctgcctgagggccctggccgggtggcccctggccgggacctgggcgccccagctggctccatgggcgccgccagctgtgaagatgaggagctggagttcaagctggtgtttggagaggagaaggaggccccacccctgggcgctgggggcctgggggaggagctggacagtgaagatgccccaccctgctgccgcctggccctgggggagcccccaccctacggggccgcccccatcggcatcccccggcccccaccacccaggcctggcatgcacagccccccacccaggcctgcccccagccctggcacctgggagagccagcctgcccggtctgtgcggctgggcggccctgggggcggggccggcggggccggcggcggccgggtgctggagtgccccagcatccgcatcaccagcatcagccccaccccagagcccccagctgccctggaggacaacccagatgcctggggagatggcagcccccgggactacccacctcctgagggctttggaggctaccgggaggccggcggccagggcggcggggccttcttcagccccagccctggcagcagcagcctgagctcctggagcttcttcagtgatgccagtgatgaagctgccctgtatgctgcctgtgatgaggtggagagcgagctgaatgaagctgccagcagatttggcctgggcagccccctgcccagcccccgggccagcccccggccctggaccccagaggacccctggagcctgtatggccccagccctgggggccggggccctgaggacagctggctgctgctgagcgcccctggccccaccccagccagccccaggcctgccagcccctgtgggaagaggcgctacagcagcagcggcacccccagcagcgccagccctgccctgagccggcggggcagcctgggggaggagggcagcgagcccccacctcctccacccctgcccctggcccgggaccccggcagccctggcccctttgattatgtgggcgcccctcctgctgagagcatcccccagaagaccaggaggaccagcagcgagcaggccgtggccctgcccaggtctgaggagcccgccagctgcaatggcaagctgcccctgggcgctgaggagagcgtggcccctcctgggggcagcaggaaggaggtggccggcatggactacctggccgtgcccagccccctggcctggagcaaggccagaattggaggccacagccccatcttccgcaccagcgccctgccccccctggactggcccctgcccagccagtatgagcagctggagctgagaattgaggtgcagccccgggcccaccaccgggcccactatgaaacagagggcagcagaggagctgtgaaggccgcccctgggggccaccctgtggtgaagctgctgggctacagcgagaagcccctgaccctgcagatgttcatcggcacagcagatgagaggaacctgcggccccacgccttctaccaggtgcaccgcatcaccgggaagatggtggccacagccagctatgaagctgtggtgtctggcaccaaggtgctggagatgaccctgctgcctgagaacaacatggccgccaacatcgactgtgccggcatcctgaagctgaggaacagcgacatcgagctgaggaagggggagacagacattggaaggaagaacaccagggtgcggctggtgttccgggtgcacgtgccccagggcggcggcaaggtggtgtctgtgcaggccgcctctgtgcccatcgagtgcagccagaggtctgcccaggagctgccccaggtggaggcctacagccccagcgcctgcagcgtgcggggcggggaggagctggtgctgaccggcagcaacttcctgcctgacagcaaggtggtgttcatcgagcggggcccagatggcaagctgcagtgggaggaggaggccaccgtgaaccggctgcagagcaatgaggtgaccctgaccctgactgtgcctgagtacagcaacaagagggtgtccaggcctgtgcaggtgtacttctacgtgtccaatggccgcaggaagaggagccccacccagagcttccgcttcctgcctgtgatctgcaaggaggagcccctgcctgacagcagcctgcggggcttccccagcgccagcgccaccccatttggaacagacatggacttcagccccccccggcccccctaccccagctacccccatgaggaccctgcctgtgagaccccctacctgtctgagggcttcggctacggcatgccacccctgtacccccagacaggccccccacccagctaccggcccggcctgaggatgtttcctgagacccggggcaccaccgtgtctgagatcatcggccgggacctgagcggcttccctgcccctcctggagaggagcccccagcctag

SEQ ID NO: 20887 - DNA, 2706 bp, synthetic construct
  misc_feature 1..2706: note = Description of Artificial Sequence: Synthetic coding sequence
  source 1..2706: mol_type = other DNA
atgggcgccgccagctgtgaagatgaggagctggagttcaagctggtgtttggagaggagaaggaggccccacccctgggcgctgggggcctgggggaggagctggacagtgaagatgccccaccctgctgccgcctggccctgggggagcccccaccctacggggccgcccccatcggcatcccccggcccccaccacccaggcctggcatgcacagccccccacccaggcctgcccccagccctggcacctgggagagccagcctgcccggtctgtgcggctgggcggccctgggggcggggccggcggggccggcggcggccgggtgctggagtgccccagcatccgcatcaccagcatcagccccaccccagagcccccagctgccctggaggacaacccagatgcctggggagatggcagcccccgggactacccacctcctgagggctttggaggctaccgggaggccggcggccagggcggcggggccttcttcagccccagccctggcagcagcagcctgagctcctggagcttcttcagtgatgccagtgatgaagctgccctgtatgctgcctgtgatgaggtggagagcgagctgaatgaagctgccagcagatttggcctgggcagccccctgcccagcccccgggccagcccccggccctggaccccagaggacccctggagcctgtatggccccagccctgggggccggggccctgaggacagctggctgctgctgagcgcccctggccccaccccagccagccccaggcctgccagcccctgtgggaagaggcgctacagcagcagcggcacccccagcagcgccagccctgccctgagccggcggggcagcctgggggaggagggcagcgagcccccacctcctccacccctgcccctggcccgggaccccggcagccctggcccctttgattatgtgggcgcccctcctgctgagagcatcccccagaagaccaggaggaccagcagcgagcaggccgtggccctgcccaggtctgaggagcccgccagctgcaatggcaagctgcccctgggcgctgaggagagcgtggcccctcctgggggcagcaggaaggaggtggccggcatggactacctggccgtgcccagccccctggcctggagcaaggccagaattggaggccacagccccatcttccgcaccagcgccctgccccccctggactggcccctgcccagccagtatgagcagctggagctgagaattgaggtgcagccccgggcccaccaccgggcccactatgaaacagagggcagcagaggagctgtgaaggccgcccctgggggccaccctgtggtgaagctgctgggctacagcgagaagcccctgaccctgcagatgttcatcggcacagcagatgagaggaacctgcggccccacgccttctaccaggtgcaccgcatcaccgggaagatggtggccacagccagctatgaagctgtggtgtctggcaccaaggtgctggagatgaccctgctgcctgagaacaacatggccgccaacatcgactgtgccggcatcctgaagctgaggaacagcgacatcgagctgaggaagggggagacagacattggaaggaagaacaccagggtgcggctggtgttccgggtgcacgtgccccagggcggcggcaaggtggtgtctgtgcaggccgcctctgtgcccatcgagtgcagccagaggtctgcccaggagctgccccaggtggaggcctacagccccagcgcctgcagcgtgcggggcggggaggagctggtgctgaccggcagcaacttcctgcctgacagcaaggtggtgttcatcgagcggggcccagatggcaagctgcagtgggaggaggaggccaccgtgaaccggctgcagagcaatgaggtgaccctgaccctgactgtgcctgagtacagcaacaagagggtgtccaggcctgtgcaggtgtacttctacgtgtccaatggccgcaggaagaggagccccacccagagcttccgcttcctgcctgtgatctgcaaggaggagcccctgcctgacagcagcctgcggggcttccccagcgccagcgccaccccatttggaacagacatggacttcagccccccccggcccccctaccccagctacccccatgaggaccctgcctgtgagaccccctacctgtctgagggcttcggctacggcatgccacccctgtacccccagacaggccccccacccagctaccggcccggcctgaggatgtttcctgagacccggggcaccaccggctgtgcccagcccccagctgtgtccttcctgccccggcccttccccagcgacccctacggcggccggggcagcagcttcagcctgggcctgcccttcagccccccagcccccttccggcccccacccctgcctgccagcccccccctggagggccccttccccagccagagtgatgtgcaccccctgcctgctgagggctacaacaaggtgggccctggctacggccctggagagggcgcccctgagcaggagaagagcagaggaggctacagcagcggcttccgggacagcgtgcccatccagggcatcaccctggaggagggcggctgcggcactggaggctgtgaatgtgaatgtgtgcaggagatcgccctgcacgtgtgctag

SEQ ID NO: 20888 - DNA, 2499 bp, synthetic construct
  misc_feature 1..2499: note = Description of Artificial Sequence: Synthetic coding sequence
  source 1..2499: mol_type = other DNA
atgcacagccccccacccaggcctgcccccagccctggcacctgggagagccagcctgcccggtctgtgcggctgggcggccctgggggcggggccggcggggccggcggcggccgggtgctggagtgccccagcatccgcatcaccagcatcagccccaccccagagcccccagctgccctggaggacaacccagatgcctggggagatggcagcccccgggactacccacctcctgagggctttggaggctaccgggaggccggcggccagggcggcggggccttcttcagccccagccctggcagcagcagcctgagctcctggagcttcttcagtgatgccagtgatgaagctgccctgtatgctgcctgtgatgaggtggagagcgagctgaatgaagctgccagcagatttggcctgggcagccccctgcccagcccccgggccagcccccggccctggaccccagaggacccctggagcctgtatggccccagccctgggggccggggccctgaggacagctggctgctgctgagcgcccctggccccaccccagccagccccaggcctgccagcccctgtgggaagaggcgctacagcagcagcggcacccccagcagcgccagccctgccctgagccggcggggcagcctgggggaggagggcagcgagcccccacctcctccacccctgcccctggcccgggaccccggcagccctggcccctttgattatgtgggcgcccctcctgctgagagcatcccccagaagaccaggaggaccagcagcgagcaggccgtggccctgcccaggtctgaggagcccgccagctgcaatggcaagctgcccctgggcgctgaggagagcgtggcccctcctgggggcagcaggaaggaggtggccggcatggactacctggccgtgcccagccccctggcctggagcaaggccagaattggaggccacagccccatcttccgcaccagcgccctgccccccctggactggcccctgcccagccagtatgagcagctggagctgagaattgaggtgcagccccgggcccaccaccgggcccactatgaaacagagggcagcagaggagctgtgaaggccgcccctgggggccaccctgtggtgaagctgctgggctacagcgagaagcccctgaccctgcagatgttcatcggcacagcagatgagaggaacctgcggccccacgccttctaccaggtgcaccgcatcaccgggaagatggtggccacagccagctatgaagctgtggtgtctggcaccaaggtgctggagatgaccctgctgcctgagaacaacatggccgccaacatcgactgtgccggcatcctgaagctgaggaacagcgacatcgagctgaggaagggggagacagacattggaaggaagaacaccagggtgcggctggtgttccgggtgcacgtgccccagggcggcggcaaggtggtgtctgtgcaggccgcctctgtgcccatcgagtgcagccagaggtctgcccaggagctgccccaggtggaggcctacagccccagcgcctgcagcgtgcggggcggggaggagctggtgctgaccggcagcaacttcctgcctgacagcaaggtggtgttcatcgagcggggcccagatggcaagctgcagtgggaggaggaggccaccgtgaaccggctgcagagcaatgaggtgaccctgaccctgactgtgcctgagtacagcaacaagagggtgtccaggcctgtgcaggtgtacttctacgtgtccaatggccgcaggaagaggagccccacccagagcttccgcttcctgcctgtgatctgcaaggaggagcccctgcctgacagcagcctgcggggcttccccagcgccagcgccaccccatttggaacagacatggacttcagccccccccggcccccctaccccagctacccccatgaggaccctgcctgtgagaccccctacctgtctgagggcttcggctacggcatgccacccctgtacccccagacaggccccccacccagctaccggcccggcctgaggatgtttcctgagacccggggcaccaccggctgtgcccagcccccagctgtgtccttcctgccccggcccttccccagcgacccctacggcggccggggcagcagcttcagcctgggcctgcccttcagccccccagcccccttccggcccccacccctgcctgccagcccccccctggagggccccttccccagccagagtgatgtgcaccccctgcctgctgagggctacaacaaggtgggccctggctacggccctggagagggcgcccctgagcaggagaagagcagaggaggctacagcagcggcttccgggacagcgtgcccatccagggcatcaccctggaggaggtgtctgagatcatcggccgggacctgagcggcttccctgcccctcctggagaggagcccccagcctag

SEQ ID NO: 20889 - DNA, 2385 bp, synthetic construct
  misc_feature 1..2385: note = Description of Artificial Sequence: Synthetic coding sequence
  source 1..2385: mol_type = other DNA
atgggcgccgccagctgtgaagatgaggagctggagttcaagctggtgtttggagaggagaaggaggccccacccctgggcgctgggggcctgggggaggagctggacagtgaagatgccccaccctgctgccgcctggccctgggggagcccccaccctacggggccgcccccatcggcatcccccggcccccaccacccaggcctggcatgcacagccccccacccaggcctgcccccagccctggcacctgggagagccagcctgcccggtctgtgcggctgggcggccctgggggcggggccggcggggccggcggcggccgggtgctggagtgccccagcatccgcatcaccagcatcagccccaccccagagcccccagctgccctggaggacaacccagatgcctggggagatggcagcccccgggactacccacctcctgagggctttggaggctaccgggaggccggcggccagggcggcggggccttcttcagccccagccctggcagcagcagcctgagctcctggagcttcttcagtgatgccagtgatgaagctgccctgtatgctgcctgtgatgaggtggagagcgagctgaatgaagctgccagcagatttggcctgggcagccccctgcccagcccccgggccagcccccggccctggaccccagaggacccctggagcctgtatggccccagccctgggggccggggccctgaggacagctggctgctgctgagcgcccctggccccaccccagccagccccaggcctgccagcccctgtgggaagaggcgctacagcagcagcggcacccccagcagcgccagccctgccctgagccggcggggcagcctgggggaggagggcagcgagcccccacctcctccacccctgcccctggcccgggaccccggcagccctggcccctttgattatgtgggcgcccctcctgctgagagcatcccccagaagaccaggaggaccagcagcgagcaggccgtggccctgcccaggtctgaggagcccgccagctgcaatggcaagctgcccctgggcgctgaggagagcgtggcccctcctgggggcagcaggaaggaggtggccggcatggactacctggccgtgcccagccccctggcctggagcaaggccagaattggaggccacagccccatcttccgcaccagcgccctgccccccctggactggcccctgcccagccagtatgagcagctggagctgagaattgaggtgcagccccgggcccaccaccgggcccactatgaaacagagggcagcagaggagctgtgaaggccgcccctgggggccaccctgtggtgaagctgctgggctacagcgagaagcccctgaccctgcagatgttcatcggcacagcagatgagaggaacctgcggccccacgccttctaccaggtgcaccgcatcaccgggaagatggtggccacagccagctatgaagctgtggtgtctggcaccaaggtgctggagatgaccctgctgcctgagaacaacatggccgccaacatcgactgtgccggcatcctgaagctgaggaacagcgacatcgagctgaggaagggggagacagacattggaaggaagaacaccagggtgcggctggtgttccgggtgcacgtgccccagggcggcggcaaggtggtgtctgtgcaggccgcctctgtgcccatcgagtgcagccagaggtctgcccaggagctgccccaggtggaggcctacagccccagcgcctgcagcgtgcggggcggggaggagctggtgctgaccggcagcaacttcctgcctgacagcaaggtggtgttcatcgagcggggcccagatggcaagctgcagtgggaggaggaggccaccgtgaaccggctgcagagcaatgaggtgaccctgaccctgactgtgcctgagtacagcaacaagagggtgtccaggcctgtgcaggtgtacttctacgtgtccaatggccgcaggaagaggagccccacccagagcttccgcttcctgcctgtgatctgcaaggaggagcccctgcctgacagcagcctgcggggcttccccagcgccagcgccaccccatttggaacagacatggacttcagccccccccggcccccctaccccagctacccccatgaggaccctgcctgtgagaccccctacctgtctgagggcttcggctacggcatgccacccctgtacccccagacaggccccccacccagctaccggcccggcctgaggatgtttcctgagacccggggcaccaccgtgtctgagatcatcggccgggacctgagcggcttccctgcccctcctggagaggagcccccagcctag

SEQ ID NO: 20890 - DNA, 2499 bp, synthetic construct; identical to SEQ ID NO: 20888
  misc_feature 1..2499: note = Description of Artificial Sequence: Synthetic coding sequence
  source 1..2499: mol_type = other DNA

SEQ ID NO: 20891 - DNA, 990 bp, synthetic construct
  misc_feature 1..990: note = Description of Artificial Sequence: Synthetic coding sequence
  source 1..990: mol_type = other DNA
atgtttattggaacagcagatgaaagaaacctgcggccccacgccttctaccaggtgcaccgcatcaccgggaagatggtggccacagccagctatgaggccgtggtgtctggcaccaaggtgctggagatgaccctgctgcctgagaacaacatggccgccaacatcgactgtgccggcatcctgaagctgaggaacagcgacatcgagctgaggaaaggagaaacagacatcggcaggaagaacaccagggtgcggctggtgttccgggtgcacgtgccccagggcggcggcaaggtggtgtctgtgcaggccgcctctgtgcccattgaatgttcccagaggtctgcccaggagctgccccaggtggaggcctacagccccagcgcctgcagcgtgcggggcggggaggagctggtgctgaccggcagcaacttcctgcctgacagcaaggtggtgttcatcgagcggggcccagatggcaagctgcagtgggaggaggaggccaccgtgaaccggctgcagagcaatgaggtgaccctgaccctgactgtgcctgagtacagcaacaagagggtgtccaggcctgtgcaggtgtacttctacgtgtccaatggaagaaggaagaggagccccacccagagcttccgcttcctgcccgtcatctgcaaggaggagcccctgcctgacagcagcctgcggggcttccccagcgccagcgccacccccttcggcacagacatggacttcagcccccccaggcctccctaccccagctacccccatgaagatcctgcctgtgagaccccctacctgtctgagggcttcggctacggcatgccacccctgtacccccagacaggccccccacccagctacagacctggcctgaggatgtttcctgagacccggggcaccaccgtgtctgagatcatcggccgggacctgagcggcttccctgcccctcctggagaggagcccccagcctag

SEQ ID NO: 20892 - DNA, 2574 bp, synthetic construct
  misc_feature 1..2574: note = Description of Artificial Sequence: Synthetic coding sequence
  source 1..2574: mol_type = other DNA
atgatcaccaccctgcccagcctgctgcctgccagcctggccagcatcagccaccgggtgaccaacctgcccagcaacagcctgagccacaaccctggcctgagcaagccagacttccctggcaacagcagccctggcctgcccagcagcagcagccctggccgggacctgggcgccccagctggctccatgggcgccgccagctgtgaagatgaggagctggagttcaagctggtgtttggagaggagaaggaggccccacccctgggcgccggcggcctgggggaggagctggacagtgaagatgccccaccctgctgccgcctggccctgggggagcccccaccctatggagctgcccccatcggcatccccaggcctcctccaccccggcccggcatgcacagccccccacccaggcctgcccccagccctggcacctgggagagccagcctgcccggtctgtgcggctgggcggccctgggggcggggccggcggggccggcggcggccgggtgctggagtgccccagcatccgcatcaccagcatcagccccaccccagagcccccagctgccctggaggacaacccagatgcctggggagatggcagcccccgggactacccacctcctgagggctttggaggctaccgggaggccggcggccagggcggcggggccttcttcagccccagccctggcagcagcagcctgagctcctggagcttcttcagtgatgccagtgatgaggccgccctgtatgctgcctgtgatgaggtggagagcgagctgaatgaggccgccagccgcttcggcctgggcagccccctgcccagcccccgggccagcccccggccctggaccccagaggacccctggagcctgtatggccccagccctgggggccggggcccagaagattcctggctgctgctgagcgcccctggccccaccccagccagccccaggcctgccagcccctgtgggaagaggcgctacagcagcagcggcacccccagcagcgccagccctgccctgagcagaagaggcagcctgggggaggagggcagcgagcccccacctcctccacccctgcccctggcccgggaccccggcagccctggcccctttgattatgtgggcgcccccccagctgagagcatcccccagaagaccaggaggaccagcagcgagcaggccgtggccctgcccaggtctgaggagcccgccagctgcaatggcaagctgcccctgggcgctgaggagagcgtggcccctcctgggggcagcaggaaggaggtggccggcatggactacctggccgtgcccagccccctggcctggagcaaggcccgcatcggcggccacagccccatcttccgcaccagcgccctgccccccctggactggcccctgcccagccagtatgagcagctggagctgcgcatcgaggtgcagccccgggcccaccaccgggcccactatgaaacagagggcagcagaggagctgtgaaggccgcccctgggggccaccctgtggtgaagctgctgggctacagcgagaagcccctgaccctgcagatgtttattggaacagcagatgaaagaaacctgcggccccacgccttctaccaggtgcaccgcatcaccgggaagatggtggccacagccagctatgaggccgtggtgtctggcaccaaggtgctggagatgaccctgctgcctgagaacaacatggccgccaacatcgactgtgccggcatcctgaagctgaggaacagcgacatcgagctgaggaaaggagaaacagacatcggcaggaagaacaccagggtgcggctggtgttccgggtgcacgtgccccagggcggcggcaaggtggtgtctgtgcaggccgcctctgtgcccattgaatgttcccagaggtctgcccaggagctgccccaggtggaggcctacagccccagcgcctgcagcgtgcggggcggggaggagctggtgctgaccggcagcaacttcctgcctgacagcaaggtggtgttcatcgagcggggcccagatggcaagctgcagtgggaggaggaggccaccgtgaaccggctgcagagcaatgaggtgaccctgaccctgactgtgcctgagtacagcaacaagagggtgtccaggcctgtgcaggtgtacttctacgtgtccaatggaagaaggaagaggagccccacccagagcttccgcttcctgcccgtcatctgcaaggaggagcccctgcctgacagcagcctgcggggcttccccagcgccagcgccacccccttcggcacagacatggacttcagcccccccaggcctccctaccccagctacccccatgaagatcctgcctgtgagaccccctacctgtctgagggcttcggctacggcatgccacccctgtacccccagacaggccccccacccagctacagacctggcctgaggatgtttcctgagacccggggcaccaccgtgtctgagatcatcggccgggacctgagcggcttccctgcccctcctggagaggagcccccagcctag

SEQ ID NO: 20893 - DNA, 2175 bp, synthetic construct
  misc_feature 1..2175: note = Description of Artificial Sequence: Synthetic coding sequence
  source 1..2175: mol_type = other DNA
atgcacagccccccacccaggcctgcccccagccctggcacctgggagagccagcctgcccggtctgtgcggctgggcggccctgggggcggggccggcggggccggcggcggccgggtgctggagtgccccagcatccgcatcaccagcatcagccccaccccagagcccccagctgccctggaggacaacccagatgcctggggagatggcagcccccgggactacccacctcctgagggctttggaggctaccgggaggccggcggccagggcggcggggccttcttcagccccagccctggcagcagcagcctgagctcctggagcttcttcagtgatgccagtgatgaagctgccctgtatgctgcctgtgatgaggtggagagcgagctgaatgaagctgccagcagatttggcctgggcagccccctgcccagcccccgggccagcccccggccctggaccccagaggacccctggagcctgtatggccccagccctgggggccggggccctgaggacagctggctgctgctgagcgcccctggccccaccccagccagccccaggcctgccagcccctgtgggaagaggcgctacagcagcagcggcacccccagcagcgccagccctgccctgagccggcggggcagcctgggggaggagggcagcgagcccccacctcctccacccctgcccctggcccgggaccccggcagccctggcccctttgattatgtgggcgcccctcctgctgagagcatcccccagaagaccaggaggaccagcagcgagcaggccgtggccctgcccaggtctgaggagcccgccagctgcaatggcaagctgcccctgggcgctgaggagagcgtggcccctcctgggggcagcaggaaggaggtggccggcatggactacctggccgtgcccagccccctggcctggagcaaggccagaattggaggccacagccccatcttccgcaccagcgccctgccccccctggactggcccctgcccagccagtatgagcagctggagctgagaattgaggtgcagccccgggcccaccaccgggcccactatgaaacagagggcagcagaggagctgtgaaggccgcccctgggggccaccctgtggtgaagctgctgggctacagcgagaagcccctgaccctgcagatgttcatcggcacagcagatgagaggaacctgcggccccacgccttctaccaggtgcaccgcatcaccgggaagatggtggccacagccagctatgaagctgtggtgtctggcaccaaggtgctggagatgaccctgctgcctgagaacaacatggccgccaacatcgactgtgccggcatcctgaagctgaggaacagcgacatcgagctgaggaagggggagacagacattggaaggaagaacaccagggtgcggctggtgttccgggtgcacgtgccccagggcggcggcaaggtggtgtctgtgcaggccgcctctgtgcccatcgagtgcagccagaggtctgcccaggagctgccccaggtggaggcctacagccccagcgcctgcagcgtgcggggcggggaggagctggtgctgaccggcagcaacttcctgcctgacagcaaggtggtgttcatcgagcggggcccagatggcaagctgcagtgggaggaggaggccaccgtgaaccggctgcagagcaatgaggtgaccctgaccctgactgtgcctgagtacagcaacaagagggtgtccaggcctgtgcaggtgtacttctacgtgtccaatggccgcaggaagaggagccccacccagagcttccgcttcctgcctgtgatctgcaaggaggagcccctgcctgacagcagcctgcggggcttccccagcgccagcgccaccccatttggaacagacatggacttcagccccccccggcccccctaccccagctacccccatgaggaccctgcctgtgagaccccctacctgtctgagggcttcggctacggcatgccacccctgtacccccagacaggccccccacccagctaccggcccggcctgaggatgtttcctgagacccggggcaccaccgtgtctgagatcatcggccgggacctgagcggcttccctgcccctcctggagaggagcccccagcctag

SEQ ID NO: 20894 - DNA, 432 bp, synthetic construct
  misc_feature 1..432: note = Description of Artificial Sequence: Synthetic coding sequence
  source 1..432: mol_type = other DNA
atgggcgccgccagctgtgaagatgaggagctggagttcaagctggtgtttggagaggagaaggaggccccacccctgggcgctgggggcctgggggaggagctggacagtgaagatgccccaccctgctgccgcctggccctgggggagcccccaccctacggggccgcccccatcggcatcccccggcccccaccacccaggcctggcatgcacagccccccacccaggcctgcccccagccctggcacctgggagagccagcctgcccggtctgtgcggctgggcggccctgggggcggggccggcggggccggcggcggccgggtgctggagtgccccagcatccgcatcaccagcatcagccccaccccagagcccccagctgccctggaggacaacccagatgcctggggagatggcagcccctag

SEQ ID NO: 20895 - DNA, 2424 bp, synthetic construct
  misc_feature 1..2424: note = Description of Artificial Sequence: Synthetic coding sequence
  source 1..2424: mol_type = other DNA
atgctgagcggccgggacctgggcgccccagctggctccatgggcgccgccagctgtgaagatgaggagctggagttcaagctggtgtttggagaggagaaggaggccccacccctgggcgccggcggcctgggggaggagctggacagtgaagatgccccaccctgctgccgcctggccctgggggagcccccaccctatggagctgcccccatcggcatccccaggcctcctccaccccggcccggcatgcacagccccccacccaggcctgcccccagccctggcacctgggagagccagcctgcccggtctgtgcggctgggcggccctgggggcggggccggcggggccggcggcggccgggtgctggagtgccccagcatccgcatcaccagcatcagccccaccccagagcccccagctgccctggaggacaacccagatgcctggggagatggcagcccccgggactacccacctcctgagggctttggaggctaccgggaggccggcggccagggcggcggggccttcttcagccccagccctggcagcagcagcctgagctcctggagcttcttcagtgatgccagtgatgaggccgccctgtatgctgcctgtgatgaggtggagagcgagctgaatgaggccgccagccgcttcggcctgggcagccccctgcccagcccccgggccagcccccggccctggaccccagaggacccctggagcctgtatggccccagccctgggggccggggcccagaagattcctggctgctgctgagcgcccctggccccaccccagccagccccaggcctgccagcccctgtgggaagaggcgctacagcagcagcggcacccccagcagcgccagccctgccctgagcagaagaggcagcctgggggaggagggcagcgagcccccacctcctccacccctgcccctggcccgggaccccggcagccctggcccctttgattatgtgggcgcccccccagctgagagcatcccccagaagaccaggaggaccagcagcgagcaggccgtggccctgcccaggtctgaggagcccgccagctgcaatggcaagctgcccctgggcgctgaggagagcgtggcccctcctgggggcagcaggaaggaggtggccggcatggactacctggccgtgcccagccccctggcctggagcaaggcccgcatcggcggccacagccccatcttccgcaccagcgccctgccccccctggactggcccctgcccagccagtatgagcagctggagctgcgcatcgaggtgcagccccgggcccaccaccgggcccactatgaaacagagggcagcagaggagctgtgaaggccgcccctgggggccaccctgtggtgaagctgctgggctacagcgagaagcccctgaccctgcagatgtttattggaacagcagatgaaagaaacctgcggccccacgccttctaccaggtgcaccgcatcaccgggaagatggtggccacagccagctatgaggccgtggtgtctggcaccaaggtgctggagatgaccctgctgcctgagaacaacatggccgccaacatcgactgtgccggcatcctgaagctgaggaacagcgacatcgagctgaggaaaggagaaacagacatcggcaggaagaacaccagggtgcggctggtgttccgggtgcacgtgccccagggcggcggcaaggtggtgtctgtgcaggccgcctctgtgcccattgaatgttcccagaggtctgcccaggagctgccccaggtggaggcctacagccccagcgcctgcagcgtgcggggcggggaggagctggtgctgaccggcagcaacttcctgcctgacagcaaggtggtgttcatcgagcggggcccagatggcaagctgcagtgggaggaggaggccaccgtgaaccggctgcagagcaatgaggtgaccctgaccctgactgtgcctgagtacagcaacaagagggtgtccaggcctgtgcaggtgtacttctacgtgtccaatggaagaaggaagaggagccccacccagagcttccgcttcctgcccgtcatctgcaaggaggagcccctgcctgacagcagcctgcggggcttccccagcgccagcgccacccccttcggcacagacatggacttcagcccccccaggcctccctaccccagctacccccatgaagatcctgcctgtgagaccccctacctgtctgagggcttcggctacggcatgccacccctgtacccccagacaggccccccacccagctacagacctggcctgaggatgtttcctgagacccggggcaccaccgtgtctgagatcatcggccgggacctgagcggcttccctgcccctcctggagaggagcccccagcctag

SEQ ID NO: 20896 - DNA, 1311 bp, synthetic construct
  misc_feature 1..1311: note = Description of Artificial Sequence: Synthetic coding sequence
  source 1..1311: mol_type = other DNA
atgtttattggaacagcagatgaaagaaacctgcggccccacgccttctaccaggtgcaccgcatcaccgggaagatggtggccacagccagctatgaggccgtggtgtctggcaccaaggtgctggagatgaccctgctgcctgagaacaacatggccgccaacatcgactgtgccggcatcctgaagctgaggaacagcgacatcgagctgaggaaaggagaaacagacatcggcaggaagaacaccagggtgcggctggtgttccgggtgcacgtgccccagggcggcggcaaggtggtgtctgtgcaggccgcctctgtgcccattgaatgttcccagaggtctgcccaggagctgccccaggtggaggcctacagccccagcgcctgcagcgtgcggggcggggaggagctggtgctgaccggcagcaacttcctgcctgacagcaaggtggtgttcatcgagcggggcccagatggcaagctgcagtgggaggaggaggccaccgtgaaccggctgcagagcaatgaggtgaccctgaccctgactgtgcctgagtacagcaacaagagggtgtccaggcctgtgcaggtgtacttctacgtgtccaatggaagaaggaagaggagccccacccagagcttccgcttcctgcccgtcatctgcaaggaggagcccctgcctgacagcagcctgcggggcttccccagcgccagcgccacccccttcggcacagacatggacttcagcccccccaggcctccctaccccagctacccccatgaagatcctgcctgtgagaccccctacctgtctgagggcttcggctacggcatgccacccctgtacccccagacaggccccccacccagctacagacctggcctgaggatgtttcctgagacccggggcaccaccggctgtgcccagcccccagctgtgtccttcctgccccggcccttccccagcgacccctatggaggccggggcagcagcttcagcctgggcctgcccttcagccccccagcccccttccggcccccacccctgcctgccagcccccccctggagggccccttccccagccagagtgatgtgcaccccctgcctgctgagggctacaacaaggtgggccctggctacggccctggagagggcgcccctgagcaggagaagagccggggcggctacagcagcggcttccgggacagcgtgcccatccagggcatcaccctggaggagggcggctgcggcaccggcggctgtgaatgtgaatgtgtgcaggagatcgccctgcacgtgtgctag

SEQ ID NO: 20897 - DNA, 570 bp, synthetic construct
  misc_feature 1..570: note = Description of Artificial Sequence: Synthetic coding sequence
  source 1..570: mol_type = other DNA
atggacttcagccccccccggcccccctaccccagctacccccatgaggaccctgcctgtgagaccccctacctgtctgagggcttcggctacggcatgccacccctgtacccccagacaggccccccacccagctaccggcccggcctgaggatgtttcctgagacccggggcaccaccggctgtgcccagcccccagctgtgtccttcctgccccggcccttccccagcgacccctacggcggccggggcagcagcttcagcctgggcctgcccttcagccccccagcccccttccggcccccacccctgcctgccagcccccccctggagggccccttccccagccagagtgatgtgcaccccctgcctgctgagggctacaacaaggtgggccctggctacggccctggagagggcgcccctgagcaggagaagagcagaggaggctacagcagcggcttccgggacagcgtgcccatccagggcatcaccctggaggagggcggctgcggcactggaggctgtgaatgtgaatgtgtgcaggagatcgccctgcacgtgtgctag

SEQ ID NO: 20898 - DNA, 2673 bp, synthetic construct
  misc_feature 1..2673: note = Description of Artificial Sequence: Synthetic coding sequence
  source 1..2673: mol_type = other DNA
atgcctgccagcatcagcagcatcttccctggccccaccctgctgctgagctgtggcagcgaggagctggacagtgaagatgccccaccctgctgccgcctggccctgggggagcccccaccctacggggccgcccccatcggcatcccccggcccccaccacccaggcctggcatgcacagccccccacccaggcctgcccccagccctggcacctgggagagccagcctgcccggtctgtgcggctgggcggccctgggggcggggccggcggggccggcggcggccgggtgctggagtgccccagcatccgcatcaccagcatcagccccaccccagagcccccagctgccctggaggacaacccagatgcctggggagatggcagcccccgggactacccacctcctgagggctttggaggctaccgggaggccggcggccagggcggcggggccttcttcagccccagccctggcagcagcagcctgagctcctggagcttcttcagtgatgccagtgatgaagctgccctgtatgctgcctgtgatgaggtggagagcgagctgaatgaagctgccagcagatttggcctgggcagccccctgcccagcccccgggccagcccccggccctggaccccagaggacccctggagcctgtatggccccagccctgggggccggggccctgaggacagctggctgctgctgagcgcccctggccccaccccagccagccccaggcctgccagcccctgtgggaagaggcgctacagcagcagcggcacccccagcagcgccagccctgccctgagccggcggggcagcctgggggaggagggcagcgagcccccacctcctccacccctgcccctggcccgggaccccggcagccctggcccctttgattatgtgggcgcccctcctgctgagagcatcccccagaagaccaggaggaccagcagcgagcaggccgtggccctgcccaggtctgaggagcccgccagctgcaatggcaagctgcccctgggcgctgaggagagcgtggcccctcctgggggcagcaggaaggaggtggccggcatggactacctggccgtgcccagccccctggcctggagcaaggccagaattggaggccacagccccatcttccgcaccagcgccctgccccccctggactggcccctgcccagccagtatgagcagctggagctgagaattgaggtgcagccccgggcccaccaccgggcccactatgaaacagagggcagcagaggagctgtgaaggccgcccctgggggccaccctgtggtgaagctgctgggctacagcgagaagcccctgaccctgcagatgttcatcggcacagcagatgagaggaacctgcggccccacgccttctaccaggtgcaccgcatcaccgggaagatggtggccacagccagctatgaagctgtggtgtctggcaccaaggtgctggagatgaccctgctgcctgagaacaacatggccgccaacatcgactgtgccggcatcctgaagctgaggaacagcgacatcgagctgaggaagggggagacagacattggaaggaagaacaccagggtgcggctggtgttccgggtgcacgtgccccagggcggcggcaaggtggtgtctgtgcaggccgcctctgtgcccatcgagtgcagccagaggtctgcccaggagctgccccaggtggaggcctacagccccagcgcctgcagcgtgcggggcggggaggagctggtgctgaccggcagcaacttcctgcctgacagcaaggtggtgttcatcgagcggggcccagatggcaagctgcagtgggaggaggaggccaccgtgaaccggctgcagagcaatgaggtgaccctgaccctgactgtgcctgagtacagcaacaagagggtgtccaggcctgtgcaggtgtacttctacgtgtccaatggccgcaggaagaggagccccacccagagcttccgcttcctgcctgtgatctgcaaggaggagcccctgcctgacagcagcctgcggggcttccccagcgccagcgccaccccatttggaacagacatggacttcagccccccccggcccccctaccccagctacccccatgaggaccctgcctgtgagaccccctacctgtctgagggcttcggctacggcatgccacccctgtacccccagacaggccccccacccagctaccggcccggcctgaggatgtttcctgagacccggggcaccaccggctgtgcccagcccccagctgtgtccttcctgccccggcccttccccagcgacccctacggcggccggggcagcagcttcagcctgggcctgcccttcagccccccagcccccttccggcccccacccctgcctgccagcccccccctggagggccccttccccagccagagtgatgtgcaccccctgcctgctgagggctacaacaaggtgggccctggctacggccctggagagggcgcccctgagcaggagaagagcagaggaggctacagcagcggcttccgggacagcgtgcccatccagggcatcaccctggaggaggtgtctgagatcatcggccgggacctgagcggcttccctgcccctcctggagaggagcccccagcctag

SEQ ID NO: 20899 - DNA, 2748 bp, synthetic construct
  misc_feature 1..2748: note = Description of Artificial Sequence: Synthetic coding sequence
  source 1..2748: mol_type = other DNA
atgctgagcggccgggacctgggcgccccagctggctccatgggcgccgccagctgtgaagatgaggagctggagttcaagctggtgtttggagaggagaaggaggccccacccctgggcgccggcggcctgggggaggagctggacagtgaagatgccccaccctgctgccgcctggccctgggggagcccccaccctatggagctgcccccatcggcatccccaggcctcctccaccccggcccggcatgcacagccccccacccaggcctgcccccagccctggcacctgggagagccagcctgcccggtctgtgcggctgggcggccctgggggcggggccggcggggccggcggcggccgggtgctggagtgccccagcatccgcatcaccagcatcagccccaccccagagcccccagctgccctggaggacaacccagatgcctggggagatggcagcccccgggactacccacctcctgagggctttggaggctaccgggaggccggcggccagggcggcggggccttcttcagccccagccctggcagcagcagcctgagctcctggagcttcttcagtgatgccagtgatgaggccgccctgtatgctgcctgtgatgaggtggagagcgagctgaatgaggccgccagccgcttcggcctgggcagccccctgcccagcccccgggccagcccccggccctggaccccagaggacccctggagcctgtatggccccagccctgggggccggggcccagaagattcctggctgctgctgagcgcccctggccccaccccagccagccccaggcctgccagcccctgtgggaagaggcgctacagcagcagcggcacccccagcagcgccagccctgccctgagcagaagaggcagcctgggggaggagggcagcgagcccccacctcctccacccctgcccctggcccgggaccccggcagccctggcccctttgattatgtgggcgcccccccagctgagagcatcccccagaagaccaggaggaccagcagcgagcaggccgtggccctgcccaggtctgaggagcccgccagctgcaatggcaagctgcccctgggcgctgaggagagcgtggcccctcctgggggcagcaggaaggaggtggccggcatggactacctggccgtgcccagccccctggcctggagcaaggcccgcatcggcggccacagccccatcttccgcaccagcgccctgccccccctggactggcccctgcccagccagtatgagcagctggagctgcgcatcgaggtgcagccccgggcccaccaccgggcccactatgaaacagagggcagcagaggagctgtgaaggccgcccctgggggccaccctgtggtgaagctgctgggctacagcgagaagcccctgaccctgcagatgtttattggaacagcagatgaaagaaacctgcggccccacgccttctaccaggtgcaccgcatcaccgggaagatggtggccacagccagctatgaggccgtggtgtctggcaccaaggtgctggagatgaccctgctgcctgagaacaacatggccgccaacatcgactgtgccggcatcctgaagctgaggaacagcgacatcgagctgaggaaaggagaaacagacatcggcaggaagaacaccagggtgcggctggtgttccgggtgcacgtgccccagggcggcggcaaggtggtgtctgtgcaggccgcctctgtgcccattgaatgttcccagaggtctgcccaggagctgccccaggtggaggcctacagccccagcgcctgcagcgtgcggggcggggaggagctggtgctgaccggcagcaacttcctgcctgacagcaaggtggtgttcatcgagcggggcccagatggcaagctgcagtgggaggaggaggccaccgtgaaccggctgcagagcaatgaggtgaccctgaccctgactgtgcctgagtacagcaacaagagggtgtccaggcctgtgcaggtgtacttctacgtgtccaatggaagaaggaagaggagccccacccagagcttccgcttcctgcccgtcatctgcaaggaggagcccctgcctgacagcagcctgcggggcttccccagcgccagcgccacccccttcggcacagacatggacttcagcccccccaggcctccctaccccagctacccccatgaagatcctgcctgtgagaccccctacctgtctgagggcttcggctacggcatgccacccctgtacccccagacaggccccccacccagctacagacctggcctgaggatgtttcctgagacccggggcaccaccggctgtgcccagcccccagctgtgtccttcctgccccggcccttccccagcgacccctatggaggccggggcagcagcttcagcctgggcctgcccttcagccccccagcccccttccggcccccacccctgcctgccagcccccccctggagggccccttccccagccagagtgatgtgcaccccctgcctgctgagggctacaacaaggtgggccctggctacggccctggagagggcgcccctgagcaggagaagagccggggcggctacagcagcggcttccgggacagcgtgcccatccagggcatcaccctggaggaggtgtctgagatcatcggccgggacctgagcggcttccctgcccctcctggagaggagcccccagcctag

SEQ ID NO: 20900 - DNA, 573 bp, synthetic construct
  misc_feature 1..573: note = Description of Artificial Sequence: Synthetic coding sequence
  source 1..573: mol_type = other DNA
atggacttcagccccccccggcccccctaccccagctacccccatgaggaccctgcctgtgagaccccctacctgtctgagggcttcggctacggcatgccacccctgtacccccagacaggccccccacccagctaccggcccggcctgaggatgtttcctgagacccggggcaccaccggctgtgcccagcccccagctgtgtccttcctgccccggcccttccccagcgacccctacggcggccggggcagcagcttcagcctgggcctgcccttcagccccccagcccccttccggcccccacccctgcctgccagcccccccctggagggccccttccccagccagagtgatgtgcaccccctgcctgctgagggctacaacaaggtgggccctggctacggccctggagagggcgcccctgagcaggagaagagcagaggaggctacagcagcggcttccgggacagcgtgcccatccagggcatcaccctggaggaggtgtctgagatcatcggccgggacctgagcggcttccctgcccctcctggagaggagcccccagcctag

SEQ ID NO: 20901 - DNA, 2349 bp, synthetic construct
  misc_feature 1..2349: note = Description of Artificial Sequence: Synthetic coding sequence
  source 1..2349: mol_type = other DNA
atgcctgccagcatcagcagcatcttccctggccccaccctgctgctgagctgtggcagcgaggagctggacagtgaagatgccccaccctgctgccgcctggccctgggggagcccccaccctacggggccgcccccatcggcatcccccggcccccaccacccaggcctggcatgcacagccccccacccaggcctgcccccagccctggcacctgggagagccagcctgcccggtctgtgcggctgggcggccctgggggcggggccggcggggccggcggcggccgggtgctggagtgccccagcatccgcatcaccagcatcagccccaccccagagcccccagctgccctggaggacaacccagatgcctggggagatggcagcccccgggactacccacctcctgagggctttggaggctaccgggaggccggcggccagggcggcggggccttcttcagccccagccctggcagcagcagcctgagctcctggagcttcttcagtgatgccagtgatgaagctgccctgtatgctgcctgtgatgaggtggagagcgagctgaatgaagctgccagcagatttggcctgggcagccccctgcccagcccccgggccagcccccggccctggaccccagaggacccctggagcctgtatggccccagccctgggggccggggccctgaggacagctggctgctgctgagcgcccctggccccaccccagccagccccaggcctgccagcccctgtgggaagaggcgctacagcagcagcggcacccccagcagcgccagccctgccctgagccggcggggcagcctgggggaggagggcagcgagcccccacctcctccacccctgcccctggcccgggaccccggcagccctggcccctttgattatgtgggcgcccctcctgctgagagcatcccccagaagaccaggaggaccagcagcgagcaggccgtggccctgcccaggtctgaggagcccgccagctgcaatggcaagctgcccctgggcgctgaggagagcgtggcccctcctgggggcagcaggaaggaggtggccggcatggactacctggccgtgcccagccccctggcctggagcaaggccagaattggaggccacagccccatcttccgcaccagcgccctgccccccctggactggcccctgcccagccagtatgagcagctggagctgagaattgaggtgcagccccgggcccaccaccgggcccactatgaaacagagggcagcagaggagctgtgaaggccgcccctgggggccaccctgtggtgaagctgctgggctacagcgagaagcccctgaccctgcagatgttcatcggcacagcagatgagaggaacctgcggccccacgccttctaccaggtgcaccgcatcaccgggaagatggtggccacagccagctatgaagctgtggtgtctggcaccaaggtgctggagatgaccctgctgcctgagaacaacatggccgccaacatcgactgtgccggcatcctgaagctgaggaacagcgacatcgagctgaggaagggggagacagacattggaaggaagaacaccagggtgcggctggtgttccgggtgcacgtgccccagggcggcggcaaggtggtgtctgtgcaggccgcctctgtgcccatcgagtgcagccagaggtctgcccaggagctgccccaggtggaggcctacagccccagcgcctgcagcgtgcggggcggggaggagctggtgctgaccggcagcaacttcctgcctgacagcaaggtggtgttcatcgagcggggcccagatggcaagctgcagtgggaggaggaggccaccgtgaaccggctgcagagcaatgaggtgaccctgaccctgactgtgcctgagtacagcaacaagagggtgtccaggcctgtgcaggtgtacttctacgtgtccaatggccgcaggaagaggagccccacccagagcttccgcttcctgcctgtgatctgcaaggaggagcccctgcctgacagcagcctgcggggcttccccagcgccagcgccaccccatttggaacagacatggacttcagccccccccggcccccctaccccagctacccccatgaggaccctgcctgtgagaccccctacctgtctgagggcttcggctacggcatgccacccctgtacccccagacaggccccccacccagctaccggcccggcctgaggatgtttcctgagacccggggcaccaccgtgtctgagatcatcggccgggacctgagcggcttccctgcccctcctggagaggagcccccagcctag

SEQ ID NO: 20902 - DNA, 2805 bp, synthetic construct
  misc_feature 1..2805: note = Description of Artificial Sequence: Synthetic coding sequence
  source 1..2805: mol_type = other DNA
atggctgatggaggagctgacagcgctgcccagaggctgcctgagggccctggccgggtggcccctggccgggacctgggcgccccagctggctccatgggcgccgccagctgtgaagatgaggagctggagttcaagctggtgtttggagaggagaaggaggccccacccctgggcgctgggggcctgggggaggagctggacagtgaagatgccccaccctgctgccgcctggccctgggggagcccccaccctacggggccgcccccatcggcatcccccggcccccaccacccaggcctggcatgcacagccccccacccaggcctgcccccagccctggcacctgggagagccagcctgcccggtctgtgcggctgggcggccctgggggcggggccggcggggccggcggcggccgggtgctggagtgccccagcatccgcatcaccagcatcagccccaccccagagcccccagctgccctggaggacaacccagatgcctggggagatggcagcccccgggactacccacctcctgagggctttggaggctaccgggaggccggcggccagggcggcggggccttcttcagccccagccctggcagcagcagcctgagctcctggagcttcttcagtgatgccagtgatgaagctgccctgtatgctgcctgtgatgaggtggagagcgagctgaatgaagctgccagcagatttggcctgggcagccccctgcccagcccccgggccagcccccggccctggaccccagaggacccctggagcctgtatggccccagccctgggggccggggccctgaggacagctggctgctgctgagcgcccctggccccaccccagccagccccaggcctgccagcccctgtgggaagaggcgctacagcagcagcggcacccccagcagcgccagccctgccctgagccggcggggcagcctgggggaggagggcagcgagcccccacctcctccacccctgcccctggcccgggaccccggcagccctggcccctttgattatgtgggcgcccctcctgctgagagcatcccccagaagaccaggaggaccagcagcgagcaggccgtggccctgcccaggtctgaggagcccgccagctgcaatggcaagctgcccctgggcgctgaggagagcgtggcccctcctgggggcagcaggaaggaggtggccggcatggactacctggccgtgcccagccccctggcctggagcaaggccagaattggaggccacagccccatcttccgcaccagcgccctgccccccctggactggcccctgcccagccagtatgagcagctggagctgagaattgaggtgcagccccgggcccaccaccgggcccactatgaaacagagggcagcagaggagctgtgaaggccgcccctgggggccaccctgtggtgaagctgctgggctacagcgagaagcccctgaccctgcagatgttcatcggcacagcagatgagaggaacctgcggccccacgccttctaccaggtgcaccgcatcaccgggaagatggtggccacagccagctatgaagctgtggtgtctggcaccaaggtgctggagatgaccctgctgcctgagaacaacatggccgccaacatcgactgtgccggcatcctgaagctgaggaacagcgacatcgagctgaggaagggggagacagacattggaaggaagaacaccagggtgcggctggtgttccgggtgcacgtgccccagggcggcggcaaggtggtgtctgtgcaggccgcctctgtgcccatcgagtgcagccagaggtctgcccaggagctgccccaggtggaggcctacagccccagcgcctgcagcgtgcggggcggggaggagctggtgctgaccggcagcaacttcctgcctgacagcaaggtggtgttcatcgagcggggcccagatggcaagctgcagtgggaggaggaggccaccgtgaaccggctgcagagcaatgaggtgaccctgaccctgactgtgcctgagtacagcaacaagagggtgtccaggcctgtgcaggtgtacttctacgtgtccaatggccgcaggaagaggagccccacccagagcttccgcttcctgcctgtgatctgcaaggaggagcccctgcctgacagcagcctgcggggcttccccagcgccagcgccaccccatttggaacagacatggacttcagccccccccggcccccctaccccagctacccccatgaggaccctgcctgtgagaccccctacctgtctgagggcttcggctacggcatgccacccctgtacccccagacaggccccccacccagctaccggcccggcctgaggatgtttcctgagacccggggcaccaccggctgtgcccagcccccagctgtgtccttcctgccccggcccttccccagcgacccctacggcggccggggcagcagcttcagcctgggcctgcccttcagccccccagcccccttccggcccccacccctgcctgccagcccccccctggagggccccttccccagccagagtgatgtgcaccccctgcctgctgagggctacaacaaggtgggccctggctacggccctggagagggcgcccctgagcaggagaagagcagaggaggctacagcagcggcttccgggacagcgtgcccatccagggcatcaccctggaggaggtgtctgagatcatcggccgggacctgagcggcttccctgcccctcctggagaggagcccccagcctag

SEQ ID NO: 20903 - DNA, 1314 bp, synthetic construct
  misc_feature 1..1314: note = Description of Artificial Sequence: Synthetic coding sequence
  source 1..1314: mol_type = other DNA
atgtttattggaacagcagatgaaagaaacctgcggccccacgccttctaccaggtgcaccgcatcaccgggaagatggtggccacagccagctatgaggccgtggtgtctggcaccaaggtgctggagatgaccctgctgcctgagaacaacatggccgccaacatcgactgtgccggcatcctgaagctgaggaacagcgacatcgagctgaggaaaggagaaacagacatcggcaggaagaacaccagggtgcggctggtgttccgggtgcacgtgccccagggcggcggcaaggtggtgtctgtgcaggccgcctctgtgcccattgaatgttcccagaggtctgcccaggagctgccccaggtggaggcctacagccccagcgcctgcagcgtgcggggcggggaggagctggtgctgaccggcagcaacttcctgcctgacagcaaggtggtgttcatcgagcggggcccagatggcaagctgcagtgggaggaggaggccaccgtgaaccggctgcagagcaatgaggtgaccctgaccctgactgtgcctgagtacagcaacaagagggtgtccaggcctgtgcaggtgtacttctacgtgtccaatggaagaaggaagaggagccccacccagagcttccgcttcctgcccgtcatctgcaaggaggagcccctgcctgacagcagcctgcggggcttccccagcgccagcgccacccccttcggcacagacatggacttcagcccccccaggcctccctaccccagctacccccatgaagatcctgcctgtgagaccccctacctgtctgagggcttcggctacggcatgccacccctgtacccccagacaggccccccacccagctacagacctggcctgaggatgtttcctgagacccggggcaccaccggctgtgcccagcccccagctgtgtccttcctgccccggcccttccccagcgacccctatggaggccggggcagcagcttcagcctgggcctgcccttcagccccccagcccccttccggcccccacccctgcctgccagcccccccctggagggccccttccccagccagagtgatgtgcaccccctgcctgctgagggctacaacaaggtgggccctggctacggccctggagagggcgcccctgagcaggagaagagccggggcggctacagcagcggcttccgggacagcgtgcccatccagggcatcaccctggaggaggtgtctgagatcatcggccgggacctgagcggcttccctgcccctcctggagaggagcccccagcctag

SEQ ID NO: 20904 - DNA, 2496 bp, synthetic construct
  misc_feature 1..2496: note = Description of Artificial Sequence: Synthetic coding sequence
  source 1..2496: mol_type = other DNA
atgcacagccccccacccaggcctgcccccagccctggcacctgggagagccagcctgcccggtctgtgcggctgggcggccctgggggcggggccggcggggccggcggcggccgggtgctggagtgccccagcatccgcatcaccagcatcagccccaccccagagcccccagctgccctggaggacaacccagatgcctggggagatggcagcccccgggactacccacctcctgagggctttggaggctaccgggaggccggcggccagggcggcggggccttcttcagccccagccctggcagcagcagcctgagctcctggagcttcttcagtgatgccagtgatgaagctgccctgtatgctgcctgtgatgaggtggagagcgagctgaatgaagctgccagcagatttggcctgggcagccccctgcccagcccccgggccagcccccggccctggaccccagaggacccctggagcctgtatggccccagccctgggggccggggccctgaggacagctggctgctgctgagcgcccctggccccaccccagccagccccaggcctgccagcccctgtgggaagaggcgctacagcagcagcggcacccccagcagcgccagccctgccctgagccggcggggcagcctgggggaggagggcagcgagcccccacctcctccacccctgcccctggcccgggaccccggcagccctggcccctttgattatgtgggcgcccctcctgctgagagcatcccccagaagaccaggaggaccagcagcgagcaggccgtggccctgcccaggtctgaggagcccgccagctgcaatggcaagctgcccctgggcgctgaggagagcgtggcccctcctgggggcagcaggaaggaggtggccggcatggactacctggccgtgcccagccccctggcctggagcaaggccagaattggaggccacagccccatcttccgcaccagcgccctgccccccctggactggcccctgcccagccagtatgagcagctggagctgagaattgaggtgcagccccgggcccaccaccgggcccactatgaaacagagggcagcagaggagctgtgaaggccgcccctgggggccaccctgtggtgaagctgctgggctacagcgagaagcccctgaccctgcagatgttcatcggcacagcagatgagaggaacctgcggccccacgccttctaccaggtgcaccgcatcaccgggaagatggtggccacagccagctatgaagctgtggtgtctggcaccaaggtgctggagatgaccctgctgcctgagaacaacatggccgccaacatcgactgtgccggcatcctgaagctgaggaacagcgacatcgagctgaggaagggggagacagacattggaaggaagaacaccagggtgcggctggtgttccgggtgcacgtgccccagggcggcggcaaggtggtgtctgtgcaggccgcctctgtgcccatcgagtgcagccagaggtctgcccaggagctgccccaggtggaggcctacagccccagcgcctgcagcgtgcggggcggggaggagctggtgctgaccggcagcaacttcctgcctgacagcaaggtggtgttcatcgagcggggcccagatggcaagctgcagtgggaggaggaggccaccgtgaaccggctgcagagcaatgaggtgaccctgaccctgactgtgcctgagtacagcaacaagagggtgtccaggcctgtgcaggtgtacttctacgtgtccaatggccgcaggaagaggagccccacccagagcttccgcttcctgcctgtgatctgcaaggaggagcccctgcctgacagcagcctgcggggcttccccagcgccagcgccaccccatttggaacagacatggacttcagccccccccggcccccctaccccagctacccccatgaggaccctgcctgtgagaccccctacctgtctgagggcttcggctacggcatgccacccctgtacccccagacaggccccccacccagctaccggcccggcctgaggatgtttcctgagacccggggcaccaccggctgtgcccagcccccagctgtgtccttcctgccccggcccttccccagcgacccctacggcggccggggcagcagcttcagcctgggcctgcccttcagccccccagcccccttccggcccccacccctgcctgccagcccccccctggagggccccttccccagccagagtgatgtgcaccccctgcctgctgagggctacaacaaggtgggccctggctacggccctggagagggcgcccctgagcaggagaagagcagaggaggctacagcagcggcttccgggacagcgtgcccatccagggcatcaccctggaggagggcggctgcggcactggaggctgtgaatgtgaatgtgtgcaggagatcgccctgcacgtgtgctag

SEQ ID NO: 20905 - DNA, 249 bp, synthetic construct
  misc_feature 1..249: note = Description of Artificial Sequence: Synthetic coding sequence
  source 1..249: mol_type = other DNA
atggacttcagccccccccggcccccctaccccagctacccccatgaggaccctgcctgtgagaccccctacctgtctgagggcttcggctacggcatgccacccctgtacccccagacaggccccccacccagctaccggcccggcctgaggatgtttcctgagacccggggcaccaccgtgtctgagatcatcggccgggacctgagcggcttccctgcccctcctggagaggagcccccagcctag

SEQ ID NO: 20906 - DNA, 315 bp, synthetic construct
  misc_feature 1..315: note = Description of Artificial Sequence: Synthetic coding sequence
  source 1..315: mol_type = other DNA
atgagcagcgctgcccggagccggctgacccgggccacccggcaggagatgctgttcctggccctgctgctgctgcctgtggtggtggcctttgcccgggcagaggccgaggaggatggagacctgcagtgcctgtgtgtgaagaccaccagccaggtgcggcccaggcacatcaccagcctggaggtgatcaaggccggcccccactgccccacagcccagctgattgccaccctgaagaatggaaggaagatctgcctggacctgcaggccctgctgtacaagaagatcatcaaggagcacctggagagctag

SEQ ID NO: 20907 - DNA, 2907 bp, synthetic construct
  misc_feature 1..2907: note = Description of Artificial Sequence: Synthetic coding sequence
  source 1..2907: mol_type = other DNA
atggctgaagatgacccctacctgggccggcctgagcagatgttccacctggaccccagcctgacccacaccatcttcaaccctgaggtgttccagccccagatggccctgcccacagatggcccctacctgcagatcctggagcagcccaagcagaggggcttccgcttccgctacgtgtgtgagggccccagccacggcggcctgcccggggccagcagcgagaagaacaagaagagctacccccaggtgaagatctgcaactacgtgggccctgccaaggtgattgtgcagctggtgaccaacgggaagaacatccacctgcacgcccacagcctggtgggcaagcactgtgaagatggcatctgcaccgtgacagctggccccaaggacatggtggtgggctttgccaacctgggcatcctgcacgtgaccaagaagaaggtgtttgagaccctggaggccaggatgacagaggcctgcatccggggctacaaccctggcctgctggtgcacccagacctggcctacctgcaggccgagggcggcggggaccggcagctgggggaccgggagaaggagctgatccggcaggccgccctgcagcagaccaaggagatggacctgtctgtggtgcggctgatgttcaccgccttcctgcctgacagcacaggcagcttcacccggcggctggagcctgtggtgtctgatgccatctatgacagcaaggccccaaatgccagcaacctgaagatcgtgaggatggacagaacagctggctgtgtgactggaggagaggagatctacctgctgtgtgacaaggtgcagaaggatgacatccagatccgcttctatgaggaggaggagaatggaggagtgtgggagggctttggagacttcagccccacagatgtgcaccggcagtttgccatcgtgttcaagacccccaagtacaaggacatcaacatcaccaagccagcctctgtgtttgtgcagctgcggaggaagagtgacctggagaccagcgagcccaagcccttcctgtactacccagagatcaaggacaaggaggaggtgcagaggaagaggcagaagctgatgcccaacttcagtgacagctttggaggcggcagcggggccggggccggcggcggcggcatgtttggcagcggcggcggcggcggcggcaccggcagcacaggccctggctacagcttcccccactacggcttccccacctacggcggcatcaccttccaccctggcaccaccaagagcaatgccggcatgaagcacggcaccatggacacagagagcaagaaggaccctgagggctgtgacaagagtgatgacaagaacacagtgaacctgtttgggaaggtgattgagaccacagagcaggaccaggagcccagcgaggccaccgtgggcaatggagaggtgaccctgacctacgccaccggcaccaaggaggagagcgctggggtgcaggacaacctcttcctggagaaggccatgcagctggccaagagacatgccaatgccctgtttgattatgctgtgactggagatgtgaagatgctgctggccgtgcagaggcacctgacagctgtgcaggatgaaaatggagacagcgtgctgcacctggccatcatccacctgcacagccagctggtgcgggacctgctggaggtgaccagcggcctcatcagtgatgacatcatcaacatgagaaatgacctgtaccagacccccctgcacctggccgtcatcaccaagcaggaggatgtggtggaggacctgctgcgggccggggctgacctgagcctgctggaccggctgggcaacagcgtgctgcacctggccgccaaggagggccatgacaaggtgctgagcatcctgctgaagcacaagaaggccgccctgctgctggaccaccccaatggagatggcctgaatgccatccacctggccatgatgagcaacagcctgccctgcctgctgctgctggtggccgccggggctgatgtgaatgcccaggagcagaagagcggccgcacagccctgcacctggccgtggagcatgacaacatcagcctggccggctgcctgctgctggagggagatgcccacgtggacagcaccacctatgatggcaccacccccctgcacatcgctgctggccggggcagcacccggctggccgccctgctgaaggctgctggagctgaccccctggtggagaactttgagcccctgtatgacctggatgacagctgggagaatgctggagaagatgagggcgtggtgcccggcaccacccccctggacatggccacctcctggcaggtgtttgacatcctgaatggcaagccctatgagcctgagttcaccagtgatgacctgctggcccagggcgacatgaagcagctggctgaagatgtgaagctgcagctgtacaagctgctggagatcccagaccctgacaagaactgggccaccctggcccagaagctgggcctgggcatcctgaacaatgccttccggctgagccctgcccccagcaagaccctgatggacaactatgaggtgtctgggggcaccgtgcgggagctggtggaggccctgcggcagatgggctacacagaggccattgaagtcatccaggccgccagcagccctgtgaagaccaccagccaggcccacagcctgcccctgagccctgccagcacccggcagcagattgatgagctgcgggacagcgacagcgtgtgtgacagcggcgtggagaccagcttcaggaagctgtccttcacagagagcctgaccagcggggccagcctgctgaccctgaacaagatgcctcatgactatggccaggagggccccctggagggcaagatctag

SEQ ID NO: 20908 - DNA, 2907 bp, synthetic construct; identical to SEQ ID NO: 20907
  misc_feature 1..2907: note = Description of Artificial Sequence: Synthetic coding sequence
  source 1..2907: mol_type = other DNA

SEQ ID NO: 20909 - DNA, 438 bp, synthetic construct
  misc_feature 1..438: note = Description of Artificial Sequence: Synthetic coding sequence
  source 1..438: mol_type = other DNA
atggctgaagatgacccctacctgggccggcctgagcagatgttccacctggaccccagcctgacccacaccatcttcaaccctgaggtgttccagccccagatggccctgcccacagcagatggcccctacctgcagatcctggagcagcccaagcagaggggcttccgcttccgctacgtgtgtgagggccccagccatggaggcctgcccggggccagcagcgagaagaacaagaagagctacccccaggtgaagatctgcaactacgtgggccctgccaaggtgattgtgcagctggtgaccaacgggaagaacatccacctgcacgcccacagcctggtgggcaagcactgtgaagatggcatctgcaccgtgacagctggccccaaggacatggtggtgggctttgccaacctgggcatcctgcacgtgtag

SEQ ID NO: 20910 - DNA, 225 bp, synthetic construct
  misc_feature 1..225: note = Description of Artificial Sequence: Synthetic coding sequence
  source 1..225: mol_type = other DNA
atgaagaggaccaccagcttcaggatggctgaagatgacccctacctgggccggcctgagcagatgttccacctggaccccagcctgacccacaccatcttcaaccctgaggtgttccagccccagatggccctgcccacagatggcccctacctgcagatcctggagcagcccaagcagaggggcttccgcttccgctacgtgtgtgagggccccagccactag

SEQ ID NO: 20911 - DNA, 1923 bp, synthetic construct
  misc_feature 1..1923: note = Description of Artificial Sequence: Synthetic coding sequence
  source 1..1923: mol_type = other DNA
atggccgccctgtacagacctggcctgcggctgaactggcacggcctgagccccctgggctggcccagctgccgcagcatccagaccctgcgggtgctgagcggggacctgggccagctgcccaccggcatccgggactttgtggagcacagcgcccggctgtgccagcctgagggcatccacatctgtgatggaacagaagcagaaaatacagccaccctgaccctgctggagcagcagggcctcatcaggaagctgcccaagtacaacaactgctggctggccaggacagaccccaaggatgtggcccgggtggagagcaagacagtgattgtgacccccagccagagggacacagtgcagctgcccccaggaggagcccggggccagctgggcaactggatgagccctgctgacttccagagagctgtggatgagcgcttccctggctgcatgcagggccgcaccatgtatgtgctgcccttctccatgggccctgtgggcagccccctgagccgcatcggcgtgcagctgacagattctgcctacgtggtggcctccatgaggatcatgacccggctgggcacccctgtgctgcaggccctgggagatggagactttgtgaagtgcctgcacagcgtgggccagcccctgaccggccagggcgagcctgtgtcccagtggccctgcaaccctgagaagaccctgattggacatgtgcctgaccagcgggagatcatcagctttggaagtggctatggaggcaacagcctgctgggcaagaagtgctttgccctgcgcatcgccagccggctggccagagatgagggctggctggccgagcacatgctgatcctgggcatcaccagccctgctgggaagaagagatatgtggccgccgccttccccagcgcctgtgggaagaccaacctggccatgatgaggcctgccctgcccggctggaaggtggagtgtgtgggagatgacatcgcctggatgagatttgattctgagggccgcctgcgggccatcaacccagaaaatggcttctttggagtggcccctggcaccagcgccaccaccaaccccaatgccatggccaccatccagagcaacaccatcttcaccaacgtggccgagaccagtgatggaggagtgtactgggagggcatcgaccagcccctgcccccaggagtgacagtgacctcctggctgggcaagccctggaagccaggggacaaggagccctgtgcccaccccaacagccgcttctgtgccccagcccggcagtgccccatcatggaccctgcctgggaggcccctgagggcgtgcccattgatgccatcatctttggaggccggcggcccaagggcgtgcccctggtgtatgaggccttcaactggaggcatggagtgtttgtgggcagcgccatgaggtctgagagcacagctgctgctgagcacaagggcaagatcatcatgcatgacccctttgccatgaggcccttcttcggctacaactttggccactacctggagcactggctgtccatggagggcaggaagggggcccagctgccccgcatcttccacgtgaactggttcagaagagatgaggccggccacttcctgtggccaggctttggagaaaatgcccgggtgctggactggatctgccggcggctggagggagaagattctgcccgggagacccccatcggcctggtgcccaaggagggcgccctggacctgagcggcctgcgggccatcgacaccacccagctgttcagcctgcccaaggacttctgggagcaggaggtgcgggacatccgcagctacctgacagagcaggtgaaccaggacctgcccaaggaggtgctggccgagctggaggccctggagaggagagtgcacaagatgtag

SEQ ID NO: 20912 - DNA, 3477 bp, synthetic construct
  misc_feature 1..3477: note = Description of Artificial Sequence: Synthetic coding sequence
  source 1..3477: mol_type = other DNA
atgacccatggagaggagctgggcagtgatgtgcaccaggacagcatcgtgctgacctacctggagggcctgctgatgcaccaggccgccggcggcagcggcacagctgtggacaagaagtctgctggccacaatgaggaggaccagaacttcaacatcagcggcagcgccttccccacctgccagagcaatggacctgtgctgaacacccacacctaccagggcagcggcatgctgcacctgaagaaggcccggctgctgcagagcagcgaggactggaatgctgccaagaggaagaggctgagtgacagcatcatgaacctgaatgtgaagaaggaggccctgctggccggcatggtggacagcgtgcccaagggcaagcaggacagcaccctgctggccagcctgctgcagagcttcagcagccggctgcagacagtggccctgagccagcagatccggcagagcctgaaggagcagggctacgccctgagccatgacagcctgaaggtggagaaggacctgcgctgctacggcgtggccagcagccacctgaagaccctgctgaagaagagcaaggtgaaggaccagaagccagacaccaacctgcctgatgtgaccaagaacctgatccgggacagatttgctgagagcccccaccacgtgggccagagcggcaccaaggtgatgtctgagcccctgagctgtgccgcccggctgcaggccgtggcctccatggtggagaagagggccagccctgccaccagccccaagcccagcgtggcctgcagccagctggccctgctgctgagcagcgaggcccacctgcagcagtacagccgggagcacgccctgaagacccagaatgccaaccaggccgccagcgagcggctggccgccatggcccggctgcaggagaatggccagaaggatgtgggcagctaccagctgcccaagggcatgagcagccacctgaatggccaggcccggaccagcagcagcaagctgatggccagcaagagcagcgccaccgtcttccagaaccccatgggcatcatccccagcagccccaagaatgccggctacaagaacagcctggagaggaacaacatcaagcaggccgccaacaacagcctgctgctgcacctgctgaagagccagaccatccccaagcccatgaatggccacagccacagcgagcggggcagcatctttgaggagagcagcacccccaccaccattgatgagtacagcgacaacaaccccagcttcacagatgacagcagtggagatgagagcagctacagcaactgtgtgcccatcgacctgagctgcaagcacaggacagagaagtctgagagtgaccagcctgtgtccctggacaacttcacccagagcctgctgaacacctgggaccccaaggtgcctgatgtggacatcaaggaggaccaggacaccagcaagaacagcaagctgaacagccaccagaaggtgaccctgctgcagctgctgctgggccacaagaatgaagaaaatgtggagaagaacaccagcccccagggcgtgcacaatgatgtgtccaagttcaacacccagaactatgcccggaccagcgtcatcgagagccccagcaccaacagaaccacccctgtgtccaccccacccctgctgaccagcagcaaggccggcagccccatcaacctgagccagcacagcctggtgatcaagtggaacagccccccctacgtgtgcagcacccagagcgagaagctgaccaacacagccagcaaccacagcatggacctgaccaagagcaaggaccccccaggagagaagccagcccagaatgaaggagcccagaacagcgccaccttcagcgccagcaagctgctgcagaacctggcccagtgtggcatgcagagctccatgtctgtggaggagcagaggcccagcaagcagctgctgaccggcaacacagacaagcccatcggcatgattgaccggctgaacagccccctgctgagcaacaagaccaatgctgtggaggagaacaaggccttcagcagccagcccaccggccctgagcccggcctgagcggcagcgagattgagaacctgctggagaggagaacagtgctgcagctgctgctgggcaaccccaacaagggcaagtctgagaagaaggagaagacccccctgagagatgagagcacccaggagcacagcgagcgggccctgtctgagcagatcctgatggtgaagatcaagtctgagccctgtgatgacctgcagatccccaacaccaacgtgcacctgagccatgatgccaagagcgcccccttcctgggcatggccccagctgtgcagaggtctgccccagccctgcctgtgtctgaggacttcaagtctgagcctgtgagcccccaggacttctccttcagcaagaatggcctgctgagccggctgctgcggcagaaccaggacagctacctggctgatgacagcgacaggagccacaggaacaatgagatggccctgctggagagcaagaacctgtgcatggtgcccaagaagaggaagctgtacacagagcccctggagaaccccttcaagaagatgaagaacaacatcgtggatgctgccaacaaccacagcgcccctgaggtgctgtatggcagcctgctgaaccaggaggagctgaagttcagcagaaatgacctggagttcaagtacccagctggccacggcagcgccagcgagagcgagcaccgctcctgggcccgggagagcaagagcttcaacgtgctgaagcagctgctgctgtctgagaactgtgtgcgggacctgagcccccacaggagcaacagcgtggccgacagcaagaagaagggccacaagaacaacgtgaccaacagcaagccagagttcagcatcagcagcctgaatggcctgatgtacagcagcacccagcccagcagctgcatggacaacagaaccttctcctacccaggagtggtgaagacccctgtgagccccaccttccctgagcacctgggctgtgccggcagcaggcctgagagcggcctgctgaatggctgcagcatgcccagcgagaagggccccatcaagtgggtgatcacagatgctgagaagaatgaatatgagaaggacagcccccggctgaccaagaccaaccccatcctgtactacatgctgcagaagggcggcaacagcgtgaccagccgggagacccaggacaaggacatctggagggaggccagcagcgctgagagcgtgtcccaggtgacagccaaggaggagctgctgcccacagctgagaccaaggccagcttcttcaacctgcggagcccctacaacagccacatgggcaacaatgccagccggccccacagcgccaacggggaggtgtatggcctgctgggctctgtgctgaccatcaagaaggagagcgagtag

SEQ ID NO: 20913 - DNA, 3477 bp, synthetic construct; identical to SEQ ID NO: 20912
  misc_feature 1..3477: note = Description of Artificial Sequence: Synthetic coding sequence
  source 1..3477: mol_type = other DNA

SEQ ID NO: 20914 - DNA, 3477 bp, synthetic construct; identical to SEQ ID NO: 20912
  misc_feature 1..3477: note = Description of Artificial Sequence: Synthetic coding sequence
  source 1..3477: mol_type = other DNA

SEQ ID NO: 20915 - DNA, 201 bp, synthetic construct
  misc_feature 1..201: note = Description of Artificial Sequence: Synthetic coding sequence
  source 1..201: mol_type = other DNA
atgacccatggagaggagctgggcagtgatgtgcaccaggacagcatcgtgctgacctacctggagggcctgctgatgcaccaggccgccggcggcagcggcacagctgtggacaagaagtctgctggccacaatgaggaggaccagaacttcaacatcagcggcagcgccttccccacctgccagagcaatggcccctag

SEQ ID NO: 20916 - DNA, 4176 bp, synthetic construct
  misc_feature 1..4176: note = Description of Artificial Sequence: Synthetic coding sequence
  source 1..4176: mol_type = other DNA
atgcccagcagcctgctgggcgccgccatgcctgccagcaccagcgctgctgccctgcaggaggccctggagaatgccggccgcctgattgaccggcagctgcaggaggacaggatgtacccagacctgtctgagctgctgatggtgtctgcccccaacaaccccaccgtgtctggcatgtctgacatggactaccccctgcagggccctggcctgctgtctgtgcccaacctgcctgagatcagcagcatcagaagagtgcccctgcccccagagctggtggagcagtttggccacatgcagtgcaactgcatgatgggcgtcttcccccccatcagccgggcctggctgaccatcgacagcgacatcttcatgtggaactatgaagatggaggagacctggcctactttgatggcctgtctgagaccatcctggccgtgggcctggtgaagcccaaggccggcatcttccagccccacgtgcgccacctgctggtgctggccacccctgtggacatcgtcatcctgggcctgtcctatgccaacctgcagacaggcagcggcgtgctgaatgacagcctgagcggcggcatgcagctgctgcctgaccccctgtacagcctgcccacagacaacacctacctgctgaccatcaccagcacagacaatggccgcatcttcctggccggcaaggatggctgcctgtatgaggtggcctaccaggccgaggccggctggttcagccagcgctgcaggaagatcaaccacagcaagagcagcctgtccttcctggtgcccagcctgctgcagttcaccttctctgaagatgaccccatcctgcagatcgccatcgacaacagcaggaacatcctgtacaccaggtctgagaagggcgtcatccaggtgtatgacctgggccaggacggccagggcatgagccgggtggcctctgtgtcccagaatgccatcgtgtctgctgctggcaacatcgcccggaccatcgacagatctgtgttcaagcccatcgtgcagattgctgtgattgaaaattctgagagcctggactgccagctgctggccgtgacccacgccggcgtgcggctgtacttcagcacctgccccttccggcagcccctggcccggcccaacaccctgaccctggtgcacgtgcggctgcccccaggcttcagcgccagcagcacagtggagaagcccagcaaggtgcaccgggccctgtacagcaagggcatcctgctgatggccgcctctgaaaatgaagataatgacatcctgtggtgtgtgaaccacgacaccttccccttccagaagcccatgatggagacccagatgacagctggggtggatggccacagctgggccctgagcgccattgatgagctgaaggtggacaagatcatcacccccctgaacaaggaccacatccccatcacagacagccctgtggtggtgcagcagcacatgctgccccccaagaagtttgtgctgctgagcgcccagggcagcctgatgttccacaagctgcggcctgtggaccagctgcggcacctgctggtgtccaatgtgggcggagatggagaggagattgagcgcttcttcaagctgcaccaggaggaccaggcctgtgccacctgcctgatcctggcctgcagcacagctgcctgtgaccgggaggtgtctgcctgggccacccgggccttcttccgctatggaggagaggcccagatgaggttccccaccaccctgcccccacccagcaatgtgggccccatcctgggcagccctgtgtacagcagcagccctgtgcccagcggcagcccctaccccaaccccagcttcctgggcacccccagccacggcatccagcccccagccatgagcacccctgtgtgtgccctgggcaacccagccacccaggccaccaacatgagctgtgtgactggacctgagatcgtgtacagcggcaagcacaacggcatctgcatctacttcagccgcatcatgggcaacatctgggatgccagcctggtggtggagcgcatcttcaagagcggcaaccgggagatcacagccatcgagagctctgtgccctgccagctgctggagagcgtgctgcaggagctgaagggcctgcaggagttcctggacaggaacagccagtttgctgggggccccctgggcaaccccaacaccacagccaaggtgcagcagaggctcatcggcttcatgaggccagaaaatggaaacccccagcagatgcagcaggagctgcagaggaagttccacgaggcccagctgtctgagaagatcagcctgcaggccatccagcagctggtgaggaagagctaccaggccctggccctgtggaagctgctgtgtgagcaccagttcaccatcatcgtggccgagctgcagaaggagctgcaggagcagctgaagatcaccaccttcaaggacctggtgatccgggacaaggagctgaccggggccctgattgccagcctcatcaactgctacatccgggacaatgctgctgtggatggcatcagcctgcacctgcaggacatctgccccctgctgtacagcacagatgatgccatctgcagcaaggccaatgagctgctgcagaggagccggcaggtgcagaacaagacagagaaggagaggatgctgcgggagagcctgaaggagtaccagaagatcagcaaccaggtggacctgagcaatgtgtgtgcccagtaccggcaggtgcgcttctatgagggcgtggtggagctgagcctgacagctgctgagaagaaggacccccagggcctgggcctgcacttctacaagcacggggagccagaagaagatattgtgggcctgcaggccttccaggagcggctgaacagctacaagtgcatcacagacaccctgcaggagctggtgaaccagagcaaggccgccccccagagccccagcgtgcccaagaagccaggcccccctgtgctgagcagtgaccccaacatgctgagcaatgaggaggccggccaccactttgagcagatgctgaagctgagccagaggagcaaggatgagctgttcagcatcgccctgtacaactggctgatccaggtggacctggccgacaagctgctgcaggtggccagccccttcctggagccccacctggtgaggatggccaaggtggaccagaacagagtgcgctacatggacctgctgtggagatactatgagaagaacagaagcttcagcaatgctgcccgggtgctgagccggctggccgacatgcacagcacagagatcagcctgcagcagaggctggagtacatcgcccgggccatcctgagcgccaagagcagcacagccatcagcagcattgctgctgatggagagttcctgcacgagctggaggagaagatggaggtggcccgcatccagctgcagatccaggagaccctgcagaggcagtacagccaccacagctctgtgcaggatgctgtgtcccagctggacagcgagctgatggacatcaccaagctgtatggagaatttgctgaccccttcaagctggccgagtgcaagctggccatcatccactgtgccggctacagcgaccccatcctggtgcagaccctgtggcaggacatcatcgagaaggagctgagtgacagcgtgaccctgagcagcagtgacaggatgcacgccctgagcctgaagatcgtgctgctgggcaagatctatgccggcaccccccgcttcttccccctggacttcatcgtgcagttcctggagcagcaggtgtgcaccctgaactgggatgtgggcttcgtcatccagaccatgaatgaaattggagtgcccctgccccggctgctggaggtgtatgaccagctgttcaagagccgggaccccttctggaacaggatgaagaagcccctgcacctgctggactgcatccacgtgctgctgatccgctacgtggagaaccccagccaggtgctgaactgtgagcggcggcgcttcaccaacctgtgcctggatgctgtgtgtggctacctggtggagctgcagagcatgagcagctctgtggccgtgcaggccatcactggaaacttcaagagcctgcaggccaagctggagcggctgcactag

SEQ ID NO: 20917 - DNA, 2334 bp, synthetic construct
  misc_feature 1..2334: note = Description of Artificial Sequence: Synthetic coding sequence
  source 1..2334: mol_type = other DNA
atggacagcaaggagagcctgaccccaggccgggaggagaaccccagctctgtgctggcccaggagagaggagatgtgatggacttctacaagaccctgcggggcggggccaccgtgaaggtgtctgccagcagccccagcctggccgtggccagccagagcgacagcaagcagaggcggctgctggtggacttccccaagggctctgtgtccaatgcccagcagcctgacctgagcaaggctgtgtccctgtccatgggcctgtacatgggagaaacagagaccaaggtgatgggaaatgacctgggcttcccccagcagggccagatcagcctgagcagcggggagacagacctgaagctgctggaggagagcatcgccaacctgaacagaagcacctctgtgcctgagaaccccaagagcagcgccagcacagctgtgtctgctgcccccacagagaaggagttccccaagacccacagtgatgtgtcctctgagcagcagcacctgaagggccagacaggcaccaatggaggaaatgtgaagctgtacaccacagaccagagcacctttgacatcctgcaggacctggagttcagcagcggcagccctgggaaggagaccaatgaaagcccctggaggagtgacctgctgattgatgagaactgcctgctgagccccctggccggagaagatgacagcttcctgctggagggcaacagcaatgaagactgcaagcccctcatcctgcctgacaccaagcccaagatcaaggacaacggggacctggtgctgagcagccccagcaatgtgaccctgccccaggtgaagacagagaaggaggacttcatcgagctgtgcaccccaggagtcatcaagcaggagaagctgggcaccgtgtactgccaggccagcttccctggggccaacatcatcggcaacaagatgtctgccatctctgtgcacggcgtgtccaccagcggcggccagatgtaccactatgacatgaacacagccagcctgagccagcagcaggaccagaagcccatcttcaacgtcatcccccccatccctgtgggcagcgagaactggaaccgctgccagggcagcggagatgacaacctgaccagcctgggcaccctgaacttccctggccgcacagtgttcagcaatggctacagcagccccagcatgaggccagatgtgagcagcccccccagcagcagcagcacagccaccaccggccccccacccaagctgtgcctggtgtgcagtgatgaggccagcggctgccactatggagtgctgacctgtggcagctgcaaggtgttcttcaagagagctgtggagggccagcacaactacctgtgtgccggcagaaatgactgcatcatcgacaagatccggaggaagaactgcccagcctgccgctacaggaagtgcctgcaggccggcatgaacctggaggccaggaagaccaagaagaagatcaagggcatccagcaggccaccactggagtgtcccaggagaccagtgaaaatcctggcaacaagaccatcgtgcctgccaccctgccccagctgacccccaccctggtgtccctgctggaggtgattgagcctgaggtgctgtatgccggctatgacagctctgtgcctgacagcacctggaggatcatgaccaccctgaacatgctgggcggccggcaggtgattgctgctgtgaagtgggccaaggccatccctggcttcaggaacctgcacctggatgaccagatgaccctgctgcagtacagctggatgttcctgatggcctttgccctgggctggaggagctaccggcagagcagcgccaacctgctgtgctttgccccagacctgatcatcaatgagcagaggatgaccctgccctgcatgtatgaccagtgcaagcacatgctgtatgtgtcctctgagctgcaccggctgcaggtgtcctatgaggagtacctgtgcatgaagaccctgctgctgctgagctctgtgcccaaggatggcctgaagagccaggagctgtttgatgagatccgcatgacctacatcaaggagctgggcaaggccatcgtgaagcgggagggcaacagcagccagaactggcagcgcttctaccagctgaccaagctgctggacagcatgcatgaggtggtggagaacctgctgaactactgcttccagaccttcctggacaagaccatgagcattgagttccctgagatgctggccgagatcatcaccaaccagatccccaagtacagcaatggaaacatcaagaagctgctcttccaccagaagtag

SEQ ID NO: 20918 - DNA, 1782 bp, synthetic construct
  misc_feature 1..1782: note = Description of Artificial Sequence: Synthetic coding sequence
  source 1..1782: mol_type = other DNA
atggacagcaaggagagcctgaccccaggccgggaggagaaccccagctctgtgctggcccaggagagaggagatgtgatggacttctacaagaccctgcggggcggggccaccgtgaaggtgtctgccagcagccccagcctggccgtggccagccagagcgacagcaagcagaggcggctgctggtggacttccccaagggctctgtgtccaatgcccagcagcctgacctgagcaaggctgtgtccctgtccatgggcctgtacatgggagaaacagagaccaaggtgatgggaaatgacctgggcttcccccagcagggccagatcagcctgagcagcggggagacagacctgaagctgctggaggagagcatcgccaacctgaacagaagcacctctgtgcctgagaaccccaagagcagcgccagcacagctgtgtctgctgcccccacagagaaggagttccccaagacccacagtgatgtgtcctctgagcagcagcacctgaagggccagacaggcaccaatggaggaaatgtgaagctgtacaccacagaccagagcacctttgacatcctgcaggacctggagttcagcagcggcagccctgggaaggagaccaatgaaagcccctggaggagtgacctgctgattgatgagaactgcctgctgagccccctggccggagaagatgacagcttcctgctggagggcaacagcaatgaagactgcaagcccctcatcctgcctgacaccaagcccaagatcaaggacaacggggacctggtgctgagcagccccagcaatgtgaccctgccccaggtgaagacagagaaggaggacttcatcgagctgtgcaccccaggagtcatcaagcaggagaagctgggcaccgtgtactgccaggccagcttccctggggccaacatcatcggcaacaagatgtctgccatctctgtgcacggcgtgtccaccagcggcggccagatgtaccactatgacatgaacacagccagcctgagccagcagcaggaccagaagcccatcttcaacgtcatcccccccatccctgtgggcagcgagaactggaaccgctgccagggcagcggagatgacaacctgaccagcctgggcaccctgaacttccctggccgcacagtgttcagcaatggctacagcagccccagcatgaggccagatgtgagcagcccccccagcagcagcagcacagccaccaccggccccccacccaagctgtgcctggtgtgcagtgatgaggccagcggctgccactatggagtgctgacctgtggcagctgcaaggtgttcttcaagagagctgtggagggccagcacaactacctgtgtgccggcagaaatgactgcatcatcgacaagatccggaggaagaactgcccagcctgccgctacaggaagtgcctgcaggccggcatgaacctggaggtggtgcccaaggatggcctgaagagccaggagctgtttgatgagatccgcatgacctacatcaaggagctgggcaaggccatcgtgaagcgggagggcaacagcagccagaactggcagcgcttctaccagctgaccaagctgctggacagcatgcatgaggtggtggagaacctgctgaactactgcttccagaccttcctggacaagaccatgagcattgagttccctgagatgctggccgagatcatcaccaaccagatccccaagtacagcaatggaaacatcaagaagctgctcttccaccagaagtag

SEQ ID NO: 20919 - DNA, 2334 bp, synthetic construct; identical to SEQ ID NO: 20917
  misc_feature 1..2334: note = Description of Artificial Sequence: Synthetic coding sequence
  source 1..2334: mol_type = other DNA

SEQ ID NO: 20920 - DNA, 2337 bp, synthetic construct
  misc_feature 1..2337: note = Description of Artificial Sequence: Synthetic coding sequence
  source 1..2337: mol_type = other DNA
atggacagcaaggagagcctgaccccaggccgggaggagaaccccagctctgtgctggcccaggagagaggagatgtgatggacttctacaagaccctgcggggcggggccaccgtgaaggtgtctgccagcagccccagcctggccgtggccagccagagcgacagcaagcagaggcggctgctggtggacttccccaagggctctgtgtccaatgcccagcagcctgacctgagcaaggctgtgtccctgtccatgggcctgtacatgggagaaacagagaccaaggtgatgggaaatgacctgggcttcccccagcagggccagatcagcctgagcagcggggagacagacctgaagctgctggaggagagcatcgccaacctgaacagaagcacctctgtgcctgagaaccccaagagcagcgccagcacagctgtgtctgctgcccccacagagaaggagttccccaagacccacagtgatgtgtcctctgagcagcagcacctgaagggccagacaggcaccaatggaggaaatgtgaagctgtacaccacagaccagagcacctttgacatcctgcaggacctggagttcagcagcggcagccctgggaaggagaccaatgaaagcccctggaggagtgacctgctgattgatgagaactgcctgctgagccccctggccggagaagatgacagcttcctgctggagggcaacagcaatgaagactgcaagcccctcatcctgcctgacaccaagcccaagatcaaggacaacggggacctggtgctgagcagccccagcaatgtgaccctgccccaggtgaagacagagaaggaggacttcatcgagctgtgcaccccaggagtcatcaagcaggagaagctgggcaccgtgtactgccaggccagcttccctggggccaacatcatcggcaacaagatgtctgccatctctgtgcacggcgtgtccaccagcggcggccagatgtaccactatgacatgaacacagccagcctgagccagcagcaggaccagaagcccatcttcaacgtcatcccccccatccctgtgggcagcgagaactggaaccgctgccagggcagcggagatgacaacctgaccagcctgggcaccctgaacttccctggccgcacagtgttcagcaatggctacagcagccccagcatgaggccagatgtgagcagcccccccagcagcagcagcacagccaccaccggccccccacccaagctgtgcctggtgtgcagtgatgaggccagcggctgccactatggagtgctgacctgtggcagctgcaaggtgttcttcaagagagctgtggagggccggcagcacaactacctgtgtgccggcagaaatgactgcatcatcgacaagatccggaggaagaactgcccagcctgccgctacaggaagtgcctgcaggccggcatgaacctggaggccaggaagaccaagaagaagatcaagggcatccagcaggccaccaccggggtgtcccaggagaccagcgagaaccctggcaacaagaccatcgtgcctgccaccctgccccagctgacccccaccctggtgtccctgctggaggtgattgagcctgaggtgctgtatgccggctatgacagctctgtgcctgacagcacctggaggatcatgaccaccctgaacatgctgggcggccggcaggtgattgctgctgtgaagtgggccaaggccatccctggcttcaggaacctgcacctggatgaccagatgaccctgctgcagtacagctggatgttcctgatggcctttgccctgggctggaggagctaccggcagagcagcgccaacctgctgtgctttgccccagacctgatcatcaatgagcagaggatgaccctgccctgcatgtatgaccagtgcaagcacatgctgtatgtgagcagcgagctgcaccggctgcaggtgtcctatgaggagtacctgtgcatgaagaccctgctgctgctgagctctgtgcccaaggatggcctgaagagccaggagctgtttgatgagatccgcatgacctacatcaaggagctgggcaaggccatcgtgaagcgggagggcaacagcagccagaactggcagcgcttctaccagctgaccaagctgctggacagcatgcatgaggtggtggagaacctgctgaactactgcttccagaccttcctggacaagaccatgagcattgagttccctgagatgctggccgagatcatcaccaaccagatccccaagtacagcaatggaaacatcaagaagctgctcttccaccagaagtag

SEQ ID NO: 20921 - DNA, 2229 bp, synthetic construct
  misc_feature 1..2229: note = Description of Artificial Sequence: Synthetic coding sequence
  source 1..2229: mol_type = other DNA
atggacagcaaggagagcctgaccccaggccgggaggagaaccccagctctgtgctggcccaggagagaggagatgtgatggacttctacaagaccctgcggggcggggccaccgtgaaggtgtctgccagcagccccagcctggccgtggccagccagagcgacagcaagcagaggcggctgctggtggacttccccaagggctctgtgtccaatgcccagcagcctgacctgagcaaggctgtgtccctgtccatgggcctgtacatgggagaaacagagaccaaggtgatgggaaatgacctgggcttcccccagcagggccagatcagcctgagcagcggggagacagacctgaagctgctggaggagagcatcgccaacctgaacagaagcacctctgtgcctgagaaccccaagagcagcgccagcacagctgtgtctgctgcccccacagagaaggagttccccaagacccacagtgatgtgtcctctgagcagcagcacctgaagggccagacaggcaccaatggaggaaatgtgaagctgtacaccacagaccagagcacctttgacatcctgcaggacctggagttcagcagcggcagccctgggaaggagaccaatgaaagcccctggaggagtgacctgctgattgatgagaactgcctgctgagccccctggccggagaagatgacagcttcctgctggagggcaacagcaatgaagactgcaagcccctcatcctgcctgacaccaagcccaagatcaaggacaacggggacctggtgctgagcagccccagcaatgtgaccctgccccaggtgaagacagagaaggaggacttcatcgagctgtgcaccccaggagtcatcaagcaggagaagctgggcaccgtgtactgccaggccagcttccctggggccaacatcatcggcaacaagatgtctgccatctctgtgcacggcgtgtccaccagcggcggccagatgtaccactatgacatgaacacagccagcctgagccagcagcaggaccagaagcccatcttcaacgtcatcccccccatccctgtgggcagcgagaactggaaccgctgccagggcagcggagatgacaacctgaccagcctgggcaccctgaacttccctggccgcacagtgttcagcaatggctacagcagccccagcatgaggccagatgtgagcagcccccccagcagcagcagcacagccaccaccggccccccacccaagctgtgcctggtgtgcagtgatgaggccagcggctgccactatggagtgctgacctgtggcagctgcaaggtgttcttcaagagagctgtggagggccagcacaactacctgtgtgccggcagaaatgactgcatcatcgacaagatccggaggaagaactgcccagcctgccgctacaggaagtgcctgcaggccggcatgaacctggaggccaggaagaccaagaagaagatcaagggcatccagcaggccaccactggagtgtcccaggagaccagtgaaaatcctggcaacaagaccatcgtgcctgccaccctgccccagctgacccccaccctggtgtccctgctggaggtgattgagcctgaggtgctgtatgccggctatgacagctctgtgcctgacagcacctggaggatcatgaccaccctgaacatgctgggcggccggcaggtgattgctgctgtgaagtgggccaaggccatccctggcttcaggaacctgcacctggatgaccagatgaccctgctgcagtacagctggatgttcctgatggcctttgccctgggctggaggagctaccggcagagcagcgccaacctgctgtgctttgccccagacctgatcatcaatgagcagaggatgaccctgccctgcatgtatgaccagtgcaagcacatgctgtatgtgtcctctgagctgcaccggctgcaggtgtcctatgaggagtacctgtgcatgaagaccctgctgctgctgagctctgtgcccaaggatggcctgaagagccaggagctgtttgatgagatccgcatgacctacatcaaggagctgggcaaggccatcgtgaagcgggagggcaacagcagccagaactggcagcgcttctaccagctgaccaagctgctggacagcatgcatgaaaatgtgatgtggctgaagccagagagcaccagccacaccctcatctag

SEQ ID NO: 20922 - DNA, 1143 bp, synthetic construct
  misc_feature 1..1143: note = Description of Artificial Sequence: Synthetic coding sequence
  source 1..1143: mol_type = other DNA
atgaggccagatgtgagcagcccccccagcagcagcagcacagccaccactggacctccacccaagctgtgcctggtgtgcagtgatgaggccagcggctgccactacggcgtgctgacctgtggcagctgcaaggtgttcttcaagagagctgtggagggccagcacaactacctgtgtgccggcagaaatgactgcatcatcgacaagatccggaggaagaactgcccagcctgccgctacaggaagtgcctgcaggccggcatgaacctggaggccaggaagaccaagaagaagatcaagggcatccagcaggccaccaccggggtgtcccaggagaccagcgagaaccctggcaacaagaccatcgtgcctgccaccctgccccagctgacccccaccctggtgtccctgctggaggtgattgagcctgaggtgctgtatgccggctatgacagctctgtgcctgacagcacctggaggatcatgaccaccctgaacatgctgggcggccggcaggtgattgctgctgtgaagtgggccaaggccatccctggcttcaggaacctgcacctggatgaccagatgaccctgctgcagtacagctggatgttcctgatggcctttgccctgggctggaggagctaccggcagagcagcgccaacctgctgtgctttgccccagacctgatcatcaatgagcagaggatgaccctgccctgcatgtatgaccagtgcaagcacatgctgtatgtgagcagcgagctgcaccggctgcaggtgtcctatgaggagtacctgtgcatgaagaccctgctgctgctgagctctgtgcccaaggatggcctgaagagccaggagctgtttgatgagatccgcatgacctacatcaaggagctgggcaaggccatcgtgaagcgggagggcaacagcagccagaactggcagcgcttctaccagctgaccaagctgctggacagcatgcatgaggtggtggagaacctgctgaactactgcttccagaccttcctggacaagaccatgagcattgagttccctgagatgctggccgagatcatcaccaaccagatccccaagtacagcaatggaaacatcaagaagctgctcttccaccagaagtag

SEQ ID NO: 20923 - DNA, 2256 bp, synthetic construct
  misc_feature 1..2256: note = Description of Artificial Sequence: Synthetic coding sequence
  source 1..2256: mol_type = other DNA
atggacagcaaggagagcctgaccccaggccgggaggagaaccccagctctgtgctggcccaggagagaggagatgtgatggacttctacaagaccctgcggggcggggccaccgtgaaggtgtctgccagcagccccagcctggccgtggccagccagagcgacagcaagcagaggcggctgctggtggacttccccaagggctctgtgtccaatgcccagcagcctgacctgagcaaggctgtgtccctgtccatgggcctgtacatgggagaaacagagaccaaggtgatgggaaatgacctgggcttcccccagcagggccagatcagcctgagcagcggggagacagacctgaagctgctggaggagagcatcgccaacctgaacagaagcacctctgtgcctgagaaccccaagagcagcgccagcacagctgtgtctgctgcccccacagagaaggagttccccaagacccacagtgatgtgtcctctgagcagcagcacctgaagggccagacaggcaccaatggaggaaatgtgaagctgtacaccacagaccagagcacctttgacatcctgcaggacctggagttcagcagcggcagccctgggaaggagaccaatgaaagcccctggaggagtgacctgctgattgatgagaactgcctgctgagccccctggccggagaagatgacagcttcctgctggagggcaacagcaatgaagactgcaagcccctcatcctgcctgacaccaagcccaagatcaaggacaacggggacctggtgctgagcagccccagcaatgtgaccctgccccaggtgaagacagagaaggaggacttcatcgagctgtgcaccccaggagtcatcaagcaggagaagctgggcaccgtgtactgccaggccagcttccctggggccaacatcatcgccagcctgagccagcagcaggaccagaagcccatcttcaacgtcatcccccccatccctgtgggcagcgagaactggaaccgctgccagggcagcggagatgacaacctgaccagcctgggcaccctgaacttccctggccgcacagtgttcagcaatggctacagcagccccagcatgaggccagatgtgagcagcccccccagcagcagcagcacagccaccaccggccccccacccaagctgtgcctggtgtgcagtgatgaggccagcggctgccactatggagtgctgacctgtggcagctgcaaggtgttcttcaagagagctgtggagggccagcacaactacctgtgtgccggcagaaatgactgcatcatcgacaagatccggaggaagaactgcccagcctgccgctacaggaagtgcctgcaggccggcatgaacctggaggccaggaagaccaagaagaagatcaagggcatccagcaggccaccactggagtgtcccaggagaccagtgaaaatcctggcaacaagaccatcgtgcctgccaccctgccccagctgacccccaccctggtgtccctgctggaggtgattgagcctgaggtgctgtatgccggctatgacagctctgtgcctgacagcacctggaggatcatgaccaccctgaacatgctgggcggccggcaggtgattgctgctgtgaagtgggccaaggccatccctggcttcaggaacctgcacctggatgaccagatgaccctgctgcagtacagctggatgttcctgatggcctttgccctgggctggaggagctaccggcagagcagcgccaacctgctgtgctttgccccagacctgatcatcaatgagcagaggatgaccctgccctgcatgtatgaccagtgcaagcacatgctgtatgtgtcctctgagctgcaccggctgcaggtgtcctatgaggagtacctgtgcatgaagaccctgctgctgctgagctctgtgcccaaggatggcctgaagagccaggagctgtttgatgagatccgcatgacctacatcaaggagctgggcaaggccatcgtgaagcgggagggcaacagcagccagaactggcagcgcttctaccagctgaccaagctgctggacagcatgcatgaggtggtggagaacctgctgaactactgcttccagaccttcctggacaagaccatgagcattgagttccctgagatgctggccgagatcatcaccaaccagatccccaagtacagcaatggaaacatcaagaagctgctcttccaccagaagtag

SEQ ID NO: 20924 - DNA, 435 bp, synthetic construct
  misc_feature 1..435: note = Description of Artificial Sequence: Synthetic coding sequence
  source 1..435: mol_type = other DNA
atggacagcaaggagagcctgaccccaggccgggaggagaaccccagctctgtgctggcccaggagagaggagatgtgatggacttctacaagaccctgcggggcggggccaccgtgaaggtgtctgccagcagccccagcctggccgtggccagccagagcgacagcaagcagaggcggctgctggtggacttccccaagggctctgtgtccaatgcccagcagcctgacctgagcaaggctgtgtccctgtccatgggcctgtacatgggagaaacagagaccaaggtgatgggaaatgacctgggcttcccccagcagggccagatcagcctgagcagcggggagacagacctgaagctgctggaggagagcatcgccaacctgaacagaagcacctctgtgcctgagaaccccaagagcagcgccagctag

SEQ ID NO: 20925 - DNA, 438 bp, synthetic construct
  misc_feature 1..438: note = Description of Artificial Sequence: Synthetic coding sequence
  source 1..438: mol_type = other DNA
atggacagcaaggagagcctgaccccaggccgggaggagaaccccagctctgtgctggcccaggagagaggagatgtgatggacttctacaagaccctgcggggcggggccaccgtgaaggtgtctgccagcagccccagcctggccgtggccagccagagcgacagcaagcagaggcggctgctggtggacttccccaagggctctgtgtccaatgcccagcagcctgacctgagcaaggctgtgtccctgtccatgggcctgtacatgggagaaacagagaccaaggtgatgggaaatgacctgggcttcccccagcagggccagatcagcctgagcagcggggagacagacctgaagctgctggaggagagcatcgccaacctgaacagaagcacctctgtgcctgagaaccccaagagcagcgccagcacctag

SEQ ID NO: 20926 - DNA, 2334 bp, synthetic construct; identical to SEQ ID NO: 20917
  misc_feature 1..2334: note = Description of Artificial Sequence: Synthetic coding sequence
  source 1..2334: mol_type = other DNA

SEQ ID NO: 20927 - DNA, 2337 bp, synthetic construct; identical to SEQ ID NO: 20920
  misc_feature 1..2337: note = Description of Artificial Sequence: Synthetic coding sequence
  source 1..2337: mol_type = other DNA

SEQ ID NO: 20928 - DNA, 438 bp, synthetic construct; identical to SEQ ID NO: 20925
  misc_feature 1..438: note = Description of Artificial Sequence: Synthetic coding sequence
  source 1..438: mol_type = other DNA

SEQ ID NO: 20929 - DNA, 438 bp, synthetic construct; identical to SEQ ID NO: 20925
  misc_feature 1..438: note = Description of Artificial Sequence: Synthetic coding sequence
  source 1..438: mol_type = other DNA

SEQ ID NO: 20930 - DNA, 438 bp, synthetic construct; identical to SEQ ID NO: 20925
  misc_feature 1..438: note = Description of Artificial Sequence: Synthetic coding sequence
  source 1..438: mol_type = other DNA

SEQ ID NO: 20931 - DNA, 1914 bp, synthetic construct
  misc_feature 1..1914: note = Description of Artificial Sequence: Synthetic coding sequence
  source 1..1914: mol_type = other DNA
atgcatgacagcatccgctttggaaatgtggacatgccctgtgtgcaggcccagtacagccccagccccccaggcagcagctatgctgcccagacctacagcagcgagtacaccacagagatcatgaacccagactacaccaagctgaccatggacctgggcagcacagagatcacagccacagccaccaccagcctgcccagcatcagcacctttgtggagggctacagcagcaactatgagctgaagcccagctgtgtgtaccagatgcagaggcccctcatcaaggtggaggagggccgggcccccagctaccaccaccaccaccaccaccaccaccaccaccaccaccaccaccagcagcagcaccagcagcccagcatccccccagccagcagcccagaagatgaggtgctgcccagcacctccatgtacttcaagcagagcccccccagcacccccaccaccccagccttccccccccaggccggggccctgtgggatgaggccctgcccagcgcccctggctgcatcgcccctggccccctgctggacccccccatgaaggctgtgcccaccgtggccggggcccgcttccccctcttccacttcaagcccagccccccccaccccccagcccccagccctgctgggggccaccacctgggctatgaccccacagctgctgctgccctgagcctgcccctgggcgctgctgctgctgctggcagccaggccgccgccctggagagccacccctacggcctgcccctggccaagagagctgcccccctggccttcccccccctgggcctgacccccagccccacagccagcagcctgctgggggagagccccagcctgcccagcccccccagccgcagcagcagcagcggggagggcacctgtgctgtgtgtggggacaatgctgcctgccagcactatggagtgaggacctgtgagggctgcaagggcttcttcaagaggacagtgcagaagaatgccaagtatgtgtgcctggccaacaagaactgccctgtggacaagagaagaagaaaccgctgccagtactgccgcttccagaagtgcctgtctgtgggcatggtgaaggaggtggtgaggacagacagcctgaagggcagaagaggccgcctgcccagcaagcccaagagccccctgcagcaggagcccagccagcccagcccccccagcccccccatctgcatgatgaatgccctggtgcgggccctgacagacagcaccccccgggacctggactacagccgctactgccccacagaccaggccgccgccggcacagatgctgagcacgtgcagcagttctacaacctgctgacagccagcattgatgtgagccgctcctgggccgagaagatccctggcttcacagacctgcccaaggaggaccagaccctgctgattgaaagtgccttcctggagctgtttgtgctgcggctgagcatccgcagcaacacagctgaggacaagtttgtgttctgcaatggcctggtgctgcaccggctgcagtgcctgcggggctttggagagtggctggacagcatcaaggacttcagcctgaacctgcagagcctgaacctggacatccaggccctggcctgcctgagcgccctgtccatgatcacagagcggcacggcctgaaggagcccaagagggtggaggagctgtgcaacaagatcaccagcagcctgaaggaccaccagagcaagggccaggccctggagcccacagagagcaaggtgctgggcgccctggtggagctgaggaagatctgcaccctgggcctgcagaggatcttctacctgaagctggaggacctggtgtccccacccagcatcatcgacaagctgttcctggacaccctgcccttctag

SEQ ID NO: 20932 - DNA, 1332 bp, synthetic construct
  misc_feature 1..1332: note = Description of Artificial Sequence: Synthetic coding sequence
  source 1..1332: mol_type = other DNA
atgccctgtgtgcaggcccagtacagccccagccccccaggcagcagctatgctgcccagacctacagcagcgagtacaccacagagatcatgaacccagactacaccaagctgaccatggacctgggcagcacagagatcacagccacagccaccaccagcctgcccagcatcagcacctttgtggagggctacagcagcaactatgagctgaagcccagctgtgtgtaccagatgcagaggcccctcatcaaggtggaggagggccgggcccccagctaccaccaccaccaccaccaccaccaccaccaccaccaccaccaccagcagcagcaccagcagcccagcatccccccagccagcagcccagaagatgaggtgctgcccagcacctccatgtacttcaagcagagcccccccagcacccccaccaccccagccttccccccccaggccggggccctgtgggatgaggccctgcccagcgcccctggctgcatcgcccctggccccctgctggacccccccatgaaggctgtgcccaccgtggccggggcccgcttccccctcttccacttcaagcccagccccccccaccccccagcccccagccctgctgggggccaccacctgggctatgaccccacagctgctgctgccctgagcctgcccctgggcgctgctgctgctgctggcagccaggccgccgccctggagagccacccctacggcctgcccctggccaagagagctgcccccctggccttcccccccctgggcctgacccccagccccacagccagcagcctgctgggggagagccccagcctgcccagcccccccagccgcagcagcagcagtggagagggcacctgtgctgtgtgtggggacaatgctgcctgccagcactacggcgtgaggacctgtgagggctgcaagggcttcttcaagaggacagtgcagaagaatgccaagtatgtgtgcctggccaacaagaactgccctgtggacaagagaagaagaaaccgctgccagtactgccgcttccagaagtgcctgtctgtgggcatggtgaaggaggtggtgaggacagacagcctgaagggccggcggggccgcctgcccagcaagcccaagagccccctgcagcaggagcccagccagcccagcccccccagcccccccatctgcatgatgaatgccctggtgcgggccctgacagacagcaccccccgggacctggactacagccgggtgtccttcatgatcagctgcttccagatgaatgaccagggcctgtacctgtggctgctggtgatccgggtggactag

SEQ ID NO: 20933 - DNA, 894 bp, synthetic construct
  misc_feature 1..894: note = Description of Artificial Sequence: Synthetic coding sequence
  source 1..894: mol_type = other DNA
atgaaggctgtgcccaccgtggccggggcccgcttccccctcttccacttcaagcccagccccccccaccccccagcccccagccctgctgggggccaccacctgggctatgaccccacagctgctgctgccctgagcctgcccctgggcgctgctgctgctgctggcagccaggccgccgccctggagagccacccctacggcctgcccctggccaagagagctgcccccctggccttcccccccctgggcctgacccccagccccacagccagcagcctgctgggggagagccccagcctgcccagcccccccagccgcagcagcagcagtggagagggcacctgtgctgtgtgtggggacaatgctgcctgccagcactacggcgtgaggacctgtgagggctgcaagggcttcttcaagaggacagtgcagaagaatgccaagtatgtgtgcctggccaacaagaactgccctgtggacaagagaagaagaaaccgctgccagtactgccgcttccagaagtgcctgtctgtgggcatggtgaaggaggtggtgaggacagacagcctgaagggccggcggggccgcctgcccagcaagcccaagagccccctgcagcaggagcccagccagcccagcccccccagcccccccatctgcatgatgaatgccctggtgcgggccctgacagacagcaccccccgggacctggactacagccgggtgtccttcatgatcagctgcttccagatgaatgaccagggcctgtacctgtggctgctggtgatccgggtgctggacagcttccacaccttcagcatcttcctggccagcttcagcaacagcgtgcaccccctgcagcagatcatctttgccctgctgaacctgtag

SEQ ID NO: 20934 - DNA, 1881 bp, synthetic construct
  misc_feature 1..1881: note = Description of Artificial Sequence: Synthetic coding sequence
  source 1..1881: mol_type = other DNA
atgccctgtgtgcaggcccagtacagccccagccccccaggcagcagctatgctgcccagacctacagcagcgagtacaccacagagatcatgaacccagactacaccaagctgaccatggacctgggcagcacagagatcacagccacagccaccaccagcctgcccagcatcagcacctttgtggagggctacagcagcaactatgagctgaagcccagctgtgtgtaccagatgcagaggcccctcatcaaggtggaggagggccgggcccccagctaccaccaccaccaccaccaccaccaccaccaccaccaccaccaccagcagcagcaccagcagcccagcatccccccagccagcagcccagaagatgaggtgctgcccagcacctccatgtacttcaagcagagcccccccagcacccccaccaccccagccttccccccccaggccggggccctgtgggatgaggccctgcccagcgcccctggctgcatcgcccctggccccctgctggacccccccatgaaggctgtgcccaccgtggccggggcccgcttccccctcttccacttcaagcccagccccccccaccccccagcccccagccctgctgggggccaccacctgggctatgaccccacagctgctgctgccctgagcctgcccctgggcgctgctgctgctgctggcagccaggccgccgccctggagagccacccctacggcctgcccctggccaagagagctgcccccctggccttcccccccctgggcctgacccccagccccacagccagcagcctgctgggggagagccccagcctgcccagcccccccagccgcagcagcagcagtggagagggcacctgtgctgtgtgtggggacaatgctgcctgccagcactacggcgtgaggacctgtgagggctgcaagggcttcttcaagaggacagtgcagaagaatgccaagtatgtgtgcctggccaacaagaactgccctgtggacaagagaagaagaaaccgctgccagtactgccgcttccagaagtgcctgtctgtgggcatggtgaaggaggtggtgaggacagacagcctgaagggccggcggggccgcctgcccagcaagcccaagagccccctgcagcaggagcccagccagcccagcccccccagcccccccatctgcatgatgaatgccctggtgcgggccctgacagacagcaccccccgggacctggactacagccgctactgccccacagaccaggccgctgctggaacagatgctgagcacgtgcagcagttctacaacctgctgacagccagcattgatgtgagccgctcctgggccgagaagatccctggcttcacagacctgcccaaggaggaccagaccctgctgattgagagcgccttcctggagctgtttgtgctgcggctgagcatccgcagcaacacagctgaggacaagtttgtgttctgcaatggcctggtgctgcaccggctgcagtgcctgcggggctttggagagtggctggacagcatcaaggacttcagcctgaacctgcagagcctgaacctggacatccaggccctggcctgcctgagcgccctgtccatgatcacagaaagacatggcctgaaggagcccaagagggtggaggagctgtgcaacaagatcaccagcagcctgaaggaccaccagagcaagggccaggccctggagcccacagagagcaaggtgctgggcgccctggtggagctgaggaagatctgcaccctgggcctgcagaggatcttctacctgaagctggaggacctggtgagcccccccagcatcatcgacaagctgttcctggacaccctgcccttctag

SEQ ID NO: 20935 - DNA, 627 bp, synthetic construct
  misc_feature 1..627: note = Description of Artificial Sequence: Synthetic coding sequence
  source 1..627: mol_type = other DNA
atgggaaatgcccaggagcggcccagcgagaccatcgaccgggagaggaagaggctggtggagaccctgcaggccgacagcggcctgctgctggatgccctgctggcccggggcgtgctgactggaccagaatatgaggccctggatgccctgcctgatgctgagcggcgggtgcggcggctgctgctgctggtgcagggcaagggggaggccgcctgccaggagctgctgcgctgtgcccagaggacagctggggccccagaccctgcctgggactggcagcacgtgggccctggctacagagacaggagctatgaccccccctgccccggccactggaccccagaggcccctggcagcggcaccacctgccccggcctgccccgggccagtgaccctgatgaggccggcggccctgagggcagcgaggccgtgcagagcggcaccccagaggagcctgagcctgagctggaggccgaggccagcaaggaggccgagcctgagcctgagcctgagcctgagctggagcctgaggccgaggccgagcctgagcctgagctggagcctgagccagaccctgagcctgagccagactttgaggagagagatgaaagtgaggacagctag

SEQ ID NO: 20936 - DNA, 627 bp, synthetic construct; identical to SEQ ID NO: 20935
  misc_feature 1..627: note = Description of Artificial Sequence: Synthetic coding sequence
  source 1..627: mol_type = other DNA

SEQ ID NO: 20937 - DNA, 2133 bp, synthetic construct
  misc_feature 1..2133: note = Description of Artificial Sequence: Synthetic coding sequence
  source 1..2133: mol_type = other DNA
atggtgaagctggccaaggccggcaagaaccagggcgaccccaagaagatggcccccccacccaaggaggtggaggaggacagtgaagatgaggagatgtctgaagatgaggaggatgacagcagcggggaggaggtggtgatcccccagaagaagggcaagaaggctgctgccaccagcgccaagaaggtggtggtgagccccaccaagaaggtggccgtggccaccccagccaagaaggctgctgtgaccccaggcaagaaggccgccgccaccccagccaagaagacagtgaccccagccaaggctgtgaccaccccaggcaagaagggggccacccctgggaaggccctggtggccacccctgggaagaagggagctgccatcccagccaagggggccaagaatggcaagaatgccaagaaggaggacagtgatgaggaggaggatgatgattctgaagaagatgaggaggatgatgaagatgaagatgaagatgaagatgaaattgagcctgctgccatgaaggctgctgctgctgccccagcctctgaagatgaagatgatgaagatgatgaagatgatgaagatgatgatgatgatgaagaagatgacagcgaggaggaggccatggagaccaccccagccaagggcaagaaggccgccaaggtggtgcctgtgaaggccaagaatgtggccgaggatgaagatgaggaggaggatgatgaagatgaagatgatgatgatgatgaagatgatgaagatgatgatgatgaagatgatgaggaggaggaggaggaggaggaggaggagcctgtgaaggaggcccctgggaagaggaagaaggagatggccaagcagaaggccgcccctgaggccaagaagcagaaggtggagggcacagagcccaccacagccttcaacctgtttgtgggcaacctgaacttcaacaagagcgcccctgagctgaagacaggcatcagtgatgtgtttgccaagaatgacctggccgtggtggatgtgagaattggcatgaccaggaagtttggctacgtggactttgagagcgctgaggacctggagaaggccctggagctgaccggcctgaaggtgtttggaaatgagatcaagctggagaagcccaagggcaaggacagcaagaaggagagagatgcccggaccctgctggccaagaacctgccctacaaggtgacccaggatgagctgaaggaggtgtttgaagatgctgctgagatccggctggtgtccaaggatggcaagagcaaaggaattgcctacatcgagttcaagacagaagcagatgctgagaagacctttgaggagaagcagggcacagaaattgatggccgcagcatcagcctgtactacaccggggagaagggccagaaccaggactacagaggaggcaagaacagcacctggagcggggagagcaagaccctggtgctgagcaacctgagctacagcgccacagaggagaccctgcaggaggtgtttgagaaggccaccttcatcaaggtgccccagaaccagaatggcaagagcaagggctacgccttcatcgagtttgccagctttgaagatgccaaggaggccctgaacagctgcaacaagcgggagattgagggccgggccatccggctggagctgcagggcccccggggcagccccaatgcccggagccagcccagcaagaccctgtttgtgaagggcctgtctgaggacaccacagaggagaccctgaaggagagctttgatggctctgtgcgggcccgcatcgtgacagaccgggagaccggcagcagcaagggcttcggctttgtggacttcaacagtgaagaagatgccaaggccgccaaggaggccatggaggatggagaaattgatggcaacaaggtgaccctggactgggccaagcccaagggggagggcggctttggaggccggggcggcggccggggcggctttggaggccggggcggcggccggggcggccggggcggctttggaggccggggccggggcggctttggaggccggggcggcttccggggcggccggggcggcggcggggaccacaagccccagggcaagaagaccaagtttgaatag

SEQ ID NO: 20938 - DNA, 1449 bp, synthetic construct
  misc_feature 1..1449: note = Description of Artificial Sequence: Synthetic coding sequence
  source 1..1449: mol_type = other DNA
atggtgaagctggccaaggccggcaagaaccagggcgaccccaagaagatggcccccccacccaaggaggtggaggaggacagtgaagatgaggagatgtctgaagatgaggaggatgacagcagcggggaggaggtggtgatcccccagaagaagggcaagaaggctgctgccaccagcgccaagaaggtggtggtgagccccaccaagaaggtggccgtggccaccccagccaagaaggctgctgtgaccccaggcaagaaggccgccgccaccccagccaagaagacagtgaccccagccaaggctgtgaccaccccaggcaagaagggggccacccctgggaaggccctggtggccacccctgggaagaagggagctgccatcccagccaagggggccaagaatggcaagaatgccaagaaggaggacagtgatgaggaggaggatgatgattctgaagaagatgaggaggatgatgaagatgaagatgaagatgaagatgaaattgagcctgctgccatgaaggctgctgctgctgccccagcctctgaagatgaagatgatgaagatgatgaagatgatgaagatggcaagagcaaaggaattgcctacatcgagttcaagacagaagcagatgctgagaagacctttgaggagaagcagggcacagaaattgatggccgcagcatcagcctgtactacaccggggagaagggccagaaccaggactacagaggaggcaagaacagcacctggagcggggagagcaagaccctggtgctgagcaacctgagctacagcgccacagaggagaccctgcaggaggtgtttgagaaggccaccttcatcaaggtgccccagaaccagaatggcaagagcaagggctacgccttcatcgagtttgccagctttgaagatgccaaggaggccctgaacagctgcaacaagcgggagattgagggccgggccatccggctggagctgcagggcccccggggcagccccaatgcccggagccagcccagcaagaccctgtttgtgaagggcctgtctgaggacaccacagaggagaccctgaaggagagctttgatggctctgtgcgggcccgcatcgtgacagaccgggagaccggcagcagcaagggcttcggctttgtggacttcaacagtgaagaagatgccaaggccgccaaggaggccatggaggatggagaaattgatggcaacaaggtgaccctggactgggccaagcccaagggggagggcggctttggaggccggggcggcggccggggcggctttggaggccggggcggcggccggggcggccggggcggctttggaggccggggccggggcggctttggaggccggggcggcttccggggcggccggggcggcggcggggaccacaagccccagggcaagaagaccaagtttgaatag

SEQ ID NO: 20939 - DNA, 1809 bp, synthetic construct
  misc_feature 1..1809: note = Description of Artificial Sequence: Synthetic coding sequence
  source 1..1809: mol_type = other DNA
atggtgaagctggccaaggccggcaagaaccagggcgaccccaagaagatggcccccccacccaaggaggtggaggaggacagtgaagatgaggagatgtctgaagatgaggaggatgacagcagcggggaggagctgaatgatgacttctaccagaccaccatgcacaccctgtggaagaagggcaagaaggccgccgccaccagcgccatcccagccaagggggccaagaatggcaagaatgccaagaaggaggacagtgatgaggaggaggatgatgattctgaagaagatgaggaggatgatgaagatgaagatgaagatgaagatgaaattgagcctgctgccatgaaggctgctgctgctgccccagcctctgaagatgaagatgatgaagatgatgaagatgatgaagatgatgatgatgatgaagaagatgatgatgatgatgaagatgatgaggaggaggaggaggaggaggaggaggagcctgtgaaggaggcccctgggaagaggaagaaggagatggccaagcagaaggccgcccctgaggccaagaagcagaaggtggagggcacagagcccaccacagccttcaacctgtttgtgggcaacctgaacttcaacaagagcgcccctgagctgaagacaggcatcagtgatgtgtttgccaagaatgacctggccgtggtggatgtgagaattggcatgaccaggaagtttggctacgtggactttgagagcgctgaggacctggagaaggccctggagctgaccggcctgaaggtgtttggaaatgagatcaagctggagaagcccaagggcaaggacagcaagaaggagagagatgcccggaccctgctggccaagaacctgccctacaaggtgacccaggatgagctgaaggaggtgtttgaagatgctgctgagatccggctggtgtccaaggatggcaagagcaaaggaattgcctacatcgagttcaagacagaagcagatgctgagaagacctttgaggagaagcagggcacagaaattgatggccgcagcatcagcctgtactacaccggggagaagggccagaaccaggactacagaggaggcaagaacagcacctggagcggggagagcaagaccctggtgctgagcaacctgagctacagcgccacagaggagaccctgcaggaggtgtttgagaaggccaccttcatcaaggtgccccagaaccagaatggcaagagcaagggctacgccttcatcgagtttgccagctttgaagatgccaaggaggccctgaacagctgcaacaagcgggagattgagggccgggccatccggctggagctgcagggcccccggggcagccccaatgcccggagccagcccagcaagaccctgtttgtgaagggcctgtctgaggacaccacagaggagaccctgaaggagagctttgatggctctgtgcgggcccgcatcgtgacagaccgggagaccggcagcagcaagggcttcggctttgtggacttcaacagtgaagaagatgccaaggccgccaaggaggccatggaggatggagaaattgatggcaacaaggtgaccctggactgggccaagcccaagggggagggcggctttggaggccggggcggcggccggggcggctttggaggccggggcggcggccggggcggccggggcggctttggaggccggggccggggcggctttggaggccggggcggcttccggggcggccggggcggcggcggggaccacaagccccagggcaagaagaccaagtttgaatag

SEQ ID NO: 20940 - DNA, 885 bp, synthetic construct
  misc_feature 1..885: note = Description of Artificial Sequence: Synthetic coding sequence
  source 1..885: mol_type = other DNA
atggaggacagcatggacatggacatgagccccctgcggccccagaactacctgtttggctgtgagctgaaggctgacaaggactaccacttcaaggtggacaatgatgaaaatgagcaccagctgagcctgaggacagtgtccctgggcgctggggccaaggatgagctgcacatcgtggaggccgaggccatgaactatgagggcagccccatcaaggtgaccctggccaccctgaagatgtctgtgcagcccaccgtgtccctgggcggctttgagatcaccccacctgtggtgctgcggctgaagtgtggcagcggccctgtgcacatcagcggccagcacctggtggccgtggaggaggatgctgagagtgaagatgaggaggaggaggatgtgaagctgctgagcatcagcggcaagaggtctgcccctgggggcggcagcaaggtgccccagaagaaggtgaagctggccgcagatgaagatgatgatgatgatgatgaggaggatgatgatgaagatgatgatgatgatgactttgatgatgaggaggccgaggagaaggcccctgtgaagaagagcatccgggacaccccagccaagaatgcccagaagagcaaccagaatggcaaggacagcaagcccagcagcacccccaggagcaagggccaggagagcttcaagaagcaggagaagacccccaagacccccaagggccccagctctgtggaggacatcaaggccaagatgcaggccagcattgaaaaaggaggcagcctgcccaaggtggaggccaagttcatcaactacgtgaagaactgcttcaggatgacagaccaggaggccatccaggacctgtggcagtggaggaagagcctgtag

SEQ ID NO: 20941 - DNA, 798 bp, synthetic construct
  misc_feature 1..798: note = Description of Artificial Sequence: Synthetic coding sequence
  source 1..798: mol_type = other DNA
atggaggacagcatggacatggacatgagccccctgcggccccagaactacctgtttggctgtgagctgaaggctgacaaggactaccacttcaaggtggacaatgatgaaaatgagcaccagctgagcctgaggacagtgtccctgggcgctggggccaaggatgagctgcacatcgtggaggccgaggccatgaactatgagggcagccccatcaaggtgaccctggccaccctgaagatgtctgtgcagcccaccgtgtccctgggcggctttgagatcaccccacctgtggtgctgcggctgaagtgtggcagcggccctgtgcacatcagcggccagcacctggtggccgtggaggaggatgctgagagtgaagatgaggaggaggaggatgtgaagctgctgagcatcagcggcaagaggtctgcccctgggggcggcagcaaggtgccccagaagaaggtgaagctggccgcagatgaagatgatgatgatgatgatgaggaggatgatgatgaagatgatgatgatgatgactttgatgatgaggaggccgaggagaaggcccctgtgaagaagggccaggagagcttcaagaagcaggagaagacccccaagacccccaagggccccagctctgtggaggacatcaaggccaagatgcaggccagcattgagaagggcggcagcctgcccaaggtggaggccaagttcatcaactacgtgaagaactgcttcaggatgacagaccaggaggccatccaggacctgtggcagtggaggaagagcctgtag

SEQ ID NO: 20942 - DNA, 780 bp, synthetic construct
  misc_feature 1..780: note = Description of Artificial Sequence: Synthetic coding sequence
  source 1..780: mol_type = other DNA
atggaggacagcatggacatggacatgagccccctgcggccccagaactacctgtttggctgtgagctgaaggctgacaaggactaccacttcaaggtggacaatgatgaaaatgagcaccagctgagcctgaggacagtgtccctgggcgctggggccaaggatgagctgcacatcgtggaggccgaggccatgaactatgagggcagccccatcaaggtgaccctggccaccctgaagatgtctgtgcagcccaccgtgtccctgggcggctttgagatcaccccacctgtggtgctgcggctgaagtgtggcagcggccctgtgcacatcagcggccagcacctggtggccgtggaggaggatgctgagagtgaagatgaggaggaggaggatgtgaagctgctgagcatcagcggcaagaggtctgcccctgggggcggcagcaaggtgccccagaagaaggtgaagctggccgcagatgaagatgatgatgatgatgatgaggaggatgatgatgaagatgatgatgatgatgactttgatgatgaggaggccgaggagaaggcccctgtgaagaagagcatccgggacaccccagccaagaatgcccagaagagcaaccagaatggcaaggacagcaagcccagcagcacccccaggagcaagggccaggagagcttcaagaagcaggagaagacccccaagacccccaagggccccagctctgtggaggacatcaaggccaagatgcaggccagcattgagaaggcccactag

SEQ ID NO: 20943 - DNA, 885 bp, synthetic construct; identical to SEQ ID NO: 20940
  misc_feature 1..885: note = Description of Artificial Sequence: Synthetic coding sequence
  source 1..885: mol_type = other DNA

SEQ ID NO: 20944 - DNA, 867 bp, synthetic construct
  misc_feature 1..867: note = Description of Artificial Sequence: Synthetic coding sequence
  source 1..867: mol_type = other DNA
atgaaggacaggacccaggagctgaggacagccaaggacagtgatgatgatgatgatgtggccgtgacagtggaccgggaccgcttcatggatgagttctttgagcaggtggaggagatccggggcttcatcgacaagattgctgaaaatgtggaggaggtgaagaggaagcacagcgccatcctggccagccccaacccagatgagaagaccaaggaggagctggaggagctgatgtctgacatcaagaagacagccaacaaggtgcgcagcaagctgaagagcattgagcagagcattgagcaggaggagggcctgaacagaagcagcgctgacctgcgcatcaggaagacccagcacagcaccctgagcaggaagtttgtggaggtgatgtctgagtacaatgccacccagagcgactaccgggagcgctgcaagggccgcatccagaggcagctggagatcaccggccgcaccaccaccagcgaggagctggaggacatgctggagagcggcaacccagccatctttgccagcggcatcatcatggacagcagcatcagcaagcaggccctgtctgaaattgagaccaggcacagcgagatcatcaagctggagaacagcatccgggagctgcatgacatgttcatggacatggccatgctggtggagagccagggcgagatgattgacagaattgagtacaacgtggagcacgctgtggactatgtggagagagctgtgtctgacaccaagaaggctgtgaagtaccagagcaaggcccggaggaagaagatcatgatcatcatctgctgcgtcatcctgggcatcgtgattgccagcacagtgggcggcatctttgcctag

SEQ ID NO: 20945 - DNA, 183 bp, synthetic construct
  misc_feature 1..183: note = Description of Artificial Sequence: Synthetic coding sequence
  source 1..183: mol_type = other DNA
atggaggagcagggccacagcgagatggagatcatccccagcgagagccacccccacatccagctgctgaagagcaaccgggagctgctggtgacccacatccggaacacccagtgcctggtggacaacctgctgaagaatgactacttcagcgcagaagatgctgagatcgtgtgtgcctag

SEQ ID NO: 20946 - DNA, 183 bp, synthetic construct; identical to SEQ ID NO: 20945
  misc_feature 1..183: note = Description of Artificial Sequence: Synthetic coding sequence
  source 1..183: mol_type = other DNA

SEQ ID NO: 20947 - DNA, 138 bp, synthetic construct
  misc_feature 1..138: note = Description of Artificial Sequence: Synthetic coding sequence
  source 1..138: mol_type = other DNA
atggaggagcagggccacagcgagatggagatcatccccagcgagagccacccccacatccagctgctgaagagcaaccgggagctgctggtgacccacatccggaacacccagtgcctggtggacaacctgctgtag

SEQ ID NO: 20948 - DNA, 183 bp, synthetic construct; identical to SEQ ID NO: 20945
  misc_feature 1..183: note = Description of Artificial Sequence: Synthetic coding sequence
  source 1..183: mol_type = other DNA

SEQ ID NO: 20949 - DNA, 750 bp, synthetic construct
  misc_feature 1..750: note = Description of Artificial Sequence: Synthetic coding sequence
  source 1..750: mol_type = other DNA
atggaggagcagggccacagcgagatggagatcatccccagcgagagccacccccacatccagctgctgaagagcaaccgggagctgctggtgacccacatccggaacacccagtgcctggtggacaacctgctgaagaatgactacttcagcgcagaagatgctgagatcgtgtgtgcctgccccacccagcctgacaaggtgaggaagatcctggacctggtgcagagcaagggggaggaggtgtctgagttcttcctgtacctgctgcagcagctggctgatgcctacgtggacctgcggccctggctgctggagatcggcttcagccccagcctgctgacccagagcaaggtggtggtgaacacagatcctgtgagccgctacacccagcagctgcggcaccacctgggccgggacagcaagtttgtgctgtgctacgcccagaaggaggagctgctgctggaggagatctacatggacaccatcatggagctggtgggcttcagcaatgaaagcctgggcagcctgaacagcctggcctgcctgctggaccacaccaccggcatcctgaatgagcaggccgccagcaggaaggtgacaggctgtgtgtgcaggacctgcagcagcagcaccacagccacccagagcggcaccccccggcgctgcctgcccagctgctgtgccagccccacctggcccagcagccccagcatggcctggaccagctgcaccaggacctggacctag

SEQ ID NO: 20950 - DNA, 2340 bp, synthetic construct
  misc_feature 1..2340: note = Description of Artificial Sequence: Synthetic coding sequence
  source 1..2340: mol_type = other DNA
atggaggagcagggccacagcgagatggagatcatccccagcgagagccacccccacatccagctgctgaagagcaaccgggagctgctggtgacccacatccggaacacccagtgcctggtggacaacctgctgaagaatgactacttcagcgcagaagatgctgagatcgtgtgtgcctgccccacccagcctgacaaggtgaggaagatcctggacctggtgcagagcaagggggaggaggtgtctgagttcttcctgtacctgctgcagcagctggctgatgcctacgtggacctgcggccctggctgctggagatcggcttcagccccagcctgctgacccagagcaaggtggtggtgaacacagatcctgtgagccgctacacccagcagctgcggcaccacctgggccgggacagcaagtttgtgctgtgctacgcccagaaggaggagctgctgctggaggagatctacatggacaccatcatggagctggtgggcttcagcaatgaaagcctgggcagcctgaacagcctggcctgcctgctggaccacaccaccggcatcctgaatgagcagggcgagaccatcttcatcctgggagatgctggggtgggcaagtccatgctgctgcagaggctgcagagcctgtgggccaccggccgcctggatgctggggtgaagttcttcttccacttccgctgcaggatgttcagctgcttcaaggagagtgaccggctgtgcctgcaggacctgctcttcaagcactactgctacccagagcgggaccctgaggaggtgtttgccttcctgctgcgcttcccccacgtggccctcttcacctttgatggcctggatgagctgcacagcgacctggacctgagccgggtgcctgacagcagctgcccctgggagcccgcccaccccctggtgctgctggccaacctgctgagcggcaagctgctgaagggggccagcaagctgctgacagccaggacaggcatcgaggtgccccggcagttcctgaggaagaaggtgctgctgcggggcttcagccccagccacctgcgggcctatgcccggaggatgtttcctgagcgggccctgcaggaccggctgctgagccagctggaggccaaccccaacctgtgcagcctgtgcagcgtgcccctcttctgctggatcatcttccgctgcttccagcacttccgggccgcctttgagggcagcccccagctgcctgactgcaccatgaccctgacagatgtgttcctgctggtgacagaggtgcacctgaacaggatgcagcccagcagcctggtgcagaggaacaccaggagccctgtggagaccctgcatgctggccgggacaccctgtgcagcctgggccaggtggcccaccggggcatggagaagagcctgtttgtgttcacccaggaggaggtgcaggccagcggcctgcaggagcgggacatgcagctgggcttcctgcgggccctgcctgagctgggccctggaggagaccagcagagctatgagttcttccacctgaccctgcaggccttcttcaccgccttcttcctggtgctggatgacagagtgggcacccaggagctgctgcgcttcttccaggagtggatgcctcctgctggagctgccaccaccagctgctacccacccttcctgcccttccagtgcctgcagggcagcggccctgcccgggaggacctcttcaagaacaaggaccacttccagttcaccaacctcttcctgtgtggcctgctgagcaaggccaagcagaagctgctgcggcacctggtgcctgctgctgccctgcggaggaagaggaaggccctgtgggcccacctgttcagcagcctgcggggctacctgaagagcctgccccgggtgcaggtggagagcttcaaccaggtgcaggccatgcccaccttcatctggatgctgcgctgcatctatgagacccagagccagaaggtgggccagctggccgcccggggcatctgtgccaactacctgaagctgacctactgcaatgcctgcagcgctgactgcagcgccctgagctttgtgctgcaccacttccccaagaggctggccctggacctggacaacaacaacctgaatgactatggagtgcgggagctgcagccctgcttcagccggctgactgtgctgcggctgtctgtgaaccagatcacagatggcggcgtgaaggtgctgtctgaggagctgaccaagtacaagatcgtgacctacctgggcctgtggaagtctgtggacaccatctgcttcaagaagcagggcctgctgaagtag

SEQ ID NO: 20951 - DNA, 495 bp, synthetic construct
  misc_feature 1..495: note = Description of Artificial Sequence: Synthetic coding sequence
  source 1..495: mol_type = other DNA
atgaagtgcaagcccaaccagaccaggacctatgaccctgagggcttcaagaagagagctgcctgcctgtgcttccgctctgagcgggaggatgaggtgctgctggtgagcagcagccgctacccagaccgctggatcgtgcctgggggcggcatggagcctgaggaggagcccggcggcgctgctgtgcgggaggtgtatgaggaggccggcgtgaagggcaagctgggccgcctgctgggcgtgtttgagcagaaccaggacaggaagcacaggacctacgtgtatgtgctgactgtgacagagctgctggaggactgggaggacagcgtgtccattggaaggaagcgggagtggttcaaggtggaggatgccatcaaggtgctgcagtgccacaagcctgtgcatgctgagtacctggagaagctgaagctgggcggcagccccaccaatggaaacagcatggcccccagcagcccagacagcgacccctag

SEQ ID NO: 20952 - DNA, 792 bp, synthetic construct
  misc_feature 1..792: note = Description of Artificial Sequence: Synthetic coding sequence
  source 1..792: mol_type = other DNA
atgagcctgtactgcggcatcgcctgcaggaggaagttcttctggtgctaccgcctgctgagcacctacgtgaccaagacccgctacctgtttgagctgaaggaggatgatgatgcctgcaagaaggcccagcagacaggagccttctacctgttccacagcctggcccccctgctgcagaccagcgcccaccagtacctggcccccaggcacagcctgctggagctggagcggctgctgggcaagtttggccaggatgcccagagaattgaagattctgtgctgattggctgcagcgagcagcaggaggcctggtttgccctggacctgggcctggacagcagcttcagcatcagcgccagcctgcacaagccagagatggagacagagctgaagggcagcttcatcgagctgaggaaggccctcttccagctgaatgccagagatgccagcctgctgagcacagcccaggccctgctgcgctggcatgatgcccaccagttctgcagccgcagcggccagcccaccaagaagaatgtggccggcagcaagagggtgtgccccagcaacaacatcatctactacccccagatccaggtgaacctgcgggagctggagacagctgcctggttcagccatgatgaggtggccacagccctgaagaggaagggcccctacacccagcagcagaatggcaccttccccttctggctgccccccaagctggccatcagccaccagctgatcaaggagtgggtggagaagcagacctgcagcagcctgcctgcctag

SEQ ID NO: 20953 - DNA, 1059 bp, synthetic construct
  misc_feature 1..1059: note = Description of Artificial Sequence: Synthetic coding sequence
  source 1..1059: mol_type = other DNA
atgagcctgtactgcggcatcgcctgcaggaggaagttcttctggtgctaccgcctgctgagcacctacgtgaccaagacccgctacctgtttgagctgaaggaggatgatgatgcctgcaagaaggcccagcagacaggagccttctacctgttccacagcctggcccccctgctgcagaccagcgcccaccagtacctggcccccaggcacagcctgctggagctggagcggctgctgggcaagtttggccaggatgcccagagaattgaagattctgtgctgattggctgcagcgagcagcaggaggcctggtttgccctggacctgggcctggacagcagcttcagcatcagcgccagcctgcacaagccagagatggagacagagctgaagggcagcttcatcgagctgaggaaggccctcttccagctgaatgccagagatgccagcctgctgagcacagcccaggccctgctgcgctggcatgatgcccaccagttctgcagccgcagcggccagcccaccaagaagaatgtggccggcagcaagagggtgtgccccagcaacaacatcatctactacccccagatggcccctgtggccatcaccctggtgtctgatggcacccgctgcctgctggcccggcagagcagcttccccaagggcatgtacagcgccctggccggcttctgtgacatcggggagagcgtggaggagaccatcagaagagaggtggccgaggaggtgggcctggaggtggagagcctgcagtactatgccagccagcactggcccttccccagcggcagcctgatgattgcctgccacgccaccgtgaagccaggccagacagagatccaggtgaacctgcgggagctggagacagctgcctggttcagccatgatgaggtggccacagccctgaagaggaagggcccctacacccagcagcagaatggcaccttccccttctggctgccccccaagctggccatcagccaccagctgatcaaggagtgggtggagaagcagacctgcagcagcctgcctgcctag

SEQ ID NO: 20954 - DNA, 708 bp, synthetic construct
  misc_feature 1..708: note = Description of Artificial Sequence: Synthetic coding sequence
  source 1..708: mol_type = other DNA
atgagcctgtactgcggcatcgcctgcaggaggaagttcttctggtgctaccgcctgctgagcacctacgtgaccaagacccgctacctgtttgagctgaaggaggatgatgatgcctgcaagaaggcccagcagacaggagccttctacctgttccacagcctggcccccctgctgcagaccagcgcccaccagtacctggcccccaggcacagcctgctggagctggagcggctgctgggcaagtttggccaggatgcccagagaattgaagattctgtgctgattggctgcagcgagcagcaggaggcctggtttgccctggacctgggcctggacagcagcttcagcatcagcgccagcctgcacaagccagagatggagacagagctgaagggcagcttcatcgagctgaggaaggccctcttccagctgaatgccagagatgccagcctgctgagcacagcccaggccctgctgcgctggcatgatgcccaccagttctgcagccgcagcggccagcccaccaagaagaatgtggccggcagcaagagggtgtgccccagcaacaacatcatctactacccccaggtgaaggtgtggaagaggccttctgctgagaagctgcagaagcgctgggactggcgctggaaggcctgcagcaccatgcaccccagcatcggccccagcctggtggcccacagctag

SEQ ID NO: 20955 - DNA, 468 bp, synthetic construct
  misc_feature 1..468: note = Description of Artificial Sequence: Synthetic coding sequence
  source 1..468: mol_type = other DNA
atggcccctgtggccatcaccctggtgtctgatggcacccgctgcctgctggcccggcagagcagcttccccaagggcatgtacagcgccctggccggcttctgtgacattggagagagcgtggaggagaccatccggcgggaggtggccgaggaggtgggcctggaggtggagagcctgcagtactatgccagccagcactggcccttccccagcggcagcctgatgattgcctgccacgccaccgtgaagccaggccagacagagatccaggtgaacctgcgggagctggagacagctgcctggttcagccatgatgaggtggccacagccctgaagaggaagggcccctacacccagcagcagaatggcaccttccccttctggctgccccccaagctggccatcagccaccagctgatcaaggagtgggtggagaagcagacctgcagcagcctgcctgcctag

SEQ ID NO: 20956 - DNA, 681 bp, synthetic construct
  misc_feature 1..681: note = Description of Artificial Sequence: Synthetic coding sequence
  source 1..681: mol_type = other DNA
atggagacagagctgaagggcagcttcatcgagctgaggaaggccctcttccagctgaatgccagagatgccagcctgctgagcacagcccaggccctgctgcgctggcatgatgcccaccagttctgcagccgcagcggccagcccaccaagaagaatgtggccggcagcaagagggtgtgccccagcaacaacatcatctactacccccagatggcccctgtggccatcaccctggtgtctgatggcacccgctgcctgctggcccggcagagcagcttccccaagggcatgtacagcgccctggccggcttctgtgacatcggggagagcgtggaggagaccatcagaagagaggtggccgaggaggtgggcctggaggtggagagcctgcagtactatgccagccagcactggcccttccccagcggcagcctgatgattgcctgccacgccaccgtgaagccaggccagacagagatccaggtgaacctgcgggagctggagacagctgcctggttcagccatgatgaggtggccacagccctgaagaggaagggcccctacacccagcagcagaatggcaccttccccttctggctgccccccaagctggccatcagccaccagctgatcaaggagtgggtggagaagcagacctgcagcagcctgcctgcctag

SEQ ID NO: 20957 - DNA, 717 bp, synthetic construct
  misc_feature 1..717: note = Description of Artificial Sequence: Synthetic coding sequence
  source 1..717: mol_type = other DNA
atgctgggccagcctgcccccctggagagatttgccagccggcggccccaggtgctggccgtgaggacagtgtgtgacctggtgctgggcaagatggacaaggactgtgagatgaagaggaccaccctggacagccccctgggcaagctggagctgagcggctgtgagcagggcctgcacgagatcaagctgctgggcaagggcaccagcgctgctgatgctgtggaggtgcctgccccagctgctgtgctgggcggccctgagcccctgatgcagtgcacagcctggctgaatgcctacttccaccagcctgaggccatcgaggagttccctgtgcctgccctgcaccaccctgtgttccagcaggagagcttcacccggcaggtgctgtggaagctgctgaaggtggtgaagtttggagaggtgatctcctaccagcagctggccgccctggccggcaaccccaaggccgcccgggctgtgggcggggccatgaggggcaaccctgtgcccatcctgatcccctgccaccgggtggtgtgcagcagtggagctgtgggcaactacagcggcggcctggccgtgaaggagtggctgctggcccacgagggccaccggctgggcaagccaggcctgggcggcagcagcggcctggccggggcctggctgaagggggccggggccaccagcggcagccccccagctggaagaaattag

SEQ ID NO: 20958 - DNA, 1569 bp, synthetic construct
  misc_feature 1..1569: note = Description of Artificial Sequence: Synthetic coding sequence
  source 1..1569: mol_type = other DNA
atgagcagccggcccctggagagccccccaccctacagaccagatgagttcaagcccaaccactacgcccccagcaatgacatctatggaggagagatgcacgtgcggcccatgctgagccagcctgcctacagcttctacccagaagatgagatcctgcacttctacaagtggaccagccccccaggagtcatccgcatcctgtccatgctgatcatcgtgatgtgcatcgccatctttgcctgtgtggccagcaccctggcctgggaccggggctacggcaccagcctgctgggcggctctgtgggctacccctacggcggcagcggcttcggcagctatggcagcggctacggctacggctacggctacggctacggctacggcggctacacagacccccgggccgccaagggcttcatgctggccatggccgccttctgcttcatcgccgccctggtgatctttgtgaccagcgtcatccgctctgagatgagcaggacccggcgctactacctgagcgtcatcatcgtgtctgccatcctgggcatcatggtgttcatcgccaccatcgtgtacatcatgggcgtgaaccccacagcccagagcagcggcagcctgtatggcagccagatctatgccctgtgcaaccagttctacaccccagctgccaccggcctgtatgtggaccagtacctgtaccactactgtgtggtggacccccaggaggccatcgccatcgtgctgggcttcatgatcatcgtggcctttgccctgatcatcttctttgctgtgaagaccaggaggaagatggacagatatgacaagagcaacatcctgtgggacaaggagcacatctatgatgagcagcccccaaatgtggaggagtgggtgaagaatgtgtctgctggcacccaggatgtgcccagccccccaagtgactatgtggagcgggtggacagccccatggcctacagcagcaatggcaaggtgaatgacaagcgcttctacccagagagcagctacaagagcacccctgtgcctgaggtggtgcaggagctgcccctgaccagccctgtggatgacttccggcagccccgctacagcagcggcggcaactttgagacccccagcaagagggccccagccaagggccgggccggccgcagcaagaggacagagcaggaccactatgaaacagactacaccaccggcggggagagctgtgatgagctggaggaggactggatccgggagtacccacccatcaccagtgaccagcagaggcagctgtacaagaggaactttgacaccggcctgcaggagtacaagagcctgcagagcgagctggatgagatcaacaaggagctgagccggctggacaaggagctggatgactaccgggaggagagcgaggagtacatggctgctgctgatgagtacaaccggctgaagcaggtgaagggcagcgctgactacaagagcaagaagaaccactgcaagcagctgaagagcaagctgagccacatcaagaagatggtgggggactatgaccggcagaagacctag

SEQ ID NO: 20959 - DNA, 1407 bp, synthetic construct
  misc_feature 1..1407: note = Description of Artificial Sequence: Synthetic coding sequence
  source 1..1407: mol_type = other DNA
atgagcagccggcccctggagagccccccaccctacagaccagatgagttcaagcccaaccactacgcccccagcaatgacatctatggaggagagatgcacgtgcggcccatgctgagccagcctgcctacagcttctacccagaagatgagatcctgcacttctacaagtggaccagccccccaggagtcatccgcatcctgtccatgctgatcatcgtgatgtgcatcgccatctttgcctgtgtggccagcaccctggcctgggaccggggctacggcaccagcctgctgggcggctctgtgggctacccctacggcggcagcggcttcggcagctatggcagcggctacggctacggctacggctacggctacggctacggcggctacacagacccccgggccgccaagggcttcatgctggccatggccgccttctgcttcatcgccgccctggtgatctttgtgaccagcgtcatccgctctgagatgagcaggacccggcgctactacctgagcgtcatcatcgtgtctgccatcctgggcatcatggtgttcatcgccaccatcgtgtacatcatgggcgtgaaccccacagcccagagcagcggcagcctgtatggcagccagatctatgccctgtgcaaccagttctacaccccagctgccaccggcctgtatgtggaccagtacctgtaccactactgtgtggtggacccccaggaggtgaagaatgtgtctgctggcacccaggatgtgcccagccccccaagtgactatgtggagcgggtggacagccccatggcctacagcagcaatggcaaggtgaatgacaagcgcttctacccagagagcagctacaagagcacccctgtgcctgaggtggtgcaggagctgcccctgaccagccctgtggatgacttccggcagccccgctacagcagcggcggcaactttgagacccccagcaagagggccccagccaagggccgggccggccgcagcaagaggacagagcaggaccactatgaaacagactacaccaccggcggggagagctgtgatgagctggaggaggactggatccgggagtacccacccatcaccagtgaccagcagaggcagctgtacaagaggaactttgacaccggcctgcaggagtacaagagcctgcagagcgagctggatgagatcaacaaggagctgagccggctggacaaggagctggatgactaccgggaggagagcgaggagtacatggctgctgctgatgagtacaaccggctgaagcaggtgaagggcagcgctgactacaagagcaagaagaaccactgcaagcagctgaagagcaagctgagccacatcaagaagatggtgggggactatgaccggcagaagacctag

SEQ ID NO: 20960 - DNA, 1569 bp, synthetic construct; identical to SEQ ID NO: 20958
  misc_feature 1..1569: note = Description of Artificial Sequence: Synthetic coding sequence
  source 1..1569: mol_type = other DNA

SEQ ID NO: 20961 - DNA, 816 bp, synthetic construct
  misc_feature 1..816: note = Description of Artificial Sequence: Synthetic coding sequence
  source 1..816: mol_type = other DNA
atgatcatcgtggcctttgccctgatcatcttctttgctgtgaagaccaggaggaagatggacagatatgacaagagcaacatcctgtgggacaaggagcacatctatgatgagcagccccccaacgtggaggagtgggtgaagaatgtgtctgctggcacccaggatgtgcccagcccccccagcgactatgtggagcgggtggacagccccatggcctacagcagcaatggcaaggtgaatgacaagcgcttctacccagagagcagctacaagagcacccctgtgcctgaggtggtgcaggagctgcccctgaccagccctgtggatgacttccggcagccccgctacagcagcggcggcaactttgagacccccagcaagagggccccagccaagggccgggccggccgcagcaagaggacagagcaggaccactatgaaacagactacaccactggaggagagagctgtgatgagctggaggaggactggatccgggagtacccacccatcaccagtgaccagcagaggcagctgtacaagaggaactttgacaccggcctgcaggagtacaagagcctgcagagcgagctggatgagatcaacaaggagctgagccggctggacaaggagctggatgactaccgggaggagagcgaggagtacatggctgctgctgatgagtacaaccggctgaagcaggtgaagggcagcgctgactacaagagcaagaagaaccactgcaagcagctgaagagcaagctgagccacatcaagaagatggtgggggactatgaccggcagaagacctag

SEQ ID NO: 20962 - DNA, 603 bp, synthetic construct
  misc_feature 1..603: note = Description of Artificial Sequence: Synthetic coding sequence
  source 1..603: mol_type = other DNA
atggcctacagcagcaatggcaaggtgaatgacaagcgcttctacccagagagcagctacaagagcacccctgtgcctgaggtggtgcaggagctgcccctgaccagccctgtggatgacttccggcagccccgctacagcagcggcggcaactttgagacccccagcaagagggccccagccaagggccgggccggccgcagcaagaggacagagcaggaccactatgaaacagactacaccaccggcggggagagctgtgatgagctggaggaggactggatccgggagtacccacccatcaccagtgaccagcagaggcagctgtacaagaggaactttgacaccggcctgcaggagtacaagagcctgcagagcgagctggatgagatcaacaaggagctgagccggctggacaaggagctggatgactaccgggaggagagcgaggagtacatggctgctgctgatgagtacaaccggctgaagcaggtgaagggcagcgctgactacaagagcaagaagaaccactgcaagcagctgaagagcaagctgagccacatcaagaagatggtgggggactatgaccggcagaagacctag

SEQ ID NO: 20963 - DNA, 3114 bp, synthetic construct
  misc_feature 1..3114: note = Description of Artificial Sequence: Synthetic coding sequence
  source 1..3114: mol_type = other DNA
atgtggaggtgtggcggccggcagggcctgtgtgtgctgcggcggctgagcggcggccacgcccaccaccgggcctggcgctggaacagcaacagagcctgtgagcgggccctgcagtacaagctgggggacaagatccacggcttcaccgtgaaccaggtgacctctgtgcctgagctgttcctgacagctgtgaagctgacccatgatgacaccggggcccgctacctgcacctggcccgggaggacaccaacaacctcttctctgtgcagttccgcaccacccccatggacagcactggagtgccccacatcctggagcacacagtgctgtgtggcagccagaagtacccctgccgggaccccttcttcaagatgctgaacagaagcctgagcaccttcatgaatgccttcaccgccagtgactacaccctgtaccccttcagcacccagaaccccaaggacttccagaacctgctgtctgtgtacctggatgccaccttcttcccctgcctgcgggagctggacttctggcaggagggctggaggctggagcacgagaaccccagcgacccccagacccccctggtgttcaagggcgtggtgttcaatgagatgaagggggcctttgtgaacaatgaaagaatcttcagccagcacctgcagaaccggctgctgcctgaccacacctacagcgtggtgtctggaggagaccccctgtgcatccctgagctgacctgggagcagctgaagcagttccacgccacccactaccaccccagcaatgcccgcttcttcacctacggcaacttccccctggagcagcacctgaagcagatccacgaggaggccctgagcaagttccagaagattgagcccagcacagtggtgcctgcccagaccccctgggacaagccccgggagttccagatcacctgtggccctgacagctttgccacagaccccagcaagcagaccaccatctctgtgtccttcctgctgcctgacatcacagacacctttgaggccttcaccctgagcctgctgagcagcctgctgaccagcggccccaacagccccttctacaaggccctgattgagagcggcctgggcacagacttctccccagatgtgggctacaacggctacacccgggaggcctacttctctgtgggcctgcagggcattgctgagaaggacattgaaacagtgcgcagcctgattgacaggaccattgatgaggtggtggagaagggctttgaagatgacagaattgaggccctgctgcacaagattgagatccagatgaagcaccagagcaccagctttggcctgatgctgaccagctacatcgccagctgctggaaccatgatggagaccctgtggagctgctgaagctgggcaaccagctggccaagttccggcagtgcctgcaggagaaccccaagttcctgcaggagaaggtgaagcagtacttcaagaacaaccagcacaagctgaccctgtccatgaggccagatgacaagtaccacgagaagcaggcccaggtggaggccaccaagctgaagcagaaggtggaggccctgagccctggggaccggcagcagatctatgagaagggcctggagctgcggagccagcagagcaagccccaggatgccagctgcctgcctgccctgaaggtgtctgacatcgagcccaccatccctgtgacagagctggatgtggtgctgacagctggggacatccctgtgcagtactgtgcccagcccaccaacggcatggtgtacttccgggccttcagcagcctgaacaccctgcctgaggagctgcggccctacgtgcccctcttctgcagcgtgctgaccaagctgggctgcggcctgctggactaccgggagcaggcccagcagatcgagctgaagacaggaggcatgtctgccagcccccacgtgctgcctgatgacagccacatggacacctatgagcagggcgtgctcttcagcagcctgtgcctggacaggaacctgcctgacatgatgcagctgtggagcgagatcttcaacaacccctgctttgaggaggaggagcacttcaaggtgctggtgaagatgacagcccaggagctggccaacggcatcccagattctggccacctgtatgccagcatccgggccggccgcaccctgaccccagctggggacctgcaggagaccttcagcggcatggaccaggtgcggctgatgaagagaattgctgagatgacagacatcaagcccatcctgaggaagctgccccgcatcaagaagcacctgctgaatggagacaacatgcgctgcagcgtgaatgccaccccccagcagatgccccagacagagaaggctgtggaggacttcctgcggagcatcggccgcagcaagaaggagcggcggcctgtgcggccccacacagtggagaagcctgtgcccagcagcagtggaggagatgcccacgtgccccacggcagccaggtgatcaggaagctggtgatggagcccaccttcaagccctggcagatgaagacccacttcctgatgcccttccctgtgaactacgtgggggagtgcatcagaacagtgccctacacagatcctgaccacgccagcctgaagatcctggcccggctgatgacagccaagttcctgcacacagagatccgggagaagggcggggcctacggcggcggggccaagctgagccacaacggcatcttcaccctgtacagctacagagaccccaacaccatcgagaccctgcagagctttgggaaggctgtggactgggccaagagcggcaagttcacccagcaggacattgatgaggccaagctgagcgtcttcagcacagtggatgcccctgtggcccccagcgacaagggcatggaccacttcctgtatggcctgagtgatgagatgaagcaggcccaccgggagcagctgtttgctgtgtcccatgacaagctgctggccgtgtctgaccgctacctgggcaccgggaagagcacccacggcctggccatcctgggccctgagaaccccaagatcgccaaggaccccagctggatcatccagtag

SEQ ID NO: 20964 - DNA, 1107 bp, synthetic construct
  misc_feature 1..1107: note = Description of Artificial Sequence: Synthetic coding sequence
  source 1..1107: mol_type = other DNA
atgcagcccggcagcagccgctgtgaggaggagacccccagcctgctgtggggcctggaccctgtgttcctggcctttgccaagctgtacatccgggacatcctggacatgaaggagagccggcaggtgcctggggtcttcctgtacaacggccaccccatcaagcaggtggatgtgctgggcaccgtcatcggcgtgcgggagagagatgccttctacagctatggagtggatgacagcactggagtcatcaactgcatctgctggaagaagctgaacacagagagcgtgtctgctgcccccagcgctgcccgggagctgagcctgaccagccagctgaagaagctgcaggagaccatcgagcagaagaccaagattgagatcggggacaccatccgggtgcggggcagcatccgcacctaccgggaggagcgggagatccacgccaccacctactacaaggtggatgatcctgtgtggaacatccagatcgccaggatgctggagctgcccaccatctacaggaaggtgtatgaccagcccttccacagcagcgccctggagaaggaggaggccctgagcaaccctggggccctggacctgcccagcctgaccagcctgctgtctgagaaggccaaggagttcctgatggagaacagagtgcagagcttctaccagcaggagctggagatggtggagagcctgctgagcctggccaaccagcccgtcatccacagcgccagcagtgaccaggtgaacttcaagaaggacaccaccagcaaggccatccacagcatcttcaagaatgccatccagctgctgcaggagaagggcctggtgttccagaaggatgatggctttgacaacctgtactacgtgacccgggaggacaaggacctgcacaggaagatccaccgcatcatccagcaggactgccagaagcccaaccacatggagaagggctgccacttcctgcacatcctggcctgtgcccggctgagcatccggcccggcctgtctgaggccgtgctgcagcaggtgctggagctgctggaggaccagagcgacatcgtgtccaccatggagcactactacacagccttctag

SEQ ID NO: 20965 - DNA, 1038 bp, synthetic construct
  misc_feature 1..1038: note = Description of Artificial Sequence: Synthetic coding sequence
  source 1..1038: mol_type = other DNA
atgggcgtgtgtggctacctgttcctgccctggaagtgcctggtggtggtgtccctgcggctgctcttcctggtgcccactggagtgcctgtgcgctctggagatgccaccttccccaaggccatggacaacgtgacagtgcggcagggcgagagcgccaccctgcgctgcaccattgatgacagagtgaccagggtggcctggctgaacagaagcaccatcctgtatgctggaaatgacaagtggagcattgaccccagggtcatcatcctggtgaacacccccacccagtacagcatcatgatccagaatgtggatgtgtatgatgagggcccctacacctgcagcgtgcagacagacaaccaccccaagaccagccgggtgcacctgattgtgcaggtgcccccccagatcatgaacatcagcagtgacatcaccgtgaatgaaggcagctctgtgaccctgctgtgcctggccatcggccggcctgagcccaccgtgacctggaggcacctgtctgtgaaggagggccagggctttgtgtctgaagatgagtacctggagatcagtgacatcaagagggaccagagcggggagtatgaatgttctgccctgaatgatgtggccgccccagatgtgaggaaggtgaagatcaccgtgaactacccaccctacatcagcaaggccaagaacacaggagtgtctgtgggccagaagggcatcctgagctgtgaggccagcgctgtgcccatggccgagttccagtggttcaaggaggagacccggctggccaccggcctggatggcatgagaattgaaaataaaggaaggatgagcaccctgaccttcttcaacgtgtctgagaaggactatggcaactacacctgtgtggccaccaacaagctgggcaacaccaatgccagcatcaccctgtatggccctggagctgtgattgatggagtgaacagcgccagccgggccctggcctgcctgtggctgagcggcaccctgctggcccacttcttcatcaagttctag

SEQ ID NO: 20966 - DNA, 939 bp, synthetic construct
  misc_feature 1..939: note = Description of Artificial Sequence: Synthetic coding sequence
  source 1..939: mol_type = other DNA
atgtaccacccagcctactgggtggtgttttctgccaccacagccctgctcttcatccctggggtgcctgtgcgctctggagatgccaccttccccaaggccatggacaacgtgacagtgcggcagggcgagagcgccaccctgcgctgcaccattgatgacagagtgaccagggtggcctggctgaacagaagcaccatcatgatccagaatgtggatgtgtatgatgagggcccctacacctgcagcgtgcagacagacaaccaccccaagaccagccgggtgcacctgattgtgcaggtgcccccccagatcatgaacatcagcagtgacatcaccgtgaatgaaggcagctctgtgaccctgctgtgcctggccatcggccggcctgagcccaccgtgacctggaggcacctgtctgtgaaggagggccagggctttgtgtctgaagatgagtacctggagatcagtgacatcaagagggaccagagcggggagtatgagtgcagcgccctgaatgatgtggccgccccagatgtgaggaaggtgaagatcaccgtgaactacccaccctacatcagcaaggccaagaacacaggagtgtctgtgggccagaagggcatcctgagctgtgaggccagcgctgtgcccatggccgagttccagtggttcaaggaggagacccggctggccaccggcctggatggcatgagaattgagaacaagggccgcatgagcaccctgaccttcttcaacgtgtctgagaaggactatggcaactacacctgtgtggccaccaacaagctgggcaacaccaatgccagcatcaccctgtatggccctggagctgtgattgatggagtgaacagcgccagccgggccctggcctgcctgtggctgagcggcaccctgctggcccacttcttcatcaagttctag

SEQ ID NO: 20967 - DNA, 1017 bp, synthetic construct
  misc_feature 1..1017: note = Description of Artificial Sequence: Synthetic coding sequence
  source 1..1017: mol_type = other DNA
atgtaccacccagcctactgggtggtgttttctgccaccacagccctgctcttcatccctggggtgcctgtgcgctctggagatgccaccttccccaaggccatggacaacgtgacagtgcggcagggcgagagcgccaccctgcgctgcaccattgatgacagagtgaccagggtggcctggctgaacagaagcaccatcctgtatgctggaaatgacaagtggagcattgaccccagggtcatcatcctggtgaacacccccacccagtacagcatcatgatccagaatgtggatgtgtatgatgagggcccctacacctgcagcgtgcagacagacaaccaccccaagaccagccgggtgcacctgattgtgcaggtgcccccccagatcatgaacatcagcagtgacatcaccgtgaatgaaggcagctctgtgaccctgctgtgcctggccatcggccggcctgagcccaccgtgacctggaggcacctgtctgtgaaggagggccagggctttgtgtctgaagatgagtacctggagatcagtgacatcaagagggaccagagcggggagtatgagtgcagcgccctgaatgatgtggccgccccagatgtgaggaaggtgaagatcaccgtgaactacccaccctacatcagcaaggccaagaacacaggagtgtctgtgggccagaagggcatcctgagctgtgaggccagcgctgtgcccatggccgagttccagtggttcaaggaggagacccggctggccaccggcctggatggcatgagaattgagaacaagggccgcatgagcaccctgaccttcttcaacgtgtctgagaaggactatggcaactacacctgtgtggccaccaacaagctgggcaacaccaatgccagcatcaccctgtatggccctggagctgtgattgatggagtgaacagcgccagccgggccctggcctgcctgtggctgagcggcaccctgctggcccacttcttcatcaagttctag

SEQ ID NO: 20968 - DNA, 1065 bp, synthetic construct
  misc_feature 1..1065: note = Description of Artificial Sequence: Synthetic coding sequence
  source 1..1065: mol_type = other DNA
atgggcgtgtgtggctacctgttcctgccctggaagtgcctggtggtggtgtccctgcggctgctcttcctggtgcccactggagtgcctgtgcgctctggagatgccaccttccccaaggccatggacaacgtgacagtgcggcagggcgagagcgccaccctgcgctgcaccattgatgacagagtgaccagggtggcctggctgaacagaagcaccatcctgtatgctggaaatgacaagtggagcattgaccccagggtcatcatcctggtgaacacccccacccagtacagcatcatgatccagaatgtggatgtgtatgatgagggcccctacacctgcagcgtgcagacagacaaccaccccaagaccagccgggtgcacctgattgtgcaggtgcccccccagatcatgaacatcagcagtgacatcaccgtgaatgaaggcagctctgtgaccctgctgtgcctggccatcggccggcctgagcccaccgtgacctggaggcacctgtctgtgaaggagggccagggctttgtgtctgaagatgagtacctggagatcagtgacatcaagagggaccagagcggggagtatgaatgttctgccctgaatgatgtggccgccccagatgtgaggaaggtgaagatcaccgtgaactacccaccctacatcagcaaggccaagaacacaggagtgtctgtgggccagaagggcatcctgagctgtgaggccagcgctgtgcccatggccgagttccagtggttcaaggaggagacccggctggccaccggcctggatggcatgagaattgaaaataaaggaaggatgagcaccctgaccttcttcaacgtgtctgagaaggactatggcaactacacctgtgtggccaccaacaagctgggcaacaccaatgccagcatcaccctgtatgagatcagccccagcagcgctgtggccggccctggagctgtgattgatggagtgaacagcgccagccgggccctggcctgcctgtggctgagcggcaccctgctggcccacttcttcatcaagttctag

SEQ ID NO: 20969 - DNA, 1662 bp, synthetic construct
  misc_feature 1..1662: note = Description of Artificial Sequence: Synthetic coding sequence
  source 1..1662: mol_type = other DNA
atgagcaacaacggcctggacatccaggacaagcccccagccccacccatgaggaacaccagcaccatgattggagctggcagcaaggatgctggcaccctgaaccacggcagcaagcccctgccccccaaccctgaggagaagaagaagaaggaccgcttctaccgcagcatcctgcccggggacaagaccaacaagaagaaggagaaggagaggcctgagatcagcctgcccagcgactttgagcacaccatccacgtgggctttgatgctgtgactggagagttcaccggcatgcctgagcagtgggcccggctgctgcagaccagcaacatcaccaagtctgagcagaagaagaacccccaggccgtgctggatgtgctggagttctacaacagcaagaagaccagcaacagccagaagtacatgtccttcacagacaagtctgctgaggactacaacagcagcaatgccctgaatgtgaaggctgtgtctgagaccccagctgtgccccctgtgtctgaagatgaagatgatgatgatgatgatgccaccccacctcctgtgattgcccccaggcctgagcacaccaagtctgtgtacaccaggagcgtcatcgagcccctgcctgtgacccccaccagagatgtggccaccagccccatcagccccacagagaacaacaccaccccaccagatgccctgaccaggaacacagagaagcagaagaagaagcccaagatgtctgatgaggagatcctggagaagctgcggagcatcgtgtctgtgggggaccccaagaagaagtacaccaggtttgagaagattggccagggcgccagcggcaccgtgtacacagccatggatgtggccaccggccaggaggtggccatcaagcagatgaacctgcagcagcagcccaagaaggagctgatcatcaatgagatcctggtgatgagggagaacaagaaccccaacatcgtgaactacctggacagctacctggtgggagatgagctgtgggtggtgatggagtacctggccggcggcagcctgacagatgtggtgacagagacctgcatggatgagggccagattgctgctgtgtgccgggagtgcctgcaggccctggagttcctgcacagcaaccaggtgatccaccgggacatcaagagtgacaacatcctgctgggcatggatggctctgtgaagctgacagactttggcttctgtgcccagatcaccccagagcagagcaagaggagcaccatggtgggcaccccctactggatggcccctgaggtggtgaccaggaaggcctacggccccaaggtggacatctggagcctgggcatcatggccatcgagatgattgaaggagagcccccctacctgaatgaaaaccccctgcgggccctgtacctgattgccaccaacggcaccccagagctgcagaaccctgagaagctgagcgccatcttccgggacttcctgaaccgctgcctggagatggatgtggagaagaggggcagcgccaaggagctgctgcaggtgaggaagctgcgcttccaggtgttcagcaacttctccatgattgctgccagcatccctgaggactgccaggcccccctgcagccccacagcacagactgctgcagctag

SEQ ID NO: 20970 - DNA, 1638 bp, synthetic construct
  misc_feature 1..1638: note = Description of Artificial Sequence: Synthetic coding sequence
  source 1..1638: mol_type = other DNA
atgagcaacaacggcctggacatccaggacaagcccccagccccacccatgaggaacaccagcaccatgattggagctggcagcaaggatgctggcaccctgaaccacggcagcaagcccctgccccccaaccctgaggagaagaagaagaaggaccgcttctaccgcagcatcctgcccggggacaagaccaacaagaagaaggagaaggagaggcctgagatcagcctgcccagcgactttgagcacaccatccacgtgggctttgatgctgtgactggagagttcaccggcatgcctgagcagtgggcccggctgctgcagaccagcaacatcaccaagtctgagcagaagaagaacccccaggccgtgctggatgtgctggagttctacaacagcaagaagaccagcaacagccagaagtacatgtccttcacagacaagtctgctgaggactacaacagcagcaatgccctgaatgtgaaggctgtgtctgagaccccagctgtgccccctgtgtctgaagatgaagatgatgatgatgatgatgccaccccacctcctgtgattgcccccaggcctgagcacaccaagtctgtgtacaccaggagcgtcatcgagcccctgcctgtgacccccaccagagatgtggccaccagccccatcagccccacagagaacaacaccaccccaccagatgccctgaccaggaacacagagaagcagaagaagaagcccaagatgtctgatgaggagatcctggagaagctgcggagcatcgtgtctgtgggggaccccaagaagaagtacaccaggtttgagaagattggccagggcgccagcggcaccgtgtacacagccatggatgtggccaccggccaggaggtggccatcaagcagatgaacctgcagcagcagcccaagaaggagctgatcatcaatgagatcctggtgatgagggagaacaagaaccccaacatcgtgaactacctggacagctacctggtgggagatgagctgtgggtggtgatggagtacctggccggcggcagcctgacagatgtggtgacagagacctgcatggatgagggccagattgctgctgtgtgccgggagtgcctgcaggccctggagttcctgcacagcaaccaggtgatccaccgggacatcaagagtgacaacatcctgctgggcatggatggctctgtgaagctgacagactttggcttctgtgcccagatcaccccagagcagagcaagaggagcaccatggtgggcaccccctactggatggcccctgaggtggtgaccaggaaggcctacggccccaaggtggacatctggagcctgggcatcatggccatcgagatgattgaaggagagcccccctacctgaatgaaaaccccctgcgggccctgtacctgattgccaccaacggcaccccagagctgcagaaccctgagaagctgagcgccatcttccgggacttcctgaaccgctgcctggagatggatgtggagaagaggggcagcgccaaggagctgctgcagcaccagttcctgaagatcgccaagcccctgagcagcctgacccccctgattgctgctgccaaggaggccaccaagaacaaccactag

SEQ ID NO: 20971 - DNA, 300 bp, synthetic construct
  misc_feature 1..300: note = Description of Artificial Sequence: Synthetic coding sequence
  source 1..300: mol_type = other DNA
atgagcaacaacggcctggacatccaggacaagcccccagccccacccatgaggaacaccagcaccatgattggagctggcagcaaggatgctggcaccctgaaccacggcagcaagcccctgccccccaaccctgaggagaagaagaagaaggaccgcttctaccgcagcatcctgcccggggacaagaccaacaagaagaaggagaaggagaggcctgagatcagcctgcccagcgactttgagcacaccatccacgtgggctttgatgctgtgactggagagttcaccggcatgtag

SEQ ID NO: 20972 - DNA, 81 bp, synthetic construct
  misc_feature 1..81: note = Description of Artificial Sequence: Synthetic coding sequence
  source 1..81: mol_type = other DNA
atgagcaacaacggcctggacatccaggacaagcccccagccccacccatgaggaacaccagcaccatgattggagcctag

SEQ ID NO: 20973 - DNA, 270 bp, synthetic construct
  misc_feature 1..270: note = Description of Artificial Sequence: Synthetic coding sequence
  source 1..270: mol_type = other DNA
atgagcaacaacggcctggacatccaggacaagcccccagccccacccatgaggaacaccagcaccatgattggagctggcagcaaggatgctggcaccctgaaccacggcagcaagcccctgccccccaaccctgaggagaagaagaagaaggaccgcttctaccgcagcatcctgcccggggacaagaccaacaagaagaaggagaaggagaggcctgagatcagcctgcccagcgactttgagcacaccatccacgtgggcttctag

SEQ ID NO: 20974 - DNA, 192 bp, synthetic construct
  misc_feature 1..192: note = Description of Artificial Sequence: Synthetic coding sequence
  source 1..192: mol_type = other DNA
atgagcaacaacggcctggacatccaggacaagcccccagccccacccatgaggaacaccagcaccatgattggagctggcagcaaggatgctggcaccctgaaccacggcagcaagcccctgccccccaaccctgaggagaagaagaagaaggaccgcttctaccgcagcatcctgcccggggacaagtag

SEQ ID NO: 20975 - DNA, 321 bp, synthetic construct
  misc_feature 1..321: note = Description of Artificial Sequence: Synthetic coding sequence
  source 1..321: mol_type = other DNA
atgagcaacaacggcctggacatccaggacaagcccccagccccacccatgaggaacaccagcaccatgattggagctggcagcaaggatgctggcaccctgaaccacggcagcaagcccctgccccccaaccctgaggagaagaagaagaaggaccgcttctaccgcagcatcctgcccggggacaagaccaacaagaagaaggagaaggagaggcctgagatcagcctgcccagcgactttgagcacaccatccacgtgggctttgatgctgtgactggagagttcaccggcatgcctgagcagtgggcccggctgtag

SEQ ID NO: 20976 - DNA, 1569 bp, synthetic construct
  misc_feature 1..1569: note = Description of Artificial Sequence: Synthetic coding sequence
  source 1..1569: mol_type = other DNA
atgagcaacaacggcctggacatccaggacaagcccccagccccacccatgaggaacaccagcaccatgattggagctggcagcaaggatgctggcaccctgaaccacggcagcaagcccctgccccccaaccctgaggagaagaagaagaaggaccgcttctaccgcagcatcctgcccggggacaagaccaacaagaagaaggagaaggagaggcctgagatcagcctgcccagcgactttgagcacaccatccacgtgggctttgatgctgtgactggagagttcaccggcatgcctgagcagtgggcccggctgctgcagaccagcaacatcaccaagtctgagcagaagaagaacccccaggccgtgctggatgtgctggagttctacaacagcaagaagaccagcaacagccagaagtacatgtccttcacagacaagtctgctgaggactacaacagcagcaatgccctgaatgtgaaggctgtgtctgagaccccagctgtgccccctgtgtctgaagatgaagatgatgatgatgatgatgccaccccacctcctgtgattgcccccaggcctgagcacaccaagtctgtgtacaccaggagcgtcatcgagcccctgcctgtgacccccaccagagatgtggccaccagccccatcagccccacagagaacaacaccaccccaccagatgccctgaccaggaacacagagaagcagaagaagaagcccaagatgtctgatgaggagatcctggagaagctgcggagcatcgtgtctgtgggggaccccaagaagaagtacaccaggtttgagaagattggccagggcgccagcggcaccgtgtacacagccatggatgtggccaccggccaggaggtggccatcaagcagatgaacctgcagcagcagcccaagaaggagctgatcatcaatgagatcctggtgatgagggagaacaagaaccccaacatcgtgaactacctggacagctacctggtgggagatgagctgtgggtggtgatggagtacctggccggcggcagcctgacagatgtggtgacagagacctgcatggatgagggccagattgctgctgtgtgccgggagtgcctgcaggccctggagttcctgcacagcaaccaggtgatccaccgggacatcaagagtgacaacatcctgctgggcatggatggctctgtgaagctgacagactttggcttctgtgcccagatcaccccagagcagagcaagaggagcaccatggtgggcaccccctactggatggcccctgaggtggtgaccaggaaggcctacggccccaaggtggacatctggagcctgggcatcatggccatcgagatgattgaaggagagcccccctacctgaatgaaaaccccctgcgggccctgtacctgattgccaccaacggcaccccagagctgcagaaccctgagaagctgagcgccatcttccgggacttcctgaaccgctgcctggagatggatgtggagaagaggggcagcgccaaggagctgctgcagcacagcagccggctgtag

SEQ ID NO: 20977 - DNA, 1317 bp, synthetic construct
  misc_feature 1..1317: note = Description of Artificial Sequence: Synthetic coding sequence
  source 1..1317: mol_type = other DNA
atgtttgggaagaggaagaagagggtggagatcagcgcccccagcaactttgagcaccgggtgcacactggatttgaccagcacgagcagaagttcaccggcctgccccggcagtggcagagcctgattgaggagagcgcccggcggcccaagcccctggtggaccctgcctgcatcaccagcatccagcccggggcccccaagggggagccccatgatgtggccccaaatggccccagcgctgggggcctggccatcccccagagcagcagcagcagcagccggccccccacccgggcccggggggcccccagccctggggtgctgggcccccacgccagcgagccccagctggcccccccagcctgcaccccagctgccccagctgtgcccggccccccaggccccaggagcccccagcgggagccccagagggtgtcccatgagcagttccgggccgccctgcagctggtggtggaccccggggaccccaggagctacctggacaacttcatcaagatcggggagggcagcactggaattgtgtgcatcgccaccgtgcgcagcagcggcaagctggtggccgtgaagaagatggacctgaggaagcagcagaggcgggagctgctcttcaatgaggtggtgatcatgagggactaccagcatgaaaatgtggtggagatgtacaacagctacctggtgggagatgagctgtgggtggtgatggagttcctggagggcggggccctgacagacatcgtgacccacaccaggatgaatgaggagcagattgctgctgtgtgcctggccgtgctgcaggccctgtctgtgctgcacgcccagggcgtcatccaccgggacatcaagagtgacagcatcctgctgacccatgatggccgggtgaagctgagtgactttggcttctgtgcccaggtgtccaaggaggtgcccaggaggaagagcctggtgggcaccccctactggatggcccctgagctgatcagccggctgccctacggccctgaggtggacatctggagcctgggcatcatggtgattgagatggtggatggagagcccccctacttcaatgagccccccctgaaggccatgaagatgatccgggacaacctgcccccccggctgaagaacctgcacaaggtgagccccagcctgaagggcttcctggaccggctgctggtgcgggaccctgcccagagggccacagctgctgagctgctgaagcaccccttcctggccaaggccggccccccagccagcatcgtgcccctgatgaggcagaacagaaccaggtag

SEQ ID NO: 20978 - DNA, 1776 bp, synthetic construct
  misc_feature 1..1776: note = Description of Artificial Sequence: Synthetic coding sequence
  source 1..1776: mol_type = other DNA
atgtttgggaagaggaagaagagggtggagatcagcgcccccagcaactttgagcaccgggtgcacactggatttgaccagcacgagcagaagttcaccggcctgccccggcagtggcagagcctgattgaggagagcgcccggcggcccaagcccctggtggaccctgcctgcatcaccagcatccagcccggggcccccaagaccatcgtgcggggcagcaaaggagccaaggatggagccctgaccctgctgctggatgaatttgagaacatgtctgtgaccaggagcaacagcctgcggcgggacagccccccacctccagcccgggcccggcaggagaatggcatgcctgaggagcccgccaccacagcccggggcggccctgggaaggccggcagccggggccgctttgctggccacagcgaggccggcggcggcagcggggacagaagaagagctggccctgagaagaggcccaagagcagccgggagggcagcggcggcccccaggagagcagccgggacaagaggcccctgagcggcccagatgtgggcaccccccagcctgctggcctggccagcggggccaagctggccgccggccggcccttcaacacctaccccagggctgacacagaccaccccagcagaggagcccagggcgagccccatgatgtggcccccaacggccccagcgctgggggcctggccatcccccagagcagcagcagcagcagcaggcctcccacccgggcccggggggcccccagccctggggtgctgggcccccacgccagcgagccccagctggcccccccagcctgcaccccagctgccccagctgtgcccggccccccaggccccaggagcccccagcgggagccccagagggtgtcccatgagcagttccgggccgccctgcagctggtggtggaccccggggaccccaggagctacctggacaacttcatcaagattggagagggcagcacaggcatcgtgtgcatcgccaccgtgcgcagcagcggcaagctggtggccgtgaagaagatggacctgaggaagcagcagaggcgggagctgctcttcaatgaggtggtgatcatgagggactaccagcatgaaaatgtggtggagatgtacaacagctacctggtgggagatgagctgtgggtggtgatggagttcctggagggcggggccctgacagacatcgtgacccacaccaggatgaatgaggagcagattgctgctgtgtgcctggccgtgctgcaggccctgtctgtgctgcacgcccagggcgtcatccaccgggacatcaagagtgacagcatcctgctgacccatgatggccgggtgaagctgagtgactttggcttctgtgcccaggtgtccaaggaggtgcccaggaggaagagcctggtgggcaccccctactggatggcccctgagctgatcagccggctgccctacggccctgaggtggacatctggagcctgggcatcatggtgattgagatggtggatggagagcccccctacttcaatgaaccacccctgaaggccatgaagatgatccgggacaacctgcccccccggctgaagaacctgcacaaggtgagccccagcctgaagggcttcctggaccggctgctggtgcgggaccctgcccagagggccacagctgctgagctgctgaagcaccccttcctggccaaggccggccccccagccagcatcgtgcccctgatgaggcagaacagaacaagatag

SEQ ID NO: 20979 - DNA, 1188 bp, synthetic construct
  misc_feature 1..1188: note = Description of Artificial Sequence: Synthetic coding sequence
  source 1..1188: mol_type = other DNA
atgggctgccagaggagccggcccttcaacacctaccccagggctgacacagaccaccccagcagaggagcccagggcgagccccatgatgtggcccccaacggccccagcgctgggggcctggccatcccccagagcagcagcagcagcagcaggcctcccacccgggcccggggggcccccagccctggggtgctgggcccccacgccagcgagccccagctggcccccccagcctgcaccccagctgccccagctgtgcccggccccccaggccccaggagcccccagcgggagccccagagggtgtcccatgagcagttccgggccgccctgcagctggtggtggaccccggggaccccaggagctacctggacaacttcatcaagattggagagggcagcacaggcatcgtgtgcatcgccaccgtgcgcagcagcggcaagctggtggccgtgaagaagatggacctgaggaagcagcagaggcgggagctgctcttcaatgaggtggtgatcatgagggactaccagcatgaaaatgtggtggagatgtacaacagctacctggtgggagatgagctgtgggtggtgatggagttcctggagggcggggccctgacagacatcgtgacccacaccaggatgaatgaggagcagattgctgctgtgtgcctggccgtgctgcaggccctgtctgtgctgcacgcccagggcgtcatccaccgggacatcaagagtgacagcatcctgctgacccatgatggccgggtgaagctgagtgactttggcttctgtgcccaggtgtccaaggaggtgcccaggaggaagagcctggtgggcaccccctactggatggcccctgagctgatcagccggctgccctacggccctgaggtggacatctggagcctgggcatcatggtgattgagatggtggatggagagcccccctacttcaatgaaccacccctgaaggccatgaagatgatccgggacaacctgcccccccggctgaagaacctgcacaaggtgagccccagcctgaagggcttcctggaccggctgctggtgcgggaccctgcccagagggccacagctgctgagctgctgaagcaccccttcctggccaaggccggccccccagccagcatcgtgcccctgatgaggcagaacagaacaagatag

SEQ ID NO: 20980 - DNA, 1776 bp, synthetic construct; identical to SEQ ID NO: 20978
  misc_feature 1..1776: note = Description of Artificial Sequence: Synthetic coding sequence
  source 1..1776: mol_type = other DNA

SEQ ID NO: 20981 - DNA, 1776 bp, synthetic construct; identical to SEQ ID NO: 20978
  misc_feature 1..1776: note = Description of Artificial Sequence: Synthetic coding sequence
  source 1..1776: mol_type = other DNA

SEQ ID NO: 20982 - DNA, 1044 bp, synthetic construct
  misc_feature 1..1044: note = Description of Artificial Sequence: Synthetic coding sequence
  source 1..1044: mol_type = other DNA
atgacctggcccctgaccggccaccagagaggagcctggcccagccccagccccccacctcctcctcctggcctgcccccagagcctgaggtgcccccagccctggagtgctgggaccccaccccccagagccccaggagcccccagcgggagccccagagggtgtcccatgagcagttccgggccgccctgcagctggtggtggaccccggggaccccaggagctacctggacaacttcatcaagattggagagggcagcacaggcatcgtgtgcatcgccaccgtgcgcagcagcggcaagctggtggccgtgaagaagatggacctgaggaagcagcagaggcgggagctgctcttcaatgaggtggtgatcatgagggactaccagcatgaaaatgtggtggagatgtacaacagctacctggtgggagatgagctgtgggtggtgatggagttcctggagggcggggccctgacagacatcgtgacccacaccaggatgaatgaggagcagattgctgctgtgtgcctggccgtgctgcaggccctgtctgtgctgcacgcccagggcgtcatccaccgggacatcaagagtgacagcatcctgctgacccatgatggccgggtgaagctgagtgactttggcttctgtgcccaggtgtccaaggaggtgcccaggaggaagagcctggtgggcaccccctactggatggcccctgagctgatcagccggctgccctacggccctgaggtggacatctggagcctgggcatcatggtgattgagatggtggatggagagcccccctacttcaatgaaccacccctgaaggccatgaagatgatccgggacaacctgcccccccggctgaagaacctgcacaaggtgagccccagcctgaagggcttcctggaccggctgctggtgcgggaccctgcccagagggccacagctgctgagctgctgaagcaccccttcctggccaaggccggccccccagccagcatcgtgcccctgatgaggcagaacagaacaagatag

SEQ ID NO: 20983 - DNA, 1776 bp, synthetic construct; identical to SEQ ID NO: 20978
  misc_feature 1..1776: note = Description of Artificial Sequence: Synthetic coding sequence
  source 1..1776: mol_type = other DNA

SEQ ID NO: 20984 - DNA, 1317 bp, synthetic construct; identical to SEQ ID NO: 20977
  misc_feature 1..1317: note = Description of Artificial Sequence: Synthetic coding sequence
  source 1..1317: mol_type = other DNA

SEQ ID NO: 20985 - DNA, 1458 bp, synthetic construct
  misc_feature 1..1458: note = Description of Artificial Sequence: Synthetic coding sequence
  source 1..1458: mol_type = other DNA
atggcccccaccatccagacccaggcccagcgggaggatggccacaggtctggagtggtgtgccgggtgaagtactgcaacagcctgcctgacatcccctttgaccccaagttcatcacctacccctttgaccagaacagatttgtgcagtacaaggccaccagcctggagaagcagcacaagcatgacctgctgacagagccagacctgggcgtgaccatcgacctgatcaacccagacacctacagaattgaccccaacgtgctgctggaccctgcagatgagaagctgctggaggaggagatccaggcccccaccagcagcaagaggagccagcagcacgccaaggtggtgccctggatgaggaagacagagtacatcagcacagagttcaacagatatggcatcagcaatgagaagccagaggtgaagattggagtgtctgtgaagcagcagttcacagaggaggagatctacaaggaccgggacagccagatcacagccatcgagaagacctttgaagatgcccagaagagcatcagccagcactacagcaagccccgggtgacccctgtggaggtgatgcctgtgtttcctgacttcaagatgtggatcaacccctgtgcccaggtgatctttgacagcgaccctgcccccaaggacaccagcggggccgccgccctggagatgatgagccaggccatgatccggggcatgatggatgaggagggcaaccagtttgtggcctacttcctgcctgtggaggagaccctgaagaagaggaagagggaccaggaggaggagatggactatgccccagatgatgtgtatgactacaagatcgcccgggagtacaactggaatgtgaagaacaaggccagcaagggctatgaggagaactacttcttcatcttccgggagggagatggagtgtactacaatgagctggagaccagggtgcggctgagcaagagaagagccaaggccggcgtgcagagcggcaccaatgccctgctggtggtgaagcaccgggacatgaatgagaaggagctggaggcccaggaggccaggaaggcccagctggagaaccacgagcctgaggaggaggaggaggaggagatggagacagaggagaaggaggccggcggctctgtgatgctgatcctgcggaccatgcccaccctgatgatgaggacagaggaccggcccaaggtggccgtgaccatgatccagacagctgctgccatgggcgtggccagcggggccggggccacagctgctgcccctgtgcccagccctgtggccgccagcacccggcccaggaggatggctgtgaagctgcagctgctgatccctgtgaagctgattgtgacagtgacagagagccagggcatccagggctggttccgccaccactactgtgagcagcagagcaccttcctggtggtgtgcctgtag

SEQ ID NO: 20986 - DNA, 873 bp, synthetic construct
  misc_feature 1..873: note = Description of Artificial Sequence: Synthetic coding sequence
  source 1..873: mol_type = other DNA
atgggccacccccccctgctgcccctgctgctgctgctgcacacctgtgtgcctgcctcctggggcctgcgctgcatgcagtgcaagaccaatggagactgccgggtggaggagtgtgccctgggccaggacctgtgcaggaccaccatcgtgcggctgtgggaggagggggaggagctggagctggtggagaagagctgcacccacagcgagaagaccaacagaaccctgagctacagaacaggcctgaagatcaccagcctgacagaggtggtgtgtggcctggacctgtgcaaccagggcaacagcggccgggctgtgacctacagccgcagccgctacctggagtgcatcagctgtggcagcagtgacatgagctgtgagcggggccgccaccagagcctgcagtgccgcagccctgaggagcagtgcctggatgtggtgacccactggatccaggagggggaggaggtgctggagctggagaacctgccccagaatggccggcagtgctacagctgcaagggcaacagcacccacggctgcagcagcgaggagaccttcctgattgactgccggggccccatgaaccagtgcctggtggccaccggcacccatgagcccaagaaccagagctacatggtgcggggctgtgccacagcctccatgtgccagcacgcccacctgggagatgccttctccatgaaccacattgatgtgtcctgctgcaccaagagcggctgcaaccacccagacctggatgtgcagtacagaagtggagctgccccccagcccggccctgcccacctgagcctgaccatcaccctgctgatgacagcccggctgtggggcggcaccctgctgtggacctag

SEQ ID NO: 20987 - DNA, 1596 bp, synthetic construct
  misc_feature 1..1596: note = Description of Artificial Sequence: Synthetic coding sequence
  source 1..1596: mol_type = other DNA
atggcccccaccatccagacccaggcccagcgggaggatggccaccggcccaacagccacaggaccctgcctgagaggtctggagtggtgtgccgggtgaagtactgcaacagcctgcctgacatcccctttgaccccaagttcatcacctacccctttgaccagaacagatttgtgcagtacaaggccaccagcctggagaagcagcacaagcatgacctgctgacagagccagacctgggcgtgaccatcgacctgatcaacccagacacctacagaattgaccccaacgtgctgctggaccctgcagatgagaagctgctggaggaggagatccaggcccccaccagcagcaagaggagccagcagcacgccaaggtggtgccctggatgaggaagacagagtacatcagcacagagttcaacagatatggcatcagcaatgagaagccagaggtgaagattggagtgtctgtgaagcagcagttcacagaggaggagatctacaaggaccgggacagccagatcacagccatcgagaagacctttgaagatgcccagaagagcatcagccagcactacagcaagccccgggtgacccctgtggaggtgatgcctgtgtttcctgacttcaagatgtggatcaacccctgtgcccaggtgatctttgacagcgaccctgcccccaaggacaccagcggggccgccgccctggagatgatgagccaggccatgatccggggcatgatggatgaggagggcaaccagtttgtggcctacttcctgcctgtggaggagaccctgaagaagaggaagagggaccaggaggaggagatggactatgccccagatgatgtgtatgactacaagatcgcccgggagtacaactggaatgtgaagaacaaggccagcaagggctatgaggagaactacttcttcatcttccgggagggagatggagtgtactacaatgagctggagaccagggtgcggctgagcaagagaagagccaaggccggcgtgcagagcggcaccaatgccctgctggtggtgaagcaccgggacatgaatgagaaggagctggaggcccaggaggccaggaaggcccagctggagaaccacgagcctgaggaggaggaggaggaggagatggagacagaggagaaggaggccggcggcagtgatgaggagcaggagaagggcagcagcagcgagaaggagggctctgaagatgagcacagcggcagcgagagcgagcgggaggagggggacagagatgaggccagtgacaagagcggcagcggggaggatgagagcagtgaagatgaggcccgggccgcccgggacaaggaggagatcttcggcagtgatgctgacagtgaagatgatgctgacagtgatgatgaagatcggggccaggcccagggcggcagtgacaatgacagcgacagcggcagcaatggaggcggccagaggagccgcagccacagccgcagcgccagccccttccccagcggcagcgagcacagcgcccaggaggatggcagcgaggccgccgccagtgacagcagcgaggccgacagcgacagcgactag

SEQ ID NO: 20988 - DNA, 867 bp, synthetic construct
  misc_feature 1..867: note = Description of Artificial Sequence: Synthetic coding sequence
  source 1..867: mol_type = other DNA
atggccaccggccccatccccaccggcctgtgcctgcggggcctggagtggagcgctgagagcagcacagccatcgccagcctcatcagccccagcacccccagcagcagccccacccccagcaccaggacagtgctgctggaccctgcagatgagaagctgctggaggaggagatccaggcccccaccagcagcaagaggagccagcagcacgccaaggtggtgccctggatgaggaagacagagtacatcagcacagagttcaacagatatggcatcagcaatgagaagccagaggtgaagattggagtgtctgtgaagcagcagttcacagaggaggagatctacaaggaccgggacagccagatcacagccatcgagaagacctttgaagatgcccagaagagcatcagccagcactacagcaagccccgggtgacccctgtggaggtgatgcctgtgtttcctgacttcaagatgtggatcaacccctgtgcccaggtgatctttgacagcgaccctgcccccaaggacaccagcggggctgctgccctggagatgatgagccaggccatgatccggggcatgatggatgaggagggcaaccagtttgtggcctacttcctgcctgtggaggagaccctgaagaagaggaagagggaccaggaggaggagatggactatgccccagatgatgtgtatgactacaagatcgcccgggagtacaactggaatgtgaagaacaaggccagcaagggctatgaggagaactacttcttcatcttccgggagggagatggagtgtactacaatgagctggagaccagcatccagtacagccacatgctgtacaacctggtggcctag

SEQ ID NO: 20989 - DNA, 1176 bp, synthetic construct
  misc_feature 1..1176: note = Description of Artificial Sequence: Synthetic coding sequence
  source 1..1176: mol_type = other DNA
atggacctggagaagaactaccccacccccaggaccagcaggactggacatggaggagtgaaccagctgggcggcgtgtttgtgaatggccggcccctgcctgatgtggtgcggcagagaattgtggagctggcccaccagggcgtgcggccctgtgacatcagccggcagctgcgggtgagccacggctgtgtgtccaagatcctgggccgctactatgaaacaggcagcatcaagccaggagtgattggaggcagcaagcccaaggtggccacccccaaggtggtggagaagattgctgagtacaagaggcagaaccccaccatgtttgcctgggagatccgggaccggctgctggccgagcgggtgtgtgacaatgacacagtgcccagcgtgagcagcatcaaccgcatcatccgcaccaaggtgcagcagccccccaaccagcctgtgcctgccagcagccacagcatcgtgtccactggatctgtgacccaggtgtcctctgtgtccacagacagcgctggcagcagctacagcatcagcggcatcctgggcatcaccagccccagcgctgacaccaacaagaggaagagagatgagggcatccaggagagccctgtgcccaacggccacagcctgcccggccgggacttcctgaggaagcagatgagaggagacctcttcacccagcagcagctggaggtgctggacagagtgtttgagcggcagcactacagcgacatcttcaccaccacagagcccatcaagccagagcagaccacagagtacagcgccatggccagcctggccggcggcctggatgacatgaaggccaacctggccagccccaccccagctgacatcggcagctctgtgcccggcccccagagctaccccatcgtgacaggccgggacctggccagcaccaccctgcccggctacccaccccacgtgcccccagctggccagggcagctacagcgcccccaccctgaccggcatggtgcccggcagcgagttcagcggcagcccctacagccacccccagtacagcagctacaatgacagctggaggttccccaaccctggcctgctgggcagcccctactactacagcgctgctgcccggggagctgcccctcctgctgctgccacagcctatgacagacactag

SEQ ID NO: 20990 - DNA, 867 bp, synthetic construct
  misc_feature 1..867: note = Description of Artificial Sequence: Synthetic coding sequence
  source 1..867: mol_type = other DNA
atggacctggagaagaactaccccacccccaggaccagcaggactggacatggaggagtgaaccagctgggcggcgtgtttgtgaatggccggcccctgcctgatgtggtgcggcagagaattgtggagctggcccaccagggcgtgcggccctgtgacatcagccggcagctgcgggtgagccacggctgtgtgtccaagatcctgggccgctactatgaaacaggcagcatcaagccaggagtgattggaggcagcaagcccaaggtggccacccccaaggtggtggagaagattgctgagtacaagaggcagaaccccaccatgtttgcctgggagatccgggaccggctgctggccgagcgggtgtgtgacaatgacacagtgcccagcgtgagcagcatcaaccgcatcatccgcaccaaggtgcagcagccccccaaccagcctgtgcctgccagcagccacagcatcgtgtccactggatctgtgacccaggtgtcctctgtgtccacagacagcgctggcagcagctacagcatcagcggcatcctgggcatcaccagccccagcgctgacaccaacaagaggaagagagatgagggcatccaggagagccctgtgcccaacggccacagcctgcccggccgggacttcctgaggaagcagatgagaggagacctcttcacccagcagcagctggaggtgctggacagagtgtttgagcggcagcactacagcgacatcttcaccaccacagagcccatcaagccagagcaggccgtgacctggagggcccggcccagccctggcaccctgcacaccagcccccccctggaccgggccgccacccagcacagaagatag

SEQ ID NO: 20991 - DNA, 987 bp, synthetic construct
  misc_feature 1..987: note = Description of Artificial Sequence: Synthetic coding sequence
  source 1..987: mol_type = other DNA
atggacctggagaagaactaccccacccccaggaccagcaggactggacatggaggagtgaaccagctgggcggcgtgtttgtgaatggccggcccctgcctgatgtggtgcggcagagaattgtggagctggcccaccagggcgtgcggccctgtgacatcagccggcagctgcgggtgagccacggctgtgtgtccaagatcctgggccgctactatgaaacaggcagcatcaagccaggagtgattggaggcagcaagcccaaggtggccacccccaaggtggtggagaagattgctgagtacaagaggcagaaccccaccatgtttgcctgggagatccgggaccggctgctggccgagcgggtgtgtgacaatgacacagtgcccagcgtgagcagcatcaaccgcatcatccgcaccaaggtgcagcagccccccaaccagcctgtgcctgccagcagccacagcatcgtgtccactggatctgtgacccaggtgtcctctgtgtccacagacagcgctggcagcagctacagcatcagcggcatcctgggcatcaccagccccagcgctgacaccaacaagaggaagagagatgagggcatccaggagagccctgtgcccaacggccacagcctgcccggccgggacttcctgaggaagcagatgagaggagacctcttcacccagcagcagctggaggtgctggacagagtgtttgagcggcagcactacagcgacatcttcaccaccacagagcccatcaagccagagcagaccacagagtacagcgccatggccagcctggccggcggcctggatgacatgaaggccaacctggccagccccaccccagctgacatcggcagctctgtgcccggcccccagagctaccccatcgtgacaggcagcccctactactacagcgctgctgcccggggggccgcccccccagctgctgccacagcctatgacagacactag

SEQ ID NO: 20992 - DNA, 909 bp, synthetic construct
  misc_feature 1..909: note = Description of Artificial Sequence: Synthetic coding sequence
  source 1..909: mol_type = other DNA
atgtttgcctgggagatccgggaccggctgctggccgagcgggtgtgtgacaatgacacagtgcccagcgtgagcagcatcaaccgcatcatccgcaccaaggtgcagcagccccccaaccagcctgtgcctgccagcagccacagcatcgtgtccactggatctgtgacccaggtgtcctctgtgtccacagacagcgctggcagcagctacagcatcagcggcatcctgggcatcaccagccccagcgctgacaccaacaagaggaagagagatgagggcatccaggagagccctgtgcccaacggccacagcctgcccggccgggacttcctgaggaagcagatgagaggagacctcttcacccagcagcagctggaggtgctggacagagtgtttgagcggcagcactacagcgacatcttcaccaccacagagcccatcaagccagagcagtggtgccctgtgctgatgaggcagtacctggtgcagccccaggccgtgctcttccagaccacagagtacagcgccatggccagcctggccggcggcctggatgacatgaaggccaacctggccagccccaccccagctgacatcggcagctctgtgcccggcccccagagctaccccatcgtgacaggccgggacctggccagcaccaccctgcccggctacccacctcatgtgcccccagctggccagggcagctacagcgcccccaccctgaccggcatggtgcccggcagcgagttcagcggcagcccctacagccacccccagtacagcagctacaatgacagctggaggttccccaaccctggcctgctgggcagcccctactactacagcgctgctgcccggggggccgcccccccagctgctgccacagcctatgacagacactag

SEQ ID NO: 20993 - DNA, 1074 bp, synthetic construct
  misc_feature 1..1074: note = Description of Artificial Sequence: Synthetic coding sequence
  source 1..1074: mol_type = other DNA
atggacctggagaagaactaccccacccccaggaccagcaggactggacatggaggagtgaaccagctgggcggcgtgtttgtgaatggccggcccctgcctgatgtggtgcggcagagaattgtggagctggcccaccagggcgtgcggccctgtgacatcagccggcagctgcgggtgagccacggctgtgtgtccaagatcctgggccgctactatgaaacaggcagcatcaagccaggagtgattggaggcagcaagcccaaggtggccacccccaaggtggtggagaagattgctgagtacaagaggcagaaccccaccatgtttgcctgggagatccgggaccggctgctggccgagcgggtgtgtgacaatgacacagtgcccagcgtgagcagcatcaaccgcatcatccgcaccaaggtgcagcagccccccaaccagcctgtgcctgccagcagccacagcatcgtgtccactggatctgtgacccaggtgtcctctgtgtccacagacagcgctggcagcagctacagcatcagcggcatcctgggcatcaccagccccagcgctgacaccaacaagaggaagagagatgagggcatccaggagagccctgtgcccaacggccacagcctgcccggccgggacttcctgaggaagcagatgagaggagacctcttcacccagcagcagctggaggtgctggacagagtgtttgagcggcagcactacagcgacatcttcaccaccacagagcccatcaagccagagcagaccacagagtacagcgccatggccagcctggccggcggcctggatgacatgaaggccaacctggccagccccaccccagctgacatcggcagctctgtgcccggcccccagagctaccccatcgtgactggaagtgagttcagcggcagcccctacagccacccccagtacagcagctacaatgacagctggaggttccccaaccctggcctgctgggcagcccctactactacagcgctgctgcccggggagctgcccctcctgctgctgccacagcctatgacagacactag

SEQ ID NO: 20994 - DNA, 1089 bp, synthetic construct
  misc_feature 1..1089: note = Description of Artificial Sequence: Synthetic coding sequence
  source 1..1089: mol_type = other DNA
atggacctggagaagaactaccccacccccaggaccagcaggactggacatggaggagtgaaccagctgggcggcgtgtttgtgaatggccggcccctgcctgatgtggtgcggcagagaattgtggagctggcccaccagggcgtgcggccctgtgacatcagccggcagctgcgggtgagccacggctgtgtgtccaagatcctgggccgctactatgaaacaggcagcatcaagccaggagtgattggaggcagcaagcccaaggtggccacccccaaggtggtggagaagattgctgagtacaagaggcagaaccccaccatgtttgcctgggagatccgggaccggctgctggccgagcgggtgtgtgacaatgacacagtgcccagcgtgagcagcatcaaccgcatcatccgcaccaaggtgcagcagccccccaaccagcctgtgcctgccagcagccacagcatcgtgtccactggatctgtgacccaggtgtcctctgtgtccacagacagcgctggcagcagctacagcatcagcggcatcctgggcatcaccagccccagcgctgacaccaacaagaggaagagagatgagggcatccaggagagccctgtgcccaacggccacagcctgcccggccgggacttcctgaggaagcagatgagaggagacctcttcacccagcagcagctggaggtgctggacagagtgtttgagcggcagcactacagcgacatcttcaccaccacagagcccatcaagccagagcagaccacagagtacagcgccatggccagcctggccggcggcctggatgacatgaaggccaacctggccagccccaccccagctgacatcggcagctctgtgcccggcccccagagctaccccatcgtgacaggccgggacctggccagcaccaccctgcccggctacccaccccacgtgcccccagctggccagggcagctacagcgcccccaccctgaccggcatggtgcccggcagcccctactactacagcgctgctgcccggggggccgcccccccagctgctgccacagcctatgacagacactag

SEQ ID NO: 20995 - DNA, 1047 bp, synthetic construct
  misc_feature 1..1047: note = Description of Artificial Sequence: Synthetic coding sequence
  source 1..1047: mol_type = other DNA
atggacctggagaagaactaccccacccccaggaccagcaggactggacatggaggagtgaaccagctgggcggcgtgtttgtgaatggccggcccctgcctgatgtggtgcggcagagaattgtggagctggcccaccagggcgtgcggccctgtgacatcagccggcagctgcgggtgagccacggctgtgtgtccaagatcctgggccgctactatgaaacaggcagcatcaagccaggagtgattggaggcagcaagcccaaggtggccacccccaaggtggtggagaagattgctgagtacaagaggcagaaccccaccatgtttgcctgggagatccgggaccggctgctggccgagcgggtgtgtgacaatgacacagtgcccagcgtgagcagcatcaaccgcatcatccgcaccaaggtgcagcagccccccaaccagcctgtgcctgccagcagccacagcatcggcatccaggagagccctgtgcccaacggccacagcctgcccggccgggacttcctgaggaagcagatgagaggagacctcttcacccagcagcagctggaggtgctggacagagtgtttgagcggcagcactacagcgacatcttcaccaccacagagcccatcaagccagagcagaccacagagtacagcgccatggccagcctggccggcggcctggatgacatgaaggccaacctggccagccccaccccagctgacatcggcagctctgtgcccggcccccagagctaccccatcgtgacaggccgggacctggccagcaccaccctgcccggctacccacctcatgtgcccccagctggccagggcagctacagcgcccccaccctgaccggcatggtgcccggcagcgagttcagcggcagcccctacagccacccccagtacagcagctacaatgacagctggaggttccccaaccctggcctgctgggcagcccctactactacagcgctgctgcccggggggccgcccccccagctgctgccacagcctatgacagacactag

SEQ ID NO: 20996 - DNA, 876 bp, synthetic construct
  misc_feature 1..876: note = Description of Artificial Sequence: Synthetic coding sequence
  source 1..876: mol_type = other DNA
atggacctggagaagaactaccccacccccaggaccagcaggactggacatggaggagtgaaccagctgggcggcgtgtttgtgaatggccggcccctgcctgatgtggtgcggcagagaattgtggagctggcccaccagggcgtgcggccctgtgacatcagccggcagctgcgggtgagccacggctgtgtgtccaagatcctgggccgcatcatccgcaccaaggtgcagcagccccccaaccagcctgtgcctgccagcagccacagcatcgtgtccactggatctgtgacccaggtgtcctctgtgtccacagacagcgctggcagcagctacagcatcagcggcatcctgggcatcaccagccccagcgctgacaccaacaagaggaagagagatgagggcatccaggagagccctgtgcccaacggccacagcctgcccggccgggacttcctgaggaagcagatgagaggagacctcttcacccagcagcagctggaggtgctggacagagtgtttgagcggcagcactacagcgacatcttcaccaccacagagcccatcaagccagagcagaccacagagtacagcgccatggccagcctggccggcggcctggatgacatgaaggccaacctggccagccccaccccagctgacatcggcagctctgtgcccggcccccagagctaccccatcgtgactggaagtgagttcagcggcagcccctacagccacccccagtacagcagctacaatgacagctggaggttccccaaccctggcctgctgggcagcccctactactacagcgctgctgcccggggagctgcccctcctgctgctgccacagcctatgacagacactag

SEQ ID NO: 20997 - DNA, 960 bp, synthetic construct
  misc_feature 1..960: note = Description of Artificial Sequence: Synthetic coding sequence
  source 1..960: mol_type = other DNA
atggacctggagaagaactaccccacccccaggaccagcaggactggacatggaggagtgaaccagctgggcggcgtgtttgtgaatggccggcccctgcctgatgtggtgcggcagagaattgtggagctggcccaccagggcgtgcggccctgtgacatcagccggcagctgcgggtgagccacggctgtgtgtccaagatcctgggccgctactatgaaacaggcagcatcaagccaggagtgattggaggcagcaagcccaaggtggccacccccaaggtggtggagaagattgctgagtacaagaggcagaaccccaccatgtttgcctgggagatccgggaccggctgctggccgagcgggtgtgtgacaatgacacagtgcccagcgtgagcagcatcaaccgcatcatccgcaccaaggtgcagcagccccccaaccagcctgtgcctgccagcagccacagcatcggcatccaggagagccctgtgcccaacggccacagcctgcccggccgggacttcctgaggaagcagatgagaggagacctcttcacccagcagcagctggaggtgctggacagagtgtttgagcggcagcactacagcgacatcttcaccaccacagagcccatcaagccagagcagaccacagagtacagcgccatggccagcctggccggcggcctggatgacatgaaggccaacctggccagccccaccccagctgacatcggcagctctgtgcccggcccccagagctaccccatcgtgacaggccgggacctggccagcaccaccctgcccggctacccacctcatgtgcccccagctggccagggcagctacagcgcccccaccctgaccggcatggtgcccggcagcccctactactacagcgctgctgcccggggagctgcccctcctgctgctgccacagcctatgacagacactag

SEQ ID NO: 20998 - DNA, 852 bp, synthetic construct
  misc_feature 1..852: note = Description of Artificial Sequence: Synthetic coding sequence
  source 1..852: mol_type = other DNA
atgtttgcctgggagatccgggaccggctgctggccgagcgggtgtgtgacaatgacacagtgcccagcgtgagcagcatcaaccgcatcatccgcaccaaggtgcagcagccccccaaccagcctgtgcctgccagcagccacagcatcgtgtccactggatctgtgacccaggtgtcctctgtgtccacagacagcgctggcagcagctacagcatcagcggcatcctgggcatcaccagccccagcgctgacaccaacaagaggaagagagatgagggcatccaggagagccctgtgcccaacggccacagcctgcccggccgggacttcctgaggaagcagatgagaggagacctcttcacccagcagcagctggaggtgctggacagagtgtttgagcggcagcactacagcgacatcttcaccaccacagagcccatcaagccagagcagaccacagagtacagcgccatggccagcctggccggcggcctggatgacatgaaggccaacctggccagccccaccccagctgacatcggcagctctgtgcccggcccccagagctaccccatcgtgacaggccgggacctggccagcaccaccctgcccggctacccaccccacgtgcccccagctggccagggcagctacagcgcccccaccctgaccggcatggtgcccggcagcgagttcagcggcagcccctacagccacccccagtacagcagctacaatgacagctggaggttccccaaccctggcctgctgggcagcccctactactacagcgctgctgcccggggagctgcccctcctgctgctgccacagcctatgacagacactag

SEQ ID NO: 20999 - DNA, 924 bp, synthetic construct
  misc_feature 1..924: note = Description of Artificial Sequence: Synthetic coding sequence
  source 1..924: mol_type = other DNA
atggacctggagaagaactaccccacccccaggaccagcaggactggacatggaggagtgaaccagctgggcggcgtgtttgtgaatggccggcccctgcctgatgtggtgcggcagagaattgtggagctggcccaccagggcgtgcggccctgtgacatcagccggcagctgcgggtgagccacggctgtgtgtccaagatcctgggccgctactatgaaacaggcagcatcaagccaggagtgattggaggcagcaagcccaaggtggccacccccaaggtggtggagaagattgctgagtacaagaggcagaaccccaccatgtttgcctgggagatccgggaccggctgctggccgagcgggtgtgtgacaatgacacagtgcccagcgtgagcagcatcaaccgcatcatccgcaccaaggtgcagcagccccccaaccagcctgtgcctgccagcagccacagcatcgtgtccactggatctgtgacccaggtgtcctctgtgtccacagacagcgctggcagcagctacagcatcagcggcatcctgggcatcaccagccccagcgctgacaccaacaagaggaagagagatgagggcatccaggagagccctgtgcccaacggccacagcctgcccggccgggacttcctgaggaagcagatgagaggagacctcttcacccagcagcagctggaggtgctggacagagtgtttgagcggcagcactacagcgacatcttcaccaccacagagcccatcaagccagagcagtggtgccctgtgctgatgaggcagtacctggtgcagccccaggccgtgctcttccaggccgtgacctggagggcccggcccagccctggcaccctgcacaccagcccccccctggacagagctgccacccagcacagaagatag

SEQ ID NO: 21000 - DNA, 1197 bp, synthetic construct
  misc_feature 1..1197: note = Description of Artificial Sequence: Synthetic coding sequence
  source 1..1197: mol_type = other DNA
atgccccacaacagcatccgcagcggccacggcggcctgaaccagctgggcggggcctttgtgaatggccggcccctgcctgaggtggtgcggcagagaattgtggacctggcccaccagggcgtgcggccctgtgacatcagccggcagctgcgggtgagccacggctgtgtgtccaagatcctgggccgctactatgagaccggcagcatccggcctggggtcatcggcggcagcaagcccaaggtggccacccccaaggtggtggagaagatcggggactacaagaggcagaaccccaccatgtttgcctgggagatccgggaccggctgctggccgagggcgtgtgtgacaatgacacagtgcccagcgtgagcagcatcaaccgcatcatccgcaccaaggtgcagcagcccttcaacctgcccatggacagctgtgtggccaccaagagcctgagccctggccacaccctcatccccagcagcgctgtgaccccacctgagagcccccagagcgacagcctgggcagcacctacagcatcaatggcctgctgggcatcgcccagcccggcagtgacaagaggaagatggatgacagcgaccaggacagctgccgcctgagcattgacagccagagcagcagcagcggccccaggaagcacctgaggacagatgccttcagccagcaccacctggagcccctggagtgcccctttgagcggcagcactacccagaggcctatgccagccccagccacaccaagggggagcagggcctgtaccccctgcccctgctgaacagcaccctggatgatggcaaggccaccctgacccccagcaacacccccctgggcaggaacctgagcacccaccagacctaccctgtggtggccgccccacccttctggatctgcagcaagagcgcccctggcagccggcccagcatgcccttccccatgctgcccccctgcaccggcagcagccgggcccggcccagcagccagggcgagcgctggtggggcccccgctgcccagacacccaccccaccagccccccagctgaccgggccgccatgccacccctgcccagccaggcctggtggcaggaggtgaacaccctggccatgcccatggccaccccacccaccccacccacagcccggcctggggccagccccaccccagcctgctag

SEQ ID NO: 21001 - DNA, 966 bp, synthetic construct
  misc_feature 1..966: note = Description of Artificial Sequence: Synthetic coding sequence
  source 1..966: mol_type = other DNA
atgccccacaacagcatccgcagcggccacggcggcctgaaccagctgggcggggcctttgtgaatggccggcccctgcctgaggtggtgcggcagagaattgtggacctggcccaccagggcgtgcggccctgtgacatcagccggcagctgcgggtgagccacggctgtgtgtccaagatcctgggccgctactatgagaccggcagcatccggcctggggtcatcggcggcagcaagcccaaggtggccacccccaaggtggtggagaagatcggggactacaagaggcagaaccccaccatgtttgcctgggagatccgggaccggctgctggccgagggcgtgtgtgacaatgacacagtgcccagcgtgagcagcatcaaccgcatcatccgcaccaaggtgcagcagcccttcaacctgcccatggacagctgtgtggccaccaagagcctgagccctggccacaccctcatccccagcagcgctgtgaccccacctgagagcccccagagcgacagcctgggcagcacctacagcatcaatggcctgctgggcatcgcccagcccggcagtgacaagaggaagatggatgacagcgaccaggacagctgccgcctgagcattgacagccagagcagcagcagcggccccaggaagcacctgaggacagatgccttcagccagcaccacctggagcccctggagtgcccctttgagcggcagcactacccagaggcctatgccagccccagccacaccaagggggagcagggcgagcgctggtggggcccccgctgcccagacacccaccccaccagccccccagctgacagagctgccatgccacccctgcccagccaggcctggtggcaggaggtgaacaccctggccatgcccatggccaccccacccaccccacccacagcccggcctggggccagccccaccccagcctgctag

SEQ ID NO: 21002 - DNA, 1197 bp, synthetic construct; identical to SEQ ID NO: 21000
  misc_feature 1..1197: note = Description of Artificial Sequence: Synthetic coding sequence
  source 1..1197: mol_type = other DNA

SEQ ID NO: 21003 - DNA, 864 bp, synthetic construct
  misc_feature 1..864: note = Description of Artificial Sequence: Synthetic coding sequence
  source 1..864: mol_type = other DNA
atgccccacaacagcatccgcagcggccacggcggcctgaaccagctgggcggggcctttgtgaatggccggcccctgcctgaggtggtgcggcagagaattgtggacctggcccaccagggcgtgcggccctgtgacatcagccggcagctgcgggtgagccacggctgtgtgtccaagatcctgggccgctactatgagaccggcagcatccggcctggggtcatcggcggcagcaagcccaaggtggccacccccaaggtggtggagaagatcggggactacaagaggcagaaccccaccatgtttgcctgggagatccgggaccggctgctggccgagggcgtgtgtgacaatgacacagtgcccagcgtgagcagcatcaaccgcatcatccgcaccaaggtgcagcagcccttcaacctgcccatggacagctgtgtggccaccaagagcctgagccctggccacaccctcatccccagcagcgctgtgaccccacctgagagcccccagagcgacagcctgggcagcacctacagcatcaatggcctgctgggcatcgcccagcccggcagtgacaagaggaagatggatgacagcgaccaggacagctgccgcctgagcattgacagccagagcagcagcagcggccccaggaagcacctgaggacagatgccttcagccagcaccacctggagcccctggagtgcccctttgagcggcagcactacccagaggcctatgccagccccagccacaccaagggggagcaggaggtgaacaccctggccatgcccatggccaccccacccaccccacccacagcccggcctggggccagccccaccccagcctgctag

SEQ ID NO: 21004 - DNA, 1353 bp, synthetic construct
  misc_feature 1..1353: note = Description of Artificial Sequence: Synthetic coding sequence
  source 1..1353: mol_type = other DNA
atgccccacaacagcatccgcagcggccacggcggcctgaaccagctgggcggggcctttgtgaatggccggcccctgcctgaggtggtgcggcagagaattgtggacctggcccaccagggcgtgcggccctgtgacatcagccggcagctgcgggtgagccacggctgtgtgtccaagatcctgggccgctactatgagaccggcagcatccggcctggggtcatcggcggcagcaagcccaaggtggccacccccaaggtggtggagaagatcggggactacaagaggcagaaccccaccatgtttgcctgggagatccgggaccggctgctggccgagggcgtgtgtgacaatgacacagtgcccagcgtgagcagcatcaaccgcatcatccgcaccaaggtgcagcagcccttcaacctgcccatggacagctgtgtggccaccaagagcctgagccctggccacaccctcatccccagcagcgctgtgaccccacctgagagcccccagagcgacagcctgggcagcacctacagcatcaatggcctgctgggcatcgcccagcccggcagtgacaagaggaagatggatgacagcgaccaggacagctgccgcctgagcattgacagccagagcagcagcagcggccccaggaagcacctgaggacagatgccttcagccagcaccacctggagcccctggagtgcccctttgagcggcagcactacccagaggcctatgccagccccagccacaccaagggggagcagggcctgtaccccctgcccctgctgaacagcaccctggatgatggcaaggccaccctgacccccagcaacacccccctgggcaggaacctgagcacccaccagacctaccctgtggtggccgacccccacagcccctttgccatcaagcaggagaccccagaggtgagcagcagcagcagcacccccagcagcctgagcagcagcgccttcctggacctgcagcaggtgggcagcggcgtgccccccttcaatgccttcccccacgccgcctctgtgtatggccagttcaccggccaggccctgctgagcggccgggagatggtgggccccaccctgcccggctacccaccccacatccccaccagcggccagggcagctatgccagcagcgccatcgccggcatggtggccggcagcgagtacagcggaaatgcctacggccacaccccctacagcagctacagcgaggcctggaggttccccaacagcagcctgctgagcagcccctactactacagcagcaccagccggcccagcgccccacccaccacagccacagcctttgaccacctgtag

SEQ ID NO: 21005 - DNA, 570 bp, synthetic construct
  misc_feature 1..570: note = Description of Artificial Sequence: Synthetic coding sequence
  source 1..570: mol_type = other DNA
atggccagcaagagggccctggtgatcctggccaagggagctgaggagatggagaccgtcatccctgtggatgtgatgagaagagctggcatcaaggtgacagtggccggcctggccggcaaggaccctgtgcagtgcagcagagatgtggtgatctgcccagatgccagcctggaggatgccaagaaggagggcccctatgatgtggtggtgctgcccggcggcaacctgggcgcccagaacctgtctgagagcgctgctgtgaaggagatcctgaaggagcaggagaacaggaagggcctgattgctgccatctgtgccggccccacagccctgctggcccatgaaattggatttggcagcaaggtgaccacccaccccctggccaaggacaagatgatgaatggaggccactacacctacagtgaaaatagagtggagaaggatggcctcatcctgaccagccggggccctggcaccagctttgaatttgccctggccatcgtggaggccctgaatggcaaggaggtggccgcccaggtgaaggcccccctggtgctgaaggactag

SEQ ID NO: 21006 - DNA, 570 bp, synthetic construct; identical to SEQ ID NO: 21005
  misc_feature 1..570: note = Description of Artificial Sequence: Synthetic coding sequence
  source 1..570: mol_type = other DNA

SEQ ID NO: 21007 - DNA, 570 bp, synthetic construct; identical to SEQ ID NO: 21005
  misc_feature 1..570: note = Description of Artificial Sequence: Synthetic coding sequence
  source 1..570: mol_type = other DNA

SEQ ID NO: 21008 - DNA, 570 bp, synthetic construct; identical to SEQ ID NO: 21005
  misc_feature 1..570: note = Description of Artificial Sequence: Synthetic coding sequence
  source 1..570: mol_type = other DNA

SEQ ID NO: 21009 - DNA, 3561 bp, synthetic construct
  misc_feature 1..3561: note = Description of Artificial Sequence: Synthetic coding sequence
  source 1..3561: mol_type = other DNA
atggatgagcccccaggcaagcccctgagctgtgaggagaaggagaagctgaaggagaagctggccttcctgaagcgggagtacagcaagaccctggcccggctgcagagggcccagagagctgagaagatcaagcacagcatcaagaagacagtggaggagcaggactgcctgagccagcaggacctgagcccccagctgaagcacagcgagcccaagaacaagatctgtgtgtatgacaagctgcacatcaagacccacctggatgaggagaccggggagaagaccagcatcaccctggatgtgggccctgagagcttcaaccctggagatggccctgggggcctgcccatccagaggacagatgacacccaggagcacttcccccaccgggtgtctgaccccagcggggagcagaagcagaagctgcccagcaggaggaagaagcagcagaagaggaccttcatcagccaggagcgggactgtgtgtttggaacagacagcctgcggctgagcggcaagaggctgaaggagcaggaggagatcagcagcaagaacccagcccggagccctgtgacagagatccgcacccacctgctgagcctgaagtctgagctgcctgacagccctgagcctgtgacagagatcaatgaagacagcgtgctgatccccccaacagcccagcctgagaagggcgtggacaccttcctgcggcggcccaacttcacccgggccaccaccgtgcccctgcagaccctgagtgacagcggcagcagccagcacctggagcacatcccccccaagggcagcagcgagctgaccacccatgacctgaagaacatccgcttcaccagccctgtgtccctggaggcccagggcaagaagatgacagtgtccacagacaacctgctggtgaacaaggccatcagcaagagcggccagctgcccaccagcagcaacctggaggccaacatcagctgcagcctgaatgagctgacctacaacaacctgcctgccaatgaaaaccagaacctgaaggagcagaaccagacagagaagagcctgaagagccccagcgacaccctggatggaagaaatgaaaacctgcaggagagcgagatcctgagccagcccaagagcctgagcctggaggccaccagccccctgtctgctgagaagcacagctgcaccgtgcctgagggcctgctcttccctgctgagtactacgtgaggaccaccaggtccatgagcaactgccagaggaaggtggccgtggaggccgtcatccagagccacctggatgtgaagaagaagggcttcaagaacaagaacaaggatgccagcaagaacctgaacctgagcaatgaggagacagaccagagcgagatccgcatgagcggcacctgcaccggccagcccagcagcaggaccagccagaagctgctgagcctgaccaaggtgagcagccctgctggccccacagaagataatgacctgagcaggaaggctgtggcccaggcccctggccgccgctacacaggcaagaggaagagcgcctgcaccccagccagtgaccactgtgagcccctgctgcccaccagcagcctgagcatcgtgaacagaagcaaggaggaggtgaccagccacaagtaccagcacgagaagctgttcatccaggtgaagggcaagaagagccgccaccagaaggaggacagcctgtcctggagcaacagcgcctacctgagcctggatgatgatgccttcaccgcccccttccacagagatggcatgctgagcctgaagcagctgctgtccttcctgagcatcacagacttccagctgcctgatgaagattttggccccctgaagctggagaaggtgaagagctgcagcgagaagcctgtggagccctttgagagcaagatgtttggagagcggcacctgaaggagggcagctgcatcttccctgaggagctgagccccaagaggatggacacagagatggaggacctggaggaggacctgattgtgctgcccgggaagagccaccccaagaggcccaacagccagagccagcacaccaagacaggcctgagcagcagcatcctgctgtacacccccctgaacacagtggccccagatgacaatgaccggcccaccacagacatgtgcagccctgccttccccatcctgggcaccaccccagccttcggcccccagggcagctatgagaaggccagcacagaggtggccggccgcacctgctgcaccccccagctggcccacctgaaggacagcgtgtgcctggccagtgacaccaagcagtttgacagcagcggcagccctgccaagccccacaccaccctgcaggtgtctggccggcagggccagcccacctgtgactgtgacagcgtgcccccaggcaccccaccacccatcgagagcttcaccttcaaggagaaccagctgtgcaggaacacctgccaggagctgcacaagcacagcgtggagcagacagaaacagctgagctgcctgccagtgacagcatcaaccctggcaacctgcagctggtgtctgagctgaagaaccccagcggcagctgcagcgtggatgtgtctgccatgttctgggagcgggccggctgcaaggagccctgcatcatcacagcctgtgaagatgtggtgtccctgtggaaggccctggatgcctggcagtgggagaagctgtacacctggcactttgctgaggtgcctgtgctgcagatcgtgcctgtgcctgatgtgtacaacctggtgtgtgtggccctgggcaacctggagatccgggagatccgggccctcttctgcagcagtgatgatgaaagtgagaagcaggtgctgctgaagagcggcaacatcaaggctgtgctgggcctgaccaagaggcggctggtgagcagcagcggcaccctgagtgaccagcaggtggaggtgatgacctttgctgaagatggcggcggcaaggagaaccagttcctgatgcctcctgaggagaccatcctgacctttgctgaggtgcagggcatgcaggaggccctgctgggcaccaccatcatgaacaacatcgtcatctggaacctgaagacaggccagctgctgaagaagatgcacattgatgacagctaccaggcctctgtgtgccacaaggcctacagcgagatgggcctgctcttcatcgtgctgagccacccctgtgccaaggagagcgagagcctgcggagccctgtgttccagctgattgtcatcaaccccaagaccaccctgtctgtgggcgtgatgctgtactgcctgcccccaggccaggccggccgcttcctggagggagatgtgaaggaccactgtgccgccgccatcctgaccagcggcaccatcgccatctgggacctgctgctgggccagtgcacagccctgctgccccctgtgtctgaccagcactggagctttgtgaagtggagcggcacagacagccacctgctggccggccagaaggatggcaacatctttgtgtaccactacagctag

SEQ ID NO: 21010 - DNA, 4344 bp, synthetic construct
  misc_feature 1..4344: note = Description of Artificial Sequence: Synthetic coding sequence
  source 1..4344: mol_type = other DNA
atggccagcgctggaaatgctgctgagccccaggaccggggcggcggcggcagcggctgcattggagcccctggccggcctgctgggggcggcagaagaagaagaactggaggcctgcggcgggctgctgccccagaccgggactacctgcaccggcccagctactgtgatgctgcctttgccctggagcagatcagcaagggcaaggccactggaaggaaggcccccctgtggctgcgggccaagttccagaggctgctcttcaagctgggctgctacatccagaagaactgtgggaagttcctggtggtgggcctgctgatctttggagcctttgctgtgggcctgaaggccgccaacctggagaccaacgtggaggagctgtgggtggaggtgggcggccgggtgtcccgggagctgaactacacccggcagaagattggagaggaggccatgttcaacccccagctgatgatccagacccccaaggaggagggcgccaacgtgctgaccacagaggccctgctgcagcacctggacagcgccctgcaggccagccgggtgcacgtgtacatgtacaaccggcagtggaagctggagcacctgtgctacaagagcggggagctgatcacagaaacaggctacatggaccagatcatcgagtacctgtacccctgcctgatcatcacccccctggactgcttctgggagggcgccaagctgcagagcggcacagcctacctgctgggcaagccacccctgcgctggaccaactttgaccccctggagttcctggaggagctgaagaagatcaactaccaggtggacagctgggaggagatgctgaacaaggccgaggtgggccacggctacatggaccggccctgcctgaacccagctgaccctgactgcccagccacagcccccaacaagaacagcaccaagcccctggacatggccctggtgctgaatggaggctgccacggcctgagcaggaagtacatgcactggcaggaggagctgattgtgggcggcaccgtgaagaacagcacaggcaagctggtgtctgcccacgccctgcagaccatgttccagctgatgacccccaagcagatgtatgagcacttcaagggctatgaatatgtgagccacatcaactggaatgaagacaaggctgctgccatcctggaggcctggcagaggacctacgtggaggtggtgcaccagagcgtggcccagaacagcacccagaaggtgctgtccttcaccaccaccaccctggatgacatcctgaagagcttcagtgatgtgtctgtcatccgggtggccagcggctacctgctgatgctggcctatgcctgcctgaccatgctgcgctgggactgcagcaagagccagggcgctgtgggcctggccggcgtgctgctggtggccctgtctgtggccgccggcctgggcctgtgcagcctgattggcatctccttcaatgctgccaccacccaggtgctgcccttcctggccctgggcgtgggcgtggatgatgtgttcctgctggcccacgccttcagcgagaccggccagaacaagaggatcccctttgaggacagaactggagaatgtctgaagaggactggagcctctgtggccctgaccagcatcagcaatgtgacagccttcttcatggccgccctgatccccatcccagccctgcgggccttcagcctgcaggccgctgtggtggtggtgttcaactttgccatggtgctgctgatcttccctgccatcctgtccatggacctgtaccgccgggaggaccggcggctggacatcttctgctgcttcaccagcccctgtgtgtccagggtcatccaggtggagccccaggcctacacagacacccatgacaacacccgctacagccccccaccaccctacagcagccacagctttgcccacgagacccagatcaccatgcagagcacagtgcagctgaggacagaatatgacccccacacccacgtgtactacaccacagctgagcccaggtctgagatctctgtgcagcctgtgacagtgacccaggacaccctgagctgccagagccctgagagcaccagcagcacccgggacctgctgagccagttcagtgacagcagcctgcactgcctggagcccccctgcaccaagtggaccctgagcagctttgctgagaagcactacgcccccttcctgctgaagcccaaggccaaggtggtggtgatcttcctgttcctgggcctgctgggcgtgtccctgtatggcaccaccagggtgagagatggcctggacctgacagacatcgtgccccgggagacccgggagtatgacttcatcgccgcccagttcaagtacttctccttctacaacatgtacatcgtgacccagaaggctgactaccccaacatccagcacctgctgtatgacctgcaccgctccttcagcaatgtgaagtatgtgatgctggaggagaacaagcagctgcccaagatgtggctgcactacttccgggactggctgcagggcctgcaggatgcctttgacagcgactgggagaccgggaagatcatgcccaacaactacaagaatggaagtgatgatggagtgctggcctacaagctgctggtgcagacaggcagccgggacaagcccatcgacatcagccagctgaccaagcagaggctggtggatgctgatggcatcatcaaccccagcgccttctacatctacctgacagcctgggtgtccaatgaccctgtggcctatgctgccagccaggccaacatccggccccacaggcctgagtgggtgcatgacaaggctgactacatgcctgagacccggctgcgcatcccagctgctgagcccattgaatatgcccagttccccttctacctgaatggcctgcgggacaccagtgactttgtggaggccatcgagaaggtgaggaccatctgcagcaactacaccagcctgggcctgagcagctacccaaatggctaccccttcctgttctgggagcagtacatcggcctgcggcactggctgctgctcttcatctctgtggtgctggcctgcaccttcctggtgtgtgctgtgttcctgctgaacccctggacagctggcatcatcgtgatggtgctggccctgatgacagtggagctgtttggcatgatgggcctcatcggcatcaagctgtctgctgtgcctgtggtgatcctgattgcctctgtgggcatcggcgtggagttcaccgtgcacgtggccctggccttcctgacagccatcggggacaagaacagaagagctgtgctggccctggagcacatgtttgcccctgtgctggatggagctgtgtccaccctgctgggcgtgctgatgctggccggcagcgagtttgacttcatcgtgcgctacttctttgctgtgctggccatcctgaccatcctgggcgtgctgaatggcctggtgctgctgcctgtgctgctgtccttcttcggcccctacccagaggtgtccccagccaacggcctgaaccggctgcccacccccagccctgagcccccaccttctgtggtgcgctttgccatgcctcctggccacacccacagcggcagtgacagcagtgacagcgagtacagcagccagaccaccgtgtctggcctgtctgaggagctgcggcactatgaggcccagcagggcgccggcggccctgcccaccaggtgattgtggaggccacagagaaccctgtgtttgcccacagcacagtggtgcaccctgagagccgccaccacccccccagcaacccccggcagcagccccacctggacagcggcagcctgcccccaggccggcagggccagcagccccggcgggaccccccccgggagggcctgtggcccccaccctaccggcccaggagagatgcctttgagatcagcacagagggccacagcggccccagcaacagagcccgctggggccccaggggggcccggagccacaaccccaggaacccagccagcacagccatgggcagctctgtgcccggctactgccagcccatcaccaccgtgacagccagcgcctctgtgacagtggccgtgcaccccccacctgtgcccggccctggaagaaacccccggggcggcctgtgccccggctacccagagacagaccacggcctgtttgaggacccccacgtgcccttccacgtgcgctgtgagcggcgggacagcaaggtggaggtgattgagctgcaggatgtggagtgtgaggagcggccccggggcagcagcagcaactag

SEQ ID NO: 21011 - DNA, 1059 bp, synthetic construct
  misc_feature 1..1059: note = Description of Artificial Sequence: Synthetic coding sequence
  source 1..1059: mol_type = other DNA
aaggccgaggtgggccacggctacatggaccggccctgcctgaacccagctgaccctgactgcccagccacagcccccaacaagaacagcaccaagcccctggacatggccctggtgctgaatggaggctgccacggcctgagcaggaagtacatgcactggcaggaggagctgattgtgggcggcaccgtgaagaacagcacaggcaagctggtgtctgcccacgccctgcagaccatgttccagctgatgacccccaagcagatgtatgagcacttcaagggctatgaatatgtgagccacatcaactggaatgaagacaaggccgccgccatcctggaggcctggcagaggacctacgtggaggtggtgcaccagagcgtggcccagaacagcacccagaaggtgctgtccttcaccaccaccaccctggatgacatcctgaagagcttcagtgatgtgtctgtcatccgggtggccagcggctacctgctgatggtgctgcccttcctggccctgggcgtgggcgtggatgatgtgttcctgctggcccacgccttcagcgagaccggccagaacaagaggatcccctttgaggacagaactggagagtgcctgaagaggactggagcctctgtggccctgaccagcatcagcaatgtgacagccttcttcatggccgccctgatccccatcccagccctgcgggccttcagcctgcaggccgctgtggtggtggtgttcaactttgccatggtgctgctgatcttccctgccatcctgtccatggacctgtacagaagagaagatagaaggctggacatcttctgctgcttcaccagcccctgtgtgtccagggtcatccaggtggagccccaggcctacacagacacccatgacaacacccgctacagccccccaccaccctacagcagccacagctttgcccacgagacccagatcaccatgcagagcacagtgcagctgaggacagaatatgacccccacacccacgtgtactacaccacagctgagcccaggtctgagatctctgtgtag

SEQ ID NO: 21012 - DNA, 4341 bp, synthetic construct
  misc_feature 1..4341: note = Description of Artificial Sequence: Synthetic coding sequence
  source 1..4341: mol_type = other DNA
atggagctgctgaacagaaaccggctggtgattgtgagcccccgctgcaccccacccaaggccagcggcggccctgcccggcggggcttctacaccttccgctccttctgcaaggatggcggcggcggggaggaggaggaggagaatggaggagaggagaaggatgacagaggagacaaggagaccaggagtgacaagggcaaggccaccggcaggaaggcccccctgtggctgcgggccaagttccagaggctgctcttcaagctgggctgctacatccagaagaactgtgggaagttcctggtggtgggcctgctgatctttggagcctttgctgtgggcctgaaggccgccaacctggagaccaacgtggaggagctgtgggtggaggtgggcggccgggtgtcccgggagctgaactacacccggcagaagatcggggaggaggccatgttcaacccccagctgatgatccagacccccaaggaggagggcgccaacgtgctgaccacagaggccctgctgcagcacctggacagcgccctgcaggccagccgggtgcacgtgtacatgtacaaccggcagtggaagctggagcacctgtgctacaagtctggagagctgatcacagagaccggctacatggaccagatcatcgagtacctgtacccctgcctgatcatcacccccctggactgcttctgggagggcgccaagctgcagagcggcacagcctacctgctgggcaagccacccctgcgctggaccaactttgaccccctggagttcctggaggagctgaagaagatcaactaccaggtggacagctgggaggagatgctgaacaaggccgaggtgggccacggctacatggaccggccctgcctgaacccagctgaccctgactgcccagccacagcccccaacaagaacagcaccaagcccctggacatggccctggtgctgaatggaggctgccacggcctgagcaggaagtacatgcactggcaggaggagctgattgtgggcggcaccgtgaagaacagcacaggcaagctggtgtctgcccacgccctgcagaccatgttccagctgatgacccccaagcagatgtatgagcacttcaagggctatgaatatgtgagccacatcaactggaatgaagacaaggccgccgccatcctggaggcctggcagaggacctacgtggaggtggtgcaccagagcgtggcccagaacagcacccagaaggtgctgtccttcaccaccaccaccctggatgacatcctgaagagcttcagtgatgtgtctgtcatccgggtggccagcggctacctgctgatgctggcctatgcctgcctgaccatgctgcgctgggactgcagcaagagccagggcgctgtgggcctggccggcgtgctgctggtggccctgtctgtggccgccggcctgggcctgtgcagcctcatcggcatctccttcaatgctgccaccacccaggtgctgcccttcctggccctgggcgtgggcgtggatgatgtgttcctgctggcccacgccttcagcgagaccggccagaacaagaggatcccctttgaggacagaactggagagtgcctgaagaggactggagcctctgtggccctgaccagcatcagcaatgtgacagccttcttcatggccgccctgatccccatcccagccctgcgggccttcagcctgcaggccgctgtggtggtggtgttcaactttgccatggtgctgctgatcttccctgccatcctgtccatggacctgtacagaagagaagatagaaggctggacatcttctgctgcttcaccagcccctgtgtgtccagggtcatccaggtggagccccaggcctacacagacacccatgacaacacccgctacagccccccaccaccctacagcagccacagctttgcccacgagacccagatcaccatgcagagcacagtgcagctgaggacagaatatgacccccacacccacgtgtactacaccacagctgagcccaggtctgagatctctgtgcagcctgtgacagtgacccaggacaccctgagctgccagagccctgagagcaccagcagcacccgggacctgctgagccagttcagtgacagcagcctgcactgcctggagcccccctgcaccaagtggaccctgagcagctttgctgagaagcactacgcccccttcctgctgaagcccaaggccaaggtggtggtgatcttcctgttcctgggcctgctgggcgtgtccctgtatggcaccaccagggtgagagatggcctggacctgacagacatcgtgccccgggagacccgggagtatgacttcatcgccgcccagttcaagtacttctccttctacaacatgtacatcgtgacccagaaggctgactaccccaacatccagcacctgctgtatgacctgcacaggagcttcagcaatgtgaagtatgtgatgctggaggagaacaagcagctgcccaagatgtggctgcactacttccgggactggctgcagggcctgcaggatgcctttgacagcgactgggagaccgggaagatcatgcccaacaactacaagaatggaagtgatgatggagtgctggcctacaagctgctggtgcagacaggcagccgggacaagcccatcgacatcagccagctgaccaagcagaggctggtggatgctgatggcatcatcaaccccagcgccttctacatctacctgacagcctgggtgtccaatgaccctgtggcctatgctgccagccaggccaacatccggccccacaggcctgagtgggtgcatgacaaggctgactacatgcctgagacccggctgcgcatcccagctgctgagcccatcgagtatgcccagttccccttctacctgaatggcctgcgggacaccagtgactttgtggaggccatcgagaaggtgaggaccatctgcagcaactacaccagcctgggcctgagcagctaccccaacggctaccccttcctgttctgggagcagtacatcggcctgcggcactggctgctgctcttcatctctgtggtgctggcctgcaccttcctggtgtgtgctgtgttcctgctgaacccctggacagctggcatcatcgtgatggtgctggccctgatgacagtggagctgtttggcatgatgggcctgattggcatcaagctgtctgctgtgcctgtggtgatcctgattgcctctgtgggcattggagtggagttcaccgtgcacgtggccctggccttcctgacagccatcggggacaagaacagaagagctgtgctggccctggagcacatgtttgcccctgtgctggatggagctgtgtccaccctgctgggcgtgctgatgctggccggcagcgagtttgacttcatcgtgcgctacttctttgctgtgctggccatcctgaccatcctgggcgtgctgaatggcctggtgctgctgcctgtgctgctgtccttcttcggcccctacccagaggtgtccccagccaacggcctgaaccggctgcccacccccagccctgagcccccacccagcgtggtgcgctttgccatgcctcctggccacacccacagcggcagtgacagcagtgacagcgagtacagcagccagaccaccgtgtctggcctgtctgaggagctgcggcactatgaggcccagcagggcgctgggggccctgcccaccaggtgattgtggaggccacagaaaatcctgtgtttgcccacagcacagtggtgcaccctgagagccgccaccacccccccagcaacccccggcagcagccccacctggacagcggcagcctgcccccaggccggcagggccagcagccccggcgggaccccccccgggagggcctgtggcccccaccctaccggcccaggagagatgcctttgagatcagcacagagggccacagcggccccagcaacagagcccgctggggccccaggggggcccggagccacaaccccagaaatcctgccagcacagccatgggcagctctgtgcccggctactgccagcccatcaccaccgtgacagccagcgcctctgtgacagtggccgtgcaccccccacctgtgcccggccctggcaggaacccccggggcggcctgtgccccggctacccagagacagaccacggcctgtttgaggacccccacgtgcccttccacgtgcgctgtgaaagaagagacagcaaggtggaggtgattgagctgcaggatgtggagtgtgaggagcggccccggggcagcagcagcaactag

SEQ ID NO: 21013 - DNA, 1758 bp, synthetic construct
  misc_feature 1..1758: note = Description of Artificial Sequence: Synthetic coding sequence
  source 1..1758: mol_type = other DNA
ccctgcaggaagagcagcgccctgaacagccccaaggctgctgtggtggtggtgttcaactttgccatggtgctgctgatcttccctgccatcctgtccatggacctgtaccgccgggaggaccggcggctggacatcttctgctgcttcaccagcccctgtgtgtccagggtcatccaggtggagccccaggcctacacagacacccatgacaacacccgctacagccccccaccaccctacagcagccacagctttgcccacgagacccagatcaccatgcagagcacagtgcagctgaggacagaatatgacccccacacccacgtgtactacaccacagctgagcccaggtctgagatctctgtgcagcctgtgacagtgacccaggacaccctgagctgccagagccctgagagcaccagcagcacccgggacctgctgagccagttcagtgacagcagcctgcactgcctggagcccccctgcaccaagtggaccctgagcagctttgctgagaagcactacgcccccttcctgctgaagcccaaggccaaggtggtggtgatcttcctgttcctgggcctgctgggcgtgtccctgtatggcaccaccagggtgagagatggcctggacctgacagacatcgtgccccgggagacccgggagtatgacttcatcgccgcccagttcaagtacttctccttctacaacatgtacatcgtgacccagaaggctgactaccccaacatccagcacctgctgtatgacctgcaccgctccttcagcaatgtgaagtatgtgatgctggaggagaacaagcagctgcccaagatgtggctgcactacttccgggactggctgcagggcctgcaggatgcctttgacagcgactgggagaccgggaagatcatgcccaacaactacaagaatggaagtgatgatggagtgctggcctacaagctgctggtgcagacaggcagccgggacaagcccatcgacatcagccagctgaccaagcagaggctggtggatgctgatggcatcatcaaccccagcgccttctacatctacctgacagcctgggtgtccaatgaccctgtggcctatgctgccagccaggccaacatccggccccacaggcctgagtgggtgcatgacaaggctgactacatgcctgagacccggctgcgcatcccagctgctgagcccattgaatatgcccagttccccttctacctgaatggcctgcgggacaccagtgactttgtggaggccatcgagaaggtgaggaccatctgcagcaactacaccagcctgggcctgagcagctacccaaatggctaccccttcctgttctgggagcagtacatcggcctgcggcactggctgctgctcttcatctctgtggtgctggcctgcaccttcctggtgtgtgctgtgttcctgctgaacccctggacagctggcatcatcgtgatggtgctggccctgatgacagtggagctgtttggcatgatgggcctcatcggcatcaagctgtctgctgtgcctgtggtgatcctgattgcctctgtgggcatcggcgtggagttcaccgtgcacgtggccctggccttcctgacagccatcggggacaagaacagaagagctgtgctggccctggagcacatgtttgcccctgtgctggatggagctgtgtccaccctgctgggcgtgctgatgctggccggcagcgagtttgacttcatcgtgtag

SEQ ID NO: 21014 - DNA, 729 bp, synthetic construct
  misc_feature 1..729: note = Description of Artificial Sequence: Synthetic coding sequence
  source 1..729: mol_type = other DNA
atgcctcctggccacacccacagcggcagtgacagcagtgacagcgagtacagcagccagaccaccgtgtctggcctgtctgaggagctgcggcactatgaggcccagcagggcgccggcggccctgcccaccaggtgattgtggaggccacagagaaccctgtgtttgcccacagcacagtggtgcaccctgagagccgccaccacccccccagcaacccccggcagcagccccacctggacagcggcagcctgcccccaggccggcagggccagcagccccggcgggaccccccccgggagggcctgtggcccccaccctaccggcccaggagagatgcctttgagatcagcacagagggccacagcggccccagcaacagagcccgctggggccccaggggggcccggagccacaaccccaggaacccagccagcacagccatgggcagctctgtgcccggctactgccagcccatcaccaccgtgacagccagcgcctctgtgacagtggccgtgcaccccccacctgtgcccggccctggaagaaacccccggggcggcctgtgccccggctacccagagacagaccacggcctgtttgaggaccccacctgcctgagcaccagcggcgtgcggggcggcatccgccgctggaagagcctgagctgcaggacctggaatgcccggcggggccctggagaggccgcccccacagaaggagactag

SEQ ID NO: 21015 - DNA, 1461 bp, synthetic construct
  misc_feature 1..1461: note = Description of Artificial Sequence: Synthetic coding sequence
  source 1..1461: mol_type = other DNA
gggaaggccaccggcaggaaggcccccctgtggctgcgggccaagttccagaggctgctcttcaagctgggctgctacatccagaagaactgtgggaagttcctggtggtgggcctgctgatctttggagcctttgctgtgggcctgaaggccgccaacctggagaccaacgtggaggagctgtgggtggaggtgggcggccgggtgtcccgggagctgaactacacccggcagaagatcggggaggaggccatgttcaacccccagctgatgatccagacccccaaggaggagggcgccaacgtgctgaccacagaggccctgctgcagcacctggacagcgccctgcaggccagccgggtgcacgtgtacatgtacaacagaggcaagccacccctgcgctggaccaactttgaccccctggagttcctggaggagctgaagaagatcaactaccaggtggacagctgggaggagatgctgaacaaggccgaggtgggccacggctacatggaccggccctgcctgaacccagctgaccctgactgcccagccacagcccccaacaagaacagcaccaagcccctggacatggccctggtgctgaatggaggctgccacggcctgagcaggaagtacatgcactggcaggaggagctgattgtgggcggcaccgtgaagaacagcacaggcaagctggtgtctgcccacgccctgcagaccatgttccagctgatgacccccaagcagatgtatgagcacttcaagggctatgaatatgtgagccacatcaactggaatgaagacaaggccgccgccatcctggaggcctggcagaggacctacgtggaggtggtgcaccagagcgtggcccagaacagcacccagaaggtgctgtccttcaccaccaccaccctggatgacatcctgaagagcttcagtgatgtgtctgtcatccgggtggccagcggctacctgctgatgctggcctatgcctgcctgaccatgctgcgctgggactgcagcaagagccagggcgctgtgggcctggccggcgtgctgctggtggccctgtctgtggccgccggcctgggcctgtgcagcctcatcggcatctccttcaatgctgccaccacccaggtgctgcccttcctggccctgggcgtgggcgtggatgatgtgttcctgctggcccacgccttcagcgagaccggccagaacaagaggatcccctttgaggacagaactggagagtgcctgaagaggactggagcctctgtggccctgaccagcatcagcaatgtgacagccttcttcatggccgccctgatccccatcccagccctgcgggccttcagcctgcagtacatcctgatggcccaccggggccgcctgtccttcaatgacaccctgtggtgtggcggcctgaagagctacatgaggttcccctatgaggagtag

SEQ ID NO: 21016 - DNA, 3891 bp, synthetic construct
  misc_feature 1..3891: note = Description of Artificial Sequence: Synthetic coding sequence
  source 1..3891: mol_type = other DNA
atgttcaacccccagctgatgatccagacccccaaggaggagggcgccaacgtgctgaccacagaggccctgctgcagcacctggacagcgccctgcaggccagccgggtgcacgtgtacatgtacaaccggcagtggaagctggagcacctgtgctacaagtctggagagctgatcacagagaccggctacatggaccagatcatcgagtacctgtacccctgcctgatcatcacccccctggactgcttctgggagggcgccaagctgcagagcggcacagcctacctgctgggcaagccacccctgcgctggaccaactttgaccccctggagttcctggaggagctgaagaagatcaactaccaggtggacagctgggaggagatgctgaacaaggccgaggtgggccacggctacatggaccggccctgcctgaacccagctgaccctgactgcccagccacagcccccaacaagaacagcaccaagcccctggacatggccctggtgctgaatggaggctgccacggcctgagcaggaagtacatgcactggcaggaggagctgattgtgggcggcaccgtgaagaacagcacaggcaagctggtgtctgcccacgccctgcagaccatgttccagctgatgacccccaagcagatgtatgagcacttcaagggctatgaatatgtgagccacatcaactggaatgaagacaaggccgccgccatcctggaggcctggcagaggacctacgtggaggtggtgcaccagagcgtggcccagaacagcacccagaaggtgctgtccttcaccaccaccaccctggatgacatcctgaagagcttcagtgatgtgtctgtcatccgggtggccagcggctacctgctgatgctggcctatgcctgcctgaccatgctgcgctgggactgcagcaagagccagggcgctgtgggcctggccggcgtgctgctggtggccctgtctgtggccgccggcctgggcctgtgcagcctcatcggcatctccttcaatgctgccaccacccaggtgctgcccttcctggccctgggcgtgggcgtggatgatgtgttcctgctggcccacgccttcagcgagaccggccagaacaagaggatcccctttgaggacagaactggagagtgcctgaagaggactggagcctctgtggccctgaccagcatcagcaatgtgacagccttcttcatggccgccctgatccccatcccagccctgcgggccttcagcctgcaggccgctgtggtggtggtgttcaactttgccatggtgctgctgatcttccctgccatcctgtccatggacctgtacagaagagaagatagaaggctggacatcttctgctgcttcaccagcccctgtgtgtccagggtcatccaggtggagccccaggcctacacagacacccatgacaacacccgctacagccccccaccaccctacagcagccacagctttgcccacgagacccagatcaccatgcagagcacagtgcagctgaggacagaatatgacccccacacccacgtgtactacaccacagctgagcccaggtctgagatctctgtgcagcctgtgacagtgacccaggacaccctgagctgccagagccctgagagcaccagcagcacccgggacctgctgagccagttcagtgacagcagcctgcactgcctggagcccccctgcaccaagtggaccctgagcagctttgctgagaagcactacgcccccttcctgctgaagcccaaggccaaggtggtggtgatcttcctgttcctgggcctgctgggcgtgtccctgtatggcaccaccagggtgagagatggcctggacctgacagacatcgtgccccgggagacccgggagtatgacttcatcgccgcccagttcaagtacttctccttctacaacatgtacatcgtgacccagaaggctgactaccccaacatccagcacctgctgtatgacctgcacaggagcttcagcaatgtgaagtatgtgatgctggaggagaacaagcagctgcccaagatgtggctgcactacttccgggactggctgcagggcctgcaggatgcctttgacagcgactgggagaccgggaagatcatgcccaacaactacaagaatggaagtgatgatggagtgctggcctacaagctgctggtgcagacaggcagccgggacaagcccatcgacatcagccagctgaccaagcagaggctggtggatgctgatggcatcatcaaccccagcgccttctacatctacctgacagcctgggtgtccaatgaccctgtggcctatgctgccagccaggccaacatccggccccacaggcctgagtgggtgcatgacaaggctgactacatgcctgagacccggctgcgcatcccagctgctgagcccatcgagtatgcccagttccccttctacctgaatggcctgcgggacaccagtgactttgtggaggccatcgagaaggtgaggaccatctgcagcaactacaccagcctgggcctgagcagctaccccaacggctaccccttcctgttctgggagcagtacatcggcctgcggcactggctgctgctcttcatctctgtggtgctggcctgcaccttcctggtgtgtgctgtgttcctgctgaacccctggacagctggcatcatcgtgatggtgctggccctgatgacagtggagctgtttggcatgatgggcctgattggcatcaagctgtctgctgtgcctgtggtgatcctgattgcctctgtgggcattggagtggagttcaccgtgcacgtggccctggccttcctgacagccatcggggacaagaacagaagagctgtgctggccctggagcacatgtttgcccctgtgctggatggagctgtgtccaccctgctgggcgtgctgatgctggccggcagcgagtttgacttcatcgtgcgctacttctttgctgtgctggccatcctgaccatcctgggcgtgctgaatggcctggtgctgctgcctgtgctgctgtccttcttcggcccctacccagaggtgtccccagccaacggcctgaaccggctgcccacccccagccctgagcccccacccagcgtggtgcgctttgccatgcctcctggccacacccacagcggcagtgacagcagtgacagcgagtacagcagccagaccaccgtgtctggcctgtctgaggagctgcggcactatgaggcccagcagggcgctgggggccctgcccaccaggtgattgtggaggccacagaaaatcctgtgtttgcccacagcacagtggtgcaccctgagagccgccaccacccccccagcaacccccggcagcagccccacctggacagcggcagcctgcccccaggccggcagggccagcagccccggcgggaccccccccgggagggcctgtggcccccaccctaccggcccaggagagatgcctttgagatcagcacagagggccacagcggccccagcaacagagcccgctggggccccaggggggcccggagccacaaccccagaaatcctgccagcacagccatgggcagctctgtgcccggctactgccagcccatcaccaccgtgacagccagcgcctctgtgacagtggccgtgcaccccccacctgtgcccggccctggcaggaacccccggggcggcctgtgccccggctacccagagacagaccacggcctgtttgaggacccccacgtgcccttccacgtgcgctgtgaaagaagagacagcaaggtggaggtgattgagctgcaggatgtggagtgtgaggagcggccccggggcagcagcagcaactag

SEQ ID NO: 21017 - DNA, 3891 bp, synthetic construct; identical to SEQ ID NO: 21016
  misc_feature 1..3891: note = Description of Artificial Sequence: Synthetic coding sequence
  source 1..3891: mol_type = other DNA

SEQ ID NO: 21018 - DNA, 3891 bp, synthetic construct; identical to SEQ ID NO: 21016
  misc_feature 1..3891: note = Description of Artificial Sequence: Synthetic coding sequence
  source 1..3891: mol_type = other DNA

SEQ ID NO: 21019 - DNA, 4146 bp, synthetic construct
  misc_feature 1..4146: note = Description of Artificial Sequence: Synthetic coding sequence
  source 1..4146: mol_type = other DNA
atgggcaaggccactggaaggaaggcccccctgtggctgcgggccaagttccagaggctgctcttcaagctgggctgctacatccagaagaactgtgggaagttcctggtggtgggcctgctgatctttggagcctttgctgtgggcctgaaggccgccaacctggagaccaacgtggaggagctgtgggtggaggtgggcggccgggtgtcccgggagctgaactacacccggcagaagattggagaggaggccatgttcaacccccagctgatgatccagacccccaaggaggagggcgccaacgtgctgaccacagaggccctgctgcagcacctggacagcgccctgcaggccagccgggtgcacgtgtacatgtacaaccggcagtggaagctggagcacctgtgctacaagagcggggagctgatcacagaaacaggctacatggaccagatcatcgagtacctgtacccctgcctgatcatcacccccctggactgcttctgggagggcgccaagctgcagagcggcacagcctacctgctgggcaagccacccctgcgctggaccaactttgaccccctggagttcctggaggagctgaagaagatcaactaccaggtggacagctgggaggagatgctgaacaaggccgaggtgggccacggctacatggaccggccctgcctgaacccagctgaccctgactgcccagccacagcccccaacaagaacagcaccaagcccctggacatggccctggtgctgaatggaggctgccacggcctgagcaggaagtacatgcactggcaggaggagctgattgtgggcggcaccgtgaagaacagcacaggcaagctggtgtctgcccacgccctgcagaccatgttccagctgatgacccccaagcagatgtatgagcacttcaagggctatgaatatgtgagccacatcaactggaatgaagacaaggctgctgccatcctggaggcctggcagaggacctacgtggaggtggtgcaccagagcgtggcccagaacagcacccagaaggtgctgtccttcaccaccaccaccctggatgacatcctgaagagcttcagtgatgtgtctgtcatccgggtggccagcggctacctgctgatgctggcctatgcctgcctgaccatgctgcgctgggactgcagcaagagccagggcgctgtgggcctggccggcgtgctgctggtggccctgtctgtggccgccggcctgggcctgtgcagcctgattggcatctccttcaatgctgccaccacccaggtgctgcccttcctggccctgggcgtgggcgtggatgatgtgttcctgctggcccacgccttcagcgagaccggccagaacaagaggatcccctttgaggacagaactggagaatgtctgaagaggactggagcctctgtggccctgaccagcatcagcaatgtgacagccttcttcatggccgccctgatccccatcccagccctgcgggccttcagcctgcaggccgctgtggtggtggtgttcaactttgccatggtgctgctgatcttccctgccatcctgtccatggacctgtaccgccgggaggaccggcggctggacatcttctgctgcttcaccagcccctgtgtgtccagggtcatccaggtggagccccaggcctacacagacacccatgacaacacccgctacagccccccaccaccctacagcagccacagctttgcccacgagacccagatcaccatgcagagcacagtgcagctgaggacagaatatgacccccacacccacgtgtactacaccacagctgagcccaggtctgagatctctgtgcagcctgtgacagtgacccaggacaccctgagctgccagagccctgagagcaccagcagcacccgggacctgctgagccagttcagtgacagcagcctgcactgcctggagcccccctgcaccaagtggaccctgagcagctttgctgagaagcactacgcccccttcctgctgaagcccaaggccaaggtggtggtgatcttcctgttcctgggcctgctgggcgtgtccctgtatggcaccaccagggtgagagatggcctggacctgacagacatcgtgccccgggagacccgggagtatgacttcatcgccgcccagttcaagtacttctccttctacaacatgtacatcgtgacccagaaggctgactaccccaacatccagcacctgctgtatgacctgcaccgctccttcagcaatgtgaagtatgtgatgctggaggagaacaagcagctgcccaagatgtggctgcactacttccgggactggctgcagggcctgcaggatgcctttgacagcgactgggagaccgggaagatcatgcccaacaactacaagaatggaagtgatgatggagtgctggcctacaagctgctggtgcagacaggcagccgggacaagcccatcgacatcagccagctgaccaagcagaggctggtggatgctgatggcatcatcaaccccagcgccttctacatctacctgacagcctgggtgtccaatgaccctgtggcctatgctgccagccaggccaacatccggccccacaggcctgagtgggtgcatgacaaggctgactacatgcctgagacccggctgcgcatcccagctgctgagcccattgaatatgcccagttccccttctacctgaatggcctgcgggacaccagtgactttgtggaggccatcgagaaggtgaggaccatctgcagcaactacaccagcctgggcctgagcagctacccaaatggctaccccttcctgttctgggagcagtacatcggcctgcggcactggctgctgctcttcatctctgtggtgctggcctgcaccttcctggtgtgtgctgtgttcctgctgaacccctggacagctggcatcatcgtgatggtgctggccctgatgacagtggagctgtttggcatgatgggcctcatcggcatcaagctgtctgctgtgcctgtggtgatcctgattgcctctgtgggcatcggcgtggagttcaccgtgcacgtggccctggccttcctgacagccatcggggacaagaacagaagagctgtgctggccctggagcacatgtttgcccctgtgctggatggagctgtgtccaccctgctgggcgtgctgatgctggccggcagcgagtttgacttcatcgtgcgctacttctttgctgtgctggccatcctgaccatcctgggcgtgctgaatggcctggtgctgctgcctgtgctgctgtccttcttcggcccctacccagaggtgtccccagccaacggcctgaaccggctgcccacccccagccctgagcccccaccttctgtggtgcgctttgccatgcctcctggccacacccacagcggcagtgacagcagtgacagcgagtacagcagccagaccaccgtgtctggcctgtctgaggagctgcggcactatgaggcccagcagggcgccggcggccctgcccaccaggtgattgtggaggccacagagaaccctgtgtttgcccacagcacagtggtgcaccctgagagccgccaccacccccccagcaacccccggcagcagccccacctggacagcggcagcctgcccccaggccggcagggccagcagccccggcgggaccccccccgggagggcctgtggcccccaccctaccggcccaggagagatgcctttgagatcagcacagagggccacagcggccccagcaacagagcccgctggggccccaggggggcccggagccacaaccccaggaacccagccagcacagccatgggcagctctgtgcccggctactgccagcccatcaccaccgtgacagccagcgcctctgtgacagtggccgtgcaccccccacctgtgcccggccctggaagaaacccccggggcggcctgtgccccggctacccagagacagaccacggcctgtttgaggacccccacgtgcccttccacgtgcgctgtgagcggcgggacagcaaggtggaggtgattgagctgcaggatgtggagtgtgaggagcggccccggggcagcagcagcaactag

SEQ ID NO: 21020 - DNA, 4146 bp, synthetic construct; identical to SEQ ID NO: 21019
  misc_feature 1..4146: note = Description of Artificial Sequence: Synthetic coding sequence
  source 1..4146: mol_type = other DNA

SEQ ID NO: 21021 - DNA, 255 bp, synthetic construct
  misc_feature 1..255: note = Description of Artificial Sequence: Synthetic coding sequence
  source 1..255: mol_type = other DNA
atgggcaaggccactggaaggaaggcccccctgtggctgcgggccaagttccagaggctgctcttcaagctgggctgctacatccagaagaactgtgggaagttcctggtggtgggcctgctgatctttggagcctttgctgtgggcctgaaggccgccaacctggagaccaacgtggaggagctgtgggtggaggaggtgaacctgctgtgtggcggccagaccagcaccctgtggaacagctggaagagctag

SEQ ID NO: 21022 - DNA, 525 bp, synthetic construct
  misc_feature 1..525: note = Description of Artificial Sequence: Synthetic coding sequence
  source 1..525: mol_type = other DNA
atgttcaacccccagctgatgatccagacccccaaggaggagggcgccaacgtgctgaccacagaggccctgctgcagcacctggacagcgccctgcaggccagccgggtgcacgtgtacatgtacaaccggcagtggaagctggagcacctgtgctacaagtctggagagctgatcacagagaccggctacatggaccagatcatcgagtacctgtacccctgcctgatcatcacccccctggactgcttctgggagggcgccaagctgcagagcggcacagcctacctgctgggcaagccacccctgcgctggaccaactttgaccccctggagttcctggaggagctgaagaagatcaactaccaggtggacagctgggaggagatgctgaacaaggccgaggtgggccacggctacatggaccggccctgcctgaacccagctgaccctgactgcccagccacagcccccaacaagaacagcaccaagcccctggacatggccctggtgctgaatggatag

SEQ ID NO: 21023 - DNA, 525 bp, synthetic construct; identical to SEQ ID NO: 21022
  misc_feature 1..525: note = Description of Artificial Sequence: Synthetic coding sequence
  source 1..525: mol_type = other DNA

SEQ ID NO: 21024 - DNA, 279 bp, synthetic construct
  misc_feature 1..279: note = Description of Artificial Sequence: Synthetic coding sequence
  source 1..279: mol_type = other DNA
atgttcaacccccagctgatgatccagacccccaaggaggagggcgccaacgtgctgaccacagaggccctgctgcagcacctggacagcgccctgcaggccagccgggtgcacgtgtacatgtacaaccggcagtggaagctggagcacctgtgctacaagtctggagagctgatcacagagaccggctacatggaccagatcatcgagtacctgtacccctgcctgatcatcacccccctggactgcttctgggagggcgccaagctgcagagctag

SEQ ID NO: 21025 - DNA, 525 bp, synthetic construct; identical to SEQ ID NO: 21022
  misc_feature 1..525: note = Description of Artificial Sequence: Synthetic coding sequence
  source 1..525: mol_type = other DNA

SEQ ID NO: 21026 - DNA, 525 bp, synthetic construct; identical to SEQ ID NO: 21022
  misc_feature 1..525: note = Description of Artificial Sequence: Synthetic coding sequence
  source 1..525: mol_type = other DNA

SEQ ID NO: 21027 - DNA, 954 bp, synthetic construct
  misc_feature 1..954: note = Description of Artificial Sequence: Synthetic coding sequence
  source 1..954: mol_type = other DNA
atgccccgggaggaccgggccacctggaagagcaactacttcctgaagatcatccagctgctggatgactaccccaagtgcttcatcgtgggcgctgacaacgtgggcagcaagcagatgcagcagatccgcatgagcctgcggggcaaggctgtggtgctgatgggcaagaacaccatgatgaggaaggccatccggggccacctggagaacaacccagccctggagaagctgctgccccacatcagaggaaatgtgggctttgtgttcaccaaggaggacctgacagagatccgggacatgctgctggccaacaaggtgcctgctgctgcccgggccggggccatcgccccctgtgaggtgacagtgcctgcccagaacacaggcctgggccctgagaagaccagcttcttccaggccctgggcatcaccaccaagatcagccggggcaccatcgagatcctgagtgatgtgcagctgatcaagacaggagacaaggtgggcgccagcgaggccaccctgctgaacatgctgaacatcagccccttctcctttggcctggtgatccagcaggtgtttgacaatggcagcatctacaaccctgaggtgctggacatcacagaggagaccctgcacagccgcttcctggagggcgtgagaaatgtggcctctgtgtgcctgcagatcggctaccccaccgtggcctctgtgccccacagcatcatcaatggctacaagagggtgctggccctgtctgtggagacagactacaccttccccctggccgagaaggtgaaggccttcctggccgaccccagcgcctttgtggccgccgcccctgtggccgccgccaccacagctgccccagctgctgctgctgccccagccaaggtggaggccaaggaggagagcgaggagagtgatgaggacatgggcttcggcctgtttgattag

SEQ ID NO: 21028 - DNA, 1818 bp, synthetic construct
  misc_feature 1..1818: note = Description of Artificial Sequence: Synthetic coding sequence
  source 1..1818: mol_type = other DNA
atggatgacctggatgccctgctggccgacctggagagcaccaccagccacatcagcaagaggcctgtgttcctgtctgaggagaccccctacagctaccccactggaaaccacacctaccaggagattgctgtgcccccacctgtgcccccaccacccagcagcgaggccctgaatggcaccatcctggaccccctggaccagtggcagcccagcagcagccgcttcatccaccagcagccccagagcagcagccctgtgtatggcagcagcgccaagaccagctctgtgagcaacccccaggacagcgtgggcagcccctgcagccgggtgggggaggaggagcacgtgtacagcttccccaacaagcagaagtctgctgagcccagccccaccgtgatgagcaccagcctgggcagcaacctgtctgagctggaccggctgctgctggagctgaatgctgtgcagcacaaccccccaggcttcccagcagatgaggccaacagcagcccccccctgcccggggccctgagccccctgtatggagtgcctgagaccaacagccccctgggcggcaaggccggccccctgaccaaggagaagcccaagagaaatggaggccggggcctggaggatgtgcggcccagcgtggagagcctgctggatgagctggagagctctgtgcccagccctgtgcctgccatcaccgtgaaccagggcgagatgagcagcccccagagggtgaccagcacccagcagcagacccgcatcagcgccagcagcgccacccgggagctggatgagctgatggccagcctgagtgacttcaagggctcctggcccctggaggaggtggtgctgctggtgtccatcagcagctctgtgcaggagggggagaagtacccccacccctgtgccgcccggcacaggacccccagcctgcggagcccagaccagcccccaccctgcccccagttcatggcccagggcaagacaggcagcagcagccccccaggcggcccccccaagccaggcagccagctggacagcatgctgggcagcctgcagagcgacctgaacaagctgggcgtggccaccgtggccaagggcgtgtgtggggcctgcaagaagcccatcgccggccaggtggtgacagccatgggcaagacctggcaccctgagcactttgtgtgcacccactgccaggaggagatcggcagcaggaacttctttgaaagagatggccagccctactgtgagaaggactaccacaacctcttcagcccccgctgctactactgcaatggccccatcctggacaaggtggtgacagccctggacaggacctggcaccctgagcacttcttctgtgcccagtgtggggccttcttcggccctgagggcttccacgagaaggatggcaaggcctactgcaggaaggactactttgacatgtttgcccccaagtgtggcggctgtgcccgggccatcctggagaactacatcagcgccctgaacaccctgtggcaccctgagtgctttgtgtgccgggagtgcttcaccccatttgtgaatggcagcttctttgaacatgatggccagccctactgtgaggtgcactaccacgagcggcggggcagcctgtgcagcggctgccagaagcccatcaccggccgctgcatcacagccatggccaagaagttccaccctgagcactttgtgtgtgccttctgcctgaagcagctgaacaagggcaccttcaaggagcagaatgacaagccctactgccagaactgcttcctgaagctgttctgctag

SEQ ID NO: 21029 - DNA, 702 bp, synthetic construct
  misc_feature 1..702: note = Description of Artificial Sequence: Synthetic coding sequence
  source 1..702: mol_type = other DNA
atgggcaagacctggcaccctgagcactttgtgtgcacccactgccaggaggagatcggcagcaggaacttctttgaaagagatggccagccctactgtgagaaggactaccacaacctcttcagcccccgctgctactactgcaatggccccatcctggacaaggtggtgacagccctggacaggacctggcaccctgagcacttcttctgtgcccagtgtggggccttcttcggccctgagggcttccacgagaaggatggcaaggcctactgcaggaaggactactttgacatgtttgcccccaagtgtggcggctgtgcccgggccatcctggagaactacatcagcgccctgaacaccctgtggcaccctgagtgctttgtgtgccgggagtgcttcaccccatttgtgaatggcagcttctttgaacatgatggccagccctactgtgaggtgcactaccacgagcggcggggcagcctgtgcagcggctgccagaagcccatcaccggccgctgcatcacagccatggccaagaagttccacccagacccctgcaccagccccaggacaggcctggccagcaccccccactggagccacctgttcctgatcttccagcagtgcagcagaggagctgggaagggccggcagggcctgctgggcagcctcttcatcctgatccccccacccacctag

SEQ ID NO: 21030 - DNA, 1212 bp, synthetic construct
  misc_feature 1..1212: note = Description of Artificial Sequence: Synthetic coding sequence
  source 1..1212: mol_type = other DNA
atgtctgcccccagcagcacaggcccccagtactgccccggcctgcccagcaggaaggaggccaccccagagggccggcctgagacctgcctgctgcccagcagcccccaggcccagaggcccatccagggcctggagcagagagcagatggagagcgctgctgggccgccggctggcccagagatggcggccgcagcagccctgggggccaggatgagggcggcggctcctggcccctggaggaggtggtgctgctggtgtccatcagcagctctgtgcaggagggggagaagtacccccacccctgtgccgcccggcacaggacccccagcctgcggagcccagaccagcccccaccctgcccccagttcatggcccagggcaagacaggcagcagcagccccccaggcggcccccccaagccaggcagccagctggacagcatgctgggcagcctgcagagcgacctgaacaagctgggcgtggccaccgtggccaagggcgtgtgtggggcctgcaagaagcccatcgccggccaggtggtgacagccatgggcaagacctggcaccctgagcactttgtgtgcacccactgccaggaggagatcggcagcaggaacttctttgaaagagatggccagccctactgtgagaaggactaccacaacctcttcagcccccgctgctactactgcaatggccccatcctggacaaggtggtgacagccctggacaggacctggcaccctgagcacttcttctgtgcccagtgtggggccttcttcggccctgagggcttccacgagaaggatggcaaggcctactgcaggaaggactactttgacatgtttgcccccaagtgtggcggctgtgcccgggccatcctggagaactacatcagcgccctgaacaccctgtggcaccctgagtgctttgtgtgccgggagtgcttcaccccatttgtgaatggcagcttctttgaacatgatggccagccctactgtgaggtgcactaccacgagcggcggggcagcctgtgcagcggctgccagaagcccatcaccggccgctgcatcacagccatggccaagaagttccaccctgagcactttgtgtgtgccttctgcctgaagcagctgaacaagggcaccttcaaggagcagaatgacaagccctactgccagaactgcttcctgaagctgttctgctag

SEQ ID NO: 21031 - DNA, 1674 bp, synthetic construct
  misc_feature 1..1674: note = Description of Artificial Sequence: Synthetic coding sequence
  source 1..1674: mol_type = other DNA
atggatgacctggatgccctgctggccgacctggagagcaccaccagccacatcagcaagaggcctgtgttcctgtctgaggagaccccctacagctaccccactggaaaccacacctaccaggagattgctgtgcccccacctgtgcccccaccacccagcagcgaggccctgaatggcaccatcctggaccccctggaccagtggcagcccagcagcagccgcttcatccaccagcagccccagagcagcagccctgtgtatggcagcagcgccaagaccagctctgtgagcaacccccaggacagcgtgggcagcccctgcagccgggtgggggaggaggagcacgtgtacagcttccccaacaagcagaagtctgctgagcccagccccaccgtgatgagcaccagcctgggcagcaacctgtctgagctggaccggctgctgctggagctgaatgctgtgcagcacaaccccccaggcttcccagcagatgaggccaacagcagcccccccctgcccggggccctgagccccctgtatggagtgcctgagaccaacagccccctgggcggcaaggccggccccctgaccaaggagaagcccaagagaaatggaggccggggcctggaggatgtgcggcccagcgtggagagcctgctggatgagctggagagctctgtgcccagccctgtgcctgccatcaccgtgaaccagggcgagatgagcagcccccagagggtgaccagcacccagcagcagacccgcatcagcgccagcagcgccacccgggagctggatgagctgatggccagcctgagtgacttcaagttcatggcccagggcaagacaggcagcagcagccccccaggcggcccccccaagccaggcagccagctggacagcatgctgggcagcctgcagagcgacctgaacaagctgggcgtggccaccgtggccaagggcgtgtgtggggcctgcaagaagcccatcgccggccaggtggtgacagccatgggcaagacctggcaccctgagcactttgtgtgcacccactgccaggaggagatcggcagcaggaacttctttgaaagagatggccagccctactgtgagaaggactaccacaacctcttcagcccccgctgctactactgcaatggccccatcctggacaaggtggtgacagccctggacaggacctggcaccctgagcacttcttctgtgcccagtgtggggccttcttcggccctgagggcttccacgagaaggatggcaaggcctactgcaggaaggactactttgacatgtttgcccccaagtgtggcggctgtgcccgggccatcctggagaactacatcagcgccctgaacaccctgtggcaccctgagtgctttgtgtgccgggagtgcttcaccccatttgtgaatggcagcttctttgaacatgatggccagccctactgtgaggtgcactaccacgagcggcggggcagcctgtgcagcggctgccagaagcccatcaccggccgctgcatcacagccatggccaagaagttccaccctgagcactttgtgtgtgccttctgcctgaagcagctgaacaagggcaccttcaaggagcagaatgacaagccctactgccagaactgcttcctgaagctgttctgctag

SEQ ID NO: 21032 - DNA, 1275 bp, synthetic construct
  misc_feature 1..1275: note = Description of Artificial Sequence: Synthetic coding sequence
  source 1..1275: mol_type = other DNA
atgagcaccagcctgggcagcaacctgtctgagctggaccggctgctgctggagctgaatgctgtgcagcacaaccccccaggcttcccagcagatgaggccaacagcagcccccccctgcccggggccctgagccccctgtatggagtgcctgagaccaacagccccctgggcggcaaggccggccccctgaccaaggagaagcccaagagaaatggaggccggggcctggaggatgtgcggcccagcgtggagagcctgctggatgagctggagagctctgtgcccagccctgtgcctgccatcaccgtgaaccagggcgagatgagcagcccccagagggtgaccagcacccagcagcagacccgcatcagcgccagcagcgccacccgggagctggatgagctgatggccagcctgagtgacttcaagttcatggcccagggcaagacaggcagcagcagccccccaggcggcccccccaagccaggcagccagctggacagcatgctgggcagcctgcagagcgacctgaacaagctgggcgtggccaccgtggccaagggcgtgtgtggggcctgcaagaagcccatcgccggccaggtggtgacagccatgggcaagacctggcaccctgagcactttgtgtgcacccactgccaggaggagatcggcagcaggaacttctttgaaagagatggccagccctactgtgagaaggactaccacaacctcttcagcccccgctgctactactgcaatggccccatcctggacaaggtggtgacagccctggacaggacctggcaccctgagcacttcttctgtgcccagtgtggggccttctttggacctgagggcttccacgagaaggatggcaaggcctactgcaggaaggactactttgacatgtttgcccccaagtgtggcggctgtgcccgggccatcctggagaactacatcagcgccctgaacaccctgtggcacccagaatgttttgtgtgccgggagtgcttcaccccatttgtgaatggcagcttctttgaacatgatggccagccctactgtgaggtgcactaccatgaaagaagaggcagcctgtgcagcggctgccagaagcccatcaccggccgctgcatcacagccatggccaagaagttccaccctgagcactttgtgtgtgccttctgcctgaagcagctgaacaagggcaccttcaaggagcagaatgacaagccctactgccagaactgcttcctgaagctgttctgctag

SEQ ID NO: 21033 - DNA, 951 bp, synthetic construct
  misc_feature 1..951: note = Description of Artificial Sequence: Synthetic coding sequence
  source 1..951: mol_type = other DNA
atgagcagcccccagagggtgaccagcacccagcagcagacccgcatcagcgccagcagcgccacccgggagctggatgagctgatggccagcctgagtgacttcaagttcatggcccagggcaagacaggcagcagcagccccccaggcggcccccccaagccaggcagccagctggacagcatgctgggcagcctgcagagcgacctgaacaagctgggcgtggccaccgtggccaagggcgtgtgtggggcctgcaagaagcccatcgccggccaggtggtgacagccatgggcaagacctggcaccctgagcactttgtgtgcacccactgccaggaggagatcggcagcaggaacttctttgaaagagatggccagccctactgtgagaaggactaccacaacctcttcagcccccgctgctactactgcaatggccccatcctggacaaggtggtgacagccctggacaggacctggcaccctgagcacttcttctgtgcccagtgtggggccttctttggacctgagggcttccacgagaaggatggcaaggcctactgcaggaaggactactttgacatgtttgcccccaagtgtggcggctgtgcccgggccatcctggagaactacatcagcgccctgaacaccctgtggcacccagaatgttttgtgtgccgggagtgcttcaccccatttgtgaatggcagcttctttgaacatgatggccagccctactgtgaggtgcactaccatgaaagaagaggcagcctgtgcagcggctgccagaagcccatcaccggccgctgcatcacagccatggccaagaagttccaccctgagcactttgtgtgtgccttctgcctgaagcagctgaacaagggcaccttcaaggagcagaatgacaagccctactgccagaactgcttcctgaagctgttctgctag

SEQ ID NO: 21034 - DNA, 993 bp, synthetic construct
  misc_feature 1..993: note = Description of Artificial Sequence: Synthetic coding sequence
  source 1..993: mol_type = other DNA
atgccccacagcgtgaccctgcggggccccagcccctggggcttccggctggtgggcggccgggacttcagcgcccccctgaccatcagccgggtgcacgccggcagcaaggccgccctggccgccctgtgccctggggacctgatccaggccatcaatggagagagcacagagctgatgacccacctggaggcccagaaccgcatcaagggctgccacgaccacctgaccctgtctgtgtccaggcctgagggccgctcctggcccagcgccccagatgacagcaaggcccaggcccaccgcatccacatcgaccctgagatccaggacggcagccccaccaccagcagaagacccagcggcaccggcaccggcccagaagatggccggcccagcctgggcagcccctacggccagcccccacgcttccctgtgccccacaacggcagcagcgaggccaccctgcctgcccagatgagcaccctgcacgtgagccccccaccttctgctgaccctgcccggggcctgcccaggagccgggactgccgggtggacctgggcagcgaggtgtacaggatgctgcgggagcctgctgagcctgtggccgctgagcccaagcagagcggcagcttccgctacctgcagggcatgctggaggccggggagggcggggactggccaggccctgggggccccaggaacctgaagcccacagccagcaagctgggcgcccccctgagcggcctgcagggcctgcctgagtgcacccgctgtggccacggcatcgtgggcaccatcgtgaaggcccgggacaagctgtaccaccctgagtgcttcatgtgcagcgactgtggcctgaacctgaagcagaggggctacttcttcctggatgagcggctgtactgtgagagccacgccaaggcccgggtgaagcccccagagggctatgatgtggtggccgtgtacccaaatgccaaggtggagctggtgtag

SEQ ID NO: 21035 - DNA, 741 bp, synthetic construct
  misc_feature 1..741: note = Description of Artificial Sequence: Synthetic coding sequence
  source 1..741: mol_type = other DNA
atgccccacagcgtgaccctgcggggccccagcccctggggcttccggctggtgggcggccgggacttcagcgcccccctgaccatcagccgggtgcacgccggcagcaaggccgccctggccgccctgtgccctggggacctgatccaggccatcaatggagagagcacagagctgatgacccacctggaggcccagaaccgcatcaagggctgccacgaccacctgaccctgtctgtgtccaggcctgagggccgctcctggcccagcgccccagatgacagcaaggcccaggcccaccgcatccacatcgaccctgagatccaggacggcagccccaccaccagcagaagacccagcggcaccggcaccggcccagaagatggccggcccagcctgggcagcccctacggccagcccccacgcttccctgtgccccacaacggcagcagcgaggccaccctgcctgcccagatgagcaccctgcacgtgagccccccaccttctgctgaccctgcccggggcctgcccaggagccgggactgccgggtggacctgggcagcgaggtgtacaggatgctgcgggagcctgctgagcctgtggccgctgagcccaagcagagcggcagcttccgctacctgcagggcatgctggaggccggggagggcggggcccccagcagccgccacggcaccagcagcaccatccccagcgccagctgtgctgtgacagctgcctag

SEQ ID NO: 21036 - DNA, 1791 bp, synthetic construct
  misc_feature 1..1791: note = Description of Artificial Sequence: Synthetic coding sequence
  source 1..1791: mol_type = other DNA
atgagcaactacagcgtgtccctggtgggccctgccccctggggcttccggctgcagggcggcaaggacttcaacatgcccctgaccatcagcagcctgaaggatggcggcaaggccgcccaggccaacgtgagaattggagatgtggtgctgagcattgatggcatcaatgcccagggcatgacccacctggaggcccagaacaagatcaagggctgcaccggcagcctgaacatgaccctgcagagggccagcgctgcccccaagccagagcctgtgcctgtgcagaagggggagcccaaggaggtggtgaagcctgtgcccatcaccagccctgctgtgtccaaggtgaccagcaccaacaacatggcctacaacaaggccccccggcccttcggctctgtgagcagccccaaggtgaccagcatccccagccccagcagcgccttcaccccagcccacgccaccaccagcagccacgccagccccagccctgtggccgctgtgaccccacccctgtttgctgccagcggcctgcacgccaatgccaacctgtctgctgaccagagccccagcgccctgtctgctgggaagacagctgtgaatgtgccccggcagcccaccgtgacctctgtgtgcagcgagaccagccaggagctggccgagggccagaggcggggcagccagggcgacagcaagcagcagaatggcccccccaggaagcacatcgtggagcgctacacagagttctaccacgtgcccacccacagtgatgccagcaagaagaggctgattgaggacacagaggactggaggcccaggacaggcaccacccagagccgctccttccgcatcctggcccagatcaccggcacagagcacctgaaggagagcgaggccgacaacaccaagaaggccaacaacagccaggagcccagcccccagctggccagctctgtggccagcaccaggtccatgcctgagagcctggacagccccaccagcggccggcctggggtgaccagcctgacagctgctgctgccttcaagcctgtgggcagcactggagtcatcaagagccccagctggcagaggcccaaccagggcgtgcccagcacaggccgcatcagcaacagcgccacctacagcggctctgtggccccagccaacagcgccctgggccagacccagcccagcgaccaggacaccctggtgcagagagctgagcacatcccagctgggaagaggacccccatgtgtgcccactgcaaccaggtgatccggggccccttcctggtggccctgggcaagtcctggcaccctgaggagttcaactgtgcccactgcaagaacaccatggcctacatcggctttgtggaggagaagggggccctgtactgtgagctgtgctatgagaagttctttgccccagaatgtggccgctgccagaggaagatcctgggggaggtgatcagcgccctgaagcagacctggcacgtgtcctgctttgtgtgtgtggcctgtgggaagcccatcagaaataatgtgttccacctggaggatggagagccctactgtgaaacagactactatgccctgtttggcaccatctgccacggctgtgagttccccattgaagctggggacatgttcctggaggccctgggctacacctggcatgacacctgctttgtgtgcagcgtgtgctgtgagagcctggagggccagaccttcttcagcaagaaggacaagcccctgtgcaagaagcacgcccacagcgtgaacttctag

SEQ ID NO: 21037 - DNA, 645 bp, synthetic construct
  misc_feature 1..645: note = Description of Artificial Sequence: Synthetic coding sequence
  source 1..645: mol_type = other DNA
atgagcaactacagcgtgtccctggtgggccctgccccctggggcttccggctgcagggcggcaaggacttcaacatgcccctgaccatcagcagcctgaaggatggcggcaaggccgcccaggccaacgtgagaattggagatgtggtgctgagcattgatggcatcaatgcccagggcatgacccacctggaggcccagaacaagatcaagggctgcaccggcagcctgaacatgaccctgcagagggccagcgctgcccccaagccagagcctgtgcctgtgcagaagaagacccaggtgaccaacaaccctggcaccgtgaagatcccccccaagaggcctcccaggaagcacatcgtggagcgctacacagagttctaccacgtgcccacccacagtgatgccagcaagaagaggctgattgaggacacagaggactggaggcccaggacaggcaccacccagagccgctccttccgcatcctggcccagatcactggaacagagcacctgaaggagagcgaggccgacaacaccaagaaggccaaggagaagatccccctgcacgtgttcagccccaagtacaccaagctgcgggactggcaccacgaggtgtctgcccgggccctgaatgtgcagtag

SEQ ID NO: 21038 - DNA, 705 bp, synthetic construct
  misc_feature 1..705: note = Description of Artificial Sequence: Synthetic coding sequence
  source 1..705: mol_type = other DNA
atgagcaactacagcgtgtccctggtgggccctgccccctggggcttccggctgcagggcggcaaggacttcaacatgcccctgaccatcagcagcctgaaggatggcggcaaggccgcccaggccaacgtgagaattggagatgtggtgctgagcattgatggcatcaatgcccagggcatgacccacctggaggcccagaacaagatcaagggctgcaccggcagcctgaacatgaccctgcagagggccagcgctgcccccaagccagagcctgtgcctgtgcagaagcccaccgtgacctctgtgtgcagcgagaccagccaggagctggccgagggccagaggcggggcagccagggcgacagcaagcagcagaatggcaagatcccccccaagaggcctcccaggaagcacatcgtggagcgctacacagagttctaccacgtgcccacccacagtgatgccagcaagaagaggctgattgaggacacagaggactggaggcccaggacaggcaccacccagagccgctccttccgcatcctggcccagatcactggaacagagcacctgaaggagagcgaggccgacaacaccaagaaggccaaggagaagatccccctgcacgtgttcagccccaagtacaccaagctgcgggactggcaccacgaggtgtctgcccgggccctgaatgtgcagtag

SEQ ID NO: 21039 - DNA, 1464 bp, synthetic construct
  misc_feature 1..1464: note = Description of Artificial Sequence: Synthetic coding sequence
  source 1..1464: mol_type = other DNA
atgagcaactacagcgtgtccctggtgggccctgccccctggggcttccggctgcagggcggcaaggacttcaacatgcccctgaccatcagcagcctgaaggatggcggcaaggccgcccaggccaacgtgagaattggagatgtggtgctgagcattgatggcatcaatgcccagggcatgacccacctggaggcccagaacaagatcaagggctgcaccggcagcctgaacatgaccctgcagagggccagcgctgcccccaagccagagcctgtgcctgtgcagaagcccaccgtgacctctgtgtgcagcgagaccagccaggagctggccgagggccagaggcggggcagccagggcgacagcaagcagcagaatggaccacccaggaagcacatcgtggagcgctacacagagttctaccacgtgcccacccacagtgatgccagcaagaagaggctgattgaggacacagaggactggaggcccaggacaggcaccacccagagccgctccttccgcatcctggcccagatcactggaacagagcacctgaaggagagcgaggccgacaacaccaagaaggccaacaacagccaggagcccagcccccagctggccagctctgtggccagcaccaggtccatgcctgagagcctggacagccccaccagcggccggcctggggtgaccagcctgacagctgctgctgccttcaagcctgtgggcagcactggagtcatcaagagccccagctggcagaggcccaaccagggcgtgcccagcacaggccgcatcagcaacagcgccacctacagcggctctgtggccccagccaacagcgccctgggccagacccagcccagcgaccaggacaccctggtgcagagagctgagcacatcccagctgggaagaggacccccatgtgtgcccactgcaaccaggtgatccggggccccttcctggtggccctgggcaagtcctggcaccctgaggagttcaactgtgcccactgcaagaacaccatggcctacatcggctttgtggaggagaagggggccctgtactgtgagctgtgctatgagaagttctttgccccagaatgtggccgctgccagaggaagatcctgggggaggtgatcagcgccctgaagcagacctggcacgtgtcctgctttgtgtgtgtggcctgtgggaagcccatccggaacaacgtgttccacctggaggatggagagccctactgtgaaacagactactatgccctgtttggcaccatctgccacggctgtgagttccccatcgaggccggggacatgttcctggaggccctgggctacacctggcatgacacctgctttgtgtgcagcgtgtgctgtgagagcctggagggccagaccttcttcagcaagaaggacaagcccctgtgcaagaagcacgcccacagcgtgaacttctag

SEQ ID NO: 21040 - DNA, 705 bp, synthetic construct
  misc_feature 1..705: note = Description of Artificial Sequence: Synthetic coding sequence
  source 1..705: mol_type = other DNA
atgagcaactacagcgtgtccctggtgggccctgccccctggggcttccggctgcagggcggcaaggacttcaacatgcccctgaccatcagcagcctgaaggatggcggcaaggccgcccaggccaacgtgagaattggagatgtggtgctgagcattgatggcatcaatgcccagggcatgacccacctggaggcccagaacaagatcaagggctgcaccggcagcctgaacatgaccctgcagagggccagcgctgcccccaagccagagcctgtgcctgtgcagaagcccaccgtgacctctgtgtgcagcgagaccagccaggagctggccgagggccagaggcggggcagccagggcgacagcaagcagcagaatggacctgtgcccaggaagatcccccccaggaagcacatcgtggagcgctacacagagttctaccacgtgcccacccacagtgatgccagcaagaagaggctgattgaggacacagaggactggaggcccaggacaggcaccacccagagccgctccttccgcatcctggcccagatcactggaacagagcacctgaaggagagcgaggccgacaacaccaagaaggccaaggagaagatccccctgcacgtgttcagccccaagtacaccaagctgcgggactggcaccacgaggtgtctgcccgggccctgaatgtgcagtag

SEQ ID NO: 21041 - DNA, 645 bp, synthetic construct
  misc_feature 1..645: note = Description of Artificial Sequence: Synthetic coding sequence
  source 1..645: mol_type = other DNA
atgagcaactacagcgtgtccctggtgggccctgccccctggggcttccggctgcagggcggcaaggacttcaacatgcccctgaccatcagcagcctgaaggatggcggcaaggccgcccaggccaacgtgagaattggagatgtggtgctgagcattgatggcatcaatgcccagggcatgacccacctggaggcccagaacaagatcaagggctgcaccggcagcctgaacatgaccctgcagagggccagcgctgcccccaagccagagcctgtgcctgtgcagaaggtgacccagaagcgggagagccgcagcagcagaagaacagcccctggcctgccccccaggaagcacatcgtggagcgctacacagagttctaccacgtgcccacccacagtgatgccagcaagaagaggctgattgaggacacagaggactggaggcccaggacaggcaccacccagagccgctccttccgcatcctggcccagatcactggaacagagcacctgaaggagagcgaggccgacaacaccaagaaggccaaggagaagatccccctgcacgtgttcagccccaagtacaccaagctgcgggactggcaccacgaggtgtctgcccgggccctgaatgtgcagtag

SEQ ID NO: 21042 - DNA, 1425 bp, synthetic construct
  misc_feature 1..1425: note = Description of Artificial Sequence: Synthetic coding sequence
  source 1..1425: mol_type = other DNA
atggcctacaacaaggccccccggcccttcggctctgtgagcagccccaaggtgaccagcatccccagccccagcagcgccttcaccccagcccacgccaccaccagcagccacgccagccccagccctgtggccgctgtgaccccacccctgtttgctgccagcggcctgcacgccaatgccaacctgtctgctgaccagagccccagcgccctgtctgctgggaagacagctgtgaatgtgccccggcagcccaccgtgacctctgtgtgcagcgagaccagccaggagctggccgagggccagaggcggggcagccagggcgacagcaagcagcagaatggcccccccaggaagcacatcgtggagcgctacacagagttctaccacgtgcccacccacagtgatgccagcaagaagaggctgattgaggacacagaggactggaggcccaggacaggcaccacccagagccgctccttccgcatcctggcccagatcaccggcacagagcacctgaaggagagcgaggccgacaacaccaagaaggccaacaacagccaggagcccagcccccagctggccagctctgtggccagcaccaggtccatgcctgagagcctggacagccccaccagcggccggcctggggtgaccagcctgacagctgctgctgccttcaagcctgtgggcagcactggagtcatcaagagccccagctggcagaggcccaaccagggcgtgcccagcacaggccgcatcagcaacagcgccacctacagcggctctgtggccccagccaacagcgccctgggccagacccagcccagcgaccaggacaccctggtgcagagagctgagcacatcccagctgggaagaggacccccatgtgtgcccactgcaaccaggtgatccggggccccttcctggtggccctgggcaagtcctggcaccctgaggagttcaactgtgcccactgcaagaacaccatggcctacatcggctttgtggaggagaagggggccctgtactgtgagctgtgctatgagaagttctttgccccagaatgtggccgctgccagaggaagatcctgggggaggtgatcagcgccctgaagcagacctggcacgtgtcctgctttgtgtgtgtggcctgtgggaagcccatcagaaataatgtgttccacctggaggatggagagccctactgtgaaacagactactatgccctgtttggcaccatctgccacggctgtgagttccccattgaagctggggacatgttcctggaggccctgggctacacctggcatgacacctgctttgtgtgcagcgtgtgctgtgagagcctggagggccagaccttcttcagcaagaaggacaagcccctgtgcaagaagcacgcccacagcgtgaacttctag

SEQ ID NO: 21043 - DNA, 411 bp, synthetic construct
  misc_feature 1..411: note = Description of Artificial Sequence: Synthetic coding sequence
  source 1..411: mol_type = other DNA
atgagcaactacagcgtgtccctggtgggccctgccccctggggcttccggctgcagggcggcaaggacttcaacatgcccctgaccatcagcagcgctggggtgcagtggaggaacctgggcagcccccagccccccagccctgagttcaagcgcttcagctgcctgagcctgcccagctcctgggactaccgccacgtgcccccccggctggccaactttgtgttcctggtggagaccaagttcccctacgtgggccaggccggcctggagctgcccaccagcggggacctgcccaccagcgccagccagagcgccaagatcactggagtgagccaccgggcctggcccaccctcttctacaccctgctcttctttgccaccatctacccagagatcatcctgtactag

SEQ ID NO: 21044 - DNA, 669 bp, synthetic construct
  misc_feature 1..669: note = Description of Artificial Sequence: Synthetic coding sequence
  source 1..669: mol_type = other DNA
atggacagcttcaaggtggtgctggagggccctgccccctggggcttccggctgcagggcggcaaggacttcaacgtgcccctgagcatcagccggctgaccccaggcggcaaggccgcccaggccggcgtggccgtgggggactgggtgctgagcattgatggagaaaatgccggcagcctgacccacatcgaggcccagaacaagatccgggcctgtggggagcggctgagcctgggcctgagccgggcccagcctgtgcagagcaagccccagaaggccagcgccccagctgctgaccccccacgctacacctttgcccccagcgtgtccctgaacaagacagcccggccctttggagcccctcctcctgctgacagcgccccccagcagaatggccagcccctgcggcccctggtgcctgatgccagcaagcagaggctgatggagaacacagaggactggaggcccaggcctggcaccggccagagccgctccttccgcatcctggcccacctgaccggcacagagttcatgcaggaccctgatgaggagcacctgaagaagagccgggagaagtatgtgctggagctgcagagcccccgctacacccggctgcgggactggcaccaccagaggtctgcccacgtgctgaatgtgcagagctag

SEQ ID NO: 21045 - DNA, 1374 bp, synthetic construct
  misc_feature 1..1374: note = Description of Artificial Sequence: Synthetic coding sequence
  source 1..1374: mol_type = other DNA
atggacagcttcaaggtggtgctggagggccctgccccctggggcttccggctgcagggcggcaaggacttcaacgtgcccctgagcatcagccggctgaccccaggcggcaaggccgcccaggccggcgtggccgtgggggactgggtgctgagcattgatggagaaaatgccggcagcctgacccacatcgaggcccagaacaagatccgggcctgtggggagcggctgagcctgggcctgagccgggcccagcctgtgcagagcaagccccagaaggccagcgccccagctgctgaccccccacgctacacctttgcccccagcgtgtccctgaacaagacagcccggccctttggagcccctcctcctgctgacagcgccccccagcagaatggccagcccctgcggcccctggtgcctgatgccagcaagcagaggctgatggagaacacagaggactggaggcccaggcctggcaccggccagagccgctccttccgcatcctggcccacctgaccggcacagagttcatgcaggaccctgatgaggagcacctgaagaagagcagccaggtgcccaggacagaggccccagccccagccagcagcaccccccaggagccctggccaggccccacagcccccagccccaccagccggcccccctgggccgtggaccctgcctttgctgagagatatgccccagacaagaccagcacagtgctgaccaggcacagccagcctgccacccccacccccctgcagagcaggaccagcatcgtgcaggccgccgccggcggcgtgcctgggggcggcagcaacaacgggaagacccctgtgtgccaccagtgccacaaggtgatccggggccgctacctggtggccctgggccacgcctaccaccctgaggagtttgtgtgcagccagtgtgggaaggtgctggaggagggcggcttctttgaggagaagggggccatcttctgccccccctgctatgatgtgcgctatgcccccagctgtgccaagtgcaagaagaagatcactggagagatcatgcacgccctgaagatgacctggcacgtgcactgcttcacctgtgccgcctgcaagacccccatccggaacagagccttctacatggaggagggcgtgccctactgtgagcgggactatgagaagatgtttggcaccaagtgccacggctgtgacttcaagattgatgctggggaccgcttcctggaggccctgggcttctcctggcatgacacctgctttgtgtgtgccatctgccagatcaacctggagggcaagaccttctacagcaagaaggaccggcccctgtgcaagagccacgccttcagccacgtgtag

SEQ ID NO: 21046 - DNA, 864 bp, synthetic construct
  misc_feature 1..864: note = Description of Artificial Sequence: Synthetic coding sequence
  source 1..864: mol_type = other DNA
atggacagcttcaaggtggtgctggagggccctgccccctggggcttccggctgcagggcggcaaggacttcaacgtgcccctgagcatcagccggctgaccccaggcggcaaggccgcccaggccggcgtggccgtgggggactgggtgctgagcattgatggagaaaatgccggcagcctgacccacatcgaggcccagaacaagatccgggcctgtggggagcggctgagcctgggcctgagccgggcccagcctgtgcagagcaagccccagaaggccagcgccccagctgctgaccccccacgctacacctttgcccccagcgtgtccctgaacaagacagcccggccctttggagcccctcctcctgctgacagcgccccccagcagaatggccagcccctgcggcccctggtgcctgatgccagcaagcagaggctgatggagaacacagaggactggaggcccaggcctggcaccggccagagccgctccttccgcatcctggcccacctgaccggcacagagttcatgcaggaccctgatgaggagcacctgaagaagagccggccctaccggccccagccctaccagcccccagccctgggctgcggcccctgtgtgtgccgggccctgtgccccggccagaatgagcacagcgctgaccctgcccagcctgctggccacgcccatgctgctgctgagccccacctgcactgtgccggcagctgccggcggggggcccggcggggccagcagcagaggcaggacagccgggtgtcccctgtgccccagggccaccctggccccctgcctggaggagctggcccccgggtgcccccaggcggcgtgtgtgtgtag

SEQ ID NO: 21047 - DNA, 1272 bp, synthetic construct
  misc_feature 1..1272: note = Description of Artificial Sequence: Synthetic coding sequence
  source 1..1272: mol_type = other DNA
atggacagcttcaaggtggtgctggagggccctgccccctggggcttccggctgcagggcggcaaggacttcaacgtgcccctgagcatcagccggctgaccccaggcggcaaggccgcccaggccggcgtggccgtgggggactgggtgctgagcattgatggagaaaatgccggcagcctgacccacatcgaggcccagaacaagatccgggcctgtggggagcggctgagcctgggcctgagccgggcccagcctgtgcagagcaagccccagaaggtgcagaccccagacaagcagcccctgcggcccctggtgcctgatgccagcaagcagaggctgatggagaacacagaggactggaggcccaggcctggcaccggccagagccgctccttccgcatcctggcccacctgaccggcacagagttcatgcaggaccctgatgaggagcacctgaagaagagcagccaggtgcccaggacagaggccccagccccagccagcagcaccccccaggagccctggccaggccccacagcccccagccccaccagccggcccccctgggccgtggaccctgcctttgctgagagatatgccccagacaagaccagcacagtgctgaccaggcacagccagcctgccacccccacccccctgcagagcaggaccagcatcgtgcaggccgccgccggcggcgtgcctgggggcggcagcaacaacgggaagacccctgtgtgccaccagtgccacaaggtgatccggggccgctacctggtggccctgggccacgcctaccaccctgaggagtttgtgtgcagccagtgtgggaaggtgctggaggagggcggcttctttgaggagaagggggccatcttctgccccccctgctatgatgtgcgctatgcccccagctgtgccaagtgcaagaagaagatcactggagagatcatgcacgccctgaagatgacctggcacgtgcactgcttcacctgtgccgcctgcaagacccccatccggaacagagccttctacatggaggagggcgtgccctactgtgagcgggactatgagaagatgtttggcaccaagtgccacggctgtgacttcaagattgatgctggggaccgcttcctggaggccctgggcttctcctggcatgacacctgctttgtgtgtgccatctgccagatcaacctggagggcaagaccttctacagcaagaaggaccggcccctgtgcaagagccacgccttcagccacgtgtag

SEQ ID NO: 21048 - DNA, 522 bp, synthetic construct
  misc_feature 1..522: note = Description of Artificial Sequence: Synthetic coding sequence
  source 1..522: mol_type = other DNA
atggacagcttcaaggtggtgctggagggccctgccccctggggcttccggctgcagggcggcaaggacttcaacgtgcccctgagcatcagccggctgaccccaggcggcaaggccgcccaggccggcgtggccgtgggggactgggtgctgagcattgatggagaaaatgccggcagcctgacccacatcgaggcccagaacaagatccgggcctgtggggagcggctgagcctgggcctgagccgggcccagcctgtgcagagcaagccccagaaggccagcgccccagctgctgaccccccacgctacacctttgcccccagcgtgtccctgaacaagacagcccggccctttggagcccctcctcctgctgacagcgccccccagcagaatggccagcccctgcggcccctggtgcctgatgccagcaagcagaggctgatggagaacacagaggactggaggcccaggcctggcaccggccagagccgctccttccgcatcctggcccacctgtag

SEQ ID NO: 21049 - DNA, 273 bp, synthetic construct
  misc_feature 1..273: note = Description of Artificial Sequence: Synthetic coding sequence
  source 1..273: mol_type = other DNA
atggacagcttcaaggtggtgctggagggccctgccccctggggcttccggctgcagggcggcaaggacttcaacgtgcccctgagcatcagccggctgaccccaggcggcaaggccgcccaggccggcgtggccgtgggggactgggtgctgagcattgatggagaaaatgccggcagcctgacccacatcgaggcccagaacaagatccgggcctgtggggagcggctgagcctgggcctgagccgggcccagcctgtgcagagcaagtag

SEQ ID NO: 21050 - DNA, 492 bp, synthetic construct
  misc_feature 1..492: note = Description of Artificial Sequence: Synthetic coding sequence
  source 1..492: mol_type = other DNA
atggctgatgaggagaagctgcccccaggctgggagaagaggatgagccgcagcagcggccgggtgtactacttcaaccacatcaccaatgccagccagtgggagcggcccagcggcaacagcagcagcggcggcaagaatggccagggcgagcccgcccgggtgcgctgcagccacctgctggtgaagcacagccagagccggcggcccagctcctggaggcaggagaagatcaccaggaccaaggaggaggccctggagctgatcaatggctacatccagaagatcaagagcggggaggaggactttgagagcctggccagccagttcagtgactgcagcagcgccaaggcccggggggacctgggcgccttcagccggggccagatgcagaagccctttgaagatgccagctttgccctgaggactggagagatgagcggccctgtgttcacagacagcggcatccacatcatcctgaggacagaatag

SEQ ID NO: 21051 - DNA, 138 bp, synthetic construct
  misc_feature 1..138: note = Description of Artificial Sequence: Synthetic coding sequence
  source 1..138: mol_type = other DNA
atgcagaagccctttgaagatgccagctttgccctgaggactggagagatgagcggccctgtgttcacagattctggcatccacatcatcctgaggacagagtgctggaggcagacccggggccccaactgcttctag

SEQ ID NO: 21052 - DNA, 438 bp, synthetic construct
  misc_feature 1..438: note = Description of Artificial Sequence: Synthetic coding sequence
  source 1..438: mol_type = other DNA
atggctgatgaggagaagctgcccccaggctgggagaagaggatgagccgcagcagcggccgggtgtactacttcaaccacatcaccaatgccagccagtgggagcggcccagcggcaacagcagcagcggcggcaagaatggccagggcgagcccgcccgggtgcgctgcagccacctgctggtgaagcacagccagagccggcggcccagctcctggaggcaggagaagatcaccaggaccaaggaggaggccctggagctgatcaatggctacatccagaagatcaagagcggggaggaggactttgagagcctggccagccagttcagtgactgcagcagcgccaaggcccggggggacctgggcgccttcagcagaggagcccagggcatgggcctgacccggctgggggacccctaccaccctgagggctag

SEQ ID NO: 21053 - DNA, 561 bp, synthetic construct
  misc_feature 1..561: note = Description of Artificial Sequence: Synthetic coding sequence
  source 1..561: mol_type = other DNA
atgaccatggtggacacagagatgcccttctggcccaccaactttggcatcagctctgtggacctgtctgtgatggaggaccacagccacagctttgacatcaagcccttcaccaccgtggacttcagcagcatcagcaccccccactatgaggacatccccttcaccaggacagatcctgtggtggccgactacaagtatgacctgaagctgcaggagtaccagagcgccatcaaggtggagcccgccagccccccctactacagcgagaagacccagctgtacaacaagccccatgaggagcccagcaacagcctgatggccatcgagtgccgggtgtgtggggacaaggccagcggcttccactatggagtgcacgcctgtgagggctgcaagggcttcttccggaggaccatccggctgaagctgatctatgacagatgtgacctgaactgccgcatccacaagaagagcaggaacaagtgccagtactgccgcttccagaagtgcctggccgtgggcatgagccacaatgaggagctgcagaaggacagctactag

SEQ ID NO: 21054 - DNA, 1752 bp, synthetic construct
  misc_feature 1..1752: note = Description of Artificial Sequence: Synthetic coding sequence
  source 1..1752: mol_type = other DNA
atgggcggcctggagaagaagaagtatgagcggggcagcgccaccaactacatcaccaggaacaaggccaggaagaagctgcagctgagcctggccgacttccggcggctgtgcatcctgaagggcatctacccccatgagcccaagcacaagaagaaggtgaacaagggcagcacagctgcccggaccttctacctgatcaaggacatccgcttcctgctgcacgagcccatcgtgaacaagttccgggagtacaaggtgtttgtgaggaagctgaggaaggcctacggcaagtctgagtggaacacagtggagcggctgaaggacaacaagcccaactacaagctggaccacatcatcaaggagcgctaccccaccttcattgatgccctgcgggacctggatgatgccctgtccatgtgcttcctgttcagcaccttccccaggacaggcaagtgccacgtgcagaccatccagctgtgccggcggctgactgtggagttcatgcactacatcatcgccgcccgggccctgaggaaggtgttcctgagcatcaagggcatctactaccaggccgaggtgctgggccagcccatcgtgtggatcaccccctatgccttcagccatgaccaccccacagatgtggactacagagtgatggccaccttcacagagttctacaccaccctgctgggctttgtgaacttccggctgtaccagctgctgaacctgcactacccacccaagctggagggccaggcccaggccgaggccaaggccggggagggcacctacgccctggacagcgagagctgcatggagaagctggccgccctgagcgccagcctggcccgggtggtggtgcctgccacagaggaggaggccgaggtggatgagttccccacagatggagaggaggacaggaggaaggagctggaggcccaggagaagcacaagaagctgtttgagggcctgaagttcttcctgaaccgggaggtgccccgggaggccctggccttcatcatccgcagctttggaggagaggtgtcctgggacaagagcctgtgcattggagccacctatgatgtgacagacagccgcatcacccaccagatcgtggaccggcccggccagcagacctctgtgattggccgctgctacgtgcagccccagtgggtgtttgacagcgtgaatgcccggctgctgctgcctgtggccgagtacttcagcggcgtgcagctgcccccccacctgagcccctttgtgacagagaaggagggggactatgtgcccccagagaagctgaagctgctggccctgcagagaggagaggaccccggcaacctgaatgaaagtgaggaggaggaggaggaggatgacaacaatgaaggagatggagatgaggagggagaaaatgaggaggaggaggaggatgctgaggccggcagcgagaaggaggaggaggcccggctggccgccctggaggagcagaggatggagggcaagaagccccgggtgatggccggcaccctgaagctggaggacaagcagaggctggcccaggaggaggagagcgaggccaagaggctggccatcatgatgatgaagaagcgggagaagtacctgtaccagaagatcatgtttgggaagaggaggaagatccgggaggccaacaagctggccgagaagaggaaggcccatgatgaggccgtgcgctctgagaagaaggccaagaaggcccggcctgagtag

SEQ ID NO: 21055 - DNA, 1767 bp, synthetic construct
  misc_feature 1..1767: note = Description of Artificial Sequence: Synthetic coding sequence
  source 1..1767: mol_type = other DNA
atgggcggcctggagaagaagaagtatgagcggggcagcgccaccaactacatcaccaggaacaaggccaggaagaagctgcagctgagcctggccgacttccggcggctgtgcatcctgaagggcatctacccccatgagcccaagcacaagaagaaggtgaacaagggcagcacagctgcccggaccttctacctgatcaaggacatccgcttcctgctgcacgagcccatcgtgaacaagttccgggagtacaaggtgtttgtgaggaagctgaggaaggcctacggcaagtctgagtggaacacagtggagcggctgaaggacaacaagcccaactacaagctggaccacatcatcaaggagcgctaccccaccttcattgatgccctgcgggacctggatgatgccctgtccatgtgcttcctgttcagcaccttccccaggacaggcaagtgccacgtgcagaccatccagctgtgccggcggctgactgtggagttcatgcactacatcatcgccgcccgggccctgaggaaggtgttcctgagcatcaagggcatctactaccaggccgaggtgctgggccagcccatcgtgtggatcaccccctatgccttcagccatgaccaccccacagatgtggactacagagtgatggccaccttcacagagttctacaccaccctgctgggctttgtgaacttccggctgtaccagctgctgaacctgcactacccacccaagctggagggccaggcccaggccgaggccaaggccggggagggcacctacgccctggacagcgagagctgcatggagaagctggccgccctgagcgccagcctggcccgggtggtggtgcctgccacagaggaggaggccgaggtggatgagttccccacagatggagagatgtctgcccaggaggaggacaggaggaaggagctggaggcccaggagaagcacaagaagctgtttgagggcctgaagttcttcctgaaccgggaggtgccccgggaggccctggccttcatcatccgcagctttggaggagaggtgtcctgggacaagagcctgtgcatcggggccacctatgatgtgacagacagccgcatcacccaccagatcgtggacaggcctggccagcagaccagcgtcatcggccgctgctacgtgcagccccagtgggtgtttgattctgtgaatgcccggctgctgctgcctgtggccgagtacttctctggagtgcagctgcccccccacctgagcccctttgtgacagagaaggagggggactatgtgcccccagagaagctgaagctgctggccctgcagagaggagaagatcctggcaacctgaatgaaagtgaggaggaggaggaggaggatgacaacaatgaaggagatggagatgaggagggggagaatgaggaggaggaggaggatgctgaggccggcagcgagaaggaggaggaggcccggctggccgccctggaggagcagaggatggagggcaagaagccccgggtgatggccggcaccctgaagctggaggacaagcagaggctggcccaggaggaggagagcgaggccaagaggctggccatcatgatgatgaagaagcgggagaagtacctgtaccagaagatcatgtttgggaagaggaggaagatccgggaggccaacaagctggccgagaagaggaaggcccatgatgaagctgtgcgctctgagaagaaggccaagaaggcccggcctgagtag

SEQ ID NO: 21056 - DNA, 1350 bp, synthetic construct
  misc_feature 1..1350: note = Description of Artificial Sequence: Synthetic coding sequence
  source 1..1350: mol_type = other DNA
atgtgcttcctgttcagcaccttccccaggactggaaaatgtcatgtgcagaccatccagctgtgccggcggctgactgtggagttcatgcactacatcatcgccgcccgggccctgaggaaggtgttcctgagcatcaagggcatctactaccaggccgaggtgctgggccagcccatcgtgtggatcaccccctatgccttcagccatgaccaccccacagatgtggactacagagtgatggccaccttcacagagttctacaccaccctgctgggctttgtgaacttccggctgtaccagctgctgaacctgcactacccacccaagctggagggccaggcccaggccgaggccaaggccggggagggcacctacgccctggacagcgagagctgcatggagaagctggccgccctgagcgccagcctggcccgggtggtggtgcctgccacagaggaggaggccgaggtggatgagttccccacagatggagagatgtctgcccaggaggaggacaggaggaaggagctggaggcccaggagaagcacaagaagctgtttgagggcctgaagttcttcctgaaccgggaggtgccccgggaggccctggccttcatcatccgcagctttggaggagaggtgtcctgggacaagagcctgtgcattggagccacctatgatgtgacagacagccgcatcacccaccagatcgtggaccggcccggccagcagacctctgtgattggccgctgctacgtgcagccccagtgggtgtttgacagcgtgaatgcccggctgctgctgcctgtggccgagtacttcagcggcgtgcagctgcccccccacctgagcccctttgtgacagagaaggagggggactatgtgcccccagagaagctgaagctgctggccctgcagagaggagaggaccccggcaacctgaatgaaagtgaggaggaggaggaggaggatgacaacaatgaaggagatggagatgaggagggagaaaatgaggaggaggaggaggatgctgaggccggcagcgagaaggaggaggaggcccggctggccgccctggaggagcagaggatggagggcaagaagccccgggtgatggccggcaccctgaagctggaggacaagcagaggctggcccaggaggaggagagcgaggccaagaggctggccatcatgatgatgaagaagcgggagaagtacctgtaccagaagatcatgtttgggaagaggaggaagatccgggaggccaacaagctggccgagaagaggaaggcccatgatgaggccgtgcgctctgagaagaaggccaagaaggcccggcctgagtag

SEQ ID NO: 21057 - DNA, 1350 bp, synthetic construct; identical to SEQ ID NO: 21056
  misc_feature 1..1350: note = Description of Artificial Sequence: Synthetic coding sequence
  source 1..1350: mol_type = other DNA

SEQ ID NO: 21058 - DNA, 5154 bp, synthetic construct
  misc_feature 1..5154: note = Description of Artificial Sequence: Synthetic coding sequence
  source 1..5154: mol_type = other DNA
atggagcctgctgctgctgccaccgtgcagaggctgcctgagctgggccgggaggaccgggccagcgccccagctgctgctgctgctgctgctgctgctgctgctgctgctgctgctgccctggccgctgctgctgggggcggccgcagccctgagcccgccctgaccccagctgcccccagcggcggcaatggcagcggcagcggggcccgggaggaggcccctggagaggcccctcctggccccctgcccggccgggccggcggggccggcagaagaagaagaagaggagccccccagcccatcgccggcggggccgcccctgtgcctggggccggcggcggggccaacagcctgctgctgcggcggggccgcctgaagaggaacctgtctgctgctgctgctgctgccagcagcagcagcagcagcagcgctgctgctgccagccacagccctggagctgctggcctgcctgccagctgcagcgccagcgccagcctgtgcaccaggagcctggacaggaagaccctgctgctgaagcaccggcagaccctgcagctgcagcccagcgaccgggactgggtgcgccaccagctgcagaggggctgtgtgcacgtgtttgacagacacatggccagcacctacctgcggcctgtgctgtgcaccctggacaccacagctggggaggtggccgcccggctgctgcagctgggccacaagggcggcggcgtggtgaaggtgctgggccagggccctggagctgctgctgcccgggagcctgctgagcccccacctgaggccggcccccggctggcccctcctgagccccgggacagcgaggtgcccccagcccggagcgcccctggggcctttggaggccccccccgggcccccccagctgacctgcccctgcctgtgggcggccctgggggctggagccggcgggccagccctgcccccagcgacagcagccctggagagccctttgtgggcggccctgtgagcagcccccgggcccccaggcctgtggtgtctgacacagagagcttcagcctgagccccagcgctgagagcgtgtctgaccggctggacccctacagcagcggcggcggcagcagcagcagcagcgaggagctggaggctgatgctgccagcgcccccaccggggtgcccggccagcccaggaggcctggccacccagcccagcccctgcccctgccccagacagccagcagcccccagccccagcagaaggccccccgggccatcgacagccctgggggcgctgtgcgggagggcagctgtgaggagaaggctgctgctgctgtggcccctgggggcctgcagagcaccccaggccgctctggagtgacagctgagaaggcccctcctcctcctcctccacccaccctgtatgtgcagctgcacggggagaccacccggcggctggaggccgaggagaagcccctgcagatccagaatgactacctgttccagctgggctttggagagctgtggagggtgcaggaggagggcatggattctgaaattggctgcctgatccgcttctacgccggcaagccccacagcacaggcagcagcgagcgcatccagctgagcggcatgtacaacgtgaggaagggcaagatgcagctgcctgtgaaccgctggacccggcggcaggtgatcctgtgtggcacctgcctgattgtgtcctctgtgaaggacagcctgaccgggaagatgcacgtgctgcccctcatcggcggcaaggtggaggaggtgaagaagcaccagcactgcctggccttcagcagcagcggcccccagagccagacctactacatctgctttgacaccttcacagagtacctgcgctggctgcggcaggtgtccaaggtggccagccagaggatcagctctgtggacctgagctgctgcagcctggagcacctgcctgccaacctcttctacagccaggacctgacccacctgaacctgaagcagaacttcctgcggcagaaccccagcctgcctgctgcccggggcctgaatgagctgcagcgcttcaccaagctgaagagcctgaacctgagcaacaaccacctgggggacttccccctggccgtgtgcagcatccccaccctggccgagctgaatgtgtcctgcaatgccctgcggtctgtgcctgctgctgtgggcgtgatgcacaacctgcagaccttcctgctggatggcaacttcctgcagagcctgcctgctgagctggagaacatgaagcagctgagctacctgggcctgtccttcaatgagttcacagacatccctgaggtgctggagaagctgacagctgtggacaagctgtgcatgagcggcaactgtgtggagaccctgcggctgcaggccctgaggaagatgccccacatcaagcacgtggacctgcggctgaatgtcatcaggaagctgattgctgatgaggtggacttcctgcagcacgtgacccagctggacctgcgggacaacaagctgggggacctggatgccatgatcttcaacaacatcgaggtgctgcactgtgaaagaaaccagctggtgaccctggacatctgtggctacttcctgaaggccctgtatgccagcagcaatgagctggtgcagctggatgtgtaccctgtgcccaactacctgagctacatggatgtgtccaggaaccggctggagaatgtgcctgagtgggtgtgtgagagcaggaagctggaggtgctggacatcggccacaaccagatctgtgagctgcctgcccggctcttctgcaacagcagcctgaggaagctgctggccggccacaaccagctggcccggctgcctgagcggctggagaggacctctgtggaggtgctggatgtgcagcacaaccagctgctggagctgccccccaacctgctgatgaaggctgacagcctgcgcttcctgaatgccagcgccaacaagctggagagcctgcccccagccaccctgtctgaggagaccaacagcatcctgcaggagctgtacctgaccaacaacagcctgacagacaagtgtgtgcccctgctgaccggccacccccacctgaagatcctgcacatggcctacaaccggctgcagagcttccctgccagcaagatggccaagctggaggagctggaggagattgacctgagcggcaacaagctgaaggccatccccaccaccatcatgaactgcaggaggatgcacacagtgattgcccacagcaactgcatcgaggtgtttcctgaggtgatgcagctgcctgagatcaagtgtgtggacctgagctgcaatgagctgtctgaggtgaccctgcctgagaacctgccccccaagctgcaggagctggacctgaccggcaacccccggctggtgctggaccacaagaccctggagctgctgaacaacatccgctgcttcaagattgaccagcccagcactggagatgccagcggggccccagctgtgtggagccacggctacacagaggccagcggcgtgaagaacaagctgtgtgtggccgccctgtctgtgaacaacttctgtgacaaccgggaggccctgtatggagtgtttgatggagacagaaatgtggaggtgccctacctgctgcagtgcaccatgtctgacatcctggccgaggagctgcagaagaccaagaatgaggaggagtacatggtgaacaccttcatcgtgatgcagaggaagctgggcacagctggccagaagctgggcggcgctgctgtgctgtgccacatcaagcatgaccctgtggaccccggcggcagcttcaccctgaccagcgccaacgtgggcaagtgccagacagtgctgtgcagaaatggcaagcccctgcccctgagccgcagctacatcatgagctgtgaggaggagctgaagaggatcaagcagcacaaggccatcatcacagaagatggcaaggtgaatggagtgacagagagcacccgcatcctgggctacaccttcctgcaccccagcgtggtgccccggccccacgtgcagagcgtgctgctgaccccccaggatgagttcttcatcctgggcagcaagggcctgtgggacagcctgtctgtggaggaggccgtggaggccgtgagaaatgtgcctgatgccctggccgccgccaagaagctgtgcaccctggcccagagctatggctgccacgacagcatctctgctgtggtggtgcagctgtctgtgacagaggacagcttctgctgctgtgagctgtctgctgggggcgctgtgcccccacccagccctggcatcttccccccatctgtgaacatggtgatcaaggaccggcccagtgatggcctgggcgtgcccagcagcagcagcggcatggccagcgagatcagcagcgagctgagcaccagcgagatgagcagcgaggtgggcagcacagccagtgatgagcccccacctggggccctgtctgagaacagccctgcctaccccagcgagcagcgctgcatgctgcaccccatctgcctgagcaacagcttccagaggcagctgagcagcgccaccttcagcagcgccttcagtgacaatggcctggacagtgatgatgaggagcccattgaaggagtcttcaccaacggcagccgggtggaggtggaggtggacatccactgcagccgggccaaggagaaggagaagcagcagcacctgctgcaggtgcctgctgaggccagtgatgagggcatcgtcatcagcgccaatgaagatgagcccggcctgcccaggaaggctgacttctctgctgtgggcaccatcggcagaagaagagccaacggctctgtggccccccaggagaggagccacaacgtgattgaggtggccacagatgcccccctgaggaagccaggcggctactttgctgccccagcccagcctgaccctgatgaccagttcatcatccccccagagctggaggaggaggtgaaggagatcatgaagcaccaccaggagcagcagcagcagcagcagcccccacctccaccccagctgcagccccagctgcccaggcactaccagctggaccagctgcctgactactatgacacccccctgtag

SEQ ID NO: 21059 - DNA, 3618 bp, synthetic construct
  misc_feature 1..3618: note = Description of Artificial Sequence: Synthetic coding sequence
  source 1..3618: mol_type = other DNA
atggattctgaaattggctgcctgatccgcttctacgccggcaagccccacagcacaggcagcagcgagcgcatccagctgagcggcatgtacaacgtgaggaagggcaagatgcagctgcctgtgaaccgctggacccggcggcaggtgatcctgtgtggcacctgcctgattgtgtcctctgtgaaggacagcctgaccgggaagatgcacgtgctgcccctcatcggcggcaaggtggaggaggtgaagaagcaccagcactgcctggccttcagcagcagcggcccccagagccagacctactacatctgctttgacaccttcacagagtacctgcgctggctgcggcaggtgtccaaggtggccagccagaggatcagctctgtggacctgagctgctgcagcctggagcacctgcctgccaacctcttctacagccaggacctgacccacctgaacctgaagcagaacttcctgcggcagaaccccagcctgcctgctgcccggggcctgaatgagctgcagcgcttcaccaagctgaagagcctgaacctgagcaacaaccacctgggggacttccccctggccgtgtgcagcatccccaccctggccgagctgaatgtgtcctgcaatgccctgcggtctgtgcctgctgctgtgggcgtgatgcacaacctgcagaccttcctgctggatggcaacttcctgcagagcctgcctgctgagctggagaacatgaagcagctgagctacctgggcctgtccttcaatgagttcacagacatccctgaggtgctggagaagctgacagctgtggacaagctgtgcatgagcggcaactgtgtggagaccctgcggctgcaggccctgaggaagatgccccacatcaagcacgtggacctgcggctgaatgtcatcaggaagctgattgctgatgaggtggacttcctgcagcacgtgacccagctggacctgcgggacaacaagctgggggacctggatgccatgatcttcaacaacatcgaggtgctgcactgtgaaagaaaccagctggtgaccctggacatctgtggctacttcctgaaggccctgtatgccagcagcaatgagctggtgcagctggatgtgtaccctgtgcccaactacctgagctacatggatgtgtccaggaaccggctggagaatgtgcctgagtgggtgtgtgagagcaggaagctggaggtgctggacatcggccacaaccagatctgtgagctgcctgcccggctcttctgcaacagcagcctgaggaagctgctggccggccacaaccagctggcccggctgcctgagcggctggagaggacctctgtggaggtgctggatgtgcagcacaaccagctgctggagctgccccccaacctgctgatgaaggctgacagcctgcgcttcctgaatgccagcgccaacaagctggagagcctgcccccagccaccctgtctgaggagaccaacagcatcctgcaggagctgtacctgaccaacaacagcctgacagacaagtgtgtgcccctgctgaccggccacccccacctgaagatcctgcacatggcctacaaccggctgcagagcttccctgccagcaagatggccaagctggaggagctggaggagattgacctgagcggcaacaagctgaaggccatccccaccaccatcatgaactgcaggaggatgcacacagtgattgcccacagcaactgcatcgaggtgtttcctgaggtgatgcagctgcctgagatcaagtgtgtggacctgagctgcaatgagctgtctgaggtgaccctgcctgagaacctgccccccaagctgcaggagctggacctgaccggcaacccccggctggtgctggaccacaagaccctggagctgctgaacaacatccgctgcttcaagattgaccagcccagcactggagatgccagcggggccccagctgtgtggagccacggctacacagaggccagcggcgtgaagaacaagctgtgtgtggccgccctgtctgtgaacaacttctgtgacaaccgggaggccctgtatggagtgtttgatggagacagaaatgtggaggtgccctacctgctgcagtgcaccatgtctgacatcctggccgaggagctgcagaagaccaagaatgaggaggagtacatggtgaacaccttcatcgtgatgcagaggaagctgggcacagctggccagaagctgggcggcgctgctgtgctgtgccacatcaagcatgaccctgtggaccccggcggcagcttcaccctgaccagcgccaacgtgggcaagtgccagacagtgctgtgcagaaatggcaagcccctgcccctgagccgcagctacatcatgagctgtgaggaggagctgaagaggatcaagcagcacaaggccatcatcacagaagatggcaaggtgaatggagtgacagagagcacccgcatcctgggctacaccttcctgcaccccagcgtggtgccccggccccacgtgcagagcgtgctgctgaccccccaggatgagttcttcatcctgggcagcaagggcctgtgggacagcctgtctgtggaggaggccgtggaggccgtgagaaatgtgcctgatgccctggccgccgccaagaagctgtgcaccctggcccagagctatggctgccacgacagcatctctgctgtggtggtgcagctgtctgtgacagaggacagcttctgctgctgtgagctgtctgctgggggcgctgtgcccccacccagccctggcatcttccccccatctgtgaacatggtgatcaaggaccggcccagtgatggcctgggcgtgcccagcagcagcagcggcatggccagcgagatcagcagcgagctgagcaccagcgagatgagcagcgaggtgggcagcacagccagtgatgagcccccacctggggccctgtctgagaacagccctgcctaccccagcgagcagcgctgcatgctgcaccccatctgcctgagcaacagcttccagaggcagctgagcagcgccaccttcagcagcgccttcagtgacaatggcctggacagtgatgatgaggagcccattgaaggagtcttcaccaacggcagccgggtggaggtggaggtggacatccactgcagccgggccaaggagaaggagaagcagcagcacctgctgcaggtgcctgctgaggccagtgatgagggcatcgtcatcagcgccaatgaagatgagcccggcctgcccaggaaggctgacttctctgctgtgggcaccatcggcagaagaagagccaacggctctgtggccccccaggagaggagccacaacgtgattgaggtggccacagatgcccccctgaggaagccaggcggctactttgctgccccagcccagcctgaccctgatgaccagttcatcatccccccagagctggaggaggaggtgaaggagatcatgaagcaccaccaggagcagcagcagcagcagcagcccccacctccaccccagctgcagccccagctgcccaggcactaccagctggaccagctgcctgactactatgacacccccctgtag

SEQ ID NO: 21060 - DNA, 2379 bp, synthetic construct
  misc_feature 1..2379: note = Description of Artificial Sequence: Synthetic coding sequence
  source 1..2379: mol_type = other DNA
atgcacatcctgcccctggtgggcggcaagattgaggaggtgaagaggcggcagtacagcctggccttcagcagcgctggggcccaggcccagacctaccacgtgtcctttgagaccctggccgagtaccagcgctggcagaggcaggccagcaaggtggtgtcccagaggatcagcacagtggacctgagctgctacagcctggaggaggtgcctgagcacctgttctacagccaggacatcacctacctgaacctgcggcacaacttcatgcagctggagaggcctgggggcctggacaccctgtacaagttcagccagctgaagggcctgaacctgagccacaacaagctgggcctcttccccatcctgctgtgtgagatcagcaccctgacagagctgaacctgagctgcaatggcttccatgacctgcccagccagatcggcaacctgctgaacctgcagaccctgtgcctggatggcaacttcctgaccaccctgcctgaggagctgggcaacctgcagcagctgagcagcctgggcatctccttcaacaacttcagccagatccctgaggtgtatgagaagctgaccatgctggacagagtggtgatggccggcaactgcctggaggtgctgaacctgggcgtgctgaacaggatgaaccacatcaagcacgtggacctgaggatgaaccacctgaagaccatggtgattgagaacctggagggcaacaagcacatcacccacgtggacctgcgggacaaccggctgacagacctggacctgagcagcctgtgcagcctggagcagctgcactgcggcaggaaccagctgcgggagctgaccctgagcggcttcagcctgcggaccctgtatgccagcagcaaccggctgacagctgtgaatgtgtaccctgtgcccagcctgctgaccttcctggacctgagcaggaacctgctggagtgtgtgcctgactgggcctgtgaggccaagaagattgaggtgctggatgtgtcctacaacctgctgacagaggtgcctgtgcgcatcctgagcagcctgagcctgaggaagctgatgctgggccacaaccacgtgcagaacctgcccaccctggtggagcacatccccctggaggtgctggacctgcagcacaatgccctgacccggctgcctgacaccctcttcagcaaggccctgaacctgcgctacctgaatgccagcgccaacagcctggagagcctgcccagcgcctgcacaggagaggagagcctgtccatgctgcagctgctgtacctgaccaacaacctgctgacagaccagtgcatccctgtgctggtgggccacctgcacctgcgcatcctgcacctggccaacaaccagctgcagaccttccctgccagcaagctgaacaagctggagcagctggaggagctgaacctgagcggcaacaagctgaagaccatccccaccaccatcgccaactgcaagaggctgcacaccctggtggcccacagcaacaacatcagcatcttccctgagatcctgcagctgccccagatccagtttgtggacctgagctgcaatgacctgacagagatcctgatccctgaggccctgcctgccaccctgcaggacctggacctgactggaaacaccaacctggtgctggagcacaagaccctggacatcttcagccacatcaccaccctgaagattgaccagaagcccctgcccaccacagacagcacagtgaccagcaccttctggagccacggcctggccgagatggccggccagaggaacaagctgtgtgtgtctgccctggccatggacagctttgctgagggcgtgggcgctgtgtatggcatgtttgatggagacagaaatgaggagctgccccggctgctgcagtgcaccatggctgatgtgctgctggaggaggtgcagcagagcaccaatgacacagtgttcatggccaacaccttcctggtgagccacaggaagctgggcatggccggccagaagctgggcagcagcgccctgctgtgctacatccggccagacacagctgaccctgccagcagcttcagcctgactgtggccaacgtgggcacctgccaggccgtgctgtgccggggcggcaagcctgtgcccctgagcaaggtgttcagcctggagcaggaccctgaggaggcccagagggtgaaggaccagaaggccatcatcacagaggtgcctgaggacctgaaggagttccagaccacagacatccctgtgcaccactgcaacttccgggctgtgctgggctgcctgtgcagcgcctctgtgctgggcagctatgccggccctgccccccgctggaggagaacatag

SEQ ID NO: 21061 - DNA, 3972 bp, synthetic construct
  misc_feature 1..3972: note = Description of Artificial Sequence: Synthetic coding sequence
  source 1..3972: mol_type = other DNA
atgaagagaaatggcagcaggaactgcctgaacagaagaagccgcttcggcagccgggagcgggactggctgcgggaggatgtgaagaggggctgtgtgtacctgtatggagctgacaccaccacagccaccaccaccaccaccaccagcagcagcagcagcagcagcagcagcagcagtgacctgcacctggtgctgtgcaccgtggagaccccagccagcgagatctgtgccggggagggccgggagagcctgtacctgcagctgcacggggacctggtgcggcggctggagcccacagagcggcccctgcagatcgtgtatgactacctgagccggctgggctttgatgatcctgtgcgcatccaggaggaggccaccaacccagacctgggctgcatgatccgcttctacggggagaagccctgccacatggaccggctggaccgcatcctgctgagcggcatctacaacgtgaggaagggcaagacccagctgcacaagtgggccgagcggctggtggtgctgtgtggcacctgcctgattgtgtcctctgtgaaggactgccagacaggcaagatgcacatcctgcccctggtgggcggcaagattgaggaggtgaagaggcggcagtacagcctggccttcagcagcgctggggcccaggcccagacctaccacgtgtcctttgagaccctggccgagtaccagcgctggcagaggcaggccagcaaggtggtgtcccagaggatcagcacagtggacctgagctgctacagcctggaggaggtgcctgagcacctgttctacagccaggacatcacctacctgaacctgcggcacaacttcatgcagctggagaggcctgggggcctggacaccctgtacaagttcagccagctgaagggcctgaacctgagccacaacaagctgggcctcttccccatcctgctgtgtgagatcagcaccctgacagagctgaacctgagctgcaatggcttccatgacctgcccagccagatcggcaacctgctgaacctgcagaccctgtgcctggatggcaacttcctgaccaccctgcctgaggagctgggcaacctgcagcagctgagcagcctgggcatctccttcaacaacttcagccagatccctgaggtgtatgagaagctgaccatgctggacagagtggtgatggccggcaactgcctggaggtgctgaacctgggcgtgctgaacaggatgaaccacatcaagcacgtggacctgaggatgaaccacctgaagaccatggtgattgagaacctggagggcaacaagcacatcacccacgtggacctgcgggacaaccggctgacagacctggacctgagcagcctgtgcagcctggagcagctgcactgcggcaggaaccagctgcgggagctgaccctgagcggcttcagcctgcggaccctgtatgccagcagcaaccggctgacagctgtgaatgtgtaccctgtgcccagcctgctgaccttcctggacctgagcaggaacctgctggagtgtgtgcctgactgggcctgtgaggccaagaagattgaggtgctggatgtgtcctacaacctgctgacagaggtgcctgtgcgcatcctgagcagcctgagcctgaggaagctgatgctgggccacaaccacgtgcagaacctgcccaccctggtggagcacatccccctggaggtgctggacctgcagcacaatgccctgacccggctgcctgacaccctcttcagcaaggccctgaacctgcgctacctgaatgccagcgccaacagcctggagagcctgcccagcgcctgcaccggggaggagagcctgtccatgctgcagctgctgtacctgaccaacaacctgctgacagaccagtgcatccctgtgctggtgggccacctgcacctgcgcatcctgcacctggccaacaaccagctgcagaccttccctgccagcaagctgaacaagctggagcagctggaggagctgaacctgagcggcaacaagctgaagaccatccccaccaccatcgccaactgcaagaggctgcacaccctggtggcccacagcaacaacatcagcatcttccctgagatcctgcagctgccccagatccagtttgtggacctgagctgcaatgacctgacagagatcctgatccctgaggccctgcctgccaccctgcaggacctggacctgaccggcaacaccaacctggtgctggagcacaagaccctggacatcttcagccacatcaccaccctgaagattgaccagaagcccctgcccaccacagacagcacagtgaccagcaccttctggagccacggcctggccgagatggccggccagaggaacaagctgtgtgtgtctgccctggccatggacagctttgctgagggcgtgggcgctgtgtatggcatgtttgatggagacagaaatgaggagctgccccggctgctgcagtgcaccatggctgatgtgctgctggaggaggtgcagcagagcaccaatgacaccgtcttcatggccaacaccttcctggtgagccacaggaagctgggcatggccggccagaagctgggcagcagcgccctgctgtgctacatccggccagacacagctgaccctgccagcagcttcagcctgactgtggccaacgtgggcacctgccaggccgtgctgtgccggggcggcaagcctgtgcccctgagcaaggtgttcagcctggagcaggaccctgaggaggcccagagggtgaaggaccagaaggccatcatcacagaggacaacaaggtgaatggagtgacctgctgcaccaggatgctgggctgcacctacctgtacccctggatcctgcccaagccccacatcagcagcacccccctgaccatccaggatgagctgctgatcctgggcaacaaggccctgtgggagcacctgagctacacagaggccgtgaatgctgtgcgccacgtgcaggaccccctggccgccgccaagaagctgtgcaccctggcccagagctatggctgccaggacaacgtgggcgccatggtggtgtacctgaacattggagaggagggctgcacctgtgagatgaatggcctgaccctgcccggccctgtgggctttgccagcaccaccaccatcaaggatgcccccaagccagccacccccagcagcagcagcggcatcgccagcgagttcagcagcgagatgagcaccagcgaggtgtcctctgaggtgggcagcacagccagtgatgagcacaatgccggcggcctggacacagccctgctgcccaggcctgagcggcgctgcagcctgcaccccacccccaccagcggcctcttccagaggcagcccagcagcgccaccttcagcagcaaccagagcgacaatggcctggacagtgatgatgaccagcctgtggagggcgtcatcaccaacggcagcaaggtggaggtggaggtggacatccactgctgccggggccgggacctggagaacagccccccactcatcgagagcagccccaccctgtgcagcgaggagcacgcccggggcagctgcttcggcatccggcggcagaacagcgtgaacagcggcatgctgctgcccatgagcaaggacaggatggagctgcagaagagccccagcaccagctgcctgtatggcaagaagctgagcaatggcagcatcgtgcccctggaggacagcctgaacctgattgaggtggccacagaggtgcccaagaggaagacaggctactttgctgcccccacccagatggagcctgaggaccagtttgtggtgccccatgacctggaggaggaggtgaaggagcagatgaagcagcaccaggacagccggctggagcctgagccccatgaggaggacagaacagagcccccagaggagtttgacacagccctgtag

SEQ ID NO: 21062 - DNA, 2871 bp, synthetic construct
  misc_feature 1..2871: note = Description of Artificial Sequence: Synthetic coding sequence
  source 1..2871: mol_type = other DNA
atgaagagaaatggcagcaggaactgcctgaacagaagaagccgcttcggcagccgggagcgggactggctgcgggaggatgtgaagaggggctgtgtgtacctgtatggagctgacaccaccacagccaccaccaccaccaccaccagcagcagcagcagcagcagcagcagcagcagtgacctgcacctggtgctgtgcaccgtggagaccccagccagcgagatctgtgccggggagggccgggagagcctgtacctgcagctgcacggggacctggtgcggcggctggagcccacagagcggcccctgcagatcgtgtatgactacctgagccggctgggctttgatgatcctgtgcgcatccaggaggaggccaccaacccagacctgggctgcatgatccgcttctacggggagaagccctgccacatggaccggctggaccgcatcctgctgagcggcatctacaacgtgaggaagggcaagacccagctgcacaagtgggccgagcggctggtggtgctgtgtggcacctgcctgattgtgtcctctgtgaaggactgccagacaggcaagatgcacatcctgcccctggtgggcggcaagattgaggaggtgaagaggcggcagtacagcctggccttcagcagcgctggggcccaggcccagacctaccacgtgtcctttgagaccctggccgagtaccagcgctggcagaggcaggccagcaaggtggtgtcccagaggatcagcacagtggacctgagctgctacagcctggaggaggtgcctgagcacctgttctacagccaggacatcacctacctgaacctgcggcacaacttcatgcagctggagaggcctgggggcctggacaccctgtacaagttcagccagctgaagggcctgaacctgagccacaacaagctgggcctcttccccatcctgctgtgtgagatcagcaccctgacagagctgaacctgagctgcaatggcttccatgacctgcccagccagatcggcaacctgctgaacctgcagaccctgtgcctggatggcaacttcctgaccaccctgcctgaggagctgggcaacctgcagcagctgagcagcctgggcatctccttcaacaacttcagccagatccctgaggtgtatgagaagctgaccatgctggacagagtggtgatggccggcaactgcctggaggtgctgaacctgggcgtgctgaacaggatgaaccacatcaagcacgtggacctgaggatgaaccacctgaagaccatggtgattgagaacctggagggcaacaagcacatcacccacgtggacctgcgggacaaccggctgacagacctggacctgagcagcctgtgcagcctggagcagctgcactgcggcaggaaccagctgcgggagctgaccctgagcggcttcagcctgcggaccctgtatgccagcagcaaccggctgacagctgtgaatgtgtaccctgtgcccagcctgctgaccttcctggacctgagcaggaacctgctggagtgtgtgcctgactgggcctgtgaggccaagaagattgaggtgctggatgtgtcctacaacctgctgacagaggtgcctgtgcgcatcctgagcagcctgagcctgaggaagctgatgctgggccacaaccacgtgcagaacctgcccaccctggtggagcacatccccctggaggtgctggacctgcagcacaatgccctgacccggctgcctgacaccctcttcagcaaggccctgaacctgcgctacctgaatgccagcgccaacagcctggagagcctgcccagcgcctgcaccggggaggagagcctgtccatgctgcagctgctgtacctgaccaacaacctgctgacagaccagtgcatccctgtgctggtgggccacctgcacctgcgcatcctgcacctggccaacaaccagctgcagaccttccctgccagcaagctgaacaagctggagcagctggaggagctgaacctgagcggcaacaagctgaagaccatccccaccaccatcgccaactgcaagaggctgcacaccctggtggcccacagcaacaacatcagcatcttccctgagatcctgcagctgccccagatccagtttgtggacctgagctgcaatgacctgacagagatcctgatccctgaggccctgcctgccaccctgcaggacctggacctgaccggcaacaccaacctggtgctggagcacaagaccctggacatcttcagccacatcaccaccctgaagattgaccagaagcccctgcccaccacagacagcacagtgaccagcaccttctggagccacggcctggccgagatggccggccagaggaacaagctgtgtgtgtctgccctggccatggacagctttgctgagggcgtgggcgctgtgtatggcatgtttgatggagacagaaatgaggagctgccccggctgctgcagtgcaccatggctgatgtgctgctggaggaggtgcagcagagcaccaatgacaccgtcttcatggccaacaccttcctggtgagccacaggaagctgggcatggccggccagaagctgggcagcagcgccctgctgtgctacatccggccagacacagctgaccctgccagcagcttcagcctgactgtggccaacgtgggcacctgccaggccgtgctgtgccggggcggcaagcctgtgcccctgagcaaggtgttcagcctggagcaggaccctgaggaggcccagagggtgaaggaccagaaggccatcatcacagagaactgggtgctgaaccagaagcacctgcaggacttccctggagaggacaagtag

SEQ ID NO: 21063 - DNA, 3771 bp, synthetic construct
  misc_feature 1..3771: note = Description of Artificial Sequence: Synthetic coding sequence
  source 1..3771: mol_type = other DNA
atgaagagaaatggcagcaggaactgcctgaacagaagaagccgcttcggcagccgggagcgggactggctgcgggaggatgtgaagaggggctgtgtgtacctgtatggagctgacaccaccacagccaccaccaccaccaccaccagcagcagcagcagcagcagcagcagcagcagtgacctgcacctggtgctgtgcaccgtggagaccccagccagcgagatctgtgccggggagggccgggagagcctgtacctgcagctgcacggggacctggtgcggcggctggagcccacagagcggcccctgcagatcgtgtatgactacctgagccggctgggctttgatgatcctgtgcgcatccaggaggaggccaccaacccagacctgggctgcatgatccgcttctacggggagaagccctgccacatggaccggctggaccgcatcctgctgagcggcatctacaacgtgaggaagggcaagacccagctgcacaagtgggccgagcggctggtggtgctgtgtggcacctgcctgattgtgtcctctgtgaaggactgccagacaggcaagatgcacatcctgcccctggtgggcggcaagattgaggaggtgaagaggcggcagtacagcctggccttcagcagcgctggggcccaggcccagacctaccacgtgtcctttgagaccctggccgagtaccagcgctggcagaggcaggccagcaaggtggtgtcccagaggatcagcacagtggacctgagctgctacagcctggaggaggtgcctgagcacctgttctacagccaggacatcacctacctgaacctgcggcacaacttcatgcagctggagaggcctgggggcctggacaccctgtacaagttcagccagctgaagggcctgaacctgagccacaacaagctgggcctcttccccatcctgctgtgtgagatcagcaccctgacagagctgaacctgagctgcaatggcttccatgacctgcccagccagatcggcaacctgctgaacctgcagaccctgtgcctggatggcaacttcctgaccaccctgcctgaggagctgggcaacctgcagcagctgagcagcctgggcatctccttcaacaacttcagccagatccctgaggtgtatgagaagctgaccatgctggacagagtggtgatggccggcaactgcctggaggtgctgaacctgggcgtgctgaacaggatgaaccacatcaagcacgtggacctgaggatgaaccacctgaagaccatggtgattgagaacctggagggcaacaagcacatcacccacgtggacctgcgggacaaccggctgacagacctggacctgagcagcctgtgcagcctggagcagctgcactgcggcaggaaccagctgcgggagctgaccctgagcggcttcagcctgcggaccctgtatgccagcagcaaccggctgacagctgtgaatgtgtaccctgtgcccagcctgctgaccttcctggacctgagcaggaacctgctggagtgtgtgcctgactgggcctgtgaggccaagaagattgaggtgctggatgtgtcctacaacctgctgacagaggtgcctgtgcgcatcctgagcagcctgagcctgaggaagctgatgctgggccacaaccacgtgcagaacctgcccaccctggtggagcacatccccctggaggtgctggacctgcagcacaatgccctgacccggctgcctgacaccctcttcagcaaggccctgaacaagctgaacaagctggagcagctggaggagctgaacctgagcggcaacaagctgaagaccatccccaccaccatcgccaactgcaagaggctgcacaccctggtggcccacagcaacaacatcagcatcttccctgagatcctgcagctgccccagatccagtttgtggacctgagctgcaatgacctgacagagatcctgatccctgaggccctgcctgccaccctgcaggacctggacctgactggaaacaccaacctggtgctggagcacaagaccctggacatcttcagccacatcaccaccctgaagattgaccagaagcccctgcccaccacagacagcacagtgaccagcaccttctggagccacggcctggccgagatggccggccagaggaacaagctgtgtgtgtctgccctggccatggacagctttgctgagggcgtgggcgctgtgtatggcatgtttgatggagacagaaatgaggagctgccccggctgctgcagtgcaccatggctgatgtgctgctggaggaggtgcagcagagcaccaatgacacagtgttcatggccaacaccttcctggtgagccacaggaagctgggcatggccggccagaagctgggcagcagcgccctgctgtgctacatccggccagacacagctgaccctgccagcagcttcagcctgactgtggccaacgtgggcacctgccaggccgtgctgtgccggggcggcaagcctgtgcccctgagcaaggtgttcagcctggagcaggaccctgaggaggcccagagggtgaaggaccagaaggccatcatcacagaggacaacaaggtgaatggagtgacctgctgcaccaggatgctgggctgcacctacctgtacccctggatcctgcccaagccccacatcagcagcacccccctgaccatccaggatgagctgctgatcctgggcaacaaggccctgtgggagcacctgagctacacagaagctgtgaatgctgtgagacatgtgcaggaccccctggccgccgccaagaagctgtgcaccctggcccagagctatggctgccaggacaacgtgggcgccatggtggtgtacctgaacatcggggaggagggctgcacctgtgagatgaatggcctgaccctgcccggccctgtgggctttgccagcaccaccaccatcaaggatgcccccaagccagccacccccagcagcagcagcggcatcgccagcgagttcagcagcgagatgagcaccagcgaggtgagcagcgaggtgggcagcacagccagtgatgagcacaatgctgggggcctggacacagccctgctgcccaggcctgagcggcgctgcagcctgcaccccacccccaccagcggcctcttccagaggcagcccagcagcgccaccttcagcagcaaccagagcgacaatggcctggacagtgatgatgaccagcctgtggagggcgtcatcaccaacggcagcaaggtggaggtggaggtggacatccactgctgccggggccgggacctggagaacagcccccccctgattgagagcagccccaccctgtgcagcgaggagcacgcccggggcagctgcttcggcatccggcggcagaacagcgtgaacagcggcatgctgctgcccatgagcaaggacaggatggagctgcagaagagccccagcaccagctgcctgtatggcaagaagctgagcaatggcagcatcgtgcccctggaggacagcctgaacctgattgaggtggccacagaggtgcccaagaggaagacaggctactttgctgcccccacccagatggagcctgaggaccagtttgtggtgccccatgacctggaggaggaggtgaaggagcagatgaagcagcaccaggacagccggctggagcctgagccccatgaggaggacagaacagagcccccagaggagtttgacacagccctgtag

SEQ ID NO: 21064 - DNA, 1272 bp, synthetic construct
  misc_feature 1..1272: note = Description of Artificial Sequence: Synthetic coding sequence
  source 1..1272: mol_type = other DNA
atgaagagaaatggcagcaggaactgcctgaacagaagaagccgcttcggcagccgggagcgggactggctgcgggaggatgtgaagaggggctgtgtgtacctgtatggagctgacaccaccacagccaccaccaccaccaccaccagcagcagcagcagcagcagcagcagcagcagtgacctgcacctggtgctgtgcaccgtggagaccccagccagcgagatctgtgccggggagggccgggagagcctgtacctgcagctgcacggggacctggtgcggcggctggagcccacagagcggcccctgcagatcgtgtatgactacctgagccggctgggctttgatgatcctgtgcgcatccaggaggaggccaccaacccagacctgggctgcatgatccgcttctacggggagaagccctgccacatggaccggctggaccgcatcctgctgagcggcatctacaacgtgaggaagggcaagacccagctgcacaagtgggccgagcggctggtggtgctgtgtggcacctgcctgattgtgtcctctgtgaaggactgccagacaggcaagatgcacatcctgcccctggtgggcggcaagattgaggaggtgaagaggcggcagtacagcctggccttcagcagcgctggggcccaggcccagacctaccacgtgtcctttgagaccctggccgagtaccagcgctggcagaggcaggccagcaaggtggtgtcccagaggatcagcacagtggacctgagctgctacagcctggaggaggtgcctgagcacctgttctacagccaggacatcacctacctgaacctgcggcacaacttcatgcagctggagaggcctgggggcctggacaccctgtacaagttcagccagctgaagggcctgaacctgagccacaacaagctgggcctcttccccatcctgctgtgtgagatcagcaccctgacagagctgaacctgagctgcaatggcttccatgacctgcccagccagatcggcaacctgctgaacctgcagaccctgtgcctggatggcaacttcctgaccaccctgcctgaggagctgggcaacctgcagcagctgagcagcctgggcatctccttcaacaacttcagccagatccctgaggtgtatgagaagctgaccatgctggacagagtggtgatggccggcaactgcctggaggtgctgaacctgggcgtgctgaacaggatgaaccacatcaagcacgtggacctgaggtag

SEQ ID NO: 21065 - DNA, 501 bp, synthetic construct
  misc_feature 1..501: note = Description of Artificial Sequence: Synthetic coding sequence
  source 1..501: mol_type = other DNA
atggccggccagaggaacaagctgtgtgtgtctgccctggccatggacagctttgctgagggcgtgggcgctgtgtatggcatgtttgatggagacagaaatgaggagctgccccggctgctgcagtgcaccatggctgatgtgctgctggaggaggtgcagcagagcaccaatgacaccgtcttcatggccaacaccttcctggtgagccacaggaagctgggcatggccggccagaagctgggcagcagcgccctgctgtgctacatccggccagacacagctgaccctgccagcagcttcagcctgactgtggccaacgtgggcacctgccaggccgtgctgtgccggggcggcaagcctgtgcccctgagcaaggtgttcagcctggagcaggaccctgaggaggcccagagggtgaaggaccagaaggccatcatcacagagaactgggtgctgaaccagaagcacctgcaggacttccctggagaggacaagtag

SEQ ID NO: 21066 - DNA, 3972 bp, synthetic construct; identical to SEQ ID NO: 21061
  misc_feature 1..3972: note = Description of Artificial Sequence: Synthetic coding sequence
  source 1..3972: mol_type = other DNA

SEQ ID NO: 21067 - DNA, 1212 bp, synthetic construct
  misc_feature 1..1212: note = Description of Artificial Sequence: Synthetic coding sequence
  source 1..1212: mol_type = other DNA
atgacagccatcatcaaggagatcgtgtccaggaacaagaggcgctaccaggaggatggctttgacctggacctgacctacatctaccccaacatcatcgccatgggcttccctgctgagcggctggagggcgtgtacagaaacaacattgatgatgtggtgcgcttcctggacagcaagcacaagaaccactacaagatctacaacctgtgtgccgagcggcactatgacacagccaagttcaactgccgggtggcccagtacccctttgaggaccacaaccccccccagctggagctgatcaagcccttctgtgaggacctggaccagtggctgtctgaagatgacaaccacgtggccgccatccactgcaaggccggcaagggccgcactggagtgatgatctgtgcctacctgctgcaccggggcaagttcctgaaggcccaggaggccctggacttctatggagaggtgaggacccgggacaagaagggcgtgaccatccccagccagaggcgctacgtgtactactacagctacctgctgaagaaccacctggactacagacctgtggccctgctcttccacaagatgatgtttgagaccatccccatgttttctgggggcacctgcaacccccagtttgtggtgtgccagctgaaggtgaagatctacagcagcaacagcggccccacccggcgggaggacaagttcatgtactttgagttcccccagcccctgcctgtgtgtggggacatcaaggtggagttcttccacaagcagaacaagatgctgaagaaggacaagatgttccacttctgggtgaacaccttcttcatccctggccctgaggagaccagcgagaaggtggagaatggcagcctgtgtgaccaggagattgacagcatctgcagcattgaaagagctgacaatgacaaggagtacctggtgctgaccctgaccaagaatgacctggacaaggccaacaaggacaaggccaaccgctacttcagccccaacttcaaggtgaagctgtacttcaccaagacagtggaggagcccagcaaccctgaggccagcagcagcacctctgtgaccccagatgtgtctgacaatgaaccagaccactaccgctacagcgacaccacagacagcgaccctgaaaatgagccctttgatgaggaccagcacacccagatcaccaaggtgtag

SEQ ID NO: 21068 - DNA, 531 bp, synthetic construct
  misc_feature 1..531: note = Description of Artificial Sequence: Synthetic coding sequence
  source 1..531: mol_type = other DNA
atgggcaaggctgctgctgctgtggccttcggggctgaggtgggcgtgcggctggccctgtttgctgccttcctggtgacagagctgctgccccccttccagaggctcatccagcctgaggagatgtggctgtacagaaacccctacgtggaggccgagtacttccccaccaagcccatgtttgtgattgccttcctgagccccctgagcctcatcttcctggccaagttcctgaagaaggctgacacccgggacagccggcaggcctgcctggccgccagcctggccctggccctgaatggagtcttcaccaacaccatcaagctgattgtgggccggcccaggccagacttcttctaccgctgcttcccagatggcctggcccacagcgacctgatgtgcacaggagacaaggatgtggtgaatgaaggaaggaagagcttccccagcggccacagcagctgcatgaacatcatctggaccctgccctatgcctgcttccacatcatcgagttcaacctggagagctag

SEQ ID NO: 21069 - DNA, 651 bp, synthetic construct
  misc_feature 1..651: note = Description of Artificial Sequence: Synthetic coding sequence
  source 1..651: mol_type = other DNA
atgggcaaggctgctgctgctgtggccttcggggctgaggtgggcgtgcggctggccctgtttgctgccttcctggtgacagagctgctgccccccttccagaggctcatccagcctgaggagatgtggctgtacagaaacccctacgtggaggccgagtacttccccaccaagcccatgtttgtgattgccttcctgagccccctgagcctcatcttcctggccaagttcctgaagaaggctgacacccgggacagccggcaggcctgcctggccgccagcctggccctggccctgaatggagtcttcaccaacaccatcaagctgattgtgggccggcccaggccagacttcttctaccgctgcttcccagatggcctggcccacagcgacctgatgtgcacaggagacaaggatgtggtgaatgaaggaaggaagagcttccccagcggccacagcagctttgcctttgctggcctggcctttgccagcttctacctggccggcaagctgcactgcttcaccccccagggccggggcaagtcctggaggttctgtgccttcctgagccccctgctgtttgctgctgtgattgccctgagcaggacctgtgactacaagcaccactggcagggccccttcaagtggtag

SEQ ID NO: 21070 - DNA, 795 bp, synthetic construct
  misc_feature 1..795: note = Description of Artificial Sequence: Synthetic coding sequence
  source 1..795: mol_type = other DNA
atgggcaaggctgctgctgctgtggccttcggggctgaggtgggcgtgcggctggccctgtttgctgccttcctggtgacagagctgctgccccccttccagaggctcatccagcctgaggagatgtggctgtacagaaacccctacgtggaggccgagtacttccccaccaagcccatgtttgtgattgccttcctgagccccctgagcctcatcttcctggccaagttcctgaagaaggctgacacccgggacagccggcaggcctgcctggccgccagcctggccctggccctgaatggagtcttcaccaacaccatcaagctgattgtgggccggcccaggccagacttcttctaccgctgcttcccagatggcctggcccacagcgacctgatgtgcacaggagacaaggatgtggtgaatgaaggaaggaagagcttccccagcggccacagcagctttgcctttgctggcctggcctttgccagcttctacctggccggcaagctgcactgcttcaccccccagggccggggcaagtcctggaggttctgtgccttcctgagccccctgctgtttgctgctgtgattgccctgagcaggacctgtgactacaagcaccactggcaggatgtgctggtgggctccatgattggcatgacctttgcctacgtgtgctaccggcagtactacccacccctgacagatgctgagtgccacaagcccttccaggacaagctggtgctgagcacagcccagaagccaggggacagctactgctttgacatctag

SEQ ID NO: 21071 - DNA, 1086 bp, synthetic construct
  misc_feature 1..1086: note = Description of Artificial Sequence: Synthetic coding sequence
  source 1..1086: mol_type = other DNA
atgcacggggactacaccctgaccctgaggaaaggaggcaacaacaagctgatcaagatcttccacagagatggcaagtatggcttcagtgaccccctgaccttcagctctgtggtggagctgatcaaccactacagaaatgaaagcctggcccagtacaaccccaagctggatgtgaagctgctgtaccctgtgtccaagtaccagcaggaccaggtggtgaaggaggacaacattgaagctgtgggcaagaagctgcacgagtacaacacccagttccaggagaagagccgggagtatgaccggctgtatgaggagtacaccaggaccagccaggagatccagatgaagaggacagccatcgaggccttcaatgagaccatcaagatctttgaggagcagtgccagacccaggagcgctacagcaaggagtacatcgagaagttcaagcgggagggcaatgagaaggagatccagaggatcatgcacaactatgacaagctgaagagccgcatcagcgagatcatcgacagcagaagaaggctggaggaggacctgaagaagcaggccgctgagtaccgggagattgacaagaggatgaacagcatcaagccagacctgatccagctgaggaagacccgggaccagtacctgatgtggctgacccagaagggcgtgcggcagaagaagctgaatgagtggctgggcaatgaaaatacagaggaccagtacagcctggtggaggatgatgaggacctgccccaccatgatgagaagacctggaatgtgggcagcagcaacagaaacaaggccgagaacctgctgcggggcaagagagatggcaccttcctggtgcgggagagcagcaagcagggctgctacgcctgcagcgtggtggtggatggagaggtgaagcactgtgtgatcaacaagacagccaccggctacggctttgctgagccctacaacctgtacagcagcctgaaggagctggtgctgcactaccagcacaccagcctggtgcagcacaatgacagcctgaatgtgaccctggcctaccctgtgtatgcccagcagaggaggtag

SEQ ID NO: 21072 - DNA, 3207 bp, synthetic construct
  misc_feature 1..3207: note = Description of Artificial Sequence: Synthetic coding sequence
  source 1..3207: mol_type = other DNA
atgccaccccggcccagcagtggagagctgtggggcatccacctgatgccaccccgcatcctggtggagtgcctgctgcccaacggcatgattgtgaccctggagtgcctgcgggaggccaccctcatcaccatcaagcatgagctgttcaaggaggccaggaagtaccccctgcaccagctgctgcaggatgagagcagctacatctttgtgtctgtgacccaggaggccgagcgggaggagttctttgatgagacccggcggctgtgtgacctgcggctcttccagcccttcctgaaggtgattgagcctgtgggcaaccgggaggagaagatcctgaaccgggagattggatttgccatcggcatgcctgtgtgtgaatttgacatggtgaaggaccctgaggtgcaggacttcagaagaaacatcctgaatgtgtgcaaggaggccgtggacctgcgggacctgaacagcccccacagccgggccatgtatgtgtacccacccaacgtggagagcagccctgagctgcccaagcacatctacaacaagctggacaagggccagatcatcgtggtgatctgggtgattgtgagccccaacaatgacaagcagaagtacaccctgaagatcaaccacgactgtgtgcctgagcaggtgattgctgaggccatcaggaagaagaccaggtccatgctgctgagcagcgagcagctgaagctgtgtgtgctggagtaccagggcaagtacatcctgaaggtgtgtggctgtgatgagtacttcctggagaagtaccccctgagccagtacaagtacatccgcagctgcatcatgctgggccgcatgcccaacctgatgctgatggccaaggagagcctgtacagccagctgcccatggactgcttcaccatgcccagctacagccgccgcatcagcacagccaccccctacatgaatggagagaccagcaccaagagcctgtgggtgatcaacagcgccctgcgcatcaagatcctgtgtgccacctacgtgaatgtgaacatccgggacatcgacaagatctacgtgaggacaggcatctaccacggcggggagcccctgtgtgacaacgtgaacacccagagggtgccctgcagcaacccccgctggaatgagtggctgaactatgacatctacatcccagacctgcccagggctgcccggctgtgcctgagcatctgcagcgtgaagggcaggaaaggagccaaggaggagcactgccccctggcctggggcaacatcaacctgtttgactacacagacaccctggtgtctgggaagatggccctgaacctgtggcctgtgccccacggcctggaggacctgctgaaccccatcggcgtgacaggcagcaaccccaacaaggagaccccctgcctggagctggagtttgactggttcagctctgtggtgaagttcccagacatgtctgtcatcgaggagcacgccaactggagcgtgtcccgggaggccggcttctcctacagccatgctggcctgagcaaccggctggcccgggacaatgagctgagagaaaatgacaaggagcagctgaaggccatcagcacccgggaccccctgtctgagatcacagagcaggagaaggacttcctgtggagccaccgccactactgtgtgaccatccctgagatcctgcccaagctgctgctgtctgtgaagtggaacagcagagatgaggtggcccagatgtactgcctggtgaaggactggccacccatcaagccagagcaggccatggagctgctggactgcaactacccagaccccatggtgcggggctttgctgtgcgctgcctggagaagtacctgacagatgacaagctgagccagtacctgatccagctggtgcaggtgctgaagtatgagcagtacctggacaacctgctggtgcgcttcctgctgaagaaggccctgaccaaccagagaattggccacttcttcttctggcacctgaagtctgagatgcacaacaagacagtgtcccagcgcttcggcctgctgctggagagctactgccgggcctgtggcatgtacctgaagcacctgaaccggcaggtggaggccatggagaagctgatcaacctgacagacatcctgaagcaggagaagaaggatgagacccagaaggtgcagatgaagttcctggtggagcagatgaggaggccagacttcatggatgccctgcagggcttcctgagccccctgaacccagcccaccagctgggcaacctgcggctggaggagtgccgcatcatgagcagcgccaagaggcccctgtggctgaactgggagaacccagacatcatgtctgagctgctcttccagaacaatgagatcatcttcaagaatggagatgacctgcggcaggacatgctgaccctgcagatcatccgcatcatggagaacatctggcagaaccagggcctggacctgaggatgctgccctacggctgcctgagcattggagactgtgtgggcctcatcgaggtggtgaggaacagccacaccatcatgcagatccagtgcaagggcggcctgaagggggccctgcagttcaacagccacaccctgcaccagtggctgaaggacaagaacaagggggagatctatgatgctgccatcgacctcttcaccaggagctgtgccggctactgtgtggccaccttcatcctgggcattggagacagacacaacagcaacatcatggtgaaggatgatggccagctgttccacatcgactttggccacttcctggaccacaagaagaagaagtttggctacaagcgggagcgggtgccctttgtgctgacccaggacttcctgattgtcatcagcaagggggcccaggagtgcaccaagacccgggagtttgagcgcttccaggagatgtgctacaaggcctacctggccatccggcagcacgccaacctcttcatcaacctcttctccatgatgctgggcagcggcatgcctgagctgcagagctttgatgacatcgcctacatcaggaagaccctggccctggacaagacagagcaggaggccctggagtacttcatgaagcagatgaatgatgcccaccacggcggctggaccaccaagatggactggatcttccacaccatcaagcagcacgccctgaactag

SEQ ID NO: 21073 - DNA, 357 bp, synthetic construct
  misc_feature 1..357: note = Description of Artificial Sequence: Synthetic coding sequence
  source 1..357: mol_type = other DNA
atgccaccccggcccagcagtggagagctgtggggcatccacctgatgccaccccgcatcctggtggagtgcctgctgcccaacggcatgattgtgaccctggagtgcctgcgggaggccaccctcatcaccatcaagcatgagctgttcaaggaggccaggaagtaccccctgcaccagctgctgcaggatgagagcagctacatctttgtgtctgtgacccaggaggccgagcgggaggagttctttgatgagacccggcggctgtgtgacctgcggctcttccagcccttcctgaaggtgattgagcctgtgggcaaccgggaggagaagatcctgaaccgggagattggatag

SEQ ID NO: 21074 - DNA, 66 bp, synthetic construct
  misc_feature 1..66: note = Description of Artificial Sequence: Synthetic coding sequence
  source 1..66: mol_type = other DNA
atgccaccccggcccagcagtggagagctgtggggcatccacctgatgccaccccgcatcctgtag

SEQ ID NO: 21075 - DNA, 3213 bp, synthetic construct
  misc_feature 1..3213: note = Description of Artificial Sequence: Synthetic coding sequence
  source 1..3213: mol_type = other DNA
atgtgcttctccttcatcatgcccccagccatggctgacatcctggacatctgggccgtggacagccagatcgccagtgatggcagcatccctgtggacttcctgctgcccaccggcatctacatccagctggaggtgccccgggaggccaccatctcctacatcaagcagatgctgtggaagcaggtgcacaactaccccatgttcaacctgctgatggacatcgacagctacatgtttgcctgtgtgaaccagacagctgtgtatgaggagctggaggatgagacccggcggctgtgtgatgtgcggcccttcctgcctgtgctgaagctggtgaccaggagctgtgaccccggggagaagctggacagcaagattggagtgctgattggcaagggcctgcatgaatttgacagcctgaaggaccctgaggtgaatgagttccggaggaagatgaggaagttcagcgaggagaagatcctgagcctggtgggcctgtcctggatggactggctgaagcagacctacccacctgagcacgagcccagcatccctgagaacctggaggacaagctgtatggaggcaagctgattgtggccgtgcactttgagaactgccaggatgtgttctccttccaggtgagccccaacatgaaccccatcaaggtgaatgagctggccatccagaagaggctgaccatccacggcaaggaggatgaggtgagcccctatgactatgtgctgcaggtgtctggccgggtggagtatgtgtttggagaccaccccctcatccagttccagtacatccggaactgtgtgatgaacagagccctgccccacttcatcctggtggagtgctgcaagatcaagaagatgtatgagcaggagatgattgccatcgaggccgccatcaacagaaacagcagcaacctgcccctgcccctgccccccaagaagacccgcatcatcagccacgtgtgggagaacaacaaccccttccagatcgtgctggtgaagggcaacaagctgaacacagaggagaccgtgaaggtgcacgtgcgggccggcctcttccatggaacagagctgctgtgcaagaccatcgtgtcctctgaggtgtctgggaagaatgaccacatctggaatgagcccctggagtttgacatcaacatctgtgacctgcccaggatggcccggctgtgctttgctgtgtatgctgtgctggacaaggtgaagaccaagaagagcaccaagaccatcaaccccagcaagtaccagaccatcaggaaggccggcaaggtgcactaccctgtggcctgggtgaacaccatggtgtttgacttcaagggccagctgaggactggagacatcatcctgcacagctggagcagcttcccagatgagctggaggagatgctgaaccccatgggcaccgtgcagaccaacccctacacagaaaatgccacagccctgcacgtgaagtttcctgagaacaagaagcagccctactactaccccccatttgacaagatcatcgagaaggctgctgagatcgccagcagtgacagcgccaacgtgagcagccggggcggcaagaagttcctgcctgtgctgaaggagatcctggaccgggaccccctgagccagctgtgtgaaaatgagatggacctgatctggaccctgcggcaggactgccgggagatcttcccccagagcctgcccaagctgctgctgagcatcaagtggaacaagctggaggatgtggcccagctgcaggccctgctgcagatctggcccaagctgcccccccgggaggccctggagctgctggacttcaactacccagaccagtatgtgcgggagtatgctgtgggctgcctgcggcagatgtctgatgaggagctgagccagtacctgctgcagctggtgcaggtgctgaagtatgagcccttcctggactgtgccctgagccgcttcctgctggagcgggccctgggcaacagacgcatcggccagttcctgttctggcacctgcggtctgaggtgcacatcccagctgtgtctgtgcagtttggagtcatcctggaggcctactgccggggctctgtgggccacatgaaggtgctgagcaagcaggtggaggccctgaacaagctgaagaccctgaacagcctcatcaagctgaatgctgtgaagctgaacagagccaagggcaaggaggccatgcacacctgcctgaagcagagcgcctaccgggaggccctgagtgacctgcagagccccctgaacccctgtgtgatcctgtctgagctgtatgtggagaagtgcaagtacatggacagcaagatgaagcccctgtggctggtgtacaacaacaaggtgtttggagaagattctgtgggcgtcatcttcaagaatggagatgacctgcggcaggacatgctgaccctgcagatgctgcggctgatggacctgctgtggaaggaggccggcctggacctgaggatgctgccctacggctgcctggccaccggggacaggagcggcctgattgaggtggtgtccaccagcgagaccatcgctgacatccagctgaacagcagcaatgtggccgctgctgctgccttcaacaaggatgccctgctgaactggctgaaggagtacaacagcggagatgacctggaccgggccatcgaggagttcaccctgagctgtgccggctactgtgtggccagctatgtgctgggcattggagacagacacagcgacaacatcatggtgaagaagacaggccagctgttccacatcgactttggccacatcctgggcaacttcaagagcaagtttggcatcaagcgggagcgggtgcccttcatcctgacctatgacttcatccacgtgatccagcagggcaagacaggcaacacagagaagtttggccgcttccggcagtgctgtgaagatgcctacctgatcctgcggcggcacggcaacctcttcatcaccctgtttgccctgatgctgacagctggcctgcctgagctgacctctgtgaaggacatccagtacctgaaggacagcctggccctgggcaagtctgaggaggaggccctgaagcagttcaagcagaagtttgatgaggccctgcgggagagctggaccaccaaggtgaactggatggcccacacagtgaggaaggactaccgctcctag

SEQ ID NO: 21076 - DNA, 303 bp, synthetic construct
  misc_feature 1..303: note = Description of Artificial Sequence: Synthetic coding sequence
  source 1..303: mol_type = other DNA
atgtgcttctccttcatcatgcccccagccatggctgacatcctggacatctgggccgtggacagccagatcgccagtgatggcagcatccctgtggacttcctgctgcccaccggcatctacatccagctggaggtgccccgggaggccaccatctcctacatcaagcagatgctgtggaagcaggtgcacaactaccccatgttcaacctgctgatggacatcgacagctacatgtttgcctgtgtgaaccagacagctgtgtatgaggagctggaggatgagacccggcggctgtgctag

SEQ ID NO: 21077 - DNA, 171 bp, synthetic construct
  misc_feature 1..171: note = Description of Artificial Sequence: Synthetic coding sequence
  source 1..171: mol_type = other DNA
atgtgcttctccttcatcatgcccccagccatggctgacatcctggacatctgggccgtggacagccagatcgccagtgatggcagcatccctgtggacttcctgctgcccaccggcatctacatccagctggaggtgccccgggaggccaccatctcctacatcaagtag

SEQ ID NO: 21078 - DNA, 3213 bp, synthetic construct; identical to SEQ ID NO: 21075
  misc_feature 1..3213: note = Description of Artificial Sequence: Synthetic coding sequence
  source 1..3213: mol_type = other DNA

SEQ ID NO: 21079 - DNA, 396 bp, synthetic construct
  misc_feature 1..396: note = Description of Artificial Sequence: Synthetic coding sequence
  source 1..396: mol_type = other DNA
atgtgcttctccttcatcatgcccccagccatggctgacatcctggacatctgggccgtggacagccagatcgccagtgatggcagcatccctgtggacttcctgctgcccaccggcatctacatccagctggaggtgccccgggaggccaccatctcctacatcaagcagatgctgtggaagcaggtgcacaactaccccatgttcaacctgctgatggacatcgacagctacatgtttgcctgtgtgaaccagacagctgtgtatgaggagctggaggatgagacccggcggctgtgtgatgtgcggcccttcctgcctgtgctgaagctggtgaccaggagctgtgaccccggggagaagctggacagcaagattggagtgctgattggatag

SEQ ID NO: 21080 - DNA, 2109 bp, synthetic construct
  misc_feature 1..2109: note = Description of Artificial Sequence: Synthetic coding sequence
  source 1..2109: mol_type = other DNA
tgagtgcgggccggcctcttccacggcacagagctgctgtgcaagaccatcgtgagcagcgaggtgtctgggaagaatgaccacatctggaatgagcccctggagtttgacatcaacatctgtgacctgcccaggatggcccggctgtgctttgctgtgtatgctgtgctggacaaggtgaagaccaagaagagcaccaagaccatcaaccccagcaagtaccagaccatcaggaaggccggcaaggtgcactaccctgtggcctgggtgaacaccatggtgtttgacttcaagggccagctgaggactggagacatcatcctgcacagctggagcagcttcccagatgagctggaggagatgctgaaccccatgggcaccgtgcagaccaacccctacacagaaaatgccacagccctgcacgtgaagtttcctgagaacaagaagcagccctactactaccccccatttgacaagagccggggcggcaagaagttcctgcctgtgctgaaggagatcctggaccgggaccccctgagccagctgtgtgaaaatgagatggacctgatctggaccctgcggcaggactgccgggagatcttcccccagagcctgcccaagctgctgctgagcatcaagtggaacaagctggaggatgtggcccagctgcaggccctgctgcagatctggcccaagctgcccccccgggaggccctggagctgctggacttcaactacccagaccagtatgtgcgggagtatgctgtgggctgcctgcggcagatgtctgatgaggagctgagccagtacctgctgcagctggtgcaggtgctgaagtatgagcccttcctggactgtgccctgagccgcttcctgctggagcgggccctgggcaacagacgcatcggccagttcctgttctggcacctgcggtctgaggtgcacatcccagctgtgtctgtgcagtttggagtcatcctggaggcctactgccggggctctgtgggccacatgaaggtgctgagcaagcaggtggaggccctgaacaagctgaagaccctgaacagcctcatcaagctgaatgctgtgaagctgaacagagccaagggcaaggaggccatgcacacctgcctgaagcagagcgcctaccgggaggccctgagtgacctgcagagccccctgaacccctgtgtgatcctgtctgagctgtatgtggagaagtgcaagtacatggacagcaagatgaagcccctgtggctggtgtacaacaacaaggtgtttggagaagattctgtgggcgtcatcttcaagaatggagatgacctgcggcaggacatgctgaccctgcagatgctgcggctgatggacctgctgtggaaggaggccggcctggacctgaggatgctgccctacggctgcctggccaccggggacaggagcggcctgattgaggtggtgtccaccagcgagaccatcgctgacatccagctgaacagcagcaatgtggccgctgctgctgccttcaacaaggatgccctgctgaactggctgaaggagtacaacagcggagatgacctggaccgggccatcgaggagttcaccctgagctgtgccggctactgtgtggccagctatgtgctgggcattggagacagacacagcgacaacatcatggtgaagaagacaggccagctgttccacatcgactttggccacatcctgggcaacttcaagagcaagtttggcatcaagcgggagcgggtgcccttcatcctgacctatgacttcatccacgtgatccagcagggcaagacaggcaacacagagaagtttggccgcttccggcagtgctgtgaagatgcctacctgatcctgcggcggcacggcaacctcttcatcaccctgtttgccctgatgctgacagctggcctgcctgagctgacctctgtgaaggacatccagtacctgaaggacagcctggccctgggcaagtctgaggaggaggccctgaagcagttcaagcagaagtttgatgaggccctgcgggagagctggaccaccaaggtgaactggatggcccacacagtgaggaaggactaccgctcctag

SEQ ID NO: 21081 - DNA, 1566 bp, synthetic construct
  misc_feature 1..1566: note = Description of Artificial Sequence: Synthetic coding sequence
  source 1..1566: mol_type = other DNA
atggacctgatctggaccctgcggcaggactgccgggagatcttcccccagagcctgcccaagctgctgctgagcatcaagtggaacaagctggaggatgtggcccagctgcaggccctgctgcagatctggcccaagctgcccccccgggaggccctggagctgctggacttcaactacccagaccagtatgtgcgggagtatgctgtgggctgcctgcggcagatgtctgatgaggagctgagccagtacctgctgcagctggtgcaggtgctgaagtatgagcccttcctggactgtgccctgagccgcttcctgctggagcgggccctgggcaacagacgcatcggccagttcctgttctggcacctgcggtctgaggtgcacatcccagctgtgtctgtgcagtttggagtcatcctggaggcctactgccggggctctgtgggccacatgaaggtgctgagcaagcaggtggaggccctgaacaagctgaagaccctgaacagcctcatcaagctgaatgctgtgaagctgaacagagccaagggcaaggaggccatgcacacctgcctgaagcagagcgcctaccgggaggccctgagtgacctgcagagccccctgaacccctgtgtgatcctgtctgagctgtatgtggagaagtgcaagtacatggacagcaagatgaagcccctgtggctggtgtacaacaacaaggtgtttggagaagattctgtgggcgtcatcttcaagaatggagatgtgtgcttccccctggacctgcggcaggacatgctgaccctgcagatgctgcggctgatggacctgctgtggaaggaggccggcctggacctgaggatgctgccctacggctgcctggccactggagacagaagtggcctcatcgaggtggtgtccaccagcgagaccatcgctgacatccagctgaacagcagcaatgtggccgctgctgctgccttcaacaaggatgccctgctgaactggctgaaggagtacaacagcggagatgacctggaccgggccatcgaggagttcaccctgagctgtgccggctactgtgtggccagctatgtgctgggcatcggggacagacacagcgacaacatcatggtgaagaagacaggccagctgttccacatcgactttggccacatcctgggcaacttcaagagcaagtttggcatcaagcgggagcgggtgcccttcatcctgacctatgacttcatccacgtgatccagcagggcaagacaggcaacacagagaagtttggccgcttccggcagtgctgtgaagatgcctacctgatcctgcggagacatggcaacctcttcatcaccctgtttgccctgatgctgacagctggcctgcctgagctgacctctgtgaaggacatccagtacctgaaggacagcctggccctgggcaagtctgaggaggaggccctgaagcagttcaagcagaagtttgatgaggccctgcgggagagctggaccaccaaggtgaactggatggcccacacagtgaggaaggactaccgctcctag

SEQ ID NO: 21082 - DNA, 3207 bp, synthetic construct
  misc_feature 1..3207: note = Description of Artificial Sequence: Synthetic coding sequence
  source 1..3207: mol_type = other DNA
atgcctcctggggtggactgccccatggagttctggaccaaggaggagaaccagagcgtggtggtggacttcctgctgcccaccggggtgtacctgaacttccctgtgtccagaaatgccaacctgagcaccatcaagcagctgctgtggcaccgggcccagtatgagcccctcttccacatgctgagcggccctgaggcctacgtgttcacctgcatcaaccagacagctgagcagcaggagctggaggatgagcagaggcggctgtgtgatgtgcagcccttcctgcctgtgctgcggctggtggcccgggagggggacagagtgaagaagctgatcaacagccagatcagcctgctgattggcaagggcctgcacgagtttgacagcctgtgtgaccctgaggtgaatgacttccgggccaagatgtgccagttctgtgaggaggccgccgcccggcggcagcagctgggctgggaggcctggctgcagtacagcttccccctgcagctggagcccagcgcccagacctggggccctggcaccctgcggctgcccaacagagccctgctggtgaatgtgaagtttgagggcagcgaggagagcttcaccttccaggtgtccaccaaggatgtgcccctggccctgatggcctgtgccctgaggaagaaggccaccgtcttccggcagcccctggtggagcagcctgaggactacaccctgcaggtgaatggaagacatgagtacctgtatggcagctaccccctgtgccagttccaggtgcagaagccccgggccaagcccccacccatcccagccaagaagcccagctctgtgtccctgtggagcctggagcagcccttccgcatcgagctgatccagggcagcaaggtgaatgctgatgagaggatgaagctggtggtgcaggccggcctcttccacggcaatgagatgctgtgcaagacagtgagcagcagcgaggtgtctgtgtgcagcgagcctgtgtggaagcagaggctggagtttgacatcaacatctgtgacctgcccaggatggcccggctgtgctttgccctgtatgctgtgattgagaaggccaagaaggcccggagcaccaagaagaagagcaagaaggctgactgccccatcgcctgggccaacctgatgctgtttgactacaaggaccagctgaagacaggagagcgctgcctgtacatgtggcccagcgtgcctgatgagaagggggagctgctgaaccccactggaacagtgcgcagcaaccccaacacagacagcgctgctgccctgctgatctgcctgcctgaggtggccccccaccctgtgtactacccagccctggagaagctgcccggcggcatgctgctggccagccgggagtggaggcctgagctgctgtggatgaggctgcacgcagaagattctgcccccagcaggatgattggagtggccatgcctggcctgggcgtgctgcccggcctggtgcaggcccctggagatgctgagtgcagccggctgctgcagatcctggagctgggccgccacagtgaatgtgtgcacgtgacagaggaggagcagctgcagctgcgggagatcctggagcggcggggcagcggggagctgtatgagcacgagaaggacctggtgtggaagctgcggcatgaggtgcaggagcacttccctgaggccctggcccggctgctgctggtgaccaagtggaacaagcatgaagatgtggcccaggatgccctgcctgctgtgtcctggccagagctgcctgtgctgagcgccctggagctgctggacttctccttcccagactgccacgtgggcagctttgccatcaagagcctgaggaagctgacagatgatgagctgttccagtacctgctgcagctggtgcaggtgctgaagtatgagagctacctggactgtgagctgaccaagttcctgctggaccgggccctggccaacaggaagattggccacttcctgttctggcacctgcggtctgagatgcacgtgcccagcgtggccctgcgcttcggcctcatcctggaggcctactgccggggcagcacccaccacatgaaggtgctgatgaagcagggcgaggccctgagcaagctgaaggccctgaatgactttgtgaagctgagcagccagaagacccccaagccccagaccaaggagctgatgcacctgtgcatgaggcaggaggcctacctggaggccctgagccacctgcagagccccctggaccccagcaccctgctggccgaggtgtgtgtggagcagtgcaccttcatggacagcaagatgaagcccctgtggatcatgtacagcaatgaggaggccggcagcggcggctctgtgggcatcatcttcaagaatggagatgacctgcggcaggacatgctgaccctgcagatgatccagctgatggatgtgctgtggaagcaggagggcctggacctgaggatgaccccctacggctgcctgcccaccggggacagaacaggcctgattgaggtggtgctgcggagtgacaccatcgccaacatccagctgaacaagagcaacatggccgccacagctgccttcaacaaggatgccctgctgaactggctgaagagcaagaaccctggagaggccctggaccgggccatcgaggagttcaccctgagctgtgccggctactgtgtggccacctacgtgctgggcattggagacagacacagcgacaacatcatgatccgggagagcggccagctgttccacatcgactttggccacttcctgggcaacttcaagaccaagtttggcatcaaccgggagcgggtgcccttcatcctgacctatgactttgtgcacgtgatccagcagggcaagaccaacaacagcgagaagtttgagcgcttccggggctactgtgagcgggcctacaccatcctgcggcggcacggcctgctcttcctgcacctgtttgccctgatgagagctgctggcctgcctgagctgagctgcagcaaggacatccagtacctgaaggacagcctggccctgggcaagacagaggaggaggccctgaagcacttccgggtgaagttcaatgaggccctgcgggagagctggaagaccaaggtgaactggctggcccacaacgtgtccaaggacaaccggcagtag

SEQ ID NO: 21083 - DNA, 3207 bp, synthetic construct
  misc_feature 1..3207: note = Description of Artificial Sequence: Synthetic coding sequence
  source 1..3207: mol_type = other DNA
atgcctcctggggtggactgccccatggagttctggaccaaggaggagaaccagagcgtggtggtggacttcctgctgcccaccggggtgtacctgaacttccctgtgtccagaaatgccaacctgagcaccatcaagcagctgctgtggcaccgggcccagtatgagcccctcttccacatgctgagcggccctgaggcctacgtgttcacctgcatcaaccagacagctgagcagcaggagctggaggatgagcagaggcggctgtgtgatgtgcagcccttcctgcctgtgctgcggctggtggcccgggagggggacagagtgaagaagctgatcaacagccagatcagcctgctgattggcaagggcctgcacgagtttgacagcctgtgtgaccctgaggtgaatgacttccgggccaagatgtgccagttctgtgaggaggccgccgcccggcggcagcagctgggctgggaggcctggctgcagtacagcttccccctgcagctggagcccagcgcccagacctggggccctggcaccctgcggctgcccaacagagccctgctggtgaatgtgaagtttgagggcagcgaggagagcttcaccttccaggtgtccaccaaggatgtgcccctggccctgatggcctgtgccctgaggaagaaggccaccgtcttccggcagcccctggtggagcagcctgaggactacaccctgcaggtgaatggaagacatgagtacctgtatggcagctaccccctgtgccagttccaggtgcagaagccccgggccaagcccccacccatcccagccaagaagcccagctctgtgtccctgtggagcctggagcagcccttccgcatcgagctgatccagggcagcaaggtgaatgctgatgagaggatgaagctggtggtgcaggccggcctcttccacggcaatgagatgctgtgcaagacagtgagcagcagcgaggtgtctgtgtgcagcgagcctgtgtggaagcagaggctggagtttgacatcaacatctgtgacctgcccaggatggcccggctgtgctttgccctgtatgctgtgattgagaaggccaagaaggcccggagcaccaagaagaagagcaagaaggctgactgccccatcgcctgggccaacctgatgctgtttgactacaaggaccagctgaagacaggagagcgctgcctgtacatgtggcccagcgtgcctgatgagaagggggagctgctgaaccccactggaacagtgcgcagcaaccccaacacagacagcgctgctgccctgctgatctgcctgcctgaggtggccccccaccctgtgtactacccagccctggagaagctgcccggcggcatgctgctggccagccgggagtggaggcctgagctgctgtggatgaggctgcacgcagaagattctgcccccagcaggatgattggagtggccatgcctggcctgggcgtgctgcccggcctggtgcaggcccctggagatgctgagtgcagccggctgctgcagatcctggagctgggccgccacagtgaatgtgtgcacgtgacagaggaggagcagctgcagctgcgggagatcctggagcggcggggcagcggggagctgtatgagcacgagaaggacctggtgtggaagctgcggcatgaggtgcaggagcacttccctgaggccctggcccggctgctgctggtgaccaagtggaacaagcatgaagatgtggcccagatgctgtacctgctgtgctcctggccagagctgcctgtgctgagcgccctggagctgctggacttctccttcccagactgccacgtgggcagctttgccatcaagagcctgaggaagctgacagatgatgagctgttccagtacctgctgcagctggtgcaggtgctgaagtatgagagctacctggactgtgagctgaccaagttcctgctggaccgggccctggccaacaggaagattggccacttcctgttctggcacctgcggtctgagatgcacgtgcccagcgtggccctgcgcttcggcctcatcctggaggcctactgccggggcagcacccaccacatgaaggtgctgatgaagcagggcgaggccctgagcaagctgaaggccctgaatgactttgtgaagctgagcagccagaagacccccaagccccagaccaaggagctgatgcacctgtgcatgaggcaggaggcctacctggaggccctgagccacctgcagagccccctggaccccagcaccctgctggccgaggtgtgtgtggagcagtgcaccttcatggacagcaagatgaagcccctgtggatcatgtacagcaatgaggaggccggcagcggcggctctgtgggcatcatcttcaagaatggagatgacctgcggcaggacatgctgaccctgcagatgatccagctgatggatgtgctgtggaagcaggagggcctggacctgaggatgaccccctacggctgcctgcccaccggggacagaacaggcctgattgaggtggtgctgcggagtgacaccatcgccaacatccagctgaacaagagcaacatggccgccacagctgccttcaacaaggatgccctgctgaactggctgaagagcaagaaccctggagaggccctggaccgggccatcgaggagttcaccctgagctgtgccggctactgtgtggccacctacgtgctgggcattggagacagacacagcgacaacatcatgatccgggagagcggccagctgttccacatcgactttggccacttcctgggcaacttcaagaccaagtttggcatcaaccgggagcgggtgcccttcatcctgacctatgactttgtgcacgtgatccagcagggcaagaccaacaacagcgagaagtttgagcgcttccggggctactgtgagcgggcctacaccatcctgcggcggcacggcctgctcttcctgcacctgtttgccctgatgagagctgctggcctgcctgagctgagctgcagcaaggacatccagtacctgaaggacagcctggccctgggcaagacagaggaggaggccctgaagcacttccgggtgaagttcaatgaggccctgcgggagagctggaagaccaaggtgaactggctggcccacaacgtgtccaaggacaaccggcagtag

SEQ ID NO: 21084 - DNA, 3135 bp, synthetic construct
  misc_feature 1..3135: note = Description of Artificial Sequence: Synthetic coding sequence
  source 1..3135: mol_type = other DNA
atgcctcctggggtggactgccccatggagttctggaccaaggaggagaaccagagcgtggtggtggacttcctgctgcccaccggggtgtacctgaacttccctgtgtccagaaatgccaacctgagcaccatcaagcagctgctgtggcaccgggcccagtatgagcccctcttccacatgctgagcggccctgaggcctacgtgttcacctgcatcaaccagacagctgagcagcaggagctggaggatgagcagaggcggctgtgtgatgtgcagcccttcctgcctgtgctgcggctggtggcccgggagggggacagagtgaagaagctgatcaacagccagatcagcctgctgattggcaagggcctgcacgagtttgacagcctgtgtgaccctgaggtgaatgacttccgggccaagatgtgccagttctgtgaggaggccgccgcccggcggcagcagctgggctgggaggcctggctgcagtacagcttccccctgcagctggagcccagcgcccagacctggggccctggcaccctgcggctgcccaacagagccctgctggtgaatgtgaagtttgagggcagcgaggagagcttcaccttccaggtgtccaccaaggatgtgcccctggccctgatggcctgtgccctgaggaagaaggccaccgtcttccggcagcccctggtggagcagcctgaggactacaccctgcaggtgaatggaagacatgagtacctgtatggcagctaccccctgtgccagttccagtacatctgcagctgcctgcacagcggcctgaccccccacctgaccatggtgcacagcagcagcatcctggccatgagagatgagcagagcaacccagccccccaggtgcagaagccccgggccaagcccccacccatcccagccaagaagcccagctctgtgtccctgtggagcctggagcagcccttcagaattgagctgatccagggcagcaaggtgaatgctgatgagaggatgaagctggtggtgcaggccggcctcttccatggaaatgagatgctgtgcaagacagtgagcagcagcgaggtgtctgtgtgcagcgagcctgtgtggaagcagaggctggagtttgacatcaacatctgtgacctgcccaggatggcccggctgtgctttgccctgtatgctgtgattgagaaggccaagaaggcccggagcaccaagaagaagagcaagaaggctgactgccccatcgcctgggccaacctgatgctgtttgactacaaggaccagctgaagacaggagagcgctgcctgtacatgtggcccagcgtgcctgatgagaagggggagctgctgaaccccaccggcaccgtgcgcagcaaccccaacacagattctgctgctgccctgctgatctgcctgcctgaggtggccccccaccctgtgtactacccagccctggagaagatcctggagctgggccgccacagtgaatgtgtgcacgtgacagaggaggagcagctgcagctgcgggagatcctggagcggcggggcagcggggagctgtatgagcacgagaaggacctggtgtggaagctgcggcatgaggtgcaggagcacttccctgaggccctggcccggctgctgctggtgaccaagtggaacaagcatgaagatgtggcccagatgctgtacctgctgtgctcctggccagagctgcctgtgctgagcgccctggagctgctggacttctccttcccagactgccacgtgggcagctttgccatcaagagcctgaggaagctgacagatgatgagctgttccagtacctgctgcagctggtgcaggtgctgaagtatgagagctacctggactgtgagctgaccaagttcctgctggaccgggccctggccaacaggaagattggccacttcctgttctggcacctgcggtctgagatgcacgtgcccagcgtggccctgcgcttcggcctcatcctggaggcctactgccggggcagcacccaccacatgaaggtgctgatgaagcagggcgaggccctgagcaagctgaaggccctgaatgactttgtgaagctgagcagccagaagacccccaagccccagaccaaggagctgatgcacctgtgcatgaggcaggaggcctacctggaggccctgagccacctgcagagccccctggaccccagcaccctgctggccgaggtgtgtgtggagcagtgcaccttcatggacagcaagatgaagcccctgtggatcatgtacagcaatgaggaggccggcagcggcggctctgtgggcatcatcttcaagaatggagatgacctgcggcaggacatgctgaccctgcagatgatccagctgatggatgtgctgtggaagcaggagggcctggacctgaggatgaccccctacggctgcctgcccaccggggacagaacaggcctgattgaggtggtgctgcggagtgacaccatcgccaacatccagctgaacaagagcaacatggccgccacagctgccttcaacaaggatgccctgctgaactggctgaagagcaagaaccctggagaggccctggaccgggccatcgaggagttcaccctgagctgtgccggctactgtgtggccacctacgtgctgggcattggagacagacacagcgacaacatcatgatccgggagagcggccagctgttccacatcgactttggccacttcctgggcaacttcaagaccaagtttggcatcaaccgggagcgggtgcccttcatcctgacctatgactttgtgcacgtgatccagcagggcaagaccaacaacagcgagaagtttgagcgcttccggggctactgtgagcgggcctacaccatcctgcggcggcacggcctgctcttcctgcacctgtttgccctgatgagagctgctggcctgcctgagctgagctgcagcaaggacatccagtacctgaaggacagcctggccctgggcaagacagaggaggaggccctgaagcacttccgggtgaagttcaatgaggccctgcgggagagctggaagaccaaggtgaactggctggcccacaacgtgtccaaggacaaccggcagtag

SEQ ID NO: 21085 - DNA, 3207 bp, synthetic construct; identical to SEQ ID NO: 21083
  misc_feature 1..3207: note = Description of Artificial Sequence: Synthetic coding sequence
  source 1..3207: mol_type = other DNA

SEQ ID NO: 21086 - DNA, 960 bp, synthetic construct
  misc_feature 1..960: note = Description of Artificial Sequence: Synthetic coding sequence
  source 1..960: mol_type = other DNA
atgatccctgagagcagcgagctggtggtgcaggccggcctcttccacggcaatgagatgctgtgcaagacagtgagcagcagcgaggtgtctgtgtgcagcgagcctgtgtggaagcagaggctggagtttgacatcaacatctgtgacctgcccaggatggcccggctgtgctttgccctgtatgctgtgattgagaaggccaagaaggcccggagcaccaagaagaagagcaagaaggctgactgccccatcgcctgggccaacctgatgctgtttgactacaaggaccagctgaagacaggagagcgctgcctgtacatgtggcccagcgtgcctgatgagaagggggagctgctgaaccccactggaacagtgcgcagcaaccccaacacagacagcgctgctgccctgctgatctgcctgcctgaggtggccccccaccctgtgtactacccagccctggagaagatcctggagctgggccgccacagtgaatgtgtgcacgtgacagaggaggagcagctgcagctgcgggagatcctggagcggcggggcagcggggagctgtatgaacatgagaaggacctggtgtggaagctgcggcatgaggtgcaggagcacttccctgaggccctggcccggctgctgctggtgaccaagtggaacaagcatgaagatgtggcccagatgctgtacctgctgtgctcctggccagagctgcctgtgctgagcgccctggagctgctggacttctccttcccagactgccacgtgggcagctttgccatcaagagcctgaggaagctgacagatgatgagctgttccagtacctgctgcagctggtgcaggtgctgaagtatgagagctacctggactgtgagctgaccaagttcctgctggaccgggccctggccaacaggaagattggccacttcctgttctggcacctgaggtag

SEQ ID NO: 21087 - DNA, 3309 bp, synthetic construct
  misc_feature 1..3309: note = Description of Artificial Sequence: Synthetic coding sequence
  source 1..3309: mol_type = other DNA
atggagctggagaactacaagcagcctgtggtgctgcgggaggacaactgcagaagaagaagaaggatgaagcccaggtctgctgctgccagcctgagctccatggagctgatccccatcgagtttgtgctgcccaccagccagaggaagtgcaagagccctgagacagccctgctgcacgtggccggccacggcaatgtggagcagatgaaggcccaggtgtggctgcgggccctggagacctctgtggccgctgacttctaccaccggctgggcccccaccacttcctgctgctgtaccagaagaagggccagtggtatgagatctatgacaagtaccaggtggtgcagaccctggactgcctgcgctactggaaggccacccacaggagccctggccagatccacctggtgcagaggcacccccccagcgaggagagccaggccttccagaggcagctgacagccctgattggctatgatgtgacagatgtgtccaatgtgcatgatgatgagctggagttcacccggcggggcctggtgacccccaggatggccgaggtggccagccgggaccccaagctgtatgccatgcacccctgggtgaccagcaagcccctgcctgagtacctgtggaagaagatcgccaacaactgcatcttcatcgtcatccacaggagcaccaccagccagaccatcaaggtgtccccagatgacacccctggggccatcctgcagagcttcttcaccaagatggccaagaagaagagcctgatggacatccctgagagccagagcgagcaggactttgtgctgcgggtgtgtggcagagatgagtacctggtgggggagacccccatcaagaacttccagtgggtgcgccactgcctgaagaatggagaggagatccacgtggtgctggacaccccaccagaccctgccctggatgaggtgaggaaggaggagtggcccctggtggatgactgcaccggggtgacaggctaccacgagcagctgaccatccacggcaaggaccacgagagcgtcttcaccgtgtccctgtgggactgtgacaggaagttccgggtgaagatccggggcatcgacatccctgtgctgcccaggaacacagacctgactgtgtttgtggaggccaacatccagcacggccagcaggtgctgtgccagaggaggaccagccccaagcccttcacagaggaggtgctgtggaatgtgtggctggagttcagcatcaagatcaaggacctgcccaagggggccctgctgaacctgcagatctactgcggcaaggccccagccctgagcagcaaggccagcgctgagagccccagcagcgagagcaagggcaaggtgcagctgctgtactacgtgaacctgctgctgattgaccaccgcttcctgctgcggcggggggagtatgtgctgcacatgtggcagatcagcggcaagggggaggaccagggcagcttcaatgctgacaagctgaccagcgccaccaacccagacaaggaaaattccatgagcatcagcatcctgctggacaactactgccaccccatcgccctgcccaagcaccagcccaccccagaccctgagggggacagagtgcgggcagagatgcccaaccagctgaggaagcagctggaggccatcatcgccacagaccccctgaaccccctgacagctgaggacaaggagctgctgtggcacttccgctatgagagcctgaagcaccccaaggcctaccccaagctgttcagctctgtgaagtggggccagcaggagatcgtggccaagacctaccagctgctggcccggcgggaggtgtgggaccagagcgccctggatgtgggcctgaccatgcagctgctggactgcaacttcagtgatgaaaatgtgcgggccatcgctgtgcagaagctggagagcctggaggatgatgatgtgctgcactacctgctgcagctggtgcaggccgtgaagtttgagccctaccatgattctgccctggcccgcttcctgctgaagaggggcctgaggaacaagagaattggccacttcctgttctggttcctgcggagtgaaattgcccagagccgccactaccagcagagatttgctgtgatcctggaggcctacctgcggggctgcggcacagccatgctgcatgacttcacccagcaggtgcaggtgattgagatgctgcagaaggtgaccctggacatcaagagcctgtctgctgagaagtatgatgtgagcagccaggtgatcagccagctgaagcagaagctggagaacctgcagaacagccagctgcctgagagcttccgggtgccctatgaccccggcctgaaggccggggccctggccatcgagaagtgcaaggtgatggccagcaagaagaagcccctgtggctggagttcaagtgtgccgaccccacagccctgagcaatgagaccatcggcatcatcttcaagcatggagatgacctgcggcaggacatgctgatcctgcagatcctgcgcatcatggagagcatctgggagacagagagcctggacctgtgcctgctgccctacggctgcatcagcactggagacaagattggcatgattgaaattgtgaaggatgccaccaccatcgccaagatccagcagagcacagtgggcaacacaggagccttcaaggatgaggtgctgaaccactggctgaaggagaagagccccacagaggagaagttccaggccgctgtggagagatttgtgtacagctgtgccggctactgtgtggccacctttgtgctgggcatcggggacagacacaatgacaacatcatgatcacagaaacaggcaacctcttccacatcgactttggccacatcctgggcaactacaagagcttcctgggcatcaacaaggagcgggtgccctttgtgctgaccccagacttcctgtttgtgatgggcaccagcggcaagaagaccagcccccacttccagaagttccaggacatctgtgtgaaggcctacctggccctgcggcaccacaccaacctgctgatcatcctcttctccatgatgctgatgacaggcatgccccagctgaccagcaaggaggacatcgagtacatcagagatgccctgactgtgggcaagaatgaggaggatgccaagaagtacttcctggaccagatcgaggtgtgccgggacaagggctggacagtgcagttcaactggttcctgcacctggtgctgggcatcaagcagggcgagaagcacagcgcctag

SEQ ID NO: 21088 - DNA, 3309 bp, synthetic construct; identical to SEQ ID NO: 21087
  misc_feature 1..3309: note = Description of Artificial Sequence: Synthetic coding sequence
  source 1..3309: mol_type = other DNA

SEQ ID NO: 21089 - DNA, 3309 bp, synthetic construct; identical to SEQ ID NO: 21087
  misc_feature 1..3309: note = Description of Artificial Sequence: Synthetic coding sequence
  source 1..3309: mol_type = other DNA

SEQ ID NO: 21090 - DNA, 5061 bp, synthetic construct
  misc_feature 1..5061: note = Description of Artificial Sequence: Synthetic coding sequence
  source 1..5061: mol_type = other DNA
atggcccagatcagcagcaacagcggcttcaaggagtgccccagcagccaccctgagcccacccgggccaaggatgtggacaaggaggaggccctgcagatggaggccgaggccctggccaagctgcagaaggaccggcaggtgacagacaaccagaggggctttgagctgagcagcagcaccaggaagaaggcccaggtgtacaacaagcaggactatgacctgatggtgtttcctgagagtgacagccagaagagggccctggacattgatgtggagaagctgacccaggccgagctggagaagctgctgctggatgacagctttgagaccaagaagacccctgtgctgcctgtgacccccatcctgagccccagcttcagcgcccagctgtacttccggcccaccatccagaggggccagtggcccccaggcctgcccggccccagcacctacgccctgcccagcatctaccccagcacctacagcaagcaggccgccttccagaatggcttcaaccccaggatgcccaccttccccagcacagagcccatctacctgagcctgcccggccagagcccctacttctcctaccccctgaccccagccacccccttccacccccagggcagcctgcccatctacagacctgtggtgtccacagacatggccaagctgtttgacaagatcgccagcaccagcgagttcctgaagaatggcaaggccaggacagacctggagatcacagacagcaaggtgagcaacctgcaggtgagccccaagtctgaggacatcagcaagtttgactggctggacctggaccccctgagcaagcccaaggtggacaacgtggaggtgctggaccacgaggaggagaagaatgtgagcagcctgctggccaaggacccctgggatgctgtgctgctggaggagaggagcacagccaactgccacctggagaggaaggtgaatggcaagagcctgtctgtggccaccgtgaccaggagccagagcctgaacatccgcaccacccagctggccaaggcccagggccacatcagccagaaggaccccaacggcaccagcagcctgcccaccggcagcagcctgctgcaggaggtggaggtgcagaatgaggagatggccgccttctgccgcagcatcaccaagctgaagaccaagttcccctacaccaaccacaggaccaaccctggctacctgctgagccctgtgacagcccagaggaacatctgtggggagaatgcctctgtgaaggtgtccattgacatcgagggcttccagctgcctgtgaccttcacctgtgatgtgagcagcacagtggagatcatcatcatgcaggccctgtgctgggtgcatgatgacctgaaccaggtggatgtgggcagctatgtgctgaaggtgtgtggccaggaggaggtgctgcagaacaaccactgcctgggcagccatgagcacatccagaactgcaggaagtgggacacagagatccggctgcagctgctgaccttcagcgccatgtgccagaacctggccaggacagcagaagatgatgagacccctgtggacctgaacaagcacctgtaccagatcgagaagccctgcaaggaggccatgaccaggcaccctgtggaggagctgctggacagctaccacaaccaggtggagctggccctgcagatcgagaaccagcacagagctgtggaccaggtgatcaaggctgtgaggaagatctgcagcgccctggatggagtggagaccctggccatcacagaatctgtgaagaagctgaagagagctgtgaacctgcccaggagcaagacagcagatgtgaccagcctgtttggaggagaggacaccagccgcagcagcacccggggcagcctgaaccctgagaaccctgtgcaggtgtccatcaaccagctgacagctgccatctatgacctgctgcggctgcacgccaacagcggccgcagccccacagactgtgcccagagcagcaagtctgtgaaggaggcctggaccaccacagagcagctgcagttcaccatctttgctgcccacggcatcagcagcaactgggtgagcaactatgagaagtactacctgatctgcagcctgagccacaacgggaaggacctcttcaagcccatccagagcaagaaggtgggcacctacaagaacttcttctacctgatcaagtgggatgagctgatcatcttccccatccagatcagccagctgcccctggagagcgtgctgcacctgaccctgtttggcatcctgaaccagagcagcggcagcagcccagacagcaacaagcagaggaaaggacctgaggccctgggcaaggtgtccctgcccctgtttgacttcaagcgcttcctgacctgtggcaccaagctgctgtacctgtggaccagcagccacaccaacagcgtgcccggcaccgtgaccaagaagggctacgtgatggagcgcatcgtgctgcaggtggacttccccagccctgcctttgacatcatctacaccaccccccaggtggacaggagcatcatccagcagcacaacctggagaccctggagaatgacatcaagggcaagctgctggacatcctgcacaaggacagcagcctgggcctgagcaaggaggacaaggccttcctgtgggagaagcgctactactgcttcaagcaccccaactgcctgcccaagatcctggccagcgcccccaactggaagtgggtgaacctggccaagacctacagcctgctgcaccagtggccagccctgtaccccctgattgccctggagctgctggacagcaagtttgctgaccaggaggtgcgcagcctggccgtgacctggattgaggccatcagtgatgatgagctgacagacctgctgccccagtttgtgcaggccctgaagtatgagatctacctgaacagcagcctggtgcagttcctgctgagccgggccctgggcaacatccagatcgcccacaacctgtactggctgctgaaggatgccctgcatgatgtgcagttcagcaccaggtatgaacatgtgctgggcgccctgctgtctgtgggcggcaagaggctgcgggaggagctgctgaagcagaccaagctggtgcagctgctgggcggcgtggccgagaaggtgcggcaggccagcggcagcgcccggcaggtggtgctgcagaggtccatggagcgggtgcagagcttcttccagaagaacaagtgccgcctgcccctgaagcccagcctggtggccaaggagctgaacatcaagagctgcagcttcttcagcagcaatgctgtgcccctgaaggtgaccatggtgaatgctgaccccatgggagaggagatcaacgtgatgttcaaggtgggggaggacctgcggcaggacatgctggccctgcagatgatcaagatcatggacaagatctggctgaaggagggcctggacctgaggatggtgatcttcaagtgcctgagcacaggccgggaccggggcatggtggagctggtgcctgccagtgacaccctgaggaagatccaggtggagtatggagtgacaggcagcttcaaggacaagcccctggccgagtggctgaggaagtacaaccccagcgaggaggagtatgagaaggccagcgagaacttcatctacagctgtgccggctgctgcgtggccacctacgtgctgggcatctgtgacagacacaatgacaacatcatgctgcggagcacaggccacatgttccacatcgactttgggaagttcctgggccacgcccagatgtttggcagcttcaagagggaccgggccccctttgtgctgaccagtgacatggcctacgtgatcaatggaggagagaagcccaccatccgcttccagctgtttgtggacctgtgctgccaggcctacaacctgatcaggaagcagaccaacctcttcctgaacctgctgagcctgatgatccccagcggcctgcctgagctgaccagcatccaggacctgaagtatgtgagagatgccctgcagccccagaccacagatgctgaggccaccatcttcttcacccggctgattgagagcagcctgggcagcatcgccaccaagttcaacttcttcatccacaacctggcccagctgcgcttcagcggcctgcccagcaatgatgagcccatcctgtccttcagccccaagacctacagcttccggcaggacggccgcatcaaggaggtgtctgtgttcacctaccacaagaagtacaacccagacaagcactacatctacgtggtgcgcatcctgcgggagggccagatcgagcccagctttgtgttccgcacctttgatgagttccaggagctgcacaacaagctgagcatcatcttccccctgtggaagctgcccggcttccccaacaggatggtgctgggccgcacccacatcaaggatgtggccgccaagaggaagattgagctgaacagctacctgcagagcctgatgaatgccagcacagatgtggctgaatgtgacctggtgtgcaccttcttccaccccctgctgagagatgagaaggccgagggcatcgcccggtctgcagatgctggcagcttcagccccaccccaggccagattggaggagctgtgaagctgagcatctcctacagaaatggcaccctcttcatcatggtgatgcacatcaaggacctggtgacagaagatggagctgaccccaacccctacgtgaagacctacctgctgcctgacaaccacaagaccagcaagaggaagaccaagatcagcaggaagaccaggaaccccaccttcaatgagatgctggtgtacagcggctacagcaaggagaccctgcggcagcgggagctgcagctgtctgtgctgtctgctgagagcctgcgggagaacttcttcctgggcggcgtgaccctgcccctgaaggacttcaacctgagcaaggagaccgtgaagtggtaccagctgacagctgccacctacctgtag

SEQ ID NO: 21091 - DNA, 393 bp, synthetic construct
  misc_feature 1..393: note = Description of Artificial Sequence: Synthetic coding sequence
  source 1..393: mol_type = other DNA
atggcccagatcagcagcaacagcggcttcaaggagtgccccagcagccaccctgagcccacccgggccaaggatgtggacaaggaggaggccctgcagatggaggccgaggccctggccaagctgcagaaggaccggcaggtgacagacaaccagaggggctttgagctgagcagcagcaccaggaagaaggcccaggtgtacaacaagcaggactatgacctgatggtgtttcctgagagtgacagccagaagagggccctggacattgatgtggagaagctgacccaggccgagctggagaagctgctgctggatgacagctttgagaccaagaagacccctgtgctgcctgtgacccccatcctgagccccagcttcagcgcccagtag

SEQ ID NO: 21092 - DNA, 1452 bp, synthetic construct
  misc_feature 1..1452: note = Description of Artificial Sequence: Synthetic coding sequence
  source 1..1452: mol_type = other DNA
atggcccagatcagcagcaacagcggcttcaaggagtgccccagcagccaccctgagcccacccgggccaaggatgtggacaaggaggaggccctgcagatggaggccgaggccctggccaagctgcagaaggaccggcaggtgacagacaaccagaggggctttgagctgagcagcagcaccaggaagaaggcccaggtgtacaacaagcaggactatgacctgatggtgtttcctgagagtgacagccagaagagggccctggacattgatgtggagaagctgacccaggccgagctggagaagctgctgctggatgacagctttgagaccaagaagacccctgtgctgcctgtgacccccatcctgagccccagcttcagcgcccagctgtacttccggcccaccatccagaggggccagtggcccccaggcctgcccggccccagcacctacgccctgcccagcatctaccccagcacctacagcaagcaggccgccttccagaatggcttcaaccccaggatgcccaccttccccagcacagagcccatctacctgagcctgcccggccagagcccctacttctcctaccccctgaccccagccacccccttccacccccagggcagcctgcccatctacagacctgtggtgtccacagacatggccaagctgtttgacaagatcgccagcaccagcgagttcctgaagaatggcaaggccaggacagacctggagatcacagacagcaaggtgagcaacctgcaggtgagccccaagtctgaggacatcagcaagtttgactggctggacctggaccccctgagcaagcccaaggtggacaacgtggaggtgctggaccacgaggaggagaagaatgtgagcagcctgctggccaaggacccctgggatgctgtgctgctggaggagaggagcacagccaactgccacctggagaggaaggtgaatggcaagagcctgtctgtggccaccgtgaccaggagccagagcctgaacatccgcaccacccagctggccaaggcccagggccacatcagccagaaggaccccaacggcaccagcagcctgcccaccggcagcagcctgctgcaggaggtggaggtgcagaatgaggagatggccgccttctgccgcagcatcaccaagctgaagaccaagttcccctacaccaaccacaggaccaaccctggctacctgctgagccctgtgacagcccagaggaacatctgtggggagaatgcctctgtgaaggtgtccattgacatcgagggcttccagctgcctgtgaccttcacctgtgatgtgagcagcacagtggagatcatcatcatgcaggccctgtgctgggtgcatgatgacctgaaccaggtggatgtgggcagctatgtgctgaaggtgtgtggccaggaggaggtgctgcagaagtag

SEQ ID NO: 21093 - DNA, 3921 bp, synthetic construct
  misc_feature 1..3921: note = Description of Artificial Sequence: Synthetic coding sequence
  source 1..3921: mol_type = other DNA
atggccgccttctgccgcagcatcaccaagctgaagaccaagttcccctacaccaaccacaggaccaaccctggctacctgctgagccctgtgacagcccagaggaacatctgtggggagaatgcctctgtgaaggtgtccattgacatcgagggcttccagctgcctgtgaccttcacctgtgatgtgagcagcacagtggagatcatcatcatgcaggccctgtgctgggtgcatgatgacctgaaccaggtggatgtgggcagctatgtgctgaaggtgtgtggccaggaggaggtgctgcagaacaaccactgcctgggcagccatgagcacatccagaactgcaggaagtgggacacagagatccggctgcagctgctgaccttcagcgccatgtgccagaacctggccaggacagcagaagatgatgagacccctgtggacctgaacaagcacctgtaccagatcgagaagccctgcaaggaggccatgaccaggcaccctgtggaggagctgctggacagctaccacaaccaggtggagctggccctgcagatcgagaaccagcacagagctgtggaccaggtgatcaaggctgtgaggaagatctgcagcgccctggatggagtggagaccctggccatcacagaatctgtgaagaagctgaagagagctgtgaacctgcccaggagcaagacagcagatgtgaccagcctgtttggaggagaggacaccagccgcagcagcacccggggcagcctgaaccctgagaaccctgtgcaggtgtccatcaaccagctgacagctgccatctatgacctgctgcggctgcacgccaacagcggccgcagccccacagactgtgcccagagcagcaagtctgtgaaggaggcctggaccaccacagagcagctgcagttcaccatctttgctgcccacggcatcagcagcaactgggtgagcaactatgagaagtactacctgatctgcagcctgagccacaacgggaaggacctcttcaagcccatccagagcaagaaggtgggcacctacaagaacttcttctacctgatcaagtgggatgagctgatcatcttccccatccagatcagccagctgcccctggagagcgtgctgcacctgaccctgtttggcatcctgaaccagagcagcggcagcagcccagacagcaacaagcagaggaaaggacctgaggccctgggcaaggtgtccctgcccctgtttgacttcaagcgcttcctgacctgtggcaccaagctgctgtacctgtggaccagcagccacaccaacagcgtgcccggcaccgtgaccaagaagggctacgtgatggagcgcatcgtgctgcaggtggacttccccagccctgcctttgacatcatctacaccaccccccaggtggacaggagcatcatccagcagcacaacctggagaccctggagaatgacatcaagggcaagctgctggacatcctgcacaaggacagcagcctgggcctgagcaaggaggacaaggccttcctgtgggagaagcgctactactgcttcaagcaccccaactgcctgcccaagatcctggccagcgcccccaactggaagtgggtgaacctggccaagacctacagcctgctgcaccagtggccagccctgtaccccctgattgccctggagctgctggacagcaagtttgctgaccaggaggtgcgcagcctggccgtgacctggattgaggccatcagtgatgatgagctgacagacctgctgccccagtttgtgcaggccctgaagtatgagatctacctgaacagcagcctggtgcagttcctgctgagccgggccctgggcaacatccagatcgcccacaacctgtactggctgctgaaggatgccctgcatgatgtgcagttcagcaccaggtatgaacatgtgctgggcgccctgctgtctgtgggcggcaagaggctgcgggaggagctgctgaagcagaccaagctggtgcagctgctgggcggcgtggccgagaaggtgcggcaggccagcggcagcgcccggcaggtggtgctgcagaggtccatggagcgggtgcagagcttcttccagaagaacaagtgccgcctgcccctgaagcccagcctggtggccaaggagctgaacatcaagagctgcagcttcttcagcagcaatgctgtgcccctgaaggtgaccatggtgaatgctgaccccatgggagaggagatcaacgtgatgttcaaggtgggggaggacctgcggcaggacatgctggccctgcagatgatcaagatcatggacaagatctggctgaaggagggcctggacctgaggatggtgatcttcaagtgcctgagcacaggccgggaccggggcatggtggagctggtgcctgccagtgacaccctgaggaagatccaggtggagtatggagtgacaggcagcttcaaggacaagcccctggccgagtggctgaggaagtacaaccccagcgaggaggagtatgagaaggccagcgagaacttcatctacagctgtgccggctgctgcgtggccacctacgtgctgggcatctgtgacagacacaatgacaacatcatgctgcggagcacaggccacatgttccacatcgactttgggaagttcctgggccacgcccagatgtttggcagcttcaagagggaccgggccccctttgtgctgaccagtgacatggcctacgtgatcaatggaggagagaagcccaccatccgcttccagctgtttgtggacctgtgctgccaggcctacaacctgatcaggaagcagaccaacctcttcctgaacctgctgagcctgatgatccccagcggcctgcctgagctgaccagcatccaggacctgaagtatgtgagagatgccctgcagccccagaccacagatgctgaggccaccatcttcttcacccggctgattgagagcagcctgggcagcatcgccaccaagttcaacttcttcatccacaacctggcccagctgcgcttcagcggcctgcccagcaatgatgagcccatcctgtccttcagccccaagacctacagcttccggcaggacggccgcatcaaggaggtgtctgtgttcacctaccacaagaagtacaacccagacaagcactacatctacgtggtgcgcatcctgcgggagggccagatcgagcccagctttgtgttccgcacctttgatgagttccaggagctgcacaacaagctgagcatcatcttccccctgtggaagctgcccggcttccccaacaggatggtgctgggccgcacccacatcaaggatgtggccgccaagaggaagattgagctgaacagctacctgcagagcctgatgaatgccagcacagatgtggctgaatgtgacctggtgtgcaccttcttccaccccctgctgagagatgagaaggccgagggcatcgcccggtctgcagatgctggcagcttcagccccaccccaggccagattggaggagctgtgaagctgagcatctcctacagaaatggcaccctcttcatcatggtgatgcacatcaaggacctggtgacagaagatggagctgaccccaacccctacgtgaagacctacctgctgcctgacaaccacaagaccagcaagaggaagaccaagatcagcaggaagaccaggaaccccaccttcaatgagatgctggtgtacagcggctacagcaaggagaccctgcggcagcgggagctgcagctgtctgtgctgtctgctgagagcctgcgggagaacttcttcctgggcggcgtgaccctgcccctgaaggacttcaacctgagcaaggagaccgtgaagtggtaccagctgacagctgccacctacctgtag

SEQ ID NO: 21094 - DNA, 1947 bp, synthetic construct
  misc_feature 1..1947: note = Description of Artificial Sequence: Synthetic coding sequence
  source 1..1947: mol_type = other DNA
atggcccagatcagcagcaacagcggcttcaaggagtgccccagcagccaccctgagcccacccgggccaaggatgtggacaaggaggaggccctgcagatggaggccgaggccctggccaagctgcagaaggaccggcaggtgacagacaaccagaggggctttgagctgagcagcagcaccaggaagaaggcccaggtgtacaacaagcaggactatgacctgatggtgtttcctgagagtgacagccagaagagggccctggacattgatgtggagaagctgacccaggccgagctggagaagctgctgctggatgacagctttgagaccaagaagacccctgtgctgcctgtgacccccatcctgagccccagcttcagcgcccagctgtacttccggcccaccatccagaggggccagtggcccccaggcctgcccggccccagcacctacgccctgcccagcatctaccccagcacctacagcaagcaggccgccttccagaatggcttcaaccccaggatgcccaccttccccagcacagagcccatctacctgagcctgcccggccagagcccctacttctcctaccccctgaccccagccacccccttccacccccagggcagcctgcccatctacagacctgtggtgtccacagacatggccaagctgtttgacaagatcgccagcaccagcgagttcctgaagaatggcaaggccaggacagacctggagatcacagacagcaaggtgagcaacctgcaggtgagccccaagtctgaggacatcagcaagtttgactggctggacctggaccccctgagcaagcccaaggtggacaacgtggaggtgctggaccacgaggaggagaagaatgtgagcagcctgctggccaaggacccctgggatgctgtgctgctggaggagaggagcacagccaactgccacctggagaggaaggtgaatggcaagagcctgtctgtggccaccgtgaccaggagccagagcctgaacatccgcaccacccagctggccaaggcccagggccacatcagccagaaggaccccaacggcaccagcagcctgcccaccggcagcagcctgctgcaggaggtggaggtgcagaatgaggagatggccgccttctgccgcagcatcaccaagctgaagaccaagttcccctacaccaaccacaggaccaaccctggctacctgctgagccctgtgacagcccagaggaacatctgtggggagaatgcctctgtgaaggtgtccattgacatcgagggcttccagctgcctgtgaccttcacctgtgatgtgagcagcacagtggagatcatcatcatgcaggccctgtgctgggtgcatgatgacctgaaccaggtggatgtgggcagctatgtgctgaaggtgtgtggccaggaggaggtgctgcagaacaaccactgcctgggcagccatgagcacatccagaactgcaggaagtgggacacagagatccggctgcagctgctgaccttcagcgccatgtgccagaacctggccaggacagcagaagatgatgagacccctgtggacctgaacaagcacctgtaccagatcgagaagccctgcaaggaggccatgaccaggcaccctgtggaggagctgctggacagctaccacaaccaggtggagctggccctgcagatcgagaaccagcacagagctgtggaccaggtgatcaaggctgtgaggaagatctgcagcgccctggatggagtggagaccctggccatcacagaatctgtgaagaagctgaagagagctgtgaacctgcccaggagcaagacagcagatgtgaccagcctgtttggaggagaggacaccagccgcagcagcacccggggcagcctgaaccctgagaaccctgtgcaggtgtccatcaaccagctgtag

SEQ ID NO: 21095 - DNA, 2664 bp, synthetic construct
  misc_feature 1..2664: note = Description of Artificial Sequence: Synthetic coding sequence
  source 1..2664: mol_type = other DNA
atgggagaggccgagaagttccactacatctacagctgtgacctggacatcaacgtgcagctgaagattggcagcctggagggcaagcgggagcagaagagctacaaggctgtgctggaggaccccatgctgaagttcagcggcctgtaccaggagacctgcagcgacctgtatgtgacctgccaggtgtttgctgagggcaagcccctggccctgcctgtgaggaccagctacaaggccttcagcacccgctggaactggaatgagtggctgaagctgcctgtgaagtacccagacctgcccagaaatgcccaggtggccctgaccatctgggatgtgtatggccctgggaaggctgtgcctgtgggcggcaccaccgtgtccctgtttgggaagtatggcatgttccggcagggcatgcatgacctgaaggtgtggcccaacgtggaggctgatggcagcgagcccaccaagaccccaggccgcaccagcagcaccctgtctgaggaccagatgagccggctggccaagctgaccaaggcccaccggcagggccacatggtgaaggtggactggctggaccggctgaccttccgggagattgagatgatcaatgaaagtgagaagaggagcagcaacttcatgtacctgatggtggagttccgctgtgtgaagtgtgatgacaaggagtatggaattgtgtactatgagaaggatggagatgagagcagccccatcctgaccagctttgagctggtgaaggtgcctgacccccagatgtccatggagaacctggtggagagcaagcaccacaagctggcccggagcctgcggagcggccccagcgaccatgacctgaagcccaatgctgccacccgggaccagctgaacatcatcgtgtcctacccacccaccaagcagctgacctatgaggagcaggacctggtgtggaagttccgctactacctgaccaaccaggagaaggccctgaccaagttcctgaagtgtgtgaactgggacctgccccaggaggccaagcaggccctggagctgctgggcaagtggaagcccatggatgtggaggacagcctggagctgctgagcagccactacaccaaccccaccgtgagaagatatgctgtggcccggctgcggcaggctgatgatgaggacctgctgatgtacctgctgcagctggtgcaggccctgaagtatgagaactttgatgacatcaagaatggcctggagcccaccaagaaggacagccagagctctgtgtctgaaaatgtgagcaacagcggcatcaacagcgctgagattgacagcagccagatcatcaccagccccctgcccagcgtgagcagccccccaccagccagcaagaccaaggaggtgcctgatggagagaacctggagcaggacctgtgcaccttcctgatcagccgggcctgcaagaacagcaccctggccaactacctgtactggtacgtgattgtggagtgtgaggaccaggacacccagcagagggaccccaagacccatgagatgtacctgaatgtgatgaggcgcttcagccaggccctgctgaagggggacaagtctgtgcgggtgatgaggagcctgctggccgcccagcagacctttgtggaccggctggtgcacctgatgaaggctgtgcagcgggagagcggcaacaggaagaagaagaatgaaaggctgcaggccctgctgggggacaatgagaagatgaacctgagtgatgtggagctgatccccctgcccctggagccccaggtgaagatccggggcatcatccctgagacagccaccctcttcaagagcgccctgatgcctgcccagctgttcttcaagacagaagatggcggcaagtaccctgtgatcttcaagcatggagatgacctgcggcaggaccagctgatcctgcagatcatcagcctgatggacaagctgctgaggaaagaaaacctggacctgaagctgaccccctacaaggtgctggccaccagcaccaagcacggcttcatgcagttcatccagagcgtgcctgtggccgaggtgctggacacagagggcagcatccagaacttcttcagaaaatatgcccccagtgaaaatggccccaacggcatctctgctgaggtgatggacacctacgtgaagagctgtgccggctactgtgtgatcacctacatcctgggcgtgggggacagacacctggacaacctgctgctgaccaagacaggcaagctgttccacatcgactttggctacatcctgggccgggaccccaagcccctgcccccacccatgaagctgaacaaggagatggtggagggcatgggcggcacccagagcgagcagtaccaggagttcaggaagcagtgctacacagccttcctgcacctgcggcgctacagcaacctgatcctgaacctcttcagcctgatggtggatgccaacatcccagacatcgccctggagccagacaagacagtgaagaaggtgcaggacaagttccggctggacctgagtgatgaggaggccgtgcactacatgcagagcctgattgatgagagcgtgcacgccctgtttgctgctgtggtggagcagatccacaagtttgcccagtactggaggaagtag

SEQ ID NO: 21096 - DNA, 2475 bp, synthetic construct
  misc_feature 1..2475: note = Description of Artificial Sequence: Synthetic coding sequence
  source 1..2475: mol_type = other DNA
atgggagaggccgagaagttccactacatctacagctgtgacctggacatcaacgtgcagctgaagatctggaatgagtggctgaagctgcctgtgaagtacccagacctgcccagaaatgcccaggtggccctgaccatctgggatgtgtatggccctgggaaggctgtgcctgtgggcggcaccaccgtgtccctgtttgggaagtatggcatgttccggcagggcatgcatgacctgaaggtgtggcccaacgtggaggctgatggcagcgagcccaccaagaccccaggccgcaccagcagcaccctgtctgaggaccagatgagccggctggccaagctgaccaaggcccaccggcagggccacatggtgaaggtggactggctggaccggctgaccttccgggagattgagatgatcaatgaaagtgagaagaggagcagcaacttcatgtacctgatggtggagttccgctgtgtgaagtgtgatgacaaggagtatggcatcgtgtactatgagaaggatggagatgagagcagccccatcctgaccagctttgagctggtgaaggtgcctgacccccagatgtccatggagaacctggtggagagcaagcaccacaagctggcccggagcctgcggagcggccccagcgaccatgacctgaagcccaatgctgccacccgggaccagctgaacatcatcgtgtcctacccacccaccaagcagctgacctatgaggagcaggacctggtgtggaagttccgctactacctgaccaaccaggagaaggccctgaccaagttcctgaagtgtgtgaactgggacctgccccaggaggccaagcaggccctggagctgctgggcaagtggaagcccatggatgtggaggacagcctggagctgctgagcagccactacaccaaccccaccgtgcggcgctatgctgtggcccggctgcggcaggctgatgatgaggacctgctgatgtacctgctgcagctggtgcaggccctgaagtatgaaaattttgatgacatcaagaatggcctggagcccaccaagaaggacagccagagctctgtgtctgaaaatgtgagcaacagcggcatcaacagcgctgagattgacagcagccagatcatcaccagccccctgcccagcgtgagcagccccccaccagccagcaagaccaaggaggtgcctgatggagagaacctggagcaggacctgtgcaccttcctgatcagccgggcctgcaagaacagcaccctggccaactacctgtactggtacgtgattgtggagtgtgaggaccaggacacccagcagagggaccccaagacccatgagatgtacctgaatgtgatgaggcgcttcagccaggccctgctgaagggggacaagtctgtgcgggtgatgaggagcctgctggccgcccagcagacctttgtggaccggctggtgcacctgatgaaggctgtgcagcgggagagcggcaacaggaagaagaagaatgaaaggctgcaggccctgctgggggacaatgagaagatgaacctgagtgatgtggagctgatccccctgcccctggagccccaggtgaagatccggggcatcatccctgagacagccaccctcttcaagagcgccctgatgcctgcccagctgttcttcaagacagaagatggcggcaagtaccctgtgatcttcaagcatggagatgacctgcggcaggaccagctgatcctgcagatcatcagcctgatggacaagctgctgaggaaggagaacctggacctgaagctgaccccctacaaggtgctggccaccagcaccaagcacggcttcatgcagttcatccagagcgtgcctgtggccgaggtgctggacacagagggcagcatccagaacttcttcagaaaatatgcccccagtgaaaatggccccaacggcatctctgctgaggtgatggacacctacgtgaagagctgtgccggctactgcgtcatcacctacatcctgggcgtgggggacagacacctggacaacctgctgctgaccaagacaggcaagctgttccacatcgactttggctacatcctgggccgggaccccaagcccctgcccccacccatgaagctgaacaaggagatggtggagggcatgggcggcacccagagcgagcagtaccaggagttcaggaagcagtgctacacagccttcctgcacctgcggcgctacagcaacctgatcctgaacctcttcagcctgatggtggatgccaacatcccagacatcgccctggagccagacaagacagtgaagaaggtgcaggacaagttccggctggacctgagtgatgaggaggccgtgcactacatgcagagcctgattgatgaatctgtgcacgccctgtttgctgctgtggtggagcagatccacaagtttgcccagtactggaggaagtag

SEQ ID NO: 21097 - DNA, 2175 bp, synthetic construct
  misc_feature 1..2175: note = Description of Artificial Sequence: Synthetic coding sequence
  source 1..2175: mol_type = other DNA
atgtctgctgagggctaccagtaccgggccctgtatgactacaagaaggagcgggaggaggacatcgacctgcacctgggggacatcctgactgtgaacaagggcagcctggtggccctgggcttcagtgatggccaggaggcccggcctgaggagatcggctggctgaatggctacaatgagaccactggagagcggggggacttccctggcacctacgtggagtacatcggcaggaagaagatcagcccccccacccccaagcccaggcctccccggcccctgcctgtggcccctggcagcagcaagacagaagcagatgtggagcagcaggccctgaccctgcctgacctggccgagcagtttgcccccccagacatcgccccacccctgctgatcaagctggtggaggccatcgagaagaagggcctggagtgcagcaccctgtaccgcacccagagcagcagcaacctggccgagctgcggcagctgctggactgtgacaccccatctgtggacctggagatgattgatgtgcacgtgctggctgatgccttcaagcgctacctgctggacctgcccaaccctgtgatcccagctgctgtgtacagcgagatgatcagcctggcccctgaggtgcagagcagcgaggagtacatccagctgctgaagaagctgatccgcagccccagcatcccccaccagtactggctgaccctgcagtacctgctgaagcacttcttcaagctgagccagaccagcagcaagaacctgctgaatgcccgggtgctgtctgagatcttcagccccatgctgttccgcttctctgctgccagcagtgacaacacagagaacctgatcaaggtgattgagatcctgatcagcacagagtggaatgaaaggcagcctgccccagccctgccccccaagccacccaagcccaccaccgtggccaacaacggcatgaacaacaacatgagcctgcaggatgctgagtggtactggggagacatcagccgggaggaggtgaatgagaagctgcgggacacagcagatggcaccttcctggtgagagatgccagcaccaagatgcatggagactacaccctgaccctgaggaagggcggcaacaacaagctgatcaagatcttccacagagatggcaagtatggcttcagtgaccccctgaccttcagctctgtggtggagctgatcaaccactacagaaatgaaagcctggcccagtacaaccccaagctggatgtgaagctgctgtaccctgtgtccaagtaccagcaggaccaggtggtgaaggaggacaacatcgaggccgtgggcaagaagctgcacgagtacaacacccagttccaggagaagagccgggagtatgaccggctgtatgaggagtacaccaggaccagccaggagatccagatgaagaggacagccatcgaggccttcaatgagaccatcaagatctttgaggagcagtgccagacccaggagcgctacagcaaggagtacatcgagaagttcaagcgggagggcaatgagaaggagatccagaggatcatgcacaactatgacaagctgaagagccgcatcagcgagatcatcgacagcagaagaaggctggaggaggacctgaagaagcaggccgctgagtaccgggagattgacaagaggatgaacagcatcaagccagacctgatccagctgaggaagacccgggaccagtacctgatgtggctgacccagaagggcgtgcggcagaagaagctgaatgagtggctgggcaatgaaaatacagaggaccagtacagcctggtggaggatgatgaggacctgccccaccatgatgagaagacctggaatgtgggcagcagcaacagaaacaaggccgagaacctgctgcggggcaagagagatggcaccttcctggtgcgggagagcagcaagcagggctgctacgcctgcagcgtggtggtggatggagaggtgaagcactgcgtcatcaacaagacagccaccggctacggctttgctgagccctacaacctgtacagcagcctgaaggagctggtgctgcactaccagcacaccagcctggtgcagcacaatgacagcctgaatgtgaccctggcctaccctgtgtatgcccagcagaggaggtag

SEQ ID NO: 21098 - DNA, 1275 bp, synthetic construct
  misc_feature 1..1275: note = Description of Artificial Sequence: Synthetic coding sequence
  source 1..1275: mol_type = other DNA
atgcacaacctgcagaccctgccccccaagccacccaagcccaccaccgtggccaacaacggcatgaacaacaacatgagcctgcaggatgctgagtggtactggggagacatcagccgggaggaggtgaatgagaagctgcgggacacagcagatggcaccttcctggtgagagatgccagcaccaagatgcatggagactacaccctgaccctgaggaagggcggcaacaacaagctgatcaagatcttccacagagatggcaagtatggcttcagtgaccccctgaccttcagctctgtggtggagctgatcaaccactacagaaatgaaagcctggcccagtacaaccccaagctggatgtgaagctgctgtaccctgtgtccaagtaccagcaggaccaggtggtgaaggaggacaacatcgaggccgtgggcaagaagctgcacgagtacaacacccagttccaggagaagagccgggagtatgaccggctgtatgaggagtacaccaggaccagccaggagatccagatgaagaggacagccatcgaggccttcaatgagaccatcaagatctttgaggagcagtgccagacccaggagcgctacagcaaggagtacatcgagaagttcaagcgggagggcaatgagaaggagatccagaggatcatgcacaactatgacaagctgaagagccgcatcagcgagatcatcgacagcagaagaaggctggaggaggacctgaagaagcaggccgctgagtaccgggagattgacaagaggatgaacagcatcaagccagacctgatccagctgaggaagacccgggaccagtacctgatgtggctgacccagaagggcgtgcggcagaagaagctgaatgagtggctgggcaatgaaaatacagaggaccagtacagcctggtggaggatgatgaggacctgccccaccatgatgagaagacctggaatgtgggcagcagcaacagaaacaaggccgagaacctgctgcggggcaagagagatggcaccttcctggtgcgggagagcagcaagcagggctgctacgcctgcagcgtggtggtggatggagaggtgaagcactgcgtcatcaacaagacagccaccggctacggctttgctgagccctacaacctgtacagcagcctgaaggagctggtgctgcactaccagcacaccagcctggtgcagcacaatgacagcctgaatgtgaccctggcctaccctgtgtatgcccagcagaggaggtag

SEQ ID NO: 21099 - DNA, 1365 bp, synthetic construct
  misc_feature 1..1365: note = Description of Artificial Sequence: Synthetic coding sequence
  source 1..1365: mol_type = other DNA
atgtacaacacagtgtggaacatggaggacctggacctggagtatgccaagacagacatcaactgtggcacagacctgatgttctacatcgagatggaccccccagccctgccccccaagccacccaagcccaccaccgtggccaacaacggcatgaacaacaacatgagcctgcaggatgctgagtggtactggggagacatcagccgggaggaggtgaatgagaagctgcgggacacagcagatggcaccttcctggtgagagatgccagcaccaagatgcatggagactacaccctgaccctgaggaagggcggcaacaacaagctgatcaagatcttccacagagatggcaagtatggcttcagtgaccccctgaccttcagctctgtggtggagctgatcaaccactacagaaatgaaagcctggcccagtacaaccccaagctggatgtgaagctgctgtaccctgtgtccaagtaccagcaggaccaggtggtgaaggaggacaacatcgaggccgtgggcaagaagctgcacgagtacaacacccagttccaggagaagagccgggagtatgaccggctgtatgaggagtacaccaggaccagccaggagatccagatgaagaggacagccatcgaggccttcaatgagaccatcaagatctttgaggagcagtgccagacccaggagcgctacagcaaggagtacatcgagaagttcaagcgggagggcaatgagaaggagatccagaggatcatgcacaactatgacaagctgaagagccgcatcagcgagatcatcgacagcagaagaaggctggaggaggacctgaagaagcaggccgctgagtaccgggagattgacaagaggatgaacagcatcaagccagacctgatccagctgaggaagacccgggaccagtacctgatgtggctgacccagaagggcgtgcggcagaagaagctgaatgagtggctgggcaatgaaaatacagaggaccagtacagcctggtggaggatgatgaggacctgccccaccatgatgagaagacctggaatgtgggcagcagcaacagaaacaaggccgagaacctgctgcggggcaagagagatggcaccttcctggtgcgggagagcagcaagcagggctgctacgcctgcagcgtggtggtggatggagaggtgaagcactgcgtcatcaacaagacagccaccggctacggctttgctgagccctacaacctgtacagcagcctgaaggagctggtgctgcactaccagcacaccagcctggtgcagcacaatgacagcctgaatgtgaccctggcctaccctgtgtatgcccagcagaggaggtag

SEQ ID NO: 21100 - DNA, 2199 bp, synthetic construct
  misc_feature 1..2199: note = Description of Artificial Sequence: Synthetic coding sequence
  source 1..2199: mol_type = other DNA
atgtctgctgagggctaccagtaccgggccctgtatgactacaagaaggagcgggaggaggacatcgacctgcacctgggggacatcctgactgtgaacaagggcagcctggtggccctgggcttcagtgatggccaggaggcccggcctgaggagatcggctggctgaatggctacaatgagaccactggagagcggggggacttccctggcacctacgtggagtacatcggcaggaagaagatcagcccccccacccccaagcccaggcctccccggcccctgcctgtggcccctggcagcagcaagacagaagcagatgtggagcagcaggccctgaccctgcctgacctggccgagcagtttgcccccccagacatcgccccacccctgctgatcaagctggtggaggccatcgagaagaagggcctggagtgcagcaccctgtaccgcacccagagcagcagcaacctggccgagctgcggcagctgctggactgtgacaccccatctgtggacctggagatgattgatgtgcacgtgctggctgatgccttcaagcgctacctgctggacctgcccaaccctgtgatcccagctgctgtgtacagcgagatgatcagcctggcccctgaggtgcagagcagcgaggagtacatccagctgctgaagaagctgatccgcagccccagcatcccccaccagtactggctgaccctgcagtacctgctgaagcacttcttcaagctgagccagaccagcagcaagaacctgctgaatgcccgggtgctgtctgagatcttcagccccatgctgttccgcttctctgctgccagcagtgacaacacagagaacctgatcaaggtgattgagatcctgatcagcacagagtggaatgaaaggcagcctgccccagccctgccccccaagccacccaagcccaccaccgtggccaacaacggcatgaacaacaacatgagcctgcaggatgctgagtggtactggggagacatcagccgggaggaggtgaatgagaagctgcgggacacagcagatggcaccttcctggtgagagatgccagcaccaagatgcatggagactacaccctgaccctgaggaagggcggcaacaacaagctgatcaagatcttccacagagatggcaagtatggcttcagtgaccccctgaccttcagctctgtggtggagctgatcaaccactacagaaatgaaagcctggcccagtacaaccccaagctggatgtgaagctgctgtaccctgtgtccaagtaccagcaggaccaggtggtgaaggaggacaacatcgaggccgtgggcaagaagctgcacgagtacaacacccagttccaggagaagagccgggagtatgaccggctgtatgaggagtacaccaggaccagccaggagatccagatgaagaggacagccatcgaggccttcaatgagaccatcaagatctttgaggagcagtgccagacccaggagcgctacagcaaggagtacatcgagaagttcaagcgggagggcaatgagaaggagatccagaggatcatgcacaactatgacaagctgaagagccgcatcagcgagatcatcgacagcagaagaaggctggaggaggacctgaagaagcaggccgctgagtaccgggagattgacaagaggatgaacagcatcaagccagacctgatccagctgaggaagacccgggaccagtacctgatgtggctgacccagaagggcgtgcggcagaagaagctgaatgagtggctgggcaatgaaaatacagaggagaacttcctgagctgcctgcccagccagtacagcctggtggaggatgatgaggacctgccccaccatgatgagaagacctggaatgtgggcagcagcaacagaaacaaggccgagaacctgctgcggggcaagagagatggcaccttcctggtgcgggagagcagcaagcagggctgctacgcctgcagcgtggtggtggatggagaggtgaagcactgcgtcatcaacaagacagccaccggctacggctttgctgagccctacaacctgtacagcagcctgaaggagctggtgctgcactaccagcacaccagcctggtgcagcacaatgacagcctgaatgtgaccctggcctaccctgtgtatgcccagcagaggaggtag

SEQ ID NO: 21101 - DNA, 2175 bp, synthetic construct; identical to SEQ ID NO: 21097
  misc_feature 1..2175: note = Description of Artificial Sequence: Synthetic coding sequence
  source 1..2175: mol_type = other DNA

SEQ ID NO: 21102 - DNA, 414 bp, synthetic construct
  misc_feature 1..414: note = Description of Artificial Sequence: Synthetic coding sequence
  source 1..414: mol_type = other DNA
atgcacggggactacaccctgaccctgaggaaaggaggcaacaacaagctgatcaagatcttccacagagatggcaagtatggcttcagtgaccccctgaccttcagctctgtggtggagctgatcaaccactacagaaatgaaagcctggcccagtacaaccccaagctggatgtgaagctgctgtaccctgtgtccaagtaccagcaggaccaggtggtgaaggaggacaacattgaagctgtgggcaagaagctgcacgagtacaacacccagttccaggagaagagccgggagtatgaccggctgtatgaggagtacaccaggaccagccaggagatccagatgaagaggacagccatcgaggccttcaatgagaccatcaagatctttgaggagcagtgccagacctag

SEQ ID NO: 21103 - DNA, 2175 bp, synthetic construct; identical to SEQ ID NO: 21097
  misc_feature 1..2175: note = Description of Artificial Sequence: Synthetic coding sequence
  source 1..2175: mol_type = other DNA

SEQ ID NO: 21104 - DNA, 1224 bp, synthetic construct
  misc_feature 1..1224: note = Description of Artificial Sequence: Synthetic coding sequence
  source 1..1224: mol_type = other DNA
atgctgtttgacaaggtgaaggccttctctgtgcagctggatggagccacagctggggtggagcccgtcttcagcggcggccaggccgtggccggccgggtgctgctggagctgagcagcgctgcccgggtgggcgccctgcggctgcgggcccggggccgggcccacgtgcactggacagagagccgctctgctggcagcagcacagcctacacccagagctacagcgagcgggtggaggtggtgagccaccgggccaccctgctggccccagacacaggagagaccaccaccctgcccccaggaagacatgagttcctgttctccttccagctgccccccaccctggtgaccagctttgagggcaagcacggctctgtgcgctactgcatcaaggccaccctgcaccggccctgggtgcctgcccggcgggccaggaaggtgttcaccgtcatcgagcctgtggacatcaacaccccagccctgctggccccccaggccggggcccgggagaaggtggcccgctcctggtactgcaacagaggcctggtgtccctgagcgccaagattgacaggaagggctacaccccaggagaggtgattcctgtgtttgctgagattgacaatggcagcaccaggcctgtgctgcccagggctgctgtggtgcagacccagaccttcatggcccggggggccaggaagcagaagagagctgtggtggccagcctggccggggagcctgtgggccctggccagagggccctgtggcagggccgggccctgcgcatcccccctgtgggccccagcatcctgcactgccgggtgctgcacgtggactatgccctgaaggtgtgtgtggacatccctggcaccagcaagctgctgctggagctgcccctggtgattggcaccatccccctgcaccccttcggcagccgcagcagctctgtgggcagccacgccagcttcctgctggactggaggctgggcgccctgcctgagaggcctgaggcccctcctgagtacagcgaggtggtggccgacacagaggaggccgccctgggccagagccccttccccctgccccaggaccctgacatgagcctggagggccccttctttgcctacatccaggagttccgctaccggcccccacccctgtacagcgaggaggaccccaaccccctgctgggggacatgaggccccgctgcatgacctgctag

SEQ ID NO: 21105 - DNA, 1386 bp, synthetic construct
  misc_feature 1..1386: note = Description of Artificial Sequence: Synthetic coding sequence
  source 1..1386: mol_type = other DNA
atgtacaacacagtgtggagcatggacagagatgatgctgactggagggaggtgatgatgccctacagcacagagctgatcttctacatcgagatggaccccccagccctgccccccaagccacccaagcccatgaccagcgctgtgcccaacggcatgaaggacagctctgtgtccctgcaggatgctgagtggtactggggagacatcagccgggaggaggtgaatgacaagctgcgggacatgccagatggcaccttcctggtgagagatgccagcaccaagatgcagggcgactacaccctgaccctgaggaagggcggcaacaacaagctgatcaagatctaccacagagatggcaagtatggcttcagtgaccccctgaccttcaacagcgtggtggagctgatcaaccactaccaccacgagagcctggcccagtacaaccccaagctggatgtgaagctgatgtaccctgtgagccgctaccagcaggaccagctggtgaaggaggacaacattgatgctgtgggcaagaagctgcaggagtaccacagccagtaccaggagaagagcaaggagtatgaccggctgtatgaggagtacaccaggaccagccaggagatccagatgaagaggacagccatcgaggccttcaatgagaccatcaagatctttgaggagcagtgccacacccaggagcagcacagcaaggagtacatcgagcgcttcagaagagagggcaatgagaaggagattgagcgcatcatgatgaactatgacaagctgaagagccggctgggggagatccatgacagcaagatgaggctggagcaggacctgaagaaccaggccctggacaaccgggagattgacaagaagatgaacagcatcaagccagacctgatccagctgaggaagatccgggaccagcacctggtgtggctgaaccacaagggcgtgcggcagaagaggctgaatgtgtggctgggcatcaagaatgaagatgctgatgagaactacttcatcaatgaggaggatgagaacctgccccactatgatgagaagacctggtttgtggaggacatcaacagagtgcaggccgaggacctgctgtatggcaagccagatggagccttcctgatccgggagagcagcaagaagggctgctacgcctgcagcgtggtggctgatggagaggtgaagcactgcgtcatctacagcacagcccggggctacggctttgctgagccctacaacctgtacagcagcctgaaggagctggtgctgcactaccagcagaccagcctggtgcagcacaatgacagcctgaatgtgcggctggcctaccctgtgcacgcccagatgcccagcctgtgcaggtag

SEQ ID NO: 21106 - DNA, 1101 bp, synthetic construct
  misc_feature 1..1101: note = Description of Artificial Sequence: Synthetic coding sequence
  source 1..1101: mol_type = other DNA
atgtacaacacagtgtggagcatggacagagatgatgctgactggagggaggtgatgatgccctacagcacagagctgatcttctacatcgagatggaccccccagctgctgaggtgaatgacaagctgcgggacatgccagatggcaccttcctggtgagagatgccagcaccaagatgcagggcgactacaccctgaccctgaggaagggcggcaacaacaagctgatcaagatctaccacagagatggcaagtatggcttcagtgaccccctgaccttcaacagcgtggtggagctgatcaaccactaccaccacgagagcctggcccagtacaaccccaagctggatgtgaagctgatgtaccctgtgagccgctaccagcaggaccagctggtgaaggaggacaacattgatgctgtgggcaagaagctgcaggagtaccacagccagtaccaggagaagagcaaggagtatgaccggctgtatgaggagtacaccaggaccagccaggagatccagatgaagaggacagccatcgaggccttcaatgagaccatcaagatctttgaggagcagtgccacacccaggagcagcacagcaaggagtacatcgagcgcttcagaagagagggcaatgagaaggagattgagcgctggctgaaccacaagggcgtgcggcagaagaggctgaatgtgtggctgggcatcaagaatgaagatgctgatgagaactacttcatcaatgaagaagatgagaacctgccccactatgatgagaagacctggtttgtggaggacatcaacagagtgcaggccgaggacctgctgtatggcaagccagatggagccttcctgatccgggagagcagcaagaagggctgctacgcctgcagcgtggtggctgatggagaggtgaagcactgtgtgatctacagcacagcccggggctacggctttgctgagccctacaacctgtacagcagcctgaaggagctggtgctgcactaccagcagaccagcctggtgcagcacaatgacagcctgaatgtgcggctggcctaccctgtgcacgcccagatgcccagcctgtgcaggtag

SEQ ID NO: 21107 - DNA, 1209 bp, synthetic construct
  misc_feature 1..1209: note = Description of Artificial Sequence: Synthetic coding sequence
  source 1..1209: mol_type = other DNA
atgtacaacacagtgtggagcatggacagagatgatgctgactggagggaggtgatgatgccctacagcacagagctgatcttctacatcgagatggaccccccagccctgccccccaagccacccaagcccatgaccagcgctgtgcccaacggcatgaaggacagctctgtgtccctgcaggatgctgagtggtactggggagacatcagccgggaggaggtgaatgacaagctgcgggacatgccagatggcaccttcctggtgagagatgccagcaccaagatgcagggcgactacaccctgaccctgaggaagggcggcaacaacaagctgatcaagatctaccacagagatggcaagtatggcttcagtgaccccctgaccttcaacagcgtggtggagctgatcaaccactaccaccacgagagcctggcccagtacaaccccaagctggatgtgaagctgatgtaccctgtgagccgctaccagcaggaccagctggtgaaggaggacaacattgatgctgtgggcaagaagctgcaggagtaccacagccagtaccaggagaagagcaaggagtatgaccggctgtatgaggagtacaccaggaccagccaggagatccagatgaagaggacagccatcgaggccttcaatgagaccatcaagatctttgaggagcagtgccacacccaggagcagcacagcaaggagtacatcgagcgcttcagaagagagggcaatgagaaggagattgagcgctggctgaaccacaagggcgtgcggcagaagaggctgaatgtgtggctgggcatcaagaatgaagatgctgatgagaactacttcatcaatgaagaagatgagaacctgccccactatgatgagaagacctggtttgtggaggacatcaacagagtgcaggccgaggacctgctgtatggcaagccagatggagccttcctgatccgggagagcagcaagaagggctgctacgcctgcagcgtggtggctgatggagaggtgaagcactgtgtgatctacagcacagcccggggctacggctttgctgagccctacaacctgtacagcagcctgaaggagctggtgctgcactaccagcagaccagcctggtgcagcacaatgacagcctgaatgtgcggctggcctaccctgtgcacgcccagatgcccagcctgtgcaggtag

SEQ ID NO: 21108 - DNA, 1386 bp, synthetic construct; identical to SEQ ID NO: 21105
  misc_feature 1..1386: note = Description of Artificial Sequence: Synthetic coding sequence
  source 1..1386: mol_type = other DNA

SEQ ID NO: 21109 - DNA, 1386 bp, synthetic construct; identical to SEQ ID NO: 21105
  misc_feature 1..1386: note = Description of Artificial Sequence: Synthetic coding sequence
  source 1..1386: mol_type = other DNA

SEQ ID NO: 21110 - DNA, 1209 bp, synthetic construct; identical to SEQ ID NO: 21107
  misc_feature 1..1209: note = Description of Artificial Sequence: Synthetic coding sequence
  source 1..1209: mol_type = other DNA

SEQ ID NO: 21111 - DNA, 621 bp, synthetic construct
  misc_feature 1..621: note = Description of Artificial Sequence: Synthetic coding sequence
  source 1..621: mol_type = other DNA
atgtacaacacagtgtggagcatggacagagatgatgctgactggagggaggtgatgatgccctacagcacagagctgatcttctacatcgagatggaccccccagccctgccccccaagccacccaagcccatgaccagcgctgtgcccaacggcatgaaggacagctctgtgtccctgcaggatgctgagtggtactggggagacatcagccgggaggaggtgaatgacaagctgcgggacatgccagatggcaccttcctggtgagagatgccagcaccaagatgcagggcgactacaccctgaccctgaggaagggcggcaacaacaagctgatcaagatctaccacagagatggcaagtatggcttcagtgaccccctgaccttcaacagcgtggtggagctgatcaaccactaccaccacgagagcctggcccagtacaaccccaagctggatgtgaagctgatgtaccctgtgagccgctaccagcaggaccagctggtgaaggaggacaacattgatgctgtgggcaagaagctgcaggagtaccacagccagtaccaggagaagagcaaggagtatgaccggctgtatgaggagtacaccaggaccagctag

SEQ ID NO: 21112 - DNA, 1524 bp, synthetic construct
  misc_feature 1..1524: note = Description of Artificial Sequence: Synthetic coding sequence
  source 1..1524: mol_type = other DNA
atgggccccagccggctggtgcggggcccccggccccagggcatgaggagcccctaccgccggcccggcatgggctggccccggccccgcttccccaggatgttcaagtgcagcagaagacgctaccagcagggcctgcggggccgcacagccagcagcgctgccatcaacccagccacccgggccatgggcatcaacaacacccacacagacaccaccatcgtgtggatcttccccccccaggccctgccccccaagccacccaagcccatgaccagcgctgtgcccaacggcatgaaggacagctctgtgtccctgcaggatgctgagtggtactggggagacatcagccgggaggaggtgaatgacaagctgcgggacatgccagatggcaccttcctggtgagagatgccagcaccaagatgcagggcgactacaccctgaccctgaggaagggcggcaacaacaagctgatcaagatctaccacagagatggcaagtatggcttcagtgaccccctgaccttcaacagcgtggtggagctgatcaaccactaccaccacgagagcctggcccagtacaaccccaagctggatgtgaagctgatgtaccctgtgagccgctaccagcaggaccagctggtgaaggaggacaacattgatgctgtgggcaagaagctgcaggagtaccacagccagtaccaggagaagagcaaggagtatgaccggctgtatgaggagtacaccaggaccagccaggagatccagatgaagaggacagccatcgaggccttcaatgagaccatcaagatctttgaggagcagtgccacacccaggagcagcacagcaaggagtacatcgagcgcttcagaagagagggcaatgagaaggagattgagcgcatcatgatgaactatgacaagctgaagagccggctgggggagatccatgacagcaagatgaggctggagcaggacctgaagaaccaggccctggacaaccgggagattgacaagaagatgaacagcatcaagccagacctgatccagctgaggaagatccgggaccagcacctggtgtggctgaaccacaagggcgtgcggcagaagaggctgaatgtgtggctgggcatcaagaatgaagatgctgatgagaactacttcatcaatgaggaggatgagaacctgccccactatgatgagaagacctggtttgtggaggacatcaacagagtgcaggccgaggacctgctgtatggcaagccagatggagccttcctgatccgggagagcagcaagaagggctgctacgcctgcagcgtggtggctgatggagaggtgaagcactgcgtcatctacagcacagcccggggctacggctttgctgagccctacaacctgtacagcagcctgaaggagctggtgctgcactaccagcagaccagcctggtgcagcacaatgacagcctgaatgtgcggctggcctaccctgtgcacgcccagatgcccagcctgtgcaggtag

SEQ ID NO: 21113 - DNA, 2643 bp, synthetic construct
  misc_feature 1..2643: note = Description of Artificial Sequence: Synthetic coding sequence
  source 1..2643: mol_type = other DNA
atgcagcccggggccaccacctgcacagaggaccgcatccagcacgccctggagcgctgcctgcacggcctgagcctgagccgccgcagcacctcctggagcgctggcctgtgcctgaactgctggagcctgcaggagctggtgtcccgggaccccggccacttcctgatcctgctggagcagatcctgcagaagacccgggaggtgcaggagaagggcacctatgacctgctgacccccctggccctgctcttctacagcacagtgctgtgcaccccccacttccccccagacagcgacctgctgctgaaggccgccagcacctaccaccgcttcctgacctggcctgtgccctactgcagcatctgccaggagctgctgaccttcattgatgctgagctgaaggcccctggcatctcctaccagaggctggtgcgggcagagcagggcctgcccatccgcagccacaggagcagcacagtgacagtgctgctgctgaaccctgtggaggtgcaggccgagttcctggccgtggccaacaagctgagcaccccaggccacagcccccacagcgcctacaccaccctgctgctgcacgccttccaggccacctttggagcccactgtgatgtgcccggcctgcactgccgcctgcaggccaagaccctggccgagctggaggacatcttcacagaaacagctgaggcccaggagctggccagcggcattggagatgctgctgaggcccggcgctggctgcggaccaagctgcaggccgtgggggagaaggccggcttccctggggtgctggacacagccaagccaggcaagctgcacaccatccccatccctgtggcccgctgctacacctacagctggagccaggacagctttgacatcctgcaggagatcctgctgaaggagcaggagctgctgcagcccggcatcctgggagatgatgaggaggaggaggaggaggaggaggaggtggaggaggacctggagacagatggccactgtgccgagcgggacagcctgctgagcaccagcagcctggccagccatgacagcaccctgagcctggccagcagccaggccagcggccctgccctgagccgccacctgctgaccagctttgtgtctggcctgagtgatggcatggattctggctacgtggaggacagcgaggagagcagcagcgagtggccctggaggcggggcagccaggagcggcggggccacagaagacctggccagaagttcatccgcatctacaagctgttcaagagcaccagccagctggtgctgcggcgggacagccgcagcctggagggcagcagtgacacagccctgcccctgcggcgggccggcagcctgtgcagccccctggatgagcctgtgtccccacccagccgggcccagaggagccgcagcctgccccagcccaagctgggcacccagctgcccagctggctgctggccccagccagccggccccagaggcggcggcccttcctgtctggagatgaggaccccaaggccagcaccctgcgggtggtggtgtttggaagtgaccgcatcagcggcaaggtggcccgggcctacagcaacctgcggcggctggagaacaaccggcccctgctgacccgcttcttcaagctgcagttcttctacgtgcctgtgaagaggagccacggcaccagccctggggcctgccccccacccaggagccagacccccagccccccaacagacagccccaggcatgccagccctggagagctgggcaccaccccctgggaggagagcaccaatgacatcagccactacctgggcatgctggacccctggtatgaaagaaatgtgctgggcctgatgcacctgcccccagaggtgctgtgccagcagagcctgaaggccgaggcccaggccctggagggcagccccacccagctgcccatcctggccgacatgctgctgtactactgccgctttgctgcccggcctgtgctgctgcaggtgtaccagacagagctgaccttcatcactggagagaagaccacagagatcttcatccacagcctggagctgggccacagcgctgccacccgggccatcaaggccagcggccctggcagcaagaggctgggcattgatggagaccgggaggccgtgcccctgaccctgcagatcatctacagcaaaggagccatcagcggccgcagccgctggagcaacctggagaaggtgtgcacctctgtgaacctgaacaaggcctgcaggaagcaggaggagctggacagctccatggaggccctgaccctgaacctgacagaggtggtgaagaggcagaacagcaagagcaagaagggcttcaaccagatcagcaccagccagatcaaggtggacaaggtgcagatcatcggcagcaacagctgcccctttgctgtgtgcctggaccaggatgagaggaagatcctgcagagcgtggtgcgctgtgaggtgagcccctgctacaagccagagaagagtgacctgagcagccccccccagaccccaccagacctgcctgcccaggccgccccagacctgtgcagcctgctgtgcctgcccatcatgaccttcagcggggccctgccctag

SEQ ID NO: 21114 - DNA, 2643 bp, synthetic construct; identical to SEQ ID NO: 21113
  misc_feature 1..2643: note = Description of Artificial Sequence: Synthetic coding sequence
  source 1..2643: mol_type = other DNA

SEQ ID NO: 21115 - DNA, 447 bp, synthetic construct
  misc_feature 1..447: note = Description of Artificial Sequence: Synthetic coding sequence
  source 1..447: mol_type = other DNA
atgaagctgctggtgctggccgtgctgctgactgtggccgctgctgacagcggcatcagccccagggctgtgtggcagttcaggaagatgatcaagtgtgtgattcctggcagtgaccccttcctggagtacaacaactacggctgctactgcggcctgggcggcagcggcacccctgtggatgagctggacaagtgctgccagacccatgacaactgctatgaccaggccaagaagctggacagctgcaagttcctgctggacaacccctacacccacacctacagctacagctgcagcggcagcgccatcacctgcagcagcaagaacaaggaatgtgaggccttcatctgcaactgtgacagaaatgctgccatctgcttcagcaaggccccctacaacaaggcccacaagaacctggacaccaagaagtactgccagagctag

SEQ ID NO: 21116 - DNA, 435 bp, synthetic construct
  misc_feature 1..435: note = Description of Artificial Sequence: Synthetic coding sequence
  source 1..435: mol_type = other DNA
atgaagaccctgctgctgctggccgtcatcatgatcttcggcctgctgcaggcccacggcaacctggtgaacttccacaggatgatcaagctgaccaccgggaaggaggccgccctgtcctatggcttctacggctgccactgcggcgtgggcggccggggcagccccaaggatgccacagaccgctgctgcgtgacccatgactgctgctacaagaggctggagaagaggggctgcggcaccaagttcctgagctacaagttcagcaacagcggcagccgcatcacctgtgccaagcaggacagctgccgcagccagctgtgtgaatgtgacaaggccgccgccacctgctttgccaggaacaagaccacctacaacaagaagtaccagtactacagcaacaagcactgccggggcagcaccccccgctgctag

SEQ ID NO: 21117 - DNA, 435 bp, synthetic construct; identical to SEQ ID NO: 21116
  misc_feature 1..435: note = Description of Artificial Sequence: Synthetic coding sequence
  source 1..435: mol_type = other DNA

SEQ ID NO: 21118 - DNA, 438 bp, synthetic construct
  misc_feature 1..438: note = Description of Artificial Sequence: Synthetic coding sequence
  source 1..438: mol_type = other DNA
atggagctggccctgctgtgtggcctggtggtgatggccggggtcatccccatccagggcggcatcctgaacctgaacaagatggtgaagcaggtgacaggcaagatgcccatcctgagctactggccctacggctgccactgcggcctgggcggccggggccagcccaaggatgccacagactggtgctgccagacccatgactgctgctatgaccacctgaagacccagggctgcagcatctacaaggactactaccgctacaacttcagccagggcaacatccactgcagcgacaagggctcctggtgtgagcagcagctgtgtgcctgtgacaaggaggtggccttctgcctgaagaggaacctggacacctaccagaagaggctgcgcttctactggaggccccactgccggggccagaccccaggctgctag

SEQ ID NO: 21119 - DNA, 429 bp, synthetic construct
  misc_feature 1..429: note = Description of Artificial Sequence: Synthetic coding sequence
  source 1..429: mol_type = other DNA
atgaagagcccccacgtgctggtgttcctgtgcctgctggtggccctggtgacaggcaacctggtgcagtttggagtgatgattgagaagatgaccgggaagagcgccctgcagtacaatgactatggctgctactgcggcatcggcggcagccactggcctgtggaccagacagactggtgctgccacgcccatgactgctgctacggccgcctggagaagctgggctgtgagcccaagctggagaagtacctgttctctgtgtctgagcggggcatcttctgtgccggccgcaccacctgccagaggctgacctgtgaatgtgacaagagagctgccctgtgcttcagaagaaacctgggcacctacaacagaaaatatgcccactaccccaacaagctgtgcaccggccccaccccaccctgctag

SEQ ID NO: 21120 - DNA, 636 bp, synthetic construct
  misc_feature 1..636: note = Description of Artificial Sequence: Synthetic coding sequence
  source 1..636: mol_type = other DNA
atggctgatggagccaaggccaaccccaagggcttcaagaagaaggtgctggaccgctgcttcagcggctggaggggccccaggtttggagccagctgccccagcaggaccagccgcagcagcctgggcatgaagaagttcttcaccgtggccatcctggccggctctgtgctgagcacagcccacggcagcctgctgaacctgaaggccatggtggaggccgtgacaggccgcagcgccatcctgagctttgtgggctacggctgctactgcggcctgggcggccggggccagcccaaggatgaggtggactggtgctgccacgcccatgactgctgctaccaggagctgtttgaccagggctgccacccctacgtggaccactatgaccacaccatcgagaacaacacagaaattgtgtgcagcgacctgaacaagacagaatgtgacaagcagacctgcatgtgtgacaagaacatggtgctgtgcctgatgaaccagacctaccgggaggagtaccggggcttcctgaatgtgtactgccagggccccacccccaactgcagcatctatgagcccccacctgaggaggtgacctgcagccaccagagccctgcccccccagccccaccctag

SEQ ID NO: 21121 - DNA, 936 bp, synthetic construct
  misc_feature 1..936: note = Description of Artificial Sequence: Synthetic coding sequence
  source 1..936: mol_type = other DNA
atgcctgccccccgggccccccgggccctggccgctgctgccccagccagcggcaaggccaagctgacccaccctgggaaggccatcctggccggcggcctggccggcggcatcgagatctgcatcaccttccccacagaatatgtgaagacccagctgcagctggatgagaggagccaccccccacgctaccggggcattggagactgtgtgcggcagacagtgcgcagccacggcgtgctgggcctgtaccggggcctgagcagcctgctgtatggcagcatccccaaggctgctgtgcgcttcggcatgtttgagttcctgagcaaccacatgagagatgcccagggccgcctggacagcacccggggcctgctgtgtggcctgggcgccggcgtggccgaggccgtggtggtggtgtgccccatggagaccatcaaggtgaagttcatccatgaccagaccagccccaaccccaagtaccggggcttcttccacggcgtgcgggagatcgtgcgggagcagggcctgaagggcacctaccagggcctgacagccaccgtgctgaagcagggcagcaaccaggccatccgcttctttgtgatgaccagcctgaggaactggtacagaggagacaaccccaacaagcccatgaaccccctcatcactggagtgtttggagccatcgccggggccgcctctgtgtttggaaacacccccctggatgtgatcaagaccaggatgcagggcctggaggcccacaagtacagaaacacctgggactgtggcctgcagatcctgaagaaggagggcctgaaggccttctacaagggcaccgtgccccggctgggccgggtgtgcctggatgtggccatcgtgtttgtgatctatgatgaggtggtgaagctgctgaacaaggtgtggaagacagactag

SEQ ID NO: 21122 - DNA, 2250 bp, synthetic construct
  misc_feature 1..2250: note = Description of Artificial Sequence: Synthetic coding sequence
  source 1..2250: mol_type = other DNA
atgtccttcatcgacccctaccagcacatcatcgtggagcaccagtacagccacaagttcaccgtggtggtgctgcgggccaccaaggtgaccaagggggcctttggagacatgctggacaccccagacccctacgtggagctgttcatcagcaccaccccagacagcaggaagaggaccaggcacttcaacaatgacatcaaccctgtgtggaatgagacctttgagttcatcctggaccccaaccaggagaatgtgctggagatcaccctgatggatgccaactacgtgatggatgagaccctgggcacagccaccttcaccgtgtcctccatgaaggtgggggagaagaaggaggtgcccttcatcttcaaccaggtgacagagatggtgctggagatgagcctggaggtgtgcagctgcccagacctgcgcttctccatggccctgtgtgaccaggagaagaccttccggcagcagaggaaggagcacatccgggagagcatgaagaagctgctgggccccaagaacagcgagggcctgcacagcgccagagatgtgcctgtggtggccatcctgggcagcggcggcggcttccgggccatggtgggcttcagcggcgtgatgaaggccctgtatgaaagtggcatcctggactgtgccacctacgtggccggcctgagcggcagcacctggtacatgagcaccctgtacagccacccagacttccctgagaagggccctgaggagatcaatgaggagctgatgaagaatgtgagccacaaccccctgctgctgctgaccccccagaaggtgaagagatatgtggagagcctgtggaagaagaagagcagcggccagcctgtgaccttcacagacatcttcggcatgctgattggagagaccctcatccacaacaggatgaacaccaccctgagcagcctgaaggagaaggtgaacacagcccagtgccccctgcccctcttcacctgcctgcacgtgaagccagatgtgtctgagctgatgtttgctgactgggtggagttcagcccctatgagatcggcatggccaagtatggcaccttcatggccccagacctgtttggcagcaagttcttcatgggcaccgtggtgaagaagtatgaggagaaccccctgcacttcctgatgggcgtgtggggcagcgccttcagcatcctcttcaacagagtgctgggcgtgtctggcagccagagccggggcagcaccatggaggaggagctggagaacatcaccaccaagcacatcgtgtccaatgacagcagtgacagtgatgatgagagccatgagcccaagggcacagaaaatgaagatgctggcagtgactaccagagcgacaaccaggcctcctggatccacaggatgatcatggccctggtgtctgacagcgccctcttcaacacccgggagggccgggccggcaaggtgcacaacttcatgctgggcctgaacctgaacaccagctaccccctgagccccctgagtgactttgccacccaggacagctttgatgatgatgagctggatgctgctgtggccgaccctgatgaatttgagcgcatctatgagcccctggatgtgaagagcaagaagatccacgtggtggacagcggcctgaccttcaacctgccctaccccctcatcctgcggccccagaggggcgtggacctgatcatcagctttgacttcagcgcccggcccagcgacagcagcccccccttcaaggagctgctgctggccgagaagtgggccaagatgaacaagctgcccttccccaagattgacccctacgtgtttgaccgggagggcctgaaggaatgttatgtgttcaagcccaagaacccagacatggagaaggactgccccaccatcatccactttgtgctggccaacatcaacttcaggaagtaccgggcccctggggtgccccgggagacagaggaggagaaggagattgctgactttgacatctttgatgatcctgagagccccttcagcaccttcaacttccagtaccccaaccaggccttcaagaggctgcatgacctgatgcacttcaacaccctgaacaacattgatgtgatcaaggaggccatggtggagagcattgagtaccgccggcagaaccccagccgctgcagcgtgtccctgagcaatgtggaggcccggcgcttcttcaacaaggagttcctgagcaagcccaaggcctag

SEQ ID NO: 21123 - DNA, 150 bp, synthetic construct
  misc_feature 1..150: note = Description of Artificial Sequence: Synthetic coding sequence
  source 1..150: mol_type = other DNA
atgtccttcatcgacccctaccagcacatcatcgtggagcaccagtacagccacaagttcaccgtggtggtgctgcgggccaccaaggtgaccaagggggcctttggagacatgcccaaggtgaccaagggggccttcggggacatgtag

SEQ ID NO: 21124 - DNA, 2070 bp, synthetic construct
  misc_feature 1..2070: note = Description of Artificial Sequence: Synthetic coding sequence
  source 1..2070: mol_type = other DNA
atgtccttcatcgacccctaccagcacatcatcgtggagcaccagtacagccacaagttcaccgtggtggtgctgcgggccaccaaggtgaccaagggggcctttggagacatgctggacaccccagacccctacgtggagctgttcatcagcaccaccccagacagcaggaagaggaccaggcacttcaacaatgacatcaaccctgtgtggaatgagacctttgagttcatcctggaccccaaccaggagaatgtgctggagatcaccctgatggatgccaactacgtgatggatgagaccctgggcacagccaccttcaccgtgtcctccatgaaggtgggggagaagaaggaggtgcccttcatcttcaaccaggtgcctgtggtggccatcctgggcagcggcggcggcttccgggccatggtgggcttcagcggcgtgatgaaggccctgtatgaaagtggcatcctggactgtgccacctacgtggccggcctgagcggcagcacctggtacatgagcaccctgtacagccacccagacttccctgagaagggccctgaggagatcaatgaggagctgatgaagaatgtgagccacaaccccctgctgctgctgaccccccagaaggtgaagagatatgtggagagcctgtggaagaagaagagcagcggccagcctgtgaccttcacagacatcttcggcatgctgattggagagaccctcatccacaacaggatgaacaccaccctgagcagcctgaaggagaaggtgaacacagcccagtgccccctgcccctcttcacctgcctgcacgtgaagccagatgtgtctgagctgatgtttgctgactgggtggagttcagcccctatgagatcggcatggccaagtatggcaccttcatggccccagacctgtttggcagcaagttcttcatgggcaccgtggtgaagaagtatgaggagaaccccctgcacttcctgatgggcgtgtggggcagcgccttcagcatcctcttcaacagagtgctgggcgtgtctggcagccagagccggggcagcaccatggaggaggagctggagaacatcaccaccaagcacatcgtgtccaatgacagcagtgacagtgatgatgagagccatgagcccaagggcacagaaaatgaagatgctggcagtgactaccagagcgacaaccaggcctcctggatccacaggatgatcatggccctggtgtctgacagcgccctcttcaacacccgggagggccgggccggcaaggtgcacaacttcatgctgggcctgaacctgaacaccagctaccccctgagccccctgagtgactttgccacccaggacagctttgatgatgatgagctggatgctgctgtggccgaccctgatgaatttgagcgcatctatgagcccctggatgtgaagagcaagaagatccacgtggtggacagcggcctgaccttcaacctgccctaccccctcatcctgcggccccagaggggcgtggacctgatcatcagctttgacttcagcgcccggcccagcgacagcagcccccccttcaaggagctgctgctggccgagaagtgggccaagatgaacaagctgcccttccccaagattgacccctacgtgtttgaccgggagggcctgaaggaatgttatgtgttcaagcccaagaacccagacatggagaaggactgccccaccatcatccactttgtgctggccaacatcaacttcaggaagtaccgggcccctggggtgccccgggagacagaggaggagaaggagattgctgactttgacatctttgatgatcctgagagccccttcagcaccttcaacttccagtaccccaaccaggccttcaagaggctgcatgacctgatgcacttcaacaccctgaacaacattgatgtgatcaaggaggccatggtggagagcattgagtaccgccggcagaaccccagccgctgcagcgtgtccctgagcaatgtggaggcccggcgcttcttcaacaaggagttcctgagcaagcccaaggcctag

SEQ ID NO: 21125 - DNA, 2346 bp, synthetic construct
  misc_feature 1..2346: note = Description of Artificial Sequence: Synthetic coding sequence
  source 1..2346: mol_type = other DNA
atggctgtggccgaggtgtccaggacctgcctgctgactgtgcgggtgctgcaggcccaccggctgcccagcaaggacctggtgacccccagcgactgctacgtgaccctgtggctgcccacagcctgcagccaccggctgcagaccaggacagtgaagaacagcagcagccctgtgtggaaccagagcttccacttccgcatccaccggcagctgaagaatgtgatggagctgaaggtgtttgaccaggacctggtgactggagatgatcctgtgctgtctgtgctgtttgatgctggcaccctgcgggccggggagttccggcgggagagcttcagcctgagcccccagggcgagggccgcctggaggtggagttccggctgcagagcctggccgacagaggagagtggctggtgtccaatggagtgctggtggcccgggagctgagctgcctgcacgtgcagctggaggagactggagaccagaagagcagcgagcaccgggtgcagctggtggtgcccggcagctgtgagggcccccaggaggcctctgtgggcaccggcaccttccgcttccactgcccagcctgctgggagcaggagctgagcatccggctgcaggatgcccctgaggagcagctgaaggcccccctgagcgccctgcccagcggccaggtggtgcggctggtgttccccaccagccaggagcccctgatgagggtggagctgaagaaggaggccggcctgcgggagctggccgtgcggctgggcttcggcccctgtgccgaggagcaggccttcctgagcaggaggaagcaggtggtggccgccgccctgcggcaggccctgcagctggatggagacctgcaggaggatgagatccctgtggtggccatcatggccaccggcggcggcatccgggccatgaccagcctgtatggccagctggccggcctgaaggagctgggcctgctggactgtgtgtcctacatcaccggggccagcggcagcacctgggccctggccaacctgtatgaggaccctgagtggagccagaaggacctggccggccccacagagctgctgaagacccaggtgaccaagaacaagctgggcgtgctggcccccagccagctgcagcgctaccggcaggagctggccgagcgggcccggctgggctaccccagctgcttcaccaacctgtgggccctgatcaatgaggccctgctgcatgatgagccccatgaccacaagctgagtgaccagcgggaggccctgagccacggccagaaccccctgcccatctactgtgccctgaacaccaagggccagagcctgaccacctttgaatttggagagtggtgtgagttcagcccctatgaggtgggcttccccaagtatggagccttcatccccagcgagctgtttggcagcgagttcttcatgggccagctgatgaagaggctgcctgagagccgcatctgcttcctggagggcatctggagcaacctgtatgctgccaacctgcaggacagcctgtactgggccagcgagcccagccagttctgggaccgctgggtgaggaaccaggccaacctggacaaggagcaggtgcccctgctgaagattgaggagccccccagcacagctggaagaattgctgagttcttcacagacctgctgacctggaggcccctggcccaggccacccacaacttcctgcggggcctgcacttccacaaggactacttccagcacccccacttcagcacctggaaggccaccaccctggatggcctgcccaaccagctgaccccatctgagccccacctgtgcctgctggatgtgggctacctgatcaacaccagctgcctgcccctgctgcagcccaccagagatgtggacctgatcctgagcctggactacaacctgcatggagccttccagcagctgcagctgctgggccgcttctgccaggagcagggcatccccttcccccccatcagccccagccctgaggagcagctgcagccccgggagtgccacaccttcagtgaccccacctgccctggggccccagctgtgctgcacttccccctggtgtctgacagcttccgggagtacagcgcccctggggtgcggaggaccccagaggaggccgccgccggggaggtgaacctgagcagcagtgacagcccctaccactacaccaaggtgacctacagccaggaggatgtggacaagctgctgcacctgacccactacaacgtgtgcaacaaccaggagcagctgctggaggccctgcggcaggccgtgcagaggcggcggcagaggcggccccactag

SEQ ID NO: 21126 - DNA, 417 bp, synthetic construct
  misc_feature 1..417: note = Description of Artificial Sequence: Synthetic coding sequence
  source 1..417: mol_type = other DNA
atgaagggcctgctgcccctggcctggttcctggcctgcagcgtgcctgctgtgcagggcggcctgctggacctgaagtccatgattgagaaggtgacaggcaagaatgccctgaccaactacggcttctacggctgctactgcggctggggcggccggggcacccccaaggatggaacagactggtgctgctgggcccatgaccactgctacggccgcctggaggagaagggctgcaacatccgcacccagagctacaagtacagatttgcctggggcgtggtgacctgtgagcccggccccttctgccacgtgaacctgtgtgcctgtgacaggaagctggtgtactgcctgaagaggaacctgcggagctacaacccccagtaccagtacttccccaacatcctgtgcagctag

SEQ ID NO: 21127 - DNA, 2421 bp, synthetic construct
  misc_feature 1..2421: note = Description of Artificial Sequence: Synthetic coding sequence
  source 1..2421: mol_type = other DNA
atgcagttcttcggccgcctggtgaacaccttcagcggcgtgaccaacctcttcagcaaccccttccgggtgaaggaggtggccgtggccgactacaccagcagtgacagagtgcgggaggagggccagctgatcctcttccagaacacccccaacagaacctgggactgtgtgctggtgaaccccaggaacagccagagcggcttccgcctcttccagctggagctggaggctgatgccctggtgaacttccaccagtacagcagccagctgctgcccttctatgagagcagcccccaggtgctgcacacagaggtgctgcagcacctgacagacctgatccggaaccaccccagctggagcgtggcccacctggccgtggagctgggcatccgggagtgcttccaccacagccgcatcatcagctgtgccaactgtgccgagaatgaggagggctgcacccccctgcacctggcctgcaggaaaggagatggagagatcctggtggagctggtgcagtactgccacacccagatggatgtgacagactacaagggggagaccgtcttccactatgctgtgcagggcgacaacagccaggtgctgcagctgctgggcagaaatgctgtggccggcctgaaccaggtgaacaaccagggcctgacccccctgcacctggcctgccagctgggcaagcaggagatggtgcgggtgctgctgctgtgcaatgcccgctgcaacatcatgggccccaacggctaccccatccacagcgccatgaagttcagccagaagggctgtgccgagatgatcatctccatggacagcagccagatccacagcaaggacccccgctacggggccagccccctgcactgggccaagaatgctgagatggccaggatgctgctgaagaggggctgcaatgtgaacagcaccagcagcgctggcaacacagccctgcacgtggccgtgatgaggaacagatttgactgtgccatcgtgctgctgacccatggagccaatgctgatgcccggggggagcacggcaacacccccctgcacctggccatgagcaaggacaacgtggagatgatcaaggccctgattgtgtttggagctgaggtggacaccccaaatgactttggagagacccccaccttcctggccagcaagattggccgcctggtgaccaggaaggccatcctgaccctgctgaggacagtgggcgctgagtactgcttcccccccatccatggagtgcctgctgagcagggcagcgctgccccccaccaccccttcagcctggagcgggcccagcccccacccatcagcctgaacaacctggagctgcaggacctgatgcacatcagccgggccaggaagccagccttcatcctgggctccatgagagatgagaagaggacccatgaccacctgctgtgcctggatggcggcggcgtgaagggcctcatcatcatccagctgctgattgccatcgagaaggccagcggcgtggccaccaaggacctgtttgactgggtggccggcaccagcactggaggcatcctggccctggccatcctgcacagcaagtccatggcctacatgaggggcatgtacttcaggatgaaggatgaggtgttccggggcagccggccctatgaaagtggccccctggaggagttcctgaagcgggagtttggagagcacaccaagatgacagatgtgaggaagcccaaggtgatgctgaccggcaccctgagtgaccggcagcctgctgagctgcacctgttcaggaactatgatgcccctgagaccgtgcgggagccccgcttcaaccagaatgtgaacctgcggcccccagcccagcccagcgaccagctggtgtggagggctgcccggagcagtggagctgcccccacctacttccggcccaacggccgcttcctggatggcggcctgctggccaacaaccccaccctggatgccatgacagagatccacgagtacaaccaggacctgatcaggaagggccaggccaacaaggtgaagaagctgagcatcgtggtgtccctgggcaccggccgcagcccccaggtgcctgtgacctgtgtggatgtgttccggcccagcaacccctgggagctggccaagacagtgtttggagccaaggagctgggcaagatggtggtggactgctgcacagatcctgatggccgggctgtggaccgggcccgggcctggtgtgagatggtgggcatccagtacttccggctgaacccccagctgggcacagacatcatgctggatgaggtgtctgacacagtgctggtgaatgccctgtgggagacagaggtgtacatctatgagcaccgggaggagttccagaagctgatccagctgctgctgagcccctag

SEQ ID NO: 21128 - DNA, 1284 bp, synthetic construct
  misc_feature 1..1284: note = Description of Artificial Sequence: Synthetic coding sequence
  source 1..1284: mol_type = other DNA
atgcagttcttcggccgcctggtgaacaccttcagcggcgtgaccaacctcttcagcaaccccttccgggtgaaggaggtggccgtggccgactacaccagcagtgacagagtgcgggaggagggccagctgatcctcttccagaacacccccaacagaacctgggactgtgtgctggtgaaccccaggaacagccagagcggcttccgctgtgccaactgtgccgagaatgaggagggctgcacccccctgcacctggcctgcaggaaaggagatggagagatcctggtggagctggtgcagtactgccacacccagatggatgtgacagactacaagggggagaccgtcttccactatgctgtgcagggcgacaacagccaggtgctgcagctgctgggcagaaatgctgtggccggcctgaaccaggtgaacaaccagggcctgacccccctgcacctggcctgccagctgggcaagcaggagatggtgcgggtgctgctgctgtgcaatgcccgctgcaacatcatgggccccaacggctaccccatccacagcgccatgaagttcagccagaagggctgtgccgagatgatcatctccatggacagcagccagatccacagcaaggacccccgctacggggccagccccctgcactgggccaagaatgctgagatggccaggatgctgctgaagaggggctgcaatgtgaacagcaccagcagcgctggcaacacagccctgcacgtggccgtgatgaggaacagatttgactgtgccatcgtgctgctgacccatggagccaatgctgatgcccggggggagcacggcaacacccccctgcacctggccatgagcaaggacaacgtggagatgatcaaggccctgattgtgtttggagctgaggtggacaccccaaatgactttggagagacccccaccttcctggccagcaagattggccgcctggtgaccaggaaggccatcctgaccctgctgaggacagtgggcgctgagtactgcttcccccccatccatggagtgcctgctgagcagggcagcgctgccccccaccaccccttcagcctggagcgggcccagcccccacccatcagcctgaacaacctgggcagccaccccagccaggccggctggtgggcctggggcgccgccagtgatggcaccaccggcagccacgcccacctgaccggccctgaggcctctgtgcaccctggcctgcacgagggccgggaggccgaccggcagaacatggagagctag

SEQ ID NO: 21129 - DNA, 2259 bp, synthetic construct
  misc_feature 1..2259: note = Description of Artificial Sequence: Synthetic coding sequence
  source 1..2259: mol_type = other DNA
atgcagttcttcggccgcctggtgaacaccttcagcggcgtgaccaacctcttcagcaaccccttccgggtgaaggaggtggccgtggccgactacaccagcagtgacagagtgcgggaggagggccagctgatcctcttccagaacacccccaacagaacctgggactgtgtgctggtgaaccccaggaacagccagagcggcttccgcctcttccagctggagctggaggctgatgccctggtgaacttccaccagtacagcagccagctgctgcccttctatgagagcagcccccaggtgctgcacacagaggtgctgcagcacctgacagacctgatccggaaccaccccagctggagcgtggcccacctggccgtggagctgggcatccgggagtgcttccaccacagccgcatcatcagctgtgccaactgtgccgagaatgaggagggctgcacccccctgcacctggcctgcaggaaaggagatggagagatcctggtggagctggtgcagtactgccacacccagatggatgtgacagactacaagggggagaccgtcttccactatgctgtgcagggcgacaacagccaggtgctgcagctgctgggcagaaatgctgtggccggcctgaaccaggtgaacaaccagggcctgacccccctgcacctggcctgccagctgggcaagcaggagatggtgcgggtgctgctgctgtgcaatgcccgctgcaacatcatgggccccaacggctaccccatccacagcgccatgaagttcagccagaagggctgtgccgagatgatcatctccatggacagcagccagatccacagcaaggacccccgctacggggccagccccctgcactgggccaagaatgctgagatggccaggatgctgctgaagaggggctgcaatgtgaacagcaccagcagcgctggcaacacagccctgcacgtggccgtgatgaggaacagatttgactgtgccatcgtgctgctgacccatggagccaatgctgatgcccggggggagcacggcaacacccccctgcacctggccatgagcaaggacaacgtggagatgatcaaggccctgattgtgtttggagctgaggtggacaccccaaatgactttggagagacccccaccttcctggccagcaagattggccggcagctgcaggacctgatgcacatcagccgggccaggaagccagccttcatcctgggctccatgagagatgagaagaggacccatgaccacctgctgtgcctggatggcggcggcgtgaagggcctcatcatcatccagctgctgattgccatcgagaaggccagcggcgtggccaccaaggacctgtttgactgggtggccggcaccagcactggaggcatcctggccctggccatcctgcacagcaagtccatggcctacatgaggggcatgtacttcaggatgaaggatgaggtgttccggggcagccggccctatgaaagtggccccctggaggagttcctgaagcgggagtttggagagcacaccaagatgacagatgtgaggaagcccaaggtgatgctgaccggcaccctgagtgaccggcagcctgctgagctgcacctgttcaggaactatgatgcccctgagaccgtgcgggagccccgcttcaaccagaatgtgaacctgcggcccccagcccagcccagcgaccagctggtgtggagggctgcccggagcagtggagctgcccccacctacttccggcccaacggccgcttcctggatggcggcctgctggccaacaaccccaccctggatgccatgacagagatccacgagtacaaccaggacctgatcaggaagggccaggccaacaaggtgaagaagctgagcatcgtggtgtccctgggcaccggccgcagcccccaggtgcctgtgacctgtgtggatgtgttccggcccagcaacccctgggagctggccaagacagtgtttggagccaaggagctgggcaagatggtggtggactgctgcacagatcctgatggccgggctgtggaccgggcccgggcctggtgtgagatggtgggcatccagtacttccggctgaacccccagctgggcacagacatcatgctggatgaggtgtctgacacagtgctggtgaatgccctgtgggagacagaggtgtacatctatgagcaccgggaggagttccagaagctgatccagctgctgctgagcccctag

SEQ ID NO: 21130 - DNA, 1440 bp, synthetic construct
  misc_feature 1..1440: note = Description of Artificial Sequence: Synthetic coding sequence
  source 1..1440: mol_type = other DNA
atgcagttcttcggccgcctggtgaacaccttcagcggcgtgaccaacctcttcagcaaccccttccgggtgaaggaggtggccgtggccgactacaccagcagtgacagagtgcgggaggagggccagctgatcctcttccagaacacccccaacagaacctgggactgtgtgctggtgaaccccaggaacagccagagcggcttccgcctcttccagctggagctggaggctgatgccctggtgaacttccaccagtacagcagccagctgctgcccttctatgagagcagcccccaggtgctgcacacagaggtgctgcagcacctgacagacctgatccggaaccaccccagctggagcgtggcccacctggccgtggagctgggcatccgggagtgcttccaccacagccgcatcatcagctgtgccaactgtgccgagaatgaggagggctgcacccccctgcacctggcctgcaggaaaggagatggagagatcctggtggagctggtgcagtactgccacacccagatggatgtgacagactacaagggggagaccgtcttccactatgctgtgcagggcgacaacagccaggtgctgcagctgctgggcagaaatgctgtggccggcctgaaccaggtgaacaaccagggcctgacccccctgcacctggcctgccagctgggcaagcaggagatggtgcgggtgctgctgctgtgcaatgcccgctgcaacatcatgggccccaacggctaccccatccacagcgccatgaagttcagccagaagggctgtgccgagatgatcatctccatggacagcagccagatccacagcaaggacccccgctacggggccagccccctgcactgggccaagaatgctgagatggccaggatgctgctgaagaggggctgcaatgtgaacagcaccagcagcgctggcaacacagccctgcacgtggccgtgatgaggaacagatttgactgtgccatcgtgctgctgacccatggagccaatgctgatgcccggggggagcacggcaacacccccctgcacctggccatgagcaaggacaacgtggagatgatcaaggccctgattgtgtttggagctgaggtggacaccccaaatgactttggagagacccccaccttcctggccagcaagattggccgcctggtgaccaggaaggccatcctgaccctgctgaggacagtgggcgctgagtactgcttcccccccatccatggagtgcctgctgagcagggcagcgctgccccccaccaccccttcagcctggagcgggcccagcccccacccatcagcctgaacaacctggagctgcaggacctgatgcacatcagccgggccaggaagccagccttcatcctgggctccatgagagatgagaagaggacagacagaacatag

SEQ ID NO: 21131 - DNA, 2259 bp, synthetic construct; identical to SEQ ID NO: 21129
  misc_feature 1..2259: note = Description of Artificial Sequence: Synthetic coding sequence
  source 1..2259: mol_type = other DNA

SEQ ID NO: 21132 - DNA, 2004 bp, synthetic construct
  misc_feature 1..2004: note = Description of Artificial Sequence: Synthetic coding sequence
  source 1..2004: mol_type = other DNA
atgcagttcttcggccgcctggtgaacaccttcagcggcgtgaccaacctcttcagcaaccccttccgggtgaaggaggtggccgtggccgactacaccagcagtgacagagtgcgggaggagggccagctgatcctcttccagaacacccccaacagaacctgggactgtgtgctggtgaaccccaggaacagccagagcggcttccgcctcttccagctggagctggaggctgatgccctggtgaacttccaccagtacagcagccagctgggcaagcaggagatggtgcgggtgctgctgctgtgcaatgcccgctgcaacatcatgggccccaacggctaccccatccacagcgccatgaagttcagccagaagggctgtgccgagatgatcatctccatggacagcagccagatccacagcaaggaccccaggtatggagccagccccctgcactgggccaagaatgctgagatggccaggatgctgctgaagaggggctgcaatgtgaacagcaccagcagcgctggcaacacagccctgcacgtggccgtgatgaggaacagatttgactgtgccatcgtgctgctgacccacggggccaatgctgatgcccggggggagcacggcaacacccccctgcacctggccatgagcaaggacaacgtggagatgatcaaggccctgattgtgtttggagctgaggtggacaccccaaatgactttggagagacccccaccttcctggccagcaagattggccgcctggtgaccaggaaggccatcctgaccctgctgaggacagtgggcgctgagtactgcttcccccccatccacggcgtgcctgctgagcagggcagcgctgccccccaccaccccttcagcctggagcgggcccagcccccacccatcagcctgaacaacctggagctgcaggacctgatgcacatcagccgggccaggaagccagccttcatcctgggctccatgagagatgagaagaggacccatgaccacctgctgtgcctggatggcggcggcgtgaagggcctcatcatcatccagctgctgattgccatcgagaaggccagcggcgtggccaccaaggacctgtttgactgggtggccggcaccagcactggaggcatcctggccctggccatcctgcacagcaagtccatggcctacatgaggggcatgtacttcaggatgaaggatgaggtgttccggggcagccggccctatgagagcggccccctggaggagttcctgaagcgggagtttggagagcacaccaagatgacagatgtgaggaagcccaaggtgatgctgaccggcaccctgagtgaccggcagcctgctgagctgcacctgttcagaaattatgatgcccctgagaccgtgcgggagccccgcttcaaccagaatgtgaacctgcggcccccagcccagcccagcgaccagctggtgtggagggctgcccggagcagcggggccgcccccacctacttccggcccaacggccgcttcctggatggcggcctgctggccaacaaccccaccctggatgccatgacagagatccacgagtacaaccaggacctgatcaggaagggccaggccaacaaggtgaagaagctgagcatcgtggtgtccctgggcaccggccgcagcccccaggtgcctgtgacctgtgtggatgtgttccggcccagcaacccctgggagctggccaagacagtgtttggagccaaggagctgggcaagatggtggtggactgctgcacagatcctgatggccgggctgtggaccgggcccgggcctggtgtgagatggtgggcatccagtacttccggctgaacccccagctgggcacagacatcatgctggatgaggtgtctgacacagtgctggtgaatgccctgtgggagacagaggtgtacatctatgagcaccgggaggagttccagaagctgatccagctgctgctgagcccctag

SEQ ID NO: 21133 - DNA, 501 bp, synthetic construct
  misc_feature 1..501: note = Description of Artificial Sequence: Synthetic coding sequence
  source 1..501: mol_type = other DNA
atgcagttcttcggccgcctggtgaacaccttcagcggcgtgaccaacctcttcagcaaccccttccgggtgaaggaggtggccgtggccgactacaccagcagtgacagagtgcgggaggagggccagctgatcctcttccagaacacccccaacagaacctgggactgtgtgctggtgaaccccaggaacagccagagcggcttccgctgtgccaactgtgccgagaatgaggagggctgcacccccctgcacctggcctgcaggaaaggagatggagagatcctggtggagctggtgcagtactgccacacccagatggatgtgacagactacaagggggagaccgtcttccactatgctgtgcagggcgacaacagccaggtgctgcagctgctgggcagaaatgctgtggccggcctgaaccaggtgaacaaccagggcctgacccccctgcacctggcctgccagctgggcaagcaggagatggtgcgggtgtag

SEQ ID NO: 21134 - DNA, 1299 bp, synthetic construct
  misc_feature 1..1299: note = Description of Artificial Sequence: Synthetic coding sequence
  source 1..1299: mol_type = other DNA
atgcagttcttcggccgcctggtgaacaccttcagcggcgtgaccaacctcttcagcaaccccttccgggtgaaggaggtggccgtggccgactacaccagcagtgacagagtgcgggaggagggccagctgatcctcttccagaacacccccaacagaacctgggactgtgtgctggtgaaccccaggaacagccagagcggcttccgcctcttccagctggagctggaggctgatgccctggtgaacttccaccagtacagcagccagctgctgcccttctatgagagcagcccccaggtgctgcacacagaggtgctgcagcacctgacagacctgatccggaaccaccccagctggagcgtggcccacctggccgtggagctgggcatccgggagtgcttccaccacagccgcatcatccgggtgcgcagcgcccaccaggtgcccggcctgtgggagctgatcagcacccaccacgagattgagttcagccagcccccccaggccgtgcccatcgcccggaggacccggcgggccgcccacccctgcacctggccagctgcccgggtgatgggccgctcctggtggagctggtgcagcacagccaccctgcgctggatgagccccaccacccgggagcggcccagcagcatcatgctgagccgggtgaccatcctgcgctgctgccgctgtgccgagatgatcatctccatggacagcagccagatccacagcaaggaccccaggtatggagccagccccctgcactgggccaagaatgctgagatggccaggatgctgctgaagaggggctgcaatgtgaacagcaccagcagcgctggcaacacagccctgcacgtggccgtgatgaggaacagatttgactgtgccatcgtgctgctgacccacggggccaatgctgatgcccggggggagcacggcaacacccccctgcacctggccatgagcaaggacaacgtggagatgatcaaggccctgattgtgtttggagctgaggtggacaccccaaatgactttggagagacccccaccttcctggccagcaagattggccgcctggtgaccaggaaggccatcctgaccctgctgaggacagtgggcgctgagtactgcttcccccccatccacggcgtgcctgctgagcagggcagcgctgccccccaccaccccttcagcctggagcgggcccagcccccacccatcagcctgaacaacctgggcagccaccccagccaggccggctggtgggcctggggcgccgccagtgatggatag

SEQ ID NO: 21135 - DNA, 243 bp, synthetic construct
  misc_feature 1..243: note = Description of Artificial Sequence: Synthetic coding sequence
  source 1..243: mol_type = other DNA
atgcagttcttcggccgcctggtgaacaccttcagcggcgtgaccaacctcttcagcaaccccttccgggtgaaggaggtggccgtggccgactacaccagcagtgacagagtgcgggaggagggccagctgatcctcttccagaacacccccaacagaacctgggactgtgtgctggtgaaccccaggaacagccagagcggcttccgcctcttccagctggagctggaggctgatgcctag

SEQ ID NO: 21136 - DNA, 498 bp, synthetic construct
  misc_feature 1..498: note = Description of Artificial Sequence: Synthetic coding sequence
  source 1..498: mol_type = other DNA
atgggccccctgcctgtgtgcctgcccatcatgctgctgctgctgctgcccagcctgctgctgctgctgctgctgcccggccctggcagcggggaggccagccgcatcctgcgggtgcacagaagaggcatcctggagctggccggcaccgtgggctgtgtgggccccaggacccccatcgcctacatgaagtatggctgcttctgtggcctgggcggccacggccagcccagagatgccatcgactggtgctgccacggccatgactgctgctacaccagggctgaggaggccggctgcagccccaagacagagcgctacagctggcagtgtgtgaaccagagcgtgctgtgtggccctgctgagaacaagtgccaggagctgctgtgcaagtgtgaccaggagatcgccaactgcctggcccagacagagtacaacctgaagtacctgttctacccccagttcctgtgtgagccagacagccccaagtgtgactag

SEQ ID NO: 21137 - DNA, 498 bp, synthetic construct; identical to SEQ ID NO: 21136
  misc_feature 1..498: note = Description of Artificial Sequence: Synthetic coding sequence
  source 1..498: mol_type = other DNA

SEQ ID NO: 21138 - DNA, 570 bp, synthetic construct
  misc_feature 1..570: note = Description of Artificial Sequence: Synthetic coding sequence
  source 1..570: mol_type = other DNA
atggccctgctgagcaggcctgccctgaccctgctgctgctgctgatggctgctgtggtgcgctgccaggagcaggcccagaccacagactggagggccaccctgaagaccatcagaaatggagtgcacaagattgacacctacctgaatgctgccctggacctgctgggcggagaagatggcctgtgccagtacaagtgcagtgatggcagcaagcccttccccaggtatggctacaagcccagccccccaaatggctgcggcagccccctgtttggagtgcacctgaacatcggcatccccagcctgaccaagtgctgcaaccagcacgaccgctgctatgagacctgtgggaagagcaagaatgactgtgatgaggagttccagtactgcctgagcaagatctgcagagatgtgcagaagaccctgggcctgacccagcacgtgcaggcctgtgagaccaccgtggagctgctgtttgacagcgtcatccacctgggctgcaagccctacctggacagccagagagctgcctgccgctgccactatgaggagaagacagacctgtag

SEQ ID NO: 21139 - DNA, 213 bp, synthetic construct
  misc_feature 1..213: note = Description of Artificial Sequence: Synthetic coding sequence
  source 1..213: mol_type = other DNA
atggccctgctgagcaggcctgccctgaccctgctgctgctgctgatggctgctgtggtgcgctgccaggagcaggcccagaccacagactggagggccaccctgaagaccatcagaaatggagtgcacaagattgacacctacctgaatgctgccctggacctgctgggcggagaagatggcctgtgccagtacaagtgcagtgatgcctag

SEQ ID NO: 21140 - DNA, 588 bp, synthetic construct
  misc_feature 1..588: note = Description of Artificial Sequence: Synthetic coding sequence
  source 1..588: mol_type = other DNA
atgaagctggccagcggcttcctggtgctgtggctgagcctgggcggcggcctggcccagagcgacaccagcccagacacagaggagagctacagcgactggggcctgcggcacctgcggggcagctttgaatctgtgaacagctactttgacagcttcctggagctgctgggcggcaagaatggagtgtgccagtaccgctgccgctatggcaaggcccccatgccccggcccggctacaagccccaggagcccaacggctgcggcagctacttcctgggcctgaaggtgcctgagagcatggacctgggcatcccagccatgaccaagtgctgcaaccagctggatgtgtgctatgacacctgtggggccaacaagtaccgctgtgatgccaagttccgctggtgcctgcacagcatctgcagcgacctgaagaggagcctgggctttgtgtccaaggtggaggccgcctgtgacagcctggtggacaccgtcttcaacacagtgtggaccctgggctgccggcccttcatgaacagccagagagctgcctgcatctgtgccgaggaggagaaggaggagctgtag

SEQ ID NO: 21141 - DNA, 3876 bp, synthetic construct
  misc_feature 1..3876: note = Description of Artificial Sequence: Synthetic coding sequence
  source 1..3876: mol_type = other DNA
atggccggggccgccagcccctgtgccaacggctgcggccctggggcccccagtgatgctgaggtgctgcacctgtgccgcagcctggaggtgggcaccgtgatgaccctcttctacagcaagaagagccagaggcctgagaggaagaccttccaggtgaagctggagacccggcagatcacctggagcagaggagctgacaagattgaaggagccatcgacatccgggagatcaaggagatccggcctgggaagaccagccgggactttgaccgctaccaggaggaccctgccttccggccagaccagagccactgctttgtgatcctgtatggcatggagttccggctgaagaccctgagcctgcaggccaccagtgaagatgaggtgaacatgtggatcaagggcctgacctggctgatggaggacaccctgcaggcccccacccccctgcagatcgagcgctggctgaggaagcagttctacagcgtggacaggaacagagaagatcgcatcagcgccaaggacctgaagaacatgctgagccaggtgaactacagagtgcccaacatgaggttcctgcgggagcggctgacagacctggagcagaggtctggggacatcacctacggccagtttgcccagctgtaccgcagcctgatgtacagcgcccagaagaccatggacctgcccttcctggaggccagcaccctgcgggccggggagaggcctgagctgtgccgggtgtccctgcctgagttccagcagttcctgctggactaccagggcgagctgtgggccgtggaccggctgcaggtgcaggagttcatgctgtccttcctgcgggaccccctgcgggagattgaggagccctacttcttcctggatgaatttgtgaccttcctgttcagcaaggagaacagcgtgtggaacagccagctggatgctgtgtgcccagacaccatgaacaaccccctgagccactactggatcagcagcagccacaacacctacctgaccggggaccagttcagcagcgagagcagcctggaggcctatgcccgctgcctgaggatgggctgccgctgcatcgagctggactgctgggatggcccagatggcatgcctgtgatctaccacggccacaccctgaccaccaagatcaagttcagtgatgtgctgcacaccatcaaggagcacgcctttgtggccagcgagtaccctgtgatcctgagcattgaggaccactgcagcatcgcccagcagaggaacatggcccagtacttcaagaaggtgctgggggacaccctgctgaccaagcctgtggagatctctgcagatggcctgcccagccccaaccagctgaagaggaagatcctgatcaagcacaagaagctggccgagggcagcgcctatgaggaggtgcccacctccatgatgtacagtgaaaatgacatcagcaacagcatcaagaatggcatcctgtacctggaggaccctgtgaaccacgagtggtacccccactactttgtgctgaccagcagcaagatctactacagcgaggagaccagcagtgaccagggcaatgaagatgaggaggagcccaaggaggtgagcagcagcacagagctgcacagcaatgagaagtggttccacggcaagctgggcgccggcagagatggccgccacatcgccgagcggctgctgacagagtactgcatcgagaccggggccccagatggcagcttcctggtgcgggagagcgagacctttgtgggggactacaccctgtccttctggagaaatggcaaggtgcagcactgccgcatccacagccggcaggatgctggcacccccaagttcttcctgacagacaacctggtgtttgacagcctgtatgacctgatcacccactaccagcaggtgcccctgcgctgcaatgaatttgagatgaggctgtctgagcctgtgccccagaccaatgcccacgagagcaaggagtggtaccacgccagcctgacccgggcccaggccgagcacatgctgatgagggtgcccagagatggagccttcctggtgaggaagagaaatgagcccaacagctatgccatctccttccgggcagagggcaagatcaagcactgccgggtgcagcaggagggccagacagtgatgctgggcaacagcgagtttgacagcctggtggacctgatctcctactatgagaagcaccccctgtacaggaagatgaagctgcgctaccccatcaatgaggaggccctggagaagattggaacagctgagccagactatggagccctgtatgagggcaggaaccctggcttctacgtggaggccaaccccatgcccaccttcaagtgtgctgtgaaggccctgtttgactacaaggcccagagagaagatgagctgaccttcatcaagagcgccatcatccagaatgtggagaagcaggagggcggctggtggaggggggactatggaggcaagaagcagctgtggttccccagcaactacgtggaggagatggtgaaccctgtggccctggagcctgagcgggagcacctggatgagaacagccccctgggggacctgctgcggggcgtgctggatgtgcctgcctgccagatcgccatccggcctgagggcaagaacaaccggctgtttgtgttcagcatctccatggcctctgtggcccactggagcctggatgtggccgctgacagccaggaggagctgcaggactgggtgaagaagatccgggaggtggcccagacagcagatgcccggctgacagagggcaagatcatggagaggaggaagaagatcgccctggagctgtctgagctggtggtgtactgcaggcctgtgccctttgatgaggagaagattggaacagagcgggcctgctacagagacatgagcagcttccctgagaccaaggccgagaagtatgtgaacaaggccaagggcaagaagttcctgcagtacaaccggctgcagctgagccgcatctaccccaagggccagaggctggacagcagcaactatgaccccctgcccatgtggatctgtggcagccagctggtggccctgaacttccagaccccagacaagcccatgcagatgaaccaggccctcttcatgacaggccgccactgcggctacgtgctgcagcccagcaccatgagagatgaggcctttgacccctttgacaagagcagcctgcggggcctggagccctgtgccatcagcattgaggtgctgggcgcccggcacctgcccaagaatggccggggcatcgtgtgcccctttgtggagattgaggtggccggggctgaatatgacagcaccaagcagaagacagaatttgtggtggacaatggcctgaaccctgtgtggccagccaagcccttccacttccagatcagcaaccctgagtttgccttcctgcgctttgtggtgtatgaggaggacatgttcagtgaccagaacttcctggcccaggccaccttccctgtgaagggcctgaagacaggctacagagctgtgcccctgaagaacaactacagcgaggacctggagctggccagcctgctgatcaagattgacatcttccctgccaagcaggagaatggagacctgagccccttcagcggcaccagcctgcgggagcggggcagtgatgccagcggccagctgttccacggccgggcccgggagggcagctttgagagccgctaccagcagccctttgaggacttccgcatcagccaggagcacctggccgaccactttgacagccgggagcggcgggcccccaggaggaccagggtgaatggagacaaccggctgtag

SEQ ID NO: 21142 - DNA, 3873 bp, synthetic construct
  misc_feature 1..3873: note = Description of Artificial Sequence: Synthetic coding sequence
  source 1..3873: mol_type = other DNA
atggccggggccgccagcccctgtgccaacggctgcggccctggggcccccagtgatgctgaggtgctgcacctgtgccgcagcctggaggtgggcaccgtgatgaccctcttctacagcaagaagagccagaggcctgagaggaagaccttccaggtgaagctggagacccggcagatcacctggagcagaggagctgacaagattgaaggagccatcgacatccgggagatcaaggagatccggcctgggaagaccagccgggactttgaccgctaccaggaggaccctgccttccggccagaccagagccactgctttgtgatcctgtatggcatggagttccggctgaagaccctgagcctgcaggccaccagtgaagatgaggtgaacatgtggatcaagggcctgacctggctgatggaggacaccctgcaggcccccacccccctgcagatcgagcgctggctgaggaagcagttctacagcgtggacaggaacagagaagatcgcatcagcgccaaggacctgaagaacatgctgagccaggtgaactacagagtgcccaacatgaggttcctgcgggagcggctgacagacctggagcagaggtctggggacatcacctacggccagtttgcccagctgtaccgcagcctgatgtacagcgcccagaagaccatggacctgcccttcctggaggccagcaccctgcgggccggggagaggcctgagctgtgccgggtgtccctgcctgagttccagcagttcctgctggactaccagggcgagctgtgggccgtggaccggctgcaggtgcaggagttcatgctgtccttcctgcgggaccccctgcgggagattgaggagccctacttcttcctggatgaatttgtgaccttcctgttcagcaaggagaacagcgtgtggaacagccagctggatgctgtgtgcccagacaccatgaacaaccccctgagccactactggatcagcagcagccacaacacctacctgaccggggaccagttcagcagcgagagcagcctggaggcctatgcccgctgcctgaggatgggctgccgctgcatcgagctggactgctgggatggcccagatggcatgcctgtgatctaccacggccacaccctgaccaccaagatcaagttcagtgatgtgctgcacaccatcaaggagcacgcctttgtggccagcgagtaccctgtgatcctgagcattgaggaccactgcagcatcgcccagcagaggaacatggcccagtacttcaagaaggtgctgggggacaccctgctgaccaagcctgtggagatctctgcagatggcctgcccagccccaaccagctgaagaggaagatcctgatcaagcacaagaagctggccgagggcagcgcctatgaggaggtgcccacctccatgatgtacagtgaaaatgacatcagcaacagcatcaagaatggcatcctgtacctggaggaccctgtgaaccacgagtggtacccccactactttgtgctgaccagcagcaagatctactacagcgaggagaccagcagtgaccagggcaatgaagatgaggaggagcccaaggaggtgagcagcagcacagagctgcacagcaatgagaagtggttccacggcaagctgggcgccggcagagatggccgccacatcgccgagcggctgctgacagagtactgcatcgagaccggggccccagatggcagcttcctggtgcgggagagcgagacctttgtgggggactacaccctgtccttctggagaaatggcaaggtgcagcactgccgcatccacagccggcaggatgctggcacccccaagttcttcctgacagacaacctggtgtttgacagcctgtatgacctgatcacccactaccagcaggtgcccctgcgctgcaatgaatttgagatgaggctgtctgagcctgtgccccagaccaatgcccacgagagcaaggagtggtaccacgccagcctgacccgggcccaggccgagcacatgctgatgagggtgcccagagatggagccttcctggtgaggaagagaaatgagcccaacagctatgccatctccttccgggcagagggcaagatcaagcactgccgggtgcagcaggagggccagacagtgatgctgggcaacagcgagtttgacagcctggtggacctgatctcctactatgagaagcaccccctgtacaggaagatgaagctgcgctaccccatcaatgaggaggccctggagaagattggaacagctgagccagactatggagccctgtatgagggcaggaaccctggcttctacgtggaggccaaccccatgcccaccttcaagtgtgctgtgaaggccctgtttgactacaaggcccagagagaagatgagctgaccttcatcaagagcgccatcatccagaatgtggagaagcaggagggcggctggtggaggggggactatggaggcaagaagcagctgtggttccccagcaactacgtggaggagatggtgaaccctgtggccctggagcctgagcgggagcacctggatgagaacagccccctgggggacctgctgcggggcgtgctggatgtgcctgcctgccagatcgccatccggcctgagggcaagaacaaccggctgtttgtgttcagcatctccatggcctctgtggcccactggagcctggatgtggccgctgacagccaggaggagctgcaggactgggtgaagaagatccgggaggtggcccagacagcagatgcccggctgacagagggcaagatcatggagaggaggaagaagatcgccctggagctgtctgagctggtggtgtactgcaggcctgtgccctttgatgaggagaagattggaacagagcgggcctgctacagagacatgagcagcttccctgagaccaaggccgagaagtatgtgaacaaggccaagggcaagaagttcctgcagtacaaccggctgcagctgagccgcatctaccccaagggccagaggctggacagcagcaactatgaccccctgcccatgtggatctgtggcagccagctggtggccctgaacttccagaccccagacaagcccatgcagatgaaccaggccctcttcatgacaggccgccactgcggctacgtgctgcagcccagcaccatgagagatgaggcctttgacccctttgacaagagcagcctgcggggcctggagccctgtgccatcagcattgaggtgctgggcgcccggcacctgcccaagaatggccggggcatcgtgtgcccctttgtggagattgaggtggccggggctgaatatgacagcaccaagcagaagacagaatttgtggtggacaatggcctgaaccctgtgtggccagccaagcccttccacttccagatcagcaaccctgagtttgccttcctgcgctttgtggtgtatgaggaggacatgttcagtgaccagaacttcctggcccaggccaccttccctgtgaagggcctgaagacaggctacagagctgtgcccctgaagaacaactacagcgaggacctggagctggccagcctgctgatcaagattgacatcttccctgccaaggaaaatggagacctgagccccttcagcggcaccagcctgcgggagcggggcagtgatgccagcggccagctgttccacggccgggcccgggagggcagctttgagagccgctaccagcagccctttgaggacttccgcatcagccaggagcacctggccgaccactttgacagccgggagcggcgggcccccaggaggaccagggtgaatggagacaaccggctgtag

SEQ ID NO: 21143 - DNA, 3876 bp, synthetic construct; identical to SEQ ID NO: 21141
  misc_feature 1..3876: note = Description of Artificial Sequence: Synthetic coding sequence
  source 1..3876: mol_type = other DNA

SEQ ID NO: 21144 - DNA, 3798 bp, synthetic construct
  misc_feature 1..3798: note = Description of Artificial Sequence: Synthetic coding sequence
  source 1..3798: mol_type = other DNA
atgagcaccaccgtgaatgtggacagcctggccgagtatgagaagagccagatcaagagggccctggagctgggcaccgtgatgacagtgttctccttcaggaagagcaccccagagaggagaacagtgcaggtgatcatggagacccggcaggtggcctggagcaagacagctgacaagattgagggcttcctggacatcatggagatcaaggagatccggcctgggaagaacagcaaggactttgagcgggccaaggctgtgcggcagaaggaggactgctgcttcaccatcctgtatggcacccagtttgtgctgagcaccctgagcctggccgctgacagcaaagaagatgctgtgaactggctgagcggcctgaagatcctgcaccaggaggccatgaatgccagcacccccaccatcatcgagagctggctgaggaagcagatctacagcgtggaccagaccaggaggaacagcatcagcctgcgggagctgaagaccatcctgcccctcatcaacttcaaggtgtcctctgccaagttcctgaaggacaagtttgtggagatcggggcccacaaggatgagctgagctttgagcagttccacctgttctacaagaagctgatgtttgagcagcagaagagcatcctggatgagttcaagaaggacagcagcgtcttcatcctgggcaacacagacagaccagatgccagcgctgtgtacctgcatgacttccagcgcttcctgatccacgagcagcaggagcactgggcccaggacctgaacaaggtgcgggagaggatgaccaagttcattgatgacaccatgagggagacagctgagcccttcctgtttgtggatgagttcctgacctacctgttcagccgggagaacagcatctgggatgagaagtatgatgctgtggacatgcaggacatgaacaaccccctgagccactactggatcagcagcagccacaacacctacctgaccggggaccagctgcggtctgagagcagccctgaggcctacatccgctgcctgaggatgggctgccgctgcatcgagctggactgctgggatggcccagatggcaagcctgtgatctaccacggctggaccaggaccaccaagatcaagtttgatgatgtggtgcaggccatcaaggaccacgcctttgtgaccagcagcttccctgtgatcctgagcattgaggagcactgcagcgtggagcagcagaggcacatggccaaggccttcaaggaggtgtttggagacctgctgctgaccaagcccacagaggccagcgctgaccagctgcccagccccagccagctgcgggagaagatcatcatcaagcacaagaagctgggccccagaggagatgtggatgtgaacatggaggacaagaaggatgagcacaagcagcagggcgagctgtacatgtgggacagcattgaccagaagtggaccaggcactactgtgccatcgcagatgccaagctgtccttcagtgatgacatcgagcagaccatggaggaggaggtgccccaggacatccccccaacagagctgcactttggagagaagtggttccacaagaaggtggagaagaggaccagcgctgagaagctgctgcaggagtactgcatggagaccggcggcaaggatggcaccttcctggtgcgggagagcgagaccttccccaatgactacaccctgtccttctggaggagcggccgggtgcagcactgccgcatccgcagcaccatggagggcggcaccctgaagtactacctgacagacaacctgaccttcagcagcatctatgccctgatccagcactaccgggagacccacctgcgctgtgccgagtttgagctgcggctgacagatcctgtgcccaaccccaacccccatgagagcaagccctggtactatgacagcctgagcagaggagaggccgaggacatgctgatgaggatccccagagatggagccttcctgatcaggaagcgggagggcagtgacagctatgccatcaccttccgggcccggggcaaggtgaagcactgccgcatcaacagagatggccgccactttgtgctgggcaccagcgcctactttgagagcctggtggagctggtgtcctactatgagaagcacagcctgtacaggaagatgaggctgcgctaccctgtgaccccagagctgctggagcgctacaacatggagcgggacatcaacagcctgtatgatgtgtccaggatgtatgtggaccccagcgagatcaaccccagcatgccccagaggacagtgaaggccctgtatgactacaaggccaagagaagtgatgagctgtccttctgccgcggggccctgatccacaacgtgtccaaggagcccggcggctggtggaagggggactatggcacccgcatccagcagtacttccccagcaactacgtggaggacatcagcacagctgactttgaggagctggagaagcagatcatcgaggacaaccccctgggcagcctgtgccggggcatcctggacctgaacacctacaacgtggtgaaggccccccagggcaagaaccagaagagctttgtgttcatcctggagcccaagcagcagggcgacccccctgtggagtttgccacagacagagtggaggagctgtttgagtggttccagagcatccgggagatcacctggaagattgacaccaaggagaacaacatgaagtactgggagaagaaccagagcatcgccatcgagctgagtgacctggtggtgtactgcaagcccaccagcaagaccaaggacaacctggagaacccagacttccgggagatccgcagctttgtggagaccaaggctgacagcatcatccggcagaagcctgtggacctgctgaagtacaaccagaagggcctgaccagggtgtaccccaagggccagagggtggacagcagcaactatgaccccttccggctgtggctgtgtggcagccagatggtggccctgaacttccagacagctgacaagtacatgcagatgaaccacgccctcttcagcctgaatggaagaacaggctacgtgctgcagcctgagagcatgaggacagagaagtatgaccccatgcctcctgagagccagaggaagatcctgatgaccctgactgtgaaggtgctgggcgcccggcacctgcccaagctgggccgcagcatcgcctgcccctttgtggaggtggagatctgtggggctgaatatgacaacaacaagttcaagaccaccgtggtgaatgacaatggcctgagccccatctgggcccccacccaggagaaggtgacctttgagatctatgaccccaacctggccttcctgcgctttgtggtgtatgaggaggacatgttcagtgaccccaacttcctggcccacgccacctaccccatcaaggctgtgaagagcggcttccgctctgtgcccctgaagaatggctacagtgaagatattgagctggccagcctgctggtgttctgtgagatgaggcctgtgctggagagcgaggaggagctgtacagcagctgccggcagctgcggcggcggcaggaggagctgaacaaccagctgttcctgtatgacacccaccagaacctgagaaatgccaacagagatgccctggtgaaggagttctctgtgaatgaaaaccagctgcagctgtaccaggagaagtgcaacaagaggctgcgggagaagagggtgagcaacagcaagttctacagctag

SEQ ID NO: 21145 - DNA, 2916 bp, synthetic construct
  misc_feature 1..2916: note = Description of Artificial Sequence: Synthetic coding sequence
  source 1..2916: mol_type = other DNA
atgagcctgaagaatgagccccgggtgaacaccagcgccctgcagaagattgctgctgacatgagcaacatcatcgagaacctggacacccgggagctgcactttgaaggagaggaggtggactatgatgtgagccccagcgaccccaagatccaggaggtgtacatccccttcagcgccatctacaacacccagggcttcaaggagcccaacatccagacctacctgagcggctgccccatcaaggcccaggtgctggaggtggagcgcttcaccagcaccaccagggtgcccagcatcaacctgtacaccatcgagctgacccatggagagttcaagtggcaggtgaagaggaagttcaagcacttccaggagttccaccgggagctgctgaagtacaaggccttcatccgcatccccatccccacccggcggcacaccttccggcggcagaatgtgcgggaggagccccgggagatgcccagcctgcccaggagcagcgagaacatgatccgggaggagcagttcctgggccgcaggaagcagctggaggactacctgaccaagatcctgaagatgcccatgtacagaaactaccacgccaccacagagttcctggacatcagccagctgtccttcatccatgacctgggccccaagggcatcgagggcatgatcatgaagaggtctgggggccaccgcatccctggcctgaactgctgcggccagggccgggcctgctaccgctggagcaagcgctggctgattgtgaaggacagcttcctgctgtacatgaagccagattctggggccatcgcctttgtgctgctggtggacaaggagttcaagatcaaggtgggcaagaaggagacagagaccaagtatggcatcagaattgacaacctgagcaggaccctcatcctgaagtgcaacagctacagacatgcccgctggtggggcggggccatcgaggagttcatccagaagcacggcaccaacttcctgaaggaccaccgcttcggcagctatgctgccatccaggagaatgccctggccaagtggtacgtgaatgccaagggctactttgaagatgtggccaatgccatggaggaggccaatgaggagatcttcatcacagactggtggctgagccctgagatcttcctgaagaggcctgtggtggagggcaaccgctggaggctggactgcatcctgaagaggaaggcccagcagggcgtgcgcatcttcatcatgctgtacaaggaggtggagctggccctgggcatcaacagcgagtacaccaagaggaccctgatgaggctgcaccccaacatcaaggtgatgaggcacccagaccacgtgagcagcacagtgtacctgtgggcccaccacgagaagctggtgatcatcgaccagagcgtggcctttgtgggcggcatcgacctggcctacggccgctgggatgacaatgagcaccggctgacagatgtgggctctgtgaagagggtgaccagcggccccagcctgggcagcctgcccccagctgccatggagagcatggagagcctgcggctgaaggacaagaatgaacctgtgcagaacctgcccatccagaagagcattgatgatgtggacagcaagctgaagggcatcggcaagcccaggaagttcagcaagttcagcctgtacaagcagctgcaccgccaccacctgcatgatgctgacagcatcagcagcattgacagcaccagcagctacttcaaccactaccgcagccaccacaacctgatccacggcctgaagccccacttcaagctgttccaccccagcagcgagagcgagcagggcctgacccggccccacgccgacaccggcagcatccgcagcctgcagacaggagtgggggagctgcacggggagacccgcttctggcacggcaaggactactgcaactttgtgttcaaggactgggtgcagctggacaagccctttgctgacttcatcgaccgctacagcacccccaggatgccctggcatgacatcgccagcgctgtgcacggcaaggccgccagagatgtggcccggcacttcatccagcgctggaacttcaccaagatcatgaagagcaagtaccgcagcctgagctaccccttcctgctgcccaagagccagaccacagcccacgagctgcgctaccaggtgcccggctctgtgcacgccaacgtgcagctgctgcggtctgctgctgactggagcgctggcatcaagtaccacgaggagagcatccacgccgcctacgtgcacgtgattgagaacagccgccactacatctacatcgagaaccagttcttcatcagctgtgctgatgacaaggtggtgttcaacaagattggagatgccatcgcccagaggatcctgaaggcccaccgggagaaccagaagtacagagtgtatgtggtgatccccctgctgcccggctttgaaggagacatcagcactggaggcggcaatgccctgcaggccatcatgcacttcaactaccgcaccatgtgccgcggggagaacagcatcctgggccagctgaaggccgagctgggcaaccagtggatcaactacatctccttctgtggcctgcggacccacgccgagctggagggcaacctggtgacagagctgatctacgtgcacagcaagctgctgattgctgatgacaacacagtcatcatcggcagcgccaacatcaatgaccgctccatgctgggcaagagggacagcgagatggccgtcatcgtgcaggacacagagaccgtgcccagcgtgatggatggcaaggagtaccaggccggccgctttgcccggggcctgcggctgcagtgcttccgcagcaagatgaccccaggagtggaggacccctag

SEQ ID NO: 21146 - DNA, 1794 bp, synthetic construct
  misc_feature 1..1794: note = Description of Artificial Sequence: Synthetic coding sequence
  source 1..1794: mol_type = other DNA
atgagcctgaagaatgagccccgggtgaacaccagcgccctgcagaagattgctgctgacatgagcaacatcatcgagaacctggacacccgggagctgcactttgaaggagaggaggtggactatgatgtgagccccagcgaccccaagatccaggaggtgtacatccccttcagcgccatctacaacacccagggcttcaaggagcccaacatccagacctacctgagcggctgccccatcaaggcccaggtgctggaggtggagcgcttcaccagcaccaccagggtgcccagcatcaacctgtacaccatcgagctgacccatggagagttcaagtggcaggtgaagaggaagttcaagcacttccaggagttccaccgggagctgctgaagtacaaggccttcatccgcatccccatccccacccggcggcacaccttccggcggcagaatgtgcgggaggagccccgggagatgcccagcctgcccaggagcagcgagaacatgatccgggaggagcagttcctgggccgcaggaagcagctggaggactacctgaccaagatcctgaagatgcccatgtacagaaactaccacgccaccacagagttcctggacatcagccagctgtccttcatccatgacctgggccccaagggcatcgagggcatgatcatgaagaggtctgggggccaccgcatccctggcctgaactgctgcggccagggccgggcctgctaccgctggagcaagcgctggctgattgtgaaggacagcttcctgctgtacatgaagccagattctggggccatcgcctttgtgctgctggtggacaaggagttcaagatcaaggtgggcaagaaggagacagagaccaagtatggcatcagaattgacaacctgagcaggaccctcatcctgaagtgcaacagctacagacatgcccgctggtggggcggggccatcgaggagttcatccagaagcacggcaccaacttcctgaaggaccaccgcttcggcagctatgctgccatccaggagaatgccctggccaagtggtacgtgaatgccaagggctactttgaagatgtggccaatgccatggaggaggccaatgaggagatcttcatcacagactggtggctgagccctgagatcttcctgaagaggcctgtggtggagggcaaccgctggaggctggactgcatcctgaagaggaaggcccagcagggcgtgcgcatcttcatcatgctgtacaaggaggtggagctggccctgggcatcaacagcgagtacaccaagaggaccctgatgaggctgcaccccaacatcaaggtgatgaggcacccagaccacgtgagcagcacagtgtacctgtgggcccaccacgagaagctggtgatcatcgaccagagcgtggcctttgtgggcggcatcgacctggcctacggccgctgggatgacaatgagcaccggctgacagatgtgggctctgtgaagagggtgaccagcggccccagcctgggcagcctgcccatccctggccccagcgtggtgtaccggcaggtgtgggagagctgcatgggcaagccagacagcggcatggagaggaccacagccatcagcagcagcaagacaggcttcaacctgatcaacctgctgctgatcagcctgaccggcacccccaggcctggctgccccggcatgaccctgcccctgcagagcactggaagaaggctggtgatgtggcacgtgaccagcagcagcgctggcaccagccagaagctgtag

SEQ ID NO: 21147 - DNA, 3225 bp, synthetic construct
  misc_feature 1..3225: note = Description of Artificial Sequence: Synthetic coding sequence
  source 1..3225: mol_type = other DNA
atgagcctgaagaatgagccccgggtgaacaccagcgccctgcagaagattgctgctgacatgagcaacatcatcgagaacctggacacccgggagctgcactttgaaggagaggaggtggactatgatgtgagccccagcgaccccaagatccaggaggtgtacatccccttcagcgccatctacaacacccagggcttcaaggagcccaacatccagacctacctgagcggctgccccatcaaggcccaggtgctggaggtggagcgcttcaccagcaccaccagggtgcccagcatcaacctgtacaccatcgagctgacccatggagagttcaagtggcaggtgaagaggaagttcaagcacttccaggagttccaccgggagctgctgaagtacaaggccttcatccgcatccccatccccacccggcggcacaccttccggcggcagaatgtgcgggaggagccccgggagatgcccagcctgcccaggagcagcgagaacatgatccgggaggagcagttcctgggccgcaggaagcagctggaggactacctgaccaagatcctgaagatgcccatgtacagaaactaccacgccaccacagagttcctggacatcagccagctgtccttcatccatgacctgggccccaagggcatcgagggcatgatcatgaagaggtctgggggccaccgcatccctggcctgaactgctgcggccagggccgggcctgctaccgctggagcaagcgctggctgattgtgaaggacagcttcctgctgtacatgaagccagattctggggccatcgcctttgtgctgctggtggacaaggagttcaagatcaaggtgggcaagaaggagacagagaccaagtatggcatcagaattgacaacctgagcaggaccctcatcctgaagtgcaacagctacagacatgcccgctggtggggcggggccatcgaggagttcatccagaagcacggcaccaacttcctgaaggaccaccgcttcggcagctatgctgccatccaggagaatgccctggccaagtggtacgtgaatgccaagggctactttgaagatgtggccaatgccatggaggaggccaatgaggagatcttcatcacagactggtggctgagccctgagatcttcctgaagaggcctgtggtggagggcaaccgctggaggctggactgcatcctgaagaggaaggcccagcagggcgtgcgcatcttcatcatgctgtacaaggaggtggagctggccctgggcatcaacagcgagtacaccaagaggaccctgatgaggctgcaccccaacatcaaggtgatgaggcacccagaccacgtgagcagcacagtgtacctgtgggcccaccacgagaagctggtgatcatcgaccagagcgtggcctttgtgggcggcatcgacctggcctacggccgctgggatgacaatgagcaccggctgacagatgtgggctctgtgaagagggtgaccagcggccccagcctgggcagcctgcccccagctgccatggagagcatggagagcctgcggctgaaggacaagaatgaacctgtgcagaacctgcccatccagaagagcattgatgatgtggacagcaagctgaagggcatcggcaagcccaggaagttcagcaagttcagcctgtacaagcagctgcaccgccaccacctgcatgatgctgacagcatcagcagcattgacagcaccagcagctacttcaaccactaccgcagccaccacaacctgatccacggcctgaagccccacttcaagctgttccaccccagcagcgagagcgagcagggcctgacccggccccacgccgacaccggcagcatccgcagcctgcagacaggagtgggggagctgcacggggagacccgcttctggcacggcaaggactactgcaactttgtgttcaaggactgggtgcagctggacaagccctttgctgacttcatcgaccgctacagcacccccaggatgccctggcatgacatcgccagcgctgtgcacggcaaggccgccagagatgtggcccggcacttcatccagcgctggaacttcaccaagatcatgaagagcaagtaccgcagcctgagctaccccttcctgctgcccaagagccagaccacagcccacgagctgcgctaccaggtgcccggctctgtgcacgccaacgtgcagctgctgcggtctgctgctgactggagcgctggcatcaagtaccacgaggagagcatccacgccgcctacgtgcacgtgattgagaacagccgccactacatctacatcgagaaccagttcttcatcagctgtgctgatgacaaggtggtgttcaacaagattggagatgccatcgcccagaggatcctgaaggcccaccgggagaaccagaagtacagagtgtatgtggtgatccccctgctgcccggctttgaaggagacatcagcactggaggcggcaatgccctgcaggccatcatgcacttcaactaccgcaccatgtgccgcggggagaacagcatcctgggccagctgaaggccgagctgggcaaccagtggatcaactacatctccttctgtggcctgcggacccacgccgagctggagggcaacctggtgacagagctgatctacgtgcacagcaagctgctgattgctgatgacaacacagtcatcatcggcagcgccaacatcaatgaccgctccatgctgggcaagagggacagcgagatggccgtcatcgtgcaggacacagagaccgtgcccagcgtgatggatggcaaggagtaccaggccggccgctttgcccggggcctgcggctgcagtgcttccgggtggtgctgggctacctggatgaccccagcgaggacatccaggaccctgtgtctgacaagttcttcaaggaggtgtgggtgtccacagctgccagaaatgccaccatctatgacaaggtgttccgctgcctgcccaatgatgaggtgcacaacctgatccagctgcgggacttcatcaacaagcctgtgctggccaaggaggaccccatccgggcagaggaggagctgaagaagatccggggcttcctggtgcagttccccttctacttcctgtctgaggagagcctgctgcccagcgtgggcaccaaggaggccatcgtgcccatggaggtgtggacctag

SEQ ID NO: 21148 - DNA, 3111 bp, synthetic construct
  misc_feature 1..3111: note = Description of Artificial Sequence: Synthetic coding sequence
  source 1..3111: mol_type = other DNA
atgagcctgaagaatgagccccgggtgaacaccagcgccctgcagaagattgctgctgacatgagcaacatcatcgagaacctggacacccgggagctgcactttgaaggagaggaggtggactatgatgtgagccccagcgaccccaagatccaggaggtgtacatccccttcagcgccatctacaacacccagggcttcaaggagcccaacatccagacctacctgagcggctgccccatcaaggcccaggtgctggaggtggagcgcttcaccagcaccaccagggtgcccagcatcaacctgtacaccatcgagctgacccatggagagttcaagtggcaggtgaagaggaagttcaagcacttccaggagttccaccgggagctgctgaagtacaaggccttcatccgcatccccatccccacccggcggcacaccttccggcggcagaatgtgcgggaggagccccgggagatgcccagcctgcccaggagcagcgagaacatgatccgggaggagcagttcctgggccgcaggaagcagctggaggactacctgaccaagatcctgaagatgcccatgtacagaaactaccacgccaccacagagttcctggacatcagccagctgtccttcatccatgacctgggccccaagggcatcgagggcatgatcatgaagaggtctgggggccaccgcatccctggcctgaactgctgcggccagggccgggcctgctaccgctggagcaagcgctggctgattgtgaaggacagcttcctgctgtacatgaagccagattctggggccatcgcctttgtgctgctggtggacaaggagttcaagatcaaggtgggcaagaaggagacagagaccaagtatggcatcagaattgacaacctgagcaggaccctcatcctgaagtgcaacagctacagacatgcccgctggtggggcggggccatcgaggagttcatccagaagcacggcaccaacttcctgaaggaccaccgcttcggcagctatgctgccatccaggagaatgccctggccaagtggtacgtgaatgccaagggctactttgaagatgtggccaatgccatggaggaggccaatgaggagatcttcatcacagactggtggctgagccctgagatcttcctgaagaggcctgtggtggagggcaaccgctggaggctggactgcatcctgaagaggaaggcccagcagggcgtgcgcatcttcatcatgctgtacaaggaggtggagctggccctgggcatcaacagcgagtacaccaagaggaccctgatgaggctgcaccccaacatcaaggtgatgaggcacccagaccacgtgagcagcacagtgtacctgtgggcccaccacgagaagctggtgatcatcgaccagagcgtggcctttgtgggcggcatcgacctggcctacggccgctgggatgacaatgagcaccggctgacagatgtgggctctgtgaagagggtgaccagcggccccagcctgggcagcctgcccccagctgccatggagagcatggagagcctgcggctgaaggacaagaatgaacctgtgcagaacctgcccatccagaagagcattgatgatgtggacagcaagctgaagggcatcggcaagcccaggaagttcagcaagttcagcctgtacaagcagctgcaccgccaccacctgcatgatgctgacagcatcagcagcattgacagcaccagcaacacaggcagcatccgcagcctgcagacaggagtgggggagctgcacggggagacccgcttctggcacggcaaggactactgcaactttgtgttcaaggactgggtgcagctggacaagccctttgctgacttcatcgaccgctacagcacccccaggatgccctggcatgacatcgccagcgctgtgcacggcaaggccgccagagatgtggcccggcacttcatccagcgctggaacttcaccaagatcatgaagagcaagtaccgcagcctgagctaccccttcctgctgcccaagagccagaccacagcccacgagctgcgctaccaggtgcccggctctgtgcacgccaacgtgcagctgctgcggtctgctgctgactggagcgctggcatcaagtaccacgaggagagcatccacgccgcctacgtgcacgtgattgagaacagccgccactacatctacatcgagaaccagttcttcatcagctgtgctgatgacaaggtggtgttcaacaagattggagatgccatcgcccagaggatcctgaaggcccaccgggagaaccagaagtacagagtgtatgtggtgatccccctgctgcccggctttgaaggagacatcagcactggaggcggcaatgccctgcaggccatcatgcacttcaactaccgcaccatgtgccgcggggagaacagcatcctgggccagctgaaggccgagctgggcaaccagtggatcaactacatctccttctgtggcctgcggacccacgccgagctggagggcaacctggtgacagagctgatctacgtgcacagcaagctgctgattgctgatgacaacacagtcatcatcggcagcgccaacatcaatgaccgctccatgctgggcaagagggacagcgagatggccgtcatcgtgcaggacacagagaccgtgcccagcgtgatggatggcaaggagtaccaggccggccgctttgcccggggcctgcggctgcagtgcttccgggtggtgctgggctacctggatgaccccagcgaggacatccaggaccctgtgtctgacaagttcttcaaggaggtgtgggtgtccacagctgccagaaatgccaccatctatgacaaggtgttccgctgcctgcccaatgatgaggtgcacaacctgatccagctgcgggacttcatcaacaagcctgtgctggccaaggaggaccccatccgggcagaggaggagctgaagaagatccggggcttcctggtgcagttccccttctacttcctgtctgaggagagcctgctgcccagcgtgggcaccaaggaggccatcgtgcccatggaggtgtggacctag

SEQ ID NO: 21149 - DNA, 429 bp, synthetic construct
  misc_feature 1..429: note = Description of Artificial Sequence: Synthetic coding sequence
  source 1..429: mol_type = other DNA
atgagcctgaagaatgagccccgggtgaacaccagcgccctgcagaagattgctgctgacatgagcaacatcatcgagaacctggacacccgggagctgcactttgaaggagaggaggtggactatgatgtgagccccagcgaccccaagatccaggaggtgtacatccccttcagcgccatctacaacacccagggcttcaaggagcccaacatccagacctacctgagcggctgccccatcaaggcccaggtgctggaggtggagcgcttcaccagcaccaccagggtgcccagcatcaacctgtacaccatcgagctgacccatggagagttcaagtggcaggtgaagaggaagttcaagcacttccaggagttccaccgggagctgctgaagtacaaggccttcatccgcatccccatcccctag

SEQ ID NO: 21150 - DNA, 2580 bp, synthetic construct
  misc_feature 1..2580: note = Description of Artificial Sequence: Synthetic coding sequence
  source 1..2580: mol_type = other DNA
atgtacagcggggccggccctgccctggcccccccagcccctcctccacccatccagggctacgccttcaagcccccacccaggccagactttggcaccagcggccgcaccatcaagctgcaggccaacttctttgagatggacatccccaagattgacatctaccactatgagctggacatcaagccagagaagtgcccccggcgggtgaaccgggagatcgtggagcacatggtgcagcacttcaagacccagatctttggagacaggaagcctgtgtttgatggcaggaagaacctgtacacagccatgcccctgcccatcggccgggacaaggtggagctggaggtgaccctgcccggggagggcaaggaccgcatcttcaaggtgtccatcaagtgggtgtcctgtgtgtccctgcaggccctgcatgatgccctgagcggccgcctgcccagcgtgccctttgagaccatccaggccctggatgtggtgatgaggcacctgcccagcatgagatacacccctgtgggccgctccttcttcaccgccagcgagggctgcagcaaccccctgggcggcggccgggaggtgtggtttggcttccaccagagcgtgcggcccagcctgtggaagatgatgctgaacattgatgtgtctgccacagccttctacaaggcccagcctgtgattgaatttgtgtgtgaggtgctggacttcaagagcattgaggagcagcagaagcccctgacagacagccagagggtgaagttcaccaaggagatcaagggcctgaaggtggagatcacccactgcggccagatgaagaggaagtacagagtgtgcaatgtgacccggcggcctgccagccaccagaccttccccctgcagcaggagagcggccagacagtggagtgcaccgtggcccagtacttcaaggacagacacaagctggtgctgcgctacccccacctgccctgcctgcaggtgggccaggagcagaagcacacctacctgcccctggaggtgtgcaacatcgtggccggccagcgctgcatcaagaagctgacagacaaccagaccagcaccatgatccgggccacagcccggagcgccccagaccggcaggaggagatcagcaagctgatgaggtctgccagcttcaacacagacccctacgtgcgggagtttggcatcatggtgaaggatgagatgacagatgtgacaggccgggtgctgcagcccccatccatcctgtatggaggaagaaacaaggccatcgccacccctgtgcagggcgtgtgggacatgaggaacaagcagttccacacaggcatcgagatcaaggtgtgggccatcgcctgctttgccccccagaggcagtgcacagaggtgcacctgaagagcttcacagagcagctgaggaagatcagcagagatgctggcatgcccatccagggccagccctgcttctgcaagtatgcccagggcgctgacagcgtggagcccatgttccgccacctgaagaacacctacgccggcctgcagctggtggtggtgatcctgcccgggaagacccctgtgtatgcagaggtgaagagggtgggggacacagtgctgggcatggccacccagtgtgtgcagatgaagaatgtgcagaggaccaccccccagaccctgagcaacctgtgcctgaagatcaacgtgaagctgggcggcgtgaacaacatcctgctgccccagggccggccccctgtgttccagcagcccgtcatcttcctgggcgcagatgtgacccaccccccagctggagatggcaagaagcccagcattgctgctgtggtgggctccatggatgcccaccccaaccgctactgtgccaccgtgcgggtgcagcagcaccggcaggagatcatccaggacctggccgccatggtgcgggagctgctgatccagttctacaagagcacccgcttcaagcccacccgcatcatcttctacagagatggagtgtctgagggccagttccagcaggtgctgcaccacgagctgctggccatccgggaggcctgcatcaagctggagaaggactaccagcccggcatcaccttcatcgtggtgcagaagaggcaccacaccaggctcttctgcacagacaagaatgaaagagtgggcaagagcggcaacatcccagctggcaccaccgtggacaccaagatcacccaccccacagaatttgacttctacctgtgcagccacgccggcatccagggcaccagccggcccagccactaccacgtgctgtgggatgacaaccgcttcagcagtgatgagctgcagatcctgacctaccagctgtgccacacctacgtgcgctgcaccaggtctgtgtccatcccagccccagcctactatgcccacctggtggccttccgggcccgctaccacctggtggacaaggagcatgacagcgctgagggcagccacaccagcggccagagcaatggccgggaccaccaggccctggccaaggctgtgcaggtgcaccaggacaccctgcggaccatgtactttgcctag

SEQ ID NO: 21151 - DNA, 1926 bp, synthetic construct
  misc_feature 1..1926: note = Description of Artificial Sequence: Synthetic coding sequence
  source 1..1926: mol_type = other DNA
atgctgtctggaattgaagctgctgctggggagtatgaagattctgagctgcgctgccgggtggccgtggaggagctgagccctgggggccagccccggcggcggcaggccctgaggacagctgagctgagcctgggcagaaatgaaagaagagagctgatgctgcggctgcaggcccctggccctgctggccggccccgctgcttccccctgcgggccgcccggctcttcaccaggtttgctgaggccggccgcagcaccctgcggctgcctgcccatgacacccctggggccggggctgtgcagctgctgctgagtgactgccccccagaccggctgcggcgcttcctgcggaccctgcggctgaagctggccgccgcccctggccctggccctgccagcgcccgggcccagctgctgggcccccggccccgggactttgtgaccatcagccctgtgcagcctgaggagcggcggctgcgggccgccaccagggtgcctgacaccaccctggtgaagaggcctgtggagccccaggccggggctgagcccagcacagaggccccccgctggcccctgcctgtgaagaggctgagcctgcccagcaccaagccccagctgtctgaggagcaggccgctgtgctgcgggctgtgctgaagggccagagcatcttcttcaccggcagcgctggcaccgggaagagctacctgctgaagaggatcctgggcagcctgccccccaccggcaccgtggccacagccagcactggagtggccgcctgccacatcggcggcaccaccctgcacgcctttgctggcatcggcagcggccaggcccccctggcccagtgtgtggccctggcccagaggcctggggtgcggcagggctggctgaactgccagaggctggtgattgatgagatctccatggtggaggccgacctgtttgacaagctggaggccgtggcccgggctgtgcggcagcagaacaagccctttggaggcatccagctgatcatctgtggggacttcctgcagctgccccctgtgaccaagggcagccagcccccacgcttctgcttccagagcaagtcctggaagagatgtgtgcctgtgaccctggagctgaccaaggtgtggaggcaggccgaccagaccttcatcagcctgctgcaggccgtgcggctgggccgctgcagtgatgaggtgacccggcagctgcaggccacagccagccacaaggtgggcagagatggcatcgtggccacccggctgtgcacccaccaggatgatgtggccctgaccaatgaaagaaggctgcaggagctgcccgggaaggtgcacagatttgaggccatggacagcaaccctgagctggccagcaccctggatgcccagtgccctgtgtcccagctgctgcagctgaagctgggcgcccaggtgatgctggtgaagaacctgtctgtgtcccggggcctggtgaatggagcccggggcgtggtggtgggctttgaggccgagggccggggcctgccccaggtgcgcttcctgtgtggggtgacagaggtgattcatgctgaccgctggacagtgcaggccaccggcggccagctgctgagccggcagcagctgcccctgcagctggcctgggccatgagcatccacaagagccagggcatgaccctggactgtgtggagatcagcctgggccgggtgtttgccagcggccaggcctacgtggccctgagccgggcccggagcctgcagggcctgcgggtgctggactttgaccccatggctgtgcgctgtgacccccgggtgctgcacttctacgccaccctgcggcggggccgcagcctgagcctggagagcccagatgatgatgaggccgccagtgaccaggagaacatggaccccatcctgtag

SEQ ID NO: 21152 - DNA, 2124 bp, synthetic construct
  misc_feature 1..2124: note = Description of Artificial Sequence: Synthetic coding sequence
  source 1..2124: mol_type = other DNA
atgctgtctggaattgaagctgctgctggggagtatgaagattctgagctgcgctgccgggtggccgtggaggagctgagccctgggggccagccccggcggcggcaggccctgaggacagctgagctgagcctgggcagaaatgaaagaagagagctgatgctgcggctgcaggcccctggccctgctggccggccccgctgcttccccctgcgggccgcccggctcttcaccaggtttgctgaggccggccgcagcaccctgcggctgcctgcccatgacacccctggggccggggctgtgcagctgctgctgagtgactgccccccagaccggctgcggcgcttcctgcggaccctgcggctgaagctggccgccgcccctggccctggccctgccagcgcccgggcccagctgctgggcccccggccccgggactttgtgaccatcagccctgtgcagcctgaggagcggcggctgcgggccgccaccagggtgcctgacaccaccctggtgaagaggcctgtggagccccaggccggggctgagcccagcacagaggccccccgctggcccctgcctgtgaagaggctgagcctgcccagcaccaagccccagctgtctgaggagcaggccgctgtgctgcgggctgtgctgaagggccagagcatcttcttcaccggcagcgctggcaccgggaagagctacctgctgaagaggatcctgggcagcctgccccccaccggcaccgtggccacagccagcactggagtggccgcctgccacatcggcggcaccaccctgcacgcctttgctggcatcggcagcggccaggcccccctggcccagtgtgtggccctggcccagaggcctggggtgcggcagggctggctgaactgccagaggctggtgattgatgagatctccatggtggaggccgacctgtttgacaagctggaggccgtggcccgggctgtgcggcagcagaacaagccctttggaggcatccagctgatcatctgtggggacttcctgcagctgccccctgtgaccaagggcagccagcccccacgcttctgcttccagagcaagtcctggaagagatgtgtgcctgtgaccctggagctgaccaaggtgtggaggcaggccgaccagaccttcatcagcctgctgcaggccgtgcggctgggccgctgcagtgatgaggtgacccggcagctgcaggccacagccagccacaaggtgggcagagatggcatcgtggccacccggctgtgcacccaccaggatgatgtggccctgaccaatgaaagaaggctgcaggagctgcccgggaaggtgcacagatttgaggccatggacagcaaccctgagctggccagcaccctggatgcccagtgccctgtgtcccagctgctgcagctgaagctgggcgcccaggtgatgctggtgaagaacctgtctgtgtcccggggcctggtgaatggagcccggggcgtggtggtgggctttgaggccgagggccggggcctgccccaggtgcgcttcctgtgtggggtgacagaggtgattcatgctgaccgctggacagtgcaggccaccggcggccagctgctgagccggcagcagctgcccctgcagctggcctgggccatgagcatccacaagagccagggcatgaccctggactgtgtggagatcagcctgggccgggtgtttgccagcggccaggcctacgtggccctgagccgggcccggagcctgcagggcctgcgggtgctggactttgaccccatggctgtgcgctgtgacccccgggtgctgcacttctacgccaccctgcggcggggccgcagcctgagcctggccgctgagggcagaggaaatgaagatcgctgcagcggcagcagcatccgggccctgggcggggactggtggggcctgcggctgggcgccgccagcaagcagaggacagagctgcgctgtgtgtccacagcccggcccagcctggcccagcccaggaccaacaccctgcagagcctgaccaaggagcacaagctgcagaatgtgcacccctacttcaagctgctcttccagggcatcaacagcgtgtggggccactag

SEQ ID NO: 21153 - DNA, 1926 bp, synthetic construct; identical to SEQ ID NO: 21151
  misc_feature 1..1926: note = Description of Artificial Sequence: Synthetic coding sequence
  source 1..1926: mol_type = other DNA

SEQ ID NO: 21154 - DNA, 801 bp, synthetic construct
  misc_feature 1..801: note = Description of Artificial Sequence: Synthetic coding sequence
  source 1..801: mol_type = other DNA
atgctgtctggaattgaagctgctgctggggagtatgaagattctgagctgcgctgccgggtggccgtggaggagctgagccctgggggccagccccggcggcggcaggccctgaggacagctgagctgagcctgggcagaaatgaaagaagagagctgatgctgcggctgcaggcccctggccctgctggccggccccgctgcttccccctgcgggccgcccggctcttcaccaggtttgctgaggccggccgcagcaccctgcggctgcctgcccatgacacccctggggccggggctgtgcagctgctgctgagtgactgccccccagaccggctgcggcgcttcctgcggaccctgcggctgaagctggccgccgcccctggccctggccctgccagcgcccgggcccagctgctgggcccccggccccgggactttgtgaccatcagccctgtgcagcctgaggagcggcggctgcgggccgccaccagggtgcctgacaccaccctggtgaagaggcctgtggagccccaggccggggctgagcccagcacagaggccccccgctggcccctgcctgtgaagaggctgagcctgcccagcaccaagccccagctgtctgaggagcaggccgctgtgctgcgggctgtgctgaagggccagagcatcttcttcaccggcagcgctggcagcggcggccgggaggaggtgggcggccagtggtggggcggcatcgaggagcagggcgacctgagcaactttgcccctgtgcaggagcagggcagccacatctgctag

SEQ ID NO: 21155 - DNA, 987 bp, synthetic construct
  misc_feature 1..987: note = Description of Artificial Sequence: Synthetic coding sequence
  source 1..987: mol_type = other DNA
atgtccatgctggccgagaggaggaggaagcagaagtgggccgtggacccccagaacacagcctggagcaatgatgacagcaagtttggccagaggatgctggagaagatgggctggagcaagggcaagggcctgggcgcccaggagcagggcgccacagaccacatcaaggtgcaggtgaagaacaaccacctgggcctgggcgccaccatcaacaatgaagacaactggatcgcccaccaggatgacttcaaccagctgctggccgagctgaacacctgccacggccaggagaccacagacagcagtgacaagaaggagaagaagagcttcagcctggaggagaagagcaagatcagcaagaacagagtgcactacatgaagttcaccaagggcaaggacctgagcagccgcagcaagacagacctggactgcatctttgggaagaggcagagcaagaagaccccagaaggagatgccagccccagcaccccagaagaaaatgagaccaccaccaccagcgccttcaccatccaggagtactttgccaagaggatggccgccctgaagaacaagccccaggtgcctgtgcccggcagtgacatcagcgagacccaggtggagaggaagaggggcaagaagaggaacaaggaggccaccgggaaggatgtggagagctacctgcagcccaaggccaagaggcacacagagggcaagccagagagagctgaggcccaggagcgggtggccaagaagaagagcgccccagctgaggagcagctgcggggcccctgctgggaccagagcagcaaggccagcgcccaggatgctggggaccacgtgcagcccccagagggccgggacttcaccctgaagcccaagaagaggcggggcaagaagaagctgcagaagcctgtggagattgctgaagatgccaccctggaggagaccctggtgaagaagaagaagaagaaggacagcaagtag

SEQ ID NO: 21156 - DNA, 519 bp, synthetic construct
  misc_feature 1..519: note = Description of Artificial Sequence: Synthetic coding sequence
  source 1..519: mol_type = other DNA
atgctggccgagaggaggaggaagcagaagtgggccgtggacccccagaacacagcctggagcaatgatgacagcaagtttggccagaggatgctggagaagatgggctggagcaagggcaagggcctgggcgcccaggagcagggcgccacagaccacatcaaggtgcaggtgaagaacaaccacctgggcctgggcgccaccatcaacaatgaagacaactggatcgcccaccaggatgacttcaaccagctgctggccgagctgaacacctgccacggccaggagaccacagacagcagtgacaagaaggagaagaagagcttcagcctggaggagaagagcaagatcagcaagaacagagtgcactacatgaagttcaccaagggccgctgccagagcctgcacagcagaggagagagaaatcatgacaaccagaggctgcaccaccctggggtgctgtgccaggctgatggcagcacagaggagcaggcccctggcagcagcagccgggtgtag

SEQ ID NO: 21157 - DNA, 525 bp, synthetic construct
  misc_feature 1..525: note = Description of Artificial Sequence: Synthetic coding sequence
  source 1..525: mol_type = other DNA
atgtccatgctggccgagaggaggaggaagcagaagtgggccgtggacccccagaacacagcctggagcaatgatgacagcaagtttggccagaggatgctggagaagatgggctggagcaagggcaagggcctgggcgcccaggagcagggcgccacagaccacatcaaggtgcaggtgaagaacaaccacctgggcctgggcgccaccatcaacaatgaagacaactggatcgcccaccaggatgacttcaaccagctgctggccgagctgaacacctgccacggccaggagaccacagacagcagtgacaagaaggagaagaagagcttcagcctggaggagaagagcaagatcagcaagaacagagtgcactacatgaagttcaccaagggccgctgccagagcctgcacagcagaggagagagaaatcatgacaaccagaggctgcaccaccctggggtgctgtgccaggctgatggcagcacagaggagcaggcccctggcagcagcagccgggtgtag

SEQ ID NO: 21158 - DNA, 972 bp, synthetic construct
  misc_feature 1..972: note = Description of Artificial Sequence: Synthetic coding sequence
  source 1..972: mol_type = other DNA
atgcctgtgcacagcagaggagacaagaaggagaccaaccaccatgatgagatggaggtggactatgcagaaaatgaaggcagcagcagtgaagatgaggacacagagagcagctctgtgtctgaagatggagacagcagcgagatggatgatgaggactgtgagaggaggaggatggagtgcctggatgagatgagcaacctggagaagcagttcacagacctgaaggaccagctgtacaaggagcggctgagccaggtggatgccaagctgcaggaggtgattgctgggaaggcccctgagtacctggagcccctggccaccctgcaggagaacatgcagatccgcaccaaggtggccggcatctaccgggagctgtgcctggagagcgtgaagaacaagtatgaatgtgagatccaggccagccggcagcactgtgagagcgagaagctgctgctgtatgacacagtgcagagcgagctggaggagaagatccggcggctggaggaggacagacacagcattgacatcaccagcgagctgtggaatgatgagctgcagagcaggaagaagaggaaggaccccttctccccagacaagaagaagcctgtggtggtgtctggcccctacatcgtgtacatgctgcaggacctggacatcctggaggactggaccaccatcaggaaggccatggccaccctgggcccccaccgggtgaagacagagccccctgtgaagctggagaagcacctgcacagcgcccggtctgaggagggccgcctgtactatgatggagagtggtacatccggggccagaccatctgcatcgacaagaaggatgaatgtcccaccagcgctgtgatcaccaccatcaaccatgatgaggtgtggttcaagaggccagatggcagcaagagcaagctgtacatcagccagctgcagaagggcaagtacagcatcaagcacagctag

SEQ ID NO: 21159 - DNA, 666 bp, synthetic construct
  misc_feature 1..666: note = Description of Artificial Sequence: Synthetic coding sequence
  source 1..666: mol_type = other DNA
atgcctgtgatgaggctcttcccctgcttcctgcagctgctggccggcctggccctgcctgctgtgcccccccagcagtgggccctgtctgctggaaatggcagcagcgaggtggaggtggtgcccttccaggaggtgtggggccgcagctactgccgggccctggagcggctggtggatgtggtgtctgagtaccccagcgaggtggagcacatgttcagccccagctgtgtgtccctgctgcgctgcaccggctgctgcggagatgagaacctgcactgtgtgcctgtggagacagccaacgtgaccatgcagctgctgaagatccgcagcggggaccggcccagctatgtggagctgaccttcagccagcacgtgcgctgtgaatgtcgccacagccctggccggcagagcccagacatgcctggggacttccgggcagatgcccccagcttcctgcccccccggcgcagcctgcccatgctgttcaggatggagtggggctgtgccctgaccggcagccagagcgctgtgtggcccagcagccctgtgcctgaggagatccccaggatgcaccctggaagaaatggcaagaagcagcagaggaagcccctgcgggagaagatgaagccagagcgctgtggagatgctgtgcccaggaggtag

SEQ ID NO: 21160 - DNA, 450 bp, synthetic construct
  misc_feature 1..450: note = Description of Artificial Sequence: Synthetic coding sequence
  source 1..450: mol_type = other DNA
atgcctgtgatgaggctcttcccctgcttcctgcagctgctggccggcctggccctgcctgctgtgcccccccagcagtgggccctgtctgctggaaatggcagcagcgaggtggaggtggtgcccttccaggaggtgtggggccgcagctactgccgggccctggagcggctggtggatgtggtgtctgagtaccccagcgaggtggagcacatgttcagccccagctgtgtgtccctgctgcgctgcaccggctgctgcggagatgagaacctgcactgtgtgcctgtggagacagccaacgtgaccatgcagctgctgaagatccgcagcggggaccggcccagctatgtggagctgaccttcagccagcacgtgcgctgtgaatgtcggcccctgcgggagaagatgaagccagagcgctgtggagatgctgtgcccaggaggtag

SEQ ID NO: 21161 - DNA, 513 bp, synthetic construct
  misc_feature 1..513: note = Description of Artificial Sequence: Synthetic coding sequence
  source 1..513: mol_type = other DNA
atgcctgtgatgaggctcttcccctgcttcctgcagctgctggccggcctggccctgcctgctgtgcccccccagcagtgggccctgtctgctggaaatggcagcagcgaggtggaggtggtgcccttccaggaggtgtggggccgcagctactgccgggccctggagcggctggtggatgtggtgtctgagtaccccagcgaggtggagcacatgttcagccccagctgtgtgtccctgctgcgctgcaccggctgctgcggagatgagaacctgcactgtgtgcctgtggagacagccaacgtgaccatgcagctgctgaagatccgcagcggggaccggcccagctatgtggagctgaccttcagccagcacgtgcgctgtgaatgtcggcccctgcgggagaagatgaagccagagcggcggcggcccaagggccggggcaagagaagaagagagaagcagaggcccacagactgccacctgtgtggagatgctgtgcccaggaggtag

SEQ ID NO: 21162 - DNA, 477 bp, synthetic construct
  misc_feature 1..477: note = Description of Artificial Sequence: Synthetic coding sequence
  source 1..477: mol_type = other DNA
atggccctggaggtgctgatgctgctggccgtgctgatctggacaggagctgagaacctgcacgtgaagatcagctgcagcctggactggctgatggtgtctgtcatccctgtggccgagagcaggaacctgtacatctttgctgatgagctgcacctgggcatgggctgcccagccaaccgcatccacacctacgtgtatgagttcatctacctggtgcgggactgtggcatccgcaccagggtggtgtctgaggagaccctgctcttccagacagagctgtacttcaccccaagaaatattgaccatgacccccaggagatccacctggagtgcagcaccagcaggaagtctgtgtggctgacccctgtgtccacagaaaatgagatcaagctggaccccagccccttcatcgctgacttccagaccacagctgaggagctgggcctgctgagcagcagccccaacctgctgtag

SEQ ID NO: 21163 - DNA, 1188 bp, synthetic construct
  misc_feature 1..1188: note = Description of Artificial Sequence: Synthetic coding sequence
  source 1..1188: mol_type = other DNA
atgagggccctgctggcccggctgctgctgtgtgtgctggtggtgtctgacagcaagggcagcaatgagctgcaccaggtgccctacaagagcaagacctgctatgagggcaatggccacttctaccggggcaaggccagcacagacaccatgggccggccctgcctgccctggaacagcgccaccgtgctgcagcagacctaccacgcccacagaagtgatgccctgcagctgggcctgggcaagcacaactactgcagaaatccagacaacagaagaagaccctggtgctacgtgcaggtgggcctgaagctgctggtgcaggagtgcatggtgcatgactgtgctgatggcaagaagcccagcagccccccagaggagctgaagttccagtgtggccagaagaccctgcggccccgcttcaagatcatcggcggggagttcaccaccatcgagaaccagccctggtttgctgccatctaccgccgccaccggggcggctctgtgacctacgtgtgtggcggcagcctcatcagcccctgctgggtgatcagcgccacccactgcttcatcgactaccccaagaaggaggactacatcgtgtacctgggccgcagccggctgaacagcaacacccagggcgagatgaagtttgaggtggagaacctgatcctgcacaaggactacagcgctgacaccctggcccaccacaatgacatcgccctgctgaagatccgcagcaaggagggccgctgtgcccagcccagcaggaccatccagaccatctgcctgcccagcatgtacaatgacccccagtttggcaccagctgtgagatcaccggctttgggaaggagaacagcacagactacctgtacccagagcagctgaagatgacagtggtgaagctgatcagccaccgggagtgccagcagccccactactacggcagcgaggtgaccaccaagatgctgtgtgccgctgacccccagtggaagacagacagctgccagggcgacagcggcggccccctggtgtgcagcctgcagggccgcatgaccctgactggaattgtgtcctggggccggggctgtgccctgaaggacaagccaggagtgtacaccagggtgagccacttcctgccctggatccgcagccacaccaaggaggagaatggcctggccctgtag

SEQ ID NO: 21164 - DNA, 1188 bp, synthetic construct; identical to SEQ ID NO: 21163
  misc_feature 1..1188: note = Description of Artificial Sequence: Synthetic coding sequence
  source 1..1188: mol_type = other DNA

SEQ ID NO: 21165 - DNA, 1296 bp, synthetic construct
  misc_feature 1..1296: note = Description of Artificial Sequence: Synthetic coding sequence
  source 1..1296: mol_type = other DNA
atgagggccctgctggcccggctgctgctgtgtgtgctggtggtgtctgacagcaagggcagcaatgagctgcaccaggtgcccagcaactgtgactgcctgaatggaggcacctgtgtgagcaacaagtacttcagcaacatccactggtgcaactgccccaagaagtttggaggccagcactgtgaaattgacaagagcaagacctgctatgagggcaatggccacttctaccggggcaaggccagcacagacaccatgggccggccctgcctgccctggaacagcgccaccgtgctgcagcagacctaccacgcccacagaagtgatgccctgcagctgggcctgggcaagcacaactactgcagaaatccagacaacagaagaagaccctggtgctacgtgcaggtgggcctgaagctgctggtgcaggagtgcatggtgcatgactgtgctgatggcaagaagcccagcagccccccagaggagctgaagttccagtgtggccagaagaccctgcggccccgcttcaagatcatcggcggggagttcaccaccatcgagaaccagccctggtttgctgccatctaccgccgccaccggggcggctctgtgacctacgtgtgtggcggcagcctcatcagcccctgctgggtgatcagcgccacccactgcttcatcgactaccccaagaaggaggactacatcgtgtacctgggccgcagccggctgaacagcaacacccagggcgagatgaagtttgaggtggagaacctgatcctgcacaaggactacagcgctgacaccctggcccaccacaatgacatcgccctgctgaagatccgcagcaaggagggccgctgtgcccagcccagcaggaccatccagaccatctgcctgcccagcatgtacaatgacccccagtttggcaccagctgtgagatcaccggctttgggaaggagaacagcacagactacctgtacccagagcagctgaagatgacagtggtgaagctgatcagccaccgggagtgccagcagccccactactacggcagcgaggtgaccaccaagatgctgtgtgccgctgacccccagtggaagacagacagctgccagggcgacagcggcggccccctggtgtgcagcctgcagggccgcatgaccctgactggaattgtgtcctggggccggggctgtgccctgaaggacaagccaggagtgtacaccagggtgagccacttcctgccctggatccgcagccacaccaaggaggagaatggcctggccctgtag

SEQ ID NO: 21166 - DNA, 1245 bp, synthetic construct
  misc_feature 1..1245: note = Description of Artificial Sequence: Synthetic coding sequence
  source 1..1245: mol_type = other DNA
atggtgttccacctgcggaccaggtatgagcaggccaactgtgactgcctgaatggaggcacctgtgtgagcaacaagtacttcagcaacatccactggtgcaactgccccaagaagtttggaggccagcactgtgaaattgacaagagcaagacctgctatgagggcaatggccacttctaccggggcaaggccagcacagacaccatgggccggccctgcctgccctggaacagcgccaccgtgctgcagcagacctaccacgcccacagaagtgatgccctgcagctgggcctgggcaagcacaactactgcaggaacccagacaacagaagaagaccctggtgctacgtgcaggtgggcctgaagctgctggtgcaggagtgcatggtgcatgactgtgctgatggcaagaagcccagcagccccccagaggagctgaagttccagtgtggccagaagaccctgcggccccgcttcaagatcattggaggagagttcaccaccatcgagaaccagccctggtttgctgccatctacagaagacacagaggaggctctgtgacctacgtgtgtggcggcagcctcatcagcccctgctgggtgatcagcgccacccactgcttcatcgactaccccaagaaggaggactacatcgtgtacctgggccgcagccggctgaacagcaacacccagggcgagatgaagtttgaggtggagaacctgatcctgcacaaggactacagcgctgacaccctggcccaccacaatgacatcgccctgctgaagatccgcagcaaggagggccgctgtgcccagcccagcaggaccatccagaccatctgcctgcccagcatgtacaatgacccccagtttggcaccagctgtgagatcactggatttgggaaggagaacagcacagactacctgtacccagagcagctgaagatgacagtggtgaagctgatcagccaccgggagtgccagcagccccactactacggcagcgaggtgaccaccaagatgctgtgtgccgctgacccccagtggaagacagacagctgccagggcgacagcggcggccccctggtgtgcagcctgcagggccgcatgaccctgaccggcatcgtgtcctggggccggggctgtgccctgaaggacaagccaggagtgtacaccagggtgagccacttcctgccctggatccgcagccacaccaaggaggagaatggcctggccctgtag

SEQ ID NO: 21167 - DNA, 3984 bp, synthetic construct
  misc_feature 1..3984: note = Description of Artificial Sequence: Synthetic coding sequence
  source 1..3984: mol_type = other DNA
atggaggcccccctgcagacaggcatggtgctgggcgtgatgattggagctggggtggccgtggtggtgacagctgtgctgatcctgctggtggtgcggcggctgcgggtgcccaagaccccagccccagatggcccccgctaccgcttcaggaagagggacaaggtgctcttctacggcaggaagatcatgaggaaggtgtcccagagcaccagcagcctggtggacacctctgtgtctgccaccagccggcccaggatgaggaagaagctgaagatgctgaacatcgccaagaagatcctgcgcatccagaaggagacccccaccctgcagaggaaggagcccccacctgctgtgctggaggccgacctgacagaaggagacctggccaacagccacctgcccagcgaggtgctgtacatgctgaagaatgtgcgggtgctgggccactttgagaagcccctcttcctggagctgtgccgccacatggtgttccagaggctgggccagggcgactatgtgttccggcccggccagccagatgccagcatctacgtggtgcaggacggcctgctggagctgtgcctgcccggcccagatggcaaggaatgtgtggtgaaggaggtggtgcctggggacagcgtgaacagcctgctgagcatcctggatgtgatcaccggccaccagcacccccagaggacagtgtctgcccgggccgcccgggacagcacagtgctgcggctgcctgtggaggccttctctgctgtgttcaccaagtacccagagagcctggtgcgggtggtgcagatcatcatggtgcggctgcagagggtgaccttcctggccctgcacaactacctgggcctgaccaatgaactcttcagccatgagatccagcccctgcggctcttccccagccctggcctgcccaccaggaccagccctgtgcggggcagcaagaggatggtgtccaccagcgccacagatgagccccgggagaccccaggccggcccccagaccccaccggggcccccctgcccggccccaccggggaccctgtgaagcccaccagcctggagaccccatctgcccccctgctgagccgctgtgtgtccatgcctggggacatcagcggcctgcagggcggccccaggagtgactttgacatggcctatgaaagaggccgcatctctgtgtccctgcaggaggaggccagcggcggcagcctggccgccccagcccggacccccacccaggagccccgggagcagcctgctggggcctgtgagtacagctactgtgaagatgagagcgccaccggcggctgccccttcggcccctaccagggccggcagaccagcagcatctttgaagctgccaagcaggagctggccaagctgatgagaattgaggaccccagcctgctgaacagccgggtgctgctgcaccacgccaaggccggcaccatcatcgcccggcagggcgaccaggatgtgtccctgcactttgtgctgtggggctgcctgcacgtgtaccagaggatgattgacaaggccgaggatgtgtgcctgtttgtggcccagcctggagagctggtgggccagctggccgtgctgaccggggagcccctcatcttcaccctgcgggcccagagggactgcaccttcctgcgcatcagcaagagtgacttctatgagatcatgagggcccagcccagcgtggtgctgtctgctgcccacacagtggccgccaggatgagcccctttgtgcggcagatggactttgccatcgactggacagctgtggaggccggccgggccctgtaccggcagggcgacagaagtgactgcacctacatcgtgctgaatggccgcctgcggagcgtcatccagaggggcagcggcaagaaggagctggtgggggagtatggccgcggggacctgattggagtggtggaggccctgacccggcagccccgggccaccaccgtgcatgctgtgcgggacacagagctggccaagctgcctgagggcaccctgggccacatcaagaggcgctacccccaggtggtgaccaggctcatccacctgctgagccagaagatcctgggcaacctgcagcagctgcagggccccttccctgctggcagcggcctgggcgtgcccccccacagcgagctgaccaacccagccagcaacctggccaccgtggccatcctgcctgtgtgtgccgaggtgcccatggtggccttcaccctggagctgcagcacgccctgcaggccatcggccccaccctgctgctgaacagcgacatcatccgggcccggctgggcgccagcgccctggacagcatccaggagttccggctgagcggctggctggcccagcaggaggatgcccacagaattgtgctgtaccagacagatgccagcctgaccccctggacagtgcgctgcctgcggcaggccgactgcatcctgattgtgggcctgggggaccaggagcccaccctgggccagctggagcagatgctggagaacacagctgtgcgggccctgaagcagctggtgctgctgcaccgggaggagggcgccggccccaccaggacagtggagtggctgaacatgaggtcctggtgcagcggccacctgcacctgcgctgcccccggcggctcttcagcagaagaagccctgccaagctgcacgagctgtatgagaaggtgttcagcagaagagctgacagacacagcgacttcagccggctggcccgggtgctgactggaaacaccatcgccctggtgctgggcggcggcggggcccggggctgcagccacatcggcgtgctgaaggccctggaggaggccggcgtgcctgtggacctggtgggcggcaccagcatcggcagcttcatcggggccctgtatgcagaggagaggtctgccagcaggaccaagcagagggcccgggagtgggccaagtccatgacctctgtgctggagcctgtgctggacctgacctaccctgtgacctccatgttcaccggcagcgccttcaacagaagcatccacagggtcttccaggacaagcagatcgaggacctgtggctgccctacttcaacgtgaccacagacatcacagccagcgccatgagggtgcacaaggatggcagcctgtggaggtatgtgcgggcctccatgaccctgagcggctacctgccccccctgtgtgaccccaaggatggccacctgctgatggatggcggctacatcaacaacctgcctgctgacatcgcccgctccatgggcgccaagacagtgattgccattgatgtgggcagccaggatgaaacagacctgagcacctacggggacagcctgagcggctggtggctgctgtggaagaggctgaacccctgggccgacaaggtgaaggtgcctgacatggccgagatccagagccggctggcctacgtgtcctgtgtgcggcagctggaggtggtgaagagcagcagctactgtgagtacctgcggccccccatcgactgcttcaagaccatggactttgggaagtttgaccagatctatgatgtgggctaccagtatggcaaggctgtgtttggaggctggagcagaggaaatgtgattgagaagatgctgacagaccggcgcagcacagacctgaatgaaagcagaagagcagatgtgctggccttccccagcagcggcttcacagacctggccgagatcgtgtccagaattgagccccccaccagctatgtgtctgatggctgtgctgatggagaggagagtgactgcctgacagaatatgaggaggatgctggccctgactgcagcagagatgaaggaggcagccctgagggcgccagccccagcacagccagcgagatggaggaggagaagagcatcctgcggcagaggcgctgcctgccccaggagcccccaggcagcgccacagatgcctag

SEQ ID NO: 21168 - DNA, 846 bp, synthetic construct
  misc_feature 1..846: note = Description of Artificial Sequence: Synthetic coding sequence
  source 1..846: mol_type = other DNA
atgggccacccccccctgctgcccctgctgctgctgctgcacacctgtgtgcctgcctcctggggcctgcgctgcatgcagtgcaagaccaatggagactgccgggtggaggagtgtgccctgggccaggacctgtgcaggaccaccatcgtgcggctgtgggaggagggggaggagctggagctggtggagaagagctgcacccacagcgagaagaccaacagaaccctgagctacagaacaggcctgaagatcaccagcctgacagaggtggtgtgtggcctggacctgtgcaaccagggcaacagcggccgggctgtgacctacagccgcagccgctacctggagtgcatcagctgtggcagcagtgacatgagctgtgagcggggccgccaccagagcctgcagtgccgcagccctgaggagcagtgcctggatgtggtgacccactggatccaggagggggaggagggccggcccaaggatgacagacacctgcggggctgcggctacctgcccggctgccccggcagcaatggcttccacaacaatgacaccttccacttcctgaagtgctgcaacaccaccaagtgcaatgaaggccccatcctggagctggagaacctgccccagaatggccggcagtgctacagctgcaagggcaacagcacccacggctgcagcagcgaggagaccttcctgattgactgccggggccccatgaaccagtgcctggtggccaccggcacccatgagaggagcctgtggggctcctggctgccctgcaagagcaccacagccctgcggcccccctgctgtgaggaggcccaggccacccacgtgtag

SEQ ID NO: 21169 - DNA, 1008 bp, synthetic construct
  misc_feature 1..1008: note = Description of Artificial Sequence: Synthetic coding sequence
  source 1..1008: mol_type = other DNA
atgggccacccccccctgctgcccctgctgctgctgctgcacacctgtgtgcctgcctcctggggcctgcgctgcatgcagtgcaagaccaatggagactgccgggtggaggagtgtgccctgggccaggacctgtgcaggaccaccatcgtgcggctgtgggaggagggggaggagctggagctggtggagaagagctgcacccacagcgagaagaccaacagaaccctgagctacagaacaggcctgaagatcaccagcctgacagaggtggtgtgtggcctggacctgtgcaaccagggcaacagcggccgggctgtgacctacagccgcagccgctacctggagtgcatcagctgtggcagcagtgacatgagctgtgagcggggccgccaccagagcctgcagtgccgcagccctgaggagcagtgcctggatgtggtgacccactggatccaggagggggaggagggccggcccaaggatgacagacacctgcggggctgcggctacctgcccggctgccccggcagcaatggcttccacaacaatgacaccttccacttcctgaagtgctgcaacaccaccaagtgcaatgaaggccccatcctggagctggagaacctgccccagaatggccggcagtgctacagctgcaagggcaacagcacccacggctgcagcagcgaggagaccttcctgattgactgccggggccccatgaaccagtgcctggtggccaccggcacccatgagcccaagaaccagagctacatggtgcggggctgtgccacagcctccatgtgccagcacgcccacctgggagatgccttctccatgaaccacattgatgtgtcctgctgcaccaagagcggctgcaaccacccagacctggatgtgcagtaccgcagcggggccgccccccagcccggccctgcccacctgagcctgaccatcaccctgctgatgacagcccggctgtggggcggcaccctgctgtggacctag

SEQ ID NO: 21170 - DNA, 1038 bp, synthetic construct
  misc_feature 1..1038: note = Description of Artificial Sequence: Synthetic coding sequence
  source 1..1038: mol_type = other DNA
atgagcctgtttggcctgctgctgctgaccagcgccctggccggccagaggcagggcacccaggccgagagcaacctgagcagcaagttccagttcagcagcaacaaggagcagaatggagtgcaggacccccagcacgagcgcatcatcaccgtgtccaccaacggcagcatccacagcccccgcttcccccacacctaccccaggaacacagtgctggtgtggaggctggtggccgtggaggagaatgtgtggatccagctgacctttgatgagcgcttcggcctggaggaccctgaagatgacatctgcaagtatgactttgtggaggtggaggagcccagtgatggcaccatcctgggccgctggtgtggcagcggcaccgtgcctgggaagcagatcagcaagggcaaccagatccgcatccgctttgtgtctgatgagtacttccccagcgagcccggcttctgcatccactacaacatcgtgatgccccagttcacagaggccgtgagccccagcgtgctgcccccatctgccctgcccctggacctgctgaacaatgccatcacagccttcagcaccctggaggacctgatccgctacctggagcctgagcgctggcagctggacctggaggacctgtaccggcccacctggcagctgctgggcaaggcctttgtgtttggaaggaagagccgggtggtggacctgaacctgctgacagaggaggtgcggctgtacagctgcaccccaagaaacttctctgtgtccatccgggaggagctgaagaggacagacaccatcttctggccaggctgcctgctggtgaagagatgtggcggcaactgtgcctgctgcctgcacaactgcaatgaatgccagtgtgtgcccagcaaggtgaccaagaagtaccacgaggtgctgcagctgcggcccaagacaggagtgcggggcctgcacaagagcctgacagatgtggccctggagcaccacgaggagtgtgactgtgtgtgccggggcagcactggaggatag

SEQ ID NO: 21171 - DNA, 549 bp, synthetic construct
  misc_feature 1..549: note = Description of Artificial Sequence: Synthetic coding sequence
  source 1..549: mol_type = other DNA
atgccccagttcacagaagctgtgagccccagcgtgctgccccccagcgccctgcccctggacctgctgaacaatgccatcacagccttcagcaccctggaggacctgatccgctacctggagcctgagcgctggcagctggacctggaggacctgtaccggcccacctggcagctgctgggcaaggcctttgtgtttggaaggaagagccgggtggtggacctgaacctgctgacagaggaggtgcggctgtacagctgcacccccaggaacttctctgtgtccatccgggaggagctgaagaggacagacaccatcttctggccaggctgcctgctggtgaagagatgtggcggcaactgtgcctgctgcctgcacaactgcaatgaatgccagtgtgtgcccagcaaggtgaccaagaagtaccacgaggtgctgcagctgcggcccaagacaggagtgcggggcctgcacaagagcctgacagatgtggccctggagcaccatgaagaatgtgactgtgtgtgccggggcagcactggaggatag

SEQ ID NO: 21172 - DNA, 573 bp, synthetic construct
  misc_feature 1..573: note = Description of Artificial Sequence: Synthetic coding sequence
  source 1..573: mol_type = other DNA
atgatgcagtacacctggctgctgaccaagcagttcacagaagctgtgagccccagcgtgctgccccccagcgccctgcccctggacctgctgaacaatgccatcacagccttcagcaccctggaggacctgatccgctacctggagcctgagcgctggcagctggacctggaggacctgtaccggcccacctggcagctgctgggcaaggcctttgtgtttggaaggaagagccgggtggtggacctgaacctgctgacagaggaggtgcggctgtacagctgcacccccaggaacttctctgtgtccatccgggaggagctgaagaggacagacaccatcttctggccaggctgcctgctggtgaagagatgtggcggcaactgtgcctgctgcctgcacaactgcaatgaatgccagtgtgtgcccagcaaggtgaccaagaagtaccacgaggtgctgcagctgcggcccaagacaggagtgcggggcctgcacaagagcctgacagatgtggccctggagcaccatgaagaatgtgactgtgtgtgccggggcagcactggaggatag

SEQ ID NO: 21173 - DNA, 504 bp, synthetic construct
  misc_feature 1..504: note = Description of Artificial Sequence: Synthetic coding sequence
  source 1..504: mol_type = other DNA
atgagcctgtttggcctgctgctgctgaccagcgccctggccggccagaggcagggcacccaggccgagagcaacctgagcagcaagttccagttcagcagcaacaaggagcagaatggagtgcaggacccccagcacgagcgcatcatcaccgtgtccaccaacggcagcatccacagcccccgcttcccccacacctaccccaggaacacagtgctggtgtggaggctggtggccgtggaggagaatgtgtggatccagctgacctttgatgagcgcttcggcctggaggaccctgaagatgacatctgcaagtatgactttgtggaggtggaggagcccagtgatggcaccatcctgggccgctggtgtggcagcggcaccgtgcctgggaagcagatcagcaagggcaaccagatccgcatccgctttgtgtctgatgagtacttccccagcgagcccagcaacagaggaggcaagatcatccagctgcacaccagctag

SEQ ID NO: 21174 - DNA, 2217 bp, synthetic construct
  misc_feature 1..2217: note = Description of Artificial Sequence: Synthetic coding sequence
  source 1..2217: mol_type = other DNA
atgcagccccgctgggcccagggcgccaccatgtggctgggcgtgctgctgaccctgctgctgtgcagcagcctggagggccaggagaacagcttcaccatcaacagcgtggacatgaagagcctgcctgactggacagtgcagaatggcaagaacctgaccctgcagtgctttgctgatgtgtccaccaccagccacgtgaagccccagcaccagatgctgttctacaaggatgatgtgctcttctacaacatcagctccatgaagagcacagagagctacttcatccctgaggtgcgcatctatgacagcggcacctacaagtgcaccgtcatcgtgaacaacaaggagaagaccacagctgagtaccaggtgctggtggagggcgtgcccagcccccgggtgaccctggacaagaaggaggccatccagggcggcatcgtgcgggtgaactgcagcgtgcctgaggagaaggcccccatccacttcaccatcgagaagctggagctgaatgagaagatggtgaagctgaagcgggagaagaacagccgggaccagaacttcgtcatcctggagttccctgtggaggagcaggacagagtgctgtccttccgctgccaggcccgcatcatcagcggcatccacatgcagaccagcgagagcaccaagtctgagctggtgacagtgacagagagcttcagcacccccaagttccacatcagccccaccggcatgatcatggagggcgcccagctgcacatcaagtgcaccatccaggtgacccacctggcccaggagttccctgagatcatcatccagaaggacaaggccatcgtggcccacaacagacatggcaacaaggctgtgtacagcgtgatggccatggtggagcacagcggcaactacacctgcaaggtggagagcagccgcatcagcaaggtgagcagcatcgtggtgaacatcacagagctgttcagcaagccagagctggagagcagcttcacccacctggaccagggcgagcggctgaacctgagctgcagcatccctggggcccccccagccaacttcaccatccagaaggaggacaccatcgtgtcccagacccaggacttcaccaagatcgccagcaagagtgacagcggcacctacatctgcacagctggcatcgacaaggtggtgaagaagagcaacacagtgcagatcgtggtgtgtgagatgctgagccagccccgcatctcctatgatgcccagtttgaagtcatcaagggccagaccatcgaggtgcgctgtgagagcatcagcggcaccctgcccatctcctaccagctgctgaagaccagcaaggtgctggagaacagcaccaagaacagcaatgaccctgctgtgttcaaggacaaccccacagaagatgtggagtaccagtgtgtggccgacaactgccacagccacgccaagatgctgtctgaggtgctgcgggtgaaggtgattgcccctgtggatgaggtgcagatcagcatcctgagcagcaaggtggtggagagcggagaagatattgtgctgcagtgtgctgtgaatgaaggcagcggccccatcacctacaagttctaccgggagaaggagggcaagcccttctaccagatgaccagcaatgccacccaggccttctggaccaagcagaaggccagcaaggagcaggagggggagtactactgcacagccttcaacagagccaaccacgccagctctgtgcccaggagcaagatcctgactgtgcgggtcatcctggccccctggaagaagggcctgattgctgtggtgatcattggagtcatcatcgccctgctgatcatcgccgccaagtgctacttcctgaggaaggccaaggccaagcagatgcctgtggagatgagcaggcctgctgtgcccctgctgaacagcaacaatgagaagatgtctgaccccaacatggaggccaacagccactacggccacaatgatgatgtgaggaaccacgccatgaagcccatcaatgacaacaaggagcccctgaacagtgatgtgcagtacacagaggtgcaggtgtcctctgctgagagccacaaggacctgggcaagaaggacacagaaacagtgtacagcgaggtgaggaaggctgtgcctgatgctgtggagagccgctacagcaggacagagggcagcctggatggcacctag

SEQ ID NO: 21175 - DNA, 636 bp, synthetic construct
  misc_feature 1..636: note = Description of Artificial Sequence: Synthetic coding sequence
  source 1..636: mol_type = other DNA
atgaggaccctggcctgcctgctgctgctgggctgcggctacctggcccacgtgctggccgaggaggccgagatcccccgggaggtgattgaaaggctggcccggagccagatccacagcatccgggacctgcagaggctgctggagattgacagcgtgggcagcgaggacagcctggacaccagcctgcgggcccacggcgtgcacgccaccaagcacgtgcctgagaagaggcccctgcccatccggaggaagaggagcattgaggaggccgtgcctgctgtgtgcaagaccaggacagtcatctatgagatccccaggagccaggtggaccccaccagcgccaacttcctgatctggccaccctgtgtggaggtgaagcgctgcaccggctgctgcaacaccagctctgtgaagtgccagcccagccgggtgcaccacaggtctgtgaaggtggccaaggtggagtatgtgaggaagaagcccaagctgaaggaggtgcaggtgcggctggaggagcacctggagtgtgcctgtgccaccaccagcctgaacccagactaccgggaggaggacaccggccggccccgggagagcggcaagaagaggaagaggaagaggctgaagcccacctag

SEQ ID NO: 21176 - DNA, 591 bp, synthetic construct
  misc_feature 1..591: note = Description of Artificial Sequence: Synthetic coding sequence
  source 1..591: mol_type = other DNA
atgaggaccctggcctgcctgctgctgctgggctgcggctacctggcccacgtgctggccgaggaggccgagatcccccgggaggtgattgaaaggctggcccggagccagatccacagcatccgggacctgcagaggctgctggagattgacagcgtgggcagcgaggacagcctggacaccagcctgcgggcccacggcgtgcacgccaccaagcacgtgcctgagaagaggcccctgcccatccggaggaagaggagcattgaggaggccgtgcctgctgtgtgcaagaccaggacagtcatctatgagatccccaggagccaggtggaccccaccagcgccaacttcctgatctggccaccctgtgtggaggtgaagcgctgcaccggctgctgcaacaccagctctgtgaagtgccagcccagccgggtgcaccacaggtctgtgaaggtggccaaggtggagtatgtgaggaagaagcccaagctgaaggaggtgcaggtgcggctggaggagcacctggagtgtgcctgtgccaccaccagcctgaacccagactaccgggaggaggacacagatgtgaggtag

SEQ ID NO: 21177 - DNA, 162 bp, synthetic construct
  misc_feature 1..162: note = Description of Artificial Sequence: Synthetic coding sequence
  source 1..162: mol_type = other DNA
atgaggaccctggcctgcctgctgctgctgggctgcggctacctggcccacgtgctggccgaggaggccgagatcccccgggaggtgattgaaaggctggcccggagccagatccacagcatccgggacctgcagaggctgctggagattgacagcgtgtag

SEQ ID NO: 21178 - DNA, 3270 bp, synthetic construct
  misc_feature 1..3270: note = Description of Artificial Sequence: Synthetic coding sequence
  source 1..3270: mol_type = other DNA
atgggcaccagccacccagccttcctggtgctgggctgcctgctgaccggcctgagcctcatcctgtgccagctgagcctgcccagcatcctgcccaatgaaaatgagaaggtggtgcagctgaacagcagcttcagcctgcgctgcttcggggagagcgaggtgtcctggcagtaccccatgtctgaggaggagagcagtgatgtggagatcagaaatgaggagaacaacagcggcctgtttgtgacagtgctggaggtgtcctctgccagcgctgcccacacaggcctgtacacctgctactacaaccacacccagacagaagaaaatgagctggagggccgccacatctacatctacgtgcctgaccctgatgtggcctttgtgcccctgggcatgacagactacctggtgattgtggaggatgatgattctgccatcatcccctgcaggaccacagatcctgagacccctgtgaccctgcacaacagcgagggcgtggtgcctgccagctatgacagccggcagggcttcaacggcaccttcaccgtgggcccctacatctgtgaggccaccgtgaagggcaagaagttccagaccatccccttcaacgtgtatgccctgaaggccaccagcgagctggacctggagatggaggccctgaagacagtgtacaagtctggagagaccatcgtggtgacctgtgctgtgttcaacaatgaggtggtggacctgcagtggacctacccaggagaggtgaagggcaagggcatcaccatgctggaggagatcaaggtgcccagcatcaagctggtgtacaccctgactgtgcctgaggccaccgtgaaggacagcggggactatgaatgtgccgcccggcaggccacccgggaggtgaaggagatgaagaaggtgaccatctctgtgcatgagaagggcttcatcgagatcaagcccaccttcagccagctggaggccgtgaacctgcacgaggtgaagcactttgtggtggaggtgcgggcctaccccccaccccgcatctcctggctgaagaacaacctgaccctgattgagaacctgacagagatcaccacagatgtggagaagatccaggagatccgctaccgcagcaagctgaagctgatccgggccaaggaggaggacagcggccactacaccatcgtggcccagaatgaagatgctgtgaagagctacacctttgagctgctgacccaggtgcccagcagcatcctggacctggtggatgaccaccacggcagcactggaggccagacagtgcgctgcacagctgagggcacccccctgcctgacatcgagtggatgatctgcaaggacatcaagaagtgcaacaatgagacctcctggaccatcctggccaacaacgtgagcaacatcatcacagagatccacagccgggacaggagcacagtggagggccgggtgacctttgccaaggtggaggagaccatcgctgtgcgctgcctggccaagaacctgctgggcgctgagaaccgggagctgaagctggtggcccccaccctgcggtctgagctgactgtggccgctgctgtgctggtgctgctggtgattgtcatcatcagcctgattgtgctggtggtgatctggaagcagaagcccaggtatgagatccgctggagggtcatcgagagcatcagcccagatggccacgagtacatctacgtggaccccatgcagctgccctatgacagccgctgggagttccccagagatggcctggtgctgggccgggtgctgggcagcggggccttcggcaaggtggtggagggcacagcctacggcctgagccgcagccagcctgtgatgaaggtggccgtgaagatgctgaagcccacagcccggagcagcgagaagcaggccctgatgtctgagctgaagatcatgacccacctgggcccccacctgaacatcgtgaacctgctgggcgcctgcaccaagagcggccccatctacatcatcacagagtactgcttctatggagacctggtgaactacctgcacaagaacagagacagcttcctgagccaccaccctgagaagcccaagaaggagctggacatcttcggcctgaacccagcagatgagagcaccaggagctatgtgatcctgagctttgagaacaacggggactacatggacatgaagcaggccgacaccacccagtatgtgcccatgctggagaggaaggaggtgtccaagtacagcgacatccagaggagcctgtatgacaggcctgccagctacaagaagaagtccatgctggacagcgaggtgaagaacctgctgagtgatgacaacagcgagggcctgaccctgctggacctgctgtccttcacctaccaggtggcccggggcatggagttcctggccagcaagaactgtgtgcaccgggacctggccgccagaaatgtgctgctggcccagggcaagatcgtgaagatctgtgactttggcctggcccgggacatcatgcatgacagcaactacgtgtccaagggcagcaccttcctgcctgtgaagtggatggcccctgagagcatctttgacaacctgtacaccaccctgagtgatgtgtggagctatggcatcctgctgtgggagatcttcagcctgggcggcaccccctacccaggcatgatggtggacagcaccttctacaacaagatcaagagcggctacaggatggccaagccagaccacgccaccagcgaggtgtatgagatcatggtgaagtgctggaacagcgagcctgagaagaggcccagcttctaccacctgtctgaaattgtggagaacctgctgcccggccagtacaagaagagctatgagaagatccacctggacttcctgaagagtgaccaccctgctgtggccaggatgagggtggacagcgacaatgcctacatcggcgtgacctacaagaatgaggaggacaagctgaaggactgggagggcggcctggatgagcagaggctgtctgctgacagcggctacatcatccccctgcctgacattgatcctgtgcctgaggaggaggacctgggcaagaggaacagacacagcagccagaccagcgaggagagcgccatcgagaccggcagcagcagcagcaccttcatcaagagagaagatgagaccatcgaggacatcgacatgatggatgacatcggcatcgacagcagtgacctggtggaggacagcttcctgtag

SEQ ID NO: 21179 - DNA, 480 bp, synthetic construct
  misc_feature 1..480: note = Description of Artificial Sequence: Synthetic coding sequence
  source 1..480: mol_type = other DNA
atgggcaccagccacccagccttcctggtgctgggctgcctgctgaccggcctgagcctcatcctgtgccagctgagcctgcccagcatcctgcccaatgaaaatgagaaggtggtgcagctgaacagcagcttcagcctgcgctgcttcggggagagcgaggtgtcctggcagtaccccatgtctgaggaggagagcagtgatgtggagatcagaaatgaggagaacaacagcggcctgtttgtgacagtgctggaggtgtcctctgccagcgctgcccacacaggcctgtacacctgctactacaaccacacccagacagaagaaaatgagctggagggccgccacatctacatctacgtgcctgaccctgatgtggcctttgtgcccctgggcatgacagactacctggtgattgtggaggatgatgattctgccatcatcccctgcaggaccacagatcctgagacccctgtgtag

SEQ ID NO: 21180 - DNA, 477 bp, synthetic construct
  misc_feature 1..477: note = Description of Artificial Sequence: Synthetic coding sequence
  source 1..477: mol_type = other DNA
atgggcaccagccacccagccttcctggtgctgggctgcctgctgaccggcctgagcctcatcctgtgccagctgagcctgcccagcatcctgcccaatgaaaatgagaaggtggtgcagctgaacagcagcttcagcctgcgctgcttcggggagagcgaggtgtcctggcagtaccccatgtctgaggaggagagcagtgatgtggagatcagaaatgaggagaacaacagcggcctgtttgtgacagtgctggaggtgtcctctgccagcgctgcccacacaggcctgtacacctgctactacaaccacacccagacagaagaaaatgagctggagggccgccacatctacatctacgtgcctgaccctgatgtggcctttgtgcccctgggcatgacagactacctggtgattgtggaggatgatgattctgccatcatcccctgcaggaccacagatcctgagaccccctag

SEQ ID NO: 21181 - DNA, 657 bp, synthetic construct
  misc_feature 1..657: note = Description of Artificial Sequence: Synthetic coding sequence
  source 1..657: mol_type = other DNA
atgggcaccagccacccagccttcctggtgctgggctgcctgctgaccggcctgagcctcatcctgtgccagctgagcctgcccagcatcctgcccaatgaaaatgagaaggtggtgcagctgaacagcagcttcagcctgcgctgcttcggggagagcgaggtgtcctggcagtaccccatgtctgaggaggagagcagtgatgtggagatcagaaatgaggagaacaacagcggcctgtttgtgacagtgctggaggtgtcctctgccagcgctgcccacacaggcctgtacacctgctactacaaccacacccagacagaagaaaatgagctggagggccgccacatctacatctacgtgcctgaccctgatgtggcctttgtgcccctgggcatgacagactacctggtgattgtggaggatgatgattctgccatcatcccctgcaggaccacagatcctgagacccctgtgaccctgcacaacagcgagggcgtggtgcctgccagctatgacagccggcagggcttcaacggcaccttcaccgtgggcccctacatctgtgaggccaccgtgaagggcaagaagttccagaccatccccttcaacgtgtatgccctgaagggcacctgcatcatctccttcctgctgtag

SEQ ID NO: 21182 - DNA, 465 bp, synthetic construct
  misc_feature 1..465: note = Description of Artificial Sequence: Synthetic coding sequence
  source 1..465: mol_type = other DNA
atgggcaccagccacccagccttcctggtgctgggctgcctgctgaccggcctgagcctcatcctgtgccagctgagcctgcccagcatcctgcccaatgaaaatgagaaggtggtgcagctgaacagcagcttcagcctgcgctgcttcggggagagcgaggtgtcctggcagtaccccatgtctgaggaggagagcagtgatgtggagatcagaaatgaggagaacaacagcggcctgtttgtgacagtgctggaggtgtcctctgccagcgctgcccacacaggcctgtacacctgctactacaaccacacccagacagaagaaaatgagctggagggccgccacatctacatctacgtgcctgaccctgatgtggcctttgtgcccctgggcatgacagactacctggtgattgtggaggatgatgattctgccatcatcccctgcaggaccacagactag

SEQ ID NO: 21183 - DNA, 3321 bp, synthetic construct
  misc_feature 1..3321: note = Description of Artificial Sequence: Synthetic coding sequence
  source 1..3321: mol_type = other DNA
atgaggctgcccggggccatgcctgccctggccctgaagggggagctgctgctgctgagcctgctgctgctgctggagccccagatcagccagggcctggtggtgaccccacctggccctgagctggtgctgaatgtgagcagcacctttgtgctgacctgcagcggcagcgcccctgtggtgtgggagaggatgagccaggagcccccccaggagatggccaaggcccaggacggcaccttcagctctgtgctgaccctgaccaacctgaccggcctggacacaggagagtacttctgcacccacaatgacagccggggcctggagacagatgagaggaagaggctgtacatctttgtgcctgaccccaccgtgggcttcctgcccaatgatgctgaggagctgttcatcttcctgacagagatcacagagatcaccatcccctgccgggtgacagacccccagctggtggtgaccctgcacgagaagaagggagatgtggccctgcctgtgccctatgaccaccagaggggcttcagcggcatctttgaggacaggagctacatctgcaagaccaccatcggggaccgggaggtggacagtgatgcctactacgtgtaccgcctgcaggtgagcagcatcaacgtgtctgtgaatgctgtgcagacagtggtgcggcagggcgagaacatcaccctgatgtgcatcgtgattggaaatgaggtggtgaactttgagtggacctaccccaggaaggagagcggccgcctggtggagcctgtgacagacttcctgctggacatgccctaccacatccgcagcatcctgcacatccccagcgctgagctggaggacagcggcacctacacctgcaatgtgacagagagcgtgaatgaccaccaggatgagaaggccatcaacatcaccgtggtggagagcggctacgtgcggctgctgggggaggtgggcaccctgcagtttgctgagctgcacaggagcaggaccctgcaggtggtgtttgaggcctaccccccacccaccgtgctgtggttcaaggacaacagaaccctgggggacagcagcgctggggagatcgccctgagcaccagaaatgtgtctgagaccaggtatgtgtctgagctgaccctggtgcgggtgaaggtggccgaggccggccactacaccatgagggccttccatgaagatgctgaggtgcagctgtccttccagctgcagatcaacgtgcctgtgcgggtgctggagctgtctgagagccacccagattctggagagcagacagtgcgctgccggggccggggcatgccccagcccaacatcatctggagcgcctgccgggacctgaagcgctgcccccgggagctgccccccaccctgctgggcaacagcagcgaggaggagagccagctggagaccaacgtgacctactgggaggaggagcaggagtttgaggtggtgtccaccctgcggctgcagcacgtggaccggcccctgtctgtgcgctgcaccctgagaaatgctgtgggccaggacacccaggaggtgattgtggtgccccacagcctgcccttcaaggtggtggtgatcagcgccatcctggccctggtggtgctgaccatcatcagcctcatcatcctgatcatgctgtggcagaagaagcccaggtatgagatccgctggaaggtgattgaatctgtgtccagtgatggccacgagtacatctacgtggaccccatgcagctgccctatgacagcacctgggagctgccccgggaccagctggtgctgggccgcaccctgggcagcggggccttcggccaggtggtggaggccacagcccacggcctgagccacagccaggccaccatgaaggtggccgtgaagatgctgaagagcacagcccggagcagcgagaagcaggccctgatgtctgagctgaagatcatgagccacctgggcccccacctgaatgtggtgaacctgctgggcgcctgcaccaagggcggccccatctacatcatcacagagtactgccgctacggggacctggtggactacctgcacaggaacaagcacaccttcctgcagcaccacagcgacaagaggcggccccccagcgctgagctgtacagcaatgccctgcctgtgggcctgcccctgcccagccacgtgtccctgactggagagagtgatggcggctacatggacatgagcaaggatgagagcgtggactatgtgcccatgctggacatgaagggagatgtgaagtatgctgacatcgagagcagcaactacatggccccctatgacaactacgtgcccagcgcccctgagaggacctgccgggccaccctcatcaatgaaagccctgtgctgagctacatggacctggtgggcttctcctaccaggtggccaacggcatggagttcctggccagcaagaactgtgtgcaccgggacctggccgccagaaatgtgctgatctgtgagggcaagctggtgaagatctgtgactttggcctggcccgggacatcatgagggacagcaactacatcagcaagggcagcaccttcctgcccctgaagtggatggcccctgagagcatcttcaacagcctgtacaccaccctgagtgatgtgtggagctttggcatcctgctgtgggagatcttcaccctgggcggcaccccctacccagagctgcccatgaatgagcagttctacaatgccatcaagaggggctacaggatggcccagcctgcccacgccagtgatgagatctatgagatcatgcagaagtgctgggaggagaagtttgagatccggccccccttcagccagctggtgctgctgctggagcggctgctgggggagggctacaagaagaagtaccagcaggtggatgaggagttcctgcggagtgaccacccagccatcctgcggagccaggcccggctgcccggcttccacggcctgcggagccccctggacaccagctctgtgctgtacacagctgtgcagcccaatgaaggagacaatgactacatcatccccctgcctgaccccaagccagaggtggctgatgagggccccctggagggcagccccagcctggccagcagcaccctgaatgaggtgaacaccagcagcaccatcagctgtgacagccccctggagccccaggatgagcctgagcctgagccccagctggagctgcaggtggagcctgagcctgagctggagcagctgcctgacagcggctgcccagcccccagggctgaggccgaggacagcttcctgtag

SEQ ID NO: 21184 - DNA, 525 bp, synthetic construct
  misc_feature 1..525: note = Description of Artificial Sequence: Synthetic coding sequence
  source 1..525: mol_type = other DNA
atgaggctgcccggggccatgcctgccctggccctgaagggggagctgctgctgctgagcctgctgctgctgctggagccccagatcagccagggcctggtggtgaccccacctggccctgagctggtgctgaatgtgagcagcacctttgtgctgacctgcagcggcagcgcccctgtggtgtgggagaggatgagccaggagcccccccaggagatggccaaggcccaggacggcaccttcagctctgtgctgaccctgaccaacctgaccggcctggacacaggagagtacttctgcacccacaatgacagccggggcctggagacagatgagaggaagaggctgtacatctttgtgcctgaccccaccgtgggcttcctgcccaatgatgctgaggagctgttcatcttcctgacagagatcacagagatcaccatcccctgccgggtgacagacccccagctggtggtgaccctgcacgagaagaagggagatgtggccctgcctgtgccctatgactag

SEQ ID NO: 21185 - DNA, 2331 bp, synthetic construct
  misc_feature 1..2331: note = Description of Artificial Sequence: Synthetic coding sequence
  source 1..2331: mol_type = other DNA
gctgccagcgagccagacacagctggctctgtgcggggcctgcccacagcccactgccctgtggtggacaacagaaccctgggggacagcagcgctggggagatcgccctgagcaccagaaatgtgtctgagaccaggtatgtgtctgagctgaccctggtgcgggtgaaggtggccgaggccggccactacaccatgagggccttccatgaagatgctgaggtgcagctgtccttccagctgcagatcaacgtgcctgtgcgggtgctggagctgtctgagagccacccagattctggagagcagacagtgcgctgccggggccggggcatgccccagcccaacatcatctggagcgcctgccgggacctgaagcgctgcccccgggagctgccccccaccctgctgggcaacagcagcgaggaggagagccagctggagaccaacgtgacctactgggaggaggagcaggagtttgaggtggtgtccaccctgcggctgcagcacgtggaccggcccctgtctgtgcgctgcaccctgagaaatgctgtgggccaggacacccaggaggtgattgtggtgccccacagcctgcccttcaaggtggtggtgatcagcgccatcctggccctggtggtgctgaccatcatcagcctcatcatcctgatcatgctgtggcagaagaagcccaggtatgagatccgctggaaggtgattgaatctgtgtccagtgatggccacgagtacatctacgtggaccccatgcagctgccctatgacagcacctgggagctgccccgggaccagctggtgctgggccgcaccctgggcagcggggccttcggccaggtggtggaggccacagcccacggcctgagccacagccaggccaccatgaaggtggccgtgaagatgctgaagagcacagcccggagcagcgagaagcaggccctgatgtctgagctgaagatcatgagccacctgggcccccacctgaatgtggtgaacctgctgggcgcctgcaccaagggcggccccatctacatcatcacagagtactgccgctacggggacctggtggactacctgcacaggaacaagcacaccttcctgcagcaccacagcgacaagaggcggccccccagcgctgagctgtacagcaatgccctgcctgtgggcctgcccctgcccagccacgtgtccctgactggagagagtgatggcggctacatggacatgagcaaggatgagagcgtggactatgtgcccatgctggacatgaagggagatgtgaagtatgctgacatcgagagcagcaactacatggccccctatgacaactacgtgcccagcgcccctgagaggacctgccgggccaccctcatcaatgaaagccctgtgctgagctacatggacctggtgggcttctcctaccaggtggccaacggcatggagttcctggccagcaagaactgtgtgcaccgggacctggccgccagaaatgtgctgatctgtgagggcaagctggtgaagatctgtgactttggcctggcccgggacatcatgagggacagcaactacatcagcaagggcagcaccttcctgcccctgaagtggatggcccctgagagcatcttcaacagcctgtacaccaccctgagtgatgtgtggagctttggcatcctgctgtgggagatcttcaccctgggcggcaccccctacccagagctgcccatgaatgagcagttctacaatgccatcaagaggggctacaggatggcccagcctgcccacgccagtgatgagatctatgagatcatgcagaagtgctgggaggagaagtttgagatccggccccccttcagccagctggtgctgctgctggagcggctgctgggggagggctacaagaagaagtaccagcaggtggatgaggagttcctgcggagtgaccacccagccatcctgcggagccaggcccggctgcccggcttccacggcctgcggagccccctggacaccagctctgtgctgtacacagctgtgcagcccaatgaaggagacaatgactacatcatccccctgcctgaccccaagccagaggtggctgatgagggccccctggagggcagccccagcctggccagcagcaccctgaatgaggtgaacaccagcagcaccatcagctgtgacagccccctggagccccaggatgagcctgagcctgagccccagctggagctgcaggtggagcctgagcctgagctggagcagctgcctgacagcggctgcccagcccccagggctgaggccgaggacagcttcctgtag

SEQ ID NO: 21186 - DNA, 891 bp, synthetic construct
  misc_feature 1..891: note = Description of Artificial Sequence: Synthetic coding sequence
  source 1..891: mol_type = other DNA
atgggcctgagccacagcaagacccacctgcgggtcatcaaggtggcccccctgcagaacaaggaggtggagaccccatctgctggccgggtggactttgccttcaaccagaacctggaggagaagaccagctacagcctggcccggctgcaggaccagaacaaggccctggagggccagctgccccccctgcaggagaactggtacggccgctacagcacagccagccgggacatgtactttgacatccccctggagcaccgggagaccagcatcatcaagaggcaccccccccagaggctgcagaagctggagcccatcgacctgcccagggtcatcaccagcggccgcctgctgagccagcgggaggcccggaccatgcacaaggccaagcaggtgctggagaagaagatgcagacccccatgtacaccagcgagaaccggcagtacctgcacaagatgcaggtgctggagatgatcaggaagaggcaggaggcccagatggagctgaagaagagcctgcatggagaggcccgcatcaacaagcagagcccccgggaccacaaggccaagaagaccctgcagagcaccccaagaaatgatgaccatgacctgctgaccatgctgcctgatgagatcctgaacagaggccctggcaacagcaagaacacagagttcctgaagcaccaggccgtgaacaactactgcccctggaagattggcaagatggagacctggctgcacgagcaggaggcccagggccagctgctgtgggacagcagcagcagtgacagtgatgagcagggcaaggatgagaagaagccccgggccctggtgaggaccaggacagagcgcatccccctgtttgatgagttctttgaccaggagtag

SEQ ID NO: 21187 - DNA, 1734 bp, synthetic construct
  misc_feature 1..1734: note = Description of Artificial Sequence: Synthetic coding sequence
  source 1..1734: mol_type = other DNA
atgcctgagggcgcccagggcctgagcctgagcaagcccagccccagcctgggctgcggcagaagaggagaggtgtgtgactgtggcaccgtgtgtgagaccaggacagccccagctgcccccaccatggccagcccccggggcagcggcagcagcaccagcctgagcacagtgggcagcgagggggaccctgcccctggccccaccccagcctgcagcgccagcaggcctgagcccctgcccggcccccccatccggctgcacctgagccctgtgggcatccctggcagcgcccggcccagccggctggagcgggtggcccgggagatcgtggagacagagcgggcctacgtgcgggacctgcggagcatcgtggaggactacctgggccccctgctggatggcggcgtgctgggcctgtctgtggagcaggtgggcaccctgtttgccaacatcgaggacatctatgagttcagcagcgagctgctggaggacctggagaacagcagcagcgctgggggcattgctgaatgttttgtgcagaggtctgaggactttgacatctacaccctgtactgcatgaactaccccagcagcctggccctgctgcgggagctgagcctgagccccccagctgccctgtggctgcaggagcggcaggcccagctgcggcacagcctgcccctgcagagcttcctgctgaagcctgtgcagaggatcctgaagtaccacctgctgctgcaggagctgggcaagcactgggccgagggccctggcaccggcggccgggagatggtggaggaggccatcgtgtccatgacagctgtggcctggtacatcaatgacatgaagaggaagcaggagcacgccgcccggctgcaggaggtgcagaggcggctgggcggctggacaggccctgagctgagcgcctttggagagctggtgctggagggcgccttccggggcggcggcggcggcggcccccggctgcggggcggggagcggctgctcttcctgttcagcaggatgctgctggtggccaagagaagaggcctggagtacacctacaagggccacatcttctgctgcaacctgtctgtgtctgagagcccccgggaccccctgggcttcaaggtgtctgacctgaccatccccaagcaccgccacctgctgcaggccaagaaccaggaggagaagaggctgtggatccactgcctgcagaggctcttctttgagaaccacccagccagcatcccagccaaggccaagcaggtgctgctggagaacagcctgcactgtgcccccaagagcaagcctgtgctggagcccctgaccccacccctgggcagcccccggcccagagatgcccggagcttcaccccaggaagaagaaacacagcccccagccctggccccagcgtcatccggcggggccggcggcagagcgagcctgtgaaggacccctacgtgatgttcccccagaatgccaagccaggcttcaagcatgctggcagcgagggggagctgtacccacctgagagccagccccctgtgtctggcagcgcccccccagaggacctggaggatgctggcccccccaccctggaccccagcggcaccagcatcacagaggagatcctggagctgctgaaccagaggggcctgcgggaccccggggagagcatgggcctgcaccgggcccagggcgccccagatgcccccttccacatgtag

SEQ ID NO: 21188 - DNA, 4161 bp, synthetic construct
  misc_feature 1..4161: note = Description of Artificial Sequence: Synthetic coding sequence
  source 1..4161: mol_type = other DNA
atgcctgagggcgcccagggcctgagcctgagcaagcccagccccagcctgggctgcggcagaagaggagaggtgtgtgactgtggcaccgtgtgtgagaccaggacagccccagctgcccccaccatggccagcccccggggcagcggcagcagcaccagcctgagcacagtgggcagcgagggggaccctgcccctggccccaccccagcctgcagcgccagcaggcctgagcccctgcccggcccccccatccggctgcacctgagccctgtgggcatccctggcagcgcccggcccagccggctggagcgggtggcccgggagatcgtggagacagagcgggcctacgtgcgggacctgcggagcatcgtggaggactacctgggccccctgctggatggcggcgtgctgggcctgtctgtggagcaggtgggcaccctgtttgccaacatcgaggacatctatgagttcagcagcgagctgctggaggacctggagaacagcagcagcgctgggggcattgctgaatgttttgtgcagaggtctgaggactttgacatctacaccctgtactgcatgaactaccccagcagcctggccctgctgcgggagctgagcctgagccccccagctgccctgtggctgcaggagcggcaggcccagctgcggcacagcctgcccctgcagagcttcctgctgaagcctgtgcagaggatcctgaagtaccacctgctgctgcaggagctgggcaagcactgggccgagggccctggcaccggcggccgggagatggtggaggaggccatcgtgtccatgacagctgtggcctggtacatcaatgacatgaagaggaagcaggagcacgccgcccggctgcaggaggtgcagaggcggctgggcggctggacaggccctgagctgagcgcctttggagagctggtgctggagggcgccttccggggcggcggcggcggcggcccccggctgcggggcggggagcggctgctcttcctgttcagcaggatgctgctggtggccaagagaagaggcctggagtacacctacaagggccacatcttctgctgcaacctgtctgtgtctgagagcccccgggaccccctgggcttcaaggtgtctgacctgaccatccccaagcaccgccacctgctgcaggccaagaaccaggaggagaagaggctgtggatccactgcctgcagaggctcttctttgagaaccacccagccagcatcccagccaaggccaagcaggtgctgctggagaacagcctgcactgtgcccccaagagcaagcctgtgctggagcccctgaccccacccctgggcagcccccggcccagagatgcccggagcttcaccccaggaagaagaaacacagcccccagccctggccccagcgtcatccggcggggccggcggcagagcgagcctgtgaaggacccctacgtgatgttcccccagaatgccaagccaggcttcaagcatgctggcagcgagggggagctgtacccacctgagagccagccccctgtgtctggcagcgcccccccagaggacctggaggatgctggcccccccaccctggaccccagcggcaccagcatcacagaggagatcctggagctgctgaaccagaggggcctgcgggaccccggccccagcacccatgacatccccaagtttcctggggacagccaggtgcctggggacagcgagaccctgaccttccaggccctgcccagccgggacagcagcgaggaggaggaggaggaggaggagggcctggagatggatgagcggggccccagccccctgcacgtgctggagggcctggagagcagcattgctgctgagatgcccagcatcccctgcctgaccaagatcccagatgtgcccaacctgcctgagatccccagccgctgtgagatccctgagggcagccggctgcccagcctgagtgacatcagtgatgtgtttgagatgccctgcctgcctgccatccccagcgtgcccaacacccccagcctgagcagcacccccaccctgagctgtgacagctggctgcagggccccctgcaggagcctgctgaggccccagccacccggcgggagctgttcagcggcagcaaccctgggaagctgggggagccccccagcggcggcaaggccggccctgaggaggatgaggagggcgtgtccttcacagacttccagccccaggatgtgacccagcaccagggcttcccagatgagctggccttccgcagctgcagcgagatccgcagcgcctggcaggccctggagcagggccagctggcccggcccggcttccctgagcccctgctgatcctggaggacagcgacctgggcggggacagcggcagcggcaaggccggggcccccagcagcgagaggacagccagccgggtgcgggagctggcccggctgtacagcgagcgcatccagcagatgcagagagctgagacccgggccagcgccaatgcccccaggagaagaccccgggtgctggcccagccccagcccagcccctgcctgccccaggagcaggccgagcccggcctgctgcctgccttcggccacgtgctggtgtgtgagctggccttccccctgacctgtgcccaggagagcgtgcccctgggccctgctgtgtgggtgcaggccgccatccccctgagcaagcagggcggcagcccagatggccagggcctgcacgtgagcaacctgcccaagcaggacctgcccggcatccacgtgtctgctgccaccctgctgcctgagcagggcggcagccgccacgtgcaggccccagctgccacccccctgcccaagcaggagggccccctgcacctgcaggtgcctgccctgaccaccttcagtgaccagggccaccctgagatccaggtgcctgccaccacccccctgcctgagcacaggagccacatggtgatcccagcccccagcacagccttctgcccagagcagggccactgtgccgacatccacgtgcccaccaccccagccctgcccaaggagatctgcagcgacttcaccgtgtctgtgaccacccctgtgcccaagcaggagggccacctggacagcgagagccccaccaacatccccctgaccaagcagggcggcagcagagatgtgcagggccctgaccctgtgtgcagccagcccatccagcccctgtcctggcacggcagcagcctggacccccagggccctggggacaccctgccccccctgccctgccacctgcctgacctgcagatccctggcaccagccccctgcctgcccacggcagccacctggaccaccgcatcccagccaatgcccccctgagcctgagccaggagctgcctgacacccaggtgcctgccaccacccccctgcccctgccccaggtgctgacagacatctgggtgcaggccctgcccaccagccccaagcagggcagcctgcctgacatccagggccctgctgctgccccacccctgcctgagcccagcctgacagacacccaggtgcagaagctgacccccagcctggagcagaagagcctgattgatgcccacgtgcctgctgccacccccctgcctgagcggggcggcagcctggacatccagggcctgagccccacccctgtgcagaccaccatggtgctgagcaagccaggcggcagcctggccagccacgtggcccggctggagagcagtgacctgaccccaccccacagccccccacccagcagccggcagctgctgggccccaatgctgctgccctgagccgctacctggccgccagctacatcagccagagcctggcccggcggcagggccctgggggcggggccccagctgccagccggggctcctggagcagcgcccccaccagccgggccagcagccccccaccccagccccagcccccacctcctccagcccggcggctgtcctatgccaccaccgtgaacatccacgtgggcggcggcggccgcctgcggcctgccaaggcccaggtgcggctgaaccacccagccctgctggccagcacccaggagagcatgggcctgcaccgggcccagggcgccccagatgcccccttccacatgtag

SEQ ID NO: 21189 - DNA, 1734 bp, synthetic construct; identical to SEQ ID NO: 21187
  misc_feature 1..1734: note = Description of Artificial Sequence: Synthetic coding sequence
  source 1..1734: mol_type = other DNA

SEQ ID NO: 21190 - DNA, 4074 bp, synthetic construct
  misc_feature 1..4074: note = Description of Artificial Sequence: Synthetic coding sequence
  source 1..4074: mol_type = other DNA
atgcctgagggcgcccagggcctgagcctgagcaagcccagccccagcctgggctgcggcagaagaggagaggtgtgtgactgtggcaccgtgtgtgagaccaggacagccccagctgcccccaccatggccagcccccggggcagcggcagcagcaccagcctgagcacagtgggcagcgagggggaccctgcccctggccccaccccagcctgcagcgccagcaggcctgagcccctgcccggcccccccatccggctgcacctgagccctgtgggcatccctggcagcgcccggcccagccggctggagcgggtggcccgggagatcgtggagacagagcgggcctacgtgcgggacctgcggagcatcgtggaggactacctgggccccctgctggatggcggcgtgctgggcctgtctgtggagcaggtgggcaccctgtttgccaacatcgaggacatctatgagttcagcagcgagctgctggaggacctggagaacagcagcagcgctgggggcattgctgaatgttttgtgcagaggtctgaggactttgacatctacaccctgtactgcatgaactaccccagcagcctggccctgctgcgggagctgagcctgagccccccagctgccctgtggctgcaggagcggcaggcccagctgcggcacagcctgcccctgcagagcttcctgctgaagcctgtgcagaggatcctgaagtaccacctgctgctgcaggagctgggcaagcactgggccgagggccctggcaccggcggccgggagatggtggaggaggccatcgtgtccatgacagctgtggcctggtacatcaatgacatgaagaggaagcaggagcacgccgcccggctgcaggaggtgcagaggcggctgggcggctggacaggccctgagctgagcgcctttggagagctggtgctggagggcgccttccggggcggcggcggcggcggcccccggctgcggggcggggagcggctgctcttcctgttcagcaggatgctgctggtggccaagagaagaggcctggagtacacctacaagggccacatcttctgctgcaacctgtctgtgtctgagagcccccgggaccccctgggcttcaaggtgtctgacctgaccatccccaagcaccgccacctgctgcaggccaagaaccaggaggagaagaggctgtggatccactgcctgcagaggctcttctttgagaaccacccagccagcatcccagccaaggccaagcaggtgctgctggagaacagcctgcactgtgcccccaagagcaagcctgtgctggagcccctgaccccacccctgggcagcccccggcccagagatgcccggagcttcaccccaggaagaagaaacacagccaagccaggcttcaagcacgccggcagcgagggggagctgtacccacctgagagccagccccctgtgtctggcagcgcccctcctgaggacctggaggatgctggcccccccaccctggaccccagcggcaccagcatcacagaggagatcctggagctgctgaaccagaggggcctgcgggaccccggccccagcacccatgacatccccaagtttcctggggacagccaggtgcctggggacagcgagaccctgaccttccaggccctgcccagccgggacagcagcgaggaggaggaggaggaggaggagggcctggagatggatgagcggggccccagccccctgcacgtgctggagggcctggagagcagcattgctgctgagatgcccagcatcccctgcctgaccaagatcccagatgtgcccaacctgcctgagatccccagccgctgtgagatccctgagggcagccggctgcccagcctgagtgacatcagtgatgtgtttgagatgccctgcctgcctgccatccccagcgtgcccaacacccccagcctgagcagcacccccaccctgagctgtgacagctggctgcagggccccctgcaggagcctgctgaggccccagccacccggcgggagctgttcagcggcagcaaccctgggaagctgggggagcccccatctgggggcaaggccggcccagaagaagatgaggagggcgtgtccttcacagacttccagccccaggatgtgacccagcaccagggcttcccagatgagctggccttccgcagctgcagcgagatccgcagcgcctggcaggccctggagcagggccagctggcccggcccggcttccctgagcccctgctgatcctggaggacagcgacctgggcggggacagcggcagcggcaaggccggggcccccagcagcgagaggacagccagccgggtgcgggagctggcccggctgtacagcgagcgcatccagcagatgcagagagctgagacccgggccagcgccaatgccccccggcggcggccccgggtgctggcccagccccagcccagcccctgcctgccccaggagcaggccgagcccggcctgctgcctgcctttggacatgtgctggtgtgtgagctggccttccccctgacctgtgcccaggagagcgtgcccctgggccctgctgtgtgggtgcaggccgccatccccctgagcaagcagggcggcagcccagatggccagggcctgcacgtgagcaacctgcccaagcaggacctgcccggcatccacgtgtctgctgccaccctgctgcctgagcagggcggcagcagacatgtgcaggccccagctgccacccccctgcccaagcaggagggccccctgcacctgcaggtgcctgccctgaccaccttcagtgaccagggccaccctgagatccaggtgcctgccaccacccccctgcctgagcacaggagccacatggtgatcccagcccccagcacagccttctgcccagagcagggccactgtgccgacatccacgtgcccaccaccccagccctgcccaaggagatctgcagcgacttcaccgtgtctgtgaccacccctgtgcccaagcaggagggccacctggacagcgagagccccaccaacatccccctgaccaagcagggcggcagcagagatgtgcagggccctgaccctgtgtgcagccagcccatccagcccctgtcctggcacggcagcagcctggacccccagggccctggggacaccctgccccccctgccctgccacctgcctgacctgcagatccctggcaccagccccctgcctgcccacggcagccacctggaccaccgcatcccagccaatgcccccctgagcctgagccaggagctgcctgacacccaggtgcctgccaccacccccctgcccctgccccaggtgctgacagacatctgggtgcaggccctgcccaccagccccaagcagggcagcctgcctgacatccagggccctgctgctgccccacccctgcctgagcccagcctgacagacacccaggtgcagaagctgacccccagcctggagcagaagagcctgattgatgcccacgtgcctgctgccacccccctgcctgagcggggcggcagcctggacatccagggcctgagccccacccctgtgcagaccaccatggtgctgagcaagccaggcggcagcctggccagccacgtggcccggctggagagcagtgacctgaccccaccccacagccccccacccagcagccggcagctgctgggccccaatgctgctgccctgagccgctacctggccgccagctacatcagccagagcctggcccggcggcagggccctgggggcggggccccagctgccagccggggctcctggagcagcgcccccaccagccgggccagcagccccccaccccagccccagcccccacctcctccagcccggcggctgtcctatgccaccaccgtgaacatccacgtgggcggcggcggccgcctgcggcctgccaaggcccaggtgcggctgaaccacccagccctgctggccagcacccaggagagcatgggcctgcaccgggcccagggcgccccagatgcccccttccacatgtag

SEQ ID NO: 21191 - DNA, 597 bp, synthetic construct
  misc_feature 1..597: note = Description of Artificial Sequence: Synthetic coding sequence
  source 1..597: mol_type = other DNA
atgcctgagggcgcccagggcctgagcctgagcaagcccagccccagcctgggctgcggcagaagaggagaggtgtgtgactgtggcaccgtgtgtgagaccaggacagctgccccagctgcccccaccatggccagcccccggggcagcggcagcagcaccagcctgagcacagtgggcagcgagggggaccctgcccctggccccaccccagcctgcagcgccagcaggcctgagcccctgcccggcccccccatccggctgcacctgagccctgtgggcatccctggcagcgcccggcccagccggctggagcgggtggcccgggagatcgtggagacagagcgggcctacgtgcgggacctgcggagcatcgtggaggactacctgggccccctgctggatggaggagtgctgggcctgtctgtggagcaggtgggcaccctgtttgccaacatcgaggacatctatgagttcagcagcgagctgctggaggacctggagaacagcagcagcgctgggggcattgctgagtgctttgtgcagaggagtgaagattttgacatctacaccctgtactgcatgaactacccctag

SEQ ID NO: 21192 - DNA, 3714 bp, synthetic construct
  misc_feature 1..3714: note = Description of Artificial Sequence: Synthetic coding sequence
  source 1..3714: mol_type = other DNA
atgcctgagggcgcccagggcctgagcctgagcaagcccagccccagcctgggctgcggcagaagaggagaggtgtgtgactgtggcaccgtgtgtgagaccaggacaggcagcgcccggcccagccggctggagcgggtggcccgggagatcgtggagacagagcgggcctacgtgcgggacctgcggagcatcgtggaggactacctgggccccctgctggatggaggagtgctgggcctgtctgtggagcaggtgggcaccctgtttgccaacatcgaggacatctatgagttcagcagcgagctgctggaggacctggagaacagcagcagcgctgggggcattgctgagtgctttgtgcagaggagtgaagattttgacatctacaccctgtactgcatgaactaccccagcagcctggccctgctgcgggagctgagcctgagccccccagctgccctgtggctgcaggagcggcaggcccagctgcggcacagcctgcccctgcagagcttcctgctgaagcctgtgcagaggatcctgaagtaccacctgctgctgcaggagctgggcaagcactgggccgagggccctggcactggaggccgggagatggtggaggaggccatcgtgtccatgacagctgtggcctggtacatcaatgacatgaagaggaagcaggagcacgccgcccggctgcaggaggtgcagaggcggctgggcggctggacaggccctgagctgagcgccttcggggagctggtgctggagggcgccttccggggcggcggcggcggcggcccccggctgcggggcggggagcggctgctcttcctgttcagcaggatgctgctggtggccaagaggcggggcctggagtacacctacaagggccacatcttctgctgcaacctgtctgtgtctgagagcccccgggaccccctgggcttcaaggtgtctgacctgaccatccccaagcaccgccacctgctgcaggccaagaaccaggaggagaagaggctgtggatccactgcctgcagaggctcttctttgagaaccacccagccagcatcccagccaaggccaagcaggtgctgctggagaacagcctgcactgtgcccccaagagcaagcctgtgctggagcccctgaccccacccctgggcagcccccggcccagagatgcccgctccttcaccccaggaagaagaaacacagcccccagccctggccccagcgtcatcagaagaggccggcggcagagcgagcctgtgaaggacccctacgtgatgttcccccagaatgccaagccaggcttcaagcacgccggcagcgagggggagctgtacccacctgagagccagccccctgtgtctggcagcgcccctcctgaggacctggaggatgctggcccccccaccctggaccccagcggcaccagcatcacagaggagatcctggagctgctgaaccagaggggcctgcgggaccccggccccagcacccatgacatccccaagtttcctggggacagccaggtgcctggggacagcgagaccctgaccttccaggccctgcccagccgggacagcagcgaggaggaggaggaggaggaggagggcctggagatggatgagcggggccccagccccctgcacgtgctggagggcctggagagcagcattgctgctgagatgcccagcatcccctgcctgaccaagatcccagatgtgcccaacctgcctgagatccccagccgctgtgagatccctgagggcagccggctgcccagcctgagtgacatcagtgatgtgtttgagatgccctgcctgcctgccatccccagcgtgcccaacacccccagcctgagcagcacccccaccctgagctgtgacagctggctgcagggccccctgcaggagcctgctgaggccccagccacccggcgggagctgttcagcggcagcaaccctgggaagctgggggagcccccatctgggggcaaggccggcccagaagaagatgaggagggcgtgtccttcacagacttccagccccaggatgtgacccagcaccagggcttcccagatgagctggccttccgcagctgcagcgagatccgcagcgcctggcaggccctggagcagggccagctggcccggcccggcttccctgagcccctgctgatcctggaggacagcgacctgggcggggacagcggcagcggcaaggccggggcccccagcagcgagaggacagccagccgggtgcgggagctggcccggctgtacagcgagcgcatccagcagatgcagagagctgagacccgggccagcgccaatgccccccggcggcggccccgggtgctggcccagccccagcccagcccctgcctgccccaggagcaggccgagcccggcctgctgcctgcctttggacatgtgctggtgtgtgagctggccttccccctgacctgtgcccaggagagcgtgcccctgggccctgctgtgtgggtgcaggccgccatccccctgagcaagcagggcggcagcccagatggccagggcctgcacgtgagcaacctgcccaagcaggacctgcccggcatccacgtgtctgctgccaccctgctgcctgagcagggcggcagcagacatgtgcaggccccagctgccacccccctgcccaagcaggagggccccctgcacctgcaggtgcctgccctgaccaccttcagtgaccagggccaccctgagatccaggtgcctgccaccacccccctgcctgagcacaggagccacatggtgatcccagcccccagcacagccttctgcccagagcagggccactgtgccgacatccacgtgcccaccaccccagccctgcccaaggagatctgcagcgacttcaccgtgtctgtgaccacccctgtgcccaagcaggagggccacctggacagcgagagccccaccaacatccccctgaccaagcagggcggcagcagagatgtgcagggccctgaccctgtgtgcagccagcccatccagcccctgtcctggcacggcagcagcctggacccccagggccctggggacaccctgccccccctgccctgccacctgcctgacctgcagatccctggcaccagccccctgcctgcccacggcagccacctggaccaccgcatcccagccaatgcccccctgagcctgagccaggagctgcctgacacccaggtgcctgccaccacccccctgcccctgccccaggtgctgacagacatctgggtgcaggccctgcccaccagccccaagcagggcagcctgcctgacatccagggccctgctgctgccccacccctgcctgagcccagcctgacagacacccaggtgcagaagctgacccccagcctggagcagaagagcctgattgatgcccacgtgcctgctgccacccccctgcctgagcggggcggcagcctggacatccagggcctgagccccacccctgtgcagaccaccatggtgctgagcaagccaggcggcagcctggccagccacgtggccaggaacctgtgggccttcaccggcccccggggcctgctgatgccacccagcacctgtgagcccggccacgaggccagcctgaagcagggcttccagccagatgccatcgacccccagaacctgacctggaagagccgccactag

SEQ ID NO: 21193 - DNA, 1128 bp, synthetic construct
  misc_feature 1..1128: note = Description of Artificial Sequence: Synthetic coding sequence
  source 1..1128: mol_type = other DNA
atgatgaagaagaacaacagcgccaagaggggcccccaggacggcaaccagcagcctgcccctcctgagaaggtgggctgggtgaggaagttctgtgggaagggcatcttccgggagatctggaagaacagatatgtggtgctgaagggggaccagctgtacatcagcgagaaggaggtgaaggatgagaagaacatccaggaggtgtttgacctgagtgactatgaaaaatgtgaggagctgaggaagagcaagagccgcagcaagaagaaccacagcaagttcaccctggcccacagcaagcagcccggcaacacagcccccaacctgatcttcctggccgtgtccccagaggagaaggagagctggatcaatgccctgaacagcgccatcacccgggccaagaaccgcatcctggatgaggccagcaccagcaccagtgatggcatgctgaccctggacctgatccaggaggaggaccccagccctgaggagcccaccagctgtgccgagagcttccgggtggacctggacaagtctgtggcccagctggccggcagcagaagaagagctgacagcgaccgcatccagcccagcgctgaccgggccagcagcctgagccggccctgggagaagacagacaagggggccacctacaccccccaggcccccaagaagctgacccccacagagaagggccgctgtgccagcctggaggagatcctgagccagagagatgctgccagcgcccggaccctgcagctgcgggcagaggagccccccaccccagccctgcccaaccctggccagctgagccgcatccaggacctggtggccaggaagctggaggagacccaggagctgctggccgaggtgcagggcctgggagatggcaagaggaaggccaaggaccccccaagaagccccccagacagcgagagcgagcagctgctgctggagacagagcggctgctgggggaggccagcagcaactggagccaggccaagagggtgctgcaggaggtgcgggagctgcgggacctgtaccggcagatggacctgcagaccccagacagccacctgcggcagaccaccccccacagccagtacaggaagagcctgatgtag

SEQ ID NO: 21194 - DNA, 1230 bp, synthetic construct
  misc_feature 1..1230: note = Description of Artificial Sequence: Synthetic coding sequence
  source 1..1230: mol_type = other DNA
atgatgaagaagaacaacagcgccaagaggggcccccaggacggcaaccagcagcctgcccctcctgagaaggtgggctgggtgaggaagttctgtgggaagggcatcttccgggagatctggaagaacagatatgtggtgctgaagggggaccagctgtacatcagcgagaaggaggtgaaggatgagaagaacatccaggaggtgtttgacctgagtgactatgaaaaatgtgaggagctgaggaagagcaagagccgcagcaagaagaaccacagcaagttcaccctggcccacagcaagcagcccggcaacacagcccccaacctgatcttcctggccgtgtccccagaggagaaggagagctggatcaatgccctgaacagcgccatcacccgggccaagaaccgcatcctggatgaggtgacagtggaggaggacagctacctggcccaccccacccgggaccgggccaagatccagcacagccggcggccccccacccggggccacctgatggctgtggccagcaccagcaccagtgatggcatgctgaccctggacctgatccaggaggaggaccccagccctgaggagcccaccagctgtgccgagagcttccgggtggacctggacaagtctgtggcccagctggccggcagcagaagaagagctgacagcgaccgcatccagcccagcgctgaccgggccagcagcctgagccggccctgggagaagacagacaagggggccacctacaccccccaggcccccaagaagctgacccccacagagaagggccgctgtgccagcctggaggagatcctgagccagagagatgctgccagcgcccggaccctgcagctgcgggcagaggagccccccaccccagccctgcccaaccctggccagctgagccgcatccaggacctggtggccaggaagctggaggagacccaggagctgctggccgaggtgcagggcctgggagatggcaagaggaaggccaaggaccccccaagaagccccccagacagcgagagcgagcagctgctgctggagacagagcggctgctgggggaggccagcagcaactggagccaggccaagagggtgctgcaggaggtgcgggagctgcgggacctgtaccggcagatggacctgcagaccccagacagccacctgcggcagaccaccccccacagccagtacaggaagagcctgatgtag

SEQ ID NO: 21195 - DNA, 681 bp, synthetic construct
  misc_feature 1..681: note = Description of Artificial Sequence: Synthetic coding sequence
  source 1..681: mol_type = other DNA
atgctgaccctggacctgatccaggaggaggaccccagccctgaggagcccaccagctgtgccgagagcttccgggtggacctggacaagtctgtggcccagctggccggcagcagaagaagagctgacagcgaccgcatccagcccagcgctgaccgggccagcagcctgagccggccctgggagaagacagacaagggggccacctacaccccccaggcccccaagaagctgacccccacagagaagggccgctgtgccagcctggaggagatcctgagccagagagatgctgccagcgcccggaccctgcagctgcgggcagaggagccccccaccccagccctgcccaaccctggccagctgagccgcatccaggacctggtggccaggaagctggaggagacccaggagctgctggccgaggtgcagggcctgggagatggcaagaggaaggccaaggacccccccaggagccccccagattctgagagcgagcagctgctgctggagacagagcggctgctgggggaggccagcagcaactggagccaggccaagagggtgctgcaggaggtgcgggagctgcgggacctgtaccggcagatggacctgcagaccccagacagccacctgcggcagaccaccccccacagccagtacaggaagagcctgatgtag

SEQ ID NO: 21196 - DNA, 675 bp, synthetic construct
  misc_feature 1..675: note = Description of Artificial Sequence: Synthetic coding sequence
  source 1..675: mol_type = other DNA
atgcccagcaccctgcccagccctgagcccaggacagtgtcctggatgagcaccagcctgcaggtgacagtggaggaggacagctacctggcccaccccacccgggaccgggccaagatccagcacagccggcggccccccacccggggccacctgatggctgtggccagcaccagcaccagtgatggcatgctgaccctggacctgatccaggaggaggaccccagccctgaggagcccaccagctgtgccgagagcttccgggtggacctggacaagtctgtggcccagctggccggcagcagaagaagagctgacagcgaccgcatccagcccagcgctgaccgggccagcagcctgagccggccctgggagaagacagacaagggggccacctacaccccccaggcccccaagaagctgacccccacagagaagggccgctgtgccagcctggaggagatcctgagccagagagatgctgccagcgcccggaccctgcagctgcgggcagaggagccccccaccccagccctgcccaaccctggccagctgagccgcatccaggacctggtggccaggaagctggaggagacccaggagctgctggccgaggtgcagggcctgggagatggcaagaggaaggccaaggaccccccaagaagccccccatag

SEQ ID NO: 21197 - DNA, 384 bp, synthetic construct
  misc_feature 1..384: note = Description of Artificial Sequence: Synthetic coding sequence
  source 1..384: mol_type = other DNA
atgacagctgctgccacagccaccgtgctgaaggagggcgtgctggagaagaggtctgggggcctgctgcagctgtggaagaggaagagatgtgtgctgacagagcggggcctgcagctgtttgaggccaagggcaccggcggccggcccaaggagctgagctttgcccgcatcaaggctgtggagtgtgtggagagcacaggccgccacatctacttcaccctggtgacagaaggaggaggagaaattgacttccgctgccccctggaggaccccggctggaatgcccagatcaccctgggcctggtgaagttcaagaaccagcaggccatccagacagtgcgggcccggcagagcctgggcaccggcaccctggtgtcctag

SEQ ID NO: 21198 - DNA, 384 bp, synthetic construct; identical to SEQ ID NO: 21197
  misc_feature 1..384: note = Description of Artificial Sequence: Synthetic coding sequence
  source 1..384: mol_type = other DNA

SEQ ID NO: 21199 - DNA, 1710 bp, synthetic construct
  misc_feature 1..1710: note = Description of Artificial Sequence: Synthetic coding sequence
  source 1..1710: mol_type = other DNA
atgagctttggcatcctgaagccagacctgcgcatcgtgtttgtgcacaacaaggctgtgatctggcagaagagccgggtgtctgaccacaagatggccctgatgtctgtgctgggcacagctgtgatgaacaacatggagagcttccagtaccacagcgaggagagccagatctacctgagcggcttcctgcccaagtgtgatgctgaccacagcttcaccagcctgagcaccccagagaggagcttcatcttcatcaacagcaggcctgtgcaccagaaggacatcctgaagctgatccgccaccactacaacctgaagtgcctgaaggagagcacccggctgtaccctgtgttcttcctgaagattgatgtgcccacagcagatgtggatgtgaacctgaccccagacaagagccaggtgctgctgcagaacaaggagagcgtgctgattgccctggagaacctgatgaccacctgctacggccccctgcccagcaccaacagctatgagaacaacaagacagatgtgtctgctgctgacatcgtgctgagcaagacagctgagacagatgtgctcttcaacaaggtggagagcagcggcaagaactacagcaatgtggacaccagcgtcatccccttccagaatgacatgcacaatgatgaaagtggcaagaacacagatgactgcctgaaccaccagatcagcattggagactttggctacggccactgcagcagcgagatcagcaacatcgacaagaacaccaagaatgccttccaggacatctccatgagcaatgtgtcctgggagaacagccagacagagtacagcaagacctgcttcatcagctctgtgaagcacacccagagtgaaaatggaaacaaggaccacattgatgagagcggggagaatgaggaggaggccggcctggagaacagcagcgagatctctgcagatgagtggagccggggcaacatcctgaagaacagcgtgggggagaacatcgagcctgtgaagatcctggtgcctgagaagagcctgccctgcaaggtgagcaacaacaactaccccatccctgagcagatgaacctgaatgaagacagctgcaacaagaagagcaatgtgattgacaacaagagcggcaaggtgacagcctatgacctgctgagcaacagagtcatcaagaagcccatgtctgccagcgccctgtttgtgcaggaccaccggccccagttcctgattgagaaccccaagaccagcctggaggatgccaccctgcagatcgaggagctgtggaagaccctgtctgaggaggagaagctgaagtatgaggagaaggccaccaaggacctggagcgctacaacagccagatgaagagggccatcgagcaggagagccagatgagcctgaaggatggcaggaagaagatcaagcccaccagcgcctggaacctggcccagaagcacaagctgaagaccagcctgagcaaccagcccaagctggatgagctgctgcagagccagatcgagaagagaagaagccagaacatcaagatggtgcagatccccttctccatgaagaacctgaagatcaacttcaagaagcagaacaaggtggacctggaggagaaggatgagccctgcctgatccacaacctgcgcttcccagatgcctggctgatgaccagcaagacagagagcttctag

SEQ ID NO: 21200 - DNA, 2271 bp, synthetic construct
  misc_feature 1..2271: note = Description of Artificial Sequence: Synthetic coding sequence
  source 1..2271: mol_type = other DNA
atgagctttggcatcctgaagccagacctgcgcatcgtgtttgtgcacaacaaggctgtgatctggcagaagagccgggtgtctgaccacaagatggccctgatgtctgtgctgggcacagctgtgatgaacaacatggagagcttccagtaccacagcgaggagagccagatctacctgagcggcttcctgcccaagtgtgatgctgaccacagcttcaccagcctgagcaccccagagaggagcttcatcttcatcaacagcaggcctgtgcaccagaaggacatcctgaagctgatccgccaccactacaacctgaagtgcctgaaggagagcacccggctgtaccctgtgttcttcctgaagattgatgtgcccacagcagatgtggatgtgaacctgaccccagacaagagccaggtgctgctgcagaacaaggagagcgtgctgattgccctggagaacctgatgaccacctgctacggccccctgcccagcaccaacagctatgagaacaacaagacagatgtgtctgctgctgacatcgtgctgagcaagacagctgagacagatgtgctcttcaacaaggtggagagcagcggcaagaactacagcaatgtggacaccagcgtcatccccttccagaatgacatgcacaatgatgaaagtggcaagaacacagatgactgcctgaaccaccagatcagcattggagactttggctacggccactgcagcagcgagatcagcaacatcgacaagaacaccaagaatgccttccaggacatctccatgagcaatgtgtcctgggagaacagccagacagagtacagcaagacctgcttcatcagctctgtgaagcacacccagagtgaaaatggaaacaaggaccacattgatgagagcggggagaatgaggaggaggccggcctggagaacagcagcgagatctctgcagatgagtggagccggggcaacatcctgaagaacagcgtgggggagaacatcgagcctgtgaagatcctggtgcctgagaagagcctgccctgcaaggtgagcaacaacaactaccccatccctgagcagatgaacctgaatgaagacagctgcaacaagaagagcaatgtgattgacaacaagagcggcaaggtgacagcctatgacctgctgagcaacagagtcatcaagaagcccatgtctgccagcgccctgtttgtgcaggaccaccggccccagttcctgattgagaaccccaagaccagcctggaggatgccaccctgcagatcgaggagctgtggaagaccctgtctgaggaggagaagctgaagtatgaggagaaggccaccaaggacctggagcgctacaacagccagatgaagagggccatcgagcaggagagccagatgagcctgaaggatggcaggaagaagatcaagcccaccagcgcctggaacctggcccagaagcacaagctgaagaccagcctgagcaaccagcccaagctggatgagctgctgcagagccagatcgagaagagaagaagccagaacatcaagatggtgcagatccccttctccatgaagaacctgaagatcaacttcaagaagcagaacaaggtggacctggaggagaaggatgagccctgcctgatccacaacctgcgcttcccagatgcctggctgatgaccagcaagacagaggtgatgctgctgaacccctacagagtggaggaggccctgctcttcaagaggctgctggagaaccacaagctgcctgctgagcccctggagaagcccatcatgctgacagagagcctcttcaacggcagccactacctggatgtgctgtacaagatgacagcagatgaccagcgctacagcggcagcacctacctgagtgacccccggctgacagccaacggcttcaagatcaagctgatccctggggtgtccatcacagagaactacctggagattgagggcatggccaactgcctgcccttctatggagtggccgacctgaaggagatcctgaatgccatcctgaacagaaatgccaaggaggtgtatgaatgtcggcccaggaaggtgatctcctacctggagggggaggccgtgcggctgagccggcagctgcccatgtacctgagcaaagaagacatccaggacatcatctacaggatgaagcaccagtttggaaatgagatcaaggaatgtgtgcacggccggcccttcttccaccacctgacctacctgcctgagaccacctag

SEQ ID NO: 21201 - DNA, 222 bp, synthetic construct
  misc_feature 1..222: note = Description of Artificial Sequence: Synthetic coding sequence
  source 1..222: mol_type = other DNA
atgaagcagctgcctgctgccaccgtgcggctgctgagcagcagccagatcatcacctctgtggtgtctgtggtgaaggagctgattgagaacagcctggatgctggggccacctctgtggatgtgaagctggagaactacggctttgacaagattgaggtgcgggacaatggagagggcatcaaggctgtggatgcccctgtgatggccatgaagtactag

SEQ ID NO: 21202 - DNA, 585 bp, synthetic construct
  misc_feature 1..585: note = Description of Artificial Sequence: Synthetic coding sequence
  source 1..585: mol_type = other DNA
atgaagcagctgcctgctgccaccgtgcggctgctgagcagcagccagatcatcacctctgtggtgtctgtggtgaaggagctgattgagaacagcctggatgctggggccacctctgtggatgtgaagctggagaactacggctttgacaagattgaggtgcgggacaatggagagggcatcaaggctgtggatgcccctgtgatggccatgaagtactacaccagcaagatcaacagccatgaggacctggagaacctgaccacctacggcttccggggggaggccctgggcagcatctgctgcatcgccgaggtgctgatcaccaccaggacagctgctgacaacttcagcacccagtatgtgctggatggcagcggccacatcctgagccagaagcccagccacctgggccagggcaccaccgtgacagccctgcggctcttcaagaacctgcctgtgaggaagcagttctacagcacagccaagaagtgcaaggatgagatcaagaagatccaggacctgctgatgagctttggcatcctgaagccagacctgcgcatcgtgtttgtgcacaacaagtag

SEQ ID NO: 21203 - DNA, 2271 bp, synthetic construct; identical to SEQ ID NO: 21200
  misc_feature 1..2271: note = Description of Artificial Sequence: Synthetic coding sequence
  source 1..2271: mol_type = other DNA

SEQ ID NO: 21204 - DNA, 2799 bp, synthetic construct
  misc_feature 1..2799: note = Description of Artificial Sequence: Synthetic coding sequence
  source 1..2799: mol_type = other DNA
atgaagcagctgcctgctgccaccgtgcggctgctgagcagcagccagatcatcacctctgtggtgtctgtggtgaaggagctgattgagaacagcctggatgctggggccacctctgtggatgtgaagctggagaactacggctttgacaagattgaggtgcgggacaatggagagggcatcaaggctgtggatgcccctgtgatggccatgaagtactacaccagcaagatcaacagccatgaggacctggagaacctgaccacctacggcttccggggggaggccctgggcagcatctgctgcatcgccgaggtgctgatcaccaccaggacagctgctgacaacttcagcacccagtatgtgctggatggcagcggccacatcctgagccagaagcccagccacctgggccagggcaccaccgtgacagccctgcggctcttcaagaacctgcctgtgaggaagcagttctacagcacagccaagaagtgcaaggatgagatcaagaagatccaggacctgctgatgagctttggcatcctgaagccagacctgcgcatcgtgtttgtgcacaacaaggctgtgatctggcagaagagccgggtgtctgaccacaagatggccctgatgtctgtgctgggcacagctgtgatgaacaacatggagagcttccagtaccacagcgaggagagccagatctacctgagcggcttcctgcccaagtgtgatgctgaccacagcttcaccagcctgagcaccccagagaggagcttcatcttcatcaacagcaggcctgtgcaccagaaggacatcctgaagctgatccgccaccactacaacctgaagtgcctgaaggagagcacccggctgtaccctgtgttcttcctgaagattgatgtgcccacagcagatgtggatgtgaacctgaccccagacaagagccaggtgctgctgcagaacaaggagagcgtgctgattgccctggagaacctgatgaccacctgctacggccccctgcccagcaccaacagctatgagaacaacaagacagatgtgtctgctgctgacatcgtgctgagcaagacagctgagacagatgtgctcttcaacaaggtggagagcagcggcaagaactacagcaatgtggacaccagcgtcatccccttccagaatgacatgcacaatgatgaaagtggcaagaacacagatgactgcctgaaccaccagatcagcattggagactttggctacggccactgcagcagcgagatcagcaacatcgacaagaacaccaagaatgccttccaggacatctccatgagcaatgtgtcctgggagaacagccagacagagtacagcaagacctgcttcatcagctctgtgaagcacacccagagtgaaaatggaaacaaggaccacattgatgagagcggggagaatgaggaggaggccggcctggagaacagcagcgagatctctgcagatgagtggagccggggcaacatcctgaagaacagcgtgggggagaacatcgagcctgtgaagatcctggtgcctgagaagagcctgccctgcaaggtgagcaacaacaactaccccatccctgagcagatgaacctgaatgaagacagctgcaacaagaagagcaatgtgattgacaacaagagcggcaaggtgacagcctatgacctgctgagcaacagagtcatcaagaagcccatgtctgccagcgccctgtttgtgcaggaccaccggccccagttcctgattgagaaccccaagaccagcctggaggatgccaccctgcagatcgaggagctgtggaagaccctgtctgaggaggagaagctgaagtatgaggagaaggccaccaaggacctggagcgctacaacagccagatgaagagggccatcgagcaggagagccagatgagcctgaaggatggcaggaagaagatcaagcccaccagcgcctggaacctggcccagaagcacaagctgaagaccagcctgagcaaccagcccaagctggatgagctgctgcagagccagatcgagaagagaagaagccagaacatcaagatggtgcagatccccttctccatgaagaacctgaagatcaacttcaagaagcagaacaaggtggacctggaggagaaggatgagccctgcctgatccacaacctgcgcttcccagatgcctggctgatgaccagcaagacagaggtgatgctgctgaacccctacagagtggaggaggccctgctcttcaagaggctgctggagaaccacaagctgcctgctgagcccctggagaagcccatcatgctgacagagagcctcttcaacggcagccactacctggatgtgctgtacaagatgacagcagatgaccagcgctacagcggcagcacctacctgagtgacccccggctgacagccaacggcttcaagatcaagctgatccctggggtgtccatcacagagaactacctggagattgagggcatggccaactgcctgcccttctatggagtggccgacctgaaggagatcctgaatgccatcctgaacagaaatgccaaggaggtgtatgaatgtcggcccaggaaggtgatctcctacctggagggggaggccgtgcggctgagccggcagctgcccatgtacctgagcaaagaagacatccaggacatcatctacaggatgaagcaccagtttggaaatgagatcaaggaatgtgtgcacggccggcccttcttccaccacctgacctacctgcctgagaccacctag

SEQ ID NO: 21205 - DNA, 135 bp, synthetic construct
  misc_feature 1..135: note = Description of Artificial Sequence: Synthetic coding sequence
  source 1..135: mol_type = other DNA
atgaagcagctgcctgctgccaccgtgcggctgctgagcagcagccagatcatcacctctgtggtgtctgtggtgaaggagctgattgagaacagcctggatgctggggccacctctgtggatgtgaagctgtag

SEQ ID NO: 21206 - DNA, 2313 bp, synthetic construct
  misc_feature 1..2313: note = Description of Artificial Sequence: Synthetic coding sequence
  source 1..2313: mol_type = other DNA
atgaagcagctgcctgctgccaccgtgcggctgctgagcagcagccagatcatcacctctgtggtgtctgtggtgaaggagctgattgagaacagcctggatgctggggccacctctgtggatgtgaagctggagaactacggctttgacaagattgaggtgcgggacaatggagagggcatcaaggctgtggatgcccctgtgatggccatgaagtactacaccagcaagatcaacagccatgaggacctggagaacctgaccacctacggcttccggggggaggccctgggcagcatctgctgcatcgccgaggtgctgatcaccaccaggacagctgctgacaacttcagcacccagtatgtgctggatggcagcggccacatcctgagccagaagcccagccacctgggccagggcaccaccgtgacagccctgcggctcttcaagaacctgcctgtgaggaagcagttctacagcacagccaagaagtgcaaggatgagatcaagaagatccaggacctgctgatgagctttggcatcctgaagccagacctgcgcatcgtgtttgtgcacaacaaggctgtgatctggcagaagagccgggtgtctgaccacaagatggccctgatgtctgtgctgggcacagctgtgatgaacaacatggagagcttccagtaccacagcgaggagagccagatctacctgagcggcttcctgcccaagtgtgatgctgaccacagcttcaccagcctgagcaccccagagaggagcttcatcttcatcaacagcaggcctgtgcaccagaaggacatcctgaagctgatccgccaccactacaacctgaagtgcctgaaggagagcacccggctgtaccctgtgttcttcctgaagattgatgtgcccacagcagatgtggatgtgaacctgaccccagacaagagccaggtgctgctgcagaacaaggagagcgtgctgattgccctggagaacctgatgaccacctgctacggccccctgcccagcaccaacagctatgagaacaacaagacagatgtgtctgctgctgacatcgtgctgagcaagacagctgagacagatgtgctcttcaacaaggtggagagcagcggcaagaactacagcaatgtggacaccagcgtcatccccttccagaatgacatgcacaatgatgaaagtggcaagaacacagatgactgcctgaaccaccagatcagcattggagactttggctacggccactgcagcagcgagatcagcaacatcgacaagaacaccaagaatgccttccaggacatctccatgagcaatgtgtcctgggagaacagccagacagagtacagcaagacctgcttcatcagctctgtgaagcacacccagagtgaaaatggaaacaaggaccacattgatgagagcggggagaatgaggaggaggccggcctggagaacagcagcgagatctctgcagatgagtggagccggggcaacatcctgaagaacagcgtgggggagaacatcgagcctgtgaagatcctggtgcctgagaagagcctgccctgcaaggtgagcaacaacaactaccccatccctgagcagatgaacctgaatgaagacagctgcaacaagaagagcaatgtgattgacaacaagagcggcaaggtgacagcctatgacctgctgagcaacagagtcatcaagaagcccatgtctgccagcgccctgtttgtgcaggaccaccggccccagttcctgattgagaaccccaagaccagcctggaggatgccaccctgcagatcgaggagctgtggaagaccctgtctgaggaggagaagctgaacctcttcaacggcagccactacctggatgtgctgtacaagatgacagcagatgaccagcgctacagcggcagcacctacctgagtgacccccggctgacagccaacggcttcaagatcaagctgatccctggggtgtccatcacagagaactacctggagattgagggcatggccaactgcctgcccttctatggagtggccgacctgaaggagatcctgaatgccatcctgaacagaaatgccaaggaggtgtatgaatgtcggcccaggaaggtgatctcctacctggagggggaggccgtgcggctgagccggcagctgcccatgtacctgagcaaagaagacatccaggacatcatctacaggatgaagcaccagtttggaaatgagatcaaggaatgtgtgcacggccggcccttcttccaccacctgacctacctgcctgagaccacctag

SEQ ID NO: 21207 - DNA, 2682 bp, synthetic construct
  misc_feature 1..2682: note = Description of Artificial Sequence: Synthetic coding sequence
  source 1..2682: mol_type = other DNA
atgaagcagctgcctgctgccaccgtgcggctgctgagcagcagccagatcatcacctctgtggtgtctgtggtgaaggagctgattgagaacagcctggatgctggggccacctctgtggatgtgaagctggagaactacggctttgacaagattgaggtgcgggacaatggagagggcatcaaggctgtggatgcccctgtgatggccatgaagtactacaccagcaagatcaacagccatgaggacctggagaacctgaccacctacggcttccggggggaggccctgggcagcatctgctgcatcgccgaggtgctgatcaccaccaggacagctgctgacaacttcagcacccagtatgtgctggatggcagcggccacatcctgagccagaagcccagccacctgggccagggcaccaccgtgacagccctgcggctcttcaagaacctgcctgtgaggaagcagttctacagcacagccaagaagtgcaaggatgagatcaagaagatccaggacctgctgatgagctttggcatcctgaagccagacctgcgcatcgtgtttgtgcacaacaagatctacctgagcggcttcctgcccaagtgtgatgctgaccacagcttcaccagcctgagcaccccagagaggagcttcatcttcatcaacagcaggcctgtgcaccagaaggacatcctgaagctgatccgccaccactacaacctgaagtgcctgaaggagagcacccggctgtaccctgtgttcttcctgaagattgatgtgcccacagcagatgtggatgtgaacctgaccccagacaagagccaggtgctgctgcagaacaaggagagcgtgctgattgccctggagaacctgatgaccacctgctacggccccctgcccagcaccaacagctatgagaacaacaagacagatgtgtctgctgctgacatcgtgctgagcaagacagctgagacagatgtgctcttcaacaaggtggagagcagcggcaagaactacagcaatgtggacaccagcgtcatccccttccagaatgacatgcacaatgatgagagcggcaagaacacagatgactgcctgaaccaccagatcagcatcggggactttggctacggccactgcagcagcgagatcagcaacatcgacaagaacaccaagaatgccttccaggacatctccatgagcaatgtgtcctgggagaacagccagacagagtacagcaagacctgcttcatcagctctgtgaagcacacccagagtgaaaatggaaacaaggaccacattgatgaaagtggagaaaatgaggaggaggccggcctggagaacagcagcgagatctctgcagatgagtggagccggggcaacatcctgaagaacagcgtgggagaaaatattgagcctgtgaagatcctggtgcctgagaagagcctgccctgcaaggtgagcaacaacaactaccccatccctgagcagatgaacctgaatgaagacagctgcaacaagaagagcaatgtcatcgacaacaagagcggcaaggtgacagcctatgacctgctgagcaacagagtcatcaagaagcccatgtctgccagcgccctgtttgtgcaggaccaccggccccagttcctgattgagaaccccaagaccagcctggaggatgccaccctgcagatcgaggagctgtggaagaccctgtctgaggaggagaagctgaagtatgaggagaaggccaccaaggacctggagcgctacaacagccagatgaagagggccatcgagcaggagagccagatgagcctgaaggatggcaggaagaagatcaagcccaccagcgcctggaacctggcccagaagcacaagctgaagaccagcctgagcaaccagcccaagctggatgagctgctgcagagccagatcgagaagaggaggagccagaacatcaagatggtgcagatccccttctccatgaagaacctgaagatcaacttcaagaagcagaacaaggtggacctggaggagaaggatgagccctgcctgatccacaacctgcgcttcccagatgcctggctgatgaccagcaagacagaggtgatgctgctgaacccctacagagtggaggaggccctgctcttcaagaggctgctggagaaccacaagctgcctgctgagcccctggagaagcccatcatgctgacagagagcctcttcaacggcagccactacctggatgtgctgtacaagatgacagcagatgaccagcgctacagcggcagcacctacctgagtgacccccggctgacagccaacggcttcaagatcaagctgatccctggggtgtccatcacagagaactacctggagattgagggcatggccaactgcctgcccttctacggcgtggccgacctgaaggagatcctgaatgccatcctgaacagaaatgccaaggaggtgtatgagtgccggcccaggaaggtgatctcctacctggagggggaggccgtgcggctgagccggcagctgcccatgtacctgagcaaggaggacatccaggacatcatctacaggatgaagcaccagtttggaaatgagatcaaggaatgtgtgcacggccggcccttcttccaccacctgacctacctgcctgagaccacctag

SEQ ID NO: 21208 - DNA, 2589 bp, synthetic construct
  misc_feature 1..2589: note = Description of Artificial Sequence: Synthetic coding sequence
  source 1..2589: mol_type = other DNA
atggagcgggcagagagcagcagcacagagcccgccaaggccatcaagcccatcgacaggaagtctgtgcaccagatctgcagcggccaggtggtgctgagcctgagcacagctgtgaaggagctggtggagaacagcctggatgctggggccaccaacatcgacctgaagctgaaggactatggagtggacctgattgaggtgtctgacaatggctgcggcgtggaggaggagaactttgagggcctgaccctgaagcaccacaccagcaagatccaggagtttgctgacctgacccaggtggagaccttcggcttccggggggaggccctgagcagcctgtgtgccctgagtgatgtgaccatcagcacctgccacgccagcgccaaggtgggcacccggctgatgtttgaccacaacgggaagatcatccagaagaccccctacccccggccccggggcaccaccgtgtctgtgcagcagctgttcagcaccctgcctgtgcgccacaaggagttccagaggaacatcaagaaggagtatgccaagatggtgcaggtgctgcacgcctactgcatcatctctgctggcatccgggtgtcctgcaccaaccagctgggccagggcaagaggcagcctgtggtgtgcacaggaggcagccccagcatcaaggaaaatattggctctgtgtttggccagaagcagctgcagagcctcatcccctttgtgcagctgccccccagcgacagcgtgtgtgaggagtatggcctgagctgcagtgatgccctgcacaacctcttctacatcagcggcttcatcagccagtgcacccacggcgtgggccgcagcagcacagaccggcagttcttcttcatcaacagaagaccctgtgaccctgccaaggtgtgccgcctggtgaatgaggtgtaccacatgtacaacagacaccagtacccctttgtggtgctgaacatctctgtggacagtgaatgtgtggacatcaacgtgaccccagacaagaggcagatcctgctgcaggaggagaagctgctgctggccgtgctgaagaccagcctcatcggcatgtttgacagtgatgtgaacaagctgaatgtgtcccagcagcccctgctggatgtggagggcaacctgatcaagatgcatgctgctgacctggagaagcccatggtggagaagcaggaccagagccccagcctgaggactggagaggagaagaaggatgtgtccatcagccggctgcgggaggccttcagcctgcggcacaccacagagaacaagccccacagccccaagaccccagagcccaggaggagccccctgggccagaagaggggcatgctgagcagcagcaccagcggggccatcagtgacaagggcgtgctgcggccccagaaggaggccgtgagcagcagccacggccccagcgaccccacagacagagctgaggtggagaaggacagcggccacggcagcacctctgtggacagcgagggcttcagcatcccagacaccggcagccactgcagcagtgaatatgctgccagcagccctggggaccggggcagccaggagcacgtggacagccaggagaaggcccccaagacagatgacagcttcagtgatgtggactgccacagcaaccaggaggacaccggctgcaagttccgggtgctgccccagcccaccaacctggccacccccaacaccaagcgcttcaagaaggaggagatcctgagcagcagtgacatctgccagaagctggtgaacacccaggacatgtctgccagccaggtggatgtggccgtgaagatcaacaagaaggtggtgcccctggacttctccatgagcagcctggccaagaggatcaagcagctgcaccacgaggcccagcagagcgagggggagcagaactacaggaagttccgggccaagatctgccctggagagaaccaggccgcagaagatgagctgaggaaggagatcagcaagaccatgtttgctgagatggagatcatcggccagttcaacctgggcttcatcatcaccaagctgaatgaagacatcttcatcgtggaccagcacgccacagatgagaagtacaactttgagatgctgcagcagcacacagtgctgcagggccagaggctcatcgccccccagaccctgaacctgacagctgtgaatgaagctgtgctgattgagaacctggagatcttcaggaagaatggatttgattttgtgattgatgaaaatgcccctgtgacagagcgggccaagctgatcagcctgcccaccagcaagaactggaccttcggcccccaggatgtggatgagctgatcttcatgctgagtgacagccctggggtgatgtgccggcccagccgggtgaagcagatgtttgccagccgggcctgcaggaagtctgtgatgattggaacagccctgaacaccagcgagatgaagaagctgatcacccacatgggagagatggaccacccctggaactgcccccacggccggcccaccatgaggcacatcgccaacctgggcgtcatcagccagaactag

SEQ ID NO: 21209 - DNA, 1386 bp, synthetic construct
  misc_feature 1..1386: note = Description of Artificial Sequence: Synthetic coding sequence
  source 1..1386: mol_type = other DNA
atggagcgggcagagagcagcagcacagagcccgccaaggccatcaagcccatcgacaggaagtctgtgcaccagatctgcagcggccaggtggtgctgagcctgagcacagctgtgaaggagctggtggagaacagcctggatgctggggccaccaacatcgacctgaagctgaaggactatggagtggacctgattgaggtgtctgacaatggctgcggcgtggaggaggagaactttgagggcctgaccctgaagcaccacaccagcaagatccaggagtttgctgacctgacccaggtggagaccttcggcttccggggggaggccctgagcagcctgtgtgccctgagtgatgtgaccatcagcacctgccacgccagcgccaaggtgggcacccggctgatgtttgaccacaacgggaagatcatccagaagaccccctacccccggccccggggcaccaccgtgtctgtgcagcagctgttcagcaccctgcctgtgcgccacaaggagttccagaggaacatcaagaaggagtatgccaagatggtgcaggtgctgcacgcctactgcatcatctctgctggcatccgggtgtcctgcaccaaccagctgggccagggcaagaggcagcctgtggtgtgcacaggaggcagccccagcatcaaggaaaatattggctctgtgtttggccagaagcagctgcagagcctcatcccctttgtgcagctgccccccagcgacagcgtgtgtgaggagtatggcctgagctgcagtgatgccctgcacaacctcttctacaagaccatgtttgctgagatggagatcatcggccagttcaacctgggcttcatcatcaccaagctgaatgaagacatcttcatcgtggaccagcacgccacagatgagaagtacaactttgagatgctgcagcagcacacagtgctgcagggccagaggctgattgccccccagaccctgaacctgacagctgtgaatgaggccgtgctgattgagaacctggagatcttcaggaagaatggatttgattttgtgattgatgaaaatgcccctgtgacagagcgggccaagctgatcagcctgcccaccagcaagaactggaccttcggcccccaggatgtggatgagctgatcttcatgctgagtgacagccctggggtgatgtgccggcccagccgggtgaagcagatgtttgccagccgggcctgcaggaagtctgtgatgattggaacagccctgaacaccagcgagatgaagaagctgatcacccacatgggagagatggaccacccctggaactgcccccacggccggcccaccatgaggcacatcgccaacctgggcgtcatcagccagaactag

SEQ ID NO: 21210 - DNA, 2448 bp, synthetic construct
  misc_feature 1..2448: note = Description of Artificial Sequence: Synthetic coding sequence
  source 1..2448: mol_type = other DNA
atggagcgggcagagagcagccgcagcaagctgaaggactatggagtggacctgattgaggtgtctgacaatggctgcggcgtggaggaggagaactttgagggcctgaccctgaagcaccacaccagcaagatccaggagtttgctgacctgacccaggtggagaccttcggcttccggggggaggccctgagcagcctgtgtgccctgagtgatgtgaccatcagcacctgccacgccagcgccaaggtgggcacccggctgatgtttgaccacaacgggaagatcatccagaagaccccctacccccggccccggggcaccaccgtgtctgtgcagcagctgttcagcaccctgcctgtgcgccacaaggagttccagaggaacatcaagaaggagtatgccaagatggtgcaggtgctgcacgcctactgcatcatctctgctggcatccgggtgtcctgcaccaaccagctgggccagggcaagaggcagcctgtggtgtgcaccggcggcagccccagcatcaaggagaacatcggctctgtgtttggccagaagcagctgcagagcctcatcccctttgtgcagctgcccccaagtgacagcgtgtgtgaggagtatggcctgagctgcagtgatgccctgcacaacctcttctacatcagcggcttcatcagccagtgcacccatggagtgggccgcagcagcacagaccggcagttcttcttcatcaacagaagaccctgtgaccctgccaaggtgtgccgcctggtgaatgaggtgtaccacatgtacaacagacaccagtacccctttgtggtgctgaacatctctgtggacagtgaatgtgtggacatcaacgtgaccccagacaagaggcagatcctgctgcaggaggagaagctgctgctggccgtgctgaagaccagcctgattggcatgtttgacagtgatgtgaacaagctgaatgtgtcccagcagcccctgctggatgtggagggcaacctgatcaagatgcacgccgctgacctggagaagcccatggtggagaagcaggaccagagccccagcctgaggactggagaggagaagaaggatgtgtccatcagccggctgcgggaggccttcagcctgcggcacaccacagagaacaagccccacagccccaagaccccagagccccggcgcagccccctgggccagaagaggggcatgctgagcagcagcaccagcggggccatcagtgacaagggcgtgctgcggccccagaaggaggccgtgagcagcagccacggccccagcgaccccacagacagagctgaggtggagaaggacagcggccacggcagcacctctgtggacagcgagggcttcagcatcccagacaccggcagccactgcagcagtgaatatgctgccagcagccctggggaccggggcagccaggagcacgtggacagccaggagaaggcccccaagacagatgacagcttcagtgatgtggactgccacagcaaccaggaggacaccggctgcaagttccgggtgctgccccagcccaccaacctggccacccccaacaccaagcgcttcaagaaggaggagatcctgagcagcagtgacatctgccagaagctggtgaacacccaggacatgtctgccagccaggtggatgtggccgtgaagatcaacaagaaggtggtgcccctggacttctccatgagcagcctggccaagaggatcaagcagctgcaccacgaggcccagcagagcgagggggagcagaactacaggaagttccgggccaagatctgccctggagagaaccaggccgcagaagatgagctgaggaaggagatcagcaagaccatgtttgctgagatggagatcatcggccagttcaacctgggcttcatcatcaccaagctgaatgaagacatcttcatcgtggaccagcacgccacagatgagaagtacaactttgagatgctgcagcagcacacagtgctgcagggccagaggctgattgccccccagaccctgaacctgacagctgtgaatgaggccgtgctgattgagaacctggagatcttcaggaagaatggatttgattttgtgattgatgaaaatgcccctgtgacagagcgggccaagctgatcagcctgcccaccagcaagaactggaccttcggcccccaggatgtggatgagctgatcttcatgctgagtgacagccctggggtgatgtgccggcccagccgggtgaagcagatgtttgccagccgggcctgcaggaagtctgtgatgattggaacagccctgaacaccagcgagatgaagaagctgatcacccacatgggagagatggaccacccctggaactgcccccacggccggcccaccatgaggcacatcgccaacctgggcgtcatcagccagaactag

SEQ ID NO: 21211 - DNA, 1719 bp, synthetic construct
  misc_feature 1..1719: note = Description of Artificial Sequence: Synthetic coding sequence
  source 1..1719: mol_type = other DNA
atggagcgggcagagagcagcagcacagagcccgccaaggccatcaagcccatcgacaggaagtctgtgcaccagatctgcagcggccaggtggtgctgagcctgagcacagctgtgaaggagctggtggagaacagcctggatgctggggccaccaacatcgacctgaagctgaaggactatggagtggacctgattgaggtgtctgacaatggctgcggcgtggaggaggagaactttgagggcctgaccctgaagcaccacaccagcaagatccaggagtttgctgacctgacccaggtggagaccttcggcttccggggggaggccctgagcagcctgtgtgccctgagtgatgtgaccatcagcacctgccacgccagcgccaaggtgggcacccggctgatgtttgaccacaacgggaagatcatccagaagaccccctacccccggccccggggcaccaccgtgtctgtgcagcagctgttcagcaccctgcctgtgcgccacaaggagttccagaggaacatcaagaaggagtatgccaagatggtgcaggtgctgcacgcctactgcatcatctctgctggcatccgggtgtcctgcaccaaccagctgggccagggcaagaggcagcctgtggtgtgcacaggaggcagccccagcatcaaggaaaatattggctctgtgtttggccagaagcagctgcagagcctcatcccctttgtgcagctgccccccagcgacagcgtgtgtgaggagtatggcctgagctgcagtgatgccctgcacaacctcttctacatcagcggcttcatcagccagtgcacccacggcgtgggccgcagcagcacagaccggcagttcttcttcatcaacagaagaccctgtgaccctgccaaggtgtgccgcctggtgaatgaggtgtaccacatgtacaacagacaccagtacccctttgtggtgctgaacatctctgtggacagtgaatgtgtggacatcaacgtgaccccagacaagaggcagatcctgctgcaggaggagaagctgctgctggccgtgctgaagaccagcctcatcggcatgtttgacagtgatgtgaacaagctgaatgtgtcccagcagcccctgctggatgtggagggcaacctgatcaagatgcatgctgctgacctggagaagcccatggtggagaagcaggaccagagccccagcctgaggactggagaggagaagaaggatgtgtccatcagccggctgcgggaggccttcagcctgcggcacaccacagagaacaagccccacagccccaagaccccagagcccaggaggagccccctgggccagaagaggggcatgctgagcagcagcaccagcggggccatcagtgacaagggcgtgctgcggccccagaaggaggccgtgagcagcagccacggccccagcgaccccacagacagagctgaggtggagaaggacagcggccacggcagcacctctgtggacagcgagggcttcagcatcccagacaccggcagccactgcagcagtgaatatgctgccagcagccctggggaccggggcagccaggagcacgtggacagccaggagaaggcccccaagacagatgacagcttcagtgatgtggactgccacagcaaccaggaggacaccggcctgaagacaggccccagcgaccccaggacctccatgaactag

SEQ ID NO: 21212 - DNA, 2271 bp, synthetic construct
  misc_feature 1..2271: note = Description of Artificial Sequence: Synthetic coding sequence
  source 1..2271: mol_type = other DNA
atgtggggcagaagaaggaagctgcggcggctgaatgatgtgaccatcagcacctgccacgccagcgccaaggtgggcacccggctgatgtttgaccacaacgggaagatcatccagaagaccccctacccccggccccggggcaccaccgtgtctgtgcagcagctgttcagcaccctgcctgtgcgccacaaggagttccagaggaacatcaagaaggagtatgccaagatggtgcaggtgctgcacgcctactgcatcatctctgctggcatccgggtgtcctgcaccaaccagctgggccagggcaagaggcagcctgtggtgtgcacaggaggcagccccagcatcaaggaaaatattggctctgtgtttggccagaagcagctgcagagcctcatcccctttgtgcagctgccccccagcgacagcgtgtgtgaggagtatggcctgagctgcagtgatgccctgcacaacctcttctacatcagcggcttcatcagccagtgcacccacggcgtgggccgcagcagcacagaccggcagttcttcttcatcaacagaagaccctgtgaccctgccaaggtgtgccgcctggtgaatgaggtgtaccacatgtacaacagacaccagtacccctttgtggtgctgaacatctctgtggacagtgaatgtgtggacatcaacgtgaccccagacaagaggcagatcctgctgcaggaggagaagctgctgctggccgtgctgaagaccagcctcatcggcatgtttgacagtgatgtgaacaagctgaatgtgtcccagcagcccctgctggatgtggagggcaacctgatcaagatgcatgctgctgacctggagaagcccatggtggagaagcaggaccagagccccagcctgaggactggagaggagaagaaggatgtgtccatcagccggctgcgggaggccttcagcctgcggcacaccacagagaacaagccccacagccccaagaccccagagcccaggaggagccccctgggccagaagaggggcatgctgagcagcagcaccagcggggccatcagtgacaagggcgtgctgcggccccagaaggaggccgtgagcagcagccacggccccagcgaccccacagacagagctgaggtggagaaggacagcggccacggcagcacctctgtggacagcgagggcttcagcatcccagacaccggcagccactgcagcagtgaatatgctgccagcagccctggggaccggggcagccaggagcacgtggacagccaggagaaggcccccaagacagatgacagcttcagtgatgtggactgccacagcaaccaggaggacaccggctgcaagttccgggtgctgccccagcccaccaacctggccacccccaacaccaagcgcttcaagaaggaggagatcctgagcagcagtgacatctgccagaagctggtgaacacccaggacatgtctgccagccaggtggatgtggccgtgaagatcaacaagaaggtggtgcccctggacttctccatgagcagcctggccaagaggatcaagcagctgcaccacgaggcccagcagagcgagggggagcagaactacaggaagttccgggccaagatctgccctggagagaaccaggccgcagaagatgagctgaggaaggagatcagcaagaccatgtttgctgagatggagatcatcggccagttcaacctgggcttcatcatcaccaagctgaatgaagacatcttcatcgtggaccagcacgccacagatgagaagtacaactttgagatgctgcagcagcacacagtgctgcagggccagaggctcatcgccccccagaccctgaacctgacagctgtgaatgaagctgtgctgattgagaacctggagatcttcaggaagaatggatttgattttgtgattgatgaaaatgcccctgtgacagagcgggccaagctgatcagcctgcccaccagcaagaactggaccttcggcccccaggatgtggatgagctgatcttcatgctgagtgacagccctggggtgatgtgccggcccagccgggtgaagcagatgtttgccagccgggcctgcaggaagtctgtgatgattggaacagccctgaacaccagcgagatgaagaagctgatcacccacatgggagagatggaccacccctggaactgcccccacggccggcccaccatgaggcacatcgccaacctgggcgtcatcagccagaactag

SEQ ID NO: 21213 - DNA, 1812 bp, synthetic construct
  misc_feature 1..1812: note = Description of Artificial Sequence: Synthetic coding sequence
  source 1..1812: mol_type = other DNA
atgtctgctgctgtgacagctgggaagctggcccgggccccagctgaccccgggaaggccggcgtgcctggggtggccgcccctggggccccagctgctgcccccccagccaaggagatccctgaggtgctggtggaccccaggagcagaagaagatatgtgcggggccgcttcctgggcaaaggaggctttgccaagtgctttgagatcagtgatgctgacaccaaggaggtgtttgctgggaagatcgtgcccaagagcctgctgctgaagccccaccagcgggagaagatgtccatggagatcagcatccacaggagcctggcccaccagcacgtggtgggcttccacggcttctttgaagataatgactttgtgtttgtggtgctggagctgtgcagaagaagaagcctgctggagctgcacaagaggaggaaggccctgacagagcctgaggcccgctactacctgcggcagatcgtgctgggctgccagtacctgcacaggaacagagtcatccaccgggacctgaagctgggcaacctcttcctgaatgaagacctggaggtgaagatcggggactttggcctggccaccaaggtggagtatgatggagagaggaagaagaccctgtgtggcacccccaactacatcgcccctgaggtgctgagcaagaagggccacagctttgaggtggatgtgtggagcatcggctgcatcatgtacaccctgctggtgggcaagcccccatttgagaccagctgcctgaaggagacctacctgcgcatcaagaagaatgagtacagcatccccaagcacatcaaccctgtggccgccagcctcatccagaagatgctgcagacagaccccacagcccggcccaccatcaatgagctgctgaatgatgagttcttcaccagcggctacatcccagcccggctgcccatcacctgcctgaccatccccccacgcttcagcatcgcccccagcagcctggaccccagcaacaggaagcccctgactgtgctgaacaagggcctggagaaccccctgcctgagcggccccgggagaaggaggagcctgtggtgcgggagaccggggaggtggtggactgccacctgagtgacatgctgcagcagctgcacagcgtgaatgccagcaagcccagcgagcggggcctggtgcggcaggaggaggctgaagatcctgcctgcatccccatcttctgggtgtccaagtgggtggactacagcgacaagtatggcctgggctaccagctgtgtgacaacagcgtgggcgtgctcttcaatgacagcaccaggctcatcctgtacaatgatggagacagcctgcagtacatcgagagagatggaacagagagctacctgactgtgagcagccaccccaacagcctgatgaagaagatcaccctgctgaagtacttcaggaactacatgtctgagcacctgctgaaggccggggccaacatcaccccccgggagggagatgagctggcccggctgccctacctgcggacctggttccgcaccaggtctgccatcatcctgcacctgagcaatggatctgtgcagatcaacttcttccaggaccacaccaagctgatcctgtgccccctgatggctgctgtgacctacattgatgagaagagggacttccgcacctaccgcctgagcctgctggaggagtatggctgctgcaaggagctggccagccggctgcgctatgcccggaccatggtggacaagctgctgagcagccgcagcgccagcaaccggctgaaggccagctag

SEQ ID NO: 21214 - DNA, 744 bp, synthetic construct
  misc_feature 1..744: note = Description of Artificial Sequence: Synthetic coding sequence
  source 1..744: mol_type = other DNA
atgtctgctgctgtgacagctgggaagctggcccgggccccagctgaccccgggaaggccggcgtgcctggggtggccgcccctggggccccagctgctgcccccccagccaaggagatccctgaggtgctggtggaccccaggagcagaagaagatatgtgcggggccgcttcctgggcaaaggaggctttgccaagtgctttgagatcagtgatgctgacaccaaggaggtgtttgctgggaagatcgtgcccaagagcctgctgctgaagccccaccagcgggagaagatgtccatggagatcagcatccacaggagcctggcccaccagcacgtggtgggcttccacggcttctttgaagataatgactttgtgtttgtggtgctggagctgtgcagaagaagaagcctgctggagctgcacaagaggaggaaggccctgacagagcctgaggcccgctactacctgcggcagatcgtgctgggctgccagtacctgcacaggaacagagtcatccaccgggacctgaagctgggcaacctcttcctgaatgaagacctggaggtgaagatcggggactttggcctggccaccaaggtggagtatgatggagagaggaagaagaccctgtgtggcacccccaactacatcgccccagctgtgccctgcctgcagtgtgccccccagccccgctggctgggccgggccgccagcagcctgcaggtgggcgtggccgtgtag

SEQ ID NO: 21215 - DNA, 1521 bp, synthetic construct
  misc_feature 1..1521: note = Description of Artificial Sequence: Synthetic coding sequence
  source 1..1521: mol_type = other DNA
atgtccatggagatcagcatccacaggagcctggcccaccagcacgtggtgggcttccacggcttctttgaggacaatgactttgtgtttgtggtgctggagctgtgcagaagaagaagcctgctggagctgcacaagaggaggaaggccctgacagagcctgaggcccgctactacctgcggcagatcgtgctgggctgccagtacctgcacaggaacagagtcatccaccgggacctgaagctgggcaacctcttcctgaatgaagacctggaggtgaagattggagactttggcctggccaccaaggtggagtatgatggagagaggaagaagaccctgtgtggcacccccaactacatcgcccctgaggtgctgagcaagaagggccacagctttgaggtggatgtgtggagcatcggctgcatcatgtacaccctgctggtgggcaagcccccatttgagaccagctgcctgaaggagacctacctgcgcatcaagaagaatgagtacagcatccccaagcacatcaaccctgtggccgccagcctcatccagaagatgctgcagacagaccccacagcccggcccaccatcaatgagctgctgaatgatgagttcttcaccagcggctacatcccagcccggctgcccatcacctgcctgaccatccccccacgcttcagcatcgcccccagcagcctggaccccagcaacaggaagcccctgactgtgctgaacaagggcctggagaaccccctgcctgagcggccccgggagaaggaggagcctgtggtgcgggagactggagaggtggtggactgccacctgagtgacatgctgcagcagctgcacagcgtgaatgccagcaagcccagcgagcggggcctggtgcggcaggaggaggccgaggaccctgcctgcatccccatcttctgggtgtccaagtgggtggactacagcgacaagtatggcctgggctaccagctgtgtgacaacagcgtgggcgtgctcttcaatgacagcaccaggctcatcctgtacaatgatggagacagcctgcagtacatcgagagagatggaacagagagctacctgactgtgagcagccaccccaacagcctgatgaagaagatcaccctgctgaagtacttcaggaactacatgtctgagcacctgctgaaggccggggccaacatcaccccccgggagggagatgagctggcccggctgccctacctgcggacctggttccgcaccaggtctgccatcatcctgcacctgagcaatggatctgtgcagatcaacttcttccaggaccacaccaagctgatcctgtgccccctgatggctgctgtgacctacattgatgagaagagggacttccgcacctaccgcctgagcctgctggaggagtatggctgctgcaaggagctggccagccggctgcgctatgcccggaccatggtggacaagctgctgagcagccgcagcgccagcaaccggctgaaggccagctag

SEQ ID NO: 21216 - DNA, 1941 bp, synthetic construct
  misc_feature 1..1941: note = Description of Artificial Sequence: Synthetic coding sequence
  source 1..1941: mol_type = other DNA
atggagcctgctgctggcttcctgagcccccggcccttccagagagctgctgctgccccagcccccccagctggccctggccccccaccttctgccctgcggggccctgagctggagatgctggccggcctgcccaccagtgaccccggccgcctcatcacagaccccaggagcggccgcacctacctgaagggccgcctgctgggcaagggcggctttgcccgctgctatgaggccacagacacagagaccggcagcgcctatgctgtgaaggtgatcccccagagccgggtggccaagccccaccagcgggagaagatcctgaatgaaattgagctgcaccgggacctgcagcaccgccacatcgtgcgcttcagccaccactttgaagatgctgacaacatctacatcttcctggagctgtgcagcaggaagagcctggcccacatctggaaggcccggcacaccctgctggagcctgaggtgcgctactacctgcggcagatcctgagcggcctgaagtacctgcaccagaggggcatcctgcaccgggacctgaagctgggcaacttcttcatcacagagaacatggagctgaaggtgggggactttggcctggccgcccggctggagcccccagagcagaggaagaagaccatctgtggcacccccaactacgtggcccctgaggtgctgctgcggcagggccacggccctgaggctgatgtgtggagcctgggctgtgtgatgtacaccctgctgtgtggcagccccccatttgaaacagctgacctgaaggagacctaccgctgcatcaagcaggtgcactacaccctgcctgccagcctgagcctgcctgcccggcagctgctggccgccatcctgcgggccagcccccgggaccggcccagcattgaccagatcctgcggcatgacttcttcaccaagggctacaccccagaccggctgcccatcagcagctgtgtgacagtgcctgacctgaccccacccaacccagcccggagcctgtttgccaaggtgaccaagagcctgtttggaaggaagaagaagagcaagaaccacgcccaggagagagatgaggtgtctggcctggtgtctggcctgatgaggacctctgtgggccaccaggatgcccggcctgaggccccagctgccagcggccctgcccctgtgtccctggtggagacagcccctgaggacagcagcccccggggcaccctggccagcagtggagatggctttgaggagggcctgactgtggccaccgtggtggagagcgccctgtgtgccctgaggaactgcatcgccttcatgcccccagctgagcagaacccagcccccctggcccagcctgagcccctggtgtgggtgtccaagtgggtggactacagcaacaagtttggcttcggctaccagctgagcagcagaagagtggccgtgctcttcaatgatggcacccacatggccctgagcgccaacaggaagacagtgcactacaaccccaccagcaccaagcacttctccttctctgtgggcgctgtgccccgggccctgcagccccagctgggcatcctgcgctactttgccagctacatggagcagcacctgatgaagggcggggacctgcccagcgtggaggaggtggaggtgcctgccccacccctgctgctgcagtgggtgaagacagaccaggccctgctgatgctgttcagtgatggcaccgtgcaggtgaacttctatggagaccacaccaagctgatcctgagcggctgggagcccctgctggtgacctttgtggccaggaacagaagtgcctgcacctacctggccagccacctgcggcagctgggctgcagcccagacctgcggcagaggctgcgctatgccctgcggctgctgcgggacaggagccctgcctag

SEQ ID NO: 21217 - DNA, 1866 bp, synthetic construct
  misc_feature 1..1866: note = Description of Artificial Sequence: Synthetic coding sequence
  source 1..1866: mol_type = other DNA
agccggcagagacatgcccggcccggccctgggggcacagagaagccaggcccccgctgtgatgccccagctgcctggagcctgccccctgtgtcctgcctgcggacctacctgaagggccgcctgctgggcaaaggaggctttgcccgctgctatgaggccacagacacagaaacaggcagcgcctatgctgtgaaggtgatcccccagagccgggtggccaagccccaccagcgggagaagatcctgaatgaaattgagctgcaccgggacctgcagcaccgccacatcgtgcgcttcagccaccactttgaagatgctgacaacatctacatcttcctggagctgtgcagcaggaagagcctggcccacatctggaaggcccggcacaccctgctggagcctgaggtgcgctactacctgcggcagatcctgagcggcctgaagtacctgcaccagaggggcatcctgcaccgggacctgaagctgggcaacttcttcatcacagagaacatggagctgaaggtgggggactttggcctggccgcccggctggagcccccagagcagaggaagaagaccatctgtggcacccccaactacgtggcccctgaggtgctgctgcggcagggccacggccctgaggctgatgtgtggagcctgggctgtgtgatgtacaccctgctgtgtggcagccccccatttgaaacagctgacctgaaggagacctaccgctgcatcaagcaggtgcactacaccctgcctgccagcctgagcctgcctgcccggcagctgctggccgccatcctgcgggccagcccccgggaccggcccagcattgaccagatcctgcggcatgacttcttcaccaagggctacaccccagaccggctgcccatcagcagctgtgtgacagtgcctgacctgaccccacccaacccagcccggagcctgtttgccaaggtgaccaagagcctgtttggaaggaagaagaagagcaagaaccacgcccaggagagagatgaggtgtctggcctggtgtctggcctgatgaggacctctgtgggccaccaggatgcccggcctgaggccccagctgccagcggccctgcccctgtgtccctggtggagacagcccctgaggacagcagcccccggggcaccctggccagcagtggagatggctttgaggagggcctgactgtggccaccgtggtggagagcgccctgtgtgccctgaggaactgcatcgccttcatgcctcctgctgagcagaacccagcccccctggcccagcctgagcccctggtgtgggtgtccaagtgggtggactacagcaacaagtttggatttggctaccagctgagcagccggcgggtggccgtgctcttcaatgatggcacccacatggccctgagcgccaacaggaagacagtgcactacaaccccaccagcaccaagcacttctccttctctgtgggcgctgtgccccgggccctgcagccccagctgggcatcctgcgctactttgccagctacatggagcagcacctgatgaagggcggggacctgcccagcgtggaggaggtggaggtgcctgccccacccctgctgctgcagtgggtgaagacagaccaggccctgctgatgctgttcagtgatggcaccgtgcaggtgaacttctacggggaccacaccaagctgatcctgagcggctgggagcccctgctggtgacctttgtggccaggaacagaagtgcctgcacctacctggccagccacctgcggcagctgggctgcagcccagacctgcggcagaggctgcgctatgccctgcggctgctgcgggacaggagccctgcctag

SEQ ID NO: 21218 - DNA, 2913 bp, synthetic construct
  misc_feature 1..2913: note = Description of Artificial Sequence: Synthetic coding sequence
  source 1..2913: mol_type = other DNA
atggccacctgcattggagagaagattgaggacttcaaggtgggcaacctgctgggcaagggcagctttgctggggtgtacagagctgagagcatccacacaggcctggaggtggccatcaagatgattgacaagaaggccatgtacaaggccggcatggtgcagagggtgcagaatgaggtgaagatccactgccagctgaagcaccccagcatcctggagctgtacaactactttgaggacagcaactacgtgtacctggtgctggagatgtgccacaacggggagatgaaccgctacctgaagaacagagtgaagcccttctctgaaaatgaggcccggcacttcatgcaccagatcatcaccggcatgctgtacctgcacagccacggcatcctgcaccgggacctgaccctgagcaacctgctgctgaccaggaacatgaacatcaagattgctgactttggcctggccacccagctgaagatgcctcatgagaagcactacaccctgtgtggcacccccaactacatcagccctgagatcgccaccaggtctgcccacggcctggagagtgatgtgtggagcctgggctgcatgttctacaccctgctgattggccggcccccatttgacacagacacagtgaagaacaccctgaacaaggtggtgctggccgactatgagatgcccagcttcctgagcattgaggccaaggacctgatccaccagctgctgcggaggaacccagctgaccggctgagcctgagctctgtgctggaccaccccttcatgagcaggaacagcagcaccaagagcaaggacctgggcaccgtggaggacagcattgattctggccacgccaccatcagcacagccatcacagccagcagcagcaccagcatcagcggcagcctgtttgacaagaggcggctgctgattggccagcccctgcccaacaagatgacagtgttccccaagaacaagagcagcacagacttcagcagcagtggagatggcaacagcttctacacccagtggggcaaccaggagaccagcaacagcggccggggccgggtcatccaggatgctgaggagcggccccacagccgctacctgcggcgggcctacagcagtgacaggagcggcaccagcaacagccagagccaggccaagacctacaccatggagcgctgccacagcgctgagatgctgtctgtgtccaagaggtctggaggaggagaaaatgaggagcgctacagccccacagacaacaatgccaacatcttcaacttcttcaaggagaagaccagcagcagcagcggcagctttgagaggccagacaacaaccaggccctgagcaaccacctgtgccctgggaagacccccttcccctttgctgaccccaccccccagacagaaacagtgcagcagtggtttggaaacctgcagatcaatgcccacctgaggaagaccacagaatatgacagcatcagccccaacagagacttccagggccacccagacctgcagaaggacaccagcaagaatgcctggacagacaccaaggtgaagaagaacagtgatgccagtgacaatgcccacagcgtgaagcagcagaacaccatgaagtacatgacagccctgcacagcaagccagagatcatccagcaggagtgtgtgtttggaagtgaccccctgtctgagcagagcaagacccggggcatggagcccccctggggctaccagaacagaaccctgcggagcatcaccagccccctggtggcccaccggctgaagcccatccggcagaagaccaagaaggctgtggtgtccatcctggacagcgaggaggtgtgtgtggagctggtgaaggagtatgccagccaggagtatgtgaaggaggtgctgcagatcagcagtgatggcaacaccatcaccatctactaccccaacggcggccggggcttccccctggccgacaggcctcccagccccacagacaacatcagccgctacagctttgacaacctgcctgagaagtactggaggaagtaccagtatgccagcagatttgtgcagctggtgcgcagcaagagccccaagatcacctacttcaccaggtatgccaagtgcatcctgatggagaacagccctggagctgactttgaggtgtggttctatgatggagtgaagatccacaagacagaggacttcatccaggtgattgagaagacaggcaagagctacaccctgaagtctgagagcgaggtgaacagcctgaaggaggagatcaagatgtacatggaccacgccaatgaaggccaccgcatctgcctggccctggagagcatcatcagcgaggaggagaggaagaccaggtctgcccccttcttccccatcatcattggaaggaagccaggcagcaccagcagccccaaggccctgagccccccaccttctgtggacagcaactaccccacccgggagcgggccagcttcaacaggatggtgatgcacagcgctgccagccccacccaggcccccatcctgaaccccagcatggtgaccaatgaaggcctgggcctgaccaccacagccagcggcacagacatcagcagcaacagcctgaaggactgcctgcccaagagcgcccagctgctgaagtctgtgtttgtgaagaatgtgggctgggccacccagctgaccagcggggctgtgtgggtgcagttcaatgatggcagccagctggtggtgcaggccggcgtgagcagcatctcctacaccagccccaacggccagaccacccgctacggggagaatgagaagctgcctgactacatcaagcagaagctgcagtgcctgagcagcatcctgctgatgttcagcaaccccacccccaacttccactag

SEQ ID NO: 21219 - DNA, 2817 bp, synthetic construct
  misc_feature 1..2817: note = Description of Artificial Sequence: Synthetic coding sequence
  source 1..2817: mol_type = other DNA
atggccacctgcattggagagaagattgaggacttcaaggtgggcaacctgctgggcaagggcagctttgctggggtgtacagagctgagagcatccacacaggcctggaggtggccatcaagatgctgtacaactactttgaggacagcaactacgtgtacctggtgctggagatgtgccacaacggggagatgaaccgctacctgaagaacagagtgaagcccttctctgaaaatgaggcccggcacttcatgcaccagatcatcaccggcatgctgtacctgcacagccacggcatcctgcaccgggacctgaccctgagcaacctgctgctgaccaggaacatgaacatcaagattgctgactttggcctggccacccagctgaagatgcctcatgagaagcactacaccctgtgtggcacccccaactacatcagccctgagatcgccaccaggtctgcccacggcctggagagtgatgtgtggagcctgggctgcatgttctacaccctgctgattggccggcccccatttgacacagacacagtgaagaacaccctgaacaaggtggtgctggccgactatgagatgcccagcttcctgagcattgaggccaaggacctgatccaccagctgctgcggaggaacccagctgaccggctgagcctgagctctgtgctggaccaccccttcatgagcaggaacagcagcaccaagagcaaggacctgggcaccgtggaggacagcattgattctggccacgccaccatcagcacagccatcacagccagcagcagcaccagcatcagcggcagcctgtttgacaagaggcggctgctgattggccagcccctgcccaacaagatgacagtgttccccaagaacaagagcagcacagacttcagcagcagtggagatggcaacagcttctacacccagtggggcaaccaggagaccagcaacagcggccggggccgggtcatccaggatgctgaggagcggccccacagccgctacctgcggcgggcctacagcagtgacaggagcggcaccagcaacagccagagccaggccaagacctacaccatggagcgctgccacagcgctgagatgctgtctgtgtccaagaggtctggaggaggagaaaatgaggagcgctacagccccacagacaacaatgccaacatcttcaacttcttcaaggagaagaccagcagcagcagcggcagctttgagaggccagacaacaaccaggccctgagcaaccacctgtgccctgggaagacccccttcccctttgctgaccccaccccccagacagaaacagtgcagcagtggtttggaaacctgcagatcaatgcccacctgaggaagaccacagaatatgacagcatcagccccaacagagacttccagggccacccagacctgcagaaggacaccagcaagaatgcctggacagacaccaaggtgaagaagaacagtgatgccagtgacaatgcccacagcgtgaagcagcagaacaccatgaagtacatgacagccctgcacagcaagccagagatcatccagcaggagtgtgtgtttggaagtgaccccctgtctgagcagagcaagacccggggcatggagcccccctggggctaccagaacagaaccctgcggagcatcaccagccccctggtggcccaccggctgaagcccatccggcagaagaccaagaaggctgtggtgtccatcctggacagcgaggaggtgtgtgtggagctggtgaaggagtatgccagccaggagtatgtgaaggaggtgctgcagatcagcagtgatggcaacaccatcaccatctactaccccaacggcggccggggcttccccctggccgacaggcctcccagccccacagacaacatcagccgctacagctttgacaacctgcctgagaagtactggaggaagtaccagtatgccagcagatttgtgcagctggtgcgcagcaagagccccaagatcacctacttcaccaggtatgccaagtgcatcctgatggagaacagccctggagctgactttgaggtgtggttctatgatggagtgaagatccacaagacagaggacttcatccaggtgattgagaagacaggcaagagctacaccctgaagtctgagagcgaggtgaacagcctgaaggaggagatcaagatgtacatggaccacgccaatgaaggccaccgcatctgcctggccctggagagcatcatcagcgaggaggagaggaagaccaggtctgcccccttcttccccatcatcattggaaggaagccaggcagcaccagcagccccaaggccctgagccccccaccttctgtggacagcaactaccccacccgggagcgggccagcttcaacaggatggtgatgcacagcgctgccagccccacccaggcccccatcctgaaccccagcatggtgaccaatgaaggcctgggcctgaccaccacagccagcggcacagacatcagcagcaacagcctgaaggactgcctgcccaagagcgcccagctgctgaagtctgtgtttgtgaagaatgtgggctgggccacccagctgaccagcggggctgtgtgggtgcagttcaatgatggcagccagctggtggtgcaggccggcgtgagcagcatctcctacaccagccccaacggccagaccacccgctacggggagaatgagaagctgcctgactacatcaagcagaagctgcagtgcctgagcagcatcctgctgatgttcagcaaccccacccccaacttccactag

SEQ ID NO: 21220 - DNA, 2790 bp, synthetic construct
  misc_feature 1..2790: note = Description of Artificial Sequence: Synthetic coding sequence
  source 1..2790: mol_type = other DNA
atgattgacaagaaggccatgtacaaggccggcatggtgcagagggtgcagaatgaggtgaagatccactgccagctgaagcaccccagcatcctggagctgtacaactactttgaggacagcaactacgtgtacctggtgctggagatgtgccacaatggagagatgaaccgctacctgaagaacagagtgaagcccttctctgaaaatgaggcccggcacttcatgcaccagatcatcaccggcatgctgtacctgcacagccacggcatcctgcaccgggacctgaccctgagcaacctgctgctgaccaggaacatgaacatcaagattgctgactttggcctggccacccagctgaagatgcctcatgagaagcactacaccctgtgtggcacccccaactacatcagccctgagatcgccaccaggtctgcccacggcctggagagtgatgtgtggagcctgggctgcatgttctacaccctgctgattggccggcccccatttgacacagacacagtgaagaacaccctgaacaaggtggtgctggccgactatgagatgcccagcttcctgagcattgaggccaaggacctgatccaccagctgctgcggagaaatcctgctgaccggctgagcctgagctctgtgctggaccaccccttcatgagcaggaacagcagcaccaagagcaaggacctgggcaccgtggaggacagcattgacagcggccacgccaccatcagcacagccatcacagccagcagcagcaccagcatcagcggcagcctgtttgacaagaggcggctgctgattggccagcccctgcccaacaagatgaccgtcttccccaagaacaagagcagcacagacttcagcagcagtggagatggcaacagcttctacacccagtggggcaaccaggagaccagcaacagcggccggggccgggtcatccaggatgctgaggagcggccccacagccgctacctgcggcgggcctacagcagtgacagaagtggcaccagcaacagccagagccaggccaagacctacaccatggagcgctgccacagcgctgagatgctgtctgtgtccaagaggtctgggggcggggagaatgaggagcgctacagccccacagacaacaatgccaacatcttcaacttcttcaaggagaagaccagcagcagcagcggcagctttgagaggccagacaacaaccaggccctgagcaaccacctgtgccctgggaagacccccttcccctttgctgaccccaccccccagacagagaccgtgcagcagtggtttggaaacctgcagatcaatgcccacctgaggaagaccacagaatatgacagcatcagccccaacagagacttccagggccacccagacctgcagaaggacaccagcaagaatgcctggacagacaccaaggtgaagaagaacagtgatgccagtgacaatgcccacagcgtgaagcagcagaacaccatgaagtacatgacagccctgcacagcaagccagagatcatccagcaggagtgtgtgtttggaagtgaccccctgtctgagcagagcaagacccggggcatggagcccccctggggctaccagaacagaaccctgcggagcatcaccagccccctggtggcccaccggctgaagcccatccggcagaagaccaagaaggctgtggtgtccatcctggacagcgaggaggtgtgtgtggagctggtgaaggagtatgccagccaggagtatgtgaaggaggtgctgcagatcagcagtgatggcaacaccatcaccatctactacccaaatggaggccggggcttccccctggccgaccggccccccagccccacagacaacatcagccgctacagctttgacaacctgcctgagaagtactggaggaagtaccagtatgccagcagatttgtgcagctggtgcgcagcaagagccccaagatcacctacttcaccaggtatgccaagtgcatcctgatggagaacagccctggagctgactttgaggtgtggttctatgatggagtgaagatccacaagacagaggacttcatccaggtgattgagaagacaggcaagagctacaccctgaagtctgagagcgaggtgaacagcctgaaggaggagatcaagatgtacatggaccacgccaatgaaggccaccgcatctgcctggccctggagagcatcatcagcgaggaggagaggaagaccaggtctgcccccttcttccccatcatcatcggcaggaagccaggcagcaccagcagccccaaggccctgagccccccacccagcgtggacagcaactaccccacccgggagcgggccagcttcaacaggatggtgatgcacagcgctgccagccccacccaggcccccatcctgaaccccagcatggtgaccaatgaaggcctgggcctgaccaccacagccagcggcacagacatcagcagcaacagcctgaaggactgcctgcccaagagcgcccagctgctgaagtctgtgtttgtgaagaatgtgggctgggccacccagctgaccagcggggctgtgtgggtgcagttcaatgatggcagccagctggtggtgcaggccggcgtgagcagcatctcctacaccagccccaacggccagaccaccaggtatggagaaaatgagaagctgcctgactacatcaagcagaagctgcagtgcctgagcagcatcctgctgatgttcagcaaccccacccccaacttccactag

SEQ ID NO: 21221 - DNA, 1752 bp, synthetic construct
  misc_feature 1..1752: note = Description of Artificial Sequence: Synthetic coding sequence
  source 1..1752: mol_type = other DNA
atggccgccaggagaagaagaagcactggaggcggccgggcccgggccctgaatgaaagcaagagggtgaacaatggaaacacagcccctgaggacagcagccctgccaagaagacccggcgctgccagaggcaggagagcaagaagatgcctgtggccggcggcaaggccaacaaggacagaacagaggacaagcaggacggcatgcctggccgctcctgggccagcaagagggtgtctgagagcgtgaaggccctgctgctgaagggcaaggcccctgtggaccctgaatgtacagccaaggtgggcaaggcccacgtgtactgtgagggcaatgatgtgtatgatgtgatgctgaaccagaccaacctgcagttcaacaacaacaagtactacctgatccagctgctggaggatgatgcccagaggaacttctctgtgtggatgcgctggggccgggtgggcaagatgggccagcacagcctggtggcctgcagcggcaacctgaacaaggccaaggagatcttccagaagaagttcctggacaagaccaagaacaactgggaggaccgggagaagtttgagaaggtgcctgggaagtatgacatgctgcagatggactatgccaccaacacccaggatgaggaggagaccaagaaggaggagagcctgaagagccccctgaagccagagagccagctggacctgcgggtgcaggagctgatcaagctgatctgcaatgtgcaggccatggaggagatgatgatggagatgaagtacaacaccaagaaggcccccctgggcaagctgactgtggcccagatcaaggccggctaccagagcctgaagaagattgaggactgcatccgggccggccagcacggccgggccctgatggaggcctgcaatgagttctacacccgcatcccccatgactttggcctgcggaccccacccctcatccgcacccagaaggagctgtctgagaagatccagctgctggaggccctgggggacatcgagatcgccatcaagctggtgaagacagagctgcagagccctgagcaccccctggaccagcactacagaaacctgcactgtgccctgcggcccctggaccacgagagctatgagttcaaggtgatcagccagtacctgcagagcacccacgcccccacccacagcgactacaccatgaccctgctggacctgtttgaggtggagaaggatggagagaaggaggccttccgggaggacctgcacaacaggatgctgctgtggcacggcagcaggatgagcaactgggtgggcatcctgagccacggcctgagaattgcccctcctgaggcccccatcaccggctacatgtttgggaagggcatctactttgctgacatgagcagcaagagcgccaactactgctttgccagccggctgaagaacacaggcctgctgctgctgtctgaggtggccctgggccagtgcaatgagctgctggaggccaaccccaaggccgagggcctgctgcagggcaagcacagcaccaagggcctgggcaagatggcccccagcagcgcccactttgtgaccctgaatggcagcacagtgcccctgggccctgccagtgacaccggcatcctgaacccagatggctacaccctgaactacaatgagtacatcgtgtacaaccccaaccaggtgaggatgagatacctgctgaaggtgcagttcaacttcctgcagctgtggtag

SEQ ID NO: 21222 - DNA, 1713 bp, synthetic construct
  misc_feature 1..1713: note = Description of Artificial Sequence: Synthetic coding sequence
  source 1..1713: mol_type = other DNA
atggccgccaggagaagaagaagcactggaggcggccgggcccgggccctgaatgaaagcaagagggtgaacaatggaaacacagcccctgaggacagcagccctgccaagaagacccggcgctgccagaggcaggagagcaagaagatgcctgtggccggcggcaaggccaacaaggacagaacagaggacaagcaggatgaatctgtgaaggccctgctgctgaagggcaaggcccctgtggaccctgagtgcacagccaaggtgggcaaggcccacgtgtactgtgagggcaatgatgtgtatgatgtgatgctgaaccagaccaacctgcagttcaacaacaacaagtactacctgatccagctgctggaggatgatgcccagaggaacttctctgtgtggatgcgctggggccgggtgggcaagatgggccagcacagcctggtggcctgcagcggcaacctgaacaaggccaaggagatcttccagaagaagttcctggacaagaccaagaacaactgggaggaccgggagaagtttgagaaggtgcctgggaagtatgacatgctgcagatggactatgccaccaacacccaggatgaggaggagaccaagaaggaggagagcctgaagagccccctgaagccagagagccagctggacctgcgggtgcaggagctgatcaagctgatctgcaatgtgcaggccatggaggagatgatgatggagatgaagtacaacaccaagaaggcccccctgggcaagctgactgtggcccagatcaaggccggctaccagagcctgaagaagattgaggactgcatccgggccggccagcacggccgggccctgatggaggcctgcaatgagttctacacccgcatcccccatgactttggcctgcggaccccacccctcatccgcacccagaaggagctgtctgagaagatccagctgctggaggccctgggggacattgaaattgccatcaagctggtgaagacagagctgcagagccctgagcaccccctggaccagcactacagaaacctgcactgtgccctgcggcccctggaccacgagagctatgagttcaaggtgatcagccagtacctgcagagcacccacgcccccacccacagcgactacaccatgaccctgctggacctgtttgaggtggagaaggatggagagaaggaggccttccgggaggacctgcacaacaggatgctgctgtggcacggcagcaggatgagcaactgggtgggcatcctgagccacggcctgcgcatcgcccctcctgaggcccccatcaccggctacatgtttgggaagggcatctactttgctgacatgagcagcaagagcgccaactactgctttgccagccggctgaagaacacaggcctgctgctgctgtctgaggtggccctgggccagtgcaatgagctgctggaggccaaccccaaggccgagggcctgctgcagggcaagcacagcaccaagggcctgggcaagatggcccccagcagcgcccactttgtgaccctgaatggcagcacagtgcccctgggccctgccagtgacaccggcatcctgaacccagatggctacaccctgaactacaatgagtacatcgtgtacaaccccaaccaggtgaggatgagatacctgctgaaggtgcagttcaacttcctgcagctgtggtag

SEQ ID NO: 21223 - DNA, 1623 bp, synthetic construct
  misc_feature 1..1623: note = Description of Artificial Sequence: Synthetic coding sequence
  source 1..1623: mol_type = other DNA
atgagcctgctcttcctggccatggcccccaagcccaagccctgggtgcagacagagggccctgagaagaagaagggccggcaggccggccgggaggaggaccccttccgcagcacagctgaggccctgaaggccatcccagctgagaagaggatcatccgggtggaccccacctgccccctgagcagcaaccctggcacccaggtgtatgaggactacaactgcaccctgaaccagaccaacatcgagaacaacaacaacaagttctacatcatccagctgctgcaggacagcaaccgcttcttcacctgctggaaccactggggccgggtgggggaggtgggccagagcaagatcaaccacttcacccggctggaggatgccaagaaggactttgagaagaagttccgggagaagaccaagaacaactgggccgagcgggaccactttgtgagccaccctgggaagtacaccctcatcgaggtgcaggctgaagatgaggcccaggaggccgtggtgaaggtggaccggggccctgtgaggacagtgaccaagagggtgcagccctgcagcctggaccctgccacccagaagctgatcaccaacatcttcagcaaggagatgttcaagaacaccatggccctgatggacctggatgtgaagaagatgcccctgggcaagctgagcaagcagcagatcgcccggggctttgaggccctggaggccctggaggaggccctgaagggccccacagatggcggccagagcctggaggagctgagcagccacttctacaccgtcatcccccacaactttggccacagccagcccccacccatcaacagccctgagctgctgcaggccaagaaggacatgctgctggtgctggccgacatcgagctggcccaggccctgcaggccgtgtctgagcaggagaagacagtggaggaggtgccccaccccctggaccgggactaccagctgctgaagtgccagctgcagctgctggacagcggggcccctgagtacaaggtgatccagacctacctggagcagacaggcagcaaccaccgctgccccaccctgcagcacatctggaaggtgaaccaggagggggaggaggaccgcttccaggcccacagcaagctgggcaacaggaagctgctgtggcacggcaccaacatggctgtggtggccgccatcctgaccagcggcctgcgcatcatgccccacagcggcggccgggtgggcaagggcatctactttgccagcgagaacagcaagtctgctggctacgtgattggcatgaagtgtggggcccaccacgtgggctacatgttcctgggggaggtggccctgggccgggagcaccacatcaacacagacaaccccagcctgaagagccccccacctggctttgattctgtgattgcccggggccacacagagccagaccccacccaggacacagagctggagctggatggccagcaggtggtggtgccccagggccagcctgtgccctgcccagagttcagcagcagcaccttcagccagagcgagtacctgatctaccaggagagccagtgccgcctgcgctacctgctggaggtgcacctgtag

SEQ ID NO: 21224 - DNA, 1602 bp, synthetic construct
  misc_feature 1..1602: note = Description of Artificial Sequence: Synthetic coding sequence
  source 1..1602: mol_type = other DNA
atggcccccaagcccaagccctgggtgcagacagagggccctgagaagaagaagggccggcaggccggccgggaggaggaccccttccgcagcacagctgaggccctgaaggccatcccagctgagaagaggatcatccgggtggaccccacctgccccctgagcagcaaccctggcacccaggtgtatgaggactacaactgcaccctgaaccagaccaacatcgagaacaacaacaacaagttctacatcatccagctgctgcaggacagcaaccgcttcttcacctgctggaaccactggggccgggtgggggaggtgggccagagcaagatcaaccacttcacccggctggaggatgccaagaaggactttgagaagaagttccgggagaagaccaagaacaactgggccgagcgggaccactttgtgagccaccctgggaagtacaccctgattgaggtgcaggccgaggatgaggcccaggaggccgtggtgaaggtggaccggggccctgtgaggacagtgaccaagagggtgcagccctgcagcctggaccctgccacccagaagctgatcaccaacatcttcagcaaggagatgttcaagaacaccatggccctgatggacctggatgtgaagaagatgcccctgggcaagctgagcaagcagcagatcgcccggggctttgaggccctggaggccctggaggaggccctgaagggccccacagatggcggccagagcctggaggagctgagcagccacttctacaccgtcatcccccacaactttggccacagccagcccccacccatcaacagccctgagctgctgcaggccaagaaggacatgctgctggtgctggccgacatcgagctggcccaggccctgcaggccgtgtctgagcaggagaagacagtggaggaggtgccccaccccctggaccgggactaccagctgctgaagtgccagctgcagctgctggacagcggggcccctgagtacaaggtgatccagacctacctggagcagacaggcagcaaccaccgctgccccaccctgcagcacatctggaaggtgaaccaggagggggaggaggaccgcttccaggcccacagcaagctgggcaacaggaagctgctgtggcacggcaccaacatggctgtggtggccgccatcctgaccagcggcctgcgcatcatgccccacagcggcggccgggtgggcaagggcatctactttgccagcgagaacagcaagtctgctggctacgtgattggcatgaagtgtggggcccaccacgtgggctacatgttcctgggggaggtggccctgggccgggagcaccacatcaacacagacaaccccagcctgaagagccccccacctggctttgacagcgtcatcgcccggggccacacagagccagaccccacccaggacacagagctggagctggatggccagcaggtggtggtgccccagggccagcctgtgccctgcccagagttcagcagcagcaccttcagccagagcgagtacctgatctaccaggagagccagtgccgcctgcgctacctgctggaggtgcacctgtag

SEQ ID NO: 21225 - DNA, 1602 bp, synthetic construct; identical to SEQ ID NO: 21224
  misc_feature 1..1602: note = Description of Artificial Sequence: Synthetic coding sequence
  source 1..1602: mol_type = other DNA

SEQ ID NO: 21226 - DNA, 999 bp, synthetic construct
  misc_feature 1..999: note = Description of Artificial Sequence: Synthetic coding sequence
  source 1..999: mol_type = other DNA
atggcccccaagcccaagccctgggtgcagacagagggccctgagaagaagaagggccggcaggccggccgggaggaggaccccttccgcagcacagctgaggccctgaaggccatcccagctgagaagaggatcatccgggtggaccccacctgccccctgagcagcaaccctggcacccaggtgtatgaggactacaactgcaccctgaaccagaccaacatcgagaacaacaacaacaagttctacatcatccagctgctgcaggacagcaaccgcttcttcacctgctggaaccactggggccgggtgggggaggtgggccagagcaagatcaaccacttcacccggctggaggatgccaagaaggactttgagaagaagttccgggagaagaccaagaacaactgggccgagcgggaccactttgtgagccaccctgggaagtacaccctgattgaggtgcaggccgaggatgaggcccaggaggccgtggtgaaggtggaccggggccctgtgaggacagtgaccaagagggtgcagccctgcagcctggaccctgccacccagaagctgatcaccaacatcttcagcaaggagatgttcaagaacaccatggccctgatggacctggatgtgaagaagatgcccctgggcaagctgagcaagcagcagatcgcccggggctttgaggccctggaggccctggaggaggccctgaagggccccacagatggcggccagagcctggaggagctgagcagccacttctacaccgtcatcccccacaactttggccacagccagcccccacccatcaacagccctgagctgctgcaggccaagaaggacatgctgctggtgctggccgacatcgagctggcccaggccctgcaggccgtgtctgagcaggagaagacagtggaggaggtgccccaccccctggaccgggactaccagctgctgaagtgccagctgcagctgctggacagcggctag

SEQ ID NO: 21227 - DNA, 5175 bp, synthetic construct
  misc_feature 1..5175: note = Description of Artificial Sequence: Synthetic coding sequence
  source 1..5175: mol_type = other DNA
atggtgatgggcatctttgccaactgcatcttctgcctgaaggtgaagtacctgccccagcagcagaagaagaagctgcagacagacatcaaggaaaatggaggcaagttctccttcagcctgaacccccagtgcacccacatcatcctggacaatgctgatgtgctgagccagtaccagctgaacagcatccagaagaaccacgtgcacatcgccaacccagacttcatctggaagagcatccgggagaagaggctgctggatgtgaagaactatgacccctacaagcccctggacatcaccccacctccagaccagaaggccagcagcagcgaggtgaagacagagggcctgtgcccagacagcgccacagaggaggaggacacagtggagctgacagaatttggcatgcagaatgtggagatcccccacctgccccaggactttgaggtggccaagtacaacaccctggagaaggtgggcatggagggcggccaggaggccgtggtggtggagctgcagtgcagccgggacagccgggactgccccttcctgatcagcagccacttcctgctggatgatggcatggagacccggcggcagtttgccatcaagaagaccagtgaagatgccagcgagtactttgagaactacatcgaggagctgaagaagcagggcttcctgctgcgggagcacttcaccccagaggccacccagctggccagcgagcagctgcaggccctgctgctggaggaggtgatgaacagcagcaccctgagccaggaggtgtctgacctggtggagatgatctgggccgaggccctgggccacctggagcacatgctgctgaagcctgtgaaccgcatcagcctgaatgatgtgtccaaggccgagggcatcctgctgctggtgaaggccgccctgaagaatggagaaacagctgagcagctgcagaagatgatgacagagttctaccgcctcatcccccacaagggcaccatgcccaaggaggtgaacctgggcctgctggccaagaaggctgacctgtgccagctgatccgggacatggtgaatgtgtgtgagaccaacctgagcaagcccaacccccccagcctggccaagtaccgggccctgcgctgcaagattgagcacgtggagcagaacacagaggagttcctgcgggtgaggaaggaggtgctgcagaaccaccacagcaagagccctgtggatgtgctgcagatcttccgggtgggccgggtgaatgagaccacagagttcctgagcaagctgggcaatgtgcggcccctgctgcacggcagccctgtgcagaacatcgtgggcatcctgtgccggggcctgctgctgcccaaggtggtggaggacagaggagtgcagaggacagatgtgggcaacctgggcagcggcatctacttcagtgacagcctgagcaccagcatcaagtacagccaccctggagaaacagatggcacccggctgctgctgatctgtgatgtggccctgggcaagtgcatggacctgcacgagaaggacttcagcctgacagaggcccctcctggctatgattctgtgcatggagtgtcccagacagcctctgtgaccacagactttgaagatgatgaatttgtggtgtacaagaccaaccaggtgaagatgaagtacatcatcaagttctccatgcctggggaccagatcaaggacttccaccccagcgaccacacagagctggaggagtacagacctgagttcagcaacttcagcaaggtggaggactaccagctgcctgatgccaagaccagcagcagcaccaaggccggcctgcaggatgccagcggcaacctggtgcccctggaggatgtgcacatcaagggccgcatcatcgacacagtggcccaggtgattgtgttccagacctacaccaacaagagccacgtgcccatcgaggccaagtacatcttccccctggatgacaaggctgctgtgtgtggctttgaggccttcatcaatggcaagcacatcgtgggggagatcaaggagaaggaggaggcccagcaggagtacctggaggccgtgacccagggccatggagcctacctgatgagccaggatgccccagatgtgttcaccgtgtctgtgggcaacctgccccccaaggccaaggtgctgatcaagatcacctacatcacagagctgagcatcctgggcaccgtgggcgtcttcttcatgcctgccaccgtggccccctggcagcaggacaaggccctgaatgaaaacctgcaggacacagtggagaagatctgcatcaaggagatcggcaccaagcagagcttcagcctgaccatgagcattgagatgccctacgtgattgagttcatcttcagtgacacccatgagctgaagcagaagaggacagactgcaaggccgtcatcagcaccatggagggcagcagcctggacagcagcggcttcagcctgcacatcggcctgtctgctgcctacctgcccaggatgtgggtggagaagcaccctgagaaggagagcgaggcctgcatgctggtgttccagcctgacctggatgtggacctgcctgacctggccagcgagagcgaggtgatcatctgcctggactgcagcagctccatggagggcgtgaccttcctgcaggccaagcagatcgccctgcacgccctgagcctggtgggggagaagcagaaggtgaacatcatccagtttggaacaggctacaaggagctgttctcctaccccaagcacatcaccagcaacaccatggctgctgagttcatcatgtctgccacccccaccatgggcaacacagacttctggaagaccctgcgctacctgagcctgctgtacccagcccggggcagcaggaacatcctgctggtgtctgatggccacctgcaggatgagagcctgaccctgcagctggtgaagaggagccggccccacacccggctgtttgcctgtggcatcggcagcacagccaacagacatgtgctgcgcatcctgagccagtgtggggccggcgtgtttgagtacttcaatgccaagagcaagcacagctggaggaagcagatcgaggaccagatgacccggctgtgcagccccagctgccacagcgtgtctgtgaagtggcagcagctgaacccagatgtgcctgaggccctgcaggccccagcccaggtgcccagcctcttcctgaatgaccggctgctggtgtatggcttcatcccccactgcacccaggccaccctgtgtgccctgatccaggagaaggagttccgcaccatggtgtccaccacagagctgcagaagaccaccggcaccatgatccacaagctggccgcccgggccctgatccgggactatgaagatggcatcctgcatgaaaatgagaccagccatgagatgaagaagcagaccctgaagagcctcatcatcaagctgagcaaagaaaacagcctcatcacccagttcaccagctttgtggccgtggagaagagagatgaaaatgaaagccccttcccagacatccccaaggtgtctgagctgattgccaaggaggatgtggacttcctgccctacatgtcctggcagggcgagccccaggaggccgtgaggaaccagagcctgctggccagcagcgagtggccagagctgcggctgagcaagaggaagcacaggaagatccccttcagcaagaggaagatggagctgagccagcctgaggtgtctgaagattttgaagaagatggcctgggcgtgctgcctgccttcaccagcaacctggagcggggcggcgtggagaagctgctggacctgtcctggacagagagctgcaagcccacagccacagagcccctcttcaagaaggtgagcccctgggagaccagcaccagcagcttcttccccatcctggccccagctgtgggcagctacctgcccccaacagcccgggcccacagccctgccagcctgagctttgccagctaccggcaggtggccagctttggcagcgctgccccaccccggcagtttgatgccagccagttcagccagggccctgtgcccggcacctgtgccgactggatcccccagagcgccagctgccccactggaccaccccagaacccccccagcagcccctactgcggcatcgtgttcagcggcagcagcctgagcagcgcccagagcgcccccctgcagcaccctgggggcttcaccacccggcccagcgctggcaccttccctgagctggacagcccccagctgcacttcagcctgcccacagatcctgaccccatccggggcttcggcagctaccaccccagcgccagcagccccttccacttccagcccagcgctgccagcctgacagccaacctgcggctgcccatggccagcgccctgcctgaggccctgtgcagccagagcaggaccacccctgtggacctgtgcctgctggaggagagcgtgggcagcctggagggcagccgctgccctgtgtttgccttccagagcagtgacacagaaagtgatgagctgtctgaggtgctgcaggacagctgcttcctgcagatcaagtgtgacaccaaggatgacagcatcctgtgcttcctggaggtgaaggaggaggatgaaattgtgtgcatccagcactggcaggatgctgtgccctggacagagctgctgagcctgcagacagaagatggcttctggaagctgaccccagagctgggcctcatcctgaacctgaacaccaacggcctgcacagcttcctgaagcagaagggcatccagagcctgggcgtgaagggcagagaatgtctgctggacctgattgccaccatgctggtgctgcagttcatccgcacccggctggagaaggagggcatcgtgttcaagagcctgatgaagatggatgatgccagcatcagcaggaacatcccctgggcctttgaggccatcaagcaggccagcgagtgggtgagaagaacagagggccagtaccccagcatctgcccccggctggagctgggcaatgactgggacagcgccaccaagcagctgctgggcctgcagcccatcagcacagtgagccccctgcaccgggtgctgcactacagccagggctag

SEQ ID NO: 21228 - DNA, 1911 bp, synthetic construct
  misc_feature 1..1911: note = Description of Artificial Sequence: Synthetic coding sequence
  source 1..1911: mol_type = other DNA
atgaaccccagcgcccccagctaccccatggccagcctgtatgtgggggacctgcacccagatgtgacagaggccatgctgtatgagaagttctccccagctggccccatcctgagcatccgggtgtgccgggacatgatcaccaggaggagcctgggctacgcctacgtgaacttccagcagcctgcagatgctgagcgggccctggacaccatgaactttgatgtgatcaagggcaagcctgtgcgcatcatgtggagccagagggaccccagcctgaggaagagcggcgtgggcaacatcttcatcaagaacctggacaagagcattgacaacaaggccctgtatgacaccttcagcgccttcggcaacatcctgagctgcaaggtggtgtgtgatgaaaatggcagcaagggctacggctttgtgcactttgagacccaggaggccgctgagcgggccatcgagaagatgaatggcatgctgctgaatgacaggaaggtgtttgtgggccgcttcaagagcaggaaggagcgggaggccgagctgggcgcccgggccaaggagttcaccaacgtgtacatcaagaactttggagaggacatggatgatgagcggctgaaggacctgtttgggaagtttggacctgccctgtctgtgaaggtgatgacagatgaaagtggcaagagcaaaggatttggatttgtgtcctttgaaagacatgaagatgcccagaaggctgtggatgagatgaatggcaaggagctgaatggcaagcagatctacgtgggccgggcccagaagaaggtggagcggcagacagagctgaagaggaagtttgagcagatgaagcaggaccgcatcacccgctaccagggcgtgaacctgtatgtgaagaacctggatgatggcattgatgatgagcggctgaggaaggagttcagccccttcggcaccatcaccagcgccaaggtgatgatggagggcggccgcagcaaaggatttggatttgtgtgcttcagcagccctgaggaggccaccaaggctgtgacagagatgaatggaagaattgtggccaccaagcccctgtatgtggccctggcccagaggaaggaggagcggcaggcccacctgaccaaccagtacatgcagaggatggcctctgtgcgggctgtgcccaaccctgtgatcaacccctaccagcctgccccacccagcggctacttcatggccgccatcccccagacccagaacagagctgcctactacccacccagccagatcgcccagctgcggcccagcccccgctggacagcccagggcgcccggccccaccccttccagaacatgcctggggccatccggcctgctgcccccaggcctcccttcagcaccatgaggcctgccagcagccaggtgccccgggtgatgagcacccagagggtggccaacaccagcacccagaccatgggccccaggcctgctgctgctgctgctgctgccaccccagctgtgaggacagtgccccagtacaagtatgctgctggggtgaggaacccccagcagcacctgaatgcccagccccaggtgaccatgcagcagcctgctgtgcacgtgcagggccaggagcccctgacagcctccatgctggccagcgccccaccccaggagcagaagcagatgctgggggagcggctcttccccctcatccaggccatgcaccccaccctggccggcaagatcaccggcatgctgctggagattgacaacagcgagctgctgcacatgctggagagccctgagagcctgcggagcaaggtggatgaggccgtggccgtgctgcaggcccaccaggccaaggaggccgcccagaaggctgtgaacagcgccactggagtgcccaccgtgtag

SEQ ID NO: 21229 - DNA, 1644 bp, synthetic construct
  misc_feature 1..1644: note = Description of Artificial Sequence: Synthetic coding sequence
  source 1..1644: mol_type = other DNA
atgaaccccagcgcccccagctaccccatggccagcctgtatgtgggggacctgcacccagatgtgacagaggccatgctgtatgagaagttctccccagctggccccatcctgagcatccgggtgtgccgggacatgatcaccaggaggagcctgggctacgcctacgtgaacttccagcagcctgcagatgctgagcgggccctggacaccatgaactttgatgtgatcaagggcaagcctgtgcgcatcatgtggagccagagggaccccagcctgaggaagagcggcgtgggcaacatcttcatcaagaacctggacaagagcattgacaacaaggccctgtatgacaccttcagcgccttcggcaacatcctgagctgcaaggtggtgtgtgatgaaaatggcagcaagggctacggctttgtgcactttgagacccaggaggccgctgagcgggccatcgagaagatgaatggcatgctgctgaatgacaggaaggtgtttgtgggccgcttcaagagcaggaaggagcgggaggccgagctgggcgcccgggccaaggagttcaccaacgtgtacatcaagaactttggagaggacatggatgatgagcggctgaaggacctgtttgggaagtttggacctgccctgtctgtgaaggtgatgacagatgaaagtggcaagagcaaaggatttggatttgtgtcctttgaaagacatgaagatgcccagaaggctgtggatgagatgaatggcaaggagctgaatggcaagcagatctacgtgggccgggcccagaagaaggtggagcggcagacagagctgaagaggaagtttgagcagatgaagcaggaccgcatcacccgctaccagggcgtgaacctgtatgtgaagaacctggatgatggcattgatgatgagcggctgaggaaggagttcagccccttcggcaccatcaccagcgccaaggtgatgatggagggcggccgcagcaaaggatttggatttgtgtgcttcagcagccctgaggaggccaccaaggctgtgacagagatgaatggaagaattgtggccaccaagcccctgtatgtggccctggcccagaggaaggaggagcggcaggcccacctgaccaaccagtacatgcagaggatggcctctgtgcgggctgtgcccaaccctgtgatcaacccctaccagcctgccccacccagcggctacttcatggccgccatcccccagacccagaacagagctgcctactacccacccagccagatcgcccagctgcggcccagcccccgctggacagcccagggcgcccggccccaccctgctgtgcacgtgcagggccaggagcccctgacagcctccatgctggccagcgccccaccccaggagcagaagcagatgctgggggagcggctcttccccctcatccaggccatgcaccccaccctggccggcaagatcaccggcatgctgctggagattgacaacagcgagctgctgcacatgctggagagccctgagagcctgcggagcaaggtggatgaagctgtggccgtgctgcaggcccaccaggccaaggaggccgcccagaaggctgtgaacagcgccaccggggtgcccaccgtgtag

SEQ ID NO: 21230 - DNA, 129 bp, synthetic construct
  misc_feature 1..129: note = Description of Artificial Sequence: Synthetic coding sequence
  source 1..129: mol_type = other DNA
tgaatgctggagagccctgagagcctgcggagcaaggtggatgaggccgtggccgtgctgcaggcccaccaggccaaggaggccgcccagaaggctgtgaacagcgccactggagtgcccaccgtgtag

SEQ ID NO: 21231 - DNA, 117 bp, synthetic construct
  misc_feature 1..117: note = Description of Artificial Sequence: Synthetic coding sequence
  source 1..117: mol_type = other DNA
atgaaccccagcgcccccagctaccccatggccagcctgtatgtgggggacctgcacccagatgtgacagaggccatgctgtatgagaagttctccccagctggccccatcctgtag

SEQ ID NO: 21232 - DNA, 357 bp, synthetic construct
  misc_feature 1..357: note = Description of Artificial Sequence: Synthetic coding sequence
  source 1..357: mol_type = other DNA
atgaaccccagcgcccccagctaccccatggccagcctgtatgtgggggacctgcacccagatgtgacagaggccatgctgtatgagaagttctccccagctggccccatcctgagcatccgggtgtgccgggacatgatcaccaggaggagcctgggctacgcctacgtgaacttccagcagcctgcagatgctgagcgggccctggacaccatgaactttgatgtgatcaagggcaagcctgtgcgcatcatgtggagccagagggaccccagcctgaggaagagcggcgtgggcaacatcttcatcaagaacctggacaagagcattgacaacaaggccctgtatgacacctag

SEQ ID NO: 21233 - DNA, 132 bp, synthetic construct
  misc_feature 1..132: note = Description of Artificial Sequence: Synthetic coding sequence
  source 1..132: mol_type = other DNA
atgaaccccagcgcccccagctaccccatggccagcctgtatgtgggggacctgcacccagatgtgacagaggccatgctgtatgagaagttctccccagctggccccatcctgagcatccgggtgtgctag

SEQ ID NO: 21234 - DNA, 510 bp, synthetic construct
  misc_feature 1..510: note = Description of Artificial Sequence: Synthetic coding sequence
  source 1..510: mol_type = other DNA
tgagccagcagccaggtgccccgggtgatgagcacccagagggtggccaacaccagcacccagaccatgggccccaggcctgctgctgctgctgctgctgccaccccagctgtgaggacagtgccccagtacaagtatgctgctggggtgaggaacccccagcagcacctgaatgcccagccccaggtgaccatgcagcagcctgctgtgcacgtgcagggccaggagcccctgacagcctccatgctggccagcgccccaccccaggagcagaagcagatgctgggggagcggctcttccccctcatccaggccatgcaccccaccctggccggcaagatcaccggcatgctgctggagattgacaacagcgagctgctgcacatgctggagagccctgagagcctgcggagcaaggtggatgaagctgtggccgtgctgcaggcccaccaggccaaggaggccgcccagaaggctgtgaacagcgccaccggggtgcccaccgtgtag

SEQ ID NO: 21235 - DNA, 186 bp, synthetic construct
  misc_feature 1..186: note = Description of Artificial Sequence: Synthetic coding sequence
  source 1..186: mol_type = other DNA
atgaaccccagcgcccccagctaccccatggccagcctgtatgtgggggacctgcacccagatgtgacagaggccatgctgtatgagaagttctccccagctggccccatcctgagcatccgggtgtgccgggacatgatcaccaggaggagcctgggctacgcctacgtgaacttccagcagtag

SEQ ID NO: 21236 - DNA, 390 bp, synthetic construct
  misc_feature 1..390: note = Description of Artificial Sequence: Synthetic coding sequence
  source 1..390: mol_type = other DNA
atgaaccccagcgcccccagctaccccatggccagcctgtatgtgggggacctgcacccagatgtgacagaggccatgctgtatgagaagttctccccagctggccccatcctgagcatccgggtgtgccgggacatgatcaccaggaggagcctgggctacgcctacgtgaacttccagcagcctgcagatgctgagcgggccctggacaccatgaactttgatgtgatcaagggcaagcctgtgcgcatcatgtggagccagagggaccccagcctgaggaagagcggcgtgggcaacatcttcatcaagaacctggacaagagcattgacaacaaggccctgtatgacaccttcagcgccttcggcaacatcctgagctgcaagtag

SEQ ID NO: 21237 - DNA, 552 bp, synthetic construct
  misc_feature 1..552: note = Description of Artificial Sequence: Synthetic coding sequence
  source 1..552: mol_type = other DNA
atccggcctgctgccccccggccccccttcagcaccatgaggcctgccagcagccaggtgccccgggtgatgagcacccagagggtggccaacaccagcacccagaccatgggccccaggcctgctgctgctgctgctgctgccaccccagctgtgaggacagtgccccagtacaagtatgctgctggggtgaggaacccccagcagcacctgaatgcccagccccaggtgaccatgcagcagcctgctgtgcacgtgcagggccaggagcccctgacagcctccatgctggccagcgccccaccccaggagcagaagcagatgctgggggagcggctcttccccctcatccaggccatgcaccccaccctggccggcaagatcaccggcatgctgctggagattgacaacagcgagctgctgcacatgctggagagccctgagagcctgcggagcaaggtggatgaagctgtggccgtgctgcaggcccaccaggccaaggaggccgcccagaaggctgtgaacagcgccaccggggtgcccaccgtgtag

SEQ ID NO: 21238 - DNA, 228 bp, synthetic construct
  misc_feature 1..228: note = Description of Artificial Sequence: Synthetic coding sequence
  source 1..228: mol_type = other DNA
atgaaccccagcgcccccagctaccccatggccagcctgtatgtgggggacctgcacccagatgtgacagaggccatgctgtatgagaagttctccccagctggccccatcctgagcatccgggtgtgccgggacatgatcaccaggaggagcctgggctacgcctacgtgaacttccagcagcctgcagatgctgagcgggccctggacaccatgaactttgattag

SEQ ID NO: 21239 - DNA, 1008 bp, synthetic construct
  misc_feature 1..1008: note = Description of Artificial Sequence: Synthetic coding sequence
  source 1..1008: mol_type = other DNA
atgagcaagaggaaggccccccaggagaccctgaatggaggcatcacagacatgctgacagagctggccaactttgagaagaatgtgtcccaggccatccacaagtacaatgcctacaggaaggccgccagcgtcatcgccaagtacccccacaagatcaagtctggagctgaggccaagaagctgcccggggtgggcaccaagattgctgagaagattgatgagttcctggccaccgggaagctgaggaagctggagaagatccggcaggatgacaccagcagcagcatcaacttcctgaccagggtgtctggcatcggccccagcgctgccaggaagtttgtggatgagggcatcaagaccctggaggacctgaggaagaatgaagacaagctgaaccaccaccagagaattggcctgaagtactttggagactttgagaagaggatcccccgggaggagatgctgcagatgcaggacatcgtgctgaatgaggtgaagaaggtggacagcgagtacatcgccaccgtgtgtggcagcttcagaagaggagctgagagcagcggggacatggatgtgctgctgacccaccccagcttcaccagcgagagcaccaagcagcccaagctgctgcaccaggtggtggagcagctgcagaaggtgcacttcatcacagacaccctgagcaagggggagaccaagttcatgggcgtgtgccagctgcccagcaagaatgatgagaaggagtacccccacagaagaattgacatccgcctcatccccaaggaccagtactactgcggcgtgctgtacttcaccggcagtgacatcttcaacaagaacatgagggcccacgccctggagaagggcttcaccatcaatgagtacaccatccggcccctgggcgtgactggagtggccggggagcccctgcctgtggacagcgagaaggacatctttgactacatccagtggaagtaccgggagcccaaggacagaagtgaatag

SEQ ID NO: 21240 - DNA, 720 bp, synthetic construct
  misc_feature 1..720: note = Description of Artificial Sequence: Synthetic coding sequence
  source 1..720: mol_type = other DNA
tgaggagactttgagaagaggatcccccgggaggagatgctgcagatgcaggacatcgtgctgaatgaggtgaagaaggtggacagcgagtacatcgccaccgtgtgtggcagcttcagaagaggagctgagagcagcggggacatggatgtgctgctgacccaccccagcttcaccagcgagagcaccaagcagcccaagctgctgcaccaggtggtggagcagctgcagaaggtgcacttcatcacagacaccctgagcaagggggagaccaagttcatgggcgtgtgccagctgcccagcaagaatgatgagaaggagtacccccacagaagaattgacatccgcctcatccccaaggaccagtactactgcggcgtgctgtacttcaccggcagtgacatcttcaacaagaacatgagggcccacgccctggagaagggcttcaccatcaatgagtacaccatccggcccctgggcgtgacagtgctgcaggccacccgggaggacctgatgcacaacatgctgctgggcccccagctgaaggccatcaaggagctgcaggagaacccctgccagtggatcgtgaagaagaccagcctcatcaccagcagcggcaacacaggcaaccccaggactggagccaatgaggcctgcatcctgcccggccgccacaaccccatcggcgtgctgatctacttcctgacctttgccatgtag

SEQ ID NO: 21241 - DNA, 843 bp, synthetic construct
  misc_feature 1..843: note = Description of Artificial Sequence: Synthetic coding sequence
  source 1..843: mol_type = other DNA
atgagcaagaggaaggccccccaggagaccctgaatggaggcatcacagacatgctgacagagctggccaactttgagaagaatgtgtcccaggccatccacaagtacaatgcctacaggaaggccgccagcgtcatcgccaagtacccccacaagatcaagtctggagctgaggccaagaagctgcccggggtgggcaccaagattgctgagaagattgatgagttcctggccaccgggaagctgaggaagctggagaagatccggcaggatgacaccagcagcagcatcaacttcctgaccagggtgtctggcatcggccccagcgctgccaggaagtttgtggatgagggcatcaagaccctggagggcagccagctggacagctgccctgtgaagggccacctgaatggaacagagagcctgctggacctgatctgggatgtgatgaccatcctgaagctgaagaatgctgacctgaggaagaatgaagacaagctgaaccaccaccagagaattggcctgaagtactttggagactttgagaagaggatcccccgggaggagatgctgcagatgcaggacatcgtgctgaatgaggtgaagaaggtggacagcgagtacatcgccaccgtgtgtggcagcttcagaagaggagctgagagcagcggggacatggatgtgctgctgacccaccccagcttcaccagcgagagcaccaagcagcccaagctgctgcaccaggtggtggagcagctgcagaaggtgcacttcatcacagacaccctgagcaaaggagagaccaagttcatgggcgtgtgccagctgcccagcaagaactag

SEQ ID NO: 21242 - DNA, 714 bp, synthetic construct
  misc_feature 1..714: note = Description of Artificial Sequence: Synthetic coding sequence
  source 1..714: mol_type = other DNA
tgagagaagattgatgagttcctggccaccgggaagctgaggaagctggagaagatccggcaggatgacaccagcagcagcatcaacttcctgaccagggtgtctggaattggccccagcgctgccaggaagtttgtggatgagggcatcaagaccctggaggacctgaggaagaatgaagacaagctgaaccaccaccagagaattggcctgaagtactttggagactttgagaagaggatcccccgggaggagatgctgcagatgcaggacatcgtgctgaatgaggtgaagaaggtggacagcgagtacatcgccaccgtgtgtggcagcttcagaagaggagctgagagcagcggggacatggatgtgctgctgacccaccccagcttcaccagcgagagcaccaagcagggcgtgtgccagctgcccagcaagaatgatgagaaggagtacccccacagaagaattgacatccgcctcatccccaaggaccagtactactgcggcgtgctgtacttcaccggcagtgacatcttcaacaagaacatgagggcccacgccctggagaagggcttcaccatcaatgagtacaccatccggcccctgggcgtgactggagtggccggggagcccctgcctgtggacagcgagaaggacatctttgactacatccagtggaagtaccgggagcccaaggacagaagtgaatag

SEQ ID NO: 21243 - DNA, 546 bp, synthetic construct
  misc_feature 1..546: note = Description of Artificial Sequence: Synthetic coding sequence
  source 1..546: mol_type = other DNA
atgctgcagatgcaggacatcgtgctgaatgaggtgaagaaggtggacagcgagtacatcgccaccgtgtgtggcagcttcagaagaggagctgagagcagcggggacatggatgtgctgctgacccaccccagcttcaccagcgagagcaccaagcagcccaagctgctgcaccaggtggtggagcagctgcagaaggtgcacttcatcacagacaccctgagcaagggggagaccaagttcatgggcgtgtgccagctgcccagcaagaatgatgagaaggagtacccccacagaagaattgacatccgcctcatccccaaggaccagtactactgcggcgtgctgtacttcaccggcagtgacatcttcaacaagaacatgagggcccacgccctggagaagggcttcaccatcaatgagtacaccatccggcccctgggcgtgactggagtggccggggagcccctgcctgtggacagcgagaaggacatctttgactacatccagtggaagtaccgggagcccaaggacagaagtgaatag

SEQ ID NO: 21244 - DNA, 1728 bp, synthetic construct
  misc_feature 1..1728: note = Description of Artificial Sequence: Synthetic coding sequence
  source 1..1728: mol_type = other DNA
atggacccccggggcatcctgaaggccttccccaagaggcagaagatccacgcagatgccagcagcaaggtgctggccaagatcccccggcgggaggagggggaggaggccgaggagtggctgagcagcctgcgggcccacgtggtgaggactggaattggccgggcccgggcagagctgtttgagaagcagatcgtgcagcacggcggccagctgtgcccagcccagggccctggggtgacccacatcgtggtggatgagggcatggactatgagcgggccctgcggctgctgcggctgccccagctgcccccaggggcccagctggtgaagagcgcctggctgagcctgtgcctgcaggagcggcggctggtggatgtggccggcttcagcatcttcatccccagccgctacctggaccacccccagcccagcaaggccgagcaggatgccagcatccccccaggcacccatgaggccctgctgcagacagccctgagccccccacctccacccaccaggcctgtgagccccccccagaaggccaaggaggcccccaacacccaggcccagcccatcagtgatgatgaggccagtgatggagaggagacccaggtgtctgctgctgacctggaggccctgatcagcggccactaccccaccagcctggagggggactgtgagcccagccctgccccagctgtgctggacaagtgggtgtgtgcccagcccagcagccagaaggccaccaaccacaacctgcacatcacagagaagctggaggtgctggccaaggcctacagcgtgcagggcgacaagtggagggccctgggctacgccaaggccatcaatgccctgaagagcttccacaagcctgtgaccagctaccaggaggcctgcagcatccctggcatcggcaagaggatggccgagaagatcatcgagatcctggagagcggccacctgaggaagctggaccacatcagcgagagcgtgcctgtgctggagctgttcagcaacatctggggcgccggcaccaagacagcccagatgtggtaccagcagggcttccgcagcctggaggacatccgcagccaggccagcctgaccacccagcaggccatcggcctgaagcactacagcgacttcctggagaggatgccccgggaggaggccacagaaattgagcagacagtgcagaaggccgcccaggccttcaacagcggcctgctgtgtgtggcctgtggcagctacagaagaggcaaggccacctgtggagatgtggatgtgctgatcacccacccagatggccgcagccaccggggcatcttcagccggctgctggacagcctgcggcaggagggcttcctgacagatgacctggtgtcccaggaggagaatggccagcagcagaagtacctgggcgtgtgccgcctgcccggccctggccgccgccaccggcggctggacatcatcgtggtgccctacagcgagtttgcctgtgccctgctgtacttcaccggcagcgcccacttcaacagatccatgagggccctggccaagaccaagggcatgagcctgtctgagcacgccctgagcacagctgtggtgaggaacacccacggctgcaaggtgggccctggccgggtgctgcccacccccacagagaaggatgtgttccggctgctgggcctgccctaccgggagcctgctgagcgggactggtag

SEQ ID NO: 21245 - DNA, 897 bp, synthetic construct
  misc_feature 1..897: note = Description of Artificial Sequence: Synthetic coding sequence
  source 1..897: mol_type = other DNA
atgcaccaccagaagtacctgcagcgcttcctgggcggcaagcgggagaagaagcagaaggaggcctgcagcatccctggcatcggcaagaggatggccgagaagatcatcgagatcctggagagcggccacctgaggaagctggaccacatcagcgagagcgtgcctgtgctggagctgttcagcaacatctggggcgccggcaccaagacagcccagatgtggtaccagcagggcttccgcagcctggaggacatccgcagccaggccagcctgaccacccagcaggccatcggcctgaagcactacagcgacttcctggagaggatgccccgggaggaggccacagaaattgagcagacagtgcagaaggccgcccaggccttcaacagcggcctgctgtgtgtggcctgtggcagctaccgccggggcaaggccacctgtggagatgtggatgtgctgatcacccacccagatggccgcagccaccggggcatcttcagccggctgctggacagcctgcggcaggagggcttcctgacagatgacctggtgtcccaggaggagaatggccagcagcagaagtacctgggcgtgtgccgcctgcccggccctggaagaagacaccggcggctggacatcatcgtggtgccctacagcgagtttgcctgtgccctgctgtacttcaccggcagcgcccacttcaacagatccatgagggccctggccaagaccaagggcatgagcctgtctgaacatgccctgagcacagctgtggtgaggaacacccacggctgcaaggtgggccctggccgggtgctgcccacccccacagagaaggatgtgttccggctgctgggcctgccctaccgggagcctgctgagcgggactggtag

SEQ ID NO: 21246 - DNA, 1548 bp, synthetic construct
  misc_feature 1..1548: note = Description of Artificial Sequence: Synthetic coding sequence
  source 1..1548: mol_type = other DNA
atggacccccggggcatcctgaaggccttccccaagaggcagaagatccacgcagatgccagcagcaaggtgctggccaagatcccccggcgggaggagggggaggaggccgaggagtggctgagcagcctgcgggcccacgtggtgaggactggaattggccgggcccgggcagagctgtttgagaagcagatcgtgcagcacggcggccagctgtgcccagcccagggccctggggtgacccacatcgtggtggatgagggcatggactatgagcgggccctgcggctgctgcggctgccccagctgcccccaggggcccagctggtgaagagcgcctggctgagcctgtgcctgcaggagcggcggctggtggatgtggccggcttcagcatcttcatccccagccgctacctggaccacccccagcccagcaaggccgagcaggatgccagcatccccccaggcacccatgaggccctgctgcagacagccctgagccccccacctccacccaccaggcctgtgagccccccccagaaggccaaggaggcccccaacacccaggcccagcccatcagtgatgatgaggccagtgatggagaggagacccaggtgtctgctgctgacctggaggccctgatcagcggccactaccccaccagcctggagggggactgtgagcccagccctgccccagctgtgctggacaagtgggtgtgtgcccagcccagcagccagaaggccaccaaccacaacctgcacatcacagagaagctggaggtgctggccaaggcctacagcgtgcagggcgacaagtggagggccctgggctacgccaaggccatcaatgccctgaagagcttccacaagcctgtgaccagctaccaggaggcctgcagcatccctggcatcggcaagaggatggccgagaagatcatcgagatcctggagagcggccacctgaggaagctggaccacatcagcgagagcgtgcctgtgctggagctgttcagcaacatctggggcgccggcaccaagacagcccagatgtggtaccagcagggcttccgcagcctggaggacatccgcagccaggccagcctgaccacccagcaggccatcggcctgaagcactacagcgacttcctggagaggatgccccgggaggaggccacagaaattgagcagacagtgcagaaggccgcccaggccttcaacagcggcctgctgtgtgtggcctgtggcagctacagaagaggcaaggccacctgtggagatgtggatgtgctgatcacccacccagatggccgcagccaccggggcatcttcagccggctgctggacagcctgcggcaggagggcttcctgacagatgacctggtgtcccaggaggagaatggccagcagcagaagtacctgggcgtgtgccgcctgcccggccctggccgccgccaccggcggctggacatcatcgtggtgccctacagcgagtttgcctgtgccctgcagggcggggcctggcccagcgctgcccacagccactag

SEQ ID NO: 21247 - DNA, 903 bp, synthetic construct
  misc_feature 1..903: note = Description of Artificial Sequence: Synthetic coding sequence
  source 1..903: mol_type = other DNA
atgctgatgcaccaccagaagtacctgcagcgcttcctgggcggcaagcgggagaagaagcagaaggaggcctgcagcatccctggcatcggcaagaggatggccgagaagatcatcgagatcctggagagcggccacctgaggaagctggaccacatcagcgagagcgtgcctgtgctggagctgttcagcaacatctggggcgccggcaccaagacagcccagatgtggtaccagcagggcttccgcagcctggaggacatccgcagccaggccagcctgaccacccagcaggccatcggcctgaagcactacagcgacttcctggagaggatgccccgggaggaggccacagaaattgagcagacagtgcagaaggccgcccaggccttcaacagcggcctgctgtgtgtggcctgtggcagctaccgccggggcaaggccacctgtggagatgtggatgtgctgatcacccacccagatggccgcagccaccggggcatcttcagccggctgctggacagcctgcggcaggagggcttcctgacagatgacctggtgtcccaggaggagaatggccagcagcagaagtacctgggcgtgtgccgcctgcccggccctggaagaagacaccggcggctggacatcatcgtggtgccctacagcgagtttgcctgtgccctgctgtacttcaccggcagcgcccacttcaacagatccatgagggccctggccaagaccaagggcatgagcctgtctgaacatgccctgagcacagctgtggtgaggaacacccacggctgcaaggtgggccctggccgggtgctgcccacccccacagagaaggatgtgttccggctgctgggcctgccctaccgggagcctgctgagcgggactggtag

SEQ ID NO: 21248 - DNA, 1728 bp, synthetic construct; identical to SEQ ID NO: 21244
  misc_feature 1..1728: note = Description of Artificial Sequence: Synthetic coding sequence
  source 1..1728: mol_type = other DNA

SEQ ID NO: 21249 - DNA, 516 bp, synthetic construct
  misc_feature 1..516: note = Description of Artificial Sequence: Synthetic coding sequence
  source 1..516: mol_type = other DNA
atggactatgagcgggccctgcggctgctgcggctgccccagctgcccccaggggcccagctggtgaagagcgcctggctgagcctgtgcctgcaggagcggcggctggtggatgtggccggcttcagcatcttcatccccagcagccccagcctgatgatgaagcctgtgatgggcaagaagccccggctggtgcagctgatctggaagcccagctctgtggccaccaccccaccacccctgcgggagatcgtgtccctggcccagcccctgctgtcctggatcagcggctctgtgcacagcccccaggcccggcggcggcccatcaccaccagcatcagccagaggtcctggaagttctggcccaagcccaccgtcttccgggagaccagcggcggcccctgggccatgccccggcccagcatgcccagccgggccagcatcagcctgagccccaggaccaggaggcctgctgtgtccctgggcctgggcagcggctggctgaggaagagctag

SEQ ID NO: 21250 - DNA, 747 bp, synthetic construct
  misc_feature 1..747: note = Description of Artificial Sequence: Synthetic coding sequence
  source 1..747: mol_type = other DNA
atggaggccctgtgtgtgtgcagcctgatgcccctgcactggagctggatcctgacagccagccacctggccgccttcttccagggcttccgcagcctggaggacatccgcagccaggccagcctgaccacccagcaggccatcggcctgaagcactacagcgacttcctggagaggatgccccgggaggaggccacagaaattgagcagacagtgcagaaggccgcccaggccttcaacagcggcctgctgtgtgtggcctgtggcagctaccgccggggcaaggccacctgtggagatgtggatgtgctgatcacccacccagatggccgcagccaccggggcatcttcagccggctgctggacagcctgcggcaggagggcttcctgacagatgacctggtgtcccaggaggagaatggccagcagcagaagtacctgggcgtgtgccgcctgcccggccctggaagaagacaccggcggctggacatcatcgtggtgccctacagcgagtttgcctgtgccctgctgtacttcaccggcagcgcccacttcaacagatccatgagggccctggccaagaccaagggcatgagcctgtctgaacatgccctgagcacagctgtggtgaggaacacccacggctgcaaggtgggccctggccgggtgctgcccacccccacagagaaggatgtgttccggctgctgggcctgccctaccgggagcctgctgagcgggactggtag

SEQ ID NO: 21251 - DNA, 1728 bp, synthetic construct; identical to SEQ ID NO: 21244
  misc_feature 1..1728: note = Description of Artificial Sequence: Synthetic coding sequence
  source 1..1728: mol_type = other DNA

SEQ ID NO: 21252 - DNA, 1464 bp, synthetic construct
  misc_feature 1..1464: note = Description of Artificial Sequence: Synthetic coding sequence
  source 1..1464: mol_type = other DNA
atggactatgagcgggccctgcggctgctgcggctgccccagctgcccccaggggcccagctggtgaagagcgcctggctgagcctgtgcctgcaggagcggcggctggtggatgtggccggcttcagcatcttcatccccagccgctacctggaccacccccagcccagcaaggccgagcaggatgccagcatccccccaggcacccatgaggccctgctgcagacagccctgagccccccacctccacccaccaggcctgtgagccccccccagaaggccaaggaggcccccaacacccaggcccagcccatcagtgatgatgaggccagtgatggagaggagacccaggtgtctgctgctgacctggaggccctgatcagcggccactaccccaccagcctggagggggactgtgagcccagccctgccccagctgtgctggacaagtgggtgtgtgcccagcccagcagccagaaggccaccaaccacaacctgcacatcacagagaagctggaggtgctggccaaggcctacagcgtgcagggcgacaagtggagggccctgggctacgccaaggccatcaatgccctgaagagcttccacaagcctgtgaccagctaccaggaggcctgcagcatccctggcatcggcaagaggatggccgagaagatcatcgagatcctggagagcggccacctgaggaagctggaccacatcagcgagagcgtgcctgtgctggagctgttcagcaacatctggggcgccggcaccaagacagcccagatgtggtaccagcagggcttccgcagcctggaggacatccgcagccaggccagcctgaccacccagcaggccatcggcctgaagcactacagcgacttcctggagaggatgccccgggaggaggccacagaaattgagcagacagtgcagaaggccgcccaggccttcaacagcggcctgctgtgtgtggcctgtggcagctacagaagaggcaaggccacctgtggagatgtggatgtgctgatcacccacccagatggccgcagccaccggggcatcttcagccggctgctggacagcctgcggcaggagggcttcctgacagatgacctggtgtcccaggaggagaatggccagcagcagaagtacctgggcgtgtgccgcctgcccggccctggccgccgccaccggcggctggacatcatcgtggtgccctacagcgagtttgcctgtgccctgctgtacttcaccggcagcgcccacttcaacagatccatgagggccctggccaagaccaagggcatgagcctgtctgagcacgccctgagcacagctgtggtgaggaacacccacggctgcaaggtgggccctggccgggtgctgcccacccccacagagaaggatgtgttccggctgctgggcctgccctaccgggagcctgctgagcgggactggtag

SEQ ID NO: 21253 - DNA, 1548 bp, synthetic construct; identical to SEQ ID NO: 21246
  misc_feature 1..1548: note = Description of Artificial Sequence: Synthetic coding sequence
  source 1..1548: mol_type = other DNA

SEQ ID NO: 21254 - DNA, 810 bp, synthetic construct
  misc_feature 1..810: note = Description of Artificial Sequence: Synthetic coding sequence
  source 1..810: mol_type = other DNA
atggacccccggggcatcctgaaggccttccccaagaggcagaagatccacgcagatgccagcagcaaggtgctggccaagatcccccggcgggaggagggggaggaggccgaggagtggctgagcagcctgcgggcccacgtggtgaggactggaattggccgggcccgggcagagctgtttgagaagcagatcgtgcagcacggcggccagctgtgcccagcccagggccctggggtgacccacatcgtggtggatgagggcatggactatgagcgggccctgcggctgctgcggctgccccagctgcccccaggggcccagctggtgaagagcgcctggctgagcctgtgcctgcaggagcggcggctggtggatgtggccggcttcagcatcttcatccccagccgctacctggaccacccccagcccagcaaggccgagcaggatgccagcatccccccaggcacccatgaggccctgctgcagacagccctgagccccccacctccacccaccaggcctgtgagccccccccagaaggccaaggaggcccccaacacccaggcccagcccatcagtgatgatgaggccagtgatggagaggagacccaggtgtctgctgctgacctggaggccctgatcagcggccactaccccaccagcctggagggggactgtgagcccagccctgccccagctgtgctggacaagtgggtgtgtgcccagcccagcagccagaaggccaccaaccacaacctgcacatcacagagaagctggaggtgctggccaaggcctacagcgtgtag

SEQ ID NO: 21255 - DNA, 1413 bp, synthetic construct
  misc_feature 1..1413: note = Description of Artificial Sequence: Synthetic coding sequence
  source 1..1413: mol_type = other DNA
atggacccccggggcatcctgaaggccttccccaagaggcagaagatccacgcagatgccagcagcaaggtgctggccaagatcccccggcgggaggagggggaggaggccgaggagtggctgagcagcctgcgggcccacgtggtgaggactggaattggccgggcccgggcagagctgtttgagaagcagatcgtgcagcacggcggccagctgtgcccagcccagggccctggggtgacccacatcgtggtggatgagggcatggactatgagcgggccctgcggctgctgcggctgccccagctgcccccaggggcccagctggtgaagagcgcctggctgagcctgtgcctgcaggagcggcggctggtggatgtggccggcttcagcatcttcatccccagccgctacctggaccacccccagcccagcaaggccgagcaggatgccagcatccccccaggcacccatgaggccctgctgcagacagccctgagccccccacctccacccaccaggcctgtgagccccccccagaaggccaaggaggcccccaacacccaggcccagcccatcagtgatgatgaggccagtgatggagaggagacccaggaggcctgcagcatccctggcatcggcaagaggatggccgagaagatcatcgagatcctggagagcggccacctgaggaagctggaccacatcagcgagagcgtgcctgtgctggagctgttcagcaacatctggggcgccggcaccaagacagcccagatgtggtaccagcagggcttccgcagcctggaggacatccgcagccaggccagcctgaccacccagcaggccatcggcctgaagcactacagcgacttcctggagaggatgccccgggaggaggccacagaaattgagcagacagtgcagaaggccgcccaggccttcaacagcggcctgctgtgtgtggcctgtggcagctacagaagaggcaaggccacctgtggagatgtggatgtgctgatcacccacccagatggccgcagccaccggggcatcttcagccggctgctggacagcctgcggcaggaggccgtgcccagcgtgggccctggcttcctgacagatgacctggtgtcccaggaggagaatggccagcagcagaagtacctgggcgtgtgccgcctgcccggccctggaagaagacaccggcggctggacatcatcgtggtgccctacagcgagtttgcctgtgccctgctgtacttcaccggcagcgcccacttcaacagatccatgagggccctggccaagaccaagggcatgagcctgtctgaacatgccctgagcacagctgtggtgaggaacacccacggctgcaaggtgggccctggccgggtgctgcccacccccacctag

SEQ ID NO: 21256 - DNA, 1005 bp, synthetic construct
  misc_feature 1..1005: note = Description of Artificial Sequence: Synthetic coding sequence
  source 1..1005: mol_type = other DNA
atggacccccggggcatcctgaaggccttccccaagaggcagaagatccacgcagatgccagcagcaagcccagctgtgccagcgccctgcgctgcctgtgcccagagagtgacattggagctgacagcgcctgccccggccctgctgagtggctgagcagcctgcgggcccacgtggtgaggacaggcatcggccgggcccgggcagagctgtttgagaagcagatcgtgcagcacggcggccagctgtgcccagcccagggccctggggtgacccacatcgtggtggatgagggcatggactatgaaagagccctgcggctgctgcggctgccccagctgcccccaggggcccagctggtgaagagcgcctggctgagcctgtgcctgcaggagcggcggctggtggatgtggccggcttcagcatcttcatccccagccgctacctggaccacccccagcccagcaaggccgagcaggatgccagcatccccccaggcacccatgaggccctgctgcagacagccctgagccccccacctccacccaccaggcctgtgtccccaccccagaaggccaaggaggcccccaacacccaggcccagcccatcagtgatgatgaggccagtgatggagaggagacccaggtgtctgctgctgacctggaggccctgatcagcggccactaccccaccagcctggagggggactgtgagcccagccctgccccagctgtgctggacaagtgggtgtgtgcccagcccagcagccagaaggccaccaaccacaacctgcacatcacagagaagctggaggtgctggccaaggcctacagcgtgcagggcgacaagtggagggccctgggctacgccaaggccatcaatgccctgaagagcttccacaagcctgtgaccagctaccaggaggcctgcagcatccctggcatcggcaagaggatggccgagaagatcatcgagatcctggagagcggccacctgaggtag

SEQ ID NO: 21257 - DNA, 657 bp, synthetic construct
  misc_feature 1..657: note = Description of Artificial Sequence: Synthetic coding sequence
  source 1..657: mol_type = other DNA
atgcaccaccagaagtacctgcagcgcttcctgggcggcaagcgggagaagaagcagaaggaggcctgcagcatccctggcatcggcaagaggatggccgagaagatcatcgagatcctggagagcggccacctgaggaagctggaccacatcagcgagagcgtgcctgtgctggagctgttcagcaacatctggggcgccggcaccaagacagcccagatgtggtaccagcagggcttccgcagcctggaggacatccgcagccaggccagcctgaccacccagcaggccatcggcctgaagcactacagcgacttcctggagaggatgccccgggaggaggccacagaaattgagcagacagtgcagaaggccgcccaggccttcaacagcggcctgctgtgtgtggcctgtggcagctaccgccggggcaaggccacctgtggagatgtggatgtgctgatcacccacccagatggccgcagccaccggggcatcttcagccggctgctggacagcctgcggcaggagggcttcctgacagatgacctggtgtcccaggaggagaatggccagcagcagaagtacctgggcgtgtgccgcctgcccggccctggaagaagacaccggcggctggacatcatcgtggtgccctag

SEQ ID NO: 21258 - DNA, 567 bp, synthetic construct
  misc_feature 1..567: note = Description of Artificial Sequence: Synthetic coding sequence
  source 1..567: mol_type = other DNA
atggacccccggggcatcctgaaggccttccccaagaggcagaagatccacgcagatgccagcagcaaggtgctggccaagatcccccggcgggaggagggggaggaggccgaggagtggctgagcagcctgcgggcccacgtggtgaggactggaattggccgggcccgggcagagctgtttgagaagcagatcgtgcagcacggcggccagctgtgcccagcccagggccctggggtgacccacatcgtggtggatgagggcatggactatgagcgggccctgcggctgctgcggctgccccagctgcccccaggggcccagctggtgaagagcgcctggctgagcctgtgcctgcaggagcggcggctggtggatgtggccggcttcagcatcttcatccccagccgctacctggaccacccccagcccagcaaggccgagcaggatgccagcatccccccaggcacccatgaggccctgctgcagacagccctgagccccccacctccacccaccaggcctgtgagccccccccagaaggccaaggaggcccccaacacctag

SEQ ID NO: 21259 - DNA, 516 bp, synthetic construct; identical to SEQ ID NO: 21249
  misc_feature 1..516: note = Description of Artificial Sequence: Synthetic coding sequence
  source 1..516: mol_type = other DNA

SEQ ID NO: 21260 - DNA, 459 bp, synthetic construct
  misc_feature 1..459: note = Description of Artificial Sequence: Synthetic coding sequence
  source 1..459: mol_type = other DNA
atggactatgagcgggccctgcggctgctgcggctgccccagctgcccccaggggcccagctggtgaagagcgcctggctgagcctgtgcctgcaggagcggcggctggtggatgtggccggcttcagcatcttcatccccagcagccccagcctgatgatgaagcctgtgatgggcaagaagccccggctggtgcagctgatctggaagcccagctctgtggccaccaccccaccacccctgcgggagatcgtgtccctggcccagcccctgctgtcctggatcagcggctctgtgcacagcccccaggcccggcggcggcccatcaccaccagcatcagccagaggtcctggaagttctggcccaagcccaccgtcttccgggagaccagcggcggcccctgggccatgccccggcccagcatgcccagccgggccagcatcagcctgagcccctag

SEQ ID NO: 21261 - DNA, 939 bp, synthetic construct
  misc_feature 1..939: note = Description of Artificial Sequence: Synthetic coding sequence
  source 1..939: mol_type = other DNA
atgcaccaccagaagtacctgcagcgcttcctgggcggcaagcgggagaagaagcagaagcccatcagtgatgatgaggccagtgatggagaggagacccaggaggcctgcagcatccctggcatcggcaagaggatggccgagaagatcatcgagatcctggagagcggccacctgaggaagctggaccacatcagcgagagcgtgcctgtgctggagctgttcagcaacatctggggcgccggcaccaagacagcccagatgtggtaccagcagggcttccgcagcctggaggacatccgcagccaggccagcctgaccacccagcaggccatcggcctgaagcactacagcgacttcctggagaggatgccccgggaggaggccacagaaattgagcagacagtgcagaaggccgcccaggccttcaacagcggcctgctgtgtgtggcctgtggcagctaccgccggggcaaggccacctgtggagatgtggatgtgctgatcacccacccagatggccgcagccaccggggcatcttcagccggctgctggacagcctgcggcaggagggcttcctgacagatgacctggtgtcccaggaggagaatggccagcagcagaagtacctgggcgtgtgccgcctgcccggccctggaagaagacaccggcggctggacatcatcgtggtgccctacagcgagtttgcctgtgccctgctgtacttcaccggcagcgcccacttcaacagatccatgagggccctggccaagaccaagggcatgagcctgtctgaacatgccctgagcacagctgtggtgaggaacacccacggctgcaaggtgggccctggccgggtgctgcccacccccacagagaaggatgtgttccggctgctgggcctgccctaccgggagcctgctgagcgggactggtag

SEQ ID NO: 21262 - DNA, 1401 bp, synthetic construct
  misc_feature 1..1401: note = Description of Artificial Sequence: Synthetic coding sequence
  source 1..1401: mol_type = other DNA
atggctgaccagctgtacctggagaacattgatgaatttgtgacagaccagaacaagatcgtgacctacaagtggctgagctacaccctgggcgtgcacgtgaaccaggccaagcagatgctgtatgactatgtggagaggaagaggaaagaaaattctggggcccagctgcacgtgacctacctggtgtctggcagcctcatccagaatggccacagctgccacaaggtggccgtggtgcgggaggacaagctggaggccgtgaagagcaagctggccgtgacagccagcatccacgtgtacagcatccagaaggccatgctgaaggacagcggccccctcttcaacacagattatgacatcctgaagagcaacctgcagaactgcagcaagttcagcgccatccagtgtgccgctgctgtgccccgggccccagctgagagcagcagcagcagcaagaagtttgagcagagccacctgcacatgagcagcgagacccaggccaacaatgagctgaccaccaatggacatggccccccagccagcaagcaggtgtcccagcagcccaagggcatcatgggcatgtttgccagcaaggctgctgccaagacccaggagaccaacaaggagaccaagacagaggccaaggaggtgaccaatgccagcgctgctggcaacaaggcccctggaaaaggaaacatgatgagcaacttcttcggcaaggccgccatgaacaagttcaaggtgaacctggacagcgagcaggccgtgaaggaggagaagatcgtggagcagcccaccgtgtctgtgacagagcccaagctggccaccccagctggcctgaagaagagcagcaagaaggccgagcctgtgaaggtgctgcagaaggagaagaagaggggcaagagggtggccctgagtgatgatgagaccaaggagacagagaacatgaggaagaagagaagacgcatcaagctgcctgagagtgacagcagtgaagatgaggtgtttcctgacagccctggggcctatgaggccgagagccccagccccccacctccacccagcccccccctggagcctgtgcccaagacagagcctgagcccccatctgtgaagagcagcagcggggagaacaagaggaagaggaagagggtgctgaagagcaagacctacctggatggagagggctgcatcgtgacagagaaggtgtatgaaagtgagagctgcacagattctgaggaggagctgaacatgaagaccagctctgtgcaccggcccccagccatgacagtgaagaaggagccccgggaggagaggaagggccccaagaagggcacagctgccctgggcaaggccaaccggcaggtgtccatcaccggcttcttccagaggaagtag

SEQ ID NO: 21263 - DNA, 1284 bp, synthetic construct
  misc_feature 1..1284: note = Description of Artificial Sequence: Synthetic coding sequence
  source 1..1284: mol_type = other DNA
atgctgtatgactatgtggagaggaagaggaaggagaacagcggggcccagctgcacgtgacctacctggtgtctggcagcctcatccagaatggccacagctgccacaaggtggccgtggtgcgggaggacaagctggaggccgtgaagagcaagctggccgtgacagccagcatccacgtgtacagcatccagaaggccatgctgaaggacagcggccccctcttcaacacagattatgacatcctgaagagcaacctgcagaactgcagcaagttcagcgccatccagtgtgccgctgctgtgccccgggccccagctgagagcagcagcagcagcaagaagtttgagcagagccacctgcacatgagcagcgagacccaggccaacaatgagctgaccaccaacggccacggccccccagccagcaagcaggtgtcccagcagcccaagggcatcatgggcatgtttgccagcaaggccgccgccaagacccaggagaccaacaaggagaccaagacagaggccaaggaggtgaccaatgccagcgctgctggcaacaaggcccctgggaagggcaacatgatgagcaacttcttcggcaaggccgccatgaacaagttcaaggtgaacctggacagcgagcaggccgtgaaggaggagaagatcgtggagcagcccaccgtgtctgtgacagagcccaagctggccaccccagctggcctgaagaagagcagcaagaaggccgagcctgtgaaggtgctgcagaaggagaagaagaggggcaagagggtggccctgagtgatgatgagaccaaggagacagagaacatgaggaagaagagaagacgcatcaagctgcctgagagtgacagcagtgaagatgaggtgtttcctgacagccctggggcctatgaagctgagagccccagccccccacctccacccagcccccccctggagcctgtgcccaagacagagcctgagccccccagcgtgaagagcagcagtggagagaacaagaggaagaggaagagggtgctgaagagcaagacctacctggatggagagggctgcatcgtgacagagaaggtgtatgagagcgagagctgcacagacagcgaggaggagctgaacatgaagaccagctctgtgcaccggcccccagccatgacagtgaagaaggagccccgggaggagaggaagggccccaagaagggcacagctgccctgggcaaggccaaccggcaggtgtccatcaccggcttcttccagaggaagtag

SEQ ID NO: 21264 - DNA, 1083 bp, synthetic construct
  misc_feature 1..1083: note = Description of Artificial Sequence: Synthetic coding sequence
  source 1..1083: mol_type = other DNA
atgctgaaggacagcggccccctcttcaacacagattatgacatcctgaagagcaacctgcagaactgcagcaagttcagcgccatccagtgtgccgctgctgtgccccgggccccagctgagagcagcagcagcagcaagaagtttgagcagagccacctgcacatgagcagcgagacccaggccaacaatgagctgaccaccaatggacatggccccccagccagcaagcaggtgtcccagcagcccaagggcatcatgggcatgtttgccagcaaggctgctgccaagacccaggagaccaacaaggagaccaagacagaggccaaggaggtgaccaatgccagcgctgctggcaacaaggcccctggaaaaggaaacatgatgagcaacttcttcggcaaggccgccatgaacaagttcaaggtgaacctggacagcgagcaggccgtgaaggaggagaagatcgtggagcagcccaccgtgtctgtgacagagcccaagctggccaccccagctggcctgaagaagagcagcaagaaggccgagcctgtgaaggtgctgcagaaggagaagaagaggggcaagagggtggccctgagtgatgatgagaccaaggagacagagaacatgaggaagaagagaagacgcatcaagctgcctgagagtgacagcagtgaagatgaggtgtttcctgacagccctggggcctatgaggccgagagccccagccccccacctccacccagcccccccctggagcctgtgcccaagacagagcctgagcccccatctgtgaagagcagcagcggggagaacaagaggaagaggaagagggtgctgaagagcaagacctacctggatggagagggctgcatcgtgacagagaaggtgtatgaaagtgagagctgcacagattctgaggaggagctgaacatgaagaccagctctgtgcaccggcccccagccatgacagtgaagaaggagccccgggaggagaggaagggccccaagaagggcacagctgccctgggcaaggccaaccggcaggtgtccatcaccggcttcttccagaggaagtag

SEQ ID NO: 21265 - DNA, 804 bp, synthetic construct
  misc_feature 1..804: note = Description of Artificial Sequence: Synthetic coding sequence
  source 1..804: mol_type = other DNA
atggctgaccagctgtacctggagaacattgatgaatttgtgacagaccagaacaagatcgtgacctacaagtggctgagctacaccctgggcgtgcacgtgaaccaggccaagcagatgctgtatgactatgtggagaggaagaggaaagaaaattctggggcccagctgcacgtgacctacctggtgtctggcagcctcatccagaatggccacagctgccacaaggtggccgtggtgcgggaggacaagctggaggccgtgaagagcaagctggccgtgacagccagcatccacgtgtacagcatccagaaggccatgctgaaggacagcggccccctcttcaacacagattatgacatcctgaagagcaacctgcagaactgcagcaagttcagcgccatccagtgtgccgctgctgtgccccgggccccagctgagagcagcagcagcagcaagaagtttgagcagagccacctgcacatgagcagcgagacccaggccaacaatgagctgaccaccaatggacatggccccccagccagcaagcaggtgtcccagcagcccaagggcatcatgggcatgtttgccagcaaggctgctgccaagacccaggagaccaacaaggagaccaagacagaggccaaggaggtgaccaatgccagcgctgctggcaacaaggcccctggaaaaggaaacatgatgagcaacttcttcggcaaggccgccatgaacaagttcaaggtgaacctggacagcgagcaggccgtgaaggaggagaagatcaaggagaagaagaggtag

SEQ ID NO: 21266 - DNA, 1566 bp, synthetic construct
  misc_feature 1..1566: note = Description of Artificial Sequence: Synthetic coding sequence
  source 1..1566: mol_type = other DNA
atgggagaggtggaggcccctggccgcctgtggctggagagccccccaggaggagccccacccatcttcctgcccagtgatggccaggccctggtgctgggccggggccccctgacccaggtgacagacaggaagtgcagcaggacccaggtggagctggtggccgaccctgagaccaggacagtggccgtgaagcagctgggcgtgaaccccagcaccaccggcacccaggagctgaagccaggcctggagggcagcctgggcgtgggggacaccctgtacctggtgaatggcctgcaccccctgaccctgcgctgggaggagaccaggaccccagagagccagcctgacaccccacctggcacccccctggtgtcccaggatgagaagagagatgctgagctgcccaagaagaggatgaggaagagcaaccctggctgggagaacctggagaagctgctggtgttcaccgctgctggggtgaagccccagggcaaggtggccggctttgacctggatggcaccctcatcaccaccaggtctgggaaggtgttccccaccggccccagcgactggaggatcctgtacccagagatccccaggaagctgcgggagctggaggccgagggctacaagctggtgatcttcaccaaccagatgagcatcggccggggcaagctgcctgctgaggagttcaaggccaaggtggaggccgtggtggagaagctgggcgtgcccttccaggtgctggtggccacccatgctggcctgtacaggaagcctgtgacaggcatgtgggaccacctgcaggagcaggccaatgatggcacccccatcagcattggagacagcatctttgtgggagatgctgctggccggcctgccaactgggcccctggcaggaagaagaaggacttcagctgtgccgaccggctgtttgccctgaacctgggcctgccctttgccaccccagaggagttcttcctgaagtggccagctgctggctttgagctgcctgcctttgaccccaggacagtgagccgcagcggccccctgtgcctgcctgagagccgggccctgctgagcgccagccctgaggtggtggtggccgtgggcttccctggggccggcaagagcaccttcctgaagaagcacctggtgtctgctggctacgtgcacgtgaacagagacaccctgggctcctggcagagatgtgtgaccacctgtgaaacagccctgaagcagggcaagagggtggccatcgacaacaccaacccagatgctgccagccgggcccgctacgtgcagtgtgcccgggctgctggggtgccctgccgctgcttcctgttcaccgccaccctggagcaggcccggcacaacaaccgcttccgggagatgacagacagcagccacatccctgtgtctgacatggtgatgtatggctacaggaagcagtttgaggcccccaccctggccgagggcttcagcgccatcctggagatccccttccggctgtgggtggagccccggctgggccgcctgtactgccagttcagcgagggctag

SEQ ID NO: 21267 - DNA, 699 bp, synthetic construct
  misc_feature 1..699: note = Description of Artificial Sequence: Synthetic coding sequence
  source 1..699: mol_type = other DNA
atgctgggcgccatgttccgggccggcacccccatgccacccaacctgaacagccagggcggcggccactacttcatcgacagagatggcaaggccttccgccacatcctgaacttcctgcggctgggccgcctggacctgccccggggctatggagaaacagccctgctgcgggcagaggccgacttctaccagatccggcccctgctggatgccctgcgggagctggaggccagccagggcaccccagcccccacagctgccctgctgcacgcagatgtggatgtgagcccccggctggtgcacttcagcgcccggcggggcccccaccactatgagctgagctctgtgcaggtggacaccttccgggccaacctcttctgcacagattctgagtgcctgggcgccctgcgggccaggtttggagtggccagcggggacagagctgagggcagcccccacttccacctggagtgggcccccaggcctgtggagctgcctgaggtggagtatggccgcctgggcctgcagcccctgtggacaggaggccctggagagcggcgggaggtggtgggcacccccagcttcctggaggaggtgctgcgggtggccctggagcacggcttccggctggacagcgtcttcccagaccctgaggacctgctgaacagccgcagcctgcgctttgtgcgccactag

SEQ ID NO: 21268 - DNA, 5157 bp, synthetic construct
  misc_feature 1..5157: note = Description of Artificial Sequence: Synthetic coding sequence
  source 1..5157: mol_type = other DNA
atgaaccagaacaccacagagcctgtggccgccacagagaccctggccgaggtgcctgagcacgtgctgcggggcctgcctgaggaggtgcggctcttccccagcgctgtggacaagacccgcatcggcgtgtgggccaccaagcccatcctgaagggcaagaagtttggcccctttgtgggggacaagaagaagaggagccaggtgaagaacaacgtgtacatgtgggaggtgtactaccccaacctgggctggatgtgcattgatgccacagatcctgagaagggcaactggctgcgctacgtgaactgggcctgcagcggggaggagcagaacctcttccccctggagatcaacagagccatctactacaagaccctgaagcccatcgcccctggagaggagctgctggtgtggtacaatggagaggacaaccctgagattgctgctgccatcgaggaggagcgggccagcgcccggagcaagaggagcagccccaagagcaggaagggcaagaagaagagccaggagaacaagaacaagggcaacaagatccaggacatccagctgaagaccagcgagccagacttcaccagcgccaacatgagggacagcgctgagggccccaaggaggatgaggagaagcccagcgccagcgccctggagcagcctgccaccctgcaggaggtggccagccaggaggtgcccccagagctggccaccccagccccagcctgggagccccagcctgagccagatgagcggctggaggccgccgcctgtgaggtgaatgacctgggggaggaggaggaggaggaggaggaggaggatgaggaggaggaggaggatgatgatgatgatgagctggaggatgaaggagaggaggaggcctccatgcccaatgaaaacagcgtgaaggagcctgagatccgctgtgatgagaagccagaggacctgctggaggagcccaagaccaccagcgaggagaccctggaggactgcagcgaggtgaccccagccatgcagatccccaggaccaaggaggaggccaatggagatgtgtttgagaccttcatgttcccctgccagcactgtgagaggaagttcaccaccaagcagggcctggagcggcacatgcacatccacatcagcacagtgaaccacgccttcaagtgcaagtactgcggcaaggccttcggcacccagatcaacagaagaagacatgagaggagacatgaggccggcctgaagaggaagcccagccagaccctgcagcccagcgaggacctggctgatggcaaggccagcggggagaatgtggccagcaaggatgacagcagcccccccagcctgggccctgactgcctgatcatgaacagcgagaaggccagccaggacaccatcaacagctctgtggtggaggagaatggagaggtgaaggagctgcacccctgcaagtactgcaagaaggtgtttggcacccacaccaacatgagaagacaccagaggagagtgcatgagcggcacctgatccccaagggcgtgcggaggaagggcggcctggaggagccccagcccccagctgagcaggcccaggccacccagaatgtgtatgtgcccagcacagagcctgaggaggagggggaggctgatgatgtgtacatcatggacatcagcagcaacatcagcgagaacctgaactactacattgatggcaagatccagaccaacaacaacaccagcaactgtgatgtgattgagatggagagcgccagcgctgacctgtatggcatcaactgcctgctgacccctgtgacagtggagatcacccagaacatcaagaccacccaggtgcctgtgacagaggacctgcccaaggagcccctgggcagcaccaacagcgaggccaagaagagaagaacagccagccccccagccctgcccaagatcaaggccgagacagacagcgaccccatggtgcccagctgcagcctgagcctgcccctgagcatcagcaccacagaggccgtgtccttccacaaggagaagtctgtgtacctgagcagcaagctgaagcagctgctgcagacccaggacaagctgaccccagctggcatcagcgccacagaaattgccaagctgggccctgtgtgtgtgtctgccccagcctccatgctgcctgtgaccagcagccgcttcaagaggaggaccagcagcccccccagcagcccccagcacagccctgccctgcgggactttgggaagcccagtgatggcaaggccgcctggacagatgctggcctgaccagcaagaagagcaagctggagagccacagcgacagccctgcctggagcctgagcggcagagatgagcgggagaccgtgtccccaccctgctttgatgagtacaagatgagcaaggagtggacagccagcagcgccttcagctctgtgtgcaaccagcagcccctggacctgagcagcggcgtgaagcagaaggccgagggcaccgggaagacccctgtgcagtgggagagcgtgctggacctgtctgtgcacaagaagcactgcagcgacagcgagggcaaggagttcaaggagagccacagcgtgcagcccacctgcagcgctgtgaagaagaggaagcccaccacctgcatgctgcagaaggtgctgctgaatgagtacaatggaattgacctgcctgtggagaacccagcagatggcaccaggagccccagcccctgcaagagcctggaggcccagcctgaccctgacctgggccctggcagcggcttccctgcccccaccgtggagagcaccccagatgtgtgccccagcagccctgccctgcagacccccagcctgagcagcggccagctgccccccctgctgatccccacagaccccagcagccccccaccctgcccccctgtgctgactgtggccaccccacctccacccctgctgcccaccgtgcccctgcctgcccccagcagcagcgccagcccccacccctgccccagccccctgagcaatgccacagcccagagccccctgcccatcctgagccccaccgtgagccccagccccagccccatcccccctgtggagcccctgatgtctgctgccagccctggcccccccaccctgagcagcagcagcagcagcagcagcagcagcagcagcttcagcagcagcagcagcagcagcagccccagccccccacccctgagcgccatcagctctgtggtgtcctctggggacaacctggaggccagcctgcccatgatctccttcaagcaggaggagctggagaatgaaggcctgaagccccgggaggagccccagagcgctgctgagcaggatgtggtggtgcaggagaccttcaacaagaactttgtgtgcaatgtgtgtgagagccccttcctgagcatcaaggacctgaccaagcacctgagcatccatgctgaggagtggcccttcaagtgtgagttctgtgtgcagctgttcaaggacaagacagacctgtctgagcaccgcttcctgctgcatggagtgggcaacatctttgtgtgcagcgtgtgcaagaaggagtttgccttcctgtgcaacctgcagcagcaccagagggacctgcacccagacaaggtgtgcacccaccacgagtttgagagcggcaccctgcggccccagaacttcacagaccccagcaaggcccacgtggagcacatgcagagcctgcctgaggaccccctggagaccagcaaggaggaggaggagctgaatgacagcagcgaggagctgtacaccaccatcaagatcatggccagcggcatcaagaccaaggaccctgatgtgcggctgggcctgaaccagcactaccccagcttcaagcccccacccttccagtaccaccacaggaaccccatgggcattggagtgacagccaccaacttcaccacccacaacatcccccagaccttcaccacagccatccgctgcaccaagtgtgggaagggcgtggacaacatgcctgagctgcacaagcacatcctggcctgtgccagcgccagtgacaagaagcgctacacccccaagaagaaccctgtgcccctgaagcagacagtgcagcccaagaatggagtggtggtgctggacaacagcggcaagaatgccttccggaggatgggccagcccaagaggctgaacttctctgtggagctgagcaagatgagcagcaacaagctgaagctgaatgccctgaagaagaagaaccagctggtgcagaaggccatcctgcagaagaacaagagcgccaagcagaaggctgacctgaagaatgcctgtgagagcagcagccacatctgcccctactgcaaccgggagttcacctacatcggcagcctgaacaagcacgccgccttcagctgccccaagaagcccctgagcccccccaagaagaaggtgagccacagcagcaagaagggcggccacagcagccctgccagcagtgacaagaacagcaacagcaaccacagaagaagaacagcagatgctgagatcaagatgcagagcatgcagacccccctgggcaagacccgggcccggagcagcggccccacccaggtgcccctgcccagcagcagcttccgcagcaagcagaatgtgaagtttgctgcctctgtgaagagcaagaagcccagcagcagcagcctgaggaacagcagccccatccgcatggccaagatcacccacgtggagggcaagaagcccaaggctgtggccaagaaccacagcgcccagctgagcagcaagaccagccgcagcctgcacgtgcgggtgcagaagagcaaggctgtgctgcagagcaagagcaccctggccagcaagaagaggacagaccgcttcaacatcaagagccgggagaggtctgggggccctgtgaccaggagcctgcagctggccgctgctgctgacctgtctgagaacaagagagaagatggcagcgccaagcaggagctgaaggacttctcctacagcctgcggctggccagccgctgcagccccccagctgccccctacatcacccggcagtacaggaaggtgaaggccccagctgctgcccagttccagggccccttcttcaaggagtag

SEQ ID NO: 21269 - DNA, 5049 bp, synthetic construct
  misc_feature 1..5049: note = Description of Artificial Sequence: Synthetic coding sequence
  source 1..5049: mol_type = other DNA
atgaaccagaacaccacagagcctgtggccgccacagagaccctggccgaggtgcctgagcacgtgctgcggggcctgcctgaggaggtgcggctcttccccagcgctgtggacaagacccgcatcggcgtgtgggccaccaagcccatcctgaagggcaagaagtttggcccctttgtgggggacaagaagaagaggagccaggtgaagaacaacgtgtacatgtgggaggtgtactaccccaacctgggctggatgtgcattgatgccacagatcctgagaagggcaactggctgcgctacgtgaactgggcctgcagcggggaggagcagaacctcttccccctggagatcaacagagccatctactacaagaccctgaagcccatcgcccctggagaggagctgctggtgtggtacaatggagaggacaaccctgagattgctgctgccatcgaggaggagcgggccagcgcccggagcaagaggagcagccccaagagcaggaagggcaagaagaagagccaggagaacaagaacaagggcaacaagatccaggacatccagctgaagaccagcgagccagacttcaccagcgccaacatgagggacagcgctgagggccccaaggaggatgaggagaagcccagcgccagcgccctggagcagcctgccaccctgcaggaggtggccagccaggaggtgcccccagagctggccaccccagccccagcctgggagccccagcctgagccagatgagcggctggaggccgccgcctgtgaggtgaatgacctgggggaggaggaggaggaggaggaggaggaggatgaggaggaggaggaggatgatgatgatgatgagctggaggatgaaggagaggaggaggcctccatgcccaatgaaaacagcgtgaaggagcctgagatccgctgtgatgagaagccagaggacctgctggaggagcccaagaccaccagcgaggagaccctggaggactgcagcgaggtgaccccagccatgcagatccccaggaccaaggaggaggccaatggagatgtgtttgagaccttcatgttcccctgccagcactgtgagaggaagttcaccaccaagcagggcctggagcggcacatgcacatccacatcagcacagtgaaccacgccttcaagtgcaagtactgcggcaaggccttcggcacccagatcaacagaagaagacatgagaggagacatgaggccggcctgaagaggaagcccagccagaccctgcagcccagcgaggacctggctgatggcaaggccagcggggagaatgtggccagcaaggatgacagcagcccccccagcctgggccctgactgcctgatcatgaacagcgagaaggccagccaggacaccatcaacagctctgtggtggaggagaatggagaggtgaaggagctgcacccctgcaagtactgcaagaaggtgtttggcacccacaccaacatgagaagacaccagaggagagtgcatgagcggcacctgatccccaagggcgtgcggaggaagggcggcctggaggagccccagcccccagctgagcaggcccaggccacccagaatgtgtatgtgcccagcacagagcctgaggaggagggggaggctgatgatgtgtacatcatggacatcagcagcaacatcagcgagaacctgaactactacattgatggcaagatccagaccaacaacaacaccagcaactgtgatgtgattgagatggagagcgccagcgctgacctgtatggcatcaactgcctgctgacccctgtgacagtggagatcacccagaacatcaagaccacccaggtgcctgtgacagaggacctgcccaaggagcccctgggcagcaccaacagcgaggccaagaagagaagaacagccagccccccagccctgcccaagatcaaggccgagacagacagcgaccccatggtgcccagctgcagcctgagcctgcccctgagcatcagcaccacagaggccgtgtccttccacaaggagaagtctgtgtacctgagcagcaagctgaagcagctgctgcagacccaggacaagctgaccccagctggcatcagcgccacagaaattgccaagctgggccctgtgtgtgtgtctgccccagcctccatgctgcctgtgaccagcagccgcttcaagaggaggaccagcagcccccccagcagcccccagcacagccctgccctgcgggactttgggaagcccagtgatggcaaggccgcctggacagatgctggcctgaccagcaagaagagcaagctggagagccacagcgacagccctgcctggagcctgagcggcagagatgagcgggagaccgtgtccccaccctgctttgatgagtacaagatgagcaaggagtggacagccagcagcgccttcagctctgtgtgcaaccagcagcccctggacctgagcagcggcgtgaagcagaaggccgagggcaccgggaagacccctgtgcagtgggagagcgtgctggacctgtctgtgcacaagaagcactgcagcgacagcgagggcaaggagttcaaggagagccacagcgtgcagcccacctgcagcgctgtgaagaagaggaagcccaccacctgcatgctgcagaaggtgctgctgaatgagtacaatggaattgacctgcctgtggagaacccagcagatggcaccaggagccccagcccctgcaagagcctggaggcccagcctgaccctgacctgggccctggcagcggcttccctgcccccaccgtggagagcaccccagatgtgtgccccagcagccctgccctgcagacccccagcctgagcagcggccagctgccccccctgctgatccccacagaccccagcagccccccaccctgcccccctgtgctgactgtggccaccccacctccacccctgctgcccaccgtgcccctgcctgcccccagcagcagcgccagcccccacccctgccccagccccctgagcaatgccacagcccagagccccctgcccatcctgagccccaccgtgagccccagccccagccccatcccccctgtggagcccctgatgtctgctgccagccctggcccccccaccctgagcagcagcagcagcagcagcagcagcagcagcagcttcagcagcagcagcagcagcagcagccccagccccccacccctgagcgccatcagctctgtggtgtcctctggggacaacctggaggccagcctgcccatgatctccttcaagcaggaggagctggagaatgaaggcctgaagccccgggaggagccccagagcgctgctgagcaggatgtggtggtgcaggagaccttcaacaagaactttgtgtgcaatgtgtgtgagagccccttcctgagcatcaaggacctgaccaagcacctgagcatccatgctgaggagtggcccttcaagtgtgagttctgtgtgcagctgttcaaggacaagacagacctgtctgagcaccgcttcctgctgcatggagtgggcaacatctttgtgtgcagcgtgtgcaagaaggagtttgccttcctgtgcaacctgcagcagcaccagagggacctgcacccagacaaggtgtgcacccaccacgagtttgagagcggcaccctgcggccccagaacttcacagaccccagcaaggcccacgtggagcacatgcagagcctgcctgaggaccccctggagaccagcaaggaggaggaggagctgaatgacagcagcgaggagctgtacaccaccatcaagatcatggccagcggcatcaagaccaaggaccctgatgtgcggctgggcctgaaccagcactaccccagcttcaagcccccacccttccagtaccaccacaggaaccccatgggcattggagtgacagccaccaacttcaccacccacaacatcccccagaccttcaccacagccatccgctgcaccaagtgtgggaagggcgtggacaacatgcctgagctgcacaagcacatcctggcctgtgccagcgccagtgacaagaagcgctacacccccaagaagaaccctgtgcccctgaagcagacagtgcagcccaagaatggagtggtggtgctggacaacagcggcaagaatgccttccggaggatgggccagcccaagaggctgaacttctctgtggagctgagcaagatgagcagcaacaagctgaagctgaatgccctgaagaagaagaaccagctggtgcagaaggccatcctgcagaagaacaagagcgccaagcagaaggctgacctgaagaatgcctgtgagagcagcagccacatctgcccctactgcaaccgggagttcacctacatcggcagcctgaacaagcacgccgccttcagctgccccaagaagcccctgagcccccccaagaagaaggtgagccacagcagcaagaagggcggccacagcagccctgccagcagtgacaagaacagcaacagcaaccacagaagaagaacagcagatgctgagatcaagatgcagagcatgcagacccccctgggcaagacccgggcccggagcagcggccccacccaggtgcccctgcccagcagcagcttccgcagcaagcagaatgtgaagtttgctgcctctgtgaagagcaagaagcccagcagcagcagcctgaggaacagcagccccatccgcatggccaagatcacccacgtggagggcaagaagcccaaggctgtggccaagaaccacagcgcccagctgagcagcaagaccagccgcagcctgcacgtgcgggtgcagaagagcaaggctgtgctgcagagcaagagcaccctggccagcaagaagaggacagaccgcttcaacatcaagagccgggagaggtctgggggccctgtgaccaggagcctgcagctggccgctgctgctgacctgtctgagaacaagagagaagatggcagcgccaagcaggagctgaaggacttcaggaacttcctgtag

SEQ ID NO: 21270 - DNA, 4446 bp, synthetic construct
  misc_feature 1..4446: note = Description of Artificial Sequence: Synthetic coding sequence
  source 1..4446: mol_type = other DNA
atgagggacagcgctgagggccccaaggaggatgaggagaagcccagcgccagcgccctggagcagcctgccaccctgcaggaggtggccagccaggaggtgcccccagagctggccaccccagccccagcctgggagccccagcctgagccagatgagcggctggaggccgccgcctgtgaggtgaatgacctgggggaggaggaggaggaggaggaggaggaggatgaggaggaggaggaggatgatgatgatgatgagctggaggatgaaggagaggaggaggcctccatgcccaatgaaaattctgtgaaggagcctgagatccgctgtgatgagaagccagaggacctgctggaggagcccaagaccaccagcgaggagaccctggaggactgcagcgaggtgaccccagccatgcagatccccaggaccaaggaggaggccaatggagatgtgtttgagaccttcatgttcccctgccagcactgtgagaggaagttcaccaccaagcagggcctggagcggcacatgcacatccacatcagcacagtgaaccacgccttcaagtgcaagtactgtgggaaggccttcggcacccagatcaacagaagaagacatgaaagaagacatgaagctggcctgaagaggaagcccagccagaccctgcagcccagcgaggacctggctgatggcaaggccagcggagaaaatgtggccagcaaggatgacagcagcccccccagcctgggccctgactgcctgatcatgaacagcgagaaggccagccaggacaccatcaacagctctgtggtggaggagaatggagaggtgaaggagctgcacccctgcaagtactgcaagaaggtgtttggcacccacaccaacatgaggaggcaccagaggagagtgcatgagcggcacctgatccccaagggcgtgagaagaaaaggaggcctggaggagccccagcccccagctgagcaggcccaggccacccagaatgtgtatgtgcccagcacagagcctgaggaggagggggaggctgatgatgtgtacatcatggacatcagcagcaacatcagcgagaacctgaactactacattgatggcaagatccagaccaacaacaacaccagcaactgtgatgtgattgagatggagagcgccagcgctgacctgtatggcatcaactgcctgctgacccctgtgacagtggagatcacccagaacatcaagaccacccaggtgcctgtgacagaggacctgcccaaggagcccctgggcagcaccaacagcgaggccaagaagagaagaacagccagccccccagccctgcccaagatcaaggccgagacagacagcgaccccatggtgcccagctgcagcctgagcctgcccctgagcatcagcaccacagaagctgtgtccttccacaaggagaagtctgtgtacctgagcagcaagctgaagcagctgctgcagacccaggacaagctgaccccagctggcatcagcgccacagagatcgccaagctgggccctgtgtgtgtgtctgccccagcctccatgctgcctgtgaccagcagccgcttcaagaggaggaccagcagcccccccagcagcccccagcacagccctgccctgcgggactttgggaagcccagtgatggcaaggccgcctggacagatgctggcctgaccagcaagaagagcaagctggagagccacagcgacagccctgcctggagcctgagcggcagagatgagcgggagaccgtgagccccccctgctttgatgagtacaagatgagcaaggagtggacagccagcagcgccttcagctctgtgtgcaaccagcagcccctggacctgagcagtggagtgaagcagaaggccgagggcaccgggaagacccctgtgcagtgggagagcgtgctggacctgtctgtgcacaagaagcactgcagcgacagcgagggcaaggagttcaaggagagccacagcgtgcagcccacctgcagcgctgtgaagaagaggaagcccaccacctgcatgctgcagaaggtgctgctgaatgagtacaacggcatcgacctgcctgtggagaacccagcagatggcaccaggagccccagcccctgcaagagcctggaggcccagcctgaccctgacctgggccctggcagcggcttccctgcccccaccgtggagagcaccccagatgtgtgccccagcagccctgccctgcagacccccagcctgagcagcggccagctgccccccctgctgatccccacagaccccagcagccccccaccctgcccccctgtgctgactgtggccaccccacctccacccctgctgcccaccgtgcccctgcctgcccccagcagcagcgccagcccccacccctgccccagccccctgagcaatgccacagcccagagccccctgcccatcctgagccccaccgtgagccccagccccagccccatcccccctgtggagcccctgatgtctgctgccagccctggcccccccaccctgagcagcagcagcagcagcagcagcagcagcagcagcttcagcagcagcagcagcagcagcagccccagccccccacccctgagcgccatcagctctgtggtgagcagcggggacaacctggaggccagcctgcccatgatctccttcaagcaggaggagctggagaatgaaggcctgaagccccgggaggagccccagagcgctgctgagcaggatgtggtggtgcaggagaccttcaacaagaactttgtgtgcaatgtgtgtgagagccccttcctgagcatcaaggacctgaccaagcacctgagcatccacgccgaggagtggcccttcaagtgtgagttctgtgtgcagctgttcaaggacaagacagacctgtctgagcaccgcttcctgctgcacggcgtgggcaacatctttgtgtgcagcgtgtgcaagaaggagtttgccttcctgtgcaacctgcagcagcaccagagggacctgcacccagacaaggtgtgcacccaccatgaatttgaaagtggcaccctgcggccccagaacttcacagaccccagcaaggcccacgtggagcacatgcagagcctgcctgaggaccccctggagaccagcaaggaggaggaggagctgaatgacagcagcgaggagctgtacaccaccatcaagatcatggccagcggcatcaagaccaaggaccctgatgtgcggctgggcctgaaccagcactaccccagcttcaagcccccacccttccagtaccaccacaggaaccccatgggcatcggcgtgacagccaccaacttcaccacccacaacatcccccagaccttcaccacagccatccgctgcaccaagtgtgggaaaggagtggacaacatgcctgagctgcacaagcacatcctggcctgtgccagcgccagtgacaagaagcgctacacccccaagaagaaccctgtgcccctgaagcagacagtgcagcccaagaatggagtggtggtgctggacaacagcggcaagaatgccttccggaggatgggccagcccaagaggctgaacttctctgtggagctgagcaagatgagcagcaacaagctgaagctgaatgccctgaagaagaagaaccagctggtgcagaaggccatcctgcagaagaacaagagcgccaagcagaaggctgacctgaagaatgcctgtgagagcagcagccacatctgcccctactgcaaccgggagttcacctacatcggcagcctgaacaagcatgctgccttcagctgccccaagaagcccctgagcccccccaagaagaaggtgagccacagcagcaagaagggcggccacagcagccctgccagcagtgacaagaacagcaacagcaaccacagaagaagaacagcagatgctgagatcaagatgcagagcatgcagacccccctgggcaagacccgggcccggagcagcggccccacccaggtgcccctgcccagcagcagcttccgcagcaagcagaatgtgaagtttgctgcctctgtgaagagcaagaagcccagcagcagcagcctgaggaacagcagccccatccgcatggccaagatcacccacgtggagggcaagaagcccaaggctgtggccaagaaccacagcgcccagctgagcagcaagaccagccgcagcctgcacgtgcgggtgcagaagagcaaggctgtgctgcagagcaagagcaccctggccagcaagaagaggacagaccgcttcaacatcaagagccgggagaggtctgggggccctgtgaccaggagcctgcagctggccgctgctgctgacctgtctgagaacaagcgggaggatggcagcgccaagcaggagctgaaggacttcaggaacttcctgtag

SEQ ID NO: 21271 - DNA, 681 bp, synthetic construct
  misc_feature 1..681: note = Description of Artificial Sequence: Synthetic coding sequence
  source 1..681: mol_type = other DNA
atgaaccagaacaccacagagcctgtggccgccacagagaccctggccgaggtgcctgagcacgtgctgcggggcctgcctgaggaggtgcggctcttccccagcgctgtggacaagacccgcatcggcgtgtgggccaccaagcccatcctgaagggcaagaagtttggcccctttgtgggggacaagaagaagaggagccaggtgaagaacaacgtgtacatgtgggaggtgtactaccccaacctgggctggatgtgcattgatgccacagatcctgagaagggcaactggctgcgctacgtgaactgggcctgcagcggggaggagcagaacctcttccccctggagatcaacagagccatctactacaagaccctgaagcccatcgcccctggagaggagctgctggtgtggtacaatggagaggacaaccctgagattgctgctgccatcgaggaggagcgggccagcgcccggagcaagaggagcagccccaagagcaggaaggccacagccagcgcctggaggccagatgccctgcaccagaggcccaggaccagccctggcagcatcggccgcagcaagctgcagctgcagcccagcagccgggaccacagcagcaagagccgccacagcggctgcagcctgacagcccctgaggtgacctggaaccagtag

SEQ ID NO: 21272 - DNA, 5049 bp, synthetic construct
  misc_feature 1..5049: note = Description of Artificial Sequence: Synthetic coding sequence
  source 1..5049: mol_type = other DNA
atgaaccagaacaccacagagcctgtggccgccacagagaccctggccgaggtgcctgagcacgtgctgcggggcctgcctgaggaggtgcggctcttccccagcgctgtggacaagacccgcatcggcgtgtgggccaccaagcccatcctgaagggcaagaagtttggcccctttgtgggggacaagaagaagaggagccaggtgaagaacaacgtgtacatgtgggaggtgtactaccccaacctgggctggatgtgcattgatgccacagatcctgagaagggcaactggctgcgctacgtgaactgggcctgcagcggggaggagcagaacctcttccccctggagatcaacagagccatctactacaagaccctgaagcccatcgcccctggagaggagctgctggtgtggtacaatggagaggacaaccctgagattgctgctgccatcgaggaggagcgggccagcgcccggagcaagaggagcagccccaagagcaggaagggcaagaagaagagccaggagaacaagaacaagggcaacaagatccaggacatccagctgaagaccagcgagccagacttcaccagcgccaacatgagggacagcgctgagggccccaaggaggatgaggagaagcccagcgccagcgccctggagcagcctgccaccctgcaggaggtggccagccaggaggtgcccccagagctggccaccccagccccagcctgggagccccagcctgagccagatgagcggctggaggccgccgcctgtgaggtgaatgacctgggggaggaggaggaggaggaggaggaggaggatgaggaggaggaggaggatgatgatgatgatgagctggaggatgaaggagaggaggaggcctccatgcccaatgaaaacagcgtgaaggagcctgagatccgctgtgatgagaagccagaggacctgctggaggagcccaagaccaccagcgaggagaccctggaggactgcagcgaggtgaccccagccatgcagatccccaggaccaaggaggaggccaatggagatgtgtttgagaccttcatgttcccctgccagcactgtgagaggaagttcaccaccaagcagggcctggagcggcacatgcacatccacatcagcacagtgaaccacgccttcaagtgcaagtactgcggcaaggccttcggcacccagatcaacagaagaagacatgagaggagacatgaggccggcctgaagaggaagcccagccagaccctgcagcccagcgaggacctggctgatggcaaggccagcggggagaatgtggccagcaaggatgacagcagcccccccagcctgggccctgactgcctgatcatgaacagcgagaaggccagccaggacaccatcaacagctctgtggtggaggagaatggagaggtgaaggagctgcacccctgcaagtactgcaagaaggtgtttggcacccacaccaacatgagaagacaccagaggagagtgcatgagcggcacctgatccccaagggcgtgcggaggaagggcggcctggaggagccccagcccccagctgagcaggcccaggccacccagaatgtgtatgtgcccagcacagagcctgaggaggagggggaggctgatgatgtgtacatcatggacatcagcagcaacatcagcgagaacctgaactactacattgatggcaagatccagaccaacaacaacaccagcaactgtgatgtgattgagatggagagcgccagcgctgacctgtatggcatcaactgcctgctgacccctgtgacagtggagatcacccagaacatcaagaccacccaggtgcctgtgacagaggacctgcccaaggagcccctgggcagcaccaacagcgaggccaagaagagaagaacagccagccccccagccctgcccaagatcaaggccgagacagacagcgaccccatggtgcccagctgcagcctgagcctgcccctgagcatcagcaccacagaggccgtgtccttccacaaggagaagtctgtgtacctgagcagcaagctgaagcagctgctgcagacccaggacaagctgaccccagctggcatcagcgccacagaaattgccaagctgggccctgtgtgtgtgtctgccccagcctccatgctgcctgtgaccagcagccgcttcaagaggaggaccagcagcccccccagcagcccccagcacagccctgccctgcgggactttgggaagcccagtgatggcaaggccgcctggacagatgctggcctgaccagcaagaagagcaagctggagagccacagcgacagccctgcctggagcctgagcggcagagatgagcgggagaccgtgtccccaccctgctttgatgagtacaagatgagcaaggagtggacagccagcagcgccttcagctctgtgtgcaaccagcagcccctggacctgagcagcggcgtgaagcagaaggccgagggcaccgggaagacccctgtgcagtgggagagcgtgctggacctgtctgtgcacaagaagcactgcagcgacagcgagggcaaggagttcaaggagagccacagcgtgcagcccacctgcagcgctgtgaagaagaggaagcccaccacctgcatgctgcagaaggtgctgctgaatgagtacaatggaattgacctgcctgtggagaacccagcagatggcaccaggagccccagcccctgcaagagcctggaggcccagcctgaccctgacctgggccctggcagcggcttccctgcccccaccgtggagagcaccccagatgtgtgccccagcagccctgccctgcagacccccagcctgagcagcggccagctgccccccctgctgatccccacagaccccagcagccccccaccctgcccccctgtgctgactgtggccaccccacctccacccctgctgcccaccgtgcccctgcctgcccccagcagcagcgccagcccccacccctgccccagccccctgagcaatgccacagcccagagccccctgcccatcctgagccccaccgtgagccccagccccagccccatcccccctgtggagcccctgatgtctgctgccagccctggcccccccaccctgagcagcagcagcagcagcagcagcagcagcagcagcttcagcagcagcagcagcagcagcagccccagccccccacccctgagcgccatcagctctgtggtgtcctctggggacaacctggaggccagcctgcccatgatctccttcaagcaggaggagctggagaatgaaggcctgaagccccgggaggagccccagagcgctgctgagcaggatgtggtggtgcaggagaccttcaacaagaactttgtgtgcaatgtgtgtgagagccccttcctgagcatcaaggacctgaccaagcacctgagcatccatgctgaggagtggcccttcaagtgtgagttctgtgtgcagctgttcaaggacaagacagacctgtctgagcaccgcttcctgctgcatggagtgggcaacatctttgtgtgcagcgtgtgcaagaaggagtttgccttcctgtgcaacctgcagcagcaccagagggacctgcacccagacaaggtgtgcacccaccacgagtttgagagcggcaccctgcggccccagaacttcacagaccccagcaaggcccacgtggagcacatgcagagcctgcctgaggaccccctggagaccagcaaggaggaggaggagctgaatgacagcagcgaggagctgtacaccaccatcaagatcatggccagcggcatcaagaccaaggaccctgatgtgcggctgggcctgaaccagcactaccccagcttcaagcccccacccttccagtaccaccacaggaaccccatgggcattggagtgacagccaccaacttcaccacccacaacatcccccagaccttcaccacagccatccgctgcaccaagtgtgggaagggcgtggacaacatgcctgagctgcacaagcacatcctggcctgtgccagcgccagtgacaagaagcgctacacccccaagaagaaccctgtgcccctgaagcagacagtgcagcccaagaatggagtggtggtgctggacaacagcggcaagaatgccttccggaggatgggccagcccaagaggctgaacttctctgtggagctgagcaagatgagcagcaacaagctgaagctgaatgccctgaagaagaagaaccagctggtgcagaaggccatcctgcagaagaacaagagcgccaagcagaaggctgacctgaagaatgcctgtgagagcagcagccacatctgcccctactgcaaccgggagttcacctacatcggcagcctgaacaagcacgccgccttcagctgccccaagaagcccctgagcccccccaagaagaaggtgagccacagcagcaagaagggcggccacagcagccctgccagcagtgacaagaacagcaacagcaaccacagaagaagaacagcagatgctgagatcaagatgcagagcatgcagacccccctgggcaagacccgggcccggagcagcggccccacccaggtgcccctgcccagcagcagcttccgcagcaagcagaatgtgaagtttgctgcctctgtgaagagcaagaagcccagcagcagcagcctgaggaacagcagccccatccgcatggccaagatcacccacgtggagggcaagaagcccaaggctgtggccaagaaccacagcgcccagctgagcagcaagaccagccgcagcctgcacgtgcgggtgcagaagagcaaggctgtgctgcagagcaagagcaccctggccagcaagaagaggacagaccgcttcaacatcaagagccgggagaggtctgggggccctgtgaccaggagcctgcagctggccgctgctgctgacctgtctgagaacaagagagaagatggcagcgccaagcaggagctgaaggacttccgctgcttcctgtag

SEQ ID NO: 21273 - DNA, 237 bp, synthetic construct
  misc_feature 1..237: note = Description of Artificial Sequence: Synthetic coding sequence
  source 1..237: mol_type = other DNA
atgagggacagcgctgagggccccaaggaggatgaggagaagcccagcgccagcgccctggagcagcctgccaccctgcaggaggtggccagccaggaggtgcccccagagctggccaccccagccccagcctgggagccccagcctgagccagatgagcggctggaggccgccgcctgtgaggtgaatgacctgggggaggaggaggaggaggaggaggaggaggatgaggagtag

SEQ ID NO: 21274 - DNA, 4446 bp, synthetic construct; identical to SEQ ID NO: 21270
  misc_feature 1..4446: note = Description of Artificial Sequence: Synthetic coding sequence
  source 1..4446: mol_type = other DNA

SEQ ID NO: 21275 - DNA, 675 bp, synthetic construct
  misc_feature 1..675: note = Description of Artificial Sequence: Synthetic coding sequence
  source 1..675: mol_type = other DNA
atgagcagctactttgtgaacagcaccttccctgtgaccctggccagcggccaggagagcttcctgggccagctgcccctgtacagcagcggctatgctgaccccctgcggcactacccagccccctacggccctggccctggccaggacaagggctttgccaccagcagctactaccccccagctgggggcggctacggccgggccgccccctgtgactatggccctgccccagccttctaccgggagaaggagagcgcctgtgccctgtctggagcagatgagcagccccccttccaccctgagcccaggaagagtgactgtgcccaggacaagtctgtgtttggagaaacagaggagcagaagtgcagcacccctgtgtacccctggatgcagaggatgaacagctgcaacagcagcagctttggccccagcggcagaagaggccggcagacctacacccgctaccagaccctggagctggagaaggagttccactacaaccgctacctgaccaggagaagaagaattgaaattgcccacgccctgtgcctgacagagcggcagatcaagatctggttccagaacagaaggatgaagtggaagaaggagagcaagctgctgagcgccagccagctgtctgctgaggaggaggaggagaagcaggccgagtag

SEQ ID NO: 21276 - DNA, 2496 bp, synthetic construct
  misc_feature 1..2496: note = Description of Artificial Sequence: Synthetic coding sequence
  source 1..2496: mol_type = other DNA
atgacagagctgaaggccaagggcccccgggcccctcatgtggccggcggcccccccagccctgaggtgggcagccccctgctgtgcaggcctgctgctggccccttccctggcagccagaccagtgacaccctgcctgaggtgtctgccatccccatcagcctggatggcctgctcttcccccggccctgccagggccaggaccccagtgatgagaagacccaggaccagcagagcctgagtgatgtggagggcgcctacagcagagctgaggccaccaggggggccggcggcagcagcagcagccccccagagaaggacagcggcctgctggacagcgtgctggacaccctgctggcccccagcggccctggccagagccagcccagccccccagcctgtgaggtgaccagctcctggtgcctgtttggacctgagctgcctgaagatcctcctgctgccccagccacccagagggtgctgagccccctgatgagccgcagcggctgcaaggtgggggacagcagcggcacagctgctgcccacaaggtgctgccccggggcctgagccctgcccggcagctgctgctgcctgccagcgagagcccccactggagcggggcccctgtgaagcccagcccccaggccgctgctgtggaggtggaggaggaggatggcagcgagagcgaggagagcgctggccccctgctgaagggcaagccccgggccctgggcggcgctgctgctgggggcggcgctgctgctgtgcccccaggagctgctgctgggggcgtggccctggtgcccaaggaggacagccgcttcagcgccccccgggtggccctggtggagcaggatgcccccatggcccctggccgcagccccctggccaccaccgtgatggacttcatccacgtgcccatcctgcccctgaaccacgccctgctggccgcccggacccggcagctgctggaggatgagagctatgatggaggagctggggccgccagcgcctttgccccacccaggagcagcccctgtgccagcagcacccctgtggccgtgggggacttcccagactgtgcctaccccccagatgctgagcccaaggatgatgcctaccccctgtacagcgacttccagcccccagccctgaagatcaaggaggaggaggagggcgctgaggccagcgcccggagccccaggagctacctggtggccggggccaacccagctgccttcccagacttccccctgggccccccaccacccctgcccccccgggccacccccagcaggcctggagaggccgctgtgacagctgccccagccagcgcctctgtgagcagcgccagcagcagcggcagcaccctggagtgcatcctgtacaaggccgagggcgccccaccccagcagggcccctttgcccccccaccctgcaaggcccctggggccagcggctgcctgctgcccagagatggcctgcccagcaccagcgccagcgctgctgctgctggagctgccccagccctgtacccagccctgggcctgaatggcctgccccagctgggctaccaggccgctgtgctgaaggagggcctgccccaggtgtacccaccctacctgaactacctgcggccagattctgaggccagccagagcccccagtacagctttgagagcctgccccagaagatctgcctgatctgtggagatgaggccagcggctgccactatggagtgctgacctgtggcagctgcaaggtgttcttcaagagggccatggagggccagcacaactacctgtgtgccggcagaaatgactgcatcgtggacaagatccggaggaagaactgcccagcctgccgcctgaggaagtgctgccaggccggcatggtgctgggcggcttcaggaacctgcacattgatgaccagatcaccctcatccagtacagctggatgagcctgatggtgtttggcctgggctggaggagctacaagcacgtgtctggccagatgctgtactttgccccagacctgatcctgaatgagcagaggatgaaggagagcagcttctacagcctgtgcctgaccatgtggcagatcccccaggagtttgtgaagctgcaggtgtcccaggaggagttcctgtgcatgaaggtgctgctgctgctgaacaccatccccctggagggcctgcggagccagacccagtttgaggagatgaggagcagctacatccgggagctgatcaaggccatcggcctgcggcagaagggcgtggtgagcagcagccagcgcttctaccagctgaccaagctgctggacaacctgcatgacctggtgaagcagctgcacctgtactgcctgaacaccttcatccagagccgggccctgtctgtggagttccctgagatgatgtctgaggtgattgctgcccagctgcccaagatcctggccggcatggtgaagcccctgctcttccacaagaagtag

SEQ ID NO: 21277 - DNA, 2802 bp, synthetic construct
  misc_feature 1..2802: note = Description of Artificial Sequence: Synthetic coding sequence
  source 1..2802: mol_type = other DNA
atgacagagctgaaggccaagggcccccgggcccctcatgtggccggcggcccccccagccctgaggtgggcagccccctgctgtgcaggcctgctgctggccccttccctggcagccagaccagtgacaccctgcctgaggtgtctgccatccccatcagcctggatggcctgctcttcccccggccctgccagggccaggaccccagtgatgagaagacccaggaccagcagagcctgagtgatgtggagggcgcctacagcagagctgaggccaccaggggggccggcggcagcagcagcagccccccagagaaggacagcggcctgctggacagcgtgctggacaccctgctggcccccagcggccctggccagagccagcccagccccccagcctgtgaggtgaccagctcctggtgcctgtttggacctgagctgcctgaagatcctcctgctgccccagccacccagagggtgctgagccccctgatgagccgcagcggctgcaaggtgggggacagcagcggcacagctgctgcccacaaggtgctgccccggggcctgagccctgcccggcagctgctgctgcctgccagcgagagcccccactggagcggggcccctgtgaagcccagcccccaggccgctgctgtggaggtggaggaggaggatggcagcgagagcgaggagagcgctggccccctgctgaagggcaagccccgggccctgggcggcgctgctgctgggggcggcgctgctgctgtgcccccaggagctgctgctgggggcgtggccctggtgcccaaggaggacagccgcttcagcgccccccgggtggccctggtggagcaggatgcccccatggcccctggccgcagccccctggccaccaccgtgatggacttcatccacgtgcccatcctgcccctgaaccacgccctgctggccgcccggacccggcagctgctggaggatgagagctatgatggaggagctggggccgccagcgcctttgccccacccaggagcagcccctgtgccagcagcacccctgtggccgtgggggacttcccagactgtgcctaccccccagatgctgagcccaaggatgatgcctaccccctgtacagcgacttccagcccccagccctgaagatcaaggaggaggaggagggcgctgaggccagcgcccggagccccaggagctacctggtggccggggccaacccagctgccttcccagacttccccctgggccccccaccacccctgcccccccgggccacccccagcaggcctggagaggccgctgtgacagctgccccagccagcgcctctgtgagcagcgccagcagcagcggcagcaccctggagtgcatcctgtacaaggccgagggcgccccaccccagcagggcccctttgcccccccaccctgcaaggcccctggggccagcggctgcctgctgcccagagatggcctgcccagcaccagcgccagcgctgctgctgctggagctgccccagccctgtacccagccctgggcctgaatggcctgccccagctgggctaccaggccgctgtgctgaaggagggcctgccccaggtgtacccaccctacctgaactacctgcggccagattctgaggccagccagagcccccagtacagctttgagagcctgccccagaagatctgcctgatctgtggagatgaggccagcggctgccactatggagtgctgacctgtggcagctgcaaggtgttcttcaagagggccatggagggccagcacaactacctgtgtgccggcagaaatgactgcatcgtggacaagatccggaggaagaactgcccagcctgccgcctgaggaagtgctgccaggccggcatggtgctgggcggcaggaagttcaagaagttcaacaaggtgcgggtggtgcgggccctggatgctgtggccctgccccagcctgtgggcgtgcccaatgaaagccaggccctgagccagcgcttcaccttcagccctggccaggacatccagctgatccccccactcatcaacctgctgatgagcattgaaccagatgtgatctatgccggccatgacaacaccaagccagacaccagcagcagcctgctgaccagcctgaaccagctgggggagcggcagctgctgtctgtggtgaagtggagcaagagcctgcccggcttcaggaacctgcacattgatgaccagatcaccctcatccagtacagctggatgagcctgatggtgtttggcctgggctggaggagctacaagcacgtgtctggccagatgctgtactttgccccagacctgatcctgaatgagcagaggatgaaggagagcagcttctacagcctgtgcctgaccatgtggcagatcccccaggagtttgtgaagctgcaggtgtcccaggaggagttcctgtgcatgaaggtgctgctgctgctgaacaccatccccctggagggcctgcggagccagacccagtttgaggagatgaggagcagctacatccgggagctgatcaaggccatcggcctgcggcagaagggcgtggtgagcagcagccagcgcttctaccagctgaccaagctgctggacaacctgcatgacctggtgaagcagctgcacctgtactgcctgaacaccttcatccagagccgggccctgtctgtggagttccctgagatgatgtctgaggtgattgctgcccagctgcccaagatcctggccggcatggtgaagcccctgctcttccacaagaagtag

SEQ ID NO: 21278 - DNA, 2088 bp, synthetic construct
  misc_feature 1..2088: note = Description of Artificial Sequence: Synthetic coding sequence
  source 1..2088: mol_type = other DNA
atgacagagctgaaggccaagggcccccgggcccctcatgtggccggcggcccccccagccctgaggtgggcagccccctgctgtgcaggcctgctgctggccccttccctggcagccagaccagtgacaccctgcctgaggtgtctgccatccccatcagcctggatggcctgctcttcccccggccctgccagggccaggaccccagtgatgagaagacccaggaccagcagagcctgagtgatgtggagggcgcctacagcagagctgaggccaccaggggggccggcggcagcagcagcagccccccagagaaggacagcggcctgctggacagcgtgctggacaccctgctggcccccagcggccctggccagagccagcccagccccccagcctgtgaggtgaccagctcctggtgcctgtttggacctgagctgcctgaagatcctcctgctgccccagccacccagagggtgctgagccccctgatgagccgcagcggctgcaaggtgggggacagcagcggcacagctgctgcccacaaggtgctgccccggggcctgagccctgcccggcagctgctgctgcctgccagcgagagcccccactggagcggggcccctgtgaagcccagcccccaggccgctgctgtggaggtggaggaggaggatggcagcgagagcgaggagagcgctggccccctgctgaagggcaagccccgggccctgggcggcgctgctgctgggggcggcgctgctgctgtgcccccaggagctgctgctgggggcgtggccctggtgcccaaggaggacagccgcttcagcgccccccgggtggccctggtggagcaggatgcccccatggcccctggccgcagccccctggccaccaccgtgatggacttcatccacgtgcccatcctgcccctgaaccacgccctgctggccgcccggacccggcagctgctggaggatgagagctatgatggaggagctggggccgccagcgcctttgccccacccaggagcagcccctgtgccagcagcacccctgtggccgtgggggacttcccagactgtgcctaccccccagatgctgagcccaaggatgatgcctaccccctgtacagcgacttccagcccccagccctgaagatcaaggaggaggaggagggcgctgaggccagcgcccggagccccaggagctacctggtggccggggccaacccagctgccttcccagacttccccctgggccccccaccacccctgcccccccgggccacccccagcaggcctggagaggccgctgtgacagctgccccagccagcgcctctgtgagcagcgccagcagcagcggcagcaccctggagtgcatcctgtacaaggccgagggcgccccaccccagcagggcccctttgcccccccaccctgcaaggcccctggggccagcggctgcctgctgcccagagatggcctgcccagcaccagcgccagcgctgctgctgctggagctgccccagccctgtacccagccctgggcctgaatggcctgccccagctgggctaccaggccgctgtgctgaaggagggcctgccccaggtgtacccaccctacctgaactacctgcggccagattctgaggccagccagagcccccagtacagctttgagagcctgccccagaagatctgcctgatctgtggagatgaggccagcggctgccactatggagtgctgacctgtggcagctgcaaggtgttcttcaagagggccatggagggccagcacaactacctgtgtgccggcagaaatgactgcatcgtggacaagatccggaggaagaactgcccagcctgccgcctgaggaagtgctgccaggccggcatggtgctgggcggcttcaggaacctgcacattgatgaccagatcaccctcatccagtacagctggatgagcctgatggtgtttggcctgggctggaggagctacaagcacgtgtctggccagatgctgtactttgccccagacctgatcctgaatgacagctttggccgggccaccaagagcaaccctgtgtag

SEQ ID NO: 21279 - DNA, 2295 bp, synthetic construct
  misc_feature 1..2295: note = Description of Artificial Sequence: Synthetic coding sequence
  source 1..2295: mol_type = other DNA
atgacagagctgaaggccaagggcccccgggcccctcatgtggccggcggcccccccagccctgaggtgggcagccccctgctgtgcaggcctgctgctggccccttccctggcagccagaccagtgacaccctgcctgaggtgtctgccatccccatcagcctggatggcctgctcttcccccggccctgccagggccaggaccccagtgatgagaagacccaggaccagcagagcctgagtgatgtggagggcgcctacagcagagctgaggccaccaggggggccggcggcagcagcagcagccccccagagaaggacagcggcctgctggacagcgtgctggacaccctgctggcccccagcggccctggccagagccagcccagccccccagcctgtgaggtgaccagctcctggtgcctgtttggacctgagctgcctgaagatcctcctgctgccccagccacccagagggtgctgagccccctgatgagccgcagcggctgcaaggtgggggacagcagcggcacagctgctgcccacaaggtgctgccccggggcctgagccctgcccggcagctgctgctgcctgccagcgagagcccccactggagcggggcccctgtgaagcccagcccccaggccgctgctgtggaggtggaggaggaggatggcagcgagagcgaggagagcgctggccccctgctgaagggcaagccccgggccctgggcggcgctgctgctgggggcggcgctgctgctgtgcccccaggagctgctgctgggggcgtggccctggtgcccaaggaggacagccgcttcagcgccccccgggtggccctggtggagcaggatgcccccatggcccctggccgcagccccctggccaccaccgtgatggacttcatccacgtgcccatcctgcccctgaaccacgccctgctggccgcccggacccggcagctgctggaggatgagagctatgatggaggagctggggccgccagcgcctttgccccacccaggagcagcccctgtgccagcagcacccctgtggccgtgggggacttcccagactgtgcctaccccccagatgctgagcccaaggatgatgcctaccccctgtacagcgacttccagcccccagccctgaagatcaaggaggaggaggagggcgctgaggccagcgcccggagccccaggagctacctggtggccggggccaacccagctgccttcccagacttccccctgggccccccaccacccctgcccccccgggccacccccagcaggcctggagaggccgctgtgacagctgccccagccagcgcctctgtgagcagcgccagcagcagcggcagcaccctggagtgcatcctgtacaaggccgagggcgccccaccccagcagggcccctttgcccccccaccctgcaaggcccctggggccagcggctgcctgctgcccagagatggcctgcccagcaccagcgccagcgctgctgctgctggagctgccccagccctgtacccagccctgggcctgaatggcctgccccagctgggctaccaggccgctgtgctgaaggagggcctgccccaggtgtacccaccctacctgaactacctgcggccagattctgaggccagccagagcccccagtacagctttgagagcctgccccagaagatctgcctgatctgtggagatgaggccagcggctgccactatggagtgctgacctgtggcagctgcaaggtgttcttcaagagggccatggagggcaggaagttcaagaagttcaacaaggtgcgggtggtgcgggccctggatgctgtggccctgccccagcctgtgggcgtgcccaatgaaagccaggccctgagccagcgcttcaccttcagccctggccaggacatccagctgatccccccactcatcaacctgctgatgagcattgaaccagatgtgatctatgccggccatgacaacaccaagccagacaccagcagcagcctgctgaccagcctgaaccagctgggggagcggcagctgctgtctgtggtgaagtggagcaagagcctgcccggcttcaggaacctgcacattgatgaccagatcaccctcatccagtacagctggatgagcctgatggtgtttggcctgggctggaggagctacaagcacgtgtctggccagatgctgtactttgccccagacctgatcctgaatgaaagccacaggagcctgagcagcttcaagctggccaagaagagcagctctgtgtag

SEQ ID NO: 21280 - DNA, 1020 bp, synthetic construct
  misc_feature 1..1020: note = Description of Artificial Sequence: Synthetic coding sequence
  source 1..1020: mol_type = other DNA
atggagggccagcacaactacctgtgtgccggcagaaatgactgcatcgtggacaagatccggaggaagaactgcccagcctgccgcctgaggaagtgctgccaggccggcatggtgctgggcggcaggaagttcaagaagttcaacaaggtgcgggtggtgcgggccctggatgctgtggccctgccccagcctgtgggcgtgcccaatgaaagccaggccctgagccagcgcttcaccttcagccctggccaggacatccagctgatccccccactcatcaacctgctgatgagcattgaaccagatgtgatctatgccggccatgacaacaccaagccagacaccagcagcagcctgctgaccagcctgaaccagctgggggagcggcagctgctgtctgtggtgaagtggagcaagagcctgcccggcttcaggaacctgcacattgatgaccagatcaccctcatccagtacagctggatgagcctgatggtgtttggcctgggctggaggagctacaagcacgtgtctggccagatgctgtactttgccccagacctgatcctgaatgagcagaggatgaaggagagcagcttctacagcctgtgcctgaccatgtggcagatcccccaggagtttgtgaagctgcaggtgtcccaggaggagttcctgtgcatgaaggtgctgctgctgctgaacaccatccccctggagggcctgcggagccagacccagtttgaggagatgaggagcagctacatccgggagctgatcaaggccatcggcctgcggcagaagggcgtggtgagcagcagccagcgcttctaccagctgaccaagctgctggacaacctgcatgacctggtgaagcagctgcacctgtactgcctgaacaccttcatccagagccgggccctgtctgtggagttccctgagatgatgtctgaggtgattgctgcccagctgcccaagatcctggccggcatggtgaagcccctgctcttccacaagaagtag

SEQ ID NO: 21281 - DNA, 2412 bp, synthetic construct
  misc_feature 1..2412: note = Description of Artificial Sequence: Synthetic coding sequence
  source 1..2412: mol_type = other DNA
atgacagagctgaaggccaagggcccccgggcccctcatgtggccggcggcccccccagccctgaggtgggcagccccctgctgtgcaggcctgctgctggccccttccctggcagccagaccagtgacaccctgcctgaggtgtctgccatccccatcagcctggatggcctgctcttcccccggccctgccagggccaggaccccagtgatgagaagacccaggaccagcagagcctgagtgatgtggagggcgcctacagcagagctgaggccaccaggggggccggcggcagcagcagcagccccccagagaaggacagcggcctgctggacagcgtgctggacaccctgctggcccccagcggccctggccagagccagcccagccccccagcctgtgaggtgaccagctcctggtgcctgtttggacctgagctgcctgaagatcctcctgctgccccagccacccagagggtgctgagccccctgatgagccgcagcggctgcaaggtgggggacagcagcggcacagctgctgcccacaaggtgctgccccggggcctgagccctgcccggcagctgctgctgcctgccagcgagagcccccactggagcggggcccctgtgaagcccagcccccaggccgctgctgtggaggtggaggaggaggatggcagcgagagcgaggagagcgctggccccctgctgaagggcaagccccgggccctgggcggcgctgctgctgggggcggcgctgctgctgtgcccccaggagctgctgctgggggcgtggccctggtgcccaaggaggacagccgcttcagcgccccccgggtggccctggtggagcaggatgcccccatggcccctggccgcagccccctggccaccaccgtgatggacttcatccacgtgcccatcctgcccctgaaccacgccctgctggccgcccggacccggcagctgctggaggatgagagctatgatggaggagctggggccgccagcgcctttgccccacccaggagcagcccctgtgccagcagcacccctgtggccgtgggggacttcccagactgtgcctaccccccagatgctgagcccaaggatgatgcctaccccctgtacagcgacttccagcccccagccctgaagatcaaggaggaggaggagggcgctgaggccagcgcccggagccccaggagctacctggtggccggggccaacccagctgccttcccagacttccccctgggccccccaccacccctgcccccccgggccacccccagcaggcctggagaggccgctgtgacagctgccccagccagcgcctctgtgagcagcgccagcagcagcggcagcaccctggagtgcatcctgtacaaggccgagggcgccccaccccagcagggcccctttgcccccccaccctgcaaggcccctggggccagcggctgcctgctgcccagagatggcctgcccagcaccagcgccagcgctgctgctgctggagctgccccagccctgtacccagccctgggcctgaatggcctgccccagctgggctaccaggccgctgtgctgaaggagggcctgccccaggtgtacccaccctacctgaactacctgcggccagattctgaggccagccagagcccccagtacagctttgagagcctgccccagaagatctgcctgatctgtggagatgaggccagcggctgccactatggagtgctgacctgtggcagctgcaaggtgttcttcaagagggccatggagggccagcacaactacctgtgtgccggcagaaatgactgcatcgtggacaagatccggaggaagaactgcccagcctgccgcctgaggaagtgctgccaggccggcatggtgctgggcggcaggaagttcaagaagttcaacaaggtgcgggtggtgcgggccctggatgctgtggccctgccccagcctgtgggcgtgcccaatgaaagccaggccctgagccagcgcttcaccttcagccctggccaggacatccagctgatccccccactcatcaacctgctgatgagcattgaaccagatgtgatctatgccggccatgacaacaccaagccagacaccagcagcagcctgctgaccagcctgaaccagctgggggagcggcagctgctgtctgtggtgaagtggagcaagagcctgcccggcttcaggaacctgcacattgatgaccagatcaccctcatccagtacagctggatgagcctgatggtgtttggcctgggctggaggagctacaagcacgtgtctggccagatgctgtactttgccccagacctgatcctgaatgaaagccacaggagcctgagcagcttcaagctggccaagaagagcagctctgtgtag

SEQ ID NO: 21282 - DNA, 2073 bp, synthetic construct
  misc_feature 1..2073: note = Description of Artificial Sequence: Synthetic coding sequence
  source 1..2073: mol_type = other DNA
atgacagagctgaaggccaagggcccccgggcccctcatgtggccggcggcccccccagccctgaggtgggcagccccctgctgtgcaggcctgctgctggccccttccctggcagccagaccagtgacaccctgcctgaggtgtctgccatccccatcagcctggatggcctgctcttcccccggccctgccagggccaggaccccagtgatgagaagacccaggaccagcagagcctgagtgatgtggagggcgcctacagcagagctgaggccaccaggggggccggcggcagcagcagcagccccccagagaaggacagcggcctgctggacagcgtgctggacaccctgctggcccccagcggccctggccagagccagcccagccccccagcctgtgaggtgaccagctcctggtgcctgtttggacctgagctgcctgaagatcctcctgctgccccagccacccagagggtgctgagccccctgatgagccgcagcggctgcaaggtgggggacagcagcggcacagctgctgcccacaaggtgctgccccggggcctgagccctgcccggcagctgctgctgcctgccagcgagagcccccactggagcggggcccctgtgaagcccagcccccaggccgctgctgtggaggtggaggaggaggatggcagcgagagcgaggagagcgctggccccctgctgaagggcaagccccgggccctgggcggcgctgctgctgggggcggcgctgctgctgtgcccccaggagctgctgctgggggcgtggccctggtgcccaaggaggacagccgcttcagcgccccccgggtggccctggtggagcaggatgcccccatggcccctggccgcagccccctggccaccaccgtgatggacttcatccacgtgcccatcctgcccctgaaccacgccctgctggccgcccggacccggcagctgctggaggatgagagctatgatggaggagctggggccgccagcgcctttgccccacccaggagcagcccctgtgccagcagcacccctgtggccgtgggggacttcccagactgtgcctaccccccagatgctgagcccaaggatgatgcctaccccctgtacagcgacttccagcccccagccctgaagatcaaggaggaggaggagggcgctgaggccagcgcccggagccccaggagctacctggtggccggggccaacccagctgccttcccagacttccccctgggccccccaccacccctgcccccccgggccacccccagcaggcctggagaggccgctgtgacagctgccccagccagcgcctctgtgagcagcgccagcagcagcggcagcaccctggagtgcatcctgtacaaggccgagggcgccccaccccagcagggcccctttgcccccccaccctgcaaggcccctggggccagcggctgcctgctgcccagagatggcctgcccagcaccagcgccagcgctgctgctgctggagctgccccagccctgtacccagccctgggcctgaatggcctgccccagctgggctaccaggccgctgtgctgaaggagggcctgccccaggtgtacccaccctacctgaactacctgcggccagattctgaggccagccagagcccccagtacagctttgagagcctgccccagaagatctgcctgatctgtggagatgaggccagcggctgccactatggagtgctgacctgtggcagctgcaaggtgttcttcaagagggccatggagggccagcacaactacctgtgtgccggcagaaatgactgcatcgtggacaagatccggaggaagaactgcccagcctgccgcctgaggaagtgctgccaggccggcatggtgctgggcggcttcaggaacctgcacattgatgaccagatcaccctcatccagtacagctggatgagcctgatggtgtttggcctgggctggaggagctacaagcacgtgtctggccagatgctgtactttgccccagacctgatcctgaatgaggagagcatcgtgaccagctag

SEQ ID NO: 21283 - DNA, 1410 bp, synthetic construct
  misc_feature 1..1410: note = Description of Artificial Sequence: Synthetic coding sequence
  source 1..1410: mol_type = other DNA
atggatgtggagaatgagcagatcctgaatgtgaacccagctgaccctgacaacctgagtgacagcctcttctctggagatgaagaaaatgccggcacagaggagatcaagaatgagatcaatggaaactggatcagcgccagcagcatcaatgaggcccgcatcaatgccaaggccaagaggcggctgaggaagaacagcagccgggacagcggccgcggggacagcgtgtctgacagcggcagtgatgccctgcggagcggcctgactgtgcccaccagccccaagggccgcctgctggaccggcgcagccgcagcggcaagggccggggcctgcccaagaagggcggggccggcggcaaaggagtgtggggcaccccaggccaggtgtatgatgtggaggaggtggatgtgaaggaccccaactatgatgatgaccaggagaactgtgtgtatgagaccgtggtgctgcccctggatgagcgggcctttgagaagaccctgacccccatcatccaggagtactttgagcacggggacaccaatgaggtggccgagatgctgcgggacctgaacctgggggagatgaagagcggcgtgcctgtgctggccgtgtccctggccctggagggcaaggccagccaccgggagatgaccagcaagctgctgagtgacctgtgtggcaccgtgatgagcaccacagatgtggagaagagctttgacaagctgctgaaggacctgcctgagctggccctggacaccccccgggccccccagctggtgggccagttcatcgcccgggctgtgggagatggcatcctgtgcaacacctacatcgacagctacaagggcaccgtggactgtgtgcaggcccgggccgccctggacaaggccaccgtgctgctgtccatgagcaagggcggcaagaggaaggacagcgtgtggggcagcggcggcggccagcagagcgtgaaccacctggtgaaggagattgacatgctgctgaaggagtacctgctgagcggggacatcagcgaggccgagcactgcctgaaggagctggaggtgccccacttccaccacgagctggtgtatgaggccatcatcatggtgctggagagcactggagagagcaccttcaagatgatcctggacctgctgaagagcctgtggaagagcagcaccatcaccgtggaccagatgaagaggggctatgagcgcatctacaatgagatcccagacatcaacctggatgtgccccacagctacagcgtgctggagagatttgtggaggagtgcttccaggccggcatcatcagcaagcagctgcgggacctgtgccccagccggggcaggaagagatttgtgtctgaaggagatggcggccgcctgaagccagagagctactag

SEQ ID NO: 21284 - DNA, 1377 bp, synthetic construct
  misc_feature 1..1377: note = Description of Artificial Sequence: Synthetic coding sequence
  source 1..1377: mol_type = other DNA
atgaccaagtacccagacaacctgagtgacagcctcttctctggagatgaggagaatgccggcacagaggagatcaagaatgagatcaatggaaactggatcagcgccagcagcatcaatgaggcccgcatcaatgccaaggccaagaggcggctgaggaagaacagcagccgggacagcggccgcggggacagcgtgtctgattctggcagtgatgccctgcggagcggcctgactgtgcccaccagccccaagggccgcctgctggacagaagaagccgcagcggcaagggccggggcctgcccaagaagggcggggccggcggcaagggcgtgtggggcaccccaggccaggtgtatgatgtggaggaggtggatgtgaaggaccccaactatgatgatgaccaggagaactgtgtgtatgaaacagtggtgctgcccctggatgagcgggcctttgagaagaccctgacccccatcatccaggagtactttgaacatggagacaccaatgaggtggccgagatgctgcgggacctgaacctgggggagatgaagtctggagtgcctgtgctggccgtgtccctggccctggagggcaaggccagccaccgggagatgaccagcaagctgctgagtgacctgtgtggcaccgtgatgagcaccacagatgtggagaagagctttgacaagctgctgaaggacctgcctgagctggccctggacaccccccgggccccccagctggtgggccagttcatcgcccgggctgtgggagatggcatcctgtgcaacacctacatcgacagctacaagggcaccgtggactgtgtgcaggcccgggccgccctggacaaggccaccgtgctgctgtccatgagcaaaggaggcaagaggaaggacagcgtgtggggcagcggcggcggccagcagagcgtgaaccacctggtgaaggagattgacatgctgctgaaggagtacctgctgagcggggacatcagcgaggccgagcactgcctgaaggagctggaggtgccccacttccaccacgagctggtgtatgaggccatcatcatggtgctggagagcactggagagagcaccttcaagatgatcctggacctgctgaagagcctgtggaagagcagcaccatcaccgtggaccagatgaagaggggctatgaaagaatctacaatgagatcccagacatcaacctggatgtgccccacagctacagcgtgctggagagatttgtggaggagtgcttccaggccggcatcatcagcaagcagctgcgggacctgtgccccagccggggcaggaagagatttgtgtctgaaggagatggcggccgcctgaagccagagagctactag

SEQ ID NO: 21285 - DNA, 696 bp, synthetic construct
  misc_feature 1..696: note = Description of Artificial Sequence: Synthetic coding sequence
  source 1..696: mol_type = other DNA
atggatgtggagaatgagcagatcctgaatgtgaacccagcagaaaatgccggcacagaggagatcaagaatgagatcaatggaaactggatcagcgccagcagcatcaatgaggcccgcatcaatgccaaggccaagaggcggctgaggaagaacagcagccgggacagcggccgcggggacagcgtgtctgacagcggcagtgatgccctgcggagcggcctgactgtgcccaccagccccaagggccgcctgctggaccggcgcagccgcagcggcaagggccggggcctgcccaagaagggcggggccggcggcaaaggagtgtggggcaccccaggccaggtgtatgatgtggaggaggtggatgtgaaggaccccaactatgatgatgaccaggagaactgtgtgtatgagaccgtggtgctgcccctggatgagcgggcctttgagaagaccctgacccccatcatccaggagtactttgagcacggggacaccaatgaggtggccgagatgctgcgggacctgaacctgggggagatgaagagcggcgtgcctgtgctggccgtgtccctggccctggagggcaaggccagccaccgggagatgaccagcaagctgctgagtgacctgtgtggcaccgtgatgagcaccacagatgtggagaagagctttgacaagctgctgaagtag

SEQ ID NO: 21286 - DNA, 786 bp, synthetic construct
  misc_feature 1..786: note = Description of Artificial Sequence: Synthetic coding sequence
  source 1..786: mol_type = other DNA
atgtttgaggcccggctggtgcagggcagcatcctgaagaaggtgctggaggccctgaaggacctgatcaatgaggcctgctgggacatcagcagcagtggagtgaacctgcagagcatggacagcagccacgtgtccctggtgcagctgaccctgcggtctgagggctttgacacctaccgctgtgacaggaacctggccatgggcgtgaacctgacctccatgagcaagatcctgaagtgtgctggaaatgaagacatcatcaccctgcgggcagaagataatgctgacaccctggccctggtgtttgaggcccccaaccaggagaaggtgtctgactatgagatgaagctgatggacctggatgtggagcagctgggcatccctgagcaggagtacagctgtgtggtgaagatgcccagcggggagtttgcccgcatctgccgggacctgagccacatcggagatgctgtggtgatcagctgtgccaaggatggagtgaagttcagcgccagcggggagctgggcaatggaaacatcaagctgagccagaccagcaatgtggacaaggaggaggaggccgtgaccatcgagatgaatgaacctgtgcagctgacctttgccctgcgctacctgaacttcttcaccaaggccacccccctgagcagcacagtgaccctgtccatgtctgcagatgtgcccctggtggtggagtacaagattgctgacatgggccacctgaagtactacctggcccccaagattgaagatgaggagggcagctag

SEQ ID NO: 21287 - DNA, 786 bp, synthetic construct; identical to SEQ ID NO: 21286
  misc_feature 1..786: note = Description of Artificial Sequence: Synthetic coding sequence
  source 1..786: mol_type = other DNA

SEQ ID NO: 21288 - DNA, 1140 bp, synthetic construct
  misc_feature 1..1140: note = Description of Artificial Sequence: Synthetic coding sequence
  source 1..1140: mol_type = other DNA
atgagcagccccagcctgagtgacctgggcaagcgggagcctgctgctgctgctgatgagcggggcacccagcagaggcgggcctgtgccaatgccacctggaacagcatccacaatggagtgattgctgtgttccagaggaagggcctgcctgaccaggagctgttcagcctgaatgaaggagtgcggcagctgctgaagacagagctgggcagcttcttcacagagtacctgcagaaccagctgctgaccaagggcatggtgatcctgcgggacaagatccgcttctatgagggccagaagctgctggacagcctggccgagacctgggacttcttcttcagtgatgtgctgcccatgctgcaggccatcttctaccctgtgcagggcaaggagcccagcgtgcggcagctggccctgctgcacttcagaaatgccatcaccctgtctgtgaagctggaggatgccctggcccgggcccacgcccgggtgcccccagccatcgtgcagatgctgctggtgctgcagggcgtgcatgagagcagaggagtgacagaggactacctgcggctggagaccctggtgcagaaggtggtgagcccctacctgggcacctacggcctgcacagcagcgagggccccttcacccacagctgcatcctggagaagaggctgctgcggcgcagccgctctggagatgtgctggccaagaaccctgtggtgcgcagcaagagctacaacacccccctgctgaaccctgtgcaggagcatgaagctgagggcgctgctgctgggggcaccagcatccgccgccacagcgtgtctgagatgaccagctgcccagagccccagggcttcagtgaccccccaggccagggccccaccggcaccttccgcagcagccctgccccccacagcggcccctgccccagccggctgtaccccaccacccagcccccagagcagggcctggaccccaccaggagcagcctgcccaggagcagccctgagaacctggtggaccagatcctggagagcgtggacagcgacagcgagggcatcttcatcgactttggccggggccggggcagcggcatgtctgacctggagggcagcggcggccggcagagcgtggtgtag

SEQ ID NO: 21289 - DNA, 1167 bp, synthetic construct
  misc_feature 1..1167: note = Description of Artificial Sequence: Synthetic coding sequence
  source 1..1167: mol_type = other DNA
atgaggaccctgcggcggctgaagttcatgagcagccccagcctgagtgacctgggcaagcgggagcctgctgctgctgctgatgagcggggcacccagcagaggcgggcctgtgccaatgccacctggaacagcatccacaacggggtgattgctgtgttccagaggaagggcctgcctgaccaggagctgttcagcctgaatgaaggagtgcggcagctgctgaagacagagctgggcagcttcttcacagagtacctgcagaaccagctgctgaccaagggcatggtgatcctgcgggacaagatccgcttctatgagggccagaagctgctggacagcctggccgagacctgggacttcttcttcagtgatgtgctgcccatgctgcaggccatcttctaccctgtgcagggcaaggagcccagcgtgcggcagctggccctgctgcacttcagaaatgccatcaccctgtctgtgaagctggaggatgccctggcccgggcccacgcccgggtgcccccagccatcgtgcagatgctgctggtgctgcagggcgtgcatgagagccggggcgtgacagaggactacctgcggctggagaccctggtgcagaaggtggtgagcccctacctgggcacctacggcctgcacagcagcgagggccccttcacccacagctgcatcctggagaagaggctgctgcggcgcagccgctctggagatgtgctggccaagaaccctgtggtgcgcagcaagagctacaacacccccctgctgaaccctgtgcaggagcacgaggccgagggcgctgctgctgggggcaccagcatcagaagacacagcgtgtctgagatgaccagctgcccagagccccagggcttcagtgaccccccaggccagggccccaccggcaccttccgcagcagccctgccccccacagcggcccctgccccagccggctgtaccccaccacccagcccccagagcagggcctggaccccaccaggagcagcctgcccaggagcagccctgagaacctggtggaccagatcctggagagcgtggacagcgacagcgagggcatcttcatcgactttggccggggccggggcagcggcatgtctgacctggagggcagcggcggccggcagagcgtggtgtag

SEQ ID NO: 21290 - DNA, 804 bp, synthetic construct
  misc_feature 1..804: note = Description of Artificial Sequence: Synthetic coding sequence
  source 1..804: mol_type = other DNA
atgagcagccccagcctgagtgacctgggcaagcgggagcctgctgctgctgctgatgagcggggcacccagcagaggcgggcctgtgccaatgccacctggaacagcatccacaatggagtgattgctgtgttccagaggaagggcctgcctgaccaggagctgttcagcctgaatgaaggagtgcggcagctgctgaagacagagctgggcagcttcttcacagagtacctgcagaaccagctgctgaccaagggcatggtgatcctgcgggacaagatccgcttctatgagggccagaagctgctggacagcctggccgagacctgggacttcttcttcagtgatgtgctgcccatgctgcaggccatcttctaccctgtgcagggcaaggagcccagcgtgcggcagctggccctgctgcacttcagaaatgccatcaccctgtctgtgaagctggaggatgccctggcccgggcccacgcccgggtgcccccagccatcgtgcagatgctgctggtgctgcagggcgtgcatgagagcagaggagtgacagaggactacctgcggctggagaccctggtgcagaaggtggtgagcccctacctgggcacctacggcctgcacagcagcgagggccccttcacccacagctgcatcctggagaagaggctgctgcggcgcagccgctctggagatgtgctggccaagaaccctgtggtgcgcagcaagagctacaacacccccctgctgaaccctgtgcaggagcatgaagctgagggcgctgctgctgggggcacctag

SEQ ID NO: 21291 - DNA, 681 bp, synthetic construct
  misc_feature 1..681: note = Description of Artificial Sequence: Synthetic coding sequence
  source 1..681: mol_type = other DNA
atgagcagccccagcctgagtgacctgggcaagcgggagcctgctgctgctgctgatgagcggggcacccagcagaggcgggcctgtgccaatgccacctggaacagcatccacaatggagtgattgctgtgttccagaggaagggcctgcctgaccaggagctgttcagcctgaatgaaggagtgcggcagctgctgaagacagagctgggcagcttcttcacagagtacctgcagaaccagctgctgaccaagggcatggtgatcctgcgggacaagatccgcttctatgagggccagaagctgctggacagcctggccgagacctgggacttcttcttcagtgatgtgctgcccatgctgcaggccatcttctaccctgtgcagggcaaggagcccagcgtgcggcagctggccctgctgcacttcagaaatgccatcaccctgtctgtgaagctggaggatgccctggcccgggcccacgcccgggtgcccccagccatcgtgcagatgctgctggtgctgcagggcgtgcatgagagcagaggagtgacagaggactacctgcggctggagaccctggtgcagaaggtggtgagcccctacctgggcacctacggcctgcacagcagcgagggccccttcacccacagctgcatcctggagaagaggctgctgtag

SEQ ID NO: 21292 - DNA, 1236 bp, synthetic construct
  misc_feature 1..1236: note = Description of Artificial Sequence: Synthetic coding sequence
  source 1..1236: mol_type = other DNA
atggtgtgcctggagctgagccagcgggaggcctggggcagcggcagccctgagaagatgcctgcccagcctgagggcctgtaccgcctgaagttcatgagcagccccagcctgagtgacctgggcaagcgggagcctgctgctgctgctgatgagcggggcacccagcagaggcgggcctgtgccaatgccacctggaacagcatccacaatggagtgattgctgtgttccagaggaagggcctgcctgaccaggagctgttcagcctgaatgaaggagtgcggcagctgctgaagacagagctgggcagcttcttcacagagtacctgcagaaccagctgctgaccaagggcatggtgatcctgcgggacaagatccgcttctatgagggccagaagctgctggacagcctggccgagacctgggacttcttcttcagtgatgtgctgcccatgctgcaggccatcttctaccctgtgcagggcaaggagcccagcgtgcggcagctggccctgctgcacttcagaaatgccatcaccctgtctgtgaagctggaggatgccctggcccgggcccacgcccgggtgcccccagccatcgtgcagatgctgctggtgctgcagggcgtgcatgagagcagaggagtgacagaggactacctgcggctggagaccctggtgcagaaggtggtgagcccctacctgggcacctacggcctgcacagcagcgagggccccttcacccacagctgcatcctggagaagaggctgctgcggcgcagccgctctggagatgtgctggccaagaaccctgtggtgcgcagcaagagctacaacacccccctgctgaaccctgtgcaggagcatgaagctgagggcgctgctgctgggggcaccagcatccgccgccacagcgtgtctgagatgaccagctgcccagagccccagggcttcagtgaccccccaggccagggccccaccggcaccttccgcagcagccctgccccccacagcggcccctgccccagccggctgtaccccaccacccagcccccagagcagggcctggaccccaccaggagcagcctgcccaggagcagccctgagaacctggtggaccagatcctggagagcgtggacagcgacagcgagggcatcttcatcgactttggccggggccggggcagcggcatgtctgacctggagggcagcggcggccggcagagcgtggtgtag

SEQ ID NO: 21293 - DNA, 2649 bp, synthetic construct
  misc_feature 1..2649: note = Description of Artificial Sequence: Synthetic coding sequence
  source 1..2649: mol_type = other DNA
atggagcccgccccagcccggagcccccggccccagcaggaccctgcccggccccaggagcccaccatgcctcctcctgagacccccagcgagggccggcagcccagccccagccccagccccacagagcgggccccagccagcgaggaggagttccagttcctgcgctgccagcagtgccaggccgaggccaagtgccccaagctgctgccctgcctgcacaccctgtgcagcggctgcctggaggccagcggcatgcagtgccccatctgccaggccccctggcccctgggcgctgacaccccagccctggacaacgtgttctttgagagcctgcagaggcggctgtctgtgtaccggcagatcgtggatgcccaggccgtgtgcacccgctgcaaggagagcgctgacttctggtgctttgaatgtgagcagctgctgtgtgccaagtgctttgaggcccaccagtggttcctgaagcatgaggcccggcccctggccgagctgaggaaccagagcgtgcgggagttcctggatggcaccaggaagaccaacaacatcttctgcagcaaccccaaccacaggacccccaccctgaccagcatctactgccggggctgcagcaagcccctgtgctgcagctgtgccctgctggacagcagccacagcgagctgaagtgtgacatctctgctgagatccagcagaggcaggaggagctggatgccatgacccaggccctgcaggagcaggacagcgccttcggggctgtgcacgcccagatgcatgctgctgtgggccagctgggccgggcccgggcagagacagaggagctgatccgggagcgggtgcggcaggtggtggcccacgtgcgggcccaggagcgggagctgctggaggccgtggatgcccgctaccagagggactatgaggagatggccagccggctgggccgcctggatgctgtgctgcagaggatcagaacaggcagcgccctggtgcagaggatgaagtgctacgccagtgaccaggaggtgctggacatgcacggcttcctgcggcaggccctgtgccgcctgcggcaggaggagccccagagcctgcaggccgctgtgaggacagatggctttgatgagttcaaggtgcggctgcaggacctgagcagctgcatcacccagggcaaggatgctgctgtgtccaagaaggccagccctgaggccgccagcaccccccgggaccccattgatgtggacctgcctgaggaggccgagcgggtgaaggcccaggtgcaggccctgggcctggccgaggcccagcccatggctgtggtgcagagcgtgcctggggcccaccctgtgcctgtgtatgccttcagcatcaagggccccagctatggagaagatgtgagcaacaccaccacagcccagaagaggaagtgcagccagacccagtgccccaggaaggtgatcaagatggagagcgaggagggcaaggaggcccggctggcccggagcagccctgagcagccccggcccagcaccagcaaggctgtgtccccaccccacctggatggcccccccagccccaggagccctgtgattggcagcgaggtgttcctgcccaacagcaaccacgtggccagcggggccggggaggccgaggagcgggtggtggtgatcagcagcagtgaagattctgatgctgagaacagcagcagccgggagctggatgacagcagcagcgagagcagtgacctgcagctggagggccccagcaccctgcgggtgctggatgagaacctggccgacccccaggccgaggaccggcccctggtgttctttgacctgaagattgacaatgagacccagaagatcagccagctggccgctgtgaaccgggagagcaagttccgggtggtgatccagcctgaggccttcttcagcatctacagcaaggctgtgtccctggaggtgggcctgcagcacttcctgtccttcctgagctccatgaggcggcccatcctggcctgctacaagctgtggggccctggcctgcccaacttcttccgggccctggaggacatcaaccggctgtgggagttccaggaggccatcagcggcttcctggccgccctgcccctcatccgggagcgggtgcctggggccagcagcttcaagctgaagaacctggcccagacctacctggccaggaacatgtctgagaggtctgccatggctgctgtgctggccatgagggacctgtgccgcctgctggaggtgtccccaggcccccagctggcccagcacgtgtaccccttcagcagcctgcagtgctttgccagcctgcagcccctggtgcaggccgctgtgctgcccagggctgaggcccggctgctggccctgcacaacgtgtccttcatggagctgctgagcgcccacagaagagaccggcagggcggcctgaagaagtacagccgctacctgagcctgcagaccaccaccctgcccccagcccagcctgccttcaacctgcaggccctgggcacctactttgagggcctgctggagggccctgccctggcccgggcagagggcgtgtccacccccctggccggccggggcctggccgagcgggccagccagcagagctag

SEQ ID NO: 21294 - DNA, 2490 bp, synthetic construct
  misc_feature 1..2490: note = Description of Artificial Sequence: Synthetic coding sequence
  source 1..2490: mol_type = other DNA
atggagcccgccccagcccggagcccccggccccagcaggaccctgcccggccccaggagcccaccatgcctcctcctgagacccccagcgagggccggcagcccagccccagccccagccccacagagcgggccccagccagcgaggaggagttccagttcctgcgctgccagcagtgccaggccgaggccaagtgccccaagctgctgccctgcctgcacaccctgtgcagcggctgcctggaggccagcggcatgcagtgccccatctgccaggccccctggcccctgggcgctgacaccccagccctggacaacgtgttctttgagagcctgcagaggcggctgtctgtgtaccggcagatcgtggatgcccaggccgtgtgcacccgctgcaaggagagcgctgacttctggtgctttgaatgtgagcagctgctgtgtgccaagtgctttgaggcccaccagtggttcctgaagcatgaggcccggcccctggccgagctgaggaaccagagcgtgcgggagttcctggatggcaccaggaagaccaacaacatcttctgcagcaaccccaaccacaggacccccaccctgaccagcatctactgccggggctgcagcaagcccctgtgctgcagctgtgccctgctggacagcagccacagcgagctgaagtgtgacatctctgctgagatccagcagaggcaggaggagctggatgccatgacccaggccctgcaggagcaggacagcgccttcggggctgtgcacgcccagatgcatgctgctgtgggccagctgggccgggcccgggcagagacagaggagctgatccgggagcgggtgcggcaggtggtggcccacgtgcgggcccaggagcgggagctgctggaggccgtggatgcccgctaccagagggactatgaggagatggccagccggctgggccgcctggatgctgtgctgcagaggatcagaacaggcagcgccctggtgcagaggatgaagtgctacgccagtgaccaggaggtgctggacatgcacggcttcctgcggcaggccctgtgccgcctgcggcaggaggagccccagagcctgcaggccgctgtgaggacagatggctttgatgagttcaaggtgcggctgcaggacctgagcagctgcatcacccagggcaaggatgctgctgtgtccaagaaggccagccctgaggccgccagcaccccccgggaccccattgatgtggacctgcctgaggaggccgagcgggtgaaggcccaggtgcaggccctgggcctggccgaggcccagcccatggctgtggtgcagagcgtgcctggggcccaccctgtgcctgtgtatgccttcagcatcaagggccccagctatggagaagatgtgagcaacaccaccacagcccagaagaggaagtgcagccagacccagtgccccaggaaggtgatcaagatggagagcgaggagggcaaggaggcccggctggcccggagcagccctgagcagccccggcccagcaccagcaaggctgtgtccccaccccacctggatggcccccccagccccaggagccctgtgattggcagcgaggtgttcctgcccaacagcaaccacgtggccagcggggccggggaggccgaggagcgggtggtggtgatcagcagcagtgaagattctgatgctgagaacagctgcatggagcccatggagacagctgagccccagagcagccctgcccacagcagccctgcccacagcagccctgcccacagcagccctgtgcagagcctgctgcgggcccagggcgccagcagcctgccctgtggcacctaccaccccccagcctggccaccccaccagcctgctgagcaggccgccaccccagatgctgagccccacagcgagcccccagaccaccaggagaggcctgctgtgcaccggggcatccgctacctgctgtaccgggcccagagggccatccggctgcggcatgccctgcggctgcacccccagctgcaccgggcccccatccgcacctggagcccccacgtggtgcaggccagcaccccagccatcaccggccccctgaaccacccagccaatgcccaggagcacccagcccagctgcagaggggcatcagccccccccaccgcatcagaggagctgtgcgcagccgcagccgcagcctgcggggcagcagccacctgagccagtggctgaacaacttctttgccctgcccttcagctccatggccagccagctggacatgagctctgtggtgggcgctggggagagccgggcccagaccctgggcgccggcgtgcccccaggggacagcgtgcggggctccatggaggccagccaggtgcaggtgcccctggaggccagccccatcaccttccccccaccctgtgcccctgagcggccccccatcagccctgtgcctggggcccggcaggccggcctgtag

SEQ ID NO: 21295 - DNA, 2346 bp, synthetic construct
  misc_feature 1..2346: note = Description of Artificial Sequence: Synthetic coding sequence
  source 1..2346: mol_type = other DNA
atggagcccgccccagcccggagcccccggccccagcaggaccctgcccggccccaggagcccaccatgcctcctcctgagacccccagcgagggccggcagcccagccccagccccagccccacagagcgggccccagccagcgaggaggagttccagttcctgcgctgccagcagtgccaggccgaggccaagtgccccaagctgctgccctgcctgcacaccctgtgcagcggctgcctggaggccagcggcatgcagtgccccatctgccaggccccctggcccctgggcgctgacaccccagccctggacaacgtgttctttgagagcctgcagaggcggctgtctgtgtaccggcagatcgtggatgcccaggccgtgtgcacccgctgcaaggagagcgctgacttctggtgctttgaatgtgagcagctgctgtgtgccaagtgctttgaggcccaccagtggttcctgaagcatgaggcccggcccctggccgagctgaggaaccagagcgtgcgggagttcctggatggcaccaggaagaccaacaacatcttctgcagcaaccccaaccacaggacccccaccctgaccagcatctactgccggggctgcagcaagcccctgtgctgcagctgtgccctgctggacagcagccacagcgagctgaagtgtgacatctctgctgagatccagcagaggcaggaggagctggatgccatgacccaggccctgcaggagcaggacagcgccttcggggctgtgcacgcccagatgcatgctgctgtgggccagctgggccgggcccgggcagagacagaggagctgatccgggagcgggtgcggcaggtggtggcccacgtgcgggcccaggagcgggagctgctggaggccgtggatgcccgctaccagagggactatgaggagatggccagccggctgggccgcctggatgctgtgctgcagaggatcagaacaggcagcgccctggtgcagaggatgaagtgctacgccagtgaccaggaggtgctggacatgcacggcttcctgcggcaggccctgtgccgcctgcggcaggaggagccccagagcctgcaggccgctgtgaggacagatggctttgatgagttcaaggtgcggctgcaggacctgagcagctgcatcacccagggcaaggatgctgctgtgtccaagaaggccagccctgaggccgccagcaccccccgggaccccattgatgtggacctggatgtgagcaacaccaccacagcccagaagaggaagtgcagccagacccagtgccccaggaaggtgatcaagatggagagcgaggagggcaaggaggcccggctggcccggagcagccctgagcagccccggcccagcaccagcaaggctgtgtccccaccccacctggatggcccccccagccccaggagccctgtgattggcagcgaggtgttcctgcccaacagcaaccacgtggccagcggggccggggaggccgaggagcgggtggtggtgatcagcagcagtgaagattctgatgctgagaacagctgcatggagcccatggagacagctgagccccagagcagccctgcccacagcagccctgcccacagcagccctgcccacagcagccctgtgcagagcctgctgcgggcccagggcgccagcagcctgccctgtggcacctaccaccccccagcctggccaccccaccagcctgctgagcaggccgccaccccagatgctgagccccacagcgagcccccagaccaccaggagaggcctgctgtgcaccggggcatccgctacctgctgtaccgggcccagagggccatccggctgcggcatgccctgcggctgcacccccagctgcaccgggcccccatccgcacctggagcccccacgtggtgcaggccagcaccccagccatcaccggccccctgaaccacccagccaatgcccaggagcacccagcccagctgcagaggggcatcagccccccccaccgcatcagaggagctgtgcgcagccgcagccgcagcctgcggggcagcagccacctgagccagtggctgaacaacttctttgccctgcccttcagctccatggccagccagctggacatgagctctgtggtgggcgctggggagagccgggcccagaccctgggcgccggcgtgcccccaggggacagcgtgcggggctccatggaggccagccaggtgcaggtgcccctggaggccagccccatcaccttccccccaccctgtgcccctgagcggccccccatcagccctgtgcctggggcccggcaggccggcctgtag

SEQ ID NO: 21296 - DNA, 1272 bp, synthetic construct
  misc_feature 1..1272: note = Description of Artificial Sequence: Synthetic coding sequence
  source 1..1272: mol_type = other DNA
atggagcccgccccagcccggagcccccggccccagcaggaccctgcccggccccaggagcccaccatgcctcctcctgagacccccagcgagggccggcagcccagccccagccccagccccacagagcgggccccagccagcgaggaggagttccagttcctgcgctgccagcagtgccaggccgaggccaagtgccccaagctgctgccctgcctgcacaccctgtgcagcggctgcctggaggccagcggcatgcagtgccccatctgccaggccccctggcccctgggcgctgacaccccagccctggacaacgtgttctttgagagcctgcagaggcggctgtctgtgtaccggcagatcgtggatgcccaggccgtgtgcacccgctgcaaggagagcgctgacttctggtgctttgaatgtgagcagctgctgtgtgccaagtgctttgaggcccaccagtggttcctgaagcatgaggcccggcccctggccgagctgaggaaccagagcgtgcgggagttcctggatggcaccaggaagaccaacaacatcttctgcagcaaccccaaccacaggacccccaccctgaccagcatctactgccggggctgcagcaagcccctgtgctgcagctgtgccctgctggacagcagccacagcgagctgaagtgtgacatctctgctgagatccagcagaggcaggaggagctggatgccatgacccaggccctgcaggagcaggacagcgccttcggggctgtgcacgcccagatgcatgctgctgtgggccagctgggccgggcccgggcagagacagaggagctgatccgggagcgggtgcggcaggtggtggcccacgtgcgggcccaggagcgggagctgctggaggccgtggatgcccgctaccagagggactatgaggagatggccagccggctgggccgcctggatgctgtgctgcagaggatcagaacaggcagcgccctggtgcagaggatgaagtgctacgccagtgaccaggaggtgctggacatgcacggcttcctgcggcaggccctgtgccgcctgcggcaggaggagccccagagcctgcaggccgctgtgaggacagatggctttgatgagttcaaggtgcggctgcaggacctgagcagctgcatcacccagggcaaggatgctgctgtgtccaagaaggccagccctgaggccgccagcaccccccgggaccccattgatgtggacctgagaaatgccctgtggtag

SEQ ID NO: 21297 - DNA, 1308 bp, synthetic construct
  misc_feature 1..1308: note = Description of Artificial Sequence: Synthetic coding sequence
  source 1..1308: mol_type = other DNA
atggagcccgccccagcccggagcccccggccccagcaggaccctgcccggccccaggagcccaccatgcctcctcctgagacccccagcgagggccggcagcccagccccagccccagccccacagagcgggccccagccagcgaggaggagttccagttcctgcgctgccagcagtgccaggccgaggccaagtgccccaagctgctgccctgcctgcacaccctgtgcagcggctgcctggaggccagcggcatgcagtgccccatctgccaggccccctggcccctgggcgctgacaccccagccctggacaacgtgttctttgagagcctgcagaggcggctgtctgtgtaccggcagatcgtggatgcccaggccgtgtgcacccgctgcaaggagagcgctgacttctggtgctttgaatgtgagcagctgctgtgtgccaagtgctttgaggcccaccagtggttcctgaagcatgaggcccggcccctggccgagctgaggaaccagagcgtgcgggagttcctggatggcaccaggaagaccaacaacatcttctgcagcaaccccaaccacaggacccccaccctgaccagcatctactgccggggctgcagcaagcccctgtgctgcagctgtgccctgctggacagcagccacagcgagctgaagtgtgacatctctgctgagatccagcagaggcaggaggagctggatgccatgacccaggccctgcaggagcaggacagcgccttcggggctgtgcacgcccagatgcatgctgctgtgggccagctgggccgggcccgggcagagacagaggagctgatccgggagcgggtgcggcaggtggtggcccacgtgcgggcccaggagcgggagctgctggaggccgtggatgcccgctaccagagggactatgaggagatggccagccggctgggccgcctggatgctgtgctgcagaggatcagaacaggcagcgccctggtgcagaggatgaagtgctacgccagtgaccaggaggtgctggacatgcacggcttcctgcggcaggccctgtgccgcctgcggcaggaggagccccagagcctgcaggccgctgtgaggacagatggctttgatgagttcaaggtgcggctgcaggacctgagcagctgcatcacccagggcaaggatgctgctgtgtccaagaaggccagccctgaggccgccagcaccccccgggaccccattgatgtggacctgctgcccccaccagcccacgccctgactggacctgcccagagcagcacccactag

SEQ ID NO: 21298 - DNA, 1902 bp, synthetic construct
  misc_feature 1..1902: note = Description of Artificial Sequence: Synthetic coding sequence
  source 1..1902: mol_type = other DNA
atggagcccgccccagcccggagcccccggccccagcaggaccctgcccggccccaggagcccaccatgcctcctcctgagacccccagcgagggccggcagcccagccccagccccagccccacagagcgggccccagccagcgaggaggagttccagttcctgcgctgccagcagtgccaggccgaggccaagtgccccaagctgctgccctgcctgcacaccctgtgcagcggctgcctggaggccagcggcatgcagtgccccatctgccaggccccctggcccctgggcgctgacaccccagccctggacaacgtgttctttgagagcctgcagaggcggctgtctgtgtaccggcagatcgtggatgcccaggccgtgtgcacccgctgcaaggagagcgctgacttctggtgctttgaatgtgagcagctgctgtgtgccaagtgctttgaggcccaccagtggttcctgaagcatgaggcccggcccctggccgagctgaggaaccagagcgtgcgggagttcctggatggcaccaggaagaccaacaacatcttctgcagcaaccccaaccacaggacccccaccctgaccagcatctactgccggggctgcagcaagcccctgtgctgcagctgtgccctgctggacagcagccacagcgagctgaagtgtgacatctctgctgagatccagcagaggcaggaggagctggatgccatgacccaggccctgcaggagcaggacagcgccttcggggctgtgcacgcccagatgcatgctgctgtgggccagctgggccgggcccgggcagagacagaggagctgatccgggagcgggtgcggcaggtggtggcccacgtgcgggcccaggagcgggagctgctggaggccgtggatgcccgctaccagagggactatgaggagatggccagccggctgggccgcctggatgctgtgctgcagaggatcagaacaggcagcgccctggtgcagaggatgaagtgctacgccagtgaccaggaggtgctggacatgcacggcttcctgcggcaggccctgtgccgcctgcggcaggaggagccccagagcctgcaggccgctgtgaggacagatggctttgatgagttcaaggtgcggctgcaggacctgagcagctgcatcacccagggcaaggatgctgctgtgtccaagaaggccagccctgaggccgccagcaccccccgggaccccattgatgtggacctgcctgaggaggccgagcgggtgaaggcccaggtgcaggccctgggcctggccgaggcccagcccatggctgtggtgcagagcgtgcctggggcccaccctgtgcctgtgtatgccttcagcatcaagggccccagctatggagaagatgtgagcaacaccaccacagcccagaagaggaagtgcagccagacccagtgccccaggaaggtgatcaagatggagagcgaggagggcaaggaggcccggctggcccggagcagccctgagcagccccggcccagcaccagcaaggctgtgtccccaccccacctggatggcccccccagccccaggagccctgtgattggcagcgaggtgttcctgcccaacagcaaccacgtggccagcggggccggggaggccgaggagcgggtggtggtgatcagcagcagtgaagattctgatgctgagaacagcagcagccgggagctggatgacagcagcagcgagagcagtgacctgcagctggagggccccagcaccctgcgggtgctggatgagaacctggccgacccccaggccgaggaccggcccctggtgttctttgacctgaagattgacaatgaaagtggcttctcctggggctacccccaccccttcctgatctag

SEQ ID NO: 21299 - DNA, 1332 bp, synthetic construct
  misc_feature 1..1332: note = Description of Artificial Sequence: Synthetic coding sequence
  source 1..1332: mol_type = other DNA
atggctgtggtgcagagcgtgcctggggcccaccctgtgcctgtgtatgccttcagcatcaagggccccagctatggagaagatgtgagcaacaccaccacagcccagaagaggaagtgcagccagacccagtgccccaggaaggtgatcaagatggagagcgaggagggcaaggaggcccggctggcccggagcagccctgagcagccccggcccagcaccagcaaggctgtgagccccccccacctggatggcccccccagccccaggagccctgtgattggcagcgaggtgttcctgcccaacagcaaccacgtggccagcggggccggggaggccgaggagcgggtggtggtgatcagcagcagcgaggacagtgatgctgagaacagcagcagccgggagctggatgacagcagcagcgagagcagtgacctgcagctggagggccccagcaccctgcgggtgctggatgagaacctggccgacccccaggctgaagatcggcccctggtgttctttgacctgaagattgacaatgagacccagaagatcagccagctggccgctgtgaaccgggagagcaagttccgggtggtgatccagcctgaggccttcttcagcatctacagcaaggctgtgtccctggaggtgggcctgcagcacttcctgtccttcctgagctccatgagaagacccatcctggcctgctacaagctgtggggccctggcctgcccaacttcttccgggccctggaggacatcaaccggctgtgggagttccaggaggccatcagcggcttcctggccgccctgcccctcatccgggagcgggtgcctggggccagcagcttcaagctgaagaacctggcccagacctacctggccaggaacatgtctgagaggtctgccatggctgctgtgctggccatgagggacctgtgccgcctgctggaggtgtccccaggcccccagctggcccagcacgtgtaccccttcagcagcctgcagtgctttgccagcctgcagcccctggtgcaggccgctgtgctgcccagggctgaggcccggctgctggccctgcacaacgtgtccttcatggagctgctgagcgcccaccggcgggaccggcagggcggcctgaagaagtacagccgctacctgagcctgcagaccaccaccctgcccccagcccagcctgccttcaacctgcaggccctgggcacctactttgagggcctgctggagggccctgccctggcccgggcagagggcgtgtccacccccctggccggccggggcctggccgagcgggccagccagcagagctag

SEQ ID NO: 21300 - DNA, 2598 bp, synthetic construct
  misc_feature 1..2598: note = Description of Artificial Sequence: Synthetic coding sequence
  source 1..2598: mol_type = other DNA
atggagcccgccccagcccggagcccccggccccagcaggaccctgcccggccccaggagcccaccatgcctcctcctgagacccccagcgagggccggcagcccagccccagccccagccccacagagcgggccccagccagcgaggaggagttccagttcctgcgctgccagcagtgccaggccgaggccaagtgccccaagctgctgccctgcctgcacaccctgtgcagcggctgcctggaggccagcggcatgcagtgccccatctgccaggccccctggcccctgggcgctgacaccccagccctggacaacgtgttctttgagagcctgcagaggcggctgtctgtgtaccggcagatcgtggatgcccaggccgtgtgcacccgctgcaaggagagcgctgacttctggtgctttgaatgtgagcagctgctgtgtgccaagtgctttgaggcccaccagtggttcctgaagcatgaggcccggcccctggccgagctgaggaaccagagcgtgcgggagttcctggatggcaccaggaagaccaacaacatcttctgcagcaaccccaaccacaggacccccaccctgaccagcatctactgccggggctgcagcaagcccctgtgctgcagctgtgccctgctggacagcagccacagcgagctgaagtgtgacatctctgctgagatccagcagaggcaggaggagctggatgccatgacccaggccctgcaggagcaggacagcgccttcggggctgtgcacgcccagatgcatgctgctgtgggccagctgggccgggcccgggcagagacagaggagctgatccgggagcgggtgcggcaggtggtggcccacgtgcgggcccaggagcgggagctgctggaggccgtggatgcccgctaccagagggactatgaggagatggccagccggctgggccgcctggatgctgtgctgcagaggatcagaacaggcagcgccctggtgcagaggatgaagtgctacgccagtgaccaggaggtgctggacatgcacggcttcctgcggcaggccctgtgccgcctgcggcaggaggagccccagagcctgcaggccgctgtgaggacagatggctttgatgagttcaaggtgcggctgcaggacctgagcagctgcatcacccagggcaaggatgctgctgtgtccaagaaggccagccctgaggccgccagcaccccccgggaccccattgatgtggacctgcctgaggaggccgagcgggtgaaggcccaggtgcaggccctgggcctggccgaggcccagcccatggctgtggtgcagagcgtgcctggggcccaccctgtgcctgtgtatgccttcagcatcaagggccccagctatggagaagatgtgagcaacaccaccacagcccagaagaggaagtgcagccagacccagtgccccaggaaggtgatcaagatggagagcgaggagggcaaggaggcccggctggcccggagcagccctgagcagccccggcccagcaccagcaaggctgtgtccccaccccacctggatggcccccccagccccaggagccctgtgattggcagcgaggtgttcctgcccaacagcaaccacgtggccagcggggccggggaggccgaggagcgggtggtggtgatcagcagcagtgaagattctgatgctgagaacagcagcagccgggagctggatgacagcagcagcgagagcagtgacctgcagctggagggccccagcaccctgcgggtgctggatgagaacctggccgacccccaggccgaggaccggcccctggtgttctttgacctgaagattgacaatgagacccagaagatcagccagctggccgctgtgaaccgggagagcaagttccgggtggtgatccagcctgaggccttcttctccttcctgagctccatgagaagacccatcctggcctgctacaagctgtggggccctggcctgcccaacttcttccgggccctggaggacatcaaccggctgtgggagttccaggaggccatcagcggcttcctggccgccctgcccctcatccgggagcgggtgcctggggccagcagcttcaagctgaagaacctggcccagacctacctggccaggaacatgtctgagaggtctgccatggctgctgtgctggccatgagggacctgtgccgcctgctggaggtgtccccaggcccccagctggcccagcacgtgtaccccttcagcagcctgcagtgctttgccagcctgcagcccctggtgcaggccgctgtgctgcccagggctgaggcccggctgctggccctgcacaacgtgtccttcatggagctgctgagcgcccaccggcgggaccggcagggcggcctgaagaagtacagccgctacctgagcctgcagaccaccaccctgcccccagcccagcctgccttcaacctgcaggccctgggcacctactttgagggcctgctggagggccctgccctggcccgggcagagggcgtgtccacccccctggccggccggggcctggccgagcgggccagccagcagagctag

SEQ ID NO: 21301 - DNA, 1836 bp, synthetic construct
  misc_feature 1..1836: note = Description of Artificial Sequence: Synthetic coding sequence
  source 1..1836: mol_type = other DNA
atggagcccgccccagcccggagcccccggccccagcaggaccctgcccggccccaggagcccaccatgcctcctcctgagacccccagcgagggccggcagcccagccccagccccagccccacagagcgggccccagccagcgaggaggagttccagttcctgcgctgccagcagtgccaggccgaggccaagtgccccaagctgctgccctgcctgcacaccctgtgcagcggctgcctggaggccagcggcatgcagtgccccatctgccaggccccctggcccctgggcgctgacaccccagccctggacaacgtgttctttgagagcctgcagaggcggctgtctgtgtaccggcagatcgtggatgcccaggccgtgtgcacccgctgcaaggagagcgctgacttctggtgctttgaatgtgagcagctgctgtgtgccaagtgctttgaggcccaccagtggttcctgaagcatgaggcccggcccctggccgagctgaggaaccagagcgtgcgggagttcctggatggcaccaggaagaccaacaacatcttctgcagcaaccccaaccacaggacccccaccctgaccagcatctactgccggggctgcagcaagcccctgtgctgcagctgtgccctgctggacagcagccacagcgagctgaagtgtgacatctctgctgagatccagcagaggcaggaggagctggatgccatgacccaggccctgcaggagcaggacagcgccttcggggctgtgcacgcccagatgcatgctgctgtgggccagctgggccgggcccgggcagagacagaggagctgatccgggagcgggtgcggcaggtggtggcccacgtgcgggcccaggagcgggagctgctggaggccgtggatgcccgctaccagagggactatgaggagatggccagccggctgggccgcctggatgctgtgctgcagaggatcagaacaggcagcgccctggtgcagaggatgaagtgctacgccagtgaccaggaggtgctggacatgcacggcttcctgcggcaggccctgtgccgcctgcggcaggaggagccccagagcctgcaggccgctgtgaggacagatggctttgatgagttcaaggtgcggctgcaggacctgagcagctgcatcacccagggcaaggatgctgctgtgtccaagaaggccagccctgaggccgccagcaccccccgggaccccattgatgtggacctgcctgaggaggccgagcgggtgaaggcccaggtgcaggccctgggcctggccgaggcccagcccatggctgtggtgcagagcgtgcctggggcccaccctgtgcctgtgtatgccttcagcatcaagggccccagctatggagaagatgtgagcaacaccaccacagcccagaagaggaagtgcagccagacccagtgccccaggaaggtgatcaagatggagagcgaggagggcaaggaggcccggctggcccggagcagccctgagcagccccggcccagcaccagcaaggctgtgtccccaccccacctggatggcccccccagccccaggagccctgtgattggcagcgaggtgttcctgcccaacagcaaccacgtggccagcggggccggggaggccgaggagcgggtggtggtgatcagcagcagtgaagattctgatgctgagaacagcgtgtctggccctgaggtgcagcccaggaccccagccagcccccacttccgcagccagggcgcccagccccagcaggtgaccctgcggctggccctgcggctgggcaacttccctgtgcgccactag

SEQ ID NO: 21302 - DNA, 1683 bp, synthetic construct
  misc_feature 1..1683: note = Description of Artificial Sequence: Synthetic coding sequence
  source 1..1683: mol_type = other DNA
atggagcccgccccagcccggagcccccggccccagcaggaccctgcccggccccaggagcccaccatgcctcctcctgagacccccagcgagggccggcagcccagccccagccccagccccacagagcgggccccagccagcgaggaggagttccagttcctgcgctgccagcagtgccaggccgaggccaagtgccccaagctgctgccctgcctgcacaccctgtgcagcggctgcctggaggccagcggcatgcagtgccccatctgccaggccccctggcccctgggcgctgacaccccagccctggacaacgtgttctttgagagcctgcagaggcggctgtctgtgtaccggcagatcgtggatgcccaggccgtgtgcacccgctgcaaggagagcgctgacttctggtgctttgaatgtgagcagctgctgtgtgccaagtgctttgaggcccaccagtggttcctgaagcatgaggcccggcccctggccgagctgaggaaccagagcgtgcgggagttcctggatggcaccaggaagaccaacaacatcttctgcagcaaccccaaccacaggacccccaccctgaccagcatctactgccggggctgcagcaagcccctgtgctgcagctgtgccctgctggacagcagccacagcgagctgaagtgtgacatctctgctgagatccagcagaggcaggaggagctggatgccatgacccaggccctgcaggagcaggacagcgccttcggggctgtgcacgcccagatgcatgctgctgtgggccagctgggccgggcccgggcagagacagaggagctgatccgggagcgggtgcggcaggtggtggcccacgtgcgggcccaggagcgggagctgctggaggccgtggatgcccgctaccagagggactatgaggagatggccagccggctgggccgcctggatgctgtgctgcagaggatcagaacaggcagcgccctggtgcagaggatgaagtgctacgccagtgaccaggaggtgctggacatgcacggcttcctgcggcaggccctgtgccgcctgcggcaggaggagccccagagcctgcaggccgctgtgaggacagatggctttgatgagttcaaggtgcggctgcaggacctgagcagctgcatcacccagggcaaggatgctgctgtgtccaagaaggccagccctgaggccgccagcaccccccgggaccccattgatgtggacctgcctgaggaggccgagcgggtgaaggcccaggtgcaggccctgggcctggccgaggcccagcccatggctgtggtgcagagcgtgcctggggcccaccctgtgcctgtgtatgccttcagcatcaagggccccagctatggagaagatgtgagcaacaccaccacagcccagaagaggaagtgcagccagacccagtgccccaggaaggtgatcaagatggagagcgaggagggcaaggaggcccggctggcccggagcagccctgagcagccccggcccagcaccagcaaggctgtgtccccaccccacctggatggcccccccagccccaggagccctgtgattggcagcgaggtgttcctgcccaacagcaaccacgtggccagcggggccggggaggccggccgggagagaaatgccctgtggtag

SEQ ID NO: 21303 - DNA, 1758 bp, synthetic construct
  misc_feature 1..1758: note = Description of Artificial Sequence: Synthetic coding sequence
  source 1..1758: mol_type = other DNA
atggagcccgccccagcccggagcccccggccccagcaggaccctgcccggccccaggagcccaccatgcctcctcctgagacccccagcgagggccggcagcccagccccagccccagccccacagagcgggccccagccagcgaggaggagttccagttcctgcgctgccagcagtgccaggccgaggccaagtgccccaagctgctgccctgcctgcacaccctgtgcagcggctgcctggaggccagcggcatgcagtgccccatctgccaggccccctggcccctgggcgctgacaccccagccctggacaacgtgttctttgagagcctgcagaggcggctgtctgtgtaccggcagatcgtggatgcccaggccgtgtgcacccgctgcaaggagagcgctgacttctggtgctttgaatgtgagcagctgctgtgtgccaagtgctttgaggcccaccagtggttcctgaagcatgaggcccggcccctggccgagctgaggaaccagagcgtgcgggagttcctggatggcaccaggaagaccaacaacatcttctgcagcaaccccaaccacaggacccccaccctgaccagcatctactgccggggctgcagcaagcccctgtgctgcagctgtgccctgctggacagcagccacagcgagctgaagtgtgacatctctgctgagatccagcagaggcaggaggagctggatgccatgacccaggccctgcaggagcaggacagcgccttcggggctgtgcacgcccagatgcatgctgctgtgggccagctgggccgggcccgggcagagacagaggagctgatccgggagcgggtgcggcaggtggtggcccacgtgcgggcccaggagcgggagctgctggaggccgtggatgcccgctaccagagggactatgaggagatggccagccggctgggccgcctggatgctgtgctgcagaggatcagaacaggcagcgccctggtgcagaggatgaagtgctacgccagtgaccaggaggtgctggacatgcacggcttcctgcggcaggccctgtgccgcctgcggcaggaggagccccagagcctgcaggccgctgtgaggacagatggctttgatgagttcaaggtgcggctgcaggacctgagcagctgcatcacccagggcaaggatgctgctgtgtccaagaaggccagccctgaggccgccagcaccccccgggaccccattgatgtggacctggatgtgagcaacaccaccacagcccagaagaggaagtgcagccagacccagtgccccaggaaggtgatcaagatggagagcgaggagggcaaggaggcccggctggcccggagcagccctgagcagccccggcccagcaccagcaaggctgtgtccccaccccacctggatggcccccccagccccaggagccctgtgattggcagcgaggtgttcctgcccaacagcaaccacgtggccagcggggccggggaggccgaggagcgggtggtggtgatcagcagcagtgaagattctgatgctgagaacagcagcagccgggagctggatgacagcagcagcgagagcagtgacctgcagctggagggccccagcaccctgcgggtgctggatgagaacctggccgacccccaggccgaggaccggcccctggtgttctttgacctgaagattgacaatgaaagtggcttctcctggggctacccccaccccttcctgatctag

SEQ ID NO: 21304 - DNA, 483 bp, synthetic construct
  misc_feature 1..483: note = Description of Artificial Sequence: Synthetic coding sequence
  source 1..483: mol_type = other DNA
atgcagcctgccagcgccaagtggtatgacagaagagattatgtgttcatcgagttctgtgtggaggacagcaaggatgtgaatgtgaactttgagaagagcaagctgaccttcagctgcctgggcggcagtgacaacttcaagcacctgaatgaaattgacctcttccactgcatcgaccccaatgacagcaagcacaagaggacagacaggagcatcctgtgctgcctgaggaaaggagagagcggccagagctggccccggctgaccaaggagcgggccaagctgaactggctgtctgtggacttcaacaactggaaggactgggaggatgacagtgatgaggacatgagcaactttgaccgcttcagcgagatgatgaacaacatgggaggagatgaagatgtggacctgcctgaggtggatggagcagatgatgacagccaggacagtgatgatgagaagatgccagacctggagtag

SEQ ID NO: 21305 - DNA, 3141 bp, synthetic construct
  misc_feature 1..3141: note = Description of Artificial Sequence: Synthetic coding sequence
  source 1..3141: mol_type = other DNA
atgcagaagcccagcggcctgaagcccccaggccggggcggcaagcacagcagccccatgggccgcaccagcactggaagtgccagcagcagcgctgctgtggccgccagcagcaaggagggcagccccctgcacaagcagagcagcggccccagcagcagccctgctgctgctgctgcccctgagaagccaggccccaaggctgctgaggtgggagatgacttcctgggggactttgtggtgggggagcgggtgtgggtgaatggagtgaagccaggagtggtgcagtacctgggggagacccagtttgcccctggccagtgggccggcgtggtgctggatgatcctgtgggcaagaatgatggagctgtgggcggcgtgcgctactttgaatgtcctgccctgcagggcatcttcacccggcccagcaagctgacccggcagcccacagctgagggcagcggcagtgatgcccacagcgtggagagcctgacagcccagaacctgagcctgcacagcggcacagccaccccacccctgaccagcagggtcatccccctgcgggagagcgtgctgaacagctctgtgaagacaggaaatgaaagtggcagcaacctgagtgacagcggctctgtgaagagaggagagaaggacctgcggctgggggacagagtgctggtgggcggcaccaagacaggagtggtgcgctacgtgggggagacagactttgccaagggggagtggtgtggggtggagctggatgagcccctgggcaagaatgatggagctgtggccggcacccgctacttccagtgcccccccaagtttggcctgtttgcccccatccacaaggtgatccgcatcggcttccccagcaccagccctgccaaggccaagaagaccaagaggatggccatgggcgtgtctgccctgacccacagccccagcagcagcagcatcagctctgtgtcctctgtggccagctctgtgggcggccggcccagccgcagcggcctgctgacagagaccagcagccgctatgccaggaagatcagcggcaccacagccctgcaggaggccctgaaggagaagcagcagcacatcgagcagctgctggccgagcgggacctggagcgggcagaggtggccaaggccaccagccacatctgtgaggtggagaaggagatcgccctgctgaaggcccagcacgagcagtatgtggccgaggccgaggagaagctgcagagggcccggctgctggtggagagcgtgaggaaggagaaggtggacctgagcaaccagctggaggaggagaggaggaaggtggaggacctgcagttccgggtggaggaggagagcatcaccaagggggacctggagacccagacccagctggagcacgcccgcatcggggagctggagcagagcctgctgctggagaaggcccaggccgagcggctgctgcgggagctggccgacaaccggctgaccaccgtggccgagaagagccgggtgctgcagctggaggaggagctgaccctgcggcggggggagattgaggagctgcagcagtgcctgctgcacagcggccccccacctccagaccacccagatgctgctgagatcctgcggctgcgggagcggctgctgagcgccagcaaggagcaccagcgggagagcggcgtgctgcgggacaagtatgagaaggccctgaaggcctaccaggccgaggtggacaagctgcgggccgccaatgagaagtatgcccaggaggtggccggcctgaaggacaaggtgcagcaggccaccagcgagaacatgggcctgatggacaactggaagagcaagctggacagcctggccagtgaccaccagaagagcctggaggacctgaaggccaccctgaacagcggccctggggcccagcagaaggagatcggggagctgaaggctgtgatggagggcatcaagatggagcaccagctggagctgggcaacctgcaggccaagcatgacctggagacagccatgcacgtgaaggagaaggaggccctgcgggagaagctgcaggaggcccaggaggagctggccggcctgcagaggcactggagggcccagctggaggtgcaggccagccagcaccggctggagctgcaggaggcccaggaccagaggagagatgctgagctgcgggtgcatgagctggagaagctggatgtggagtaccggggccaggcccaggccatcgagttcctgaaggagcagatcagcctggccgagaagaagatgctggactatgaaaggctgcagagagctgaggcccagggcaagcaggaggtggagagcctgcgggagaagctgctggtggctgaaaatcggctgcaggccgtggaggccctgtgcagcagccagcacacccacatgattgagagcaatgacatcagcgaggagaccatccgcaccaaggagaccgtggagggcctgcaggacaagctgaacaagagggacaaggaggtgacagccctgaccagccagacagagatgctgcgggcccaggtgtctgccctggagagcaagtgcaagagcggggagaagaaggtggatgccctgctgaaggagaagaggcggctggaggccgagctggagaccgtgtccaggaagacccatgatgccagcggccagctggtgctgatcagccaggagctgctgaggaaggagaggagcctgaatgagctgcgggtgctgctgctggaggccaacagacacagccctggccctgagcgggacctgagccgggaggtgcacaaggccgagtggaggatcaaggagcagaagctgaaggatgacatccggggcctgcgggagaagctgaccggcctggacaaggagaagagcctgagtgaccagaggcgctacagcctgattgacaggagcagcgcccctgagctgctgcggctgcagcaccagctgatgagcacagaagatgccctgagagatgccctggaccaggcccagcaggtggagaagctgatggaggccatgaggagctgcccagacaaggcccagaccatcggcaacagcggcagcgccaacggcatccaccagcaggacaaggcccagaagcaggaggacaagcactag

SEQ ID NO: 21306 - DNA, 1800 bp, synthetic construct
  misc_feature 1..1800: note = Description of Artificial Sequence: Synthetic coding sequence
  source 1..1800: mol_type = other DNA
atgagccgcagcctgctgctgtggttcctgctcttcctgctgctgctgccccccctgcctgtgctgctggccgaccccggggcccccacccctgtgaacccctgctgctactacccctgccagcaccagggcatctgtgtgcgcttcggcctggaccgctaccagtgtgactgcaccaggacaggctacagcggccccaactgcaccatccctggcctgtggacctggctgaggaacagcctgcggcccagccccagcttcacccacttcctgctgacccacggccgctggttctgggagtttgtgaatgccaccttcatccgggagatgctgatgaggctggtgctgactgtgcgcagcaacctgatccccagcccccccacctacaacagcgcccatgactacatctcctgggagagcttcagcaatgtgtcctactacacccgcatcctgcccagcgtgcccaaggactgccccacccccatgggcaccaagggcaagaagcagctgcctgatgcccagctgctggcccggcgcttcctgctgcggaggaagttcatcccagacccccagggcaccaacctgatgtttgccttctttgcccagcacttcacccaccagttcttcaagaccagcggcaagatgggccctggcttcaccaaggccctgggccatggagtggacctgggccacatctatggagacaacctggagcggcagtaccagctgcggctcttcaaggatggcaagctgaagtaccaggtgctggatggagagatgtacccacccagcgtggaggaggcccctgtgctgatgcactacccccggggcatccccccccagagccagatggctgtgggccaggaggtgtttggcctgctgcccggcctgatgctgtatgccaccctgtggctgcgggagcacaacagagtgtgtgacctgctgaaggccgagcaccccacctggggagatgagcagctgttccagaccaccaggctcatcctgattggagagaccatcaagatcgtcatcgaggagtatgtgcagcagctgagcggctacttcctgcagctgaagtttgatcctgagctgctgtttggagtgcagttccagtacagaaaccgcatcgccatggagttcaaccacctgtaccactggcaccccctgatgccagacagcttcaaggtgggcagccaggagtacagctatgagcagttcctgttcaacacctccatgctggtggactatggagtggaggccctggtggatgccttcagccggcagattgctggaagaattggaggcggcaggaacatggaccaccacatcctgcacgtggccgtggatgtgatccgggagagccgggagatgaggctgcagcccttcaatgagtacaggaagagatttggcatgaagccctacaccagcttccaggagctggtgggggagaaggagatggctgctgagctggaggagctgtatggagacattgatgccctggagttctacccaggcctgctgctggagaagtgccaccccaacagcatctttggagagagcatgattgagatcggggcccccttcagcctgaagggcctgctgggcaaccccatctgcagccctgagtactggaagcccagcacctttggaggagaggtgggcttcaacatcgtgaagacagccaccctgaagaagctggtgtgcctgaacaccaagacctgcccctacgtgtccttccgggtgcctgatgccagccaggatgatggccctgctgtggagcggcccagcacagagctgtag

SEQ ID NO: 21307 - DNA, 1473 bp, synthetic construct
  misc_feature 1..1473: note = Description of Artificial Sequence: Synthetic coding sequence
  source 1..1473: mol_type = other DNA
atgctgatgaggctggtgctgactgtgcgcagcaacctgatccccagcccccccacctacaacagcgcccatgactacatctcctgggagagcttcagcaatgtgtcctactacacccgcatcctgcccagcgtgcccaaggactgccccacccccatgggcaccaagggcaagaagcagctgcctgatgcccagctgctggcccggcgcttcctgctgcggaggaagttcatcccagacccccagggcaccaacctgatgtttgccttctttgcccagcacttcacccaccagttcttcaagaccagcggcaagatgggccctggcttcaccaaggccctgggccacggcgtggacctgggccacatctacggggacaacctggagcggcagtaccagctgcggctcttcaaggatggcaagctgaagtaccaggtgctggatggagagatgtacccaccttctgtggaggaggcccctgtgctgatgcactacccccggggcatccccccccagagccagatggctgtgggccaggaggtgtttggcctgctgcccggcctgatgctgtatgccaccctgtggctgcgggagcacaacagagtgtgtgacctgctgaaggccgagcaccccacctggggagatgagcagctgttccagaccaccaggctcatcctgattggagagaccatcaagatcgtgattgaggagtatgtgcagcagctgagcggctacttcctgcagctgaagtttgatcctgagctgctgtttggagtgcagttccagtacagaaacagaattgccatggagttcaaccacctgtaccactggcaccccctgatgccagacagcttcaaggtgggcagccaggagtacagctatgagcagttcctgttcaacacctccatgctggtggactatggagtggaggccctggtggatgccttcagccggcagattgctggccgcatcggcggcggcaggaacatggaccaccacatcctgcacgtggccgtggatgtgatccgggagagccgggagatgaggctgcagcccttcaatgagtacaggaagcgcttcggcatgaagccctacaccagcttccaggagctggtgggggagaaggagatggctgctgagctggaggagctgtatggagacattgatgccctggagttctacccaggcctgctgctggagaagtgccaccccaacagcatctttggagagagcatgattgaaattggagcccccttcagcctgaagggcctgctgggcaaccccatctgcagccctgagtactggaagcccagcaccttcggcggggaggtgggcttcaacatcgtgaagacagccaccctgaagaagctggtgtgcctgaacaccaagacctgcccctacgtgtccttccgggtgcctgatgccagccaggatgatggccctgctgtggagcggcccagcacagagctgtag

SEQ ID NO: 21308 - DNA, 471 bp, synthetic construct
  misc_feature 1..471: note = Description of Artificial Sequence: Synthetic coding sequence
  source 1..471: mol_type = other DNA
agcctgctgctgtggttcctgctcttcctgctgctgctgccccccctgcctgtgctgctggccgaccccggggcccccaccccagctggcctgtggacctggctgaggaacagcctgcggcccagccccagcttcacccacttcctgctgacccacggccgctggttctgggagtttgtgaatgccaccttcatccgggagatgctgatgaggctggtgctgactgtgcgcagcaacctgatccccagcccccccacctacaacagcgcccatgactacatctcctgggagagcttcagcaacttcttcaagaccagcggcaagatgggccctggcttcaccaaggccctgggccatggagtggacctgggccacatctatggagacaacctggagcggcagtaccagctgcggctcttcaaggatggcaagctgaagtaccaggtgctggatggagagatgtacccctag

SEQ ID NO: 21309 - DNA, 1614 bp, synthetic construct
  misc_feature 1..1614: note = Description of Artificial Sequence: Synthetic coding sequence
  source 1..1614: mol_type = other DNA
atgaggaagccccggctgatgaacccctgctgctactacccctgccagcaccagggcatctgtgtgcgcttcggcctggaccgctaccagtgtgactgcaccaggacaggctacagcggccccaactgcaccatccctggcctgtggacctggctgaggaacagcctgcggcccagccccagcttcacccacttcctgctgacccacggccgctggttctgggagtttgtgaatgccaccttcatccgggagatgctgatgaggctggtgctgactgtgcgcagcaacctgatccccagcccccccacctacaacagcgcccatgactacatctcctgggagagcttcagcaatgtgtcctactacacccgcatcctgcccagcgtgcccaaggactgccccacccccatgggcaccaagggcaagaagcagctgcctgatgcccagctgctggcccggcgcttcctgctgcggaggaagttcatcccagacccccagggcaccaacctgatgtttgccttctttgcccagcacttcacccaccagttcttcaagaccagcggcaagatgggccctggcttcaccaaggccctgggccacggcgtggacctgggccacatctacggggacaacctggagcggcagtaccagctgcggctcttcaaggatggcaagctgaagtaccaggtgctggatggagagatgtacccaccttctgtggaggaggcccctgtgctgatgcactacccccggggcatccccccccagagccagatggctgtgggccaggaggtgtttggcctgctgcccggcctgatgctgtatgccaccctgtggctgcgggagcacaacagagtgtgtgacctgctgaaggccgagcaccccacctggggagatgagcagctgttccagaccaccaggctcatcctgattggagagaccatcaagatcgtgattgaggagtatgtgcagcagctgagcggctacttcctgcagctgaagtttgatcctgagctgctgtttggagtgcagttccagtacagaaacagaattgccatggagttcaaccacctgtaccactggcaccccctgatgccagacagcttcaagattggaggcggcaggaacatggaccaccacatcctgcacgtggccgtggatgtgatccgggagagccgggagatgaggctgcagcccttcaatgagtacaggaagagatttggcatgaagccctacaccagcttccaggagctggtgggggagaaggagatggctgctgagctggaggagctgtatggagacattgatgccctggagttctacccaggcctgctgctggagaagtgccaccccaacagcatctttggagagagcatgattgagatcggggcccccttcagcctgaagggcctgctgggcaaccccatctgcagccctgagtactggaagcccagcacctttggaggagaggtgggcttcaacatcgtgaagacagccaccctgaagaagctggtgtgcctgaacaccaagacctgcccctacgtgtccttccgggtgcctgatgccagccaggatgatggccctgctgtggagcggcccagcacagagctgtag

SEQ ID NO: 21310 - DNA, 1815 bp, synthetic construct
  misc_feature 1..1815: note = Description of Artificial Sequence: Synthetic coding sequence
  source 1..1815: mol_type = other DNA
atgctggcccgggccctgctgctgtgtgctgtgctggccctgagccacacagccaacccctgctgcagccacccctgccagaacagaggagtgtgcatgtctgtgggctttgaccagtacaagtgtgactgcaccaggacaggcttctacggggagaactgcagcaccccagagttcctgacccgcatcaagctgttcctgaagcccacccccaacacagtgcactacatcctgacccacttcaagggcttctggaatgtggtgaacaacatccccttcctgagaaatgccatcatgtcctatgtgctgaccagccgcagccacctgattgacagcccccccacctacaatgctgactatggctacaagtcctgggaggccttcagcaacctgagctactacacccgggccctgccccctgtgcctgatgactgccccacccccctgggcgtgaagggcaagaagcagctgcctgacagcaatgaaattgtggagaagctgctgctgcggaggaagttcatcccagacccccagggcagcaacatgatgtttgccttctttgcccagcacttcacccaccagttcttcaagacagaccacaagaggggccctgccttcaccaacggcctgggccacggcgtggacctgaaccacatctacggggagaccctggcccggcagaggaagctgcggctcttcaaggatggcaagatgaagtaccagatcattgatggagagatgtacccacccaccgtgaaggacacccaggccgagatgatctacccaccccaggtgcctgagcacctgcgctttgctgtgggccaggaggtgtttggcctggtgcccggcctgatgatgtatgccaccatctggctgcgggagcacaacagagtgtgtgatgtgctgaagcaggagcaccctgagtggggagatgagcagctgttccagaccagccgcctcatcctgattggagagaccatcaagatcgtgattgaggactatgtgcagcacctgagcggctaccacttcaagctgaagtttgatcctgagctgctcttcaacaagcagttccagtaccagaacagaattgctgctgagttcaacaccctgtaccactggcaccccctgctgcctgacaccttccagatccatgaccagaagtacaactaccagcagttcatctacaacaacagcatcctgctggagcacggcatcacccagtttgtggagagcttcacccggcagattgctggccgggtggccggcggcagaaatgtgcccccagctgtgcagaaggtgtcccaggccagcattgaccagagccggcagatgaagtaccagagcttcaatgagtacaggaagcgcttcatgctgaagccctatgagagctttgaggagctgaccggggagaaggagatgtctgctgagctggaggccctgtatggagacattgatgctgtggagctgtacccagccctgctggtggagaagcccaggccagatgccatctttggagagaccatggtggaggtgggcgcccccttcagcctgaagggcctgatgggaaatgtcatctgcagccctgcctactggaagcccagcaccttcggcggggaggtgggcttccagatcatcaacacagccagcatccagagcctcatctgcaacaacgtgaagggctgccccttcaccagcttctctgtgcctgaccctgagctgatcaagacagtgaccatcaatgccagcagcagccgcagcggcctggatgacatcaaccccaccgtgctgctgaaggagaggagcacagagctgtag

SEQ ID NO: 21311 - DNA, 1614 bp, synthetic construct
  misc_feature 1..1614: note = Description of Artificial Sequence: Synthetic coding sequence
  source 1..1614: mol_type = other DNA
agcctggtgcctgccaccaactacatctacacccccctgaaccagctgaagggcggcaccatcgtgaatgtgtatggagtggtgaagttcttcaagccaccctacctgagcaagggcacagactactgcagcgtggtgaccatcgtggaccagaccaacgtgaagctgacctgcctgctcttcagcggcaactatgaggccctgcccatcatctacaagaatggagacatcgtgcgcttccaccggctgaagatccaggtgtacaagaaggagacccagggcatcaccagcagcggctttgccagcctgacctttgagggcaccctgggcgcccccatcatccccaggaccagcagcaagtacttcaacttcaccacagaggaccacaagatggtggaggccctgcgggtgtgggccagcacccacatgagccccagctggaccctgctgaagctgtgtgatgtgcagcccatgcagtactttgacctgacctgccagctgctgggcaaggccgaggtggatggagccagcttcctgctgaaggtgtgggatggcaccaggacccccttccccagctggagggtgctgatccaggacctggtgctggagggggacctgagccacatccaccggctgcagaacctgaccatcgacatcctggtgtatgacaaccacgtgcacgtggcccggagcctgaaggtgggcagcttcctgcgcatctacagcctgcacaccaagctgcagagcatgaacagcgagaaccagaccatgctgagcctggagttccacctgcatggaggcaccagctatggccggggcatccgggtgctgcctgagagcaacagtgatgtggaccagctgaagaaggacctggagagcgccaacctgacagccaaccagcacagtgatgtgatctgccagagcgagccagatgacagcttccccagcagcggctctgtgtccctgtatgaggtggagcgctgccagcagctgagcgccaccatcctgacagaccaccagtacctggagaggacccccctgtgtgccatcctgaagcagaaggccccccagcagtaccgcatccgggccaagctgcggagctacaagcccaggaggctcttccagagcgtgaagctgcactgccccaagtgccacctgctgcaggaggtgccccatgaaggagacctggacatcatcttccaggatggagccaccaagaccccagatgtgaagctgcagaacaccagcctgtatgacagcaagatctggaccaccaagaaccagaagggcaggaaggtggccgtgcactttgtgaagaacaacggcatcctgcccctgagcaatgaatgtctgctgctgattgagggcggcaccctgtctgagatctgcaagctgagcaacaagttcaacagcgtcatccctgtgcgcagcggccacgaggacctggagctgctggacctgagcgcccccttcctgatccagggcaccatccaccactacggctgcaagcagtgcagcagcctgcggagcatccagaacctgaacagcctggtggacaagacctcctggatccccagctctgtggccgaggagctggacatcgtgctgcagtag

SEQ ID NO: 21312 - DNA, 1905 bp, synthetic construct
  misc_feature 1..1905: note = Description of Artificial Sequence: Synthetic coding sequence
  source 1..1905: mol_type = other DNA
atgagcctggtgcctgccaccaactacatctacacccccctgaaccagctgaagggcggcaccatcgtgaatgtgtatggagtggtgaagttcttcaagccaccctacctgagcaaaggaacagactactgcagcgtggtgaccatcgtggaccagaccaacgtgaagctgacctgcctgctcttcagcggcaactatgaggccctgcccatcatctacaagaatggagacatcgtgcgcttccaccggctgaagatccaggtgtacaagaaggagacccagggcatcaccagcagcggctttgccagcctgacctttgagggcaccctgggcgcccccatcatccccaggaccagcagcaagtacttcaacttcaccacagaggaccacaagatggtggaggccctgcgggtgtgggccagcacccacatgagccccagctggaccctgctgaagctgtgtgatgtgcagcccatgcagtactttgacctgacctgccagctgctgggcaaggccgaggtggatggagccagcttcctgctgaaggtgtgggatggcaccaggacccccttccccagctggagggtgctgatccaggacctggtgctggagggggacctgagccacatccaccggctgcagaacctgaccatcgacatcctggtgtatgacaaccacgtgcacgtggcccggagcctgaaggtgggcagcttcctgcgcatctacagcctgcacaccaagctgcagagcatgaacagcgagaaccagaccatgctgagcctggagttccacctgcacggcggcaccagctatggccggggcatccgggtgctgcctgagagcaacagtgatgtggaccagctgaagaaggacctggagagcgccaacctgacagccaaccagcacagtgatgtgatctgccagagcgagccagatgacagcttccccagcagcggctctgtgtccctgtatgaggtggagcgctgccagcagctgagcgccaccatcctgacagaccaccagtacctggagaggacccccctgtgtgccatcctgaagcagaaggccccccagcagtaccgcatccgggccaagctgcggagctacaagccccggcggctcttccagagcgtgaagctgcactgccccaagtgccacctgctgcaggaggtgccccatgaaggagacctggacatcatcttccaggatggagccaccaagaccccagatgtgaagctgcagaacaccagcctgtatgacagcaagatctggaccaccaagaaccagaagggcaggaaggtggccgtgcactttgtgaagaacaacggcatcctgcccctgagcaatgaatgtctgctgctgattgaaggaggcaccctgtctgagatctgcaagctgagcaacaagttcaacagcgtcatccctgtgcgcagcggccacgaggacctggagctgctggacctgagcgcccccttcctgatccagggcaccatccaccactacggctgcaagcagtgcagcagcctgcggagcatccagaacctgaacagcctggtggacaagacctcctggatccccagctctgtggccgaggccctgggcatcgtgcccctgcagtatgtgtttgtgatgaccttcaccctggatgatggcaccggggtgctggaggcctacctgatggacagcgacaagttcttccagatcccagccagcgaggtgctgatggatgatgacctgcagaagtctgtggacatgatcatggacatgttctgccccccaggcatcaagattgatgcctacccctggctggagtgcttcatcaagagctacaacgtgaccaacggcacagacaaccagatctgctaccagatctttgacaccaccgtggctgaagatgtgatctag

SEQ ID NO: 21313 - DNA, 1023 bp, synthetic construct
  misc_feature 1..1023: note = Description of Artificial Sequence: Synthetic coding sequence
  source 1..1023: mol_type = other DNA
ctgagcctggtgcctgccaccaactacatctacacccccctgaaccagctgaagggcggcaccatcgtgaatgtgtatggagtggtgaagttcttcaagccaccctacctgagcaaaggaacagactactgcagcgtggtgaccatcgtggaccagaccaacgtgaagctgacctgcctgctcttcagcggcaactatgaggccctgcccatcatctacaagaatggagacatcgtgcgcttccaccggctgaagatccaggtgtacaagaaggagacccagggcatcaccagcagcggctttgccagcctgacctttgagggcaccctgggcgcccccatcatccccaggaccagcagcaagtacttcaacttcaccacagaggaccacaagatggtggaggccctgcgggtgtgggccagcacccacatgagccccagctggaccctgctgaagctgtgtgatgtgcagcccatgcagtactttgacctgacctgccagctgctgggcaaggccgaggtggatggagccagcttcctgctgaaggtgtgggatggcaccaggacccccttccccagctggagggtgctgatccaggacctggtgctggagggggacctgagccacatccaccggctgcagaacctgaccatcgacatcctggtgtatgacaaccacgtgcacgtggcccggagcctgaaggtgggcagcttcctgcgcatctacagcctgcacaccaagctgcagagcatgaacagcgagaaccagaccatgctgagcctggagttccacctgcacggcggcaccagctatggccggggcatccgggtgctgcctgagagcaacagtgatgtggaccagctgaagaaggacctggagagcgccaacctgacagccaaccagcacagtgatgtgatctgccagagcgagccagatgacagcttccccaatggagtgtccctgcggcccccaggctggagctctgtggcccggagccggctgattgctgccagcaccagctag

SEQ ID NO: 21314 - DNA, 1512 bp, synthetic construct
  misc_feature 1..1512: note = Description of Artificial Sequence: Synthetic coding sequence
  source 1..1512: mol_type = other DNA
atggtggaggccctgcgggtgtgggccagcacccacatgagccccagctggaccctgctgaagctgtgtgatgtgcagcccatgcagtactttgacctgacctgccagctgctgggcaaggccgaggtggatggagccagcttcctgctgaaggtgtgggatggcaccaggacccccttccccagctggagggtgctgatccaggacctggtgctggagggggacctgagccacatccaccggctgcagaacctgaccatcgacatcctggtgtatgacaaccacgtgcacgtggcccggagcctgaaggtgggcagcttcctgcgcatctacagcctgcacaccaagctgcagagcatgaacagcgagaaccagaccatgctgagcctggagttccacctgcatggaggcaccagctatggccggggcatccgggtgctgcctgagagcaacagtgatgtggaccagctgaagaaggacctggagagcgccaacctgacagccaaccagcacagtgatgtgatctgccagagcgagccagatgacagcttccccagcagcggctctgtgtccctgtatgaggtggagcgctgccagcagctgagcgccaccatcctgacagaccaccagtacctggagaggacccccctgtgtgccatcctgaagcagaaggccccccagcagtaccgcatccgggccaagctgcggagctacaagcccaggaggctcttccagagcgtgaagctgcactgccccaagtgccacctgctgcaggaggtgccccatgaaggagacctggacatcatcttccaggatggagccaccaagaccccagatgtgaagctgcagaacaccagcctgtatgacagcaagatctggaccaccaagaaccagaagggcaggaaggtggccgtgcactttgtgaagaacaacggcatcctgcccctgagcaatgaatgtctgctgctgattgagggcggcaccctgtctgagatctgcaagctgagcaacaagttcaacagcgtcatccctgtgcgcagcggccacgaggacctggagctgctggacctgagcgcccccttcctgatccagggcaccatccaccactacggctgcaagcagtgcagcagcctgcggagcatccagaacctgaacagcctggtggacaagacctcctggatccccagctctgtggccgaggccctgggcatcgtgcccctgcagtatgtgtttgtgatgaccttcaccctggatgatggcactggagtgctggaggcctacctgatggacagcgacaagttcttccagatcccagccagcgaggtgctgatggatgatgacctgcagaagtctgtggacatgatcatggacatgttctgccccccaggcatcaagattgatgcctacccctggctggagtgcttcatcaagagctacaacgtgaccaatggaacagacaaccagatctgctaccagatctttgacaccaccgtggccgaggatgtgatctag

SEQ ID NO: 21315 - DNA, 1380 bp, synthetic construct
  misc_feature 1..1380: note = Description of Artificial Sequence: Synthetic coding sequence
  source 1..1380: mol_type = other DNA
ctgagcctggtgcctgccaccaactacatctacacccccctgaaccagctgaagggcggcaccatcgtgaatgtgtatggagtggtgaagttcttcaagccaccctacctgagcaaaggaacagactactgcagcgtggtgaccatcgtggaccagaccaacgtgaagctgacctgcctgctcttcagcggcaactatgaggccctgcccatcatctacaagaatggagacatcgtgcgcttccaccggctgaagatccaggtgtacaagaaggagacccagggcatcaccagcagcggctttgccagcctgacctttgagggcaccctgggcgcccccatcatccccaggaccagcagcaagtacttcaacttcaccacagaggaccacaagatggtggaggccctgcgggtgtgggccagcacccacatgagccccagctggaccctgctgaagctgtgtgatgtgcagcccatgcagtactttgacctgacctgccagctgctgggcaaggccgaggtggatggagccagcttcctgctgaaggtgtgggatggcaccaggacccccttccccagctggagggtgctgatccaggacctggtgctggagggggacctgagccacatccaccggctgcagaacctgaccatcgacatcctggtgtatgacaaccacgtgcacgtggcccggagcctgaaggtgggcagcttcctgcgcatctacagcctgcacaccaagctgcagagcatgaacagcgagaaccagaccatgctgagcctggagttccacctgcacggcggcaccagctatggccggggcatccgggtgctgcctgagagcaacagtgatgtggaccagctgaagaaggacctggagagcgccaacctgacagccaaccagcacagtgatgtgatctgccagagcgagccagatgacagcttccccagcagcggctctgtgtccctgtatgaggtggagcgctgccagcagctgagcgccaccatcctgacagaccaccagtacctggagaggacccccctgtgtgccatcctgaagcagaaggccccccagcagtaccgcatccgggccaagctgcggagctacaagccccggcggctcttccagagcgtgaagctgcactgccccaagtgccacctgctgcaggaggtgccccatgaaggagacctggacatcatcttccaggatggagccaccaagaccccagatgtgaagctgcagaacaccagcctgtatgacagcaagatctggaccaccaagaaccagaagggcaggaaggtggccgtgcactttgtgaagaacaacggcatcctgcccctgagcaatgaatgtctgctgctgattgaggtgctgctgtag

SEQ ID NO: 21316 - DNA, 249 bp, synthetic construct
  misc_feature 1..249: note = Description of Artificial Sequence: Synthetic coding sequence
  source 1..249: mol_type = other DNA
atgagcctggtgcctgccaccaactacatctacacccccctgaaccagctgaagggcggcaccatcgtgaatgtgtatggagtggtgaagttcttcaagccaccctacctgagcaaaggaacagactactgcagcgtggtgaccatcgtggaccagaccaacgtgaagctgacctgcctgctcttcagcggcaactatgaggccctgcccatcatctacaagaatggagacatcgtgcgcttccactag

SEQ ID NO: 21317 - DNA, 1557 bp, synthetic construct
  misc_feature 1..1557: note = Description of Artificial Sequence: Synthetic coding sequence
  source 1..1557: mol_type = other DNA
ctgagcctggtgcctgccaccaactacatctacacccccctgaaccagctgaagggcggcaccatcgtgaatgtgtatggagtggtgaagttcttcaagccaccctacctgagcaaaggaacagactactgcagcgtggtgaccatcgtggaccagaccaacgtgaagctgacctgcctgctcttcagcggcaactatgaggccctgcccatcatctacaagaatggagacatcgtgcgcttccaccggctgaagatccaggtgtacaagaaggagacccagggcatcaccagcagcggctttgccagcctgacctttgagggcaccctgggcgcccccatcatccccaggaccagcagcaagtacttcaacttcaccacagaggaccacaagatggtggaggccctgcgggtgtgggccagcacccacatgagccccagctggaccctgctgaagctgtgtgatgtgcagcccatgcagtactttgacctgacctgccagctgctgggcaaggccgaggtggatggagccagcttcctgctgaaggtgtgggatggcaccaggacccccttccccagctggagggtgctgatccaggacctggtgctggagggggacctgagccacatccaccggctgcagaacctgaccatcgacatcctggtgtatgacaaccacgtgcacgtggcccggagcctgaaggtgggcagcttcctgcgcatctacagcctgcacaccaagctgcagagcatgaacagcgagaaccagaccatgctgagcctggagttccacctgcacggcggcaccagctatggccggggcatccgggtgctgcctgagagcaacagtgatgtggaccagctgaagaaggacctggagagcgccaacctgacagccaaccagcacagtgatgtgatctgccagagcgagccagatgacagcttccccagcagcggctctgtgtccctgtatgaggtggagcgctgccagcagctgagcgccaccatcctgacagaccaccagtacctggagaggacccccctgtgtgccatcctgaagcagaaggccccccagcagtaccgcatccgggccaagctgcggagctacaagccccggcggctcttccagagcgtgaagctgcactgccccaagtgccacctgctgcaggaggtgccccatgaaggagacctggacatcatcttccaggatggagccaccaagaccccagatgtgaagctgcagaacaccagcctgtatgacagcaagatctggaccaccaagaaccagaagggcaggaaggtggccgtgcactttgtgaagaacaacggcatcctgcccctgagcaatgaatgtctgctgctgattgaaggaggcaccctgtctgagatctgcaagctgagcaacaagttcaacagcgtcatccctgtgcgcagcggccacgaggacctggagctgctggacctgagcgcccccttcctgatccagggcaccatccaccactatggaacaggctactgcaccccacccatctgtgtgtgctatgacctgtacacctag

SEQ ID NO: 21318 - DNA, 1374 bp, synthetic construct
  misc_feature 1..1374: note = Description of Artificial Sequence: Synthetic coding sequence
  source 1..1374: mol_type = other DNA
agccctgaggaccccaggagcaagcacaagttcaagatccacacctacggcagccccaccttctgtgaccactgcggcagcctgctgtatggcctcatccaccagggcatgaagtgtgacacctgtgacatgaatgtgcacaagcagtgtgtgatcaacgtgcccagcctgtgtggcatggaccacacagagaagaggggccgcatctacctgaaggccgaggtggctgatgagaagctgcacgtgacagtgagagatgccaagaacctgatccccatggaccccaacggcctgagtgacccctacgtgaagctgaagctgatcccagaccccaagaatgaaagcaagcagaagaccaagaccatccgcagcaccctgaacccccagtggaatgaaagcttcaccttcaagctgaagcccagcgacaaggaccggcggctgtctgtggagatctgggactgggacaggaccaccagaaatgacttcatgggcagcctgagctttggagtgtctgagctgatgaagatgcctgccagcggctggtacaagctgctgaaccaggaggagggggagtactacaacgtgcccatcccagaaggagatgaggagggcaacatggagctgcggcagaagtttgagaaggccaagctgggccctgctggcaacaaggtgatcagccccagcgaggacaggaagcagcccagcaacaacctggacagagtgaagctgacagacttcaacttcctgatggtgctgggcaagggcagctttgggaaggtgatgctggccgacaggaagggcacagaggagctgtatgccatcaagatcctgaagaaggatgtggtgatccaggatgatgatgtggagtgcaccatggtggagaagagggtgctggccctgctggacaagccacccttcctgacccagctgcacagctgcttccagacagtggaccggctgtactttgtgatggagtatgtgaatggaggagacctgatgtaccacatccagcaggtgggcaagttcaaggagccccaggccgtgttctatgctgctgagatcagcatcggcctcttcttcctgcacaagaggggcatcatctacagagacctgaagctggacaacgtgatgctggacagcgagggccacatcaagattgctgactttggcatgtgcaaggagcacatgatggatggagtgaccaccaggaccttctgtggcaccccagactacatcgcccctgagatcatcgcctaccagccctacggcaagtctgtggactggtgggcctatggagtgctgctgtatgagatgctggccggccaggtgatgttctgctacatcttcatgtttgtgtactgctgcgtgatgtag

SEQ ID NO: 21319 - DNA, 2019 bp, synthetic construct
  misc_feature 1..2019: note = Description of Artificial Sequence: Synthetic coding sequence
  source 1..2019: mol_type = other DNA
atggctgatgtgtttcctggaaatgacagcacagccagccaggatgtggccaacagatttgccaggaaaggagccctgcggcagaagaatgtgcatgaggtgaaggaccacaagttcatcgcccgcttcttcaagcagcccaccttctgcagccactgcacagacttcatctggggctttgggaagcagggcttccagtgccaggtgtgctgctttgtggtgcacaagcgctgccatgaatttgtgaccttcagctgccctggagctgacaagggccctgacacagatgaccccaggagcaagcacaagttcaagatccacacctacggcagccccaccttctgtgaccactgcggcagcctgctgtatggcctcatccaccagggcatgaagtgtgacacctgtgacatgaatgtgcacaagcagtgtgtgatcaacgtgcccagcctgtgtggcatggaccacacagagaagaggggccgcatctacctgaaggccgaggtggctgatgagaagctgcacgtgacagtgagagatgccaagaacctgatccccatggaccccaacggcctgagtgacccctacgtgaagctgaagctgatcccagaccccaagaatgaaagcaagcagaagaccaagaccatccgcagcaccctgaacccccagtggaatgaaagcttcaccttcaagctgaagcccagcgacaaggaccggcggctgtctgtggagatctgggactgggacaggaccaccagaaatgacttcatgggcagcctgagctttggagtgtctgagctgatgaagatgcctgccagcggctggtacaagctgctgaaccaggaggagggggagtactacaacgtgcccatcccagaaggagatgaggagggcaacatggagctgcggcagaagtttgagaaggccaagctgggccctgctggcaacaaggtgatcagccccagcgaggacaggaagcagcccagcaacaacctggacagagtgaagctgacagacttcaacttcctgatggtgctgggcaagggcagctttgggaaggtgatgctggccgacagaaaaggaacagaggagctgtatgccatcaagatcctgaagaaggatgtggtgatccaggatgatgatgtggagtgcaccatggtggagaagagggtgctggccctgctggacaagccacccttcctgacccagctgcacagctgcttccagacagtggaccggctgtactttgtgatggagtatgtgaatggaggagacctgatgtaccacatccagcaggtgggcaagttcaaggagccccaggccgtgttctacgccgctgagatcagcatcggcctcttcttcctgcacaagaggggcatcatctacagagacctgaagctggacaacgtgatgctggacagcgagggccacatcaagattgctgactttggcatgtgcaaggagcacatgatggatggagtgaccaccaggaccttctgtggcaccccagactacatcgcccctgagatcatcgcctaccagccctacggcaagtctgtggactggtgggcctacggcgtgctgctgtatgagatgctggccggccagcccccatttgatggagaagatgaagatgagctgttccagagcatcatggagcacaacgtgtcctaccccaagagcctgagcaaggaggccgtgtctgtgtgcaagggcctgatgaccaagcacccagccaagaggctgggctgcggccctgagggggagagagatgtgcgggagcacgccttcttcagaagaattgactgggagaagctggagaaccgggagatccagccccccttcaagcccaaggtgtgtgggaaaggagctgagaactttgacaagttcttcacccggggccagcctgtgctgaccccaccagaccagctggtgattgccaacatcgaccagagcgactttgagggcttctcctatgtgaacccccagtttgtgcaccccatcctgcagagcgctgtgtag

SEQ ID NO: 21320 - DNA, 2022 bp, synthetic construct
  misc_feature 1..2022: note = Description of Artificial Sequence: Synthetic coding sequence
  source 1..2022: mol_type = other DNA
atggctgaccctgctgctggccccccaccttctgagggggaggagagcacagtgcgctttgccaggaaaggagccctgcggcagaagaatgtgcatgaggtgaagaaccacaagttcaccgcccgcttcttcaagcagcccaccttctgcagccactgcacagacttcatctggggctttgggaagcagggcttccagtgccaggtgtgctgctttgtggtgcacaagcgctgccatgaatttgtgaccttcagctgccctggagctgacaagggccctgccagtgatgaccccaggagcaagcacaagttcaagatccacacctacagcagccccaccttctgtgaccactgcggcagcctgctgtatggcctcatccaccagggcatgaagtgtgacacctgcatgatgaatgtgcacaagagatgtgtgatgaatgtgcccagcctgtgtggcacagaccacacagagcggcggggccgcatctacatccaggcccacatcgacagagatgtgctgattgtgctggtgagagatgccaagaacctggtgcccatggaccccaacggcctgagtgacccctacgtgaagctgaagctgatcccagaccccaagtctgagagcaagcagaagaccaagaccatcaagtgcagcctgaaccctgagtggaatgagaccttccgcttccagctgaaggagagtgacaaggaccggcggctgtctgtggagatctgggactgggacctgaccagcagaaatgacttcatgggcagcctgagctttggcatcagcgagctgcagaaggcctctgtggatggctggttcaagctgctgagccaggaggagggggagtacttcaacgtgcctgtgcccccagagggcagcgaggccaatgaggagctgcggcagaagtttgagcgggccaagatcagccagggcaccaaggtgcctgaggagaagaccaccaacacagtgtccaagtttgacaacaatggaaacagagacaggatgaagctgacagacttcaacttcctgatggtgctgggcaagggcagctttgggaaggtgatgctgtctgagaggaagggcacagatgagctgtatgctgtgaagatcctgaagaaggatgtggtgatccaggatgatgatgtggagtgcaccatggtggagaagagggtgctggccctgcccgggaagccacccttcctgacccagctgcacagctgcttccagaccatggaccggctgtactttgtgatggagtatgtgaatggaggagacctgatgtaccacatccagcaggtgggccgcttcaaggagccccatgctgtgttctatgctgctgagatcgccatcggcctcttcttcctgcagagcaagggcatcatctacagagacctgaagctggacaacgtgatgctggacagcgagggccacatcaagattgctgactttggcatgtgcaaggagaacatctgggatggagtgaccaccaagaccttctgtggcaccccagactacatcgcccctgagatcatcgcctaccagccctacggcaagtctgtggactggtgggcctttggagtgctgctgtatgagatgctggccggccaggccccctttgaaggagaagatgaagatgagctgttccagagcatcatggagcacaacgtggcctaccccaagtccatgagcaaggaggccgtggccatctgcaagggcctgatgaccaagcaccctgggaagaggctgggctgcggccctgagggggagcgggacatcaaggagcacgccttcttccgctacatcgactgggagaagctggagaggaaggagatccagcccccctacaagcccaaggcctgtggcagaaatgcagaaaattttgaccgcttcttcaccaggcacccccctgtgctgaccccaccagaccaggaggtgatcagaaatattgaccagagcgagtttgagggcttctcctttgtgaacagcgagttcctgaagccagaggtgaagagctag

SEQ ID NO: 21321 - DNA, 2016 bp, synthetic construct
  misc_feature 1..2016: note = Description of Artificial Sequence: Synthetic coding sequence
  source 1..2016: mol_type = other DNA
atggctgaccctgctgctggccccccaccttctgagggggaggagagcacagtgcgctttgccaggaaaggagccctgcggcagaagaatgtgcatgaggtgaagaaccacaagttcaccgcccgcttcttcaagcagcccaccttctgcagccactgcacagacttcatctggggctttgggaagcagggcttccagtgccaggtgtgctgctttgtggtgcacaagcgctgccatgaatttgtgaccttcagctgccctggagctgacaagggccctgccagtgatgaccccaggagcaagcacaagttcaagatccacacctacagcagccccaccttctgtgaccactgcggcagcctgctgtatggcctcatccaccagggcatgaagtgtgacacctgcatgatgaatgtgcacaagagatgtgtgatgaatgtgcccagcctgtgtggcacagaccacacagagcggcggggccgcatctacatccaggcccacatcgacagagatgtgctgattgtgctggtgagagatgccaagaacctggtgcccatggaccccaacggcctgagtgacccctacgtgaagctgaagctgatcccagaccccaagtctgagagcaagcagaagaccaagaccatcaagtgcagcctgaaccctgagtggaatgagaccttccgcttccagctgaaggagagtgacaaggaccggcggctgtctgtggagatctgggactgggacctgaccagcagaaatgacttcatgggcagcctgagctttggcatcagcgagctgcagaaggcctctgtggatggctggttcaagctgctgagccaggaggagggggagtacttcaacgtgcctgtgcccccagagggcagcgaggccaatgaggagctgcggcagaagtttgagcgggccaagatcagccagggcaccaaggtgcctgaggagaagaccaccaacacagtgtccaagtttgacaacaatggaaacagagacaggatgaagctgacagacttcaacttcctgatggtgctgggcaagggcagctttgggaaggtgatgctgtctgagaggaagggcacagatgagctgtatgctgtgaagatcctgaagaaggatgtggtgatccaggatgatgatgtggagtgcaccatggtggagaagagggtgctggccctgcccgggaagccacccttcctgacccagctgcacagctgcttccagaccatggaccggctgtactttgtgatggagtatgtgaatggaggagacctgatgtaccacatccagcaggtgggccgcttcaaggagccccatgctgtgttctatgctgctgagatcgccatcggcctcttcttcctgcagagcaagggcatcatctacagagacctgaagctggacaacgtgatgctggacagcgagggccacatcaagattgctgactttggcatgtgcaaggagaacatctgggatggagtgaccaccaagaccttctgtggcaccccagactacatcgcccctgagatcatcgcctaccagccctacggcaagtctgtggactggtgggcctttggagtgctgctgtatgagatgctggccggccaggccccctttgaaggagaagatgaagatgagctgttccagagcatcatggagcacaacgtggcctaccccaagtccatgagcaaggaggccgtggccatctgcaagggcctgatgaccaagcaccctgggaagaggctgggctgcggccctgagggggagcgggacatcaaggagcacgccttcttccgctacatcgactgggagaagctggagaggaaggagatccagcccccctacaagcccaaggcccgggacaagagggacaccagcaactttgacaaggagttcacccggcagcctgtggagctgacccccacagacaagctgttcatcatgaacctggaccagaatgaatttgctggcttctcctacaccaaccctgagtttgtgatcaacgtgtag

SEQ ID NO: 21322 - DNA, 786 bp, synthetic construct
  misc_feature 1..786: note = Description of Artificial Sequence: Synthetic coding sequence
  source 1..786: mol_type = other DNA
atgagggagagcgccctggagcggggccctgtgcctgaggccccagctgggggccctgtgcatgctgtgacagtggtgaccctgctggagaagctggcctccatgctggagaccctgcgggagcggcagggcggcctggcccggcggcagggcggcctggccggctctgtgcggcgcatccagagcggcctgggcgccctgagccgcagccatgacaccaccagcaacaccctggcccagctgctggccaaggccgagcgggtgagcagccacgccaatgctgcccaggagagagctgtgagaagagctgcccaggtgcagaggctggaggccaaccacggcctgctggtggcccggggcaagctgcacgtgctgctcttcaaggaggagggggaggtgcctgccagcgccttccagaaggcccctgagcccctgggccctgctgaccagagcgagctgggccctgagcagctggaggccgaggtgggggagagcagtgatgaggagcctgtggagagccgggcccagaggctgcggaggacaggcctgcagaaggtgcagagcctgcggcgggccctgagcggcaggaaaggacctgctgcccccccacccacccctgtgaagccaccccggctgggccctggccgctctgctgaggcccagcctgaggcccagcctgccctggagcccaccctggagcctgagcccccccaggacacagaggaggaccccggccggcctggagctgctgaggaggccctgctgcagatggagagcgtggcctag

SEQ ID NO: 21323 - DNA, 2214 bp, synthetic construct
  misc_feature 1..2214: note = Description of Artificial Sequence: Synthetic coding sequence
  source 1..2214: mol_type = other DNA
atggtggtgttcaacggcctgctgaagatcaagatctgtgaggccgtgtccctgaagcccacagcctggagcctgcggcatgctgtgggcccccggccccagaccttcctgctggacccctacatcgccctgaatgtggatgacagcagaattggccagacagccaccaagcagaagaccaacagccctgcctggcatgatgaatttgtgacagatgtgtgcaatggaaggaagattgagctggccgtgttccatgatgcccccatcggctatgatgactttgtggccaactgcaccatccagtttgaggagctgctgcagaatggcagccgccactttgaggactggattgacctggagcctgagggccgggtgtatgtgatcatcgacctgagcggcagcagtggagaggcccccaaggacaatgaggagagggtcttccgggagaggatgaggcccaggaagaggcagggcgctgtgagaagaagagtgcaccaggtgaatggccacaagttcatggccacctacctgcggcagcccacctactgcagccactgccgggacttcatctggggcgtcatcggcaagcagggctaccagtgccaggtgtgcacctgtgtggtgcacaagcgctgccacgagctgatcatcaccaagtgtgccggcctgaagaagcaggagaccccagaccaggtgggcagccagcgcttctctgtgaacatgccccacaagtttggcatccacaactacaaggtgcccaccttctgtgaccactgcggcagcctgctgtggggcctgctgcggcagggcctgcagtgcaaggtgtgcaagatgaatgtgcaccggcgctgtgagaccaacgtggcccccaactgtggggtggatgcccggggcatcgccaaggtgctggccgacctgggcgtgaccccagacaagatcaccaacagcggccagaggaggaagaagctgattgctggagctgagagcccccagcctgccagcggcagcagccccagtgaagaagatagaagcaagagcgcccccaccagcccctgtgaccaggagatcaaggagctggagaacaacatcaggaaggccctgagctttgacaacagaggagaggagcaccgggccgccagcagcccagatggccagctgatgagccctggagaaaatggagaggtgcggcagggccaggccaagaggctgggcctggatgagttcaacttcatcaaggtgctgggcaagggcagctttgggaaggtgatgctggccgagctgaagggcaaggatgaggtgtatgctgtgaaggtgctgaagaaggatgtgatcctgcaggatgatgatgtggactgcaccatgacagagaagaggatcctggccctggccaggaagcacccctacctgacccagctgtactgctgcttccagaccaaggacaggctcttctttgtgatggagtatgtgaatggaggagacctgatgttccagatccagaggagcaggaagtttgatgagcccaggagccgcttctatgctgctgaggtgaccagcgccctgatgttcctgcaccagcacggcgtcatctacagagacctgaagctggacaacatcctgctggatgctgagggccactgcaagctggccgactttggcatgtgcaaggagggcatcctgaatggagtgaccaccaccaccttctgtggcaccccagactacatcgcccctgagatcctgcaggagctggagtatggccccagcgtggactggtgggccctgggcgtgctgatgtatgagatgatggccggccagcccccatttgaagctgacaatgaagatgacctgtttgagagcatcctgcatgatgatgtgctgtaccctgtgtggctgagcaaggaggccgtgtccatcctgaaggccttcatgaccaagaacccccacaagaggctgggctgtgtggccagccagaatggagaagatgccatcaagcagcaccccttcttcaaggagattgactgggtgctgctggagcagaagaagatcaagccacccttcaagccccgcatcaagaccaagagagatgtgaacaactttgaccaggacttcacccgggaggagcctgtgctgaccctggtggatgaggccatcgtgaagcagatcaaccaggaggagttcaagggcttctcctactttggagaggacctgatgccctag

SEQ ID NO: 21324 - DNA, 384 bp, synthetic construct
  misc_feature 1..384: note = Description of Artificial Sequence: Synthetic coding sequence
  source 1..384: mol_type = other DNA
atggtggtgttcaacggcctgctgaagatcaagatctgtgaggccgtgtccctgaagcccacagcctggagcctgcggcatgctgtgggcccccggccccagaccttcctgctggacccctacatcgccctgaatgtggatgacagcagaattggccagacagccaccaagcagaagaccaacagccctgcctggcatgatgaatttgtgacagatgtgtgcaatggaaggaagattgagctggccgtgttccatgatgcccccatcggctatgatgactttgtggccaactgcaccatccagtttgaggagctgctgcagaatggcagccgccactttgaggactggattgacctggagcctgagggccgggtgtatgtgtag

SEQ ID NO: 21325 - DNA, 2094 bp, synthetic construct
  misc_feature 1..2094: note = Description of Artificial Sequence: Synthetic coding sequence
  source 1..2094: mol_type = other DNA
atggccggcctgggccctggggtgggggacagcgagggcggcccccggcccctcttctgcaggaagggggccctgcggcagaaggtggtgcatgaggtgaagagccacaagttcaccgcccgcttcttcaagcagcccaccttctgcagccactgcacagacttcatctggggcatcggcaagcagggcctgcagtgccaggtgtgcagctttgtggtgcaccggcgctgccacgagtttgtgacctttgagtgccctggggccggcaagggcccccagacagatgaccccaggaacaagcacaagttccggctgcacagctacagcagccccaccttctgtgaccactgcggcagcctgctgtatggcctggtgcaccagggcatgaagtgcagctgctgtgagatgaatgtgcaccggcgctgtgtgcgctctgtgcccagcctgtgtggggtggaccacacagaaagaagaggccgcctgcagctggagatccgggcccccacagcagatgagatccacgtgacagtgggggaggccaggaacctgatccccatggaccccaacggcctgagtgacccctacgtgaagctgaagctgatcccagaccccaggaacctgaccaagcagaagaccaggacagtgaaggccaccctgaaccctgtgtggaatgagacctttgtgttcaacctgaagccaggagatgtggagcggcggctgtctgtggaggtgtgggactgggacaggaccagcagaaatgacttcatgggcgccatgagctttggagtgtctgagctgctgaaggcccctgtggatggctggtacaagctgctgaaccaggaggagggggagtactacaacgtgcctgtggctgatgctgacaactgcagcctgctgcagaagtttgaggcctgcaactaccccctggagctgtatgaaagagtgaggatgggccccagcagcagccccatccccagccccagccccagccccacagaccccaagcgctgcttctttggagccagccctggccgcctgcacatcagtgacttctccttcctgatggtgctgggcaagggcagctttgggaaggtgatgctggccgagcggcggggcagtgatgagctgtatgccatcaagatcctgaagaaggatgtgattgtgcaggatgatgatgtggactgcaccctggtggagaagagggtgctggccctgggcggccggggccctgggggccggccccacttcctgacccagctgcacagcaccttccagaccccagaccggctgtactttgtgatggagtatgtgactggaggagacctgatgtaccacatccagcagctgggcaagttcaaggagccccatgctgccttctatgctgctgagatcgccatcggcctcttcttcctgcacaaccagggcatcatctacagagacctgaagctggacaacgtgatgctggatgctgagggccacatcaagatcacagactttggcatgtgcaaggaaaatgtgtttcctggcaccaccaccaggaccttctgtggcaccccagactacatcgcccctgagatcatcgcctaccagccctacggcaagtctgtggactggtggagctttggagtgctgctgtatgagatgctggccggccagcccccatttgatggagaagatgaggaggagctgttccaggccatcatggagcagacagtgacctaccccaagagcctgagccgggaggccgtggccatctgcaagggcttcctgaccaagcaccctgggaagaggctgggcagcggcccagatggagagcccaccatccgggcccacggcttcttccgctggattgactgggagcggctggagcggctggagatccccccacccttccggccccggccctgtggccgctctggagaaaattttgacaagttcttcacccgggccgccccagccctgaccccaccagaccggctggtgctggccagcattgaccaggccgacttccagggcttcacctacgtgaacccagactttgtgcacccagatgcccggagccccaccagccctgtgcctgtgcctgtgatgtag

SEQ ID NO: 21326 - DNA, 984 bp, synthetic construct
  misc_feature 1..984: note = Description of Artificial Sequence: Synthetic coding sequence
  source 1..984: mol_type = other DNA
atggccggcctgggccctggggtgggggacagcgagggcggcccccggcccctcttctgcaggaagggggccctgcggcagaaggtggtgcatgaggtgaagagccacaagttcaccgcccgcttcttcaagcagcccaccttctgcagccactgcacagacttcatctggggcatcggcaagcagggcctgcagtgccaggtgtgcagctttgtggtgcaccggcgctgccacgagtttgtgacctttgagtgccctggggccggcaagggcccccagacagatgaccccaggaacaagcacaagttccggctgcacagctacagcagccccaccttctgtgaccactgcggcagcctgctgtatggcctggtgcaccagggcatgaagtgcagctgctgtgagatgaatgtgcaccggcgctgtgtgcgctctgtgcccagcctgtgtggggtggaccacacagaaagaagaggccgcctgcagctggagatccgggcccccacagcagatgagatccacgtgacagtgggggaggccaggaacctgatccccatggaccccaacggcctgagtgacccctacgtgaagctgaagctgatcccagaccccaggaacctgaccaagcagaagaccaggacagtgaaggccaccctgaaccctgtgtggaatgagacctttgtgttcaacctgaagccaggagatgtggagcggcggctgtctgtggaggtgtgggactgggacaggaccagcagaaatgacttcatgggcgccatgagctttggagtgtctgagctgctgaaggcccctgtggatggctggctggtgaccaccccctggaactgcatgagcggctgcggctgggcccccctgcccctgcccagcccccccctgcccctggtgccccccacccccagcgctgccagcagcggccgggtgcaggatgcctgcaccagccccaccagcgccagctcctggttctag

SEQ ID NO: 21327 - DNA, 2133 bp, synthetic construct
  misc_feature 1..2133: note = Description of Artificial Sequence: Synthetic coding sequence
  source 1..2133: mol_type = other DNA
atggccggcctgggccctggggtgggggacagcgagggcggcccccggcccctcttctgcaggaagggggccctgcggcagaaggtggtgcatgaggtgaagagccacaagttcaccgcccgcttcttcaagcagcccaccttctgcagccactgcacagacttcatctggggcatcggcaagcagggcctgcagtgccaggtgtgcagctttgtggtgcaccggcgctgccacgagtttgtgacctttgagtgccctggggccggcaagggcccccagacagatgaccccaggaacaagcacaagttccggctgcacagctacagcagccccaccttctgtgaccactgcggcagcctgctgtatggcctggtgcaccagggcatgaagtgcagctgctgtgagatgaatgtgcaccggcgctgtgtgcgctctgtgcccagcctgtgtggggtggaccacacagaaagaagaggccgcctgcagctggagatccgggcccccacagcagatgagatccacgtgacagtgggggaggccaggaacctgatccccatggaccccaacggcctgagtgacccctacgtgaagctgaagctgatcccagaccccaggaacctgaccaagcagaagaccaggacagtgaaggccaccctgaaccctgtgtggaatgagacctttgtgttcaacctgaagccaggagatgtggagcggcggctgtctgtggaggtgtgggactgggacaggaccagcagaaatgacttcatgggcgccatgagctttggagtgtctgagctgctgaaggcccctgtggatggctggtacaagctgctgaaccaggaggagggggagtactacaacgtgcctgtggctgatgctgacaactgcagcctgctgcagaagtttgaggcctgcaactaccccctggagctgtatgaaagagtgaggatgggccccagcagcagccccatccccagccccagccccagccccacagaccccaagcgctgcttctttggagccagccctggccgcctgcacatcagtgacttctccttcctgatggtgctgggcaagggcagctttgggaaggtgatgctggccgagcggcggggcagtgatgagctgtatgccatcaagatcctgaagaaggatgtgattgtgcaggatgatgatgtggactgcaccctggtggagaagagggtgctggccctgggcggccggggccctgggggccggccccacttcctgacccagctgcacagcaccttccagaccccagaccggctgtactttgtgatggagtatgtgactggaggagacctgatgtaccacatccagcagctgggcaagttcaaggagccccatgctgccttctatgctgctgagatcgccatcggcctcttcttcctgcacaaccagggcatcatctacagagacctgaagctggacaacgtgatgctggatgctgagggccacatcaagatcacagactttggcatgtgcaaggaaaatgtgtttcctggcaccaccaccaggaccttctgtggcaccccagactacatcgcccctgagatcatcgcctaccagccctacggcaagtctgtggactggtggagctttggagtgctgctgtatgagatgctggccggccagcccccatttgatggagaagatgaggaggagctgttccaggccatcatggagcagacagtgacctaccccaagagcctgagccgggaggccgtggccatctgcaagggcttcctgaccaagcaccctgggaagaggctgggcagcggcccagatggagagcccaccatccgggcccacggcttcttccgctggattgactgggagcggctggagcggctggagatccccccacccttccggccccggccctgtggccgctctggagaaaattttgacaagttcttcacccgggccgccccagccctgaccccaccagaccggctggtgctggccagcattgaccaggccgacttccagggcttcacctacgtgaacccagactttgtgcacccagatgcccggagccccaccagccctgtgcctgtgcctgtgatcagctgcaccccagccttccagctgtgcccccggggcttctag

SEQ ID NO: 21328 - DNA, 1647 bp, synthetic construct
  misc_feature 1..1647: note = Description of Artificial Sequence: Synthetic coding sequence
  source 1..1647: mol_type = other DNA
atgccccgcatctgtgacctgcgggtgtcccggcgctgggagggccccccagatggccgctgtgagatgaatgtgcacagaagatgtgtgcgctctgtgcccagcctgtgtggggtggaccacacagagcggcggggccgcctgcagctggagatccgggcccccacagcagatgagatccacgtgacagtgggggaggccaggaacctgatccccatggaccccaacggcctgagtgacccctacgtgaagctgaagctgatcccagaccccaggaacctgaccaagcagaagaccaggacagtgaaggccaccctgaaccctgtgtggaatgagacctttgtgttcaacctgaagccaggagatgtggagcggcggctgtctgtggaggtgtgggactgggacaggaccagcagaaatgacttcatgggcgccatgagctttggagtgtctgagctgctgaaggcccctgtggatggctggtacaagctgctgaaccaggaggagggggagtactacaacgtgcctgtggctgatgctgacaactgcagcctgctgcagaagtttgaggcctgcaactaccccctggagctgtatgagcgggtgaggatgggccccagcagcagccccatccccagccccagccccagccccacagaccccaagcgctgcttcttcggggccagccctggccgcctgcacatcagtgacttctccttcctgatggtgctgggcaagggcagctttgggaaggtgatgctggccgagcggcggggcagtgatgagctgtatgccatcaagatcctgaagaaggatgtgattgtgcaggatgatgatgtggactgcaccctggtggagaagagggtgctggccctgggcggccggggccctgggggccggccccacttcctgacccagctgcacagcaccttccagaccccagaccggctgtactttgtgatggagtatgtgactggaggagacctgatgtaccacatccagcagctgggcaagttcaaggagccccacgccgccttctacgccgctgagatcgccatcggcctcttcttcctgcacaaccagggcatcatctacagagacctgaagctggacaacgtgatgctggatgctgagggccacatcaagatcacagactttggcatgtgcaaggaaaatgtgtttcctggcaccaccaccaggaccttctgtggcaccccagactacatcgcccctgagatcatcgcctaccagccctacggcaagtctgtggactggtggagctttggagtgctgctgtatgagatgctggccggccagttcctgaccaagcaccctgggaagaggctgggcagcggcccagatggagagcccaccatccgggcccacggcttcttccgctggattgactgggagcggctggagcggctggagatccccccacccttccggccccggccctgtggccgcagcggggagaactttgacaagttcttcaccagggctgccccagccctgaccccaccagaccggctggtgctggccagcattgaccaggccgacttccagggcttcacctacgtgaacccagactttgtgcacccagatgcccggagccccaccagccctgtgcctgtgcctgtgatgtag

SEQ ID NO: 21329 - DNA, 1779 bp, synthetic construct
  misc_feature 1..1779: note = Description of Artificial Sequence: Synthetic coding sequence
  source 1..1779: mol_type = other DNA
atgcccagcaggacaggccccaagatggagggcagcggcggccgggtgcggctgaaggcccactacggcggggacatcttcatcacctctgtggatgctgccaccacctttgaggagctgtgtgaggaggtgcgggacatgtgccgcctgcaccagcagcaccccctgaccctgaagtgggtggacagcgagggggacccctgcaccgtgagcagccagatggagctggaggaggccttccggctggcccggcagtgcagagatgagggcctcatcatccacgtgttccccagcaccccagagcagcccggcctgccctgccctggagaggacaagagcatctaccgccgcggggcccggcgctggaggaagctgtaccgggccaacggccacctgttccaggccaagcgcttcaacagaagagcctactgcggccagtgcagcgagcgcatctggggcctggcccggcagggctaccgctgcatcaactgcaagctgctggtgcacaagcgctgccacggcctggtgcccctgacctgcaggaagcacatggacagcgtgatgcccagccaggagccccctgtggatgacaagaatgaagatgctgacctgcccagcgaggagacagatggcatcgcctacatcagcagcagcaggaagcatgacagcatcaaggatgacagcgaggacctgaagcctgtgattgatggcatggatggcatcaagatcagccagggcctgggcctgcaggactttgacctgatccgggtcatcggccggggcagctatgccaaggtgctgctggtgcggctgaagaagaatgaccagatctatgccatgaaggtggtgaagaaggagctggtgcatgatgatgaggacatcgactgggtgcagacagagaagcacgtgtttgagcaggccagcagcaaccccttcctggtgggcctgcacagctgcttccagaccaccagccgcctcttcctggtgattgaatatgtgaatggaggagacctgatgttccacatgcagaggcagaggaagctgcctgaggagcacgcccgcttctatgctgctgagatctgcatcgccctgaacttcctgcacgagcggggcatcatctacagagacctgaagctggacaacgtgctgctggatgctgatggccacatcaagctgacagattatggcatgtgcaaggagggcctgggccctggggacaccaccagcaccttctgtggcacccccaactacatcgcccctgagatcctgcggggggaggagtatggcttctctgtggactggtgggccctgggcgtgctgatgtttgagatgatggccggccgcagcccctttgacatcatcacagacaacccagacatgaacacagaggactacctgttccaggtgatcctggagaagcccatccgcatcccccgcttcctgtctgtgaaggccagccacgtgctgaagggcttcctgaacaaggaccccaaggagcggctgggctgccggccccagacaggcttcagtgacatcaagagccacgccttcttccgcagcattgactgggacctgctggagaagaagcaggccctgccccccttccagccccagatcacagatgattatggcctggacaactttgacacccagttcaccagcgagcctgtgcagctgaccccagatgatgaagatgccatcaagagaattgaccagagcgagtttgagggctttgagtacatcaaccccctgctgctgagcacagaggagagcgtgtag

SEQ ID NO: 21330 - DNA, 1230 bp, synthetic construct
  misc_feature 1..1230: note = Description of Artificial Sequence: Synthetic coding sequence
  source 1..1230: mol_type = other DNA
atggattctgtgatgcccagccaggagccccctgtggatgacaagaatgaagatgctgacctgcccagcgaggagacagatggcatcgcctacatcagcagcagcaggaagcatgacagcatcaaggatgattctgaggacctgaagcctgtgattgatggcatggatggcatcaagatcagccagggcctgggcctgcaggactttgacctgatccgggtgattggccggggcagctatgccaaggtgctgctggtgcggctgaagaagaatgaccagatctatgccatgaaggtggtgaagaaggagctggtgcatgatgatgaagatattgactgggtgcagacagagaagcacgtgtttgagcaggccagcagcaaccccttcctggtgggcctgcacagctgcttccagaccaccagccgcctcttcctggtgattgaatatgtgaatggaggagacctgatgttccacatgcagaggcagaggaagctgcctgaggagcacgcccgcttctacgccgctgagatctgcatcgccctgaacttcctgcacgagcggggcatcatctacagagacctgaagctggacaacgtgctgctggatgctgatggccacatcaagctgacagattatggcatgtgcaaggagggcctgggccctggggacaccaccagcaccttctgtggcacccccaactacatcgcccctgagatcctgcggggggaggagtatggcttctctgtggactggtgggccctgggcgtgctgatgtttgagatgatggccggccgcagcccctttgacatcatcacagacaacccagacatgaacacagaggactacctgttccaggtgatcctggagaagcccatccgcatcccccgcttcctgtctgtgaaggccagccacgtgctgaagggcttcctgaacaaggaccccaaggagcggctgggctgccggccccagacaggcttcagtgacatcaagagccacgccttcttccgcagcattgactgggacctgctggagaagaagcaggccctgccccccttccagccccagatcacagatgattatggcctggacaactttgacacccagttcaccagcgagcctgtgcagctgaccccagatgatgaagatgccatcaagagaattgaccagagcgagtttgagggctttgagtacatcaaccccctgctgctgagcacagaggagagcgtgtag

SEQ ID NO: 21331 - DNA, 1230 bp, synthetic construct; identical to SEQ ID NO: 21330
  misc_feature 1..1230: note = Description of Artificial Sequence: Synthetic coding sequence
  source 1..1230: mol_type = other DNA

SEQ ID NO: 21332 - DNA, 1467 bp, synthetic construct
  misc_feature 1..1467: note = Description of Artificial Sequence: Synthetic coding sequence
  source 1..1467: mol_type = other DNA
atgctgacccccaggacagatgagagcatctaccgccgcggggcccggcgctggaggaagctgtaccgggccaacggccacctgttccaggccaagcgcttcaacagaagagcctactgcggccagtgcagcgagcgcatctggggcctggcccggcagggctaccgctgcatcaactgcaagctgctggtgcacaagcgctgccacggcctggtgcccctgacctgcaggaagcacatggacagcgtgatgcccagccaggagccccctgtggatgacaagaatgaagatgctgacctgcccagcgaggagacagatggcatcgcctacatcagcagcagcaggaagcatgacagcatcaaggatgacagcgaggacctgaagcctgtgattgatggcatggatggcatcaagatcagccagggcctgggcctgcaggactttgacctgatccgggtcatcggccggggcagctatgccaaggtgctgctggtgcggctgaagaagaatgaccagatctatgccatgaaggtggtgaagaaggagctggtgcatgatgatgaggacatcgactgggtgcagacagagaagcacgtgtttgagcaggccagcagcaaccccttcctggtgggcctgcacagctgcttccagaccaccagccgcctcttcctggtgattgaatatgtgaatggaggagacctgatgttccacatgcagaggcagaggaagctgcctgaggagcacgcccgcttctatgctgctgagatctgcatcgccctgaacttcctgcacgagcggggcatcatctacagagacctgaagctggacaacgtgctgctggatgctgatggccacatcaagctgacagattatggcatgtgcaaggagggcctgggccctggggacaccaccagcaccttctgtggcacccccaactacatcgcccctgagatcctgcggggggaggagtatggcttctctgtggactggtgggccctgggcgtgctgatgtttgagatgatggccggccgcagcccctttgacatcatcacagacaacccagacatgaacacagaggactacctgttccaggtgatcctggagaagcccatccgcatcccccgcttcctgtctgtgaaggccagccacgtgctgaagggcttcctgaacaaggaccccaaggagcggctgggctgccggccccagacaggcttcagtgacatcaagagccacgccttcttccgcagcattgactgggacctgctggagaagaagcaggccctgccccccttccagccccagatcacagatgattatggcctggacaactttgacacccagttcaccagcgagcctgtgcagctgaccccagatgatgaagatgccatcaagagaattgaccagagcgagtttgagggctttgagtacatcaaccccctgctgctgagcacagaggagagcgtgtag

SEQ ID NO: 21333 - DNA, 78 bp, synthetic construct
  misc_feature 1..78: note = Description of Artificial Sequence: Synthetic coding sequence
  source 1..78: mol_type = other DNA
atggattctgtgatgcccagccaggagccccctgtggatgacaagaatgaagatgctgacctgcccagcgaggagtag

SEQ ID NO: 21334 - DNA, 249 bp, synthetic construct
  misc_feature 1..249: note = Description of Artificial Sequence: Synthetic coding sequence
  source 1..249: mol_type = other DNA
atggattctgtgatgcccagccaggagccccctgtggatgacaagaatgaagatgctgacctgcccagcgaggagacagatggcatcgcctacatcagcagcagcaggaagcatgacagcatcaaggatgattctgaggacctgaagcctgtgattgatggcatggatggcatcaagatcagccagggcctgggcctgcaggactttgacctgatccgggtgattggccggggcagctatgccaagtag

SEQ ID NO: 21335 - DNA, 297 bp, synthetic construct
  misc_feature 1..297: note = Description of Artificial Sequence: Synthetic coding sequence
  source 1..297: mol_type = other DNA
atggattctgtgatgcccagccaggagccccctgtggatgacaagaatgaagatgctgacctgcccagcgaggagacagatggcatcgcctacatcagcagcagcaggaagcatgacagcatcaaggatgattctgaggacctgaagcctgtgattgatggcatggatggcatcaagatcagccagggcctgggcctgcaggactttgacctgatccgggtgattggccggggcagctatgccaaggtgctgctggtgcggctgaagaagaatgaccagatctatgccatgaagtag

SEQ ID NO: 21336 - DNA, 330 bp, synthetic construct
  misc_feature 1..330: note = Description of Artificial Sequence: Synthetic coding sequence
  source 1..330: mol_type = other DNA
atggattctgtgatgcccagccaggagccccctgtggatgacaagaatgaagatgctgacctgcccagcgaggagacagatggcatcgcctacatcagcagcagcaggaagcatgacagcatcaaggatgattctgaggacctgaagcctgtgattgatggcatggatggcatcaagatcagccagggcctgggcctgcaggactttgacctgatccgggtgattggccggggcagctatgccaaggtgctgctggtgcggctgaagaagaatgaccagatctatgccatgaaggtggtgaagaaggagctggtgcatgatgatgaatag

SEQ ID NO: 21337 - DNA, 141 bp, synthetic construct
  misc_feature 1..141: note = Description of Artificial Sequence: Synthetic coding sequence
  source 1..141: mol_type = other DNA
atggattctgtgatgcccagccaggagccccctgtggatgacaagaatgaagatgctgacctgcccagcgaggagacagatggcatcgcctacatcagcagcagcaggaagcatgacagcatcaaggatgattctgagtag

SEQ ID NO: 21338 - DNA, 222 bp, synthetic construct
  misc_feature 1..222: note = Description of Artificial Sequence: Synthetic coding sequence
  source 1..222: mol_type = other DNA
atggattctgtgatgcccagccaggagccccctgtggatgacaagaatgaagatgctgacctgcccagcgaggagacagatggcatcgcctacatcagcagcagcaggaagcatgacagcatcaaggatgattctgaggacctgaagcctgtgattgatggcatggatggcatcaagatcagccagggcctgggcctgcaggactttgacctgatcagatag

SEQ ID NO: 21339 - DNA, 66 bp, synthetic construct
  misc_feature 1..66: note = Description of Artificial Sequence: Synthetic coding sequence
  source 1..66: mol_type = other DNA
atggattctgtgatgcccagccaggagccccctgtggatgacaagaatgaagatgctgacctgtag

SEQ ID NO: 21340 - DNA, 216 bp, synthetic construct
  misc_feature 1..216: note = Description of Artificial Sequence: Synthetic coding sequence
  source 1..216: mol_type = other DNA
atggattctgtgatgcccagccaggagccccctgtggatgacaagaatgaagatgctgacctgcccagcgaggagacagatggcatcgcctacatcagcagcagcaggaagcatgacagcatcaaggatgattctgaggacctgaagcctgtgattgatggcatggatggcatcaagatcagccagggcctgggcctgcaggactttgacctgtag

SEQ ID NO: 21341 - DNA, 417 bp, synthetic construct
  misc_feature 1..417: note = Description of Artificial Sequence: Synthetic coding sequence
  source 1..417: mol_type = other DNA
atgatcagcctgacagacacccagaagattggcatgggcctgactggatttggagtcttcttcctgttcttcggcatgatcctcttctttgacaaggccctgctggccatcggaaatgtgctgtttgtggccggcctggccttcgtcatcggcctggagaggaccttccgcttcttcttccagaagcacaagatgaaggccaccggcttcttcctgggcggcgtgtttgtggtgctgattggctggcccctgattggcatgatctttgagatctacggcttcttcctgctcttccggggcttcttccctgtggtggtgggcttcatccggcgggtgcctgtgctgggcagcctgctgaacctgcccggcatccgcagctttgtggacaaggtgggggagagcaacaacatggtgtag

SEQ ID NO: 21342 - DNA, 702 bp, synthetic construct
  misc_feature 1..702: note = Description of Artificial Sequence: Synthetic coding sequence
  source 1..702: mol_type = other DNA
atggacagcccagaagatgctgacctcttccacagcgaggagatcaaggcccctgagaaggaggagttcctggcctggcagcacgacctggaggtgaatgacaaggccccagcccaggcccggcccaccgtcttccgctggacaggaggcggcaaggaggtgtacctgagcggcagcttcaacaactggagcaagctgcccctgaccaggagccacaacaactttgtggccatcctggacctgcctgagggggagcaccagtacaagttctttgtggatggccagtggacccatgaccccagcgagcccatcgtgaccagccagctgggcaccgtgaacaacatcatccaggtgaagaagacagactttgaggtgtttgatgccctgatggtggacagccagaagtgcagtgatgtgtctgagctgagcagcagccccccaggcccctaccaccaggagccctacgtgtgcaagccagaggagcgcttccgggccccacccatcctgcccccccacctgctgcaggtgatcctgaacaaggacaccggcatcagctgtgaccctgccctgctgcctgagcccaaccacgtgatgctgaaccacctgtatgccctgagcatcaaggatggagtgatggtgctgagcgccacccaccgctacaagaagaagtatgtgaccaccctgctgtacaagcccatctag

SEQ ID NO: 21343 - DNA, 813 bp, synthetic construct
  misc_feature 1..813: note = Description of Artificial Sequence: Synthetic coding sequence
  source 1..813: mol_type = other DNA
atgggcaacaccagcagcgagagagctgccctggagcggcacggcggccacaagaccccaagaagagacagcagcggcggcaccaaggatggagaccggcccaagatcctgatggacagcccagaagatgctgacctcttccacagcgaggagatcaaggcccctgagaaggaggagttcctggcctggcagcacgacctggaggtgaatgacaaggccccagcccaggcccggcccaccgtcttccgctggacaggaggcggcaaggaggtgtacctgagcggcagcttcaacaactggagcaagctgcccctgaccaggagccacaacaactttgtggccatcctggacctgcctgagggggagcaccagtacaagttctttgtggatggccagtggacccatgaccccagcgagcccatcgtgaccagccagctgggcaccgtgaacaacatcatccaggtgaagaagacagactttgaggtgtttgatgccctgatggtggacagccagaagtgcagtgatgtgtctgagctgagcagcagccccccaggcccctaccaccaggagccctacgtgtgcaagccagaggagcgcttccgggccccacccatcctgcccccccacctgctgcaggtgatcctgaacaaggacaccggcatcagctgtgaccctgccctgctgcctgagcccaaccacgtgatgctgaaccacctgtatgccctgagcatcaaggatggagtgatggtgctgagcgccacccaccgctacaagaagaagtatgtgaccaccctgctgtacaagcccatctag

SEQ ID NO: 21344 - DNA, 12384 bp, synthetic construct
  misc_feature 1..12384: note = Description of Artificial Sequence: Synthetic coding sequence
  source 1..12384: mol_type = other DNA
atggccggcagcggggccggcgtgcgctgcagcctgctgcggctgcaggagaccctgtctgctgctgacagatgtggggccgccctggccggccaccagctgatccggggcctgggccaggagtgtgtgctgagcagcagccctgctgtgctggccctgcagaccagcctggtgttcagccgggactttggcctgctggtgtttgtgaggaagagcctgaacagcattgagttccgggagtgccgggaggagatcctgaagttcctgtgcatcttcctggagaagatgggccagaagatcgccccctacagcgtggagatcaagaacacctgcacctctgtgtacaccaaggaccgggccgccaagtgcaagatcccagccctggacctgctgatcaagctgctgcagaccttccgcagcagccggctgatggatgagttcaagattggagagctgttcagcaagttctatggagagctggccctgaagaagaagatcccagacacagtgctggagaaggtgtatgagctgctgggcctgctgggggaggtgcaccccagcgagatgatcaacaatgctgagaacctcttccgggccttcctgggggagctgaagacccagatgaccagcgctgtgcgggagcccaagctgcctgtgctggccggctgcctgaagggcctgagcagcctgctgtgcaacttcaccaagtccatggaggaggacccccagaccagccgggagatcttcaactttgtgctgaaggccatccggccccagattgacctgaagagatatgctgtgcccagcgctggcctgcggctgtttgccctgcacgccagccagttcagcacctgcctgctggacaactacgtgtccctgtttgaggtgctgctgaagtggtgtgcccacaccaacgtggagctgaagaaggccgccctgagcgccctggagagcttcctgaagcaggtgagcaacatggtggccaagaatgctgagatgcacaagaacaagctgcagtacttcatggagcagttctacggcatcatcagaaatgtggacagcaacaacaaggagctgagcatcgccatccggggctacggcctgtttgctggcccctgcaaggtgatcaatgccaaggatgtggacttcatgtatgtggagctgatccagcgctgcaagcagatgttcctgacccagacagacacaggagatgacagagtgtaccagatgcccagcttcctgcagagcgtggcctctgtgctgctgtacctggacacagtgcctgaggtgtacacccctgtgctggagcacctggtggtgatgcagattgacagcttcccccagtacagccccaagatgcagctggtgtgctgccgggccatcgtgaaggtgttcctggccctggccgccaagggccctgtgctgaggaactgcatcagcacagtggtgcaccagggcctcatccgcatctgcagcaagcctgtggtgctgcccaagggccctgagagcgagagcgaggaccaccgggccagcggggaggtgaggacaggcaagtggaaggtgcccacctacaaggactatgtggacctcttccgccacctgctgagcagtgaccagatgatggacagcatcctggctgatgaggccttcttctctgtgaacagcagcagcgagagcctgaaccacctgctgtatgatgaatttgtgaagtctgtgctgaagatcgtggagaagctggacctgaccctggagatccagacagtgggggagcaggagaatggagatgaggcccctggggtgtggatgatccccaccagtgaccctgctgccaacctgcacccagccaagcccaaggacttcagcgccttcatcaacctggtggagttctgccgggagatcctgcctgagaagcaggccgagttctttgagccctgggtgtacagcttctcctatgagctgatcctgcagagcacccggctgcccctcatcagcggcttctacaagctgctgagcatcaccgtgagaaatgccaagaagatcaagtactttgaaggagtgagccccaagagcctgaagcacagccctgaggaccctgagaagtacagctgctttgccctgtttgtgaagtttgggaaggaggtggccgtgaagatgaagcagtacaaggatgagctgctggccagctgcctgaccttcctgctgagcctgccccacaacatcatcgagctggatgtgcgggcctacgtgcctgccctgcagatggccttcaagctgggcctgagctacacccccctggccgaggtgggcctgaatgccctggaggagtggagcatctacatcgacagacatgtgatgcagccctactacaaggacatcctgccctgcctggatggctacctgaagaccagcgccctgagtgatgagaccaagaacaactgggaggtgtctgccctgagcagagctgcccagaagggcttcaacaaggtggtgctgaagcacctgaagaagaccaagaacctgagcagcaatgaggccatcagcctggaggagatccgcatccgggtggtgcagatgctgggcagcctgggcggccagatcaacaagaacctgctgactgtgaccagcagtgatgagatgatgaagagctatgtggcctgggaccgggagaagaggctgagctttgctgtgcccttccgggagatgaagcctgtgatcttcctggatgtgttcctgccccgggtgacagagctggccctgacagccagtgaccggcagaccaaggtggccgcctgtgagctgctgcacagcatggtgatgttcatgctgggcaaggccacccagatgcctgagggcggccagggcgccccacccatgtaccagctgtacaagaggaccttccctgtgctgctgcggctggcctgtgatgtggaccaggtgacccggcagctgtatgagcccctggtgatgcagctgatccactggttcaccaacaacaagaagtttgagagccaggacacagtggccctgctggaggccatcctggatggcatcgtggaccctgtggacagcaccctgcgggacttctgtggccgctgcatccgggagttcctgaagtggagcatcaagcagatcaccccccagcagcaggagaagagccctgtgaacaccaagagcctcttcaagaggctgtacagcctggccctgcaccccaatgccttcaagaggctgggcgccagcctggccttcaacaacatctaccgggagttccgggaggaggagagcctggtggagcagtttgtgtttgaggccctggtgatctacatggagagcctggccctggcccacgcagatgagaagagcctgggcaccatccagcagtgctgtgatgccatcgaccacctgtgccgcatcatcgagaagaagcacgtgtccctgaacaaggccaagaagaggcggctgccccggggcttcccccccagcgccagcctgtgcctgctggacctggtgaagtggctgctggcccactgcggccggccccagacagagtgccgccacaagagcattgagctgttctacaagtttgtgcccctgctgcccggcaacagaagccccaacctgtggctgaaggatgtgctgaaggaggagggcgtgtccttcctgatcaacacctttgagggcggcggctgcggccagcccagcggcatcctggcccagcccaccctgctgtaccggggccccttcagcctgcaggccaccctgtgctggctggacctgctgctggccgccctggagtgctacaacaccttcatcggggagaggacagtgggcgccctgcaggtgctgggcacagaggcccagagcagcctgctgaaggctgtggccttcttcctggagagcatcgccatgcatgacatcatcgctgctgagaagtgcttcggcaccggggctgctggcaacagaaccagcccccaggagggggagcgctacaactacagcaaatgtactgtggtggtgcgcatcatggagttcaccaccaccctgctgaacaccagccctgagggctggaagctgctgaagaaggacctgtgcaacacccacctgatgagggtgctggtgcagaccctgtgtgagcccgccagcatcggcttcaacattggagatgtgcaggtgatggcccacctgcctgatgtgtgtgtgaacctgatgaaggccctgaagatgagcccctacaaggacatcctggagacccacctgcgggagaagatcacagcccagagcattgaggagctgtgtgctgtgaacctgtatggcccagatgcccaggtggacaggagccggctggccgctgtggtgtctgcctgcaagcagctgcaccgggccggcctgctgcacaacatcctgcccagccagagcacagacctgcaccacagcgtgggcacagagctgctgagcctggtgtacaagggcatcgcccctggagatgagcggcagtgcctgcccagcctggacctgagctgcaagcagctggccagcggcctgctggagctggcctttgccttcggcggcctgtgtgagcggctggtgtccctgctgctgaacccagctgtgctgagcacagccagcctgggcagcagccagggcagcgtcatccacttcagccacggggagtacttctacagcctcttcagcgagaccatcaacacagagctgctgaagaacctggacctggccgtgctggagctgatgcagagctctgtggacaacaccaagatggtgtctgctgtgctgaatggcatgctggaccagagcttccgggagcgggccaaccagaagcaccagggcctgaagctggccaccaccatcctgcagcactggaagaagtgtgacagctggtgggccaaggacagccccctggagaccaagatggctgtgctggccctgctggccaagatcctgcagattgacagctctgtgtccttcaacaccagccacggcagcttccctgaggtgttcaccacctacatcagcctgctggccgacaccaagctggacctgcacctgaagggccaggccgtgaccctgctgcccttcttcaccagcctgaccggcggcagcctggaggagctgcggcgggtgctggagcagctgattgtggcccacttccccatgcagagccgggagttccccccaggcaccccccgcttcaacaactacgtggactgcatgaagaagttcctggatgccctggagctgagccagagccccatgctgctggagctgatgacagaggtgctgtgccgggagcagcagcacgtgatggaggagctgttccagagcagcttccgccgcatcgcccggcggggcagctgtgtgacccaggtgggcctgctggagagcgtgtatgagatgttcaggaaggatgacccccggctgtccttcacccggcagagctttgtggacaggagcctgctgaccctgctgtggcactgcagcctggatgccctgcgggagttcttcagcaccatcgtggtggatgccattgatgtgctgaagagccgcttcaccaagctgaatgaaagcacctttgacacccagatcaccaagaagatgggctactacaagatcctggatgtgatgtacagccggctgcccaaggatgatgtgcacgccaaggagagcaagatcaaccaggtgttccacggcagctgcatcacagagggcaatgagctgaccaagaccctcatcaagctgtgctatgatgccttcacagagaacatggccggggagaaccagctgctggagcggcggcggctgtaccactgtgccgcctacaactgtgccatcagcgtcatctgctgcgtgttcaatgagctgaagttctaccagggcttcctgttcagcgagaagccagagaagaacctgctgatctttgagaacctgattgacctgaagaggcgctacaacttccctgtggaggtggaggtgcccatggagaggaagaagaagtacatcgagatcaggaaggaggcccgggaggccgccaatggagacagtgatggccccagctacatgagcagcctgagctacctggccgacagcaccctgtctgaggagatgagccagtttgacttcagcactggagtgcagagctacagctacagcagccaggaccccaggcctgccaccggccgcttcagaagaagagagcagagggaccccaccgtgcatgatgatgtgctggagctggagatggatgagctgaacagacatgagtgcatggcccccctgacagccctggtgaagcacatgcacaggagcctgggccccccccagggcgaggaggacagcgtgccccgggacctgcccagctggatgaagttcctgcacggcaagctgggcaaccccatcgtgcccctgaacatccgcctcttcctggccaagctggtgatcaacacagaggaggtgttccggccctatgccaagcactggctgagccccctgctgcagctggccgccagcgagaacaacggcggggagggcatccactacatggtggtggagatcgtggccaccatcctgtcctggacaggcctggccacccccaccggggtgcccaaggatgaggtgctggccaaccggctgctgaacttcctgatgaagcacgtgttccaccccaagagagctgtgttccgccacaacctggagatcatcaagaccctggtggagtgctggaaggactgcctgagcatcccctaccgcctcatctttgagaagttcagcggcaaggaccccaacagcaaggacaacagcgtgggcatccagctgctgggcatcgtgatggccaatgacctgcccccctatgacccccagtgtggcatccagagcagcgagtacttccaggccctggtgaacaacatgagctttgtgcgctacaaggaggtgtatgctgctgctgctgaggtgctgggcctcatcctgcgctacgtgatggagaggaagaacatcctggaggagagcctgtgtgagctggtggccaagcagctgaagcagcaccagaacaccatggaggacaagttcatcgtgtgcctgaacaaggtgaccaagagcttcccccccctggccgaccgcttcatgaatgctgtgttcttcctgctgcccaagttccatggagtgctgaagaccctgtgcctggaggtggtgctgtgccgggtggagggcatgacagagctgtacttccagctgaagagcaaggactttgtgcaggtgatgaggcacagagatgatgagcggcagaaggtgtgcctggacatcatctacaagatgatgcccaagctgaagcctgtggagctgcgggagctgctgaaccctgtggtggagtttgtgagccaccccagcaccacctgccgggagcagatgtacaacatcctgatgtggattcatgacaactacagagatcctgagagcgagacagacaatgacagccaggagatcttcaagctggccaaggatgtgctgatccagggcctgattgatgagaaccctggcctgcagctgatcatccggaacttctggagccatgagacccggctgcccagcaacaccctggaccggctgctggccctgaacagcctgtacagccccaagattgaggtgcacttcctgagcctggccaccaacttcctgctggagatgacctccatgagcccagactaccccaaccccatgtttgagcaccccctgtctgaatgtgagttccaggagtacaccatcgacagcgactggaggttccgcagcacagtgctgacccccatgtttgtggagacccaggccagccagggcaccctgcagaccaggacccaggagggcagcctgagcgcccgctggcctgtggccggccagatccgggccacccagcagcagcacgacttcaccctgacccagacagcagatggccgcagcagctttgactggctgaccggcagcagcacagaccccctggtggaccacaccagccccagcagtgacagcctgctgtttgcccacaagaggtctgagcggctgcagagggcccccctgaagtctgtgggccctgactttgggaagaagaggctgggcctgcctggagatgaggtggacaacaaggtgaagggagctgctggccgcacagacctgctgcggctgcggcggcgcttcatgagggaccaggagaagctgagcctgatgtatgccaggaaaggagtggccgagcagaagcgggagaaggagatcaagtctgagctgaagatgaagcaggatgcccaggtggtgctgtaccgcagctaccgccacggggacctgcctgacatccagatcaagcacagcagcctcatcacccccctgcaggccgtggcccagagggaccccatcatcgccaagcagctgttcagcagcctcttcagcggcatcctgaaggagatggacaagttcaagaccctgtctgagaagaacaacatcacccagaagctgctgcaggacttcaaccgcttcctgaacaccaccttctccttcttccccccatttgtgtcctgcatccaggacatcagctgccagcacgccgccctgctgagcctggaccctgctgctgtgtctgctggctgcctggccagcctgcagcagcctgtgggcatccggctgctggaggaggccctgctgcggctgctgcctgctgagctgcctgccaagagggtgcggggcaaggcccggctgcccccagatgtgctgcgctgggtggagctggccaagctgtaccgcagcatcggggagtatgatgtgctgcggggcatcttcaccagcgagatcggcaccaagcagatcacccagagcgccctgctggccgaggcccggagtgactacagcgaggccgccaagcagtatgatgaggccctgaacaagcaggactgggtggatggagagcccacagaggccgagaaggacttctgggagctggccagcctggactgctacaaccacctggccgagtggaagagcctggagtactgcagcacagccagcattgacagtgaaaatcctccagacctgaacaagatctggagcgagcccttctaccaggagacctacctgccctacatgatccgcagcaagctgaagctgctgctgcagggcgaggccgaccagagcctgctgaccttcatcgacaaggccatgcatggagagctgcagaaggccatcctggagctgcactacagccaggagctgagcctgctgtacctgctgcaggatgatgtggaccgggccaagtactacatccagaatggcatccagagcttcatgcagaactacagcagcattgatgtgctgctgcaccagagccggctgaccaagctgcagagcgtgcaggccctgacagagatccaggagttcatctccttcatcagcaagcagggcaacctgagcagccaggtgcccctgaagaggctgctgaacacctggaccaaccgctacccagatgccaagatggaccccatgaacatctgggatgacatcatcaccaaccgctgcttcttcctgagcaagattgaggagaagctgacccccctgcctgaggacaacagcatgaatgtggaccaggatggagaccccagcgacaggatggaggtgcaggagcaggaggaggacatcagcagcctcatccgcagctgcaagttctccatgaagatgaagatgattgacagcgccaggaagcagaacaacttcagcctggccatgaagctgctgaaggagctgcacaaggagagcaagaccagagatgactggctggtgtcctgggtgcagagctactgccgcctgagccactgccgcagccgcagccagggctgcagcgagcaggtgctgactgtgctgaagacagtgtccctgctggatgagaacaacgtgtcctcctacctgagcaagaacatcctggccttccgggaccagaacatcctgctgggcaccacctaccgcatcatcgccaatgccctgagcagcgagcccgcctgcctggccgagattgaggaggacaaggcccggcgcatcctggagctgagcggcagcagcagtgaagattctgagaaggtgattgctggcctgtaccagagggccttccagcacctgtctgaggccgtgcaggccgctgaggaggaggcccagcccccatcctggagctgtggccctgctgctggggtgattgatgcctacatgaccctggccgacttctgtgaccagcagctgaggaaggaggaggagaatgcctctgtgattgattctgctgagctgcaggcctacccagccctggtggtggagaagatgctgaaggccctgaagctgaacagcaatgaggcccggctgaagttcccccggctgctgcagatcatcgagcgctacccagaggagaccctgagcctgatgaccaaggagatcagctctgtgccctgctggcagttcatctcctggatcagccacatggtggccctgctggacaaggaccaggccgtggccgtgcagcacagcgtggaggagatcacagacaactacccccaggccatcgtgtaccccttcatcatcagcagcgagagctacagcttcaaggacaccagcacaggccacaagaacaaggagtttgtggcccgcatcaagagcaagctggaccagggcggcgtcatccaggacttcatcaatgccctggaccagctgagcaaccctgagctgctcttcaaggactggagcaatgatgtgcgggcagagctggccaagacccctgtgaacaagaagaacatcgagaagatgtatgaaagaatgtatgctgccctgggggaccccaaggcccctggcctgggcgccttccggaggaagttcatccagaccttcggcaaggagtttgacaagcactttggaaaaggaggcagcaagctgctgaggatgaagctgagtgacttcaatgacatcaccaacatgctgctgctgaagatgaacaaggacagcaagcccccaggcaacctgaaggaatgtagcccctggatgtctgacttcaaggtggagttcctgagaaatgagctggagatccctggccagtatgatggccggggcaagcccctgcctgagtaccacgtgagaattgctggctttgatgagcgggtgacagtgatggccagcctgcggcggcccaagaggatcatcatccggggccatgatgagcgggagcaccccttcctggtgaagggaggagaggacctgcggcaggaccagagggtggagcagctgttccaggtgatgaatggcatcctggcccaggacagcgcctgcagccagagggccctgcagctgcggacctacagcgtggtgcccatgaccagccggctgggcctcatcgagtggctggagaacacagtgaccctgaaggacctgctgctgaacaccatgagccaggaggagaaggccgcctacctgagtgacccccgggccccaccctgtgagtacaaggactggctgaccaagatgtctgggaagcatgatgtgggcgcctacatgctgatgtacaagggggccaacagaacagagaccgtgaccagcttcaggaagcgggagagcaaggtgcctgctgacctgctgaagagggcctttgtgaggatgagcaccagccctgaggccttcctggccctgcggagccactttgccagcagccacgccctgatctgcatcagccactggatcctgggcattggagacagacacctgaacaacttcatggtggccatggagactggaggagtgattggaattgactttggacatgcctttggaagtgccacccagttcctgcctgtgcctgagctgatgcccttccggctgacccggcagttcatcaacctgatgctgcccatgaaggagaccggcctgatgtacagcatcatggtgcacgccctgcgggccttcagaagtgaccccggcctgctgaccaacaccatggatgtgtttgtgaaggagcccagctttgactggaagaactttgagcagaagatgctgaagaagggcggctcctggatccaggagatcaacgtggccgagaagaactggtacccccggcagaagatctgctacgccaagaggaagctggccggggccaacccagctgtgatcacctgtgatgagctgctgctgggccacgagaaggccccagccttccgggactatgtggccgtggcccggggcagcaaggaccacaacatccgggcccaggagcctgagagcggcctgtctgaggagacccaggtgaagtgcctgatggaccaggccacagaccccaacatcctgggccgcacctgggagggctgggagccctggatgtag

SEQ ID NO: 21345 - DNA, 12291 bp, synthetic construct
  misc_feature 1..12291: note = Description of Artificial Sequence: Synthetic coding sequence
  source 1..12291: mol_type = other DNA
atggccggcagcggggccggcgtgcgctgcagcctgctgcggctgcaggagaccctgtctgctgctgacagatgtggggccgccctggccggccaccagctgatccggggcctgggccaggagtgtgtgctgagcagcagccctgctgtgctggccctgcagaccagcctggtgttcagccgggactttggcctgctggtgtttgtgaggaagagcctgaacagcattgagttccgggagtgccgggaggagatcctgaagttcctgtgcatcttcctggagaagatgggccagaagatcgccccctacagcgtggagatcaagaacacctgcacctctgtgtacaccaaggaccgggccgccaagtgcaagatcccagccctggacctgctgatcaagctgctgcagaccttccgcagcagccggctgatggatgagttcaagattggagagctgttcagcaagttctatggagagctggccctgaagaagaagatcccagacacagtgctggagaaggtgtatgagctgctgggcctgctgggggaggtgcaccccagcgagatgatcaacaatgctgagaacctcttccgggccttcctgggggagctgaagacccagatgaccagcgctgtgcgggagcccaagctgcctgtgctggccggctgcctgaagggcctgagcagcctgctgtgcaacttcaccaagtccatggaggaggacccccagaccagccgggagatcttcaactttgtgctgaaggccatccggccccagattgacctgaagagatatgctgtgcccagcgctggcctgcggctgtttgccctgcacgccagccagttcagcacctgcctgctggacaactacgtgtccctgtttgaggtgctgctgaagtggtgtgcccacaccaacgtggagctgaagaaggccgccctgagcgccctggagagcttcctgaagcaggtgagcaacatggtggccaagaatgctgagatgcacaagaacaagctgcagtacttcatggagcagttctacggcatcatcagaaatgtggacagcaacaacaaggagctgagcatcgccatccggggctacggcctgtttgctggcccctgcaaggtgatcaatgccaaggatgtggacttcatgtatgtggagctgatccagcgctgcaagcagatgttcctgacccagacagacacaggagatgacagagtgtaccagatgcccagcttcctgcagagcgtggcctctgtgctgctgtacctggacacagtgcctgaggtgtacacccctgtgctggagcacctggtggtgatgcagattgacagcttcccccagtacagccccaagatgcagctggtgtgctgccgggccatcgtgaaggtgttcctggccctggccgccaagggccctgtgctgaggaactgcatcagcacagtggtgcaccagggcctcatccgcatctgcagcaagcctgtggtgctgcccaagggccctgagagcgagagcgaggaccaccgggccagcggggaggtgaggacaggcaagtggaaggtgcccacctacaaggactatgtggacctcttccgccacctgctgagcagtgaccagatgatggacagcatcctggctgatgaggccttcttctctgtgaacagcagcagcgagagcctgaaccacctgctgtatgatgaatttgtgaagtctgtgctgaagatcgtggagaagctggacctgaccctggagatccagacagtgggggagcaggagaatggagatgaggcccctggggtgtggatgatccccaccagtgaccctgctgccaacctgcacccagccaagcccaaggacttcagcgccttcatcaacctggtggagttctgccgggagatcctgcctgagaagcaggccgagttctttgagccctgggtgtacagcttctcctatgagctgatcctgcagagcacccggctgcccctcatcagcggcttctacaagctgctgagcatcaccgtgagaaatgccaagaagatcaagtactttgaaggagtgagccccaagagcctgaagcacagccctgaggaccctgagaagtacagctgctttgccctgtttgtgaagtttgggaaggaggtggccgtgaagatgaagcagtacaaggatgagctgctggccagctgcctgaccttcctgctgagcctgccccacaacatcatcgagctggatgtgcgggcctacgtgcctgccctgcagatggccttcaagctgggcctgagctacacccccctggccgaggtgggcctgaatgccctggaggagtggagcatctacatcgacagacatgtgatgcagccctactacaaggacatcctgccctgcctggatggctacctgaagaccagcgccctgagtgatgagaccaagaacaactgggaggtgtctgccctgagcagagctgcccagaagggcttcaacaaggtggtgctgaagcacctgaagaagaccaagaacctgagcagcaatgaggccatcagcctggaggagatccgcatccgggtggtgcagatgctgggcagcctgggcggccagatcaacaagaacctgctgactgtgaccagcagtgatgagatgatgaagagctatgtggcctgggaccgggagaagaggctgagctttgctgtgcccttccgggagatgaagcctgtgatcttcctggatgtgttcctgccccgggtgacagagctggccctgacagccagtgaccggcagaccaaggtggccgcctgtgagctgctgcacagcatggtgatgttcatgctgggcaaggccacccagatgcctgagggcggccagggcgccccacccatgtaccagctgtacaagaggaccttccctgtgctgctgcggctggcctgtgatgtggaccaggtgacccggcagctgtatgagcccctggtgatgcagctgatccactggttcaccaacaacaagaagtttgagagccaggacacagtggccctgctggaggccatcctggatggcatcgtggaccctgtggacagcaccctgcgggacttctgtggccgctgcatccgggagttcctgaagtggagcatcaagcagatcaccccccagcagcaggagaagagccctgtgaacaccaagagcctcttcaagaggctgtacagcctggccctgcaccccaatgccttcaagaggctgggcgccagcctggccttcaacaacatctaccgggagttccgggaggaggagagcctggtggagcagtttgtgtttgaggccctggtgatctacatggagagcctggccctggcccacgcagatgagaagagcctgggcaccatccagcagtgctgtgatgccatcgaccacctgtgccgcatcatcgagaagaagcacgtgtccctgaacaaggccaagaagaggcggctgccccggggcttcccccccagcgccagcctgtgcctgctggacctggtgaagtggctgctggcccactgcggccggccccagacagagtgccgccacaagagcattgagctgttctacaagtttgtgcccctgctgcccggcaacagaagccccaacctgtggctgaaggatgtgctgaaggaggagggcgtgtccttcctgatcaacacctttgagggcggcggctgcggccagcccagcggcatcctggcccagcccaccctgctgtaccggggccccttcagcctgcaggccaccctgtgctggctggacctgctgctggccgccctggagtgctacaacaccttcatcggggagaggacagtgggcgccctgcaggtgctgggcacagaggcccagagcagcctgctgaaggctgtggccttcttcctggagagcatcgccatgcatgacatcatcgctgctgagaagtgcttcggcaccggggctgctggcaacagaaccagcccccaggagggggagcgctacaactacagcaaatgtactgtggtggtgcgcatcatggagttcaccaccaccctgctgaacaccagccctgagggctggaagctgctgaagaaggacctgtgcaacacccacctgatgagggtgctggtgcagaccctgtgtgagcccgccagcatcggcttcaacattggagatgtgcaggtgatggcccacctgcctgatgtgtgtgtgaacctgatgaaggccctgaagatgagcccctacaaggacatcctggagacccacctgcgggagaagatcacagcccagagcattgaggagctgtgtgctgtgaacctgtatggcccagatgcccaggtggacaggagccggctggccgctgtggtgtctgcctgcaagcagctgcaccgggccggcctgctgcacaacatcctgcccagccagagcacagacctgcaccacagcgtgggcacagagctgctgagcctggtgtacaagggcatcgcccctggagatgagcggcagtgcctgcccagcctggacctgagctgcaagcagctggccagcggcctgctggagctggcctttgccttcggcggcctgtgtgagcggctggtgtccctgctgctgaacccagctgtgctgagcacagccagcctgggcagcagccagggcagcgtcatccacttcagccacggggagtacttctacagcctcttcagcgagaccatcaacacagagctgctgaagaacctggacctggccgtgctggagctgatgcagagctctgtggacaacaccaagatggtgtctgctgtgctgaatggcatgctggaccagagcttccgggagcgggccaaccagaagcaccagggcctgaagctggccaccaccatcctgcagcactggaagaagtgtgacagctggtgggccaaggacagccccctggagaccaagatggctgtgctggccctgctggccaagatcctgcagattgacagctctgtgtccttcaacaccagccacggcagcttccctgaggtgttcaccacctacatcagcctgctggccgacaccaagctggacctgcacctgaagggccaggccgtgaccctgctgcccttcttcaccagcctgaccggcggcagcctggaggagctgcggcgggtgctggagcagctgattgtggcccacttccccatgcagagccgggagttccccccaggcaccccccgcttcaacaactacgtggactgcatgaagaagttcctggatgccctggagctgagccagagccccatgctgctggagctgatgacagaggtgctgtgccgggagcagcagcacgtgatggaggagctgttccagagcagcttccgccgcatcgcccggcggggcagctgtgtgacccaggtgggcctgctggagagcgtgtatgagatgttcaggaaggatgacccccggctgtccttcacccggcagagctttgtggacaggagcctgctgaccctgctgtggcactgcagcctggatgccctgcgggagttcttcagcaccatcgtggtggatgccattgatgtgctgaagagccgcttcaccaagctgaatgaaagcacctttgacacccagatcaccaagaagatgggctactacaagatcctggatgtgatgtacagccggctgcccaaggatgatgtgcacgccaaggagagcaagatcaaccaggtgttccacggcagctgcatcacagagggcaatgagctgaccaagaccctcatcaagctgtgctatgatgccttcacagagaacatggccggggagaaccagctgctggagcggcggcggctgtaccactgtgccgcctacaactgtgccatcagcgtcatctgctgcgtgttcaatgagctgaagttctaccagggcttcctgttcagcgagaagccagagaagaacctgctgatctttgagaacctgattgacctgaagaggcgctacaacttccctgtggaggtggaggtgcccatggagaggaagaagaagtacatcgagatcaggaaggaggcccgggaggccgccaatggagacagtgatggccccagctacatgagcagcctgagctacctggccgacagcaccctgtctgaggagatgagccagtttgacttcagcactggagtgcagagctacagctacagcagccaggaccccaggcctgccaccggccgcttcagaagaagagagcagagggaccccaccgtgcatgatgatgtgctggagctggagatggatgagctgaacagacatgagtgcatggcccccctgacagccctggtgaagcacatgcacaggagcctgggccccccccagggcgaggaggacagcgtgccccgggacctgcccagctggatgaagttcctgcacggcaagctgggcaaccccatcgtgcccctgaacatccgcctcttcctggccaagctggtgatcaacacagaggaggtgttccggccctatgccaagcactggctgagccccctgctgcagctggccgccagcgagaacaacggcggggagggcatccactacatggtggtggagatcgtggccaccatcctgtcctggacaggcctggccacccccaccggggtgcccaaggatgaggtgctggccaaccggctgctgaacttcctgatgaagcacgtgttccaccccaagagagctgtgttccgccacaacctggagatcatcaagaccctggtggagtgctggaaggactgcctgagcatcccctaccgcctcatctttgagaagttcagcggcaaggaccccaacagcaaggacaacagcgtgggcatccagctgctgggcatcgtgatggccaatgacctgcccccctatgacccccagtgtggcatccagagcagcgagtacttccaggccctggtgaacaacatgagctttgtgcgctacaaggaggtgtatgctgctgctgctgaggtgctgggcctcatcctgcgctacgtgatggagaggaagaacatcctggaggagagcctgtgtgagctggtggccaagcagctgaagcagcaccagaacaccatggaggacaagttcatcgtgtgcctgaacaaggtgaccaagagcttcccccccctggccgaccgcttcatgaatgctgtgttcttcctgctgcccaagttccatggagtgctgaagaccctgtgcctggaggtggtgctgtgccgggtggagggcatgacagagctgtacttccagctgaagagcaaggactttgtgcaggtgatgaggcacagagatgatgagcggcagaaggtgtgcctggacatcatctacaagatgatgcccaagctgaagcctgtggagctgcgggagctgctgaaccctgtggtggagtttgtgagccaccccagcaccacctgccgggagcagatgtacaacatcctgatgtggattcatgacaactacagagatcctgagagcgagacagacaatgacagccaggagatcttcaagctggccaaggatgtgctgatccagggcctgattgatgagaaccctggcctgcagctgatcatccggaacttctggagccatgagacccggctgcccagcaacaccctggaccggctgctggccctgaacagcctgtacagccccaagattgaggtgcacttcctgagcctggccaccaacttcctgctggagatgacctccatgagcccagactaccccaaccccatgtttgagcaccccctgtctgaatgtgagttccaggagtacaccatcgacagcgactggaggttccgcagcacagtgctgacccccatgtttgtggagacccaggccagccagggcaccctgcagaccaggacccaggagggcagcctgagcgcccgctggcctgtggccggccagatccgggccacccagcagcagcacgacttcaccctgacccagacagcagatggccgcagcagctttgactggctgaccggcagcagcacagaccccctggtggaccacaccagccccagcagtgacagcctgctgtttgcccacaagaggtctgagcggctgcagagggcccccctgaagtctgtgggccctgactttgggaagaagaggctgggcctgcctggagatgaggtggacaacaaggtgaagggagctgctggccgcacagacctgctgcggctgcggcggcgcttcatgagggaccaggagaagctgagcctgatgtatgccaggaaaggagtggccgagcagaagcgggagaaggagatcaagtctgagctgaagatgaagcaggatgcccaggtggtgctgtaccgcagctaccgccacggggacctgcctgacatccagatcaagcacagcagcctcatcacccccctgcaggccgtggcccagagggaccccatcatcgccaagcagctgttcagcagcctcttcagcggcatcctgaaggagatggacaagttcaagaccctgtctgagaagaacaacatcacccagaagctgctgcaggacttcaaccgcttcctgaacaccaccttctccttcttccccccatttgtgtcctgcatccaggacatcagctgccagcacgccgccctgctgagcctggaccctgctgctgtgtctgctggctgcctggccagcctgcagcagcctgtgggcatccggctgctggaggaggccctgctgcggctgctgcctgctgagctgcctgccaagagggtgcggggcaaggcccggctgcccccagatgtgctgcgctgggtggagctggccaagctgtaccgcagcatcggggagtatgatgtgctgcggggcatcttcaccagcgagatcggcaccaagcagatcacccagagcgccctgctggccgaggcccggagtgactacagcgaggccgccaagcagtatgatgaggccctgaacaagcaggactgggtggatggagagcccacagaggccgagaaggacttctgggagctggccagcctggactgctacaaccacctggccgagtggaagagcctggagtactgcagcacagccagcattgacagtgaaaatcctccagacctgaacaagatctggagcgagcccttctaccaggagacctacctgccctacatgatccgcagcaagctgaagctgctgctgcagggcgaggccgaccagagcctgctgaccttcatcgacaaggccatgcatggagagctgcagaaggccatcctggagctgcactacagccaggagctgagcctgctgtacctgctgcaggatgatgtggaccgggccaagtactacatccagaatggcatccagagcttcatgcagaactacagcagcattgatgtgctgctgcaccagagccggctgaccaagctgcagagcgtgcaggccctgacagagatccaggagttcatctccttcatcagcaagcagggcaacctgagcagccaggtgcccctgaagaggctgctgaacacctggaccaaccgctacccagatgccaagatggaccccatgaacatctgggatgacatcatcaccaaccgctgcttcttcctgagcaagattgaggagaagctgacccccctgcctgaggacaacagcatgaatgtggaccaggatggagaccccagcgacaggatggaggtgcaggagcaggaggaggacatcagcagcctcatccgcagctgcaagttctccatgaagatgaagatgattgacagcgccaggaagcagaacaacttcagcctggccatgaagctgctgaaggagctgcacaaggagagcaagaccagagatgactggctggtgtcctgggtgcagagctactgccgcctgagccactgccgcagccgcagccagggctgcagcgagcaggtgctgactgtgctgaagacagtgtccctgctggatgagaacaacgtgtcctcctacctgagcaagaacatcctggccttccgggaccagaacatcctgctgggcaccacctaccgcatcatcgccaatgccctgagcagcgagcccgcctgcctggccgagattgaggaggacaaggcccggcgcatcctggagctgagcggcagcagcagtgaagattctgagaaggtgattgctggcctgtaccagagggccttccagcacctgtctgaggccgtgcaggccgctgaggaggaggcccagcccccatcctggagctgtggccctgctgctggggtgattgatgcctacatgaccctggccgacttctgtgaccagcagctgaggaaggaggaggagaatgcctctgtgattgattctgctgagctgcaggcctacccagccctggtggtggagaagatgctgaaggccctgaagctgaacagcaatgaggcccggctgaagttcccccggctgctgcagatcatcgagcgctacccagaggagaccctgagcctgatgaccaaggagatcagctctgtgccctgctggcagttcatctcctggatcagccacatggtggccctgctggacaaggaccaggccgtggccgtgcagcacagcgtggaggagatcacagacaactacccccaggccatcgtgtaccccttcatcatcagcagcgagagctacagcttcaaggacaccagcacaggccacaagaacaaggagtttgtggcccgcatcaagagcaagctggaccagggcggcgtcatccaggacttcatcaatgccctggaccagctgagcaaccctgagctgctcttcaaggactggagcaatgatgtgcgggcagagctggccaagacccctgtgaacaagaagaacatcgagaagatgtatgaaagaatgtatgctgccctgggggaccccaaggcccctggcctgggcgccttccggaggaagttcatccagaccttcggcaaggagtttgacaagcactttggaaaaggaggcagcaagctgctgaggatgaagctgagtgacttcaatgacatcaccaacatgctgctgctgaagatgaacaaggacagcaagcccccaggcaacctgaaggaatgtagcccctggatgtctgacttcaaggtggagttcctgagaaatgagctggagatccctggccagtatgatggccggggcaagcccctgcctgagtaccacgtgagaattgctggctttgatgagcgggtgacagtgatggccagcctgcggcggcccaagaggatcatcatccggggccatgatgagcgggagcaccccttcctggtgaagggaggagaggacctgcggcaggaccagagggtggagcagctgttccaggtgatgaatggcatcctggcccaggacagcgcctgcagccagagggccctgcagctgcggacctacagcgtggtgcccatgaccagcagtgacccccgggccccaccctgtgagtacaaggactggctgaccaagatgtctgggaagcatgatgtgggcgcctacatgctgatgtacaagggggccaacagaacagaaacagtgaccagcttcaggaagcgggagagcaaggtgcctgctgacctgctgaagagggcctttgtgaggatgagcaccagccctgaggccttcctggccctgcggagccactttgccagcagccacgccctgatctgcatcagccactggatcctgggcatcggggacagacacctgaacaacttcatggtggccatggagaccggcggcgtcatcggcatcgactttggccacgccttcggcagcgccacccagttcctgcctgtgcctgagctgatgcccttccggctgacccggcagttcatcaacctgatgctgcccatgaaggagaccggcctgatgtacagcatcatggtgcacgccctgcgggccttcagaagtgaccccggcctgctgaccaacaccatggatgtgtttgtgaaggagcccagctttgactggaagaactttgagcagaagatgctgaagaagggcggctcctggatccaggagatcaacgtggccgagaagaactggtacccccggcagaagatctgctacgccaagaggaagctggccggggccaacccagctgtgatcacctgtgatgagctgctgctgggccacgagaaggccccagccttccgggactatgtggccgtggcccggggcagcaaggaccacaacatccgggcccaggagcctgagagcggcctgtctgaggagacccaggtgaagtgcctgatggaccaggccacagaccccaacatcctgggccgcacctgggagggctgggagccctggatgtag

SEQ ID NO: 21346 - DNA, 444 bp, synthetic construct
  misc_feature 1..444: note = Description of Artificial Sequence: Synthetic coding sequence
  source 1..444: mol_type = other DNA
atggccgcccagaggctgggcaagagggtgctgagcaagctgcagagccccagccgggcccggggccctgggggcagccctgggggcctgcagaagagacatgcccgggtgacagtgaagtatgacagaagagagctgcagaggcggctggatgtggagaagtggattgatggccgcctggaggagctgtaccggggcatggaggccgacatgccagatgagatcaacattgatgagctgctggagctggagagcgaggaggagaggagcaggaagatccagggcctgctgaagagctgtgggaagcctgtggaggacttcatccaggagctgctggccaagctgcagggcctgcaccggcagcccggcctgcggcagcccagccccagccatgatggcagcctgagccccctgcaggaccgggccaggacagcccacccctag

SEQ ID NO: 21347 - DNA, 363 bp, synthetic construct
  misc_feature 1..363: note = Description of Artificial Sequence: Synthetic coding sequence
  source 1..363: mol_type = other DNA
atggccgcccagaggctgggcaagagggtgctgagcaagctgcagagccccagccgggcccggggccctgggggcagccctgggggcctgcagaagagacatgcccgggtgacagtgaagtatgacagaagagagctgcagaggcggctggatgtggagaagtggattgatggccgcctggaggagctgtaccggggcatgggcctgctgaagagctgtgggaagcctgtggaggacttcatccaggagctgctggccaagctgcagggcctgcaccggcagcccggcctgcggcagcccagccccagccatgatggcagcctgagccccctgcaggaccgggccaggacagcccacccctag

SEQ ID NO: 21348 - DNA, 2025 bp, synthetic construct
  misc_feature 1..2025: note = Description of Artificial Sequence: Synthetic coding sequence
  source 1..2025: mol_type = other DNA
atggcccctggccaggccccccaccaggccaccccctggagagatgcccaccccttcttcctgctgagccctgtgatgggcctgctgagccgggcctggagccggctgcggggcctgggccccctggagccctggctggtggaggccgtgaagggagctgccctggtggaggccggcctggagggggaggcccggacccccctggccatcccccacaccccctggggcagaagacctgaggaggaggccgaggacagcggcggccctggagaagatcgggagaccctgggcctgaagaccagcagcagcctgcctgaggcctggggcctgctggatgatgatgatggcatgtacggggagcgggaggccacctctgtgccccggggccagggcagccagtttgctgatggccagagggcccccctgagccccagcctgctgatccgcaccctgcagggcagtgacaagaaccctggagaggagaaggccgaggaggagggcgtggccgaggaggagggcgtgaacaagttctcctacccacccagccaccgggagtgctgcccagctgtggaggaggaggatgatgaggaggccgtgaagaaggaggcccacaggaccagcaccagcgccctgagccctggcagcaagcccagcacctgggtgtcctgccctggagaggaggagaaccaggccacagaggacaagaggacagagaggagcaaaggagccaggaagacctctgtgagccccaggagcagcggcagtgaccccaggtcctgggagtaccgcagcggggaggccagcgaggagaaggaggagaaggcccacaaggagactggaaaaggagaggccgcccctggcccccagagcagcgccccagcccagaggccccagctgaagtcctggtggtgccagcccagtgatgaggaggagggggaggtgaaggccctgggcgctgctgagaaggatggagaggctgaatgtcctccctgcatccccccacccagcgccttcctgaaggcctgggtgtactggccaggagaggacacagaggaggaggaggatgaggaggaggatgaggacagcgacagcggcagtgatgaggaggagggggaggccgaggccagcagcagcaccccagccaccggggtcttcctgaagtcctgggtgtaccagcctggagaggacacagaggaggaggaggatgaagattctgacaccggcagcgcagaagatgagcgggaggccgagaccagcgccagcaccccaccagccagcgccttcctgaaggcctgggtgtacagacctggagaggacacagaggaggaggaggatgaagatgtggacagcgaggacaaggaggatgattctgaggccgccctgggggaggccgagagtgacccccaccccagccacccagaccagagggcccacttccggggctggggctacagacctgggaaggagacagaggaggaggaggccgctgaggactggggcgaggccgagccctgccccttccgggtggccatctacgtgcctggagagaagcccccaccaccctgggccccaccccggctgcccctgcggctgcagaggcggctgaagaggcctgagacccccacccatgaccctgaccctgagacccccctgaaggccaggaaggtgcgcttcagcgagaaggtgacagtgcacttcctggccgtgtgggccggccctgcccaggccgcccggcagggcccctgggagcagctggcccgggacaggagcagatttgcccggcgcatcacccaggcccaggaggagctgagcccctgcctgaccccagctgcccgggcccgggcctgggcccggctgaggaacccccccctggcccccatcccagccctgacccagaccctgcccagcagctctgtgcccagcagccctgtgcagaccacccccctgagccaggccgtggccacccccagccgcagcagcgctgctgctgctgctgccctggacctgagcggccggcggggctag

SEQ ID NO: 21349 - DNA, 1545 bp, synthetic construct
  misc_feature 1..1545: note = Description of Artificial Sequence: Synthetic coding sequence
  source 1..1545: mol_type = other DNA
atgaaggccgaggaggagggcgtggccgaggaggagggcgtgaacaagttctcctacccacccagccaccgggagtgctgcccagctgtggaggaggaggatgatgaggaggccgtgaagaaggaggcccacaggaccagcaccagcgccctgagccctggcagcaagcccagcacctgggtgtcctgccctggagaggaggagaaccaggccacagaggacaagaggacagagaggagcaaaggagccaggaagacctctgtgagccccaggagcagcggcagtgaccccaggtcctgggagtaccgcagcggggaggccagcgaggagaaggaggagaaggcccacaaggagactggaaaaggagaggccgcccctggcccccagagcagcgccccagcccagaggccccagctgaagtcctggtggtgccagcccagtgatgaggaggagggggaggtgaaggccctgggcgctgctgagaaggatggagaggctgaatgtcctccctgcatccccccacccagcgccttcctgaaggcctgggtgtactggccaggagaggacacagaggaggaggaggatgaggaggaggatgaggacagcgacagcggcagtgatgaggaggagggggaggccgaggccagcagcagcaccccagccaccggggtcttcctgaagtcctgggtgtaccagcctggagaggacacagaggaggaggaggatgaagattctgacaccggcagcgcagaagatgagcgggaggccgagaccagcgccagcaccccaccagccagcgccttcctgaaggcctgggtgtacagacctggagaggacacagaggaggaggaggatgaagatgtggacagcgaggacaaggaggatgattctgaggccgccctgggggaggccgagagtgacccccaccccagccacccagaccagagggcccacttccggggctggggctacagacctgggaaggagacagaggaggaggaggccgctgaggactggggcgaggccgagccctgccccttccgggtggccatctacgtgcctggagagaagcccccaccaccctgggccccaccccggctgcccctgcggctgcagaggcggctgaagaggcctgagacccccacccatgaccctgaccctgagacccccctgaaggccaggaaggtgcgcttcagcgagaaggtgacagtgcacttcctggccgtgtgggccggccctgcccaggccgcccggcagggcccctgggagcagctggcccgggacaggagcagatttgcccggcgcatcacccaggcccaggaggagctgagcccctgcctgaccccagctgcccgggcccgggcctgggcccggctgaggaacccccccctggcccccatcccagccctgacccagaccctgcccagcagctctgtgcccagcagccctgtgcagaccacccccctgagccaggccgtggccacccccagccgcagcagcgctgctgctgctgctgccctggacctgagcggccggcggggctag

SEQ ID NO: 21350 - DNA, 1899 bp, synthetic construct
  misc_feature 1..1899: note = Description of Artificial Sequence: Synthetic coding sequence
  source 1..1899: mol_type = other DNA
atgccctggctggtggaggccgtgaagggagctgccctggtggaggccggcctggagggggaggcccggacccccctggccatcccccacaccccctggggcagaagacctgaggaggaggccgaggacagcggcggccctggagaagatcgggagaccctgggcctgaagaccagcagcagcctgcctgaggcctggggcctgctggatgatgatgatggcatgtacggggagcgggaggccacctctgtgccccggggccagggcagccagtttgctgatggccagagggcccccctgagccccagcctgctgatccgcaccctgcagggcagtgacaagaaccctggagaggagaaggccgaggaggagggcgtggccgaggaggagggcgtgaacaagttctcctacccacccagccaccgggagtgctgcccagctgtggaggaggaggatgatgaggaggccgtgaagaaggaggcccacaggaccagcaccagcgccctgagccctggcagcaagcccagcacctgggtgtcctgccctggagaggaggagaaccaggccacagaggacaagaggacagagaggagcaaaggagccaggaagacctctgtgagccccaggagcagcggcagtgaccccaggtcctgggagtaccgcagcggggaggccagcgaggagaaggaggagaaggcccacaaggagactggaaaaggagaggccgcccctggcccccagagcagcgccccagcccagaggccccagctgaagtcctggtggtgccagcccagtgatgaggaggagggggaggtgaaggccctgggcgctgctgagaaggatggagaggctgaatgtcctccctgcatccccccacccagcgccttcctgaaggcctgggtgtactggccaggagaggacacagaggaggaggaggatgaggaggaggatgaggacagcgacagcggcagtgatgaggaggagggggaggccgaggccagcagcagcaccccagccaccggggtcttcctgaagtcctgggtgtaccagcctggagaggacacagaggaggaggaggatgaagattctgacaccggcagcgcagaagatgagcgggaggccgagaccagcgccagcaccccaccagccagcgccttcctgaaggcctgggtgtacagacctggagaggacacagaggaggaggaggatgaagatgtggacagcgaggacaaggaggatgattctgaggccgccctgggggaggccgagagtgacccccaccccagccacccagaccagagggcccacttccggggctggggctacagacctgggaaggagacagaggaggaggaggccgctgaggactggggcgaggccgagccctgccccttccgggtggccatctacgtgcctggagagaagcccccaccaccctgggccccaccccggctgcccctgcggctgcagaggcggctgaagaggcctgagacccccacccatgaccctgaccctgagacccccctgaaggccaggaaggtgcgcttcagcgagaaggtgacagtgcacttcctggccgtgtgggccggccctgcccaggccgcccggcagggcccctgggagcagctggcccgggacaggagcagatttgcccggcgcatcacccaggcccaggaggagctgagcccctgcctgaccccagctgcccgggcccgggcctgggcccggctgaggaacccccccctggcccccatcccagccctgacccagaccctgcccagcagctctgtgcccagcagccctgtgcagaccacccccctgagccaggccgtggccacccccagccgcagcagcgctgctgctgctgctgccctggacctgagcggccggcggggctag

SEQ ID NO: 21351 - DNA, 1671 bp, synthetic construct
  misc_feature 1..1671: note = Description of Artificial Sequence: Synthetic coding sequence
  source 1..1671: mol_type = other DNA
atggccggggccagcgagctgggcactggacctggagctgctggaggagatggagatgacagcctgtaccccatcgctgtgctgattgatgagctgagaaatgaagatgtgcagctgcggctgaacagcatcaagaagctgagcaccatcgccctggccctgggcgtggagaggaccaggtctgagctgctgcccttcctgacagacaccatctatgatgaagatgaggtgctgctggccctggccgagcagctgggcaacttcaccggcctggtgggcggccctgactttgcccactgcctgctgccccccctggagaacctggccaccgtggaggagaccgtggtgcgggacaaggctgtggagagcctgcggcagatcagccaggagcacacccctgtggccctggaggcctactttgtgcccctggtgaagaggctggccagcggggactggttcaccagcaggaccagcgcctgtggcctcttctctgtgtgctacccccgggccagcaatgctgtgaaggccgagatccggcagcagttccgcagcctgtgcagtgatgacacccccatggtgcggcgggctgctgccagcaagctgggggagtttgccaaggtgctggagctggacagcgtgaagtcagaaattgtgcccctcttcaccagcctggccagtgatgagcaggacagcgtgcggctgctggccgtggaggcctgtgtgtccatcgcccagctgctgagccaggatgacctggagaccctggtgatgcccaccctgcggcaggccgctgaggacaagtcctggagggtgcgctacatggtggccgaccgcttcagcgagctgcagaaggccatgggccccaagatcaccctgaatgacctgatcccagccttccagaacctgctgaaggactgtgaggccgaggtgcgggctgctgctgcccacaaggtgaaggagctgggggagaacctgcccatcgaggaccgggagaccatcatcatgaaccagatcctgccctacatcaagtgcccagatgtgcggctgaacatcatcagcaacctggactgtgtgaatgaagtcatcggcatccggcagctgagccagagcctgctgcctgccatcgtggagctggccgaggatgccaagtggagggtgcggctggccatcatcgagtacatgcccctgctggccggccagctgggcgtggagttctttgatgagaagctgaacagcctgtgcatggcctggctggtggaccacgtgtatgccatccgggaggccgccaccaacaacctgatgaagctggtgcagaagtttggaacagagtgggcccagaacaccatcgtgcccaaggtgctggtgatggccaatgaccccaactacctgcacaggatgaccaccctcttctgcatcaatgccctgtctgaggcctgtggccaggagatcaccaccaagcagatgctgcccatcgtgctgaagatggccggggaccaggtggccaacgtgcgcttcaacgtggccaagagcctgcagaagattggccccatcctggacaccaatgccctgcagggcgaggtgaagcctgtgctgcagaagctgggccaggatgaggacatggatgtgaagtactttgcccaggaggccatctctgtgctggccctggcctag

SEQ ID NO: 21352 - DNA, 1770 bp, synthetic construct
  misc_feature 1..1770: note = Description of Artificial Sequence: Synthetic coding sequence
  source 1..1770: mol_type = other DNA
atggctgctgctgatggagatgacagcctgtaccccatcgctgtgctgattgatgagctgagaaatgaagatgtgcagctgcggctgaacagcatcaagaagctgagcaccatcgccctggccctgggcgtggagaggaccaggtctgagctgctgcccttcctgacagacaccatctatgatgaagatgaggtgctgctggccctggccgagcagctgggcaccttcaccaccctggtgggcggcccagaatatgtgcactgcctgctgccccccctggagagcctggccaccgtggaggagaccgtggtgcgggacaaggctgtggagagcctgcgggccatcagccatgagcacagccccagcgacctggaggcccactttgtgcccctggtgaagaggctggccggcggggactggttcaccagcaggaccagcgcctgtggcctcttctctgtgtgctacccccgggtgagcagcgctgtgaaggccgagctgcggcagtacttcaggaacctgtgcagtgatgacacccccatggtgcggcgggctgctgccagcaagctgggggagtttgccaaggtgctggagctggacaacgtgaagtctgagatcatccccatgttcagcaacctggccagtgatgagcaggacagcgtgcggctgctggccgtggaggcctgtgtgaacatcgcccagctgctgccccaggaggacctggaggccctggtgatgcccaccctgcggcaggccgctgaggacaagtcctggagggtgcgctacatggtggccgacaagttcacagagctgcagaaggctgtgggccctgagatcaccaagacagacctggtgcctgccttccagaacctgatgaaggactgtgaggccgaggtgcgggctgctgccagccacaaggtgaaggagttctgtgagaacctgtctgctgactgcagagaaaatgtcatcatgagccagatcctgccctgcatcaaggagctggtgtctgatgccaaccagcacgtgaagagcgccctggccagcgtcatcatgggcctgagccccatcctgggcaaggacaacaccatcgagcacctgctgcccctcttcctggcccagctgaaggatgagtgcccagaggtgcggctgaacatcatcagcaacctggactgtgtgaatgaggtgattggcatccggcagctgagccagagcctgctgcctgccatcgtggagctggctgaagatgccaagtggagggtgcggctggccatcatcgagtacatgcccctgctggccggccagctgggcgtggagttctttgatgagaagctgaacagcctgtgcatggcctggctggtggaccacgtgtatgccatccgggaggccgccaccagcaacctgaagaagctggtggagaagtttgggaaggagtgggcccacgccaccatcatccccaaggtgctggccatgtctggggaccccaactacctgcacaggatgaccaccctcttctgcatcaacgtgctgtctgaggtgtgtggccaggacatcaccaccaagcacatgctgcccaccgtgctgaggatggccggggaccctgtggccaacgtgcgcttcaacgtggccaagagcctgcagaagattggccccatcctggacaacagcaccctgcagagcgaggtgaagcccatcctggagaagctgacccaggaccaggatgtggatgtgaagtactttgcccaggaggccctgactgtgctgagcctggcctag

SEQ ID NO: 21353 - DNA, 1740 bp, synthetic construct
  misc_feature 1..1740: note = Description of Artificial Sequence: Synthetic coding sequence
  source 1..1740: mol_type = other DNA
atggctgctgctgatggagatgacagcctgtaccccatcgctgtgctgattgatgagctgagaaatgaagatgtgcagctgcggctgaacagcatcaagaagctgagcaccatcgccctggccctgggcgtggagaggaccaggtctgagctgctgcccttcctgacagacaccatctatgatgaagatgaggtgctgctggccctggccgagcagctgggcaccttcaccaccctggtgggcggcccagaatatgtgcactgcctgctgccccccctggagagcctggccaccgtggagagcctgcgggccatcagccatgagcacagccccagcgacctggaggcccactttgtgcccctggtgaagaggctggccggcggggactggttcaccagcaggaccagcgcctgtggcctcttctctgtgtgctacccccgggtgagcagcgctgtgaaggccgagctgcggcagtacttcaggaacctgtgcagtgatgacacccccatggtgcggcgggctgctgccagcaagctgggggagtttgccaaggtgctggagctggacaacgtgaagtctgagatcatccccatgttcagcaacctggccagtgatgagcaggacagcgtgcggctgctggccgtggaggcctgtgtgaacatcgcccagctgctgccccaggaggacctggaggccctggtgatgcccaccctgcggcaggccgctgaggacaagtcctggagggtgcgctacatggtggccgacaagttcacagagctgcagaaggctgtgggccctgagatcaccaagacagacctggtgcctgccttccagaacctgatgaaggactgtgaggccgaggtgcgggctgctgccagccacaaggtgaaggagttctgtgagaacctgtctgctgactgcagagaaaatgtcatcatgagccagatcctgccctgcatcaaggagctggtgtctgatgccaaccagcacgtgaagagcgccctggccagcgtcatcatgggcctgagccccatcctgggcaaggacaacaccatcgagcacctgctgcccctcttcctggcccagctgaaggatgagtgcccagaggtgcggctgaacatcatcagcaacctggactgtgtgaatgaggtgattggcatccggcagctgagccagagcctgctgcctgccatcgtggagctggctgaagatgccaagtggagggtgcggctggccatcatcgagtacatgcccctgctggccggccagctgggcgtggagttctttgatgagaagctgaacagcctgtgcatggcctggctggtggaccacgtgtatgccatccgggaggccgccaccagcaacctgaagaagctggtggagaagtttgggaaggagtgggcccacgccaccatcatccccaaggtgctggccatgtctggggaccccaactacctgcacaggatgaccaccctcttctgcatcaacgtgctgtctgaggtgtgtggccaggacatcaccaccaagcacatgctgcccaccgtgctgaggatggccggggaccctgtggccaacgtgcgcttcaacgtggccaagagcctgcagaagattggccccatcctggacaacagcaccctgcagagcgaggtgaagcccatcctggagaagctgacccaggaccaggatgtggatgtgaagtactttgcccaggaggccctgactgtgctgagcctggcctag

SEQ ID NO: 21354 - DNA, 471 bp, synthetic construct
  misc_feature 1..471: note = Description of Artificial Sequence: Synthetic coding sequence
  source 1..471: mol_type = other DNA
atggctgctgctgatggagatgacagcctgtaccccatcgctgtgctgattgatgagctgagaaatgaagatgtgcagctgcggctgaacagcaacctgaagaagctggtggagaagtttgggaaggagtgggcccacgccaccatcatccccaaggtgctggccatgtctggggaccccaactacctgcacaggatgaccaccctcttctgcatcaacgtgctgtctgaggtgtgtggccaggacatcaccaccaagcacatgctgcccaccgtgctgaggatggccggggaccctgtggccaacgtgcgcttcaacgtggccaagagcctgcagaagattggccccatcctggacaacagcaccctgcagagcgaggtgaagcccatcctggagaagctgacccaggaccaggatgtggatgtgaagtactttgcccaggaggccctgactgtgctgagcctggcctag

SEQ ID NO: 21355 - DNA, 1605 bp, synthetic construct
  misc_feature 1..1605: note = Description of Artificial Sequence: Synthetic coding sequence
  source 1..1605: mol_type = other DNA
atgaggaccttctcctttgccagcacagccagccgcagctgcccccccagcccctggcccctgggcctgaagggccctgaggtgtccttctgcctgagcctgcagccccccctggagagcctggccaccgtggaggagaccgtggtgcgggacaaggctgtggagagcctgcgggccatcagccatgagcacagccccagcgacctggaggcccactttgtgcccctggtgaagaggctggccggcggggactggttcaccagcaggaccagcgcctgtggcctcttctctgtgtgctacccccgggtgtcctctgctgtgaaggccgagctgcggcagtacttcaggaacctgtgcagtgatgacacccccatggtgagaagagctgctgccagcaagctgggggagtttgccaaggtgctggagctggacaacgtgaagtctgagatcatccccatgttcagcaacctggccagtgatgagcaggacagcgtgcggctgctggccgtggaggcctgtgtgaacatcgcccagctgctgccccaggaggacctggaggccctggtgatgcccaccctgcggcaggccgctgaggacaagtcctggagggtgcgctacatggtggccgacaagttcacagagctgcagaaggctgtgggccctgagatcaccaagacagacctggtgcctgccttccagaacctgatgaaggactgtgaggccgaggtgcgggccgccgccagccacaaggtgaaggagttctgtgagaacctgtctgctgactgccgggagaatgtcatcatgagccagatcctgccctgcatcaaggagctggtgtctgatgccaaccagcacgtgaagagcgccctggccagcgtcatcatgggcctgagccccatcctgggcaaggacaacaccatcgagcacctgctgcccctcttcctggcccagctgaaggatgaatgtcctgaggtgcggctgaacatcatcagcaacctggactgtgtgaatgaagtcatcggcatccggcagctgagccagagcctgctgcctgccatcgtggagctggccgaggatgccaagtggagggtgcggctggccatcatcgagtacatgcccctgctggccggccagctgggcgtggagttctttgatgagaagctgaacagcctgtgcatggcctggctggtggaccacgtgtatgccatccgggaggccgccaccagcaacctgaagaagctggtggagaagtttgggaaggagtgggcccacgccaccatcatccccaaggtgctggccatgtctggggaccccaactacctgcacaggatgaccaccctcttctgcatcaacgtgctgtctgaggtgtgtggccaggacatcaccaccaagcacatgctgcccaccgtgctgaggatggccggggaccctgtggccaacgtgcgcttcaacgtggccaagagcctgcagaagattggccccatcctggacaacagcaccctgcagagcgaggtgaagcccatcctggagaagctgacccaggaccaggatgtggatgtgaagtactttgcccaggaggccctgactgtgctgagcctggcctag

SEQ ID NO: 21356 - DNA, 2004 bp, synthetic construct
  misc_feature 1..2004: note = Description of Artificial Sequence: Synthetic coding sequence
  source 1..2004: mol_type = other DNA
atggccggggccagcgagctgggcactggacctggagctgctggaggagatggagatgacagcctgtaccccatcgctgtgctgattgatgagctgagaaatgaagatgtgcagctgcggctgaacagcatcaagaagctgagcaccatcgccctggccctgggcgtggagaggaccaggtctgagctgctgcccttcctgacagacaccatctatgatgaagatgaggtgctgctggccctggccgagcagctgggcaacttcaccggcctggtgggcggccctgactttgcccactgcctgctgccccccctggagaacctggccaccgtggaggagaccgtggtgcgggacaaggctgtggagagcctgcggcagatcagccaggagcacacccctgtggccctggaggcctactttgtgcccctggtgaagaggctggccagcggggactggttcaccagcaggaccagcgcctgtggcctcttctctgtgtgctacccccgggccagcaatgctgtgaaggccgagatccggcagcagttccgcagcctgtgcagtgatgacacccccatggtgcggcgggctgctgccagcaagctgggggagtttgccaaggtgctggagctggacagcgtgaagtcagaaattgtgcccctcttcaccagcctggccagtgatgagcaggacagcgtgcggctgctggccgtggaggcctgtgtgtccatcgcccagctgctgagccaggatgacctggagaccctggtgatgcccaccctgcggcaggccgctgaggacaagtcctggagggtgcgctacatggtggccgaccgcttcagcgagctgcagaaggccatgggccccaagatcaccctgaatgacctgatcccagccttccagaacctgctgaaggactgtgaggccgaggtgcgggctgctgctgcccacaaggtgaaggagctgggggagaacctgcccatcgaggaccgggagaccatcatcatgaaccagatcctgccctacatcaaggagctggtgtctgacaccaaccagcacgtgaagagcgccctggccagcgtcatcatgggcctgagcaccatcctgggcaaggagaacaccatcgagcacctgctgcccctcttcctggcccagctgaaggatgagtgcccagatgtgcggctgaacatcatcagcaacctggactgtgtgaatgaggtgattggcatccggcagctgagccagagcctgctgcctgccatcgtggagctggctgaagatgccaagtggagggtgcggctggccatcatcgagtacatgcccctgctggccggccagctgggcgtggagttctttgatgagaagctgaacagcctgtgcatggcctggctggtggaccacgtgtatgccatccgggaggccgccaccaacaacctgatgaagctggtgcagaagtttggaacagagtgggcccagaacaccatcgtgcccaaggtgctggtgatggccaatgaccccaactacctgcacaggatgaccaccctcttctgcatcaatgccctgtctgaggcctgtggccaggagatcaccaccaagcagatgctgcccatcgtgctgaagatggccggggaccaggtggccaacgtgcgcttcaacgtggccaagagcctgcagaagattggccccatcctggacaccaatgccctgcagggcgaggtgaagcctgtgctgcagaagctgggccaggatgaggacatggatgtgaagtactttgcccaggaggccatctctgtggtggcccagaggctgaggaagctggagttccctgtgaaggacagcggggagcccagcgtgcccagggctgacaagaaccacttcccccggcccaccgtgcctggagaggacatgggcaaaggacctgtgtaccagctgcggggggacacccgggacaccctggcccagctgggcattgctgagctggtgcacttcagccagagcacagactag

SEQ ID NO: 21357 - DNA, 1425 bp, synthetic construct
  misc_feature 1..1425: note = Description of Artificial Sequence: Synthetic coding sequence
  source 1..1425: mol_type = other DNA
atggccggggccagcgagctgggcactggacctggagctgctggaggagatggagatgacagcctgtaccccatcgctgtgctgattgatgagctgagaaatgaagatgtgcagctgcggctgaacagcatcaagaagctgagcaccatcgccctggccctgggcgtggagaggaccaggtctgagctgctgcccttcctgacagacaccatctatgatgaagatgaggtgctgctggccctggccgagcagctgggcaacttcaccggcctggtgggcggccctgactttgcccactgcctgctggacagcgtgcggctgctggccgtggaggcctgtgtgtccatcgcccagctgctgagccaggatgacctggagaccctggtgatgcccaccctgcggcaggccgctgaggacaagtcctggagggtgcgctacatggtggccgaccgcttcagcgagctgcagaaggccatgggccccaagatcaccctgaatgacctgatcccagccttccagaacctgctgaaggactgtgaggccgaggtgcgggctgctgctgcccacaaggtgaaggagctgggggagaacctgcccattgaagatcgggagaccatcatcatgaaccagatcctgccctacatcaaggagctggtgtctgacaccaaccagcacgtgaagagcgccctggccagcgtcatcatgggcctgagcaccatcctgggcaaggagaacaccatcgagcacctgctgcccctcttcctggcccagctgaaggatgaatgtccagatgtgcggctgaacatcatcagcaacctggactgtgtgaatgaagtcatcggcatccggcagctgagccagagcctgctgcctgccatcgtggagctggccgaggatgccaagtggagggtgcggctggccatcatcgagtacatgcccctgctggccggccagctgggcgtggagttctttgatgagaagctgaacagcctgtgcatggcctggctggtggaccacgtgtatgccatccgggaggccgccaccaacaacctgatgaagctggtgcagaagtttggaacagagtgggcccagaacaccatcgtgcccaaggtgctggtgatggccaatgaccccaactacctgcacaggatgaccaccctcttctgcatcaatgccctgtctgaggcctgtggccaggagatcaccaccaagcagatgctgcccatcgtgctgaagatggccggggaccaggtggccaacgtgcgcttcaacgtggccaagagcctgcagaagattggccccatcctggacaccaatgccctgcagggcgaggtgaagcctgtgctgcagaagctgggccaggatgaggacatggatgtgaagtactttgcccaggaggccatctctgtgctggccctggcctag

SEQ ID NO: 21358 - DNA, 1365 bp, synthetic construct
  misc_feature 1..1365: note = Description of Artificial Sequence: Synthetic coding sequence
  source 1..1365: mol_type = other DNA
atggccggggccagcgagctgggcactggacctggagctgctggaggagatggagatgacagcctgtaccccatcgctgtgctgattgatgagctgagaaatgaagatgtgcagctgcggctgaacagcatcaagaagctgagcaccatcgccctggccctgggcgtggagaggaccaggtctgagctgctgcccttcctgacagacaccatctatgatgaagatgaggtgctgctggccctggccgagcagctgggcaacttcaccggcctggtgggcggccctgactttgcccactgcctgctggacagcgtgcggctgctggccgtggaggcctgtgtgtccatcgcccagctgctgagccaggatgacctggagaccctggtgatgcccaccctgcggcaggccgctgaggacaagtcctggagggtgcgctacatggtggccgaccgcttcagcgagctgcagaaggccatgggccccaagatcaccctgaatgacctgatcccagccttccagaacctgctgaaggactgtgaggccgaggtgcgggctgctgctgcccacaaggtgaaggagctgggggagaacctgcccattgaagatcgggagaccatcatcatgaaccagatcctgccctacatcaaggagctggtgtctgacaccaaccagcacgtgaagagcgccctggccagcgtcatcatgggcctgagcaccatcctgggcaaggagaacaccatcgagcacctgctgcccctcttcctggcccagctgaaggatgaatgtccagatgtgcggctgaacatcatcagcaacctggactgtgtgaatgaagtcatcggcatccggcagctgagccagagcctgctgcctgccatcgtggagctggccgaggatgccaagtggagggtgcggctggccatcatcgagtacatgcccctgctggccggccagctgggcgtggagttctttgatgagaagctgaacagcctgtgcatggcctggctggtggaccacgtgtatgccatccgggaggccgccaccaacaacctgatgaagctggtgcagaagtttggaacagagtgggcccagaacaccatcgtgcccaaggtgctggtgatggccaatgaccccaactacctgcacaggatgaccaccctcttctgcatcaatgccctgtctgaggcctgtggccaggagatcaccaccaagcagatgctgcccatcgtgaagaatggccggcggcccagcagcaagtgcagcctgcagtgtggccagatcagcaccaaggactggaccaacagccgctaccagtgcttcaccggccgctctgaggccagcaccacagaggtgcgcagcaggtag

SEQ ID NO: 21359 - DNA, 1812 bp, synthetic construct
  misc_feature 1..1812: note = Description of Artificial Sequence: Synthetic coding sequence
  source 1..1812: mol_type = other DNA
atggccggggccagcgagctgggcactggacctggagctgctggaggagatggagatgacagcctgtaccccatcgctgtgctgattgatgagctgagaaatgaagatgtgcagccccccctggagaacctggccaccgtggaggagaccgtggtgcgggacaaggctgtggagagcctgcggcagatcagccaggagcacacccctgtggccctggaggcctactttgtgcccctggtgaagaggctggccagcggggactggttcaccagcaggaccagcgcctgtggcctcttctctgtgtgctacccccgggccagcaatgctgtgaaggccgagatccggcagcagttccgcagcctgtgcagtgatgacacccccatggtgcggcgggctgctgccagcaagctgggggagtttgccaaggtgctggagctggacagcgtgaagtcagaaattgtgcccctcttcaccagcctggccagtgatgagcaggacagcgtgcggctgctggccgtggaggcctgtgtgtccatcgcccagctgctgagccaggatgacctggagaccctggtgatgcccaccctgcggcaggccgctgaggacaagtcctggagggtgcgctacatggtggccgaccgcttcagcgagctgcagaaggccatgggccccaagatcaccctgaatgacctgatcccagccttccagaacctgctgaaggactgtgaggccgaggtgcgggctgctgctgcccacaaggtgaaggagctgggggagaacctgcccatcgaggaccgggagaccatcatcatgaaccagatcctgccctacatcaaggagctggtgtctgacaccaaccagcacgtgaagagcgccctggccagcgtcatcatgggcctgagcaccatcctgggcaaggagaacaccatcgagcacctgctgcccctcttcctggcccagctgaaggatgagtgcccagatgtgcggctgaacatcatcagcaacctggactgtgtgaatgaggtgattggcatccggcagctgagccagagcctgctgcctgccatcgtggagctggctgaagatgccaagtggagggtgcggctggccatcatcgagtacatgcccctgctggccggccagctgggcgtggagttctttgatgagaagctgaacagcctgtgcatggcctggctggtggaccacgtgtatgccatccgggaggccgccaccaacaacctgatgaagctggtgcagaagtttggaacagagtgggcccagaacaccatcgtgcccaaggtgctggtgatggccaatgaccccaactacctgcacaggatgaccaccctcttctgcatcaatgccctgtctgaggcctgtggccaggagatcaccaccaagcagatgctgcccatcgtgctgaagatggccggggaccaggtggccaacgtgcgcttcaacgtggccaagagcctgcagaagattggccccatcctggacaccaatgccctgcagggcgaggtgaagcctgtgctgcagaagctgggccaggatgaggacatggatgtgaagtactttgcccaggaggccatctctgtggtggcccagaggctgaggaagctggagttccctgtgaaggacagcggggagcccagcgtgcccagggctgacaagaaccacttcccccggcccaccgtgcctggagaggacatgggcaaaggacctgtgtaccagctgcggggggacacccgggacaccctggcccagctgggcattgctgagctggtgcacttcagccagagcacagactag

SEQ ID NO: 21360 - DNA, 1323 bp, synthetic construct
  misc_feature 1..1323: note = Description of Artificial Sequence: Synthetic coding sequence
  source 1..1323: mol_type = other DNA
atgatgcagctgaccttctggctgcgggtgcccccacccttcagccacttcaagaggcagttccgcagcctgtgcagtgatgacacccccatggtgagaagagctgctgccagcaagctgggggagtttgccaaggtgctggagctggacagcgtgaagtctgagatcgtgcccctcttcaccagcctggccagtgatgagcaggacagcgtgcggctgctggccgtggaggcctgtgtgtccatcgcccagctgctgagccaggatgacctggagaccctggtgatgcccaccctgcggcaggccgctgaggacaagtcctggagggtgcgctacatggtggccgaccgcttcagcgagctgcagaaggccatgggccccaagatcaccctgaatgacctgatcccagccttccagaacctgctgaaggactgtgaggccgaggtgcgggctgctgctgcccacaaggtgaaggagctgggggagaacctgcccattgaagatcgggagaccatcatcatgaaccagatcctgccctacatcaaggagctggtgtctgacaccaaccagcacgtgaagagcgccctggccagcgtcatcatgggcctgagcaccatcctgggcaaggagaacaccatcgagcacctgctgcccctcttcctggcccagctgaaggatgaatgtccagatgtgcggctgaacatcatcagcaacctggactgtgtgaatgaagtcatcggcatccggcagctgagccagagcctgctgcctgccatcgtggagctggccgaggatgccaagtggagggtgcggctggccatcatcgagtacatgcccctgctggccggccagctgggcgtggagttctttgatgagaagctgaacagcctgtgcatggcctggctggtggaccacgtgtatgccatccgggaggccgccaccaacaacctgatgaagctggtgcagaagtttggaacagagtgggcccagaacaccatcgtgcccaaggtgctggtgatggccaatgaccccaactacctgcacaggatgaccaccctcttctgcatcaatgccctgtctgaggcctgtggccaggagatcaccaccaagcagatgctgcccatcgtgctgaagatggccggggaccaggtggccaacgtgcgcttcaacgtggccaagagcctgcagaagattggccccatcctggacaccaatgccctgcagggcgaggtgaagcctgtgctgcagaagctgggccaggatgaggacatggatgtgaagtactttgcccaggaggccatctctgtgctggccctggcctag

SEQ ID NO: 21361 - DNA, 1806 bp, synthetic construct
  misc_feature 1..1806: note = Description of Artificial Sequence: Synthetic coding sequence
  source 1..1806: mol_type = other DNA
atggccggggccagcgagctgggcactggacctggagctgctggaggagatggagatgacagcctgtaccccatcgctgtgctgattgatgagctgagaaatgaagatgtgcagctgcggctgaacagcatcaagaagctgagcaccatcgccctggccctgggcgtggagaggaccaggtctgagctgctgcccttcctgacagacaccatctatgatgaagatgaggtgctgctggccctggccgagcagctgggcaacttcaccggcctggtgggcggccctgactttgcccactgcctgctgccccccctggagaacctggccaccgtggaggagaccgtggtgcgggacaaggctgtggagagcctgcggcagatcagccaggagcacacccctgtggccctggaggcctactttgtgcccctggtgaagaggctggccagcggggactggttcaccagcaggaccagcgcctgtggcctcttctctgtgtgctacccccgggccagcaatgctgtgaaggccgagatccggcagcagttccgcagcctgtgcagtgatgacacccccatggtgcggcgggctgctgccagcaagctgggggagtttgccaaggtgctggagctggacagcgtgaagtcagaaattgtgcccctcttcaccagcctggccagtgatgagcaggacagcgtgcggctgctggccgtggaggcctgtgtgtccatcgcccagctgctgagccaggatgacctggagaccctggtgatgcccaccctgcggcaggccgctgaggacaagtcctggagggtgcgctacatggtggccgaccgcttcagcgagctgcagaaggccatgggccccaagatcaccctgaatgacctgatcccagccttccagaacctgctgaaggactgtgaggccgaggtgcgggctgctgctgcccacaaggtgaaggagctgggggagaacctgcccatcgaggaccgggagaccatcatcatgaaccagatcctgccctacatcaaggagctggtgtctgacaccaaccagcacgtgaagagcgccctggccagcgtcatcatgggcctgagcaccatcctgggcaaggagaacaccatcgagcacctgctgcccctcttcctggcccagctgaaggatgagtgcccagatgtgcggctgaacatcatcagcaacctggactgtgtgaatgaggtgattggcatccggcagctgagccagagcctgctgcctgccatcgtggagctggctgaagatgccaagtggagggtgcggctggccatcatcgagtacatgcccctgctggccggccagctgggcgtggagttctttgatgagaagctgaacagcctgtgcatggcctggctggtggaccacgtgtatgccatccgggaggccgccaccaacaacctgatgaagctggtgcagaagtttggaacagagtgggcccagaacaccatcgtgcccaaggtgctggtgatggccaatgaccccaactacctgcacaggatgaccaccctcttctgcatcaatgccctgtctgaggcctgtggccaggagatcaccaccaagcagatgctgcccatcgtgctgaagatggccggggaccaggtggccaacgtgcgcttcaacgtggccaagagcctgcagaagattggccccatcctggacaccaatgccctgcagggcgaggtgaagcctgtgctgcagaagctgggccaggatgaggacatggatgtgaagtactttgcccaggaggccatctctgtgctggccctggcctag

SEQ ID NO: 21362 - DNA, 1566 bp, synthetic construct
  misc_feature 1..1566: note = Description of Artificial Sequence: Synthetic coding sequence
  source 1..1566: mol_type = other DNA
atgagcggccgccgcttccacctgagcaccacagacagagtcatcaaggctgtgcccttcccccccacccagaggctgaccttcaaggaggtgtttgaaaatggcaagcccaaggtggatgtgctgaagaaccacctggtgaaggagggccgcctggaggaggaggtggccctgaagatcatcaatgatggagctgccatcctgcggcaggagaagaccatgattgaggtggatgcccccatcaccgtgtgtggggacatccacggccagttctttgacctgatgaagctgtttgaggtgggcggcagccccagcaacacccgctacctgttcctgggggactatgtggaccggggctacttcagcattgaatgtgtgctgtacctgtggagcctgaagatcaaccaccccaagaccctcttcctgctgcggggcaaccacgagtgccgccacctgacagactacttcaccttcaagcaggagtgccgcatcaagtacagcgagcaggtgtatgatgcctgcatggagacctttgactgcctgcccctggccgccctgctgaaccagcagttcctgtgtgtgcatggaggcatgagccctgagatcaccagcctggatgacatcaggaagctggaccgcttcacagagcccccagccttcggccctgtgtgtgacctgctgtggagcgaccccagtgaagattatggaaatgagaagaccctggagcactacacccacaacacagtgcggggctgcagctacttctacagctacccagctgtgtgtgagttcctgcagaacaacaacctgctgagcatcatccgggcccacgaggcccaggatgctggctacaggatgtacaggaagagccaggccaccggcttccccagcctcatcaccatcttcagcgcccccaactacctggatgtgtacaacaacaaggctgctgtgctgaagtatgaaaataatgtgatgaacatccggcagttcaactgcagcccccacccctactggctgcccaacttcatggatgtgttcacctggagcctgccctttgtgggggagaaggtgacagagatgctggtgaatgtgctgaacatctgcagtgatgatgagctgatcagtgatgatgaagctgaggaccactacatccccagctaccagaagggcagcaccaccgtgaggaaggagatcatccggaacaagatccgggccatcggcaagatggcccgggtcttcagcatcctgcggcaggagagcgagagcgtgctgaccctgaagggcctgacccccaccggcaccctgcccctgggcgtgctgagcggcggcaagcagaccattgaaacagccaccgtggaggccgtggaggcccgggaggccatccggggcttcagcctgcagcacaagatccgcagctttgaggaggcccggggcctggaccgcatcaatgaaagaatgccacccaggaaggacagcatccatgctgggggccccatgaagtctgtgaccagcgcccacagccatgctgcccacagaagtgaccagggcaagaaggcccacagctag

SEQ ID NO: 21363 - DNA, 1410 bp, synthetic construct
  misc_feature 1..1410: note = Description of Artificial Sequence: Synthetic coding sequence
  source 1..1410: mol_type = other DNA
atgtctgagcccaaggccatcgaccccaagctgagcaccacagacagagtggtgaaggctgtgcccttcccccccagccaccggctgacagccaaggaggtgtttgacaatgatggcaagccccgggtggacatcctgaaggcccacctgatgaaggagggccgcctggaggagagcgtggccctgcgcatcatcacagagggcgccagcatcctgcggcaggagaagaacctgctggacattgatgcccctgtgacagtgtgtggggacatccacggccagttctttgacctgatgaagctgtttgaggtgggcggcagccctgccaacacccgctacctgttcctgggggactatgtggaccggggctacttcagcattgaatgtgtgctgtacctgtgggccctgaagatcctgtaccccaagaccctcttcctgctgcggggcaaccacgagtgccgccacctgacagagtacttcaccttcaagcaggagtgcaagatcaagtacagcgagcgggtgtatgatgcctgcatggatgcctttgactgcctgcccctggccgccctgatgaaccagcagttcctgtgtgtgcatggaggcctgagccctgagatcaacaccctggatgacatcaggaagctggaccgcttcaaggagcccccagcctacggccccatgtgtgacatcctgtggagcgaccccctggaggactttggaaatgagaagacccaggagcacttcacccacaacacagtgcggggctgcagctacttctacagctacccagctgtgtgtgagttcctgcagcacaacaacctgctgagcatcctgcgggcccacgaggcccaggatgctggctacaggatgtacaggaagagccagaccaccggcttccccagcctcatcaccatcttcagcgcccccaactacctggatgtgtacaacaacaaggtgacagagatgctggtgaatgtgctgaacatctgcagtgatgatgagctgggctctgaagaagatggctttgatggagccacagctgctgccaggaaggaggtgatccggaacaagatccgggccatcggcaagatggcccgggtcttctctgtgctgcgggaggagagcgagagcgtgctgaccctgaagggcctgacccccaccggcatgctgcccagcggcgtgctgagcggcggcaagcagaccctgcagagcgccatcaagggcttcagcccccagcacaagatcaccagctttgaggaggccaagggcctggaccgcatcaatgaaagaatgccacccaggagagatgccatgcccagtgatgccaacctgaacagcatcaacaaggccctgaccagcgagaccaacggcacagacagcaatggcagcaacagcagcaacatccagtag

SEQ ID NO: 21364 - DNA, 1536 bp, synthetic construct
  misc_feature 1..1536: note = Description of Artificial Sequence: Synthetic coding sequence
  source 1..1536: mol_type = other DNA
atgtctgagcccaaggccatcgaccccaagctgagcaccacagacagagtggtgaaggctgtgcccttcccccccagccaccggctgacagccaaggaggtgtttgacaatgatggcaagccccgggtggacatcctgaaggcccacctgatgaaggagggccgcctggaggagagcgtggccctgcgcatcatcacagagggcgccagcatcctgcggcaggagaagaacctgctggacattgatgcccctgtgacagtgtgtggggacatccacggccagttctttgacctgatgaagctgtttgaggtgggcggcagccctgccaacacccgctacctgttcctgggggactatgtggaccggggctacttcagcattgaatgtgtgctgtacctgtgggccctgaagatcctgtaccccaagaccctcttcctgctgcggggcaaccacgagtgccgccacctgacagagtacttcaccttcaagcaggagtgcaagatcaagtacagcgagcgggtgtatgatgcctgcatggatgcctttgactgcctgcccctggccgccctgatgaaccagcagttcctgtgtgtgcatggaggcctgagccctgagatcaacaccctggatgacatcaggaagctggaccgcttcaaggagcccccagcctacggccccatgtgtgacatcctgtggagcgaccccctggaggactttggaaatgagaagacccaggagcacttcacccacaacacagtgcggggctgcagctacttctacagctacccagctgtgtgtgagttcctgcagcacaacaacctgctgagcatcctgcgggcccacgaggcccaggatgctggctacaggatgtacaggaagagccagaccaccggcttccccagcctcatcaccatcttcagcgcccccaactacctggatgtgtacaacaacaaggctgctgtgctgaagtatgaaaataatgtgatgaacatccggcagttcaactgcagcccccacccctactggctgcccaacttcatggatgtgttcacctggagcctgccctttgtgggggagaaggtgacagagatgctggtgaatgtgctgaacatctgcagtgatgatgagctgggctctgaagaagatggctttgatggagccacagctgctgccaggaaggaggtgatccggaacaagatccgggccatcggcaagatggcccgggtcttctctgtgctgcgggaggagagcgagagcgtgctgaccctgaagggcctgacccccaccggcatgctgcccagcggcgtgctgagcggcggcaagcagaccctgcagagcgccatcaagggcttcagcccccagcacaagatcaccagctttgaggaggccaagggcctggaccgcatcaatgaaagaatgccacccaggagagatgccatgcccagtgatgccaacctgaacagcatcaacaaggccctgaccagcgagaccaacggcacagacagcaatggcagcaacagcagcaacatccagtag

SEQ ID NO: 21365 - DNA, 1566 bp, synthetic construct
  misc_feature 1..1566: note = Description of Artificial Sequence: Synthetic coding sequence
  source 1..1566: mol_type = other DNA
atgtctgagcccaaggccatcgaccccaagctgagcaccacagacagagtggtgaaggctgtgcccttcccccccagccaccggctgacagccaaggaggtgtttgacaatgatggcaagccccgggtggacatcctgaaggcccacctgatgaaggagggccgcctggaggagagcgtggccctgcgcatcatcacagagggcgccagcatcctgcggcaggagaagaacctgctggacattgatgcccctgtgacagtgtgtggggacatccacggccagttctttgacctgatgaagctgtttgaggtgggcggcagccctgccaacacccgctacctgttcctgggggactatgtggaccggggctacttcagcattgaatgtgtgctgtacctgtgggccctgaagatcctgtaccccaagaccctcttcctgctgcggggcaaccacgagtgccgccacctgacagagtacttcaccttcaagcaggagtgcaagatcaagtacagcgagcgggtgtatgatgcctgcatggatgcctttgactgcctgcccctggccgccctgatgaaccagcagttcctgtgtgtgcatggaggcctgagccctgagatcaacaccctggatgacatcaggaagctggaccgcttcaaggagcccccagcctacggccccatgtgtgacatcctgtggagcgaccccctggaggactttggaaatgagaagacccaggagcacttcacccacaacacagtgcggggctgcagctacttctacagctacccagctgtgtgtgagttcctgcagcacaacaacctgctgagcatcctgcgggcccacgaggcccaggatgctggctacaggatgtacaggaagagccagaccaccggcttccccagcctcatcaccatcttcagcgcccccaactacctggatgtgtacaacaacaaggctgctgtgctgaagtatgaaaataatgtgatgaacatccggcagttcaactgcagcccccacccctactggctgcccaacttcatggatgtgttcacctggagcctgccctttgtgggggagaaggtgacagagatgctggtgaatgtgctgaacatctgcagtgatgatgagctgggctctgaagaagatggctttgatggagccacagctgctgccaggaaggaggtgatccggaacaagatccgggccatcggcaagatggcccgggtcttctctgtgctgcgggaggagagcgagagcgtgctgaccctgaagggcctgacccccaccggcatgctgcccagcggcgtgctgagcggcggcaagcagaccctgcagagcgccaccgtggaggccatcgaggctgatgaggccatcaagggcttcagcccccagcacaagatcaccagctttgaggaggccaagggcctggaccgcatcaatgaaagaatgccacccaggagagatgccatgcccagtgatgccaacctgaacagcatcaacaaggccctgaccagcgagaccaacggcacagacagcaatggcagcaacagcagcaacatccagtag

SEQ ID NO: 21366 - DNA, 1272 bp, synthetic construct
  misc_feature 1..1272: note = Description of Artificial Sequence: Synthetic coding sequence
  source 1..1272: mol_type = other DNA
atgaagctgtttgaggtgggcggcagccctgccaacacccgctacctgttcctgggggactatgtggaccggggctacttcagcattgaatgtgtgctgtacctgtgggccctgaagatcctgtaccccaagaccctcttcctgctgcggggcaaccacgagtgccgccacctgacagagtacttcaccttcaagcaggagtgcaagatcaagtacagcgagcgggtgtatgatgcctgcatggatgcctttgactgcctgcccctggccgccctgatgaaccagcagttcctgtgtgtgcatggaggcctgagccctgagatcaacaccctggatgacatcaggaagctggaccgcttcaaggagcccccagcctacggccccatgtgtgacatcctgtggagcgaccccctggaggactttggaaatgagaagacccaggagcacttcacccacaacacagtgcggggctgcagctacttctacagctacccagctgtgtgtgagttcctgcagcacaacaacctgctgagcatcctgcgggcccacgaggcccaggatgctggctacaggatgtacaggaagagccagaccaccggcttccccagcctcatcaccatcttcagcgcccccaactacctggatgtgtacaacaacaaggctgctgtgctgaagtatgaaaataatgtgatgaacatccggcagttcaactgcagcccccacccctactggctgcccaacttcatggatgtgttcacctggagcctgccctttgtgggggagaaggtgacagagatgctggtgaatgtgctgaacatctgcagtgatgatgagctgggctctgaagaagatggctttgatggagccacagctgctgccaggaaggaggtgatccggaacaagatccgggccatcggcaagatggcccgggtcttctctgtgctgcgggaggagagcgagagcgtgctgaccctgaagggcctgacccccaccggcatgctgcccagcggcgtgctgagcggcggcaagcagaccctgcagagcgccaccgtggaggccatcgaggctgatgaggccatcaagggcttcagcccccagcacaagatcaccagctttgaggaggccaagggcctggaccgcatcaatgaaagaatgccacccaggagagatgccatgcccagtgatgccaacctgaacagcatcaacaaggccctgaccagcgagaccaacggcacagacagcaatggcagcaacagcagcaacatccagtag

SEQ ID NO: 21367 - DNA, 870 bp, synthetic construct
  misc_feature 1..870: note = Description of Artificial Sequence: Synthetic coding sequence
  source 1..870: mol_type = other DNA
atgtctgagcccaaggccatcgaccccaagctgagcaccacagacagagtggtgaaggctgtgcccttcccccccagccaccggctgacagccaaggaggtgtttgacaatgatggcaagccccgggtggacatcctgaaggcccacctgatgaaggagggccgcctggaggagagcgtggccctgcgcatcatcacagagggcgccagcatcctgcggcaggagaagaacctgctggacattgatgcccctgtgacagctgctgtgctgaagtatgaaaataatgtgatgaacatccggcagttcaactgcagcccccacccctactggctgcccaacttcatggatgtgttcacctggagcctgccctttgtgggggagaaggtgacagagatgctggtgaatgtgctgaacatctgcagtgatgatgagctgggctctgaagaagatggctttgatggagccacagctgctgccaggaaggaggtgatccggaacaagatccgggccatcggcaagatggcccgggtcttctctgtgctgcgggaggagagcgagagcgtgctgaccctgaagggcctgacccccaccggcatgctgcccagcggcgtgctgagcggcggcaagcagaccctgcagagcgccaccgtggaggccatcgaggctgatgaggccatcaagggcttcagcccccagcacaagatcaccagctttgaggaggccaagggcctggaccgcatcaatgaaagaatgccacccaggagagatgccatgcccagtgatgccaacctgaacagcatcaacaaggccctgaccagcgagaccaacggcacagacagcaatggcagcaacagcagcaacatccagtag

SEQ ID NO: 21368 - DNA, 1365 bp, synthetic construct
  misc_feature 1..1365: note = Description of Artificial Sequence: Synthetic coding sequence
  source 1..1365: mol_type = other DNA
atgtctgagcccaaggccatcgaccccaagctgagcaccacagacagagtggtgaaggtgtgtggggacatccacggccagttctttgacctgatgaagctgtttgaggtgggcggcagccctgccaacacccgctacctgttcctgggggactatgtggaccggggctacttcagcattgaatgtgtgctgtacctgtgggccctgaagatcctgtaccccaagaccctcttcctgctgcggggcaaccatgaatgtcgccacctgacagagtacttcaccttcaagcaggagtgcaagatcaagtacagcgagcgggtgtatgatgcctgcatggatgcctttgactgcctgcccctggccgccctgatgaaccagcagttcctgtgtgtgcacggcggcctgagccctgagatcaacaccctggatgacatcaggaagctggaccgcttcaaggagcccccagcctacggccccatgtgtgacatcctgtggagcgaccccctggaggactttggaaatgagaagacccaggagcacttcacccacaacacagtgcggggctgcagctacttctacagctacccagctgtgtgtgagttcctgcagcacaacaacctgctgagcatcctgcgggcccacgaggcccaggatgctggctacaggatgtacaggaagagccagaccaccggcttccccagcctcatcaccatcttcagcgcccccaactacctggatgtgtacaacaacaaggctgctgtgctgaagtatgagaacaacgtgatgaacatccggcagttcaactgcagcccccacccctactggctgcccaacttcatggatgtgttcacctggagcctgccctttgtgggggagaaggtgacagagatgctggtgaatgtgctgaacatctgcagtgatgatgagctgggcagcgaggaggatggctttgatggagccacagctgctgccaggaaggaggtgatccggaacaagatccgggccatcggcaagatggcccgggtcttctctgtgctgcgggaggagagcgagagcgtgctgaccctgaagggcctgacccccaccggcatgctgcccagcggcgtgctgagcggcggcaagcagaccctgcagagcgccaccgtggaggccattgaagcagatgaggccatcaagggcttcagcccccagcacaagatcaccagctttgaggaggccaagggcctggaccgcatcaatgaaagaatgcccccaagaagagatgccatgcccagtgatgccaacctgaacagcatcaacaaggccctgaccagcgagaccaatggaacagacagcaatggcagcaacagcagcaacatccagtag

SEQ ID NO: 21369 - DNA, 399 bp, synthetic construct
  misc_feature 1..399: note = Description of Artificial Sequence: Synthetic coding sequence
  source 1..399: mol_type = other DNA
atgaaggagggccgcctggaggagagcgtggccctgcgcatcatcacagagggcgccagcatcctgcggcaggagaagaacctgctggacattgatgcccctgtgacagtgtgtggggacatccacggccagttctttgacctgatgaagctgtttgaggtgggcggcagccctgccaacacccgctacctgttcctgggggactatgtggaccggggctacttcagcattgaatgtgtgctgtacctgtgggccctgaagatcctgtaccccaagaccctcttcctgctgcggggcaaccacgagtgccgccacctgacagagtacttcaccttcaagcaggagtgcaagatcaagtacagcgagcgggtgtatgatgcctgcatggatgccttctag

SEQ ID NO: 21370 - DNA, 444 bp, synthetic construct
  misc_feature 1..444: note = Description of Artificial Sequence: Synthetic coding sequence
  source 1..444: mol_type = other DNA
atgaaggagggccgcctggaggagagcgtggccctgcgcatcatcacagagggcgccagcatcctgcggcaggagaagaacctgctggacattgatgcccctgtgacagtgtgtggggacatccacggccagttctttgacctgatgaagctgtttgaggtgggcggcagccctgccaacacccgctacctgttcctgggggactatgtggaccggggctacttcagcattgaatgtgtgctgtacctgtgggccctgaagatcctgtaccccaagaccctcttcctgctgcggggcaaccacgagtgccgccacctgacagagtacttcaccttcaagcaggagtgcaagatcaagtacagcgagcgggtgtatgatgcctgcatggatgcctttgactgcctgcccctggccgccctgatgaaccagcagttcctgtgctag

SEQ ID NO: 21371 - DNA, 1491 bp, synthetic construct
  misc_feature 1..1491: note = Description of Artificial Sequence: Synthetic coding sequence
  source 1..1491: mol_type = other DNA
atggccgcccctgagcccgcccgggccgcccctcctcctcctcctcctcctcctcctcctcctggagctgacagagtggtgaaggctgtgcccttcccccccacccaccggctgaccagcgaggaggtgtttgacctggatggcatcccccgggtggatgtgctgaagaaccacctggtgaaggagggccgggtggatgaggagatcgccctgcgcatcatcaatgaaggagctgccatcctgcggcgggagaagaccatgattgaggtggaggcccccatcaccgtgtgtggggacatccacggccagttctttgacctgatgaagctgtttgaggtgggcggcagccctgccaacacccgctacctgttcctgggggactatgtggaccggggctacttcagcattgaatgtgtgctgtacctgtgggtgctgaagatcctgtaccccagcaccctcttcctgctgcggggcaaccatgaatgtcgccacctgacagagtacttcaccttcaagcaggagtgcaagatcaagtacagcgagcgggtgtatgaggcctgcatggaggcctttgacagcctgcccctggccgccctgctgaaccagcagttcctgtgtgtgcacggcggcctgagccctgagatccacaccctggatgacatccggcggctggaccgcttcaaggagcccccagccttcggccccatgtgtgacctgctgtggagcgaccccagcgaggactttggaaatgagaagagccaggagcacttcagccacaacacagtgcggggctgcagctacttctacaactacccagctgtgtgtgagttcctgcagaacaacaacctgctgagcatcatccgggcccacgaggcccaggatgctggctacaggatgtacaggaagagccagaccaccggcttccccagcctcatcaccatcttcagcgcccccaactacctggatgtgtacaacaacaaggctgctgtgctgaagtatgagaacaacgtgatgaacatccggcagttcaactgcagcccccacccctactggctgcccaacttcatggatgtgttcacctggagcctgccctttgtgggggagaaggtgacagagatgctggtgaatgtgctgagcatctgcagtgatgatgagctgatgacagaaggagaggaccagtttgatggcagcgctgctgccaggaaggagatcatccggaacaagatccgggccatcggcaagatggcccgggtcttctctgtgctgcgggaggagagcgagagcgtgctgaccctgaagggcctgacccccaccggcatgctgcccagcggcgtgctggccggcggccggcagaccctgcagagcggaaatgatgtgatgcagctggccgtgccccagatggactggggcaccccccacagctttgccaacaacagccacaatgcctgccgggagttcctgctcttcttcagcagctgcctgagcagctag

SEQ ID NO: 21372 - DNA, 1575 bp, synthetic construct
  misc_feature 1..1575: note = Description of Artificial Sequence: Synthetic coding sequence
  source 1..1575: mol_type = other DNA
atggccgcccctgagcccgcccgggccgcccctcctcctcctcctcctcctcctcctcctcctggagctgacagagtggtgaaggctgtgcccttcccccccacccaccggctgaccagcgaggaggtgtttgacctggatggcatcccccgggtggatgtgctgaagaaccacctggtgaaggagggccgggtggatgaggagatcgccctgcgcatcatcaatgaaggagctgccatcctgcggcgggagaagaccatgattgaggtggaggcccccatcaccgtgtgtggggacatccacggccagttctttgacctgatgaagctgtttgaggtgggcggcagccctgccaacacccgctacctgttcctgggggactatgtggaccggggctacttcagcattgaatgtgtgctgtacctgtgggtgctgaagatcctgtaccccagcaccctcttcctgctgcggggcaaccatgaatgtcgccacctgacagagtacttcaccttcaagcaggagtgcaagatcaagtacagcgagcgggtgtatgaggcctgcatggaggcctttgacagcctgcccctggccgccctgctgaaccagcagttcctgtgtgtgcacggcggcctgagccctgagatccacaccctggatgacatccggcggctggaccgcttcaaggagcccccagccttcggccccatgtgtgacctgctgtggagcgaccccagcgaggactttggaaatgagaagagccaggagcacttcagccacaacacagtgcggggctgcagctacttctacaactacccagctgtgtgtgagttcctgcagaacaacaacctgctgagcatcatccgggcccacgaggcccaggatgctggctacaggatgtacaggaagagccagaccaccggcttccccagcctcatcaccatcttcagcgcccccaactacctggatgtgtacaacaacaaggctgctgtgctgaagtatgagaacaacgtgatgaacatccggcagttcaactgcagcccccacccctactggctgcccaacttcatggatgtgttcacctggagcctgccctttgtgggggagaaggtgacagagatgctggtgaatgtgctgagcatctgcagtgatgatgagctgatgacagaaggagaggaccagtttgatggcagcgctgctgccaggaaggagatcatccggaacaagatccgggccatcggcaagatggcccgggtcttctctgtgctgcgggaggagagcgagagcgtgctgaccctgaagggcctgacccccaccggcatgctgcccagcggcgtgctggccggcggccggcagaccctgcagagcgccaccgtggaggccattgaagctgagaaggccatccggggcttcagccccccccaccgcatctgcagctttgaggaggccaagggcctggaccgcatcaatgaaagaatgccacccaggaaggatgctgtgcagcaggacggcttcaacagcctgaacacagcccacgccacagagaaccacggcaccggcaaccacacagcccagtag

SEQ ID NO: 21373 - DNA, 1545 bp, synthetic construct
  misc_feature 1..1545: note = Description of Artificial Sequence: Synthetic coding sequence
  source 1..1545: mol_type = other DNA
atggccgcccctgagcccgcccgggccgcccctcctcctcctcctcctcctcctcctcctcctggagctgacagagtggtgaaggctgtgcccttcccccccacccaccggctgaccagcgaggaggtgtttgacctggatggcatcccccgggtggatgtgctgaagaaccacctggtgaaggagggccgggtggatgaggagatcgccctgcgcatcatcaatgaaggagctgccatcctgcggcgggagaagaccatgattgaggtggaggcccccatcaccgtgtgtggggacatccacggccagttctttgacctgatgaagctgtttgaggtgggcggcagccctgccaacacccgctacctgttcctgggggactatgtggaccggggctacttcagcattgagcacgtgctgggcacagaggacatcagcatcaacccccacaacaacatcaatgaatgtgtgctgtacctgtgggtgctgaagatcctgtaccccagcaccctcttcctgctgcggggcaaccatgaatgtcgccacctgacagagtacttcaccttcaagcaggagtgcaagatcaagtacagcgagcgggtgtatgaggcctgcatggaggcctttgacagcctgcccctggccgccctgctgaaccagcagttcctgtgtgtgcacggcggcctgagccctgagatccacaccctggatgacatccggcggctggaccgcttcaaggagcccccagccttcggccccatgtgtgacctgctgtggagcgaccccagcgaggactttggaaatgagaagagccaggagcacttcagccacaacacagtgcggggctgcagctacttctacaactacccagctgtgtgtgagttcctgcagaacaacaacctgctgagcatcatccgggcccacgaggcccaggatgctggctacaggatgtacaggaagagccagaccaccggcttccccagcctcatcaccatcttcagcgcccccaactacctggatgtgtacaacaacaaggctgctgtgctgaagtatgagaacaacgtgatgaacatccggcagttcaactgcagcccccacccctactggctgcccaacttcatggatgtgttcacctggagcctgccctttgtgggggagaaggtgacagagatgctggtgaatgtgctgagcatctgcagtgatgatgagctgatgacagaaggagaggaccagtttgatggcagcgctgctgccaggaaggagatcatccggaacaagatccgggccatcggcaagatggcccgggtcttctctgtgctgcgggaggagagcgagagcgtgctgaccctgaagggcctgacccccaccggcatgctgcccagcggcgtgctggccggcggccggcagaccctgcagagcggaaatgatgtgatgcagctggccgtgccccagatggactggggcaccccccacagctttgccaacaacagccacaatgcctgccgggagttcctgctcttcttcagcagctgcctgagcagctag

SEQ ID NO: 21374 - DNA, 591 bp, synthetic construct
  misc_feature 1..591: note = Description of Artificial Sequence: Synthetic coding sequence
  source 1..591: mol_type = other DNA
atgaacatccggcagttcaactgcagcccccacccctactggctgcccaacttcatggatgtgttcacctggagcctgccctttgtgggggagaaggtgacagagatgctggtgaatgtgctgagcatctgcagtgatgatgagctgatgacagaaggagaggaccagtttgatgagcggctcatctacggcaacaagaagggcagcgctgctgccaggaaggagatcatccggaacaagatccgggccatcggcaagatggcccgggtcttctctgtgctgcgggaggagagcgagagcgtgctgaccctgaagggcctgacccccaccggcatgctgcccagcggcgtgctggccggcggccggcagaccctgcagagcgccaccgtggaggccattgaagctgagaaggccatccggggcttcagccccccccaccgcatctgcagctttgaggaggccaagggcctggaccgcatcaatgaaagaatgccacccaggaaggatgctgtgcagcaggacggcttcaacagcctgaacacagcccacgccacagagaaccacggcaccggcaaccacacagcccagtag

SEQ ID NO: 21375 - DNA, 1548 bp, synthetic construct
  misc_feature 1..1548: note = Description of Artificial Sequence: Synthetic coding sequence
  source 1..1548: mol_type = other DNA
atggccgcccctgagcccgcccgggccgcccctcctcctcctcctcctcctcctcctcctcctggagctgacagagtggtgaaggctgtgcccttcccccccacccaccggctgaccagcgaggaggtgtttgacctggatggcatcccccgggtggatgtgctgaagaaccacctggtgaaggagggccgggtggatgaggagatcgccctgcgcatcatcaatgaaggagctgccatcctgcggcgggagaagaccatgattgaggtggaggcccccatcaccgtgtgtggggacatccacggccagttctttgacctgatgaagctgtttgaggtgggcggcagccctgccaacacccgctacctgttcctgggggactatgtggaccggggctacttcagcattgaatgtgtgctgtacctgtgggtgctgaagatcctgtaccccagcaccctcttcctgctgcggggcaaccatgaatgtcgccacctgacagagtacttcaccttcaagcaggagtgcaagatcaagtacagcgagcgggtgtatgaggcctgcatggaggcctttgacagcctgcccctggccgccctgctgaaccagcagttcctgtgtgtgcacggcggcctgagccctgagatccacaccctggatgacatccggcggctggaccgcttcaaggagcccccagccttcggccccatgtgtgacctgctgtggagcgaccccagcgaggactttggaaatgagaagagccaggagcacttcagccacaacacagtgcggggctgcagctacttctacaactacccagctgtgtgtgagttcctgcagaacaacaacctgctgagcatcatccgggcccacgaggcccaggatgctggctacaggatgtacaggaagagccagaccaccggcttccccagcctcatcaccatcttcagcgcccccaactacctggatgtgtacaacaacaaggctgctgtgctgaagtatgagaacaacgtgatgaacatccggcagttcaactgcagcccccacccctactggctgcccaacttcatggatgtgttcacctggagcctgccctttgtgggggagaaggtgacagagatgctggtgaatgtgctgagcatctgcagtgatgatgagctgatgacagaaggagaggaccagtttgatgtgggcagcgctgctgccaggaaggagatcatccggaacaagatccgggccatcggcaagatggcccgggtcttctctgtgctgcgggaggagagcgagagcgtgctgaccctgaagggcctgacccccaccggcatgctgcccagcggcgtgctggccggcggccggcagaccctgcagagcgccatccggggcttcagccccccccaccgcatctgcagctttgaggaggccaagggcctggaccgcatcaatgaaagaatgccacccaggaaggatgctgtgcagcaggacggcttcaacagcctgaacacagcccacgccacagaaaatcatggaactggaaaccacacagcccagtag

SEQ ID NO: 21376 - DNA, 1578 bp, synthetic construct
  misc_feature 1..1578: note = Description of Artificial Sequence: Synthetic coding sequence
  source 1..1578: mol_type = other DNA
atggccgcccctgagcccgcccgggccgcccctcctcctcctcctcctcctcctcctcctcctggagctgacagagtggtgaaggctgtgcccttcccccccacccaccggctgaccagcgaggaggtgtttgacctggatggcatcccccgggtggatgtgctgaagaaccacctggtgaaggagggccgggtggatgaggagatcgccctgcgcatcatcaatgaaggagctgccatcctgcggcgggagaagaccatgattgaggtggaggcccccatcaccgtgtgtggggacatccacggccagttctttgacctgatgaagctgtttgaggtgggcggcagccctgccaacacccgctacctgttcctgggggactatgtggaccggggctacttcagcattgaatgtgtgctgtacctgtgggtgctgaagatcctgtaccccagcaccctcttcctgctgcggggcaaccatgaatgtcgccacctgacagagtacttcaccttcaagcaggagtgcaagatcaagtacagcgagcgggtgtatgaggcctgcatggaggcctttgacagcctgcccctggccgccctgctgaaccagcagttcctgtgtgtgcacggcggcctgagccctgagatccacaccctggatgacatccggcggctggaccgcttcaaggagcccccagccttcggccccatgtgtgacctgctgtggagcgaccccagcgaggactttggaaatgagaagagccaggagcacttcagccacaacacagtgcggggctgcagctacttctacaactacccagctgtgtgtgagttcctgcagaacaacaacctgctgagcatcatccgggcccacgaggcccaggatgctggctacaggatgtacaggaagagccagaccaccggcttccccagcctcatcaccatcttcagcgcccccaactacctggatgtgtacaacaacaaggctgctgtgctgaagtatgagaacaacgtgatgaacatccggcagttcaactgcagcccccacccctactggctgcccaacttcatggatgtgttcacctggagcctgccctttgtgggggagaaggtgacagagatgctggtgaatgtgctgagcatctgcagtgatgatgagctgatgacagaaggagaggaccagtttgatgtgggcagcgctgctgccaggaaggagatcatccggaacaagatccgggccatcggcaagatggcccgggtcttctctgtgctgcgggaggagagcgagagcgtgctgaccctgaagggcctgacccccaccggcatgctgcccagcggcgtgctggccggcggccggcagaccctgcagagcgccaccgtggaggccatcgaggccgagaaggccatccggggcttcagccccccccaccgcatctgcagctttgaggaggccaagggcctggaccgcatcaatgaaagaatgccacccaggaaggatgctgtgcagcaggacggcttcaacagcctgaacacagcccacgccacagaaaatcatggaactggaaaccacacagcccagtag

SEQ ID NO: 21377 - DNA, 561 bp, synthetic construct
  misc_feature 1..561: note = Description of Artificial Sequence: Synthetic coding sequence
  source 1..561: mol_type = other DNA
cacccctactggctgcccaacttcatggatgtgttcacctggagcctgccctttgtgggggagaaggtgacagagatgctggtgaatgtgctgagcatctgcagtgatgatgagctgatgacagaaggagaggaccagtttgatgagcggctcatctacggcaacaagaagggcagcgctgctgccaggaaggagatcatccggaacaagatccgggccatcggcaagatggcccgggtcttctctgtgctgcgggaggagagcgagagcgtgctgaccctgaagggcctgacccccaccggcatgctgcccagcggcgtgctggccggcggccggcagaccctgcagagcgccaccgtggaggccattgaagctgagaaggccatccggggcttcagccccccccaccgcatctgcagctttgaggaggccaagggcctggaccgcatcaatgaaagaatgccacccaggaaggatgctgtgcagcaggacggcttcaacagcctgaacacagcccacgccacagagaaccacggcaccggcaaccacacagcccagtag

SEQ ID NO: 21378 - DNA, 459 bp, synthetic construct
  misc_feature 1..459: note = Description of Artificial Sequence: Synthetic coding sequence
  source 1..459: mol_type = other DNA
atgctggtgaatgtgctgagcatctgcagtgatgatgagctgatgacagaaggagaggaccagtttgatggcagcgctgctgccaggaaggagatcatccggaacaagatccgggccatcggcaagatggcccgggtcttctctgtgctgcgggaggagagcgagagcgtgctgaccctgaagggcctgacccccaccggcatgctgcccagcggcgtgctggccggcggccggcagaccctgcagagcgccaccgtggaggccattgaagctgagaaggccatccggggcttcagccccccccaccgcatctgcagctttgaggaggccaagggcctggaccgcatcaatgaaagaatgccacccaggaaggatgctgtgcagcaggacggcttcaacagcctgaacacagcccacgccacagagaaccacggcaccggcaaccacacagcccagtag

SEQ ID NO: 21379 - DNA, 1236 bp, synthetic construct
  misc_feature 1..1236: note = Description of Artificial Sequence: Synthetic coding sequence
  source 1..1236: mol_type = other DNA
atgattgaggtggaggcccccatcaccgtgtgtggggacatccacggccagttctttgacctgatgaagctgtttgaggtgggcggcagccctgccaacacccgctacctgttcctgggggactatgtggaccggggctacttcagcattgaatgtgtgctgtacctgtgggtgctgaagatcctgtaccccagcaccctcttcctgctgcggggcaaccatgaatgtcgccacctgacagagtacttcaccttcaagcaggagtgcaagatcaagtacagcgagcgggtgtatgaggcctgcatggaggcctttgacagcctgcccctggccgccctgctgaaccagcagttcctgtgtgtgcacggcggcctgagccctgagatccacaccctggatgacatccggcggctggaccgcttcaaggagcccccagccttcggccccatgtgtgacctgctgtggagcgaccccagcgaggactttggaaatgagaagagccaggagcacttcagccacaacacagtgcggggctgcagctacttctacaactacccagctgtgtgtgagttcctgcagaacaacaacctgctgagcatcatccgggcccacgaggcccaggatgctggctacaggatgtacaggaagagccagaccaccggcttccccagcctcatcaccatcttcagcgcccccaactacctggatgtgtacaacaacaaggctgctgtgctgaagtatgagaacaacgtgatgaacatccggcagttcaactgcagcccccacccctactggctgcccaacttcatggatgtgttcacctggagcctgccctttgtgggggagaaggtgacagagatgctggtgaatgtgctgagcatctgcagtgatgatgagctgatgacagaaggagaggaccagtttgatgtgggcagcgctgctgccaggaaggagatcatccggaacaagatccgggccatcggcaagatggcccgggtcttctctgtgctgcgggaggagagcgagagcgtgctgaccctgaagggcctgacccccaccggcatgctgcccagcggcgtgctggccggcggccggcagaccctgcagagcggaaatgatgtgatgcagctggccgtgccccagatggactggggcaccccccacagctttgccaacaacagccacaatgcctgccgggagttcctgctcttcttcagcagctgcctgagcagctag

SEQ ID NO: 21380 - DNA, 1539 bp, synthetic construct
  misc_feature 1..1539: note = Description of Artificial Sequence: Synthetic coding sequence
  source 1..1539: mol_type = other DNA
atgagcggccgccgcttccacctgagcaccacagacagagtcatcaaggctgtgcccttcccccccacccagaggctgaccttcaaggaggtgtttgaaaatggcaagcccaaggtggatgtgctgaagaaccacctggtgaaggagggccgcctggaggaggaggtggccctgaagatcatcaatgatggagctgccatcctgcggcaggagaagaccatgattgaggtggatgcccccatcaccgtgtgtggggacatccacggccagttctttgacctgatgaagctgtttgaggtgggcggcagccccagcaacacccgctacctgttcctgggggactatgtggaccggggctacttcagcattgaatgtgtgctgtacctgtggagcctgaagatcaaccaccccaagaccctcttcctgctgcggggcaaccacgagtgccgccacctgacagactacttcaccttcaagcaggagtgccgcatcaagtacagcgagcaggtgtatgatgcctgcatggagacctttgactgcctgcccctggccgccctgctgaaccagcagttcctgtgtgtgcatggaggcatgagccctgagatcaccagcctggatgacatcaggaagctggaccgcttcacagagcccccagccttcggccctgtgtgtgacctgctgtggagcgaccccagtgaagattatggaaatgagaagaccctggagcactacacccacaacacagtgcggggctgcagctacttctacagctacccagctgtgtgtgagttcctgcagaacaacaacctgctgagcatcatccgggcccacgaggcccaggatgctggctacaggatgtacaggaagagccaggccaccggcttccccagcctcatcaccatcttcagcgcccccaactacctggatgtgtacaacaacaaggctgctgtgctgaagtatgaaaataatgtgatgaacatccggcagttcaactgcagcccccacccctactggctgcccaacttcatggatgtgttcacctggagcctgccctttgtgggggagaaggtgacagagatgctggtgaatgtgctgaacatctgcagtgatgatgagctgatcagtgatgatgaagctgagggcagcaccaccgtgaggaaggagatcatccggaacaagatccgggccatcggcaagatggcccgggtcttcagcatcctgcggcaggagagcgagagcgtgctgaccctgaagggcctgacccccaccggcaccctgcccctgggcgtgctgagcggcggcaagcagaccatcgagacagccaccgtggaggccgtggaggcccgggaggccatccggggcttcagcctgcagcacaagatccgcagctttgaggaggcccggggcctggaccgcatcaatgaaagaatgccacccaggaaggacagcatccacgccggcggccccatgaagtctgtgaccagcgcccacagccacgccgcccacagaagtgaccagggcaagaaggcccacagctag

SEQ ID NO: 21381 - DNA, 1509 bp, synthetic construct
  misc_feature 1..1509: note = Description of Artificial Sequence: Synthetic coding sequence
  source 1..1509: mol_type = other DNA
atgagcggccgccgcttccacctgagcaccacagacagagtcatcaaggctgtgcccttcccccccacccagaggctgaccttcaaggaggtgtttgaaaatggcaagcccaaggtggatgtgctgaagaaccacctggtgaaggagggccgcctggaggaggaggtggccctgaagatcatcaatgatggagctgccatcctgcggcaggagaagaccatgattgaggtggatgcccccatcaccgtgtgtggggacatccacggccagttctttgacctgatgaagctgtttgaggtgggcggcagccccagcaacacccgctacctgttcctgggggactatgtggaccggggctacttcagcattgaatgtgtgctgtacctgtggagcctgaagatcaaccaccccaagaccctcttcctgctgcggggcaaccacgagtgccgccacctgacagactacttcaccttcaagcaggagtgccgcatcaagtacagcgagcaggtgtatgatgcctgcatggagacctttgactgcctgcccctggccgccctgctgaaccagcagttcctgtgtgtgcatggaggcatgagccctgagatcaccagcctggatgacatcaggaagctggaccgcttcacagagcccccagccttcggccctgtgtgtgacctgctgtggagcgaccccagtgaagattatggaaatgagaagaccctggagcactacacccacaacacagtgcggggctgcagctacttctacagctacccagctgtgtgtgagttcctgcagaacaacaacctgctgagcatcatccgggcccacgaggcccaggatgctggctacaggatgtacaggaagagccaggccaccggcttccccagcctcatcaccatcttcagcgcccccaactacctggatgtgtacaacaacaaggctgctgtgctgaagtatgaaaataatgtgatgaacatccggcagttcaactgcagcccccacccctactggctgcccaacttcatggatgtgttcacctggagcctgccctttgtgggggagaaggtgacagagatgctggtgaatgtgctgaacatctgcagtgatgatgagctgatcagtgatgatgaagctgagggcagcaccaccgtgaggaaggagatcatccggaacaagatccgggccatcggcaagatggcccgggtcttcagcatcctgcggcaggagagcgagagcgtgctgaccctgaagggcctgacccccaccggcaccctgcccctgggcgtgctgagcggcggcaagcagaccatcgagacagccatccggggcttcagcctgcagcacaagatccgcagctttgaggaggcccggggcctggaccgcatcaatgaaagaatgccacccaggaaggacagcatccacgccggcggccccatgaagtctgtgaccagcgcccacagccacgccgcccacagaagtgaccagggcaagaaggcccacagctag

SEQ ID NO: 21382 - DNA, 345 bp, synthetic construct
  misc_feature 1..345: note = Description of Artificial Sequence: Synthetic coding sequence
  source 1..345: mol_type = other DNA
atgtactacaagttcagcggcttcacccagaagctggccggggcctgggccagcgaggcctacagcccccagggcctgaagcctgtggtgtccacagaggccccacccatcatctttgccacccccaccaagctgaccagtgacagcacagtgtatgactatgccggcaagaacaaggtgcctgagctgcagaagttcttccagaaggcagatggagtgcctgtgtacctgaagaggggcctgcctgaccagatgctgtaccgcaccaccatggccctgactgtgggcggcaccatctactgcctgattgccctgtacatggccagccagcccaagaacaagtag

SEQ ID NO: 21383 - DNA, 522 bp, synthetic construct
  misc_feature 1..522: note = Description of Artificial Sequence: Synthetic coding sequence
  source 1..522: mol_type = other DNA
atgagcaccatgggaaatgaggccagctacccagctgagatgtgcagccactttgacaatgatgagatcaagaggctgggccgccgcttcaagaagctggacctggacaagagcggcagcctgtctgtggaggagttcatgagcctgcctgagctgcggcacaaccccctggtgagaagagtgattgatgtgtttgacacagatggagatggagaggtggacttcaaggagttcatcctgggcaccagccagttctctgtgaagggagatgaggagcagaagctgcgctttgccttcagcatctatgacatggacaaggatggctacatcagcaatggagagctgttccaggtgctgaagatgatggtgggcaacaacctgacagactggcagctgcagcagctggtggacaagaccatcatcatcctggacaaggatggagatggcaagatcagctttgaggagttctctgctgtggtgcgggacctggagatccacaagaagctggtgctgattgtgtag

SEQ ID NO: 21384 - DNA, 420 bp, synthetic construct
  misc_feature 1..420: note = Description of Artificial Sequence: Synthetic coding sequence
  source 1..420: mol_type = other DNA
atgagcaccatgggaaatgaggccagctacccagctgagatgtgcagccactttgacaatgatgagatcaagaggctgggccgccgcttcaagaagctggacctggacaagagcggcagcctgtctgtggaggagttcatgagcctgcctgagctgcggcacaaccccctggtgagaagagtgattgatgtgtttgacacagatggagatggagaggtggacttcaaggagttcatcctgggcaccagccagttctctgtgaagggagatgaggagcagaagctgcgctttgccttcagcatctatgacatggacaaggatggctacatcagcaatggagagctgttccaggtgctgaagatgatggtgggcaacaacctgacagactggcagctgcagcagctggtgctgattgtgtag

SEQ ID NO: 21385 - DNA, 1818 bp, synthetic construct
  misc_feature 1..1818: note = Description of Artificial Sequence: Synthetic coding sequence
  source 1..1818: mol_type = other DNA
atggccggcctgtacagcctgggcgtgtctgtgttcagtgaccagggcggcaggaagtacatggaggatgtgacccagatcgtggtggagcctgagcccacagctgaggagaagcccagcccccggcgcagcctgagccagcccctgcccccccggcccagccctgctgccctgcctggaggagaggtgtctgggaagggccctgctgtggccgcccgggaggcccgggaccccctgcctgatgctggggccagccctgcccccagccgctgctgcagaagaagaagctctgtggccttctttgctgtgtgtgatggccatggaggccgggaggccgcccagtttgcccgggagcacctgtggggcttcatcaagaagcagaagggcttcaccagcagcgagcccgccaaggtgtgtgccgccatcaggaagggcttcctggcctgccacctggccatgtggaagaagctggccgagtggcccaagaccatgacaggcctgcccagcaccagcggcaccacagcctctgtggtgatcatccggggcatgaagatgtatgtggcccacgtgggggacagcggcgtggtgctgggcatccaggatgaccccaaggatgactttgtgcgggctgtggaggtgacccaggaccacaagccagagctgcccaaggagcgggagcgcatcgagggcctgggcggctctgtgatgaacaagtctggagtgaacagagtggtgtggaagaggccccggctgacccacaacggccctgtgcggcgcagcacagtgattgaccagatccccttcctggccgtggcccgggccctgggggacctgtggagctatgacttcttctctggagaatttgtggtgtccccagagccagacacctctgtgcacaccctggacccccagaagcacaagtacatcatcctgggcagtgatggcctgtggaacatgatccccccccaggatgccatctccatgtgccaggaccaggaggagaagaagtacctgatgggagagcacggccagagctgtgccaagatgctggtgaacagagccctgggccgctggaggcagaggatgctgcgggctgacaacaccagcgccatcgtcatctgcatcagccctgaggtggacaaccagggcaacttcaccaatgaagatgagctgtacctgaacctgacagacagccccagctacaacagccaggagacctgtgtgatgacccccagcccctgcagcaccccacctgtgaagagcctggaggaggacccctggccccgggtgaacagcaaggaccacatcccagccctggtgcgcagcaatgccttcagcgagaacttcctggaggtgtctgctgagatcgccagagaaaatgtgcagggcgtggtgatccccagcaaggaccctgagcccctggaggagaactgtgccaaggccctgaccctgcgcatccatgacagcctgaacaacagcctgcccatcggcctggtgcccaccaacagcaccaacacagtgatggaccagaagaacctgaagatgagcaccccaggccagatgaaggcccaggagattgaaagaacaccacccaccaacttcaagaggaccctggaggagagcaacagcggccccctgatgaagaagcacagaagaaatggcctgagccgcagcagcggggcccagcctgccagcctgcccaccaccagccagaggaagaacagcgtgaagctgaccatgagaagaaggctgcggggccagaagaagattggcaaccccctgctgcaccagcacaggaagacagtgtgtgtgtgctag

SEQ ID NO: 21386 - DNA, 1293 bp, synthetic construct
  misc_feature 1..1293: note = Description of Artificial Sequence: Synthetic coding sequence
  source 1..1293: mol_type = other DNA
atggccggcctgtacagcctgggcgtgtctgtgttcagtgaccagggcggcaggaagtacatggaggatgtgacccagatcgtggtggagcctgagcccacagctgaggagaagcccagcccccggcgcagcctgagccagcccctgcccccccggcccagccctgctgccctgcctggaggagaggtgtctgggaagggccctgctgtggccgcccgggaggcccgggaccccctgcctgatgctggggccagccctgcccccagccgctgctgcagaagaagaagctctgtggccttctttgctgtgtgtgatggccatggaggccgggaggccgcccagtttgcccgggagcacctgtggggcttcatcaagaagcagaagggcttcaccagcagcgagcccgccaaggtgtgtgccgccatcaggaagggcttcctggcctgccacctggccatgtggaagaagctggccgagtggcccaagaccatgacaggcctgcccagcaccagcggcaccacagcctctgtggtgatcatccggggcatgaagatgtatgtggcccacgtgggggacagcggcgtggtgctgggcatccaggatgaccccaaggatgactttgtgcgggctgtggaggtgacccaggaccacaagccagagctgcccaaggagcgggagcgcatcgagggcctgggcggctctgtgatgaacaagtctggagtgaacagagtggtgtggaagaggccccggctgacccacaacggccctgtgcggcgcagcacagtgattgaccagatccccttcctggccgtggcccgggccctgggggacctgtggagctatgacttcttctctggagaatttgtggtgtccccagagccagacacctctgtgcacaccctggacccccagaagcacaagtacatcatcctgggcagtgatggcctgtggaacatgatccccccccaggatgccatctccatgtgccaggaccaggaggagaagaagtacctgatgggagagcacggccagagctgtgccaagatgctggtgaacagagccctgggccgctggaggcagaggatgctgcgggctgacaacaccagcgccatcgtcatctgcatcagccctgaggtggacaaccagggcaacttcaccaatgaagatgagctgtacctgaacctgacagacagccccagctacaacagccaggagacctgtgtgatgacccccagcccctgcagcaccccacctgtgaaggactttggatttgagctggacagcaggaagtag

SEQ ID NO: 21387 - DNA, 837 bp, synthetic construct
  misc_feature 1..837: note = Description of Artificial Sequence: Synthetic coding sequence
  source 1..837: mol_type = other DNA
atgtggaagaagctggccgagtggcccaagaccatgacaggcctgcccagcaccagcggcaccacagcctctgtggtgatcatccggggcatgaagatgtatgtggcccacgtgggggacagcggcgtggtgctgggcatccaggatgaccccaaggatgactttgtgcgggctgtggaggtgacccaggaccacaagccagagctgcccaaggagcgggagcgcatcgagggcctgggcggctctgtgatgaacaagtctggagtgaacagagtggtgtggaagaggccccggctgacccacaacggccctgtgcggcgcagcacagtgattgaccagatccccttcctggccgtggcccgggccctgggggacctgtggagctatgacttcttctctggagaatttgtggtgtccccagagccagacacctctgtgcacaccctggacccccagaagcacaagtacatcatcctgggcagtgatggcctgtggaacatgatccccccccaggatgccatctccatgtgccaggaccaggaggagaagaagtacctgatgggagagcacggccagagctgtgccaagatgctggtgaacagagccctgggccgctggaggcagaggatgctgcgggctgacaacaccagcgccatcgtcatctgcatcagccctgaggtggacaaccagggcaacttcaccaatgaagatgagctgtacctgaacctgacagacagccccagctacaacagccaggagacctgtgtgatgacccccagcccctgcagcaccccacctgtgaaggactttggatttgagctggacagcaggaagtag

SEQ ID NO: 21388 - DNA, 3432 bp, synthetic construct
  misc_feature 1..3432: note = Description of Artificial Sequence: Synthetic coding sequence
  source 1..3432: mol_type = other DNA
atgtacctgtggctgaagctgctggccttcggctttgccttcctggacacagaggtgtttgtgacaggccagagccccacccccagccccacagatgcctacctgaatgccagcgagaccaccaccctgagccccagcggcagcgctgtgatcagcaccaccaccatcgccaccacccccagcaagcccacctgtgatgagaagtatgccaacatcaccgtggactacctgtacaacaaggagaccaagctgttcaccgccaagctgaatgtgaatgaaaatgtggagtgtggcaacaacacctgcaccaacaatgaggtgcacaacctgacagagtgcaagaatgcctctgtgtccatcagccacaacagctgcacagccccagacaagaccctcatcctggatgtgcccccaggagtggagaagttccagctgcatgactgcacccaggtggagaaggctgacaccaccatctgcctgaagtggaagaacatcgagaccttcacctgtgacacccagaacatcacctaccgcttccagtgtggcaacatgatctttgacaacaaggagatcaagctggagaacctggagcctgagcacgagtacaagtgtgacagcgagatcctgtacaacaaccacaagttcaccaatgccagcaagatcatcaagacagactttggcagccctggagagccccagatcatcttctgccgctctgaggccgcccaccagggcgtcatcacctggaaccccccccagaggagcttccacaacttcaccctgtgctacatcaaggagacagagaaggactgcctgaacctggacaagaacctgatcaagtatgacctgcagaacctgaagccctacaccaagtatgtgctgagcctgcacgcctacatcatcgccaaggtgcagagaaatggatctgctgccatgtgccacttcaccaccaagagcgccccacccagccaggtgtggaacatgacagtgtccatgaccagtgacaacagcatgcacgtgaagtgccggcccccccgggacagaaatggcccccatgagcgctaccacctggaggtggaggccggcaacaccctggtgagaaatgaaagccacaagaactgtgacttccgggtgaaggacctgcagtacagcacagactacaccttcaaggcctacttccacaatggagactacccaggagagcccttcatcctgcaccacagcaccagctacaacagcaaggccctgattgccttcctggccttcctgatcatcgtgaccagcatcgccctgctggtggtgctgtacaagatctatgacctgcacaagaagaggagctgcaacctggatgagcagcaggagctggtggagagagatgatgagaagcagctgatgaatgtggagcccatccacgccgacatcctgctggagacctacaagaggaagattgctgatgagggccgcctcttcctggccgagttccagagcatccccagggtcttcagcaagttccccatcaaggaggccaggaagcccttcaaccagaacaagaaccgctacgtggacatcctgccctatgactacaacagagtggagctgtctgagatcaatggagatgctggcagcaactacatcaatgccagctacattgatggcttcaaggagcccaggaagtacatcgccgcccagggccccagagatgaaacagtggatgacttctggaggatgatctgggagcagaaggccaccgtgattgtgatggtgacccgctgtgaggagggcaacagaaacaagtgtgccgagtactggcccagcatggaggagggcacccgggcctttggagatgtggtggtgaagatcaaccagcacaagcgctgcccagactacatcatccagaagctgaacatcgtgaacaagaaggagaaggccaccggccgggaggtgacccacatccagttcacctcctggccagaccatggagtgcctgaggacccccacctgctgctgaagctgcggaggagagtgaatgccttcagcaacttcttcagcggccccatcgtggtgcactgcagcgctggggtgggccgcacaggcacctacatcggcattgatgccatgctggagggcctggaggccgagaacaaggtggatgtgtatggctacgtggtgaagctgcggcggcagcgctgcctgatggtgcaggtggaggcccagtacatcctgatccaccaggccctggtggagtacaaccagtttggagaaacagaggtgaacctgtctgagctgcacccctacctgcacaacatgaagaagagggacccccccagcgagcccagccccctggaggccgagttccagaggctgcccagctaccgctcctggaggacccagcacatcggcaaccaggaggagaacaagagcaagaacagaaacagcaatgtcatcccctatgactacaacagagtgcccctgaagcatgagctggagatgagcaaggagagcgagcatgacagtgatgagagcagtgatgatgacagcgacagcgaggagcccagcaagtacatcaatgccagcttcatcatgagctactggaagccagaggtgatgattgctgcccagggccccctgaaggagaccatcggggacttctggcagatgatcttccagaggaaggtgaaggtgattgtgatgctgacagagctgaagcatggagaccaggagatctgtgcccagtactggggcgagggcaagcagacctacggggacatcgaggtggacctgaaggacacagacaagagcagcacctacaccctgcgggtgtttgagctgcggcacagcaagaggaaggacagcaggacagtgtaccagtaccagtacaccaactggagcgtggagcagctgcctgctgagcccaaggagctgatctccatgatccaggtggtgaagcagaagctgccccagaagaacagcagcgagggcaacaagcaccacaagagcacccccctgctgatccactgcagagatggcagccagcagacaggcatcttctgtgccctgctgaacctgctggagagcgctgagacagaggaggtggtggacatcttccaggtggtgaaggccctgaggaaggcccggcccggcatggtgtccacctttgagcagtaccagttcctgtatgatgtgattgccagcacctacccagcccagaatggccaggtgaagaagaacaaccaccaggaggacaagattgaatttgacaatgaggtggacaaggtgaagcaggatgccaactgtgtgaaccccctgggcgcccctgagaagctgcctgaggccaaggagcaggccgagggcagcgagcccaccagcggcacagagggccctgagcacagcgtgaatggacctgccagccctgccctgaaccagggcagctag

SEQ ID NO: 21389 - DNA, 105 bp, synthetic construct
  misc_feature 1..105: note = Description of Artificial Sequence: Synthetic coding sequence
  source 1..105: mol_type = other DNA
atgtacctgtggctgaagctgctggccttcggctttgccttcctggacacagaggtgtttgtgacaggccagagccccacccccagccccaccgggaagaactag

SEQ ID NO: 21390 - DNA, 447 bp, synthetic construct
  misc_feature 1..447: note = Description of Artificial Sequence: Synthetic coding sequence
  source 1..447: mol_type = other DNA
atggccaggatgaacagacctgcccctgtggaggtgacctacaagaacatgaggttcctgatcacccacaaccccaccaatgccaccctgaacaagttcatcgaggagctgaagaagtatggagtgaccaccatcgtgcgggtgtgtgaggccacctatgacaccaccctggtggagaaggagggcatccacgtgctggactggccctttgatgatggagccccacccagcaaccagatcgtggatgactggctgagcctggtgaagatcaagttccgggaggagcccggctgctgcatcgctgtgcactgtgtggccggcctgggcaggaagagaagaggagccttcaacagcaagcagctgctgtacctggagaagtaccggcccaagatgaggctgcgcttcaaggacagcaatggccacaggaacaactgctgcatccagtag

SEQ ID NO: 21391 - DNA, 447 bp, synthetic construct; identical to SEQ ID NO: 21390
  misc_feature 1..447: note = Description of Artificial Sequence: Synthetic coding sequence
  source 1..447: mol_type = other DNA

SEQ ID NO: 21392 - DNA, 522 bp, synthetic construct
  misc_feature 1..522: note = Description of Artificial Sequence: Synthetic coding sequence
  source 1..522: mol_type = other DNA
atggccaggatgaacagacctgcccctgtggaggtgacctacaagaacatgaggttcctgatcacccacaaccccaccaatgccaccctgaacaagttcatcgaggagctgaagaagtatggagtgaccaccatcgtgcgggtgtgtgaggccacctatgacaccaccctggtggagaaggagggcatccacgtgctggactggccctttgatgatggagccccacccagcaaccagatcgtggatgactggctgagcctggtgaagatcaagttccgggaggagcccggctgctgcatcgctgtgcactgtgtggccggcctgggccgggcccctgtgctggtggccctggccctgattgagggcggcatgaagtatgaagatgctgtgcagttcatccggcagaagagaagaggagccttcaacagcaagcagctgctgtacctggagaagtaccggcccaagatgaggctgcgcttcaaggacagcaatggccacaggaacaactgctgcatccagtag

SEQ ID NO: 21393 - DNA, 1308 bp, synthetic construct
  misc_feature 1..1308: note = Description of Artificial Sequence: Synthetic coding sequence
  source 1..1308: mol_type = other DNA
atggagatggagaaggagtttgagcagattgacaagagcggctcctgggccgccatctaccaggacatcagacatgaggccagtgacttcccctgccgggtggccaagctgcccaagaacaagaacagaaaccgctacagagatgtgagcccctttgaccacagccgcatcaagctgcaccaggaggacaatgactacatcaatgccagcctcatcaagatggaggaggcccagaggagctacatcctgacccagggccccctgcccaacacctgtggccacttctgggagatggtgtgggagcagaagagccggggcgtggtgatgctgaacagagtgatggagaagggcagcctgaagtgtgcccagtactggccccagaaggaggagaaggagatgatctttgaggacaccaacctgaagctgaccctcatcagcgaggacatcaagagctactacacagtgcggcagctggagctggagaacctgaccacccaggagacccgggagatcctgcacttccactacaccacctggccagactttggagtgcctgagagccctgccagcttcctgaacttcctgttcaaggtgcgggagagcggcagcctgagccctgagcacggccctgtggtggtgcactgcagcgctggcatcggccgcagcggcaccttctgcctggccgacacctgcctgctgctgatggacaagaggaaggaccccagctctgtggacatcaagaaggtgctgctggagatgaggaagttcaggatgggcctcatccagacagctgaccagctgcgcttctcctacctggccgtgattgaaggagccaagttcatcatgggagacagctctgtgcaggaccagtggaaggagctgagccatgaggacctggagcccccacctgagcacatccccccaccaccccggccccccaagaggatcctggagccccacaatggaaaatgtcgggagttcttccccaaccaccagtgggtgaaggaggagacccaggaggacaaggactgccccatcaaggaggagaagggcagccccctgaatgctgccccctatggaattgaatccatgagccaggacacagaggtgcgcagccgggtggtgggcggcagcctgcggggggcccaggccgccagccctgccaagggggagcccagcctgcctgagaaggatgaagatcatgccctgagctactggaagcccttcctggtgaacatgtgtgtggccaccgtgctgacagctggggcctacctgtgctaccgcttcctgttcaacagcaacacctag

SEQ ID NO: 21394 - DNA, 1089 bp, synthetic construct
  misc_feature 1..1089: note = Description of Artificial Sequence: Synthetic coding sequence
  source 1..1089: mol_type = other DNA
atggaggaggcccagaggagctacatcctgacccagggccccctgcccaacacctgtggccacttctgggagatggtgtgggagcagaagagcagaggagtggtgatgctgaacagagtgatggagaagggcagcctgaagtgtgcccagtactggccccagaaggaggagaaggagatgatctttgaggacaccaacctgaagctgaccctcatcagcgaggacatcaagagctactacacagtgcggcagctggagctggagaacctgaccacccaggagacccgggagatcctgcacttccactacaccacctggccagactttggagtgcctgagagccctgccagcttcctgaacttcctgttcaaggtgcgggagagcggcagcctgagccctgagcacggccctgtggtggtgcactgcagcgctggcatcggccgcagcggcaccttctgcctggccgacacctgcctgctgctgatggacaagaggaaggaccccagctctgtggacatcaagaaggtgctgctggagatgaggaagttcaggatgggcctcatccagacagctgaccagctgcgcttctcctacctggccgtcatcgagggcgccaagttcatcatgggagacagctctgtgcaggaccagtggaaggagctgagccatgaggacctggagcccccacctgagcacatccccccaccacccaggcctcccaagaggatcctggagccccacaacgggaagtgccgggagttcttccccaaccaccagtgggtgaaggaggagacccaggaggacaaggactgccccatcaaggaggagaagggcagccccctgaatgctgccccctacggcatcgagagcatgagccaggacacagaggtgcgcagccgggtggtgggcggcagcctgcggggggcccaggccgccagccctgccaagggggagcccagcctgcctgagaaggatgaggaccacgccctgagctactggaagcccttcctggtgaacatgtgtgtggccaccgtgctgacagctggggcctacctgtgctaccgcttcctgttcaacagcaacacctag

SEQ ID NO: 21395 - DNA, 1782 bp, synthetic construct
  misc_feature 1..1782: note = Description of Artificial Sequence: Synthetic coding sequence
  source 1..1782: mol_type = other DNA
atgaccagccgccgctggttccaccccaacatcaccggggtggaggccgagaacctgctgctgacccggggcgtggatggcagcttcctggcccggcccagcaagagcaaccctggggacttcaccctgtctgtgagaagaaatggagctgtgacccacatcaagatccagaacacaggagactactatgacctgtatggaggagagaagtttgccaccctggccgagctggtgcagtactacatggagcaccacggccagctgaaggagaagaatggagatgtgattgagctgaagtaccccctgaactgtgccgaccccaccagcgagcgctggttccacggccacctgagcggcaaggaggccgagaagctgctgacagagaagggcaagcacggcagcttcctggtgcgggagagccagagccaccctggggactttgtgctgtctgtgaggactggagatgacaagggggagagcaatgatggcaagagcaaggtgacccacgtgatgatccgctgccaggagctgaagtatgatgtgggcggcggggagagatttgacagcctgacagacctggtggagcactacaagaagaaccccatggtggagaccctgggcaccgtgctgcagctgaagcagcccctgaacaccacccgcatcaatgctgctgagattgagagccgggtgcgggagctgagcaagctggccgagaccacagacaaggtgaagcagggcttctgggaggagtttgagaccctgcagcagcaggagtgcaagctgctgtacagcaggaaggagggccagaggcaggagaacaagaacaagaaccgctacaagaacatcctgccctttgaccacaccagggtggtgctgcatgatggagaccccaatgaacctgtgtctgactacatcaatgccaacatcatcatgcctgagtttgagaccaagtgcaacaacagcaagcccaagaagagctacatcgccacccagggctgcctgcagaacacagtgaatgacttctggaggatggtgttccaggagaacagccgggtgattgtgatgaccaccaaggaggtggagcggggcaagagcaaatgtgtgaagtactggccagatgaatatgccctgaaggagtatggagtgatgagggtgagaaatgtgaaggagagcgctgcccatgactacaccctgcgggagctgaagctgagcaaggtgggccagggcaacacagagaggacagtgtggcagtaccacttccgcacctggccagaccacggcgtgcccagcgaccccggcggcgtgctggacttcctggaggaggtgcaccacaagcaggagagcatcatggatgctggccctgtggtggtgcactgcagcgctggcattggaagaacaggcaccttcatcgtcatcgacatcctgattgacatcatccgggagaagggcgtggactgtgacattgatgtgcccaagaccatccagatggtgcgcagccagaggagcggcatggtgcagacagaggcccagtaccgcttcatctacatggctgtgcagcactacatcgagaccctgcagaggagaattgaggaggagcagaagagcaagaggaagggccacgagtacaccaacatcaagtacagcctggccgaccagaccagcggggaccagagccccctgcccccctgcacccccaccccaccctgtgccgagatgagggaggacagcgcccgggtgtatgaaaatgtgggcctgatgcagcagcagaagagcttcagatag

SEQ ID NO: 21396 - DNA, 651 bp, synthetic construct
  misc_feature 1..651: note = Description of Artificial Sequence: Synthetic coding sequence
  source 1..651: mol_type = other DNA
atgaccagccgccgctggttccaccccaacatcaccggggtggaggccgagaacctgctgctgacccggggcgtggatggcagcttcctggcccggcccagcaagagcaaccctggggacttcaccctgtctgtgagaagaaatggagctgtgacccacatcaagatccagaacacaggagactactatgacctgtatggaggagagaagtttgccaccctggccgagctggtgcagtactacatggagcaccacggccagctgaaggagaagaatggagatgtgattgagctgaagtaccccctgaactgtgccgaccccaccagcgagcgctggttccacggccacctgagcggcaaggaggccgagaagctgctgacagagaagggcaagcacggcagcttcctggtgcgggagagccagagccaccctggggactttgtgctgtctgtgaggactggagatgacaagggggagagcaatgatggcaagagcaaggtgacccacgtgatgatccgctgccaggagctgaagtatgatgtgggcggcggggagagatttgacagcctgacagacctggtggagcactacaagaagaaccccatggtggagaccctgggcaccgtgctgcagctgaagcagcccctgtag

SEQ ID NO: 21397 - DNA, 1383 bp, synthetic construct
  misc_feature 1..1383: note = Description of Artificial Sequence: Synthetic coding sequence
  source 1..1383: mol_type = other DNA
atgaccagccgccgctggttccaccccaacatcaccggggtggaggccgagaacctgctgctgacccggggcgtggatggcagcttcctggcccggcccagcaagagcaaccctggggacttcaccctgtctgtgagaagaaatggagctgtgacccacatcaagatccagaacacaggagactactatgacctgtatggaggagagaagtttgccaccctggccgagctggtgcagtactacatggagcaccacggccagctgaaggagaagaatggagatgtgattgagctgaagtaccccctgaactgtgccgaccccaccagcgagcgctggttccacggccacctgagcggcaaggaggccgagaagctgctgacagagaagggcaagcacggcagcttcctggtgcgggagagccagagccaccctggggactttgtgctgtctgtgaggactggagatgacaagggggagagcaatgatggcaagagcaaggtgacccacgtgatgatccgctgccaggagctgaagtatgatgtgggcggcggggagagatttgacagcctgacagacctggtggagcactacaagaagaaccccatggtggagaccctgggcaccgtgctgcagctgaagcagcccctgaacaccacccgcatcaatgctgctgagattgagagccgggtgcgggagctgagcaagctggccgagaccacagacaaggtgaagcagggcttctgggaggagtttgagaccctgcagcagcaggagtgcaagctgctgtacagcaggaaggagggccagaggcaggagaacaagaacaagaaccgctacaagaacatcctgccctttgaccacaccagggtggtgctgcatgatggagaccccaatgaacctgtgtctgactacatcaatgccaacatcatcatgcctgagtttgagaccaagtgcaacaacagcaagcccaagaagagctacatcgccacccagggctgcctgcagaacacagtgaatgacttctggaggatggtgttccaggagaacagccgggtgattgtgatgaccaccaaggaggtggagcggggcaagagcaaatgtgtgaagtactggccagatgaatatgccctgaaggagtatggagtgatgagggtgagaaatgtgaaggagagcgctgcccatgactacaccctgcgggagctgaagctgagcaaggtgggccagggcaacacagagaggacagtgtggcagtaccacttccgcacctggccagaccacggcgtgcccagcgaccccggcggcgtgctggacttcctggaggaggtgcaccacaagcaggagagcatcatggatgctggccctgtggtggtgcactgcaggtag

SEQ ID NO: 21398 - DNA, 723 bp, synthetic construct
  misc_feature 1..723: note = Description of Artificial Sequence: Synthetic coding sequence
  source 1..723: mol_type = other DNA
atgtacctgtggctgaagctgctggccttcggctttgccttcctggacacagaggtgtttgtgacaggccagagccccacccccagccccaccggccacctgcaggccgaggagcagggcagccagagcaagagccccaacctgaagagccgggaggccgacagcagcgccttctcctggtggcccaaggcccgggagcccctgaccaaccactggaggctgaccacagccaagatgcccagcgtgcccctgagcagtgaccccctgcccacccacaccacagccttcagccctgccagcacctttgaaagagaaaatgacttcagcgagaccaccaccagcctgagcccagacaacaccagcacccaggtgtccccagacagcctggacaatgccagcgccttcaacaccaccggggtgtcctctgtgcagaccccccacctgcccacccacgccgacagccagacccccagcgctggaacagacacccagaccttcagcggcagcgctgccaatgccaagctgaaccccaccccaggcagcaatgccatcagtgatgtgcctggagagaggagcacagccagcaccttccccacagatcctgtgagccccctgaccaccaccctgagcctggcccaccacagcagcgctgccctgcctgcccggaccagcaacaccaccatcacagccaacaccagtgatgcctacctgaatgccagctag

SEQ ID NO: 21399 - DNA, 3432 bp, synthetic construct; identical to SEQ ID NO: 21388
  misc_feature 1..3432: note = Description of Artificial Sequence: Synthetic coding sequence
  source 1..3432: mol_type = other DNA

SEQ ID NO: 21400 - DNA, 3771 bp, synthetic construct
  misc_feature 1..3771: note = Description of Artificial Sequence: Synthetic coding sequence
  source 1..3771: mol_type = other DNA
atgtacctgtggctgaagctgctggccttcggctttgccttcctggacacagaggtgtttgtgacaggccagagccccacccccagccccaccggcctgaccacagccaagatgcccagcgtgcccctgagcagtgaccccctgcccacccacaccacagccttctccccagccagcacctttgagcgggagaatgacttcagcgagaccaccaccagcctgagcccagacaacaccagcacccaggtgtccccagacagcctggacaatgccagcgccttcaacaccactggagtgtcctctgtgcagaccccccacctgcccacccatgctgacagccagaccccatctgctggaacagacacccagaccttcagcggcagcgctgccaatgccaagctgaaccccaccccaggcagcaatgccatcagtgatgcctacctgaatgccagcgagaccaccaccctgagccccagcggcagcgctgtgatcagcaccaccaccatcgccaccacccccagcaagcccacctgtgatgagaagtatgccaacatcaccgtggactacctgtacaacaaggagaccaagctgttcaccgccaagctgaatgtgaatgaaaatgtggagtgtggcaacaacacctgcaccaacaatgaggtgcacaacctgacagagtgcaagaatgcctctgtgtccatcagccacaacagctgcacagccccagacaagaccctcatcctggatgtgcccccaggagtggagaagttccagctgcatgactgcacccaggtggagaaggctgacaccaccatctgcctgaagtggaagaacatcgagaccttcacctgtgacacccagaacatcacctaccgcttccagtgtggcaacatgatctttgacaacaaggagatcaagctggagaacctggagcctgagcacgagtacaagtgtgacagcgagatcctgtacaacaaccacaagttcaccaatgccagcaagatcatcaagacagactttggcagccctggagagccccagatcatcttctgccgctctgaggccgcccaccagggcgtcatcacctggaaccccccccagaggagcttccacaacttcaccctgtgctacatcaaggagacagagaaggactgcctgaacctggacaagaacctgatcaagtatgacctgcagaacctgaagccctacaccaagtatgtgctgagcctgcacgcctacatcatcgccaaggtgcagagaaatggcagcgctgccatgtgccacttcaccaccaagagcgccccacccagccaggtgtggaacatgacagtgtccatgaccagtgacaacagcatgcacgtgaagtgcaggcctccccgggacagaaatggcccccatgagcgctaccacctggaggtggaggccggcaacaccctggtgagaaatgaaagccacaagaactgtgacttccgggtgaaggacctgcagtacagcacagactacaccttcaaggcctacttccacaacggggactacccaggagagcccttcatcctgcaccacagcaccagctacaacagcaaggccctgattgccttcctggccttcctgatcatcgtgaccagcatcgccctgctggtggtgctgtacaagatctatgacctgcacaagaagaggagctgcaacctggatgagcagcaggagctggtggagagagatgatgagaagcagctgatgaatgtggagcccatccatgctgacatcctgctggagacctacaagaggaagattgctgatgagggccgcctcttcctggccgagttccagagcatccccagggtcttcagcaagttccccatcaaggaggccaggaagcccttcaaccagaacaagaacagatatgtggacatcctgccctatgactacaacagagtggagctgtctgagatcaatggagatgctggcagcaactacatcaatgccagctacattgatggcttcaaggagcccaggaagtacatcgccgcccagggccccagagatgagaccgtggatgacttctggaggatgatctgggagcagaaggccaccgtcatcgtgatggtgacccgctgtgaggagggcaacagaaataaatgtgccgagtactggcccagcatggaggagggcacccgggcctttggagatgtggtggtgaagatcaaccagcacaagcgctgcccagactacatcatccagaagctgaacatcgtgaacaagaaggagaaggccaccggccgggaggtgacccacatccagttcacctcctggccagaccacggcgtgcctgaggacccccacctgctgctgaagctgcggcggcgggtgaatgccttcagcaacttcttcagcggccccatcgtggtgcactgcagcgctggggtgggccgcacaggcacctacatcggcattgatgccatgctggagggcctggaggccgagaacaaggtggatgtgtatggctacgtggtgaagctgcggcggcagcgctgcctgatggtgcaggtggaggcccagtacatcctgatccaccaggccctggtggagtacaaccagtttggagaaacagaggtgaacctgtctgagctgcacccctacctgcacaacatgaagaagagggaccccccatctgagcccagccccctggaggccgagttccagaggctgcccagctaccgctcctggaggacccagcacatcggcaaccaggaggagaacaagagcaagaacagaaacagcaatgtcatcccctatgactacaacagagtgcccctgaagcatgagctggagatgagcaaggagagcgagcatgacagtgatgagagcagtgatgatgacagcgacagcgaggagcccagcaagtacatcaatgccagcttcatcatgagctactggaagccagaggtgatgattgctgcccagggccccctgaaggagaccatcggggacttctggcagatgatcttccagaggaaggtgaaggtgattgtgatgctgacagagctgaagcacggggaccaggagatctgtgcccagtactggggcgagggcaagcagacctatggagacatcgaggtggacctgaaggacacagacaagagcagcacctacaccctgcgggtgtttgagctgcggcacagcaagaggaaggacagcaggacagtgtaccagtaccagtacaccaactggagcgtggagcagctgcctgctgagcccaaggagctgatctccatgatccaggtggtgaagcagaagctgccccagaagaacagcagcgagggcaacaagcaccacaagagcacccccctgctgatccactgcagagatggcagccagcagacaggcatcttctgtgccctgctgaacctgctggagagcgctgagacagaggaggtggtggacatcttccaggtggtgaaggccctgaggaaggcccggcccggcatggtgtccacctttgagcagtaccagttcctgtatgatgtgattgccagcacctacccagcccagaatggccaggtgaagaagaacaaccaccaggaggacaagattgaatttgacaatgaggtggacaaggtgaagcaggatgccaactgtgtgaaccccctgggcgcccctgagaagctgcctgaggccaaggagcaggccgagggcagcgagcccaccagcggcacagagggccctgagcacagcgtgaatggacctgccagccctgccctgaaccagggcagctag

SEQ ID NO: 21401 - DNA, 2208 bp, synthetic construct
  misc_feature 1..2208: note = Description of Artificial Sequence: Synthetic coding sequence
  source 1..2208: mol_type = other DNA
atgaccatgtacctgtggctgaagctgctggccttcggctttgccttcctggacacagaggtgtttgtgacaggccagagccccacccccagccccactggagtgtcctctgtgcagaccccccacctgcccacccatgctgacagccagaccccatctgctggaacagacacccagaccttcagcggcagcgctgccaatgccaagctgaaccccaccccaggcagcaatgccatcagtgatgtgcctggagagaggagcacagccagcaccttccccacagatcctgtgagccccctgaccaccaccctgagcctggcccaccacagcagcgctgccctgcctgcccggaccagcaacaccaccatcacagccaacaccagtgatgcctacctgaatgccagcgagaccaccaccctgagccccagcggcagcgctgtgatcagcaccaccaccatcgccaccacccccagcaagcccacctgtgatgagaagtatgccaacatcaccgtggactacctgtacaacaaggagaccaagctgttcaccgccaagctgaatgtgaatgaaaatgtggagtgtggcaacaacacctgcaccaacaatgaggtgcacaacctgacagagtgcaagaatgcctctgtgtccatcagccacaacagctgcacagccccagacaagaccctcatcctggatgtgcccccaggagtggagaagttccagctgcatgactgcacccaggtggagaaggctgacaccaccatctgcctgaagtggaagaacatcgagaccttcacctgtgacacccagaacatcacctaccgcttccagtgtggcaacatgatctttgacaacaaggagatcaagctggagaacctggagcctgagcacgagtacaagtgtgacagcgagatcctgtacaacaaccacaagttcaccaatgccagcaagatcatcaagacagactttggcagccctggagagccccagatcatcttctgccgctctgaggccgcccaccagggcgtcatcacctggaaccccccccagaggagcttccacaacttcaccctgtgctacatcaaggagacagagaaggactgcctgaacctggacaagaacctgatcaagtatgacctgcagaacctgaagccctacaccaagtatgtgctgagcctgcacgcctacatcatcgccaaggtgcagagaaatggcagcgctgccatgtgccacttcaccaccaagagcgccccacccagccaggtgtggaacatgacagtgtccatgaccagtgacaacagcatgcacgtgaagtgcaggcctccccgggacagaaatggcccccatgagcgctaccacctggaggtggaggccggcaacaccctggtgagaaatgaaagccacaagaactgtgacttccgggtgaaggacctgcagtacagcacagactacaccttcaaggcctacttccacaacggggactacccaggagagcccttcatcctgcaccacagcaccagctacaacagcaaggccctgattgccttcctggccttcctgatcatcgtgaccagcatcgccctgctggtggtgctgtacaagatctatgacctgcacaagaagaggagctgcaacctggatgagcagcaggagctggtggagagagatgatgagaagcagctgatgaatgtggagcccatccatgctgacatcctgctggagacctacaagaggaagattgctgatgagggccgcctcttcctggccgagttccagagcatccccagggtcttcagcaagttccccatcaaggaggccaggaagcccttcaaccagaacaagaacagatatgtggacatcctgccctatgactacaacagagtggagctgtctgagatcaatggagatgctggcagcaactacatcaatgccagctacattgatggcttcaaggagcccaggaagtacatcgccgcccagggccccagagatgagaccgtggatgacttctggaggatgatctgggagcagaaggccaccgtcatcgtgatggtgacccgctgtgaggagggcaacagaaataaatgtgccgagtactggcccagcatggaggagggcacccgggcctttggagatgtggtggtgaagatcaaccagcacaagcgctgcccagactacatcatccagaagctgaacatcgtgaactag

SEQ ID NO: 21402 - DNA, 2202 bp, synthetic construct
  misc_feature 1..2202: note = Description of Artificial Sequence: Synthetic coding sequence
  source 1..2202: mol_type = other DNA
atgtacctgtggctgaagctgctggccttcggctttgccttcctggacacagaggtgtttgtgacaggccagagccccacccccagccccactggagtgtcctctgtgcagaccccccacctgcccacccatgctgacagccagaccccatctgctggaacagacacccagaccttcagcggcagcgctgccaatgccaagctgaaccccaccccaggcagcaatgccatcagtgatgtgcctggagagaggagcacagccagcaccttccccacagatcctgtgagccccctgaccaccaccctgagcctggcccaccacagcagcgctgccctgcctgcccggaccagcaacaccaccatcacagccaacaccagtgatgcctacctgaatgccagcgagaccaccaccctgagccccagcggcagcgctgtgatcagcaccaccaccatcgccaccacccccagcaagcccacctgtgatgagaagtatgccaacatcaccgtggactacctgtacaacaaggagaccaagctgttcaccgccaagctgaatgtgaatgaaaatgtggagtgtggcaacaacacctgcaccaacaatgaggtgcacaacctgacagagtgcaagaatgcctctgtgtccatcagccacaacagctgcacagccccagacaagaccctcatcctggatgtgcccccaggagtggagaagttccagctgcatgactgcacccaggtggagaaggctgacaccaccatctgcctgaagtggaagaacatcgagaccttcacctgtgacacccagaacatcacctaccgcttccagtgtggcaacatgatctttgacaacaaggagatcaagctggagaacctggagcctgagcacgagtacaagtgtgacagcgagatcctgtacaacaaccacaagttcaccaatgccagcaagatcatcaagacagactttggcagccctggagagccccagatcatcttctgccgctctgaggccgcccaccagggcgtcatcacctggaaccccccccagaggagcttccacaacttcaccctgtgctacatcaaggagacagagaaggactgcctgaacctggacaagaacctgatcaagtatgacctgcagaacctgaagccctacaccaagtatgtgctgagcctgcacgcctacatcatcgccaaggtgcagagaaatggcagcgctgccatgtgccacttcaccaccaagagcgccccacccagccaggtgtggaacatgacagtgtccatgaccagtgacaacagcatgcacgtgaagtgcaggcctccccgggacagaaatggcccccatgagcgctaccacctggaggtggaggccggcaacaccctggtgagaaatgaaagccacaagaactgtgacttccgggtgaaggacctgcagtacagcacagactacaccttcaaggcctacttccacaacggggactacccaggagagcccttcatcctgcaccacagcaccagctacaacagcaaggccctgattgccttcctggccttcctgatcatcgtgaccagcatcgccctgctggtggtgctgtacaagatctatgacctgcacaagaagaggagctgcaacctggatgagcagcaggagctggtggagagagatgatgagaagcagctgatgaatgtggagcccatccatgctgacatcctgctggagacctacaagaggaagattgctgatgagggccgcctcttcctggccgagttccagagcatccccagggtcttcagcaagttccccatcaaggaggccaggaagcccttcaaccagaacaagaacagatatgtggacatcctgccctatgactacaacagagtggagctgtctgagatcaatggagatgctggcagcaactacatcaatgccagctacattgatggcttcaaggagcccaggaagtacatcgccgcccagggccccagagatgagaccgtggatgacttctggaggatgatctgggagcagaaggccaccgtcatcgtgatggtgacccgctgtgaggagggcaacagaaataaatgtgccgagtactggcccagcatggaggagggcacccgggcctttggagatgtggtggtgaagatcaaccagcacaagcgctgcccagactacatcatccagaagctgaacatcgtgaactag

SEQ ID NO: 21403 - DNA, 3921 bp, synthetic construct
  misc_feature 1..3921: note = Description of Artificial Sequence: Synthetic coding sequence
  source 1..3921: mol_type = other DNA
atgaccatgtacctgtggctgaagctgctggccttcggctttgccttcctggacacagaggtgtttgtgacaggccagagccccacccccagccccaccggcctgaccacagccaagatgcccagcgtgcccctgagcagtgaccccctgcccacccacaccacagccttctccccagccagcacctttgagcgggagaatgacttcagcgagaccaccaccagcctgagcccagacaacaccagcacccaggtgtccccagacagcctggacaatgccagcgccttcaacaccactggagtgtcctctgtgcagaccccccacctgcccacccatgctgacagccagaccccatctgctggaacagacacccagaccttcagcggcagcgctgccaatgccaagctgaaccccaccccaggcagcaatgccatcagtgatgtgcctggagagaggagcacagccagcaccttccccacagatcctgtgagccccctgaccaccaccctgagcctggcccaccacagcagcgctgccctgcctgcccggaccagcaacaccaccatcacagccaacaccagtgatgcctacctgaatgccagcgagaccaccaccctgagccccagcggcagcgctgtgatcagcaccaccaccatcgccaccacccccagcaagcccacctgtgatgagaagtatgccaacatcaccgtggactacctgtacaacaaggagaccaagctgttcaccgccaagctgaatgtgaatgaaaatgtggagtgtggcaacaacacctgcaccaacaatgaggtgcacaacctgacagagtgcaagaatgcctctgtgtccatcagccacaacagctgcacagccccagacaagaccctcatcctggatgtgcccccaggagtggagaagttccagctgcatgactgcacccaggtggagaaggctgacaccaccatctgcctgaagtggaagaacatcgagaccttcacctgtgacacccagaacatcacctaccgcttccagtgtggcaacatgatctttgacaacaaggagatcaagctggagaacctggagcctgagcacgagtacaagtgtgacagcgagatcctgtacaacaaccacaagttcaccaatgccagcaagatcatcaagacagactttggcagccctggagagccccagatcatcttctgccgctctgaggccgcccaccagggcgtcatcacctggaaccccccccagaggagcttccacaacttcaccctgtgctacatcaaggagacagagaaggactgcctgaacctggacaagaacctgatcaagtatgacctgcagaacctgaagccctacaccaagtatgtgctgagcctgcacgcctacatcatcgccaaggtgcagagaaatggcagcgctgccatgtgccacttcaccaccaagagcgccccacccagccaggtgtggaacatgacagtgtccatgaccagtgacaacagcatgcacgtgaagtgcaggcctccccgggacagaaatggcccccatgagcgctaccacctggaggtggaggccggcaacaccctggtgagaaatgaaagccacaagaactgtgacttccgggtgaaggacctgcagtacagcacagactacaccttcaaggcctacttccacaacggggactacccaggagagcccttcatcctgcaccacagcaccagctacaacagcaaggccctgattgccttcctggccttcctgatcatcgtgaccagcatcgccctgctggtggtgctgtacaagatctatgacctgcacaagaagaggagctgcaacctggatgagcagcaggagctggtggagagagatgatgagaagcagctgatgaatgtggagcccatccatgctgacatcctgctggagacctacaagaggaagattgctgatgagggccgcctcttcctggccgagttccagagcatccccagggtcttcagcaagttccccatcaaggaggccaggaagcccttcaaccagaacaagaacagatatgtggacatcctgccctatgactacaacagagtggagctgtctgagatcaatggagatgctggcagcaactacatcaatgccagctacattgatggcttcaaggagcccaggaagtacatcgccgcccagggccccagagatgagaccgtggatgacttctggaggatgatctgggagcagaaggccaccgtcatcgtgatggtgacccgctgtgaggagggcaacagaaataaatgtgccgagtactggcccagcatggaggagggcacccgggcctttggagatgtggtggtgaagatcaaccagcacaagcgctgcccagactacatcatccagaagctgaacatcgtgaacaagaaggagaaggccaccggccgggaggtgacccacatccagttcacctcctggccagaccacggcgtgcctgaggacccccacctgctgctgaagctgcggcggcgggtgaatgccttcagcaacttcttcagcggccccatcgtggtgcactgcagcgctggggtgggccgcacaggcacctacatcggcattgatgccatgctggagggcctggaggccgagaacaaggtggatgtgtatggctacgtggtgaagctgcggcggcagcgctgcctgatggtgcaggtggaggcccagtacatcctgatccaccaggccctggtggagtacaaccagtttggagaaacagaggtgaacctgtctgagctgcacccctacctgcacaacatgaagaagagggaccccccatctgagcccagccccctggaggccgagttccagaggctgcccagctaccgctcctggaggacccagcacatcggcaaccaggaggagaacaagagcaagaacagaaacagcaatgtcatcccctatgactacaacagagtgcccctgaagcatgagctggagatgagcaaggagagcgagcatgacagtgatgagagcagtgatgatgacagcgacagcgaggagcccagcaagtacatcaatgccagcttcatcatgagctactggaagccagaggtgatgattgctgcccagggccccctgaaggagaccatcggggacttctggcagatgatcttccagaggaaggtgaaggtgattgtgatgctgacagagctgaagcacggggaccaggagatctgtgcccagtactggggcgagggcaagcagacctatggagacatcgaggtggacctgaaggacacagacaagagcagcacctacaccctgcgggtgtttgagctgcggcacagcaagaggaaggacagcaggacagtgtaccagtaccagtacaccaactggagcgtggagcagctgcctgctgagcccaaggagctgatctccatgatccaggtggtgaagcagaagctgccccagaagaacagcagcgagggcaacaagcaccacaagagcacccccctgctgatccactgcagagatggcagccagcagacaggcatcttctgtgccctgctgaacctgctggagagcgctgagacagaggaggtggtggacatcttccaggtggtgaaggccctgaggaaggcccggcccggcatggtgtccacctttgagcagtaccagttcctgtatgatgtgattgccagcacctacccagcccagaatggccaggtgaagaagaacaaccaccaggaggacaagattgaatttgacaatgaggtggacaaggtgaagcaggatgccaactgtgtgaaccccctgggcgcccctgagaagctgcctgaggccaaggagcaggccgagggcagcgagcccaccagcggcacagagggccctgagcacagcgtgaatggacctgccagccctgccctgaaccagggcagctag

SEQ ID NO: 21404 - DNA, 441 bp, synthetic construct
  misc_feature 1..441: note = Description of Artificial Sequence: Synthetic coding sequence
  source 1..441: mol_type = other DNA
atgtacctgtggctgaagctgctggccttcggctttgccttcctggacacagaggtgtttgtgacaggccagagccccacccccagccccacagatgcctacctgaatgccagcgagaccaccaccctgagccccagcggcagcgctgtgatcagcaccaccaccatcgccaccacccccagcaagcccacctgtgatgagaagtatgccaacatcaccgtggactacctgtacaacaaggagaccaagctgttcaccgccaagctgaatgtgaatgaaaatgtggagtgtggcaacaacacctgcaccaacaatgaggtgcacaacctgacagagtgcaagaatgcctctgtgtccatcagccacaacagctgcacagccccagacaagaccctcatcctggatgtgcccccaggagtggagaagttccagctgcactag

SEQ ID NO: 21405 - DNA, 351 bp, synthetic construct
  misc_feature 1..351: note = Description of Artificial Sequence: Synthetic coding sequence
  source 1..351: mol_type = other DNA
atgtacctgtggctgaagctgctggccttcggctttgccttcctggacacagaggtgtttgtgacaggccagagccccacccccagccccaccggcctgaccacagccaagatgcccagcgtgcccctgagcagtgaccccctgcccacccacaccacagccttctccccagccagcacctttgagcgggagaatgacttcagcgagaccaccaccagcctgagcccagacaacaccagcacccaggtgtccccagacagcctggacaatgccagcgccttcaacaccactggagtgtcctctgtgcagaccccccacctgcccacccatgctgacagccagaccccctag

SEQ ID NO: 21406 - DNA, 3915 bp, synthetic construct
  misc_feature 1..3915: note = Description of Artificial Sequence: Synthetic coding sequence
  source 1..3915: mol_type = other DNA
atgtacctgtggctgaagctgctggccttcggctttgccttcctggacacagaggtgtttgtgacaggccagagccccacccccagccccaccggcctgaccacagccaagatgcccagcgtgcccctgagcagtgaccccctgcccacccacaccacagccttctccccagccagcacctttgagcgggagaatgacttcagcgagaccaccaccagcctgagcccagacaacaccagcacccaggtgtccccagacagcctggacaatgccagcgccttcaacaccactggagtgtcctctgtgcagaccccccacctgcccacccatgctgacagccagaccccatctgctggaacagacacccagaccttcagcggcagcgctgccaatgccaagctgaaccccaccccaggcagcaatgccatcagtgatgtgcctggagagaggagcacagccagcaccttccccacagatcctgtgagccccctgaccaccaccctgagcctggcccaccacagcagcgctgccctgcctgcccggaccagcaacaccaccatcacagccaacaccagtgatgcctacctgaatgccagcgagaccaccaccctgagccccagcggcagcgctgtgatcagcaccaccaccatcgccaccacccccagcaagcccacctgtgatgagaagtatgccaacatcaccgtggactacctgtacaacaaggagaccaagctgttcaccgccaagctgaatgtgaatgaaaatgtggagtgtggcaacaacacctgcaccaacaatgaggtgcacaacctgacagagtgcaagaatgcctctgtgtccatcagccacaacagctgcacagccccagacaagaccctcatcctggatgtgcccccaggagtggagaagttccagctgcatgactgcacccaggtggagaaggctgacaccaccatctgcctgaagtggaagaacatcgagaccttcacctgtgacacccagaacatcacctaccgcttccagtgtggcaacatgatctttgacaacaaggagatcaagctggagaacctggagcctgagcacgagtacaagtgtgacagcgagatcctgtacaacaaccacaagttcaccaatgccagcaagatcatcaagacagactttggcagccctggagagccccagatcatcttctgccgctctgaggccgcccaccagggcgtcatcacctggaaccccccccagaggagcttccacaacttcaccctgtgctacatcaaggagacagagaaggactgcctgaacctggacaagaacctgatcaagtatgacctgcagaacctgaagccctacaccaagtatgtgctgagcctgcacgcctacatcatcgccaaggtgcagagaaatggcagcgctgccatgtgccacttcaccaccaagagcgccccacccagccaggtgtggaacatgacagtgtccatgaccagtgacaacagcatgcacgtgaagtgcaggcctccccgggacagaaatggcccccatgagcgctaccacctggaggtggaggccggcaacaccctggtgagaaatgaaagccacaagaactgtgacttccgggtgaaggacctgcagtacagcacagactacaccttcaaggcctacttccacaacggggactacccaggagagcccttcatcctgcaccacagcaccagctacaacagcaaggccctgattgccttcctggccttcctgatcatcgtgaccagcatcgccctgctggtggtgctgtacaagatctatgacctgcacaagaagaggagctgcaacctggatgagcagcaggagctggtggagagagatgatgagaagcagctgatgaatgtggagcccatccatgctgacatcctgctggagacctacaagaggaagattgctgatgagggccgcctcttcctggccgagttccagagcatccccagggtcttcagcaagttccccatcaaggaggccaggaagcccttcaaccagaacaagaacagatatgtggacatcctgccctatgactacaacagagtggagctgtctgagatcaatggagatgctggcagcaactacatcaatgccagctacattgatggcttcaaggagcccaggaagtacatcgccgcccagggccccagagatgagaccgtggatgacttctggaggatgatctgggagcagaaggccaccgtcatcgtgatggtgacccgctgtgaggagggcaacagaaataaatgtgccgagtactggcccagcatggaggagggcacccgggcctttggagatgtggtggtgaagatcaaccagcacaagcgctgcccagactacatcatccagaagctgaacatcgtgaacaagaaggagaaggccaccggccgggaggtgacccacatccagttcacctcctggccagaccacggcgtgcctgaggacccccacctgctgctgaagctgcggcggcgggtgaatgccttcagcaacttcttcagcggccccatcgtggtgcactgcagcgctggggtgggccgcacaggcacctacatcggcattgatgccatgctggagggcctggaggccgagaacaaggtggatgtgtatggctacgtggtgaagctgcggcggcagcgctgcctgatggtgcaggtggaggcccagtacatcctgatccaccaggccctggtggagtacaaccagtttggagaaacagaggtgaacctgtctgagctgcacccctacctgcacaacatgaagaagagggaccccccatctgagcccagccccctggaggccgagttccagaggctgcccagctaccgctcctggaggacccagcacatcggcaaccaggaggagaacaagagcaagaacagaaacagcaatgtcatcccctatgactacaacagagtgcccctgaagcatgagctggagatgagcaaggagagcgagcatgacagtgatgagagcagtgatgatgacagcgacagcgaggagcccagcaagtacatcaatgccagcttcatcatgagctactggaagccagaggtgatgattgctgcccagggccccctgaaggagaccatcggggacttctggcagatgatcttccagaggaaggtgaaggtgattgtgatgctgacagagctgaagcacggggaccaggagatctgtgcccagtactggggcgagggcaagcagacctatggagacatcgaggtggacctgaaggacacagacaagagcagcacctacaccctgcgggtgtttgagctgcggcacagcaagaggaaggacagcaggacagtgtaccagtaccagtacaccaactggagcgtggagcagctgcctgctgagcccaaggagctgatctccatgatccaggtggtgaagcagaagctgccccagaagaacagcagcgagggcaacaagcaccacaagagcacccccctgctgatccactgcagagatggcagccagcagacaggcatcttctgtgccctgctgaacctgctggagagcgctgagacagaggaggtggtggacatcttccaggtggtgaaggccctgaggaaggcccggcccggcatggtgtccacctttgagcagtaccagttcctgtatgatgtgattgccagcacctacccagcccagaatggccaggtgaagaagaacaaccaccaggaggacaagattgaatttgacaatgaggtggacaaggtgaagcaggatgccaactgtgtgaaccccctgggcgcccctgagaagctgcctgaggccaaggagcaggccgagggcagcgagcccaccagcggcacagagggccctgagcacagcgtgaatggacctgccagccctgccctgaaccagggcagctag

SEQ ID NO: 21407 - DNA, 1797 bp, synthetic construct
  misc_feature 1..1797: note = Description of Artificial Sequence: Synthetic coding sequence
  source 1..1797: mol_type = other DNA
atgtacctgtggctgaagctgctggccttcggctttgccttcctggacacagaggtgtttgtgacaggccagagccccacccccagccccactggagtgtcctctgtgcagaccccccacctgcccacccatgctgacagccagaccccatctgctggaacagacacccagaccttcagcggcagcgctgccaatgccaagctgaaccccaccccaggcagcaatgccatcagtgatgcctacctgaatgccagcgagaccaccaccctgagccccagcggcagcgctgtgatcagcaccaccaccatcgccaccacccccagcaagcccacctgtgatgagaagtatgccaacatcaccgtggactacctgtacaacaaggagaccaagctgttcaccgccaagctgaatgtgaatgaaaatgtggagtgtggcaacaacacctgcaccaacaatgaggtgcacaacctgacagagtgcaagaatgcctctgtgtccatcagccacaacagctgcacagccccagacaagaccctcatcctggatgtgcccccaggagtggagaagttccagctgcatgactgcacccaggtggagaaggctgacaccaccatctgcctgaagtggaagaacatcgagaccttcacctgtgacacccagaacatcacctaccgcttccagtgtggcaacatgatctttgacaacaaggagatcaagctggagaacctggagcctgagcacgagtacaagtgtgacagcgagatcctgtacaacaaccacaagttcaccaatgccagcaagatcatcaagacagactttggcagccctggagagccccagatcatcttctgccgctctgaggccgcccaccagggcgtcatcacctggaaccccccccagaggagcttccacaacttcaccctgtgctacatcaaggagacagagaaggactgcctgaacctggacaagaacctgatcaagtatgacctgcagaacctgaagccctacaccaagtatgtgctgagcctgcacgcctacatcatcgccaaggtgcagagaaatggcagcgctgccatgtgccacttcaccaccaagagcgccccacccagccaggtgtggaacatgacagtgtccatgaccagtgacaacagcatgcacgtgaagtgcaggcctccccgggacagaaatggcccccatgagcgctaccacctggaggtggaggccggcaacaccctggtgagaaatgaaagccacaagaactgtgacttccgggtgaaggacctgcagtacagcacagactacaccttcaaggcctacttccacaacggggactacccaggagagcccttcatcctgcaccacagcaccagctacaacagcaaggccctgattgccttcctggccttcctgatcatcgtgaccagcatcgccctgctggtggtgctgtacaagatctatgacctgcacaagaagaggagctgcaacctggatgagcagcaggagctggtggagagagatgatgagaagcagctgatgaatgtggagcccatccatgctgacatcctgctggagacctacaagaggaagattgctgatgagggccgcctcttcctggccgagttccagagcatccccagggtcttcagcaagttccccatcaaggaggccaggaagcccttcaaccagaacaagaacagatatgtggacatcctgccctatgactacaacagagtggagctgtctgagatcaatggagatgctggcagcaactacatcaatgccagctacattgattag

SEQ ID NO: 21408 - DNA, 2271 bp, synthetic construct
  misc_feature 1..2271: note = Description of Artificial Sequence: Synthetic coding sequence
  source 1..2271: mol_type = other DNA
atgtacctgtggctgaagctgctggccttcggctttgccttcctggacacagaggtgtttgtgacaggccagagccccacccccagccccaccggcctgaccacagccaagatgcccagcgtgcccctgagcagtgaccccctgcccacccacaccacagccttctccccagccagcacctttgagcgggagaatgacttcagcgagaccaccaccagcctgagcccagacaacaccagcacccaggtgtccccagacagcctggacaatgccagcgccttcaacaccactggagtgtcctctgtgcagaccccccacctgcccacccatgctgacagccagaccccatctgctggaacagacacccagaccttcagcggcagcgctgccaatgccaagctgaaccccaccccaggcagcaatgccatcagtgatgcctacctgaatgccagcgagaccaccaccctgagccccagcggcagcgctgtgatcagcaccaccaccatcgccaccacccccagcaagcccacctgtgatgagaagtatgccaacatcaccgtggactacctgtacaacaaggagaccaagctgttcaccgccaagctgaatgtgaatgaaaatgtggagtgtggcaacaacacctgcaccaacaatgaggtgcacaacctgacagagtgcaagaatgcctctgtgtccatcagccacaacagctgcacagccccagacaagaccctcatcctggatgtgcccccaggagtggagaagttccagctgcatgactgcacccaggtggagaaggctgacaccaccatctgcctgaagtggaagaacatcgagaccttcacctgtgacacccagaacatcacctaccgcttccagtgtggcaacatgatctttgacaacaaggagatcaagctggagaacctggagcctgagcacgagtacaagtgtgacagcgagatcctgtacaacaaccacaagttcaccaatgccagcaagatcatcaagacagactttggcagccctggagagccccagatcatcttctgccgctctgaggccgcccaccagggcgtcatcacctggaaccccccccagaggagcttccacaacttcaccctgtgctacatcaaggagacagagaaggactgcctgaacctggacaagaacctgatcaagtatgacctgcagaacctgaagccctacaccaagtatgtgctgagcctgcacgcctacatcatcgccaaggtgcagagaaatggcagcgctgccatgtgccacttcaccaccaagagcgccccacccagccaggtgtggaacatgacagtgtccatgaccagtgacaacagcatgcacgtgaagtgcaggcctccccgggacagaaatggcccccatgagcgctaccacctggaggtggaggccggcaacaccctggtgagaaatgaaagccacaagaactgtgacttccgggtgaaggacctgcagtacagcacagactacaccttcaaggcctacttccacaacggggactacccaggagagcccttcatcctgcaccacagcaccagctacaacagcaaggccctgattgccttcctggccttcctgatcatcgtgaccagcatcgccctgctggtggtgctgtacaagatctatgacctgcacaagaagaggagctgcaacctggatgagcagcaggagctggtggagagagatgatgagaagcagctgatgaatgtggagcccatccatgctgacatcctgctggagacctacaagaggaagattgctgatgagggccgcctcttcctggccgagttccagagcatccccagggtcttcagcaagttccccatcaaggaggccaggaagcccttcaaccagaacaagaacagatatgtggacatcctgccctatgactacaacagagtggagctgtctgagatcaatggagatgctggcagcaactacatcaatgccagctacattgatggcttcaaggagcccaggaagtacatcgccgcccagggccccagagatgagaccgtggatgacttctggaggatgatctgggagcagaaggccaccgtcatcgtgatggtgacccgctgtgaggagggcaacagaaataaatgtgccgagtactggcccagcatggaggagggcacccgggcctttggagatgtggtggtgaagatcaaccagcacaagcgctgcccagactacatcatccagaagctgaacatcgtgaacaagcagaagagcaagtag

SEQ ID NO: 21409 - DNA, 1662 bp, synthetic construct
  misc_feature 1..1662: note = Description of Artificial Sequence: Synthetic coding sequence
  source 1..1662: mol_type = other DNA
agtgactacatgatcatcaagaagaagagcaactatgaggtgctggagaaggatgtgggcctgaagcgcttcttccccaagagcctgctggacagcgtgaaggccaagaccctgaggaagctgatccagcagaccttccggcagtttgccaacctgaaccgggaggagagcatcctgaagttctttgagatcctgagccctgtgtacagatttgacaaggagtgcttcaagtgtgccctgggcagctcctggatcatctctgtggagctggccatcggccctgaggagggcatctcctacctgacagacaagggctgcaaccccacccacctggccgacttcacccaggtgcagaccatccagtacagcaacagcgaggacaaggacaggaagggcatgctgcagctgaagattgctggggcccctgagcccctgactgtgacagcccccagcctgaccatcgccgagaacatggctgacctgattgatggctactgccgcctggtgaatggcaccagccagagcttcatcatccggccccagaaggagggggagcgggccctgcccagcatccccaagctggccaacagcgagaagcagggcatgaggacccatgctgtgtctgtgtctgaaacagatgattatgcagagatcattgatgaggaggacacctacaccatgcccagcacccgggactatgagatccagcgggagcgcatcgagctgggccgctgcatcggggagggccagtttggagatgtgcaccagggcatctacatgagcccagaaaatcctgccctggccgtggccatcaagacctgcaagaactgcaccagtgacagcgtgcgggagaagttcctgcaggaggcctgccactacaccagcctgcactggaactggtgccgctacatcagtgaccccaacgtggactgcccagaccccagaaatgctgaggtgaccatgaggcagtttgaccacccccacatcgtgaagctgattggagtcatcacagagaaccctgtgtggatcatcatggagctgtgcaccctgggggagctgcgctccttcctgcaggtgaggaagtacagcctggacctggccagcctcatcctgtatgcctaccagctgagcacagccctggcctacctggagagcaagagatttgtgcaccgggacattgctgccagaaatgtgctggtgagcagcaatgactgtgtgaagctgggggactttggcctgagccgctacatggaggacagcacctactacaaggccagcaagggcaagctgcccatcaagtggatggcccctgagagcatcaacttccgccgcttcaccagcgccagtgatgtgtggatgtttggagtgtgcatgtgggagatcctgatgcacggcgtgaagcccttccagggcgtgaagaacaatgatgtgattggaagaattgaaaatggagagcggctgcccatgccacccaactgcccccccaccctgtacagcctgatgaccaagtgctgggcctatgaccccagcagaagaccccgcttcacagagctgaaggcccagctgtccttccagaacccagcccagatgctgcctgccagcggccgcctgcccaaccagccctgcccagagcgggagaactacagctttgccaccttctag

SEQ ID NO: 21410 - DNA, 2931 bp, synthetic construct
  misc_feature 1..2931: note = Description of Artificial Sequence: Synthetic coding sequence
  source 1..2931: mol_type = other DNA
cgctccttcatcatcctgaaggccatcgtgtcccagcccccaggccctgtgctgagcggcatggagatgctgctgatgagcggctatgagctgcgcatccgctacctgcccaagggcttcctgaaccagttcacagaggacaagcccaccctgaacttcttctaccagcaggtgaagagtgactacatgctggagattgctgaccaggtggaccaggagatcgccctgaagctgggctgcctggagatccgccgcagctactgggagatgagaggaaatgccctggagaagaagagcaactatgaggtgctggagaaggatgtgggcctgaagcgcttcttccccaagagcctgctggacagcgtgaaggccaagaccctgaggaagctgatccagcagaccttccggcagtttgccaacctgaaccgggaggagagcatcctgaagttctttgagatcctgagccctgtgtacagatttgacaaggagtgcttcaagtgtgccctgggcagctcctggatcatctctgtggagctggccatcggccctgaggagggcatctcctacctgacagacaagggctgcaaccccacccacctggccgacttcacccaggtgcagaccatccagtacagcaacagcgaggacaaggacaggaagggcatgctgcagctgaagattgctggggcccctgagcccctgactgtgacagcccccagcctgaccatcgccgagaacatggctgacctgattgatggctactgccgcctggtgaatggcaccagccagagcttcatcatccggccccagaaggagggggagcgggccctgcccagcatccccaagctggccaacagcgagaagcagggcatgaggacccatgctgtgtctgtgtctgatgagatccctggagctgagacagatgattatgcagagatcattgatgaggaggacacctacaccatgcccagcatcaagagctactgcattgatgtggcccgggactatgagatccagcgggagagaattgagctgggccgctgcattggagagggccagtttggagatgtgcaccagggcatctacatgagccctgagaacccagccctggccgtggccatcaagacctgcaagaactgcaccagtgacagcgtgcgggagaagttcctgcaggaggccctgaccatgaggcagtttgaccacccccacatcgtgaagctgattggagtcatcacagaaaatcctgtgtggatcatcatggagctgtgcaccctgggggagctgcggagcttcctgcaggtgaggaagtacagcctggacctggccagcctcatcctgtatgcctaccagctgagcacagccctggcctacctggagagcaagagatttgtgcaccgggacattgctgccagaaatgtgctggtgagcagcaatgactgtgtgaagctgggggactttggcctgagccgctacatggaggacagcacctactacaaggccagcaagggcaagctgcccatcaagtggatggcccctgagagcatcaacttccgccgcttcaccagcgccagtgatgtgtggatgtttggagtgtgcatgtgggagatcctgatgcatggagtgaagcccttccagggcgtgaagaacaatgatgtgattggaagaattgaaaatggagagcggctgcccatgccacccaactgcccccccaccctgtacagcctgatgaccaagtgctgggcctatgaccccagccggcggccccgcttcacagagctgaaggcccagctgagcaccatcctggaggaggagaaggcccagcaggaggagaggatgaggatggagagccggcggcaggccaccgtgtcctgggacagcggcggcagtgatgaggccccacccaagcccagcaggcctggctaccccagccccaggagcagcgagggcttctaccccagcccccagcacatggtgcagaccaaccactaccaggtgtctggctacccaggcagccacggcatcacagccatggccggcagcatctacccaggccaggccagcctgctggaccagacagacagctggaaccaccggccccaggagatcgccatgtggcagcccaacgtggaggacagcacagtgctggacctgcggggcatcggccaggtgctgcccacccacctgatggaggagcggctcatccggcagcagcaggagatggaggaggaccagcgctggctggagaaggaggagcgcttcctgaagccagatgtgcggctgagccggggcagcattgaccgggaggatggcagcctgcagggccccatcggcaaccagcacatctaccagcctgtgggcaagccagaccctgctgccccacccaagaagccacccaggcctggggcccctggccacctgggcagcctggccagcctgagcagccctgctgacagctacaatgaaggagtgaagcccctgcggctgcagccccaggagatcagccccccacccacagccaacctggacaggagcaatgacaaggtgtatgaaaatgtgacaggcctggtgaaggccgtcatcgagatgagcagcaagatccagcctgcccctcctgaggagtatgtgcccatggtgaaggaggtgggcctggccctgcggaccctgctggccaccgtggatgagaccatccccctgctgcctgccagcacccaccgggagattgagatggcccagaagctgctgaacagcgacctgggggagctgatcaacaagatgaagctggcccagcagtatgtgatgaccagcctgcagcaggagtacaagaagcagatgctgacagctgcccacgccctggccgtggatgccaagaacctgctggatgtgattgaccaggcccggctgaagatgctgggccagacccggccccactag

SEQ ID NO: 21411 - DNA, 3024 bp, synthetic construct
  misc_feature 1..3024: note = Description of Artificial Sequence: Synthetic coding sequence
  source 1..3024: mol_type = other DNA
aaggccgagtatgaccgctacctggccagcagcaagatcatggccgccgcctacctggaccccaacctgaaccacacccccaaggagtggaagtatgagctgcgcatccgctacctgcccaagggcttcctgaaccagttcacagaggacaagcccaccctgaacttcttctaccagcaggtgaagagtgactacatgctggagattgctgaccaggtggaccaggagatcgccctgaagctgggctgcctggagatcagaagaagctactgggagatgagaggaaatgccctggagaagaagagcaactatgaggtgctggagaaggatgtgggcctgaagcgcttcttccccaagagcctgctggacagcgtgaaggccaagaccctgaggaagctgatccagcagaccttccggcagtttgccaacctgaaccgggaggagagcatcctgaagttctttgagatcctgagccctgtgtacagatttgacaaggagtgcttcaagtgtgccctgggcagctcctggatcatctctgtggagctggccatcggccctgaggagggcatctcctacctgacagacaagggctgcaaccccacccacctggccgacttcacccaggtgcagaccatccagtacagcaacagcgaggacaaggacaggaagggcatgctgcagctgaagattgctggggcccctgagcccctgactgtgacagcccccagcctgaccatcgccgagaacatggctgacctgattgatggctactgccgcctggtgaatggcaccagccagagcttcatcatccggccccagaaggagggggagcgggccctgcccagcatccccaagctggccaacagcgagaagcagggcatgaggacccatgctgtgtctgtgtctggagtgagccactgccagcacaaggtgaagaaggcccggcgcttcctgcccctggtgttctgcagccatgacccccccagcacagatgagatctctggagatgaaacagatgattatgcagagatcattgatgaggaggacacctacaccatgcccagcatcaagagctactgcattgatgtggcccgggactatgagatccagcgggagcgcatcgagctgggccgctgcatcggggagggccagtttggagatgtgcaccagggcatctacatgagcccagaaaatcctgccctggccgtggccatcaagacctgcaagaactgcaccagtgacagcgtgcgggagaagttcctgcaggaggccctgaccatgaggcagtttgaccacccccacatcgtgaagctgattggagtcatcacagagaaccctgtgtggatcatcatggagctgtgcaccctgggggagctgcgctccttcctgcaggtgaggaagtacagcctggacctggccagcctcatcctgtatgcctaccagctgagcacagccctggcctacctggagagcaagagatttgtgcaccgggacattgctgccagaaatgtgctggtgagcagcaatgactgtgtgaagctgggggactttggcctgagccgctacatggaggacagcacctactacaaggccagcaagggcaagctgcccatcaagtggatggcccctgagagcatcaacttccgccgcttcaccagcgccagtgatgtgtggatgtttggagtgtgcatgtgggagatcctgatgcacggcgtgaagcccttccagggcgtgaagaacaatgatgtgattggaagaattgaaaatggagagcggctgcccatgccacccaactgcccccccaccctgtacagcctgatgaccaagtgctgggcctatgaccccagcagaagaccccgcttcacagagctgaaggcccagctgagcaccatcctggaggaggagaaggcccagcaggaggagaggatgaggatggagagccggcggcaggccaccgtgtcctgggacagcggcggcagtgatgaggccccacccaagcccagccggcccggctaccccagccccaggagcagcgagggcttctaccccagcccccagcacatggtgcagaccaaccactaccaggtgtctggctacccaggcagccacggcatcacagccatggccggcagcatctacccaggccaggccagcctgctggaccagacagacagctggaaccaccggccccaggagatcgccatgtggcagcccaacgtggaggacagcacagtgctggacctgcggggcatcggccaggtgctgcccacccacctgatggaggagcggctcatccggcagcagcaggagatggaggaggaccagcgctggctggagaaggaggagcgcttcctgaagccagatgtgcggctgagccggggcagcattgacagagaagatggcagcctgcagggccccatcggcaaccagcacatctaccagcctgtgggcaagccagaccctgctgccccacccaagaagccacccaggcctggggcccctggccacctgggcagcctggccagcctgagcagccctgctgacagctacaatgaaggagtgaagcccctgcggctgcagccccaggagatcagccccccacccacagccaacctggacaggagcaatgacaaggtgtatgaaaatgtgacaggcctggtgaaggctgtgattgagatgagcagcaagatccagcctgcccctcctgaggagtatgtgcccatggtgaaggaggtgggcctggccctgcggaccctgctggccaccgtggatgagaccatccccctgctgcctgccagcacccaccgggagattgagatggcccagaagctgctgaacagcgacctgggggagctgatcaacaagatgaagctggcccagcagtatgtgatgaccagcctgcagcaggagtacaagaagcagatgctgacagctgcccacgccctggccgtggatgccaagaacctgctggatgtgattgaccaggcccggctgaagatgctgggccagacccggccccactag

SEQ ID NO: 21412 - DNA, 3198 bp, synthetic construct
  misc_feature 1..3198: note = Description of Artificial Sequence: Synthetic coding sequence
  source 1..3198: mol_type = other DNA
atggctgctgcctacctggaccccaacctgaaccacacccccaacagcagcaccaagacccacctgggcaccggcatggagaggagccctggggccatggagcgggtgctgaaggtgttccactactttgagagcaacagcgagcccaccacctgggccagcatcatcagacatggagatgccacagatgtgcggggcatcatccagaagatcgtggacagccacaaggtgaagcacgtggcctgctacggcttccggctgagccacctgcggtctgaggaggtgcactggctgcacgtggacatgggcgtgtcctctgtgcgggagaagtatgagctggcccaccccccagaggagtggaagtatgagctgcgcatccgctacctgcccaagggcttcctgaaccagttcacagaggacaagcccaccctgaacttcttctaccagcaggtgaagagtgactacatgctggagattgctgaccaggtggaccaggagatcgccctgaagctgggctgcctggagatcagaagaagctactgggagatgagaggaaatgccctggagaagaagagcaactatgaggtgctggagaaggatgtgggcctgaagcgcttcttccccaagagcctgctggacagcgtgaaggccaagaccctgaggaagctgatccagcagaccttccggcagtttgccaacctgaaccgggaggagagcatcctgaagttctttgagatcctgagccctgtgtacagatttgacaaggagtgcttcaagtgtgccctgggcagctcctggatcatctctgtggagctggccatcggccctgaggagggcatctcctacctgacagacaagggctgcaaccccacccacctggccgacttcacccaggtgcagaccatccagtacagcaacagcgaggacaaggacaggaagggcatgctgcagctgaagattgctggggcccctgagcccctgactgtgacagcccccagcctgaccatcgccgagaacatggctgacctgattgatggctactgccgcctggtgaatggcaccagccagagcttcatcatccggccccagaaggagggggagcgggccctgcccagcatccccaagctggccaacagcgagaagcagggcatgaggacccatgctgtgtctgtgtctgaaacagatgattatgcagagatcattgatgaggaggacacctacaccatgcccagcacccgggactatgagatccagcgggagcgcatcgagctgggccgctgcatcggggagggccagtttggagatgtgcaccagggcatctacatgagcccagaaaatcctgccctggccgtggccatcaagacctgcaagaactgcaccagtgacagcgtgcgggagaagttcctgcaggaggccctgaccatgaggcagtttgaccacccccacatcgtgaagctgattggagtcatcacagagaaccctgtgtggatcatcatggagctgtgcaccctgggggagctgcgctccttcctgcaggtgaggaagtacagcctggacctggccagcctcatcctgtatgcctaccagctgagcacagccctggcctacctggagagcaagagatttgtgcaccgggacattgctgccagaaatgtgctggtgagcagcaatgactgtgtgaagctgggggactttggcctgagccgctacatggaggacagcacctactacaaggccagcaagggcaagctgcccatcaagtggatggcccctgagagcatcaacttccgccgcttcaccagcgccagtgatgtgtggatgtttggagtgtgcatgtgggagatcctgatgcacggcgtgaagcccttccagggcgtgaagaacaatgatgtgattggaagaattgaaaatggagagcggctgcccatgccacccaactgcccccccaccctgtacagcctgatgaccaagtgctgggcctatgaccccagcagaagaccccgcttcacagagctgaaggcccagctgagcaccatcctggaggaggagaaggcccagcaggaggagaggatgaggatggagagccggcggcaggccaccgtgtcctgggacagcggcggcagtgatgaggccccacccaagcccagccggcccggctaccccagccccaggagcagcgagggcttctaccccagcccccagcacatggtgcagaccaaccactaccaggtgtctggctacccaggcagccacggcatcacagccatggccggcagcatctacccaggccaggccagcctgctggaccagacagacagctggaaccaccggccccaggagatcgccatgtggcagcccaacgtggaggacagcacagtgctggacctgcggggcatcggccaggtgctgcccacccacctgatggaggagcggctcatccggcagcagcaggagatggaggaggaccagcgctggctggagaaggaggagcgcttcctgaagccagatgtgcggctgagccggggcagcattgacagagaagatggcagcctgcagggccccatcggcaaccagcacatctaccagcctgtgggcaagccaggcaaggaggagaagaactgggccgagagaaatcctgctgccccacccaagaagccacccaggcctggggcccctggccacctgggcagcctggccagcctgagcagccctgctgacagctacaatgaaggagtgaagcccaaccagctgcagccccaggagatcagccccccacccacagccaacctggacaggagcaatgacaaggtgtatgaaaatgtgacaggcctggtgaaggctgtgattgagatgagcagcaagatccagcctgcccctcctgaggagtatgtgcccatggtgaaggaggtgggcctggccctgcggaccctgctggccaccgtggatgagaccatccccctgctgcctgccagcacccaccgggagattgagatggcccagaagctgctgaacagcgacctgggggagctgatcaacaagatgaagctggcccagcagtatgtgatgaccagcctgcagcaggagtacaagaagcagatgctgacagctgcccacgccctggccgtggatgccaagaacctgctggatgtgattgaccaggcccggctgaagatgctgggccagacccggccccactag

SEQ ID NO: 21413 - DNA, 2253 bp, synthetic construct
  misc_feature 1..2253: note = Description of Artificial Sequence: Synthetic coding sequence
  source 1..2253: mol_type = other DNA
atggctgacctgattgatggctactgccgcctggtgaatggcaccagccagagcttcatcatccggccccagaaggagggggagcgggccctgcccagcatccccaagctggccaacagcgagaagcagggcatgaggacccatgctgtgtctgtgtctggagtgagccactgccagcacaaggtgaagaaggcccggcgcttcctgcccctggtgttctgcagccatgacccccccagcacagatgagatctctggagatgaaacagatgattatgcagagatcattgatgaggaggacacctacaccatgcccagcacccgggactatgagatccagcgggagagaattgagctgggccgctgcattggagagggccagtttggagatgtgcaccagggcatctacatgagccctgagaacccagccctggccgtggccatcaagacctgcaagaactgcaccagtgacagcgtgcgggagaagttcctgcaggaggccctgaccatgaggcagtttgaccacccccacatcgtgaagctgattggagtcatcacagaaaatcctgtgtggatcatcatggagctgtgcaccctgggggagctgcggagcttcctgcaggtgaggaagtacagcctggacctggccagcctcatcctgtatgcctaccagctgagcacagccctggcctacctggagagcaagagatttgtgcaccgggacattgctgccagaaatgtgctggtgagcagcaatgactgtgtgaagctgggggactttggcctgagccgctacatggaggacagcacctactacaaggccagcaagggcaagctgcccatcaagtggatggcccctgagagcatcaacttccgccgcttcaccagcgccagtgatgtgtggatgtttggagtgtgcatgtgggagatcctgatgcatggagtgaagcccttccagggcgtgaagaacaatgatgtgattggaagaattgaaaatggagagcggctgcccatgccacccaactgcccccccaccctgtacagcctgatgaccaagtgctgggcctatgaccccagccggcggccccgcttcacagagctgaaggcccagctgagcaccatcctggaggaggagaaggcccagcaggaggagaggatgaggatggagagccggcggcaggccaccgtgtcctgggacagcggcggcagtgatgaggccccacccaagcccagcaggcctggctaccccagccccaggagcagcgagggcttctaccccagcccccagcacatggtgcagaccaaccactaccaggtgtctggctacccaggcagccacggcatcacagccatggccggcagcatctacccaggccaggccagcctgctggaccagacagacagctggaaccaccggccccaggagatcgccatgtggcagcccaacgtggaggacagcacagtgctggacctgcggggcatcggccaggtgctgcccacccacctgatggaggagcggctcatccggcagcagcaggagatggaggaggaccagcgctggctggagaaggaggagcgcttcctgaagccagatgtgcggctgagccggggcagcattgaccgggaggatggcagcctgcagggccccatcggcaaccagcacatctaccagcctgtgggcaagccagaccctgctgccccacccaagaagccacccaggcctggggcccctggccacctgggcagcctggccagcctgagcagccctgctgacagctacaatgaaggagtgaagccctgccgcctgcagccccaggagatcagccccccacccacagccaacctggacaggagcaatgacaaggtgtatgaaaatgtgacaggcctggtgaaggccgtcatcgagatgagcagcaagatccagcctgcccctcctgaggagtatgtgcccatggtgaaggaggtgggcctggccctgcggaccctgctggccaccgtggatgagaccatccccctgctgcctgccagcacccaccgggagattgagatggcccagaagctgctgaacagcgacctgggggagctgatcaacaagatgaagctggcccagcagtatgtgatgaccagcctgcagcaggagtacaagaagcagatgctgacagctgcccacgccctggccgtggatgccaagaacctgctggatgtgattgaccaggcccggctgaagatgctgggccagacccggccccactag

SEQ ID NO: 21414 - DNA, 1089 bp, synthetic construct
  misc_feature 1..1089: note = Description of Artificial Sequence: Synthetic coding sequence
  source 1..1089: mol_type = other DNA
atgaggatggagagccggcggcaggccaccgtgtcctgggacagcggcggcagtgatgaggccccacccaagcccagccggcccggctaccccagccccaggagcagcgagggcttctaccccagcccccagcacatggtgcagaccaaccactaccaggtgtctggctacccaggcagccacggcatcacagccatggccggcagcatctacccaggccaggccagcctgctggaccagacagacagctggaaccaccggccccaggagatcgccatgtggcagcccaacgtggaggacagcacagtgctggacctgcggggcatcggccaggtgctgcccacccacctgatggaggagcggctcatccggcagcagcaggagatggaggaggaccagcgctggctggagaaggaggagcgcttcctgaagccagatgtgcggctgagccggggcagcattgacagagaagatggcagcctgcagggccccatcggcaaccagcacatctaccagcctgtgggcaagccagaccctgctgccccacccaagaagccacccaggcctggggcccctggccacctgggcagcctggccagcctgagcagccctgctgacagctacaatgaaggagtgaagctgcagccccaggagatcagccccccacccacagccaacctggacaggagcaatgacaaggtgtatgaaaatgtgacaggcctggtgaaggccgtcatcgagatgagcagcaagatccagcctgcccctcctgaggagtatgtgcccatggtgaaggaggtgggcctggccctgcggaccctgctggccaccgtggatgagaccatccccctgctgcctgccagcacccaccgggagattgagatggcccagaagctgctgaacagcgacctgggggagctgatcaacaagatgaagctggcccagcagtatgtgatgaccagcctgcagcaggagtacaagaagcagatgctgacagctgcccacgccctggccgtggatgccaagaacctgctggatgtgattgaccaggcccggctgaagatgctgggccagacccggccccactag

SEQ ID NO: 21415 - DNA, 354 bp, synthetic construct
  misc_feature 1..354: note = Description of Artificial Sequence: Synthetic coding sequence
  source 1..354: mol_type = other DNA
atggctgctgcctacctggaccccaacctgaaccacacccccaacagcagcaccaagacccacctgggcaccggcatggagaggagccctggggccatggagcgggtgctgaaggtgttccactactttgagagcaacagcgagcccaccacctgggccagcatcatcagacatggagatgccacagatgtgcggggcatcatccagaagatcgtggacagccacaaggtgaagcacgtggcctgctacggcttccggctgagccacctgcggtctgaggaggtgcactggctgcacgtggacatgggcgtgtcctctgtgcgggagaagtatgagctggcccaccccccatag

SEQ ID NO: 21416 - DNA, 3291 bp, synthetic construct
  misc_feature 1..3291: note = Description of Artificial Sequence: Synthetic coding sequence
  source 1..3291: mol_type = other DNA
atgctgctggagctggccggccaggaggccctgaagccagctggggccatctacatggagaagagcggctgcagccccttccctgtgtgctgggccaaggagtatgaccgctacctggccagcagcaagatcatggctgctgcctacctggaccccaacctgaaccacacccccaacagcagcaccaagacccacctgggcaccggcatggagaggagccctggggccatggagcgggtgctgaaggtgttccactactttgagagcaacagcgagcccaccacctgggccagcatcatcagacatggagatgccacagatgtgcggggcatcatccagaagatcgtggacagccacaaggtgaagcacgtggcctgctacggcttccggctgagccacctgcggtctgaggaggtgcactggctgcacgtggacatgggcgtgtcctctgtgcgggagaagtatgagctggcccaccccccagaggagtggaagtatgagctgcgcatccgctacctgcccaagggcttcctgaaccagttcacagaggacaagcccaccctgaacttcttctaccagcaggtgaagagtgactacatgctggagattgctgaccaggtggaccaggagatcgccctgaagctgggctgcctggagatcagaagaagctactgggagatgagaggaaatgccctggagaagaagagcaactatgaggtgctggagaaggatgtgggcctgaagcgcttcttccccaagagcctgctggacagcgtgaaggccaagaccctgaggaagctgatccagcagaccttccggcagtttgccaacctgaaccgggaggagagcatcctgaagttctttgagatcctgagccctgtgtacagatttgacaaggagtgcttcaagtgtgccctgggcagctcctggatcatctctgtggagctggccatcggccctgaggagggcatctcctacctgacagacaagggctgcaaccccacccacctggccgacttcacccaggtgcagaccatccagtacagcaacagcgaggacaaggacaggaagggcatgctgcagctgaagattgctggggcccctgagcccctgactgtgacagcccccagcctgaccatcgccgagaacatggctgacctgattgatggctactgccgcctggtgaatggcaccagccagagcttcatcatccggccccagaaggagggggagcgggccctgcccagcatccccaagctggccaacagcgagaagcagggcatgaggacccatgctgtgtctgtgtctgaaacagatgattatgcagagatcattgatgaggaggacacctacaccatgcccagcacccgggactatgagatccagcgggagcgcatcgagctgggccgctgcatcggggagggccagtttggagatgtgcaccagggcatctacatgagcccagaaaatcctgccctggccgtggccatcaagacctgcaagaactgcaccagtgacagcgtgcgggagaagttcctgcaggaggccctgaccatgaggcagtttgaccacccccacatcgtgaagctgattggagtcatcacagagaaccctgtgtggatcatcatggagctgtgcaccctgggggagctgcgctccttcctgcaggtgaggaagtacagcctggacctggccagcctcatcctgtatgcctaccagctgagcacagccctggcctacctggagagcaagagatttgtgcaccgggacattgctgccagaaatgtgctggtgagcagcaatgactgtgtgaagctgggggactttggcctgagccgctacatggaggacagcacctactacaaggccagcaagggcaagctgcccatcaagtggatggcccctgagagcatcaacttccgccgcttcaccagcgccagtgatgtgtggatgtttggagtgtgcatgtgggagatcctgatgcacggcgtgaagcccttccagggcgtgaagaacaatgatgtgattggaagaattgaaaatggagagcggctgcccatgccacccaactgcccccccaccctgtacagcctgatgaccaagtgctgggcctatgaccccagcagaagaccccgcttcacagagctgaaggcccagctgagcaccatcctggaggaggagaaggcccagcaggaggagaggatgaggatggagagccggcggcaggccaccgtgtcctgggacagcggcggcagtgatgaggccccacccaagcccagccggcccggctaccccagccccaggagcagcgagggcttctaccccagcccccagcacatggtgcagaccaaccactaccaggtgtctggctacccaggcagccacggcatcacagccatggccggcagcatctacccaggccaggccagcctgctggaccagacagacagctggaaccaccggccccaggagatcgccatgtggcagcccaacgtggaggacagcacagtgctggacctgcggggcatcggccaggtgctgcccacccacctgatggaggagcggctcatccggcagcagcaggagatggaggaggaccagcgctggctggagaaggaggagcgcttcctgaagccagatgtgcggctgagccggggcagcattgacagagaagatggcagcctgcagggccccatcggcaaccagcacatctaccagcctgtgggcaagccagaccctgctgccccacccaagaagccacccaggcctggggcccctggccacctgggcagcctggccagcctgagcagccctgctgacagctacaatgaaggagtgaagctgcagccccaggagatcagccccccacccacagccaacctggacaggagcaatgacaaggtgtatgaaaatgtgacaggcctggtgaaggccgtcatcgagatgagcagcaagatccagcctgcccctcctgaggagtatgtgcccatggtgaaggaggtgggcctggccctgcggaccctgctggccaccgtggatgagaccatccccctgctgcctgccagcacccaccgggagattgagatggcccagaagctgctgaacagcgacctgggggagctgatcaacaagatgaagctggcccagcagtatgtgatgaccagcctgcagcaggagtacaagaagcagatgctgacagctgcccacgccctggccgtggatgccaagaacctgctggatgtgattgaccaggcccggctgaagatgctgggccagacccggccccactag

SEQ ID NO: 21417 - DNA, 3291 bp, synthetic construct; identical to SEQ ID NO: 21416
  misc_feature 1..3291: note = Description of Artificial Sequence: Synthetic coding sequence
  source 1..3291: mol_type = other DNA

SEQ ID NO: 21418 - DNA, 2043 bp, synthetic construct
  misc_feature 1..2043: note = Description of Artificial Sequence: Synthetic coding sequence
  source 1..2043: mol_type = other DNA
atgaagtaccaggaggtgcgctgcctgaccagcttcaacatctctgtgtccttccctgctgagacagatgattatgcagagatcattgatgaggaggacacctacaccatgcccagcacccgggactatgagatccagcgggagcgcatcgagctgggccgctgcatcggggagggccagtttggagatgtgcaccagggcatctacatgagcccagaaaatcctgccctggccgtggccatcaagacctgcaagaactgcaccagtgacagcgtgcgggagaagttcctgcaggaggccctgaccatgaggcagtttgaccacccccacatcgtgaagctgattggagtcatcacagagaaccctgtgtggatcatcatggagctgtgcaccctgggggagctgcgctccttcctgcaggtgaggaagtacagcctggacctggccagcctcatcctgtatgcctaccagctgagcacagccctggcctacctggagagcaagagatttgtgcaccgggacattgctgccagaaatgtgctggtgagcagcaatgactgtgtgaagctgggggactttggcctgagccgctacatggaggacagcacctactacaaggccagcaagggcaagctgcccatcaagtggatggcccctgagagcatcaacttccgccgcttcaccagcgccagtgatgtgtggatgtttggagtgtgcatgtgggagatcctgatgcacggcgtgaagcccttccagggcgtgaagaacaatgatgtgattggaagaattgaaaatggagagcggctgcccatgccacccaactgcccccccaccctgtacagcctgatgaccaagtgctgggcctatgaccccagcagaagaccccgcttcacagagctgaaggcccagctgagcaccatcctggaggaggagaaggcccagcaggaggagaggatgaggatggagagccggcggcaggccaccgtgtcctgggacagcggcggcagtgatgaggccccacccaagcccagccggcccggctaccccagccccaggagcagcgagggcttctaccccagcccccagcacatggtgcagaccaaccactaccaggtgtctggctacccaggcagccacggcatcacagccatggccggcagcatctacccaggccaggccagcctgctggaccagacagacagctggaaccaccggccccaggagatcgccatgtggcagcccaacgtggaggacagcacagtgctggacctgcggggcatcggccaggtgctgcccacccacctgatggaggagcggctcatccggcagcagcaggagatggaggaggaccagcgctggctggagaaggaggagcgcttcctgaagccagatgtgcggctgagccggggcagcattgacagagaagatggcagcctgcagggccccatcggcaaccagcacatctaccagcctgtgggcaagccagaccctgctgccccacccaagaagccacccaggcctggggcccctggccacctgggcagcctggccagcctgagcagccctgctgacagctacaatgaaggagtgaagctgcagccccaggagatcagccccccacccacagccaacctggacaggagcaatgacaaggtgtatgaaaatgtgacaggcctggtgaaggccgtcatcgagatgagcagcaagatccagcctgcccctcctgaggagtatgtgcccatggtgaaggaggtgggcctggccctgcggaccctgctggccaccgtggatgagaccatccccctgctgcctgccagcacccaccgggagattgagatggcccagaagctgctgaacagcgacctgggggagctgatcaacaagatgaagctggcccagcagtatgtgatgaccagcctgcagcaggagtacaagaagcagatgctgacagctgcccacgccctggccgtggatgccaagaacctgctggatgtgattgaccaggcccggctgaagatgctgggccagacccggccccactag

SEQ ID NO: 21419 - DNA, 3054 bp, synthetic construct
  misc_feature 1..3054: note = Description of Artificial Sequence: Synthetic coding sequence
  source 1..3054: mol_type = other DNA
tgatatgaccgctacctggccagcagcaagatcatggccgccgcctacctggaccccaacctgaaccacacccccaacagcagcaccaagacccacctgggcaccggcatggagaggagccctggggccatggagcgggtgctgaaggtgttccactactttgagagcaacagcgagcccaccacctgggccagcatcatcagacatggagatgccacagatgtgcggggcatcatccagaagatcgtggacagccacaaggtgaagcacgtggcctgctacggcttccggctgagccacctgcggtctgaggaggtgcactggctgcacgtggacatgggcgtgtcctctgtgcgggagaagtatgagctggcccaccccccagaggagtggaagtatgagctgcgcatccgctacctgcccaagggcttcctgaaccagttcacagaggacaagcccaccctgaacttcttctaccagcaggtgaagagtgactacatgctggagattgctgaccaggtggaccaggagatcgccctgaagctgggctgcctggagatccgccgcagctactgggagatgagaggaaatgccctggagaagaagagcaactatgaggtgctggagaaggatgtgggcctgaagcgcttcttccccaagagcctgctggacagcgtgaaggccaagaccctgaggaagctgatccagcagaccttccggcagtttgccaacctgaaccgggaggagagcatcctgaagttctttgagatcctgagccctgtgtacagatttgacaaggagtgcttcaagtgtgccctgggcagctcctggatcatctctgtggagctggccatcggccctgaggagggcatctcctacctgacagacaagggctgcaaccccacccacctggccgacttcacccaggtgcagaccatccagtacagcaacagcgaggacaaggacaggaagggcatgctgcagctgaagattgctggggcccctgagcccctgactgtgacagcccccagcctgaccatcgccgagaacatggctgacctgattgatggctactgccgcctggtgaatggcaccagccagagcttcatcatccggccccagaaggagggggagcgggccctgcccagcatccccaagctggccaacagcgagaagcagggcatgaggacccatgctgtgtctgtgtctgaaacagatgattatgcagagatcattgatgaggaggacacctacaccatgcccagcacccgggactatgagatccagcgggagagaattgagctgggccgctgcattggagagggccagtttggagatgtgcaccagggcatctacatgagccctgagaacccagccctggccgtggccatcaagacctgcaagaactgcaccagtgacagcgtgcgggagaagttcctgcaggaggccctgaccatgaggcagtttgaccacccccacatcgtgaagctgattggagtcatcacagaaaatcctgtgtggatcatcatggagctgtgcaccctgggggagctgcggagcttcctgcaggtgaggaagtacagcctggacctggccagcctcatcctgtatgcctaccagctgagcacagccctggcctacctggagagcaagagatttgtgcaccgggacattgctgccagaaatgtgctggtgagcagcaatgactgtgtgaagctgggggactttggcctgagccgctacatggaggacagcacctactacaaggccagcaagggcaagctgcccatcaagtggatggcccctgagagcatcaacttccgccgcttcaccagcgccagtgatgtgtggatgtttggagtgtgcatgtgggagatcctgatgcatggagtgaagcccttccagggcgtgaagaacaatgatgtgattggaagaattgaaaatggagagcggctgcccatgccacccaactgcccccccaccctgtacagcctgatgaccaagtgctgggcctatgaccccagccggcggccccgcttcacagagctgaaggcccagctgagcaccatcctggaggaggagaaggcccagcaggaggagaggatgaggatggagagccggcggcaggccaccgtgtcctgggacagcggcggcagtgatgaggccccacccaagcccagcaggcctggctaccccagccccaggagcagcgagggcttctaccccagcccccagcacatggtgcagaccaaccactaccaggacagcacagtgctggacctgcggggcatcggccaggtgctgcccacccacctgatggaggagcggctcatccggcagcagcaggagatggaggaggaccagcgctggctggagaaggaggagcgcttcctgaagccagatgtgcggctgagccggggcagcattgaccgggaggatggcagcctgcagggccccatcggcaaccagcacatctaccagcctgtgggcaagccagaccctgctgccccacccaagaagccacccaggcctggggcccctggccacctgggcagcctggccagcctgagcagccctgctgacagctacaatgaaggagtgaagctgcagccccaggagatcagccccccacccacagccaacctggacaggagcaatgacaaggtgtatgaaaatgtgacaggcctggtgaaggctgtgattgagatgagcagcaagatccagcctgcccctcctgaggagtatgtgcccatggtgaaggaggtgggcctggccctgcggaccctgctggccaccgtggatgagaccatccccctgctgcctgccagcacccaccgggagattgagatggcccagaagctgctgaacagcgacctgggggagctgatcaacaagatgaagctggcccagcagtatgtgatgaccagcctgcagcaggagtacaagaagcagatgctgacagctgcccacgccctggccgtggatgccaagaacctgctggatgtgattgaccaggcccggctgaagatgctgggccagacccggccccactag

SEQ ID NO: 21420 - DNA, 354 bp, synthetic construct; identical to SEQ ID NO: 21415
  misc_feature 1..354: note = Description of Artificial Sequence: Synthetic coding sequence
  source 1..354: mol_type = other DNA

SEQ ID NO: 21421 - DNA, 471 bp, synthetic construct
  misc_feature 1..471: note = Description of Artificial Sequence: Synthetic coding sequence
  source 1..471: mol_type = other DNA
atggctgctgcctacctggaccccaacctgaaccacacccccaacagcagcaccaagacccacctgggcaccggcatggagaggagccctggggccatggagcgggtgctgaaggtgttccactactttgagagcaacagcgagcccaccacctgggccagcatcatcagacatggagatgccacagatgtgcggggcatcatccagaagatcgtggacagccacaaggtgaagcacgtggcctgctacggcttccggctgagccacctgcggtctgaggaggtgcactggctgcacgtggacatgggcgtgtcctctgtgcgggagaagtatgagctggcccaccccccagaggagtggaagtatgagctgcgcatccgctacctgcccaagggcttcctgaaccagttcacagaggacaagcccaccctgaacttcttctaccagcaggtgaagagtgactacatgtag

SEQ ID NO: 21422 - DNA, 3159 bp, synthetic construct
  misc_feature 1..3159: note = Description of Artificial Sequence: Synthetic coding sequence
  source 1..3159: mol_type = other DNA
atggctgctgcctacctggaccccaacctgaaccacacccccaacagcagcaccaagacccacctgggcaccggcatggagaggagccctggggccatggagcgggtgctgaaggtgttccactactttgagagcaacagcgagcccaccacctgggccagcatcatcagacatggagatgccacagatgtgcggggcatcatccagaagatcgtggacagccacaaggtgaagcacgtggcctgctacggcttccggctgagccacctgcggtctgaggaggtgcactggctgcacgtggacatgggcgtgtcctctgtgcgggagaagtatgagctggcccaccccccagaggagtggaagtatgagctgcgcatccgctacctgcccaagggcttcctgaaccagttcacagaggacaagcccaccctgaacttcttctaccagcaggtgaagagtgactacatgctggagattgctgaccaggtggaccaggagatcgccctgaagctgggctgcctggagatcagaagaagctactgggagatgagaggaaatgccctggagaagaagagcaactatgaggtgctggagaaggatgtgggcctgaagcgcttcttccccaagagcctgctggacagcgtgaaggccaagaccctgaggaagctgatccagcagaccttccggcagtttgccaacctgaaccgggaggagagcatcctgaagttctttgagatcctgagccctgtgtacagatttgacaaggagtgcttcaagtgtgccctgggcagctcctggatcatctctgtggagctggccatcggccctgaggagggcatctcctacctgacagacaagggctgcaaccccacccacctggccgacttcacccaggtgcagaccatccagtacagcaacagcgaggacaaggacaggaagggcatgctgcagctgaagattgctggggcccctgagcccctgactgtgacagcccccagcctgaccatcgccgagaacatggctgacctgattgatggctactgccgcctggtgaatggcaccagccagagcttcatcatccggccccagaaggagggggagcgggccctgcccagcatccccaagctggccaacagcgagaagcagggcatgaggacccatgctgtgtctgtgtctgaaacagatgattatgcagagatcattgatgaggaggacacctacaccatgcccagcacccgggactatgagatccagcgggagcgcatcgagctgggccgctgcatcggggagggccagtttggagatgtgcaccagggcatctacatgagcccagaaaatcctgccctggccgtggccatcaagacctgcaagaactgcaccagtgacagcgtgcgggagaagttcctgcaggaggccctgaccatgaggcagtttgaccacccccacatcgtgaagctgattggagtcatcacagagaaccctgtgtggatcatcatggagctgtgcaccctgggggagctgcgctccttcctgcaggtgaggaagtacagcctggacctggccagcctcatcctgtatgcctaccagctgagcacagccctggcctacctggagagcaagagatttgtgcaccgggacattgctgccagaaatgtgctggtgagcagcaatgactgtgtgaagctgggggactttggcctgagccgctacatggaggacagcacctactacaaggccagcaagggcaagctgcccatcaagtggatggcccctgagagcatcaacttccgccgcttcaccagcgccagtgatgtgtggatgtttggagtgtgcatgtgggagatcctgatgcacggcgtgaagcccttccagggcgtgaagaacaatgatgtgattggaagaattgaaaatggagagcggctgcccatgccacccaactgcccccccaccctgtacagcctgatgaccaagtgctgggcctatgaccccagcagaagaccccgcttcacagagctgaaggcccagctgagcaccatcctggaggaggagaaggcccagcaggaggagaggatgaggatggagagccggcggcaggccaccgtgtcctgggacagcggcggcagtgatgaggccccacccaagcccagccggcccggctaccccagccccaggagcagcgagggcttctaccccagcccccagcacatggtgcagaccaaccactaccaggtgtctggctacccaggcagccacggcatcacagccatggccggcagcatctacccaggccaggccagcctgctggaccagacagacagctggaaccaccggccccaggagatcgccatgtggcagcccaacgtggaggacagcacagtgctggacctgcggggcatcggccaggtgctgcccacccacctgatggaggagcggctcatccggcagcagcaggagatggaggaggaccagcgctggctggagaaggaggagcgcttcctgaagccagatgtgcggctgagccggggcagcattgacagagaagatggcagcctgcagggccccatcggcaaccagcacatctaccagcctgtgggcaagccagaccctgctgccccacccaagaagccacccaggcctggggcccctggccacctgggcagcctggccagcctgagcagccctgctgacagctacaatgaaggagtgaagctgcagccccaggagatcagccccccacccacagccaacctggacaggagcaatgacaaggtgtatgaaaatgtgacaggcctggtgaaggccgtcatcgagatgagcagcaagatccagcctgcccctcctgaggagtatgtgcccatggtgaaggaggtgggcctggccctgcggaccctgctggccaccgtggatgagaccatccccctgctgcctgccagcacccaccgggagattgagatggcccagaagctgctgaacagcgacctgggggagctgatcaacaagatgaagctggcccagcagtatgtgatgaccagcctgcagcaggagtacaagaagcagatgctgacagctgcccacgccctggccgtggatgccaagaacctgctggatgtgattgaccaggcccggctgaagatgctgggccagacccggccccactag

SEQ ID NO: 21423 - DNA, 198 bp, synthetic construct
  misc_feature 1..198: note = Description of Artificial Sequence: Synthetic coding sequence
  source 1..198: mol_type = other DNA
atggctgctgcctacctggaccccaacctgaaccacacccccaacagcagcaccaagacccacctgggcaccggcatggagaggagccctggggccatggagcgggtgctgaaggtgttccactactttgagagcaacagcgagcccaccacctgggccagcatcatcagacatggagatgccacagatgtgaggtag

SEQ ID NO: 21424 - DNA, 324 bp, synthetic construct
  misc_feature 1..324: note = Description of Artificial Sequence: Synthetic coding sequence
  source 1..324: mol_type = other DNA
atggctgctgcctacctggaccccaacctgaaccacacccccaacagcagcaccaagacccacctgggcaccggcatggagaggagccctggggccatggagcgggtgctgaaggtgttccactactttgagagcaacagcgagcccaccacctgggccagcatcatcagacatggagatgccacagatgtgcggggcatcatccagaagatcgtggacagccacaaggtgaagcacgtggcctgctacggcttccggctgagccacctgcggtctgaggaggtgcactggctgcacgtggacatgggcgtgtcctctgtgtag

SEQ ID NO: 21425 - DNA, 360 bp, synthetic construct
  misc_feature 1..360: note = Description of Artificial Sequence: Synthetic coding sequence
  source 1..360: mol_type = other DNA
atggctgctgcctacctggaccccaacctgaaccacacccccaacagcagcaccaagacccacctgggcaccggcatggagaggagccctggggccatggagcgggtgctgaaggtgttccactactttgagagcaacagcgagcccaccacctgggccagcatcatcagacatggagatgccacagatgtgcggggcatcatccagaagatcgtggacagccacaaggtgaagcacgtggcctgctacggcttccggctgagccacctgcggtctgaggaggtgcactggctgcacgtggacatgggcgtgtcctctgtgcgggagaagtatgagctggcccaccccccagaggagtag

SEQ ID NO: 21426 - DNA, 2262 bp, synthetic construct
  misc_feature 1..2262: note = Description of Artificial Sequence: Synthetic coding sequence
  source 1..2262: mol_type = other DNA
gctgagaacatggctgacctgattgatggctactgccgcctggtgaatggcaccagccagagcttcatcatccggccccagaaggagggggagcgggccctgcccagcatccccaagctggccaacagcgagaagcagggcatgaggacccatgctgtgtctgtgtctggagtgagccactgccagcacaaggtgaagaaggcccggcgcttcctgcccctggtgttctgcagccatgacccccccagcacagatgagatctctggagatgaaacagatgattatgcagagatcattgatgaggaggacacctacaccatgcccagcacccgggactatgagatccagcgggagcgcatcgagctgggccgctgcatcggggagggccagtttggagatgtgcaccagggcatctacatgagcccagaaaatcctgccctggccgtggccatcaagacctgcaagaactgcaccagtgacagcgtgcgggagaagttcctgcaggaggccctgaccatgaggcagtttgaccacccccacatcgtgaagctgattggagtcatcacagagaaccctgtgtggatcatcatggagctgtgcaccctgggggagctgcgctccttcctgcaggtgaggaagtacagcctggacctggccagcctcatcctgtatgcctaccagctgagcacagccctggcctacctggagagcaagagatttgtgcaccgggacattgctgccagaaatgtgctggtgagcagcaatgactgtgtgaagctgggggactttggcctgagccgctacatggaggacagcacctactacaaggccagcaagggcaagctgcccatcaagtggatggcccctgagagcatcaacttccgccgcttcaccagcgccagtgatgtgtggatgtttggagtgtgcatgtgggagatcctgatgcacggcgtgaagcccttccagggcgtgaagaacaatgatgtgattggaagaattgaaaatggagagcggctgcccatgccacccaactgcccccccaccctgtacagcctgatgaccaagtgctgggcctatgaccccagcagaagaccccgcttcacagagctgaaggcccagctgagcaccatcctggaggaggagaaggcccagcaggaggagaggatgaggatggagagccggcggcaggccaccgtgtcctgggacagcggcggcagtgatgaggccccacccaagcccagccggcccggctaccccagccccaggagcagcgagggcttctaccccagcccccagcacatggtgcagaccaaccactaccaggtgtctggctacccaggcagccacggcatcacagccatggccggcagcatctacccaggccaggccagcctgctggaccagacagacagctggaaccaccggccccaggagatcgccatgtggcagcccaacgtggaggacagcacagtgctggacctgcggggcatcggccaggtgctgcccacccacctgatggaggagcggctcatccggcagcagcaggagatggaggaggaccagcgctggctggagaaggaggagcgcttcctgaagccagatgtgcggctgagccggggcagcattgacagagaagatggcagcctgcagggccccatcggcaaccagcacatctaccagcctgtgggcaagccagaccctgctgccccacccaagaagccacccaggcctggggcccctggccacctgggcagcctggccagcctgagcagccctgctgacagctacaatgaaggagtgaagccctggaggctgcagccccaggagatcagccccccacccacagccaacctggacaggagcaatgacaaggtgtatgaaaatgtgacaggcctggtgaaggctgtgattgagatgagcagcaagatccagcctgcccctcctgaggagtatgtgcccatggtgaaggaggtgggcctggccctgcggaccctgctggccaccgtggatgagaccatccccctgctgcctgccagcacccaccgggagattgagatggcccagaagctgctgaacagcgacctgggggagctgatcaacaagatgaagctggcccagcagtatgtgatgaccagcctgcagcaggagtacaagaagcagatgctgacagctgcccacgccctggccgtggatgccaagaacctgctggatgtgattgaccaggcccggctgaagatgctgggccagacccggccccactag

SEQ ID NO: 21427 - DNA, 3159 bp, synthetic construct; identical to SEQ ID NO: 21422
  misc_feature 1..3159: note = Description of Artificial Sequence: Synthetic coding sequence
  source 1..3159: mol_type = other DNA

SEQ ID NO: 21428 - DNA, 2175 bp, synthetic construct
  misc_feature 1..2175: note = Description of Artificial Sequence: Synthetic coding sequence
  source 1..2175: mol_type = other DNA
attgctgagaacatggctgacctgattgatggctactgccgcctggtgaatggcaccagccagagcttcatcatccggccccagaaggagggggagcgggccctgcccagcatccccaagctggccaacagcgagaagcagggcatgaggacccatgctgtgtctgtgtctgaaacagatgattatgcagagatcattgatgaggaggacacctacaccatgcccagcaagagctatggaattgatgaggcccgggactatgagatccagcgggagcgcatcgagctgggccgctgcatcggggagggccagtttggagatgtgcaccagggcatctacatgagcccagaaaatcctgccctggccgtggccatcaagacctgcaagaactgcaccagtgacagcgtgcgggagaagttcctgcaggaggccctgaccatgaggcagtttgaccacccccacatcgtgaagctgattggagtcatcacagagaaccctgtgtggatcatcatggagctgtgcaccctgggggagctgcgctccttcctgcaggtgaggaagtacagcctggacctggccagcctcatcctgtatgcctaccagctgagcacagccctggcctacctggagagcaagagatttgtgcaccgggacattgctgccagaaatgtgctggtgagcagcaatgactgtgtgaagctgggggactttggcctgagccgctacatggaggacagcacctactacaaggccagcaagggcaagctgcccatcaagtggatggcccctgagagcatcaacttccgccgcttcaccagcgccagtgatgtgtggatgtttggagtgtgcatgtgggagatcctgatgcacggcgtgaagcccttccagggcgtgaagaacaatgatgtgattggaagaattgaaaatggagagcggctgcccatgccacccaactgcccccccaccctgtacagcctgatgaccaagtgctgggcctatgaccccagcagaagaccccgcttcacagagctgaaggcccagctgagcaccatcctggaggaggagaaggcccagcaggaggagaggatgaggatggagagccggcggcaggccaccgtgtcctgggacagcggcggcagtgatgaggccccacccaagcccagccggcccggctaccccagccccaggagcagcgagggcttctaccccagcccccagcacatggtgcagaccaaccactaccaggtgtctggctacccaggcagccacggcatcacagccatggccggcagcatctacccaggccaggccagcctgctggaccagacagacagctggaaccaccggccccaggagatcgccatgtggcagcccaacgtggaggacagcacagtgctggacctgcggggcatcggccaggtgctgcccacccacctgatggaggagcggctcatccggcagcagcaggagatggaggaggaccagcgctggctggagaaggaggagcgcttcctgaagccagatgtgcggctgagccggggcagcattgacagagaagatggcagcctgcagggccccatcggcaaccagcacatctaccagcctgtgggcaagccagaccctgctgccccacccaagaagccacccaggcctggggcccctggccacctgggcagcctggccagcctgagcagccctgctgacagctacaatgaaggagtgaagctgcagccccaggagatcagccccccacccacagccaacctggacaggagcaatgacaaggtgtatgaaaatgtgacaggcctggtgaaggccgtcatcgagatgagcagcaagatccagcctgcccctcctgaggagtatgtgcccatggtgaaggaggtgggcctggccctgcggaccctgctggccaccgtggatgagaccatccccctgctgcctgccagcacccaccgggagattgagatggcccagaagctgctgaacagcgacctgggggagctgatcaacaagatgaagctggcccagcagtatgtgatgaccagcctgcagcaggagtacaagaagcagatgctgacagctgcccacgccctggccgtggatgccaagaacctgctggatgtgattgaccaggcccggctgaagatgctgggccagacccggccccactag

SEQ ID NO: 21429 - DNA, 363 bp, synthetic construct
  misc_feature 1..363: note = Description of Artificial Sequence: Synthetic coding sequence
  source 1..363: mol_type = other DNA
atggctgctgcctacctggaccccaacctgaaccacacccccaacagcagcaccaagacccacctgggcaccggcatggagaggagccctggggccatggagcgggtgctgaaggtgttccactactttgagagcaacagcgagcccaccacctgggccagcatcatcagacatggagatgccacagatgtgcggggcatcatccagaagatcgtggacagccacaaggtgaagcacgtggcctgctacggcttccggctgagccacctgcggtctgaggaggtgcactggctgcacgtggacatgggcgtgtcctctgtgcgggagaagtatgagctggcccaccccccagaggagtggtag

SEQ ID NO: 21430 - DNA, 156 bp, synthetic construct
  misc_feature 1..156: note = Description of Artificial Sequence: Synthetic coding sequence
  source 1..156: mol_type = other DNA
atggctgctgcctacctggaccccaacctgaaccacacccccaacagcagcaccaagacccacctgggcaccggcatggagaggagccctggggccatggagcgggtgctgaaggtgttccactactttgagagcaacagcgagcccaccacctag

SEQ ID NO: 21431 - DNA, 3021 bp, synthetic construct
  misc_feature 1..3021: note = Description of Artificial Sequence: Synthetic coding sequence
  source 1..3021: mol_type = other DNA
atggctgctgcctacctggaccccaacctgaaccacacccccaacagcagcaccaagacccacctgggcaccggcatggagaggagccctggggccatggagcgggtgctgaaggtgttccactactttgagagcaacagcgagcccaccacctgggccagcatcatcagacatggagatgccacagatgtgcggggcatcatccagaagatcgtggacagccacaaggtgaagcacgtggcctgctacggcttccggctgagccacctgcggtctgaggaggtgcactggctgcacgtggacatgggcgtgtcctctgtgcgggagaagtatgagctggcccaccccccagaggagtggaagtatgagctgcgcatccgctacctgcccaagggcttcctgaaccagttcacagaggacaagcccaccctgaacttcttctaccagcaggtgaagagtgactacatgctggagattgctgaccaggtggaccaggagatcgccctgaagctgggctgcctggagatcagaagaagctactgggagatgagaggaaatgccctggagaagaagagcaactatgaggtgctggagaaggatgtgggcctgaagcgcttcttccccaagagcctgctggacagcgtgaaggccaagaccctgaggaagctgatccagcagaccttccggcagtttgccaacctgaaccgggaggagagcatcctgaagttctttgagatcctgagccctgtgtacagatttgacaaggagtgcttcaagtgtgccctgggcagctcctggatcatctctgtggagctggccatcggccctgaggagggcatctcctacctgacagacaagggctgcaaccccacccacctggccgacttcacccaggtgcagaccatccagtacagcaacagcgaggacaaggacaggaagggcatgctgcagctgaagattgctggggcccctgagcccctgactgtgacagcccccagcctgaccatcgccgagaacatggctgacctgattgatggctactgccgcctggtgaatggcaccagccagagcttcatcatccggccccagaaggagggggagcgggccctgcccagcatccccaagctggccaacagcgagaagcagggcatgaggacccatgctgtgtctgtgtctgaaacagatgattatgcagagatcattgatgaggaggacacctacaccatgcccagcacccgggactatgagatccagcgggagcgcatcgagctgggccgctgcatcggggagggccagtttggagatgtgcaccagggcatctacatgagcccagaaaatcctgccctggccgtggccatcaagacctgcaagaactgcaccagtgacagcgtgcgggagaagttcctgcaggaggccctgaccatgaggcagtttgaccacccccacatcgtgaagctgattggagtcatcacagagaaccctgtgtggatcatcatggagctgtgcaccctgggggagctgcgctccttcctgcaggtgaggaagtacagcctggacctggccagcctcatcctgtatgcctaccagctgagcacagccctggcctacctggagagcaagagatttgtgcaccgggacattgctgccagaaatgtgctggtgagcagcaatgactgtgtgaagctgggggactttggcctgagccgctacatggaggacagcacctactacaaggccagcaagggcaagctgcccatcaagtggatggcccctgagagcatcaacttccgccgcttcaccagcgccagtgatgtgtggatgtttggagtgtgcatgtgggagatcctgatgcacggcgtgaagcccttccagggcgtgaagaacaatgatgtgattggaagaattgaaaatggagagcggctgcccatgccacccaactgcccccccaccctgtacagcctgatgaccaagtgctgggcctatgaccccagcagaagaccccgcttcacagagctgaaggcccagctgagcaccatcctggaggaggagaaggcccagcaggaggagaggatgaggatggagagccggcggcaggccaccgtgtcctgggacagcggcggcagtgatgaggccccacccaagcccagccggcccggctaccccagccccaggagcagcgagggcttctaccccagcccccagcacatggtgcagaccaaccactaccaggacagcacagtgctggacctgcggggcatcggccaggtgctgcccacccacctgatggaggagcggctcatccggcagcagcaggagatggaggaggaccagcgctggctggagaaggaggagcgcttcctgaagccagatgtgcggctgagccggggcagcattgacagagaagatggcagcctgcagggccccatcggcaaccagcacatctaccagcctgtgggcaagccagaccctgctgccccacccaagaagccacccaggcctggggcccctggccacctgggcagcctggccagcctgagcagccctgctgacagctacaatgaaggagtgaagctgcagccccaggagatcagccccccacccacagccaacctggacaggagcaatgacaaggtgtatgaaaatgtgacaggcctggtgaaggccgtcatcgagatgagcagcaagatccagcctgcccctcctgaggagtatgtgcccatggtgaaggaggtgggcctggccctgcggaccctgctggccaccgtggatgagaccatccccctgctgcctgccagcacccaccgggagattgagatggcccagaagctgctgaacagcgacctgggggagctgatcaacaagatgaagctggcccagcagtatgtgatgaccagcctgcagcaggagtacaagaagcagatgctgacagctgcccacgccctggccgtggatgccaagaacctgctggatgtgattgaccaggcccggctgaagatgctgggccagacccggccccactag

SEQ ID NO: 21432 - DNA, 2163 bp, synthetic construct
  misc_feature 1..2163: note = Description of Artificial Sequence: Synthetic coding sequence
  source 1..2163: mol_type = other DNA
atggctgacctgattgatggctactgccgcctggtgaatggcaccagccagagcttcatcatccggccccagaaggagggggagcgggccctgcccagcatccccaagctggccaacagcgagaagcagggcatgaggacccatgctgtgtctgtgtctgaaacagatgattatgcagagatcattgatgaggaggacacctacaccatgcccagcaagagctatggaattgatgaggcccgggactatgagatccagcgggagcgcatcgagctgggccgctgcatcggggagggccagtttggagatgtgcaccagggcatctacatgagcccagaaaatcctgccctggccgtggccatcaagacctgcaagaactgcaccagtgacagcgtgcgggagaagttcctgcaggaggccctgaccatgaggcagtttgaccacccccacatcgtgaagctgattggagtcatcacagagaaccctgtgtggatcatcatggagctgtgcaccctgggggagctgcgctccttcctgcaggtgaggaagtacagcctggacctggccagcctcatcctgtatgcctaccagctgagcacagccctggcctacctggagagcaagagatttgtgcaccgggacattgctgccagaaatgtgctggtgagcagcaatgactgtgtgaagctgggggactttggcctgagccgctacatggaggacagcacctactacaaggccagcaagggcaagctgcccatcaagtggatggcccctgagagcatcaacttccgccgcttcaccagcgccagtgatgtgtggatgtttggagtgtgcatgtgggagatcctgatgcacggcgtgaagcccttccagggcgtgaagaacaatgatgtgattggaagaattgaaaatggagagcggctgcccatgccacccaactgcccccccaccctgtacagcctgatgaccaagtgctgggcctatgaccccagcagaagaccccgcttcacagagctgaaggcccagctgagcaccatcctggaggaggagaaggcccagcaggaggagaggatgaggatggagagccggcggcaggccaccgtgtcctgggacagcggcggcagtgatgaggccccacccaagcccagccggcccggctaccccagccccaggagcagcgagggcttctaccccagcccccagcacatggtgcagaccaaccactaccaggtgtctggctacccaggcagccacggcatcacagccatggccggcagcatctacccaggccaggccagcctgctggaccagacagacagctggaaccaccggccccaggagatcgccatgtggcagcccaacgtggaggacagcacagtgctggacctgcggggcatcggccaggtgctgcccacccacctgatggaggagcggctcatccggcagcagcaggagatggaggaggaccagcgctggctggagaaggaggagcgcttcctgaagccagatgtgcggctgagccggggcagcattgacagagaagatggcagcctgcagggccccatcggcaaccagcacatctaccagcctgtgggcaagccagaccctgctgccccacccaagaagccacccaggcctggggcccctggccacctgggcagcctggccagcctgagcagccctgctgacagctacaatgaaggagtgaagctgcagccccaggagatcagccccccacccacagccaacctggacaggagcaatgacaaggtgtatgaaaatgtgacaggcctggtgaaggccgtcatcgagatgagcagcaagatccagcctgcccctcctgaggagtatgtgcccatggtgaaggaggtgggcctggccctgcggaccctgctggccaccgtggatgagaccatccccctgctgcctgccagcacccaccgggagattgagatggcccagaagctgctgaacagcgacctgggggagctgatcaacaagatgaagctggcccagcagtatgtgatgaccagcctgcagcaggagtacaagaagcagatgctgacagctgcccacgccctggccgtggatgccaagaacctgctggatgtgattgaccaggcccggctgaagatgctgggccagacccggccccactag

SEQ ID NO: 21433 - DNA, 3198 bp, synthetic construct
  misc_feature 1..3198: note = Description of Artificial Sequence: Synthetic coding sequence
  source 1..3198: mol_type = other DNA
atggctgctgcctacctggaccccaacctgaaccacacccccaacagcagcaccaagacccacctgggcaccggcatggagaggagccctggggccatggagcgggtgctgaaggtgttccactactttgagagcaacagcgagcccaccacctgggccagcatcatcagacatggagatgccacagatgtgcggggcatcatccagaagatcgtggacagccacaaggtgaagcacgtggcctgctacggcttccggctgagccacctgcggtctgaggaggtgcactggctgcacgtggacatgggcgtgtcctctgtgcgggagaagtatgagctggcccaccccccagaggagtggaagtatgagctgcgcatccgctacctgcccaagggcttcctgaaccagttcacagaggacaagcccaccctgaacttcttctaccagcaggtgaagagtgactacatgctggagattgctgaccaggtggaccaggagatcgccctgaagctgggctgcctggagatcagaagaagctactgggagatgagaggaaatgccctggagaagaagagcaactatgaggtgctggagaaggatgtgggcctgaagcgcttcttccccaagagcctgctggacagcgtgaaggccaagaccctgaggaagctgatccagcagaccttccggcagtttgccaacctgaaccgggaggagagcatcctgaagttctttgagatcctgagccctgtgtacagatttgacaaggagtgcttcaagtgtgccctgggcagctcctggatcatctctgtggagctggccatcggccctgaggagggcatctcctacctgacagacaagggctgcaaccccacccacctggccgacttcacccaggtgcagaccatccagtacagcaacagcgaggacaaggacaggaagggcatgctgcagctgaagattgctggggcccctgagcccctgactgtgacagcccccagcctgaccatcgccgagaacatggctgacctgattgatggctactgccgcctggtgaatggcaccagccagagcttcatcatccggccccagaaggagggggagcgggccctgcccagcatccccaagctggccaacagcgagaagcagggcatgaggacccatgctgtgtctgtgtctgaaacagatgattatgcagagatcattgatgaggaggacacctacaccatgcccagcacccgggactatgagatccagcgggagcgcatcgagctgggccgctgcatcggggagggccagtttggagatgtgcaccagggcatctacatgagcccagaaaatcctgccctggccgtggccatcaagacctgcaagaactgcaccagtgacagcgtgcgggagaagttcctgcaggaggccctgaccatgaggcagtttgaccacccccacatcgtgaagctgattggagtcatcacagagaaccctgtgtggatcatcatggagctgtgcaccctgggggagctgcgctccttcctgcaggtgaggaagtacagcctggacctggccagcctcatcctgtatgcctaccagctgagcacagccctggcctacctggagagcaagagatttgtgcaccgggacattgctgccagaaatgtgctggtgagcagcaatgactgtgtgaagctgggggactttggcctgagccgctacatggaggacagcacctactacaaggccagcaagggcaagctgcccatcaagtggatggcccctgagagcatcaacttccgccgcttcaccagcgccagtgatgtgtggatgtttggagtgtgcatgtgggagatcctgatgcacggcgtgaagcccttccagggcgtgaagaacaatgatgtgattggaagaattgaaaatggagagcggctgcccatgccacccaactgcccccccaccctgtacagcctgatgaccaagtgctgggcctatgaccccagcagaagaccccgcttcacagagctgaaggcccagctgagcaccatcctggaggaggagaaggcccagcaggaggagaggatgaggatggagagccggcggcaggccaccgtgtcctgggacagcggcggcagtgatgaggccccacccaagcccagccggcccggctaccccagccccaggagcagcgagggcttctaccccagcccccagcacatggtgcagaccaaccactaccaggtgtctggctacccaggcagccacggcatcacagccatggccggcagcatctacccaggccaggccagcctgctggaccagacagacagctggaaccaccggccccaggagatcgccatgtggcagcccaacgtggaggacagcacagtgctggacctgcggggcatcggccaggtgctgcccacccacctgatggaggagcggctcatccggcagcagcaggagatggaggaggaccagcgctggctggagaaggaggagcgcttcctgaagccagatgtgcggctgagccggggcagcattgacagagaagatggcagcctgcagggccccatcggcaaccagcacatctaccagcctgtgggcaagccaggcaaggaggagaagaactgggccgagagaaatcctgctgccccacccaagaagccacccaggcctggggcccctggccacctgggcagcctggccagcctgagcagccctgctgacagctacaatgaaggagtgaagccctggaggctgcagccccaggagatcagccccccacccacagccaacctggacaggagcaatgacaaggtgtatgaaaatgtgacaggcctggtgaaggctgtgattgagatgagcagcaagatccagcctgcccctcctgaggagtatgtgcccatggtgaaggaggtgggcctggccctgcggaccctgctggccaccgtggatgagaccatccccctgctgcctgccagcacccaccgggagattgagatggcccagaagctgctgaacagcgacctgggggagctgatcaacaagatgaagctggcccagcagtatgtgatgaccagcctgcagcaggagtacaagaagcagatgctgacagctgcccacgccctggccgtggatgccaagaacctgctggatgtgattgaccaggcccggctgaagatgctgggccagacccggccccactag

SEQ ID NO: 21434 - DNA, 2904 bp, synthetic construct
  misc_feature 1..2904: note = Description of Artificial Sequence: Synthetic coding sequence
  source 1..2904: mol_type = other DNA
atgtctggagtgtctgagcccctgagccgggtgaagctgggcaccctgcggcggcctgagggccctgctgagcccatggtggtggtgcctgtggatgtggagaaggaggatgtgcgcatcctgaaggtgtgcttctacagcaacagcttcaaccctgggaagaacttcaagctggtgaagtgcaccgtgcagacagagatccgggagatcatcaccagcatcctgctgagcggccgcatcggccccaacatccggctggccgagtgctacggcctgcggctgaagcacatgaagagtgatgagatccactggctgcacccccagatgacagtgggggaggtgcaggacaagtatgaatgtctgcacgtggaggccgagtggaggtatgacctgcagatccgctacctgcctgaggacttcatggagagcctgaaggaggacaggaccaccctgctgtacttctaccagcagctgagaaatgactacatgcagagatatgccagcaaggtgtctgagggcatggccctgcagctgggctgcctggagctgcggcgcttcttcaaggacatgccccacaatgccctggacaagaagagcaactttgagctgctggagaaggaggtgggcctggacctcttcttccccaagcagatgcaggagaacctgaagcccaagcagttcaggaagatgatccagcagaccttccagcagtatgccagcctgcgggaggaggagtgtgtgatgaagttcttcaacaccctggccggctttgccaacatcgaccaggagacctaccgctgtgagctgatccagggctggaacatcaccgtggacctggtgattggccccaagggcatccggcagctgaccagccaggatgccaagcccacctgcctggccgagttcaagcagatccgcagcatccgctgcctgcccctggaggagggccaggccgtgctgcagctgggcatcgagggcgccccccaggccctgagcatcaagaccagcagcctggccgaggccgagaacatggctgacctgattgatggctactgccgcctgcagggcgagcaccagggcagcctcatcatccaccccaggaaggatggagagaagaggaacagcctgccccagatccccatgctgaacctggaggcccggcgcagccacctgtctgagagctgcagcattgaaagtgacatctatgcagagatcccagatgagaccctgcggcggcctgggggcccccagtatggcatcgccagagaagatgtggtgctgaaccgcatcctgggggagggcttcttcggggaggtgtatgagggcgtgtacaccaaccacaagggggagaagatcaacgtggccgtgaagacctgcaagaaggactgcaccctggacaacaaggagaagttcatgtctgaggccgtcatcatgaagaacctggaccacccccacatcgtgaagctgattggcatcatcgaggaggagcccacctggatcatcatggagctgtacccctatggagagctgggccactacctggagaggaacaagaacagcctgaaggtgctgaccctggtgctgtacagcctgcagatctgcaaggccatggcctacctggagagcatcaactgtgtgcaccgggacattgctgtgaggaacatcctggtggccagcccagaatgtgtgaagctgggggactttggcctgagccgctacattgaagatgaggactactacaaggcctctgtgacccggctgcccatcaagtggatgagccctgagagcatcaacttccgccgcttcaccacagccagtgatgtgtggatgtttgctgtgtgcatgtgggagatcctgagctttgggaagcagcccttcttctggctggagaacaaggatgtgattggagtgctggagaagggggaccggctgcccaagccagacctgtgcccccctgtgctgtacaccctgatgacccgctgctgggactatgaccccagcgaccggccccgcttcacagagctggtgtgcagcctgagtgatgtgtaccagatggagaaggacatcgccatggagcaggagagaaatgcccgctaccgcacccccaagatcctggagcccacagccttccaggagcccccacccaagcccagccggcccaagtaccggcccccaccccagaccaacctgctggcccccaagctgcagttccaggaggaggacttcatccagcccagcagccgggaggaggcccagcagctgtgggaggccgagaaggtgaagatgaggcagatcctggacaagcagcagaagcagatggtggaggactaccagtggctgcggcaggaggagaagagcctggaccccatggtgtacatgaatgacaagagccccctgaccccagagaaggaggtgggctacctggagttcaccggccccccccagaagccaccccggctgggcgcccagagcatccagcccacagccaacctggacagaacagatgacctggtgtacctgaatgtgatggagctggtgcgggctgtgctggagctgaagaatgagctgtgccagctgcccccagagggctacgtggtggtggtgaagaatgtgggcctgaccctgaggaagctgattggctctgtggatgacctgctgcccagcctgcccagcagcagcaggacagaaattgagggcacccagaagctgctgaacaaggacctggccgagctgatcaacaagatgaggctggcccagcagaatgctgtgaccagcctgtctgaggagtgcaagaggcagatgctgacagccagccacaccctggccgtggatgccaagaacctgctggatgctgtggaccaggccaaggtgctggccaacctggcccaccccccagctgagtag

SEQ ID NO: 21435 - DNA, 3030 bp, synthetic construct
  misc_feature 1..3030: note = Description of Artificial Sequence: Synthetic coding sequence
  source 1..3030: mol_type = other DNA
atgtctggagtgtctgagcccctgagccgggtgaagctgggcaccctgcggcggcctgagggccctgctgagcccatggtggtggtgcctgtggatgtggagaaggaggatgtgcgcatcctgaaggtgtgcttctacagcaacagcttcaaccctgggaagaacttcaagctggtgaagtgcaccgtgcagacagagatccgggagatcatcaccagcatcctgctgagcggccgcatcggccccaacatccggctggccgagtgctacggcctgcggctgaagcacatgaagagtgatgagatccactggctgcacccccagatgacagtgggggaggtgcaggacaagtatgaatgtctgcacgtggaggccgagtggaggtatgacctgcagatccgctacctgcctgaggacttcatggagagcctgaaggaggacaggaccaccctgctgtacttctaccagcagctgagaaatgactacatgcagagatatgccagcaaggtgtctgagggcatggccctgcagctgggctgcctggagctgcggcgcttcttcaaggacatgccccacaatgccctggacaagaagagcaactttgagctgctggagaaggaggtgggcctggacctcttcttccccaagcagatgcaggagaacctgaagcccaagcagttcaggaagatgatccagcagaccttccagcagtatgccagcctgcgggaggaggagtgtgtgatgaagttcttcaacaccctggccggctttgccaacatcgaccaggagacctaccgctgtgagctgatccagggctggaacatcaccgtggacctggtgattggccccaagggcatccggcagctgaccagccaggatgccaagcccacctgcctggccgagttcaagcagatccgcagcatccgctgcctgcccctggaggagggccaggccgtgctgcagctgggcatcgagggcgccccccaggccctgagcatcaagaccagcagcctggccgaggccgagaacatggctgacctgattgatggctactgccgcctgcagggcgagcaccagggcagcctcatcatccaccccaggaaggatggagagaagaggaacagcctgccccagatccccatgctgaacctggaggcccggcgcagccacctgtctgagagctgcagcattgaaagtgacatctatgcagagatcccagatgagaccctgcggcggcctgggggcccccagtatggcatcgccagagaagatgtggtgctgaaccgcatcctgggggagggcttcttcggggaggtgtatgagggcgtgtacaccaaccacaagggggagaagatcaacgtggccgtgaagacctgcaagaaggactgcaccctggacaacaaggagaagttcatgtctgaggccgtcatcatgaagaacctggaccacccccacatcgtgaagctgattggcatcatcgaggaggagcccacctggatcatcatggagctgtacccctatggagagctgggccactacctggagaggaacaagaacagcctgaaggtgctgaccctggtgctgtacagcctgcagatctgcaaggccatggcctacctggagagcatcaactgtgtgcaccgggacattgctgtgaggaacatcctggtggccagcccagaatgtgtgaagctgggggactttggcctgagccgctacattgaagatgaggactactacaaggcctctgtgacccggctgcccatcaagtggatgagccctgagagcatcaacttccgccgcttcaccacagccagtgatgtgtggatgtttgctgtgtgcatgtgggagatcctgagctttgggaagcagcccttcttctggctggagaacaaggatgtgattggagtgctggagaagggggaccggctgcccaagccagacctgtgcccccctgtgctgtacaccctgatgacccgctgctgggactatgaccccagcgaccggccccgcttcacagagctggtgtgcagcctgagtgatgtgtaccagatggagaaggacatcgccatggagcaggagagaaatgcccgctaccgcacccccaagatcctggagcccacagccttccaggagcccccacccaagcccagccggcccaagtaccggcccccaccccagaccaacctgctggcccccaagctgcagttccaggtgcctgagggcctgtgtgccagcagccccaccctgaccagccccatggagtaccccagccctgtgaacagcctgcacaccccacccctgcaccgccacaacgtgttcaagaggcacagcatgagggaggaggacttcatccagcccagcagccgggaggaggcccagcagctgtgggaggccgagaaggtgaagatgaggcagatcctggacaagcagcagaagcagatggtggaggactaccagtggctgcggcaggaggagaagagcctggaccccatggtgtacatgaatgacaagagccccctgaccccagagaaggaggtgggctacctggagttcaccggccccccccagaagccaccccggctgggcgcccagagcatccagcccacagccaacctggacagaacagatgacctggtgtacctgaatgtgatggagctggtgcgggctgtgctggagctgaagaatgagctgtgccagctgcccccagagggctacgtggtggtggtgaagaatgtgggcctgaccctgaggaagctgattggctctgtggatgacctgctgcccagcctgcccagcagcagcaggacagaaattgagggcacccagaagctgctgaacaaggacctggccgagctgatcaacaagatgaggctggcccagcagaatgctgtgaccagcctgtctgaggagtgcaagaggcagatgctgacagccagccacaccctggccgtggatgccaagaacctgctggatgctgtggaccaggccaaggtgctggccaacctggcccaccccccagctgagtag

SEQ ID NO: 21436 - DNA, 3030 bp, synthetic construct; identical to SEQ ID NO: 21435
  misc_feature 1..3030: note = Description of Artificial Sequence: Synthetic coding sequence
  source 1..3030: mol_type = other DNA

SEQ ID NO: 21437 - DNA, 2904 bp, synthetic construct; identical to SEQ ID NO: 21434
  misc_feature 1..2904: note = Description of Artificial Sequence: Synthetic coding sequence
  source 1..2904: mol_type = other DNA

SEQ ID NO: 21438 - DNA, 2904 bp, synthetic construct; identical to SEQ ID NO: 21434
  misc_feature 1..2904: note = Description of Artificial Sequence: Synthetic coding sequence
  source 1..2904: mol_type = other DNA

SEQ ID NO: 21439 - DNA, 2409 bp, synthetic construct
  misc_feature 1..2409: note = Description of Artificial Sequence: Synthetic coding sequence
  source 1..2409: mol_type = other DNA
ctgctgcctgagaggatgtctggagtgtctgagcccctgagccgggtgaagctgggcaccctgcggcggcctgagggccctgctgagcccatggtggtggtgcctgtggatgtggagaaggaggatgtgcgcatcctgaaggtgtgcttctacagcaacagcttcaaccctgggaagaacttcaagctggtgaagtgcaccgtgcagacagagatccgggagatcatcaccagcatcctgctgagcggcagaattggccccaacatccggctggctgaatgttatggcctgcggctgaagcacatgaagagtgatgagatccactggctgcacccccagatgacagtgggggaggtgcaggacaagtatgagtgcctgcacgtggaggccgagtggaggtatgacctgcagatccgctacctgcctgaggacttcatggagagcctgaaggaggacaggaccaccctgctgtacttctaccagcagctgagaaatgactacatgcagagatatgccagcaaggtgtctgagggcatggccctgcagctgggctgcctggagctgcggcgcttcttcaaggacatgccccacaatgccctggacaagaagagcaactttgagctgctggagaaggaggtgggcctggacctcttcttccccaagcagatgcaggagaacctgaagcccaagcagttcaggaagatgatccagcagaccttccagcagtatgccagcctgcgggaggaggagtgtgtgatgaagttcttcaacaccctggccggctttgccaacatcgaccaggagacctaccgctgtgagctgatccagggctggaacatcaccgtggacctggtgattggccccaagggcatccggcagctgaccagccaggatgccaagcccacctgcctggccgagttcaagcagatccgcagcatccgctgcctgcccctggaggagggccaggccgtgctgcagctgggcattgaaggagccccccaggccctgagcatcaagaccagcagcctggccgaggccgagaacatggctgacctgattgatggctactgccgcctgcagggcgagcaccagggcagcctcatcatccaccccaggaaggatggagagaagaggaacagcctgccccagatccccatgctgaacctggaggcccggcgcagccacctgtctgagagctgcagcattgaaagtgacatctatgcagagatcccagatgagaccctgcggcggcctgggggcccccagtatggaattgcccgggaggatgtggtgctgaaccgcatcctgggggagggcttctttggagaggtgtatgaaggagtgtacaccaaccacaagggggagaagatcaacgtggccgtgaagacctgcaagaaggactgcaccctggacaacaaggagaagttcatgtctgaggccgtcatcatgaagaacctggaccacccccacatcgtgaagctgattggcatcatcgaggaggagcccacctggatcatcatggagctgtacccctacggggagctgggccactacctggagaggaacaagaacagcctgaaggtgctgaccctggtgctgtacagcctgcagatctgcaaggccatggcctacctggagagcatcaactgtgtgcaccgggacattgctgtgaggaacatcctggtggccagcccagaatgtgtgaagctgggggactttggcctgagccgctacattgaagatgaggactactacaaggcctctgtgacccggctgcccatcaagtggatgagccctgagagcatcaacttccgccgcttcaccacagccagtgatgtgtggatgtttgctgtgtgcatgtgggagatcctgagctttgggaagcagcccttcttctggctggagaacaaggatgtgattggagtgctggagaagggggaccggctgcccaagccagacctgtgcccccctgtgctgtacaccctgatgacccgctgctgggactatgaccccagcgaccggccccgcttcacagagctggtgtgcagcctgagtgatgtgtaccagatggagaaggacatcgccatggagcaggagagaaatgcccgctaccgcacccccaagatcctggagcccacagccttccaggagcccccacccaagcccagccggcccaagtacagacctccaccccagaccaacctgctggcccccaagctgcagttccaggtgcctgagggcctgtgtgccagcagccccaccctgaccagccccatggagtaccccagccctgtgaacagcctgcacaccccacccctgcaccgccacaacgtgttcaagaggcacagcatgagggaggaggacttcatccagcccagcagccggggccctgctgctgtgggcggctag

SEQ ID NO: 21440 - DNA, 3030 bp, synthetic construct; identical to SEQ ID NO: 21435
  misc_feature 1..3030: note = Description of Artificial Sequence: Synthetic coding sequence
  source 1..3030: mol_type = other DNA

SEQ ID NO: 21441 - DNA, 969 bp, synthetic construct
  misc_feature 1..969: note = Description of Artificial Sequence: Synthetic coding sequence
  source 1..969: mol_type = other DNA
atggctgaccgggacagcggcagcgagcagggcggggccgccctgggcagcggcggcagcctgggccaccctggcagcggcagcggcagcggcggcggcggcggcggcggcggcggcggcggcggcagcggcggcggcggcggcggggcccctgggggcctgcagcacgagacccaggagctggccagcaagagggtggacatccagaacaagcgcttctacctggatgtgaagcagaatgccaagggccgcttcctgaagattgctgaggtgggcgccggcggcaacaagagccggctgaccctgtccatgtctgtggccgtggagttccgggactacctgggggacttcatcgagcactacgcccagctgggccccagccagcccccagacctggcccaggcccaggatgagccccggcgggccctgaagtctgagttcctggtgagagaaaataggaagtactacatggacctgaaggagaaccagaggggccgcttcctgcgcatccggcagacagtgaacagaggccctggcctgggcagcacccagggccagaccatcgccctgcctgcccagggcctcatcgagttcagagatgccctggccaagctgattgatgattatggagtggaggaggagcctgctgagctgcctgagggcaccagcctgactgtggacaacaagcgcttcttctttgatgtgggcagcaacaagtatggagtcttcatgagggtgtctgaggtgaagcccacctacagaaacagcatcaccgtgccctacaaggtgtgggccaagtttggccacaccttctgcaagtacagcgaggagatgaagaagatccaggagaagcagcgggagaagagagctgcctgtgagcagctgcaccagcagcagcagcagcagcaggaggagacagctgctgccaccctgctgctgcagggcgaggaggagggggaggaggactag

SEQ ID NO: 21442 - DNA, 588 bp, synthetic construct
  misc_feature 1..588: note = Description of Artificial Sequence: Synthetic coding sequence
  source 1..588: mol_type = other DNA
atgggccgggccagagatgccatcctggatgccctggagaacctgacagctgaggagctgaagaagttcaagctgaagctgctgtctgtgcccctgcgggagggctacggccgcatccccaggggggccctgctgtccatggatgccctggacctgacagacaagctggtgtccttctacctggagacctacggggctgagctgacagccaacgtgctgcgggacatgggcctgcaggagatggccggccagctgcaggccgccacccaccagggcagcggggccgccccagctggcatccaggccccaccccagagcgctgccaagccaggcctgcacttcatcgaccagcaccgggccgccctgattgcccgggtgaccaacgtggagtggctgctggatgccctgtatggcaaggtgctgacagatgagcagtaccaggccgtgcgggcagagcccaccaaccccagcaagatgaggaagctgttctccttcaccccagcctggaactggacctgcaaggacctgctgctgcaggccctgcgggagagccagagctacctggtggaggacctggagaggagctag

SEQ ID NO: 21443 - DNA, 531 bp, synthetic construct
  misc_feature 1..531: note = Description of Artificial Sequence: Synthetic coding sequence
  source 1..531: mol_type = other DNA
atgggccgggccagagatgccatcctggatgccctggagaacctgacagctgaggagctgaagaagttcaagctgaagctgctgtctgtgcccctgcgggagggctacggccgcatccccaggggggccctgctgtccatggatgccctggacctgacagacaagctggtgtccttctacctggagacctacggggctgagctgacagccaacgtgctgcgggacatgggcctgcaggagatggccggccagctgcaggccgccacccaccagggcctgcacttcatcgaccagcacagagctgccctgattgcccgggtgaccaacgtggagtggctgctggatgccctgtatggcaaggtgctgacagatgagcagtaccaggccgtgcgggcagagcccaccaaccccagcaagatgaggaagctgttctccttcaccccagcctggaactggacctgcaaggacctgctgctgcaggccctgcgggagagccagagctacctggtggaggacctggagaggagctag

SEQ ID NO: 21444 - DNA, 408 bp, synthetic construct
  misc_feature 1..408: note = Description of Artificial Sequence: Synthetic coding sequence
  source 1..408: mol_type = other DNA
atgggccgggccagagatgccatcctggatgccctggagaacctgacagctgaggagctgaagaagttcaagctgcaggccgccacccaccagggcagcggggccgccccagctggcatccaggccccaccccagagcgctgccaagccaggcctgcacttcatcgaccagcaccgggccgccctgattgcccgggtgaccaacgtggagtggctgctggatgccctgtatggcaaggtgctgacagatgagcagtaccaggccgtgcgggcagagcccaccaaccccagcaagatgaggaagctgttctccttcaccccagcctggaactggacctgcaaggacctgctgctgcaggccctgcgggagagccagagctacctggtggaggacctggagaggagctag

SEQ ID NO: 21445 - DNA, 1311 bp, synthetic construct
  misc_feature 1..1311: note = Description of Artificial Sequence: Synthetic coding sequence
  source 1..1311: mol_type = other DNA
atgaggctggcccggctgctgcggggggccgccctggccggccctggccctggcctgcgggccgccggcttcagccgctccttcagcagtgacagcggcagcagccctgccagcgagcggggcgtgcccggccaggtggacttctacgcccgcttcagccccagccccctgtccatgaagcagttcctggactttggatctgtgaatgcctgtgagaagaccagcttcatgttcctgcggcaggagctgcctgtgcggctggccaacatcatgaaggagatcagcctgctgcctgacaacctgctgcggacccccagcgtgcagctggtgcagagctggtacatccagagcctgcaggagctgctggacttcaaggacaagtctgcagaagatgccaaggccatctatgacttcacagacaccgtcatccgcatccggaacagacacaatgatgtgatccccaccatggcccagggcgtgattgagtacaaggagagctttggagtggaccctgtgaccagccagaatgtgcagtacttcctggaccgcttctacatgagccgcatcagcatccgcatgctgctgaaccagcacagcctgctgtttggaggcaagggcaagggcagccccagccacaggaagcacatcggcagcatcaaccccaactgcaatgtgctggaggtgatcaaggatggctatgaaaatgcccggcggctgtgtgacctgtactacatcaacagccctgagctggagctggaggagctgaatgccaagagccctggccagcccatccaggtggtgtatgtgcccagccacctgtaccacatggtgtttgagctgttcaagaatgccatgagggccaccatggagcaccacgccaacagaggagtgtacccacccatccaggtgcacgtgaccctgggcaatgaagacctgactgtgaagatgtctgaccggggcggcggcgtgcccctgaggaagattgacaggctcttcaactacatgtacagcacagccccccggccccgggtggagaccagcagagctgtgcccctggccggcttcggctacggcctgcccatcagccggctgtatgcccagtacttccagggcgacctgaagctgtacagcctggagggctatggaacagatgctgtgatctacatcaaggccctgagcacagacagcattgagcggctgcctgtgtacaacaaggccgcctggaagcactacaacaccaaccatgaagcagatgactggtgtgtgcccagccgggagcccaaggacatgaccaccttccgcagcgcctag

SEQ ID NO: 21446 - DNA, 1371 bp, synthetic construct
  misc_feature 1..1371: note = Description of Artificial Sequence: Synthetic coding sequence
  source 1..1371: mol_type = other DNA
atgaggctggcccggctgctgcggggggccgccctggccggccctggccctggcctgcgggccgccggcttcagccgctccttcagcagtgacagcggcagcagccctgccagcgagcggggcgtgcccggccaggtggacttctacgcccgcttcagccccagccccctgtccatgaagcagttcctggactttggatctgtgaatgcctgtgagaagaccagcttcatgttcctgcggcaggagctgcctgtgcggctggccaacatcatgaaggagatcagcctgctgcctgacaacctgctgcggacccccagcgtgcagctggtgcagagctggtacatccagagcctgcaggagctgctggacttcaaggacaagtctgcagaagatgccaaggccatctatgaaagacccaggaggacctggctgcaggtgagcagcctgtgctgcatggcctgcaagatgatcttcacagacaccgtcatccgcatccggaacagacacaatgatgtgatccccaccatggcccagggcgtgattgagtacaaggagagctttggagtggaccctgtgaccagccagaatgtgcagtacttcctggaccgcttctacatgagccgcatcagcatccgcatgctgctgaaccagcacagcctgctgtttggaggcaagggcaagggcagccccagccacaggaagcacatcggcagcatcaaccccaactgcaatgtgctggaggtgatcaaggatggctatgaaaatgcccggcggctgtgtgacctgtactacatcaacagccctgagctggagctggaggagctgaatgccaagagccctggccagcccatccaggtggtgtatgtgcccagccacctgtaccacatggtgtttgagctgttcaagaatgccatgagggccaccatggagcaccacgccaacagaggagtgtacccacccatccaggtgcacgtgaccctgggcaatgaagacctgactgtgaagatgtctgaccggggcggcggcgtgcccctgaggaagattgacaggctcttcaactacatgtacagcacagccccccggccccgggtggagaccagcagagctgtgcccctggccggcttcggctacggcctgcccatcagccggctgtatgcccagtacttccagggcgacctgaagctgtacagcctggagggctatggaacagatgctgtgatctacatcaaggccctgagcacagacagcattgagcggctgcctgtgtacaacaaggccgcctggaagcactacaacaccaaccatgaagcagatgactggtgtgtgcccagccgggagcccaaggacatgaccaccttccgcagcgcctag

SEQ ID NO: 21447 - DNA, 1311 bp, synthetic construct; identical to SEQ ID NO: 21445
  misc_feature 1..1311: note = Description of Artificial Sequence: Synthetic coding sequence
  source 1..1311: mol_type = other DNA

SEQ ID NO: 21448 - DNA, 1083 bp, synthetic construct
  misc_feature 1..1083: note = Description of Artificial Sequence: Synthetic coding sequence
  source 1..1083: mol_type = other DNA
atgttcctgcggcaggagctgcctgtgcggctggccaacatcatgaaggagatcagcctgctgcctgacaacctgctgcggacccccagcgtgcagctggtgcagagctggtacatccagagcctgcaggagctgctggacttcaaggacaagtctgcagaagatgccaaggccatctatgacttcacagacaccgtcatccgcatccggaacagacacaatgatgtgatccccaccatggcccagggcgtgattgagtacaaggagagctttggagtggaccctgtgaccagccagaatgtgcagtacttcctggaccgcttctacatgagccgcatcagcatccgcatgctgctgaaccagcacagcctgctgtttggaggcaagggcaagggcagccccagccacaggaagcacatcggcagcatcaaccccaactgcaatgtgctggaggtgatcaaggatggctatgaaaatgcccggcggctgtgtgacctgtactacatcaacagccctgagctggagctggaggagctgaatgccaagagccctggccagcccatccaggtggtgtatgtgcccagccacctgtaccacatggtgtttgagctgttcaagaatgccatgagggccaccatggagcaccacgccaacagaggagtgtacccacccatccaggtgcacgtgaccctgggcaatgaagacctgactgtgaagatgtctgaccggggcggcggcgtgcccctgaggaagattgacaggctcttcaactacatgtacagcacagccccccggccccgggtggagaccagcagagctgtgcccctggccggcttcggctacggcctgcccatcagccggctgtatgcccagtacttccagggcgacctgaagctgtacagcctggagggctatggaacagatgctgtgatctacatcaaggccctgagcacagacagcattgagcggctgcctgtgtacaacaaggccgcctggaagcactacaacaccaaccatgaagcagatgactggtgtgtgcccagccgggagcccaaggacatgaccaccttccgcagcgcctag

SEQ ID NO: 21449 - DNA, 846 bp, synthetic construct
  misc_feature 1..846: note = Description of Artificial Sequence: Synthetic coding sequence
  source 1..846: mol_type = other DNA
atggcccagggcgtcatcgagtacaaggagagctttggagtggaccctgtgaccagccagaatgtgcagtacttcctggaccgcttctacatgagccgcatcagcatccgcatgctgctgaaccagcacagcctgctgtttggaggcaagggcaagggcagccccagccacaggaagcacatcggcagcatcaaccccaactgcaatgtgctggaggtgatcaaggatggctatgaaaatgcccggcggctgtgtgacctgtactacatcaacagccctgagctggagctggaggagctgaatgccaagagccctggccagcccatccaggtggtgtatgtgcccagccacctgtaccacatggtgtttgagctgttcaagaatgccatgagggccaccatggagcaccacgccaacagaggagtgtacccacccatccaggtgcacgtgaccctgggcaatgaagacctgactgtgaagatgtctgacagaggaggaggagtgcccctgaggaagattgacaggctcttcaactacatgtacagcacagccccccggccccgggtggagaccagcagagctgtgcccctggccggcttcggctacggcctgcccatcagccggctgtatgcccagtacttccagggcgacctgaagctgtacagcctggagggctacggcacagatgctgtgatctacatcaaggccctgagcacagacagcattgaaaggctgcctgtgtacaacaaggccgcctggaagcactacaacaccaaccacgaggctgatgactggtgtgtgcccagccgggagcccaaggacatgaccaccttccgcagcgcctag

SEQ ID NO: 21450 - DNA, 1032 bp, synthetic construct
  misc_feature 1..1032: note = Description of Artificial Sequence: Synthetic coding sequence
  source 1..1032: mol_type = other DNA
atgaaggagatcaacctgctgcctgacagagtgctgagcacccccagcgtgcagctggtgcagagctggtacgtgcagagcctgctggacatcatggagttcctggacaaggaccctgaggaccacaggaccctgagccagttcacagatgccctggtgaccatccggaacagacacaatgatgtggtgcccaccatggcccagggcgtgctggagtacaaggacacctatggagatgatcctgtgagcaaccagaacatccagtacttcctggaccgcttctacctgagccgcatcagcatccgcatgctgatcaaccagcacaccctcatctttgatggcagcaccaacccagcccaccccaagcacatcggcagcattgaccccaactgcaatgtgtctgaggtggtgaaggatgcctatgacatggccaagctgctgtgtgacaagtactacatggccagcccagacctggagatccaggagatcaatgctgccaacagcaagcagcccatccacatggtgtatgtgcccagccacctgtaccacatgctgtttgagctgttcaagaatgccatgagggccaccgtggagagccatgagagcagcctcatcctgccccccatcaaggtgatggtggccctgggggaggaggacctgagcatcaagatgtctgaccggggcggcggcgtgcccctgaggaagattgaaagactcttctcctacatgtacagcacagcccccaccccccagcccggcaccggcggcacccccctggccggcttcggctacggcctgcccatcagccggctgtatgccaagtacttccagggcgacctgcagctgttctccatggagggcttcggcacagatgctgtgatctacctgaaggccctgagcacagattctgtggagcggctgcctgtgtacaacaagagcgcctggaggcactaccagaccatccaggaggccggggactggtgtgtgcccagcacagagcccaagaacaccagcacctacagagtgtcctag

SEQ ID NO: 21451 - DNA, 1224 bp, synthetic construct
  misc_feature 1..1224: note = Description of Artificial Sequence: Synthetic coding sequence
  source 1..1224: mol_type = other DNA
atgcgctgggtgtgggccctgctgaagaatgccagcctggccggggcccccaagtacatcgagcacttcagcaagttcagccccagccccctgtccatgaagcagttcctggactttggcagcagcaatgcctgtgagaagaccagcttcaccttcctgcggcaggagctgcctgtgcggctggccaacatcatgaaggagatcaacctgctgcctgacagagtgctgagcacccccagcgtgcagctggtgcagagctggtacgtgcagagcctgctggacatcatggagttcctggacaaggaccctgaggaccacaggaccctgagccagttcacagatgccctggtgaccatccggaacagacacaatgatgtggtgcccaccatggcccagggcgtgctggagtacaaggacacctatggagatgatcctgtgagcaaccagaacatccagtacttcctggaccgcttctacctgagccgcatcagcatccgcatgctgatcaaccagcacaccctcatctttgatggcagcaccaacccagcccaccccaagcacatcggcagcattgaccccaactgcaatgtgtctgaggtggtgaaggatgcctatgacatggccaagctgctgtgtgacaagtactacatggccagcccagacctggagatccaggagatcaatgctgccaacagcaagcagcccatccacatggtgtatgtgcccagccacctgtaccacatgctgtttgagctgttcaagaatgccatgagggccaccgtggagagccatgagagcagcctcatcctgccccccatcaaggtgatggtggccctgggggaggaggacctgagcatcaagatgtctgaccggggcggcggcgtgcccctgaggaagattgaaagactcttctcctacatgtacagcacagcccccaccccccagcccggcaccggcggcacccccctggccggcttcggctacggcctgcccatcagccggctgtatgccaagtacttccagggcgacctgcagctgttctccatggagggcttcggcacagatgctgtgatctacctgaaggccctgagcacagattctgtggagcggctgcctgtgtacaacaagagcgcctggaggcactaccagaccatccaggaggccggggactggtgtgtgcccagcacagagcccaagaacaccagcacctacagagtgtcctag

SEQ ID NO: 21452 - DNA, 849 bp, synthetic construct
  misc_feature 1..849: note = Description of Artificial Sequence: Synthetic coding sequence
  source 1..849: mol_type = other DNA
atgcccctgctgacccagcagatccaggatgaagatgaccagtacagcctggtggccagcctggacaacgtgaggaacctgagcaccatcctgaaggccatccacttccgggagcacgccacctgctttgccaccaagaatggcatcaaggtgacagtggagaatgccaagtgtgtgcaggccaatgccttcatccaggccggcatcttccaggagttcaaggtgcaggaggagagcgtgaccttccgcatcaacctgactgtgctgctggactgcctgagcatcttcggcagcagccccatgcctggcaccctgacagccctgaggatgtgctaccagggctacggctaccccctgatgctgttcctggaggagggcggcgtggtgacagtgtgcaagatcaacacccaggagcctgaggagaccctggactttgacttctgcagcaccaacgtcatcaacaagatcatcctgcagagcgagggcctgcgggaggccttcagcgagctggacatgaccagcgaggtgctgcagatcaccatgagcccagacaagccctacttccggctgagcacctttggaaatgccggcagcagccacctggactaccccaaggacagcgacctgatggaggccttccactgcaaccagacccaggtgaaccgctacaagatcagcctgctgaagcccagcaccaaggccctggtgctgagctgcaaggtgtccatcagaacagacaacagaggcttcctgagcctgcagtacatgatcagaaatgaagatggccagatctgctttgtggagtactactgctgcccagatgaggaggtgcctgagagcgagagctag

SEQ ID NO: 21453 - DNA, 849 bp, synthetic construct; identical to SEQ ID NO: 21452
  misc_feature 1..849: note = Description of Artificial Sequence: Synthetic coding sequence
  source 1..849: mol_type = other DNA

SEQ ID NO: 21454 - DNA, 741 bp, synthetic construct
  misc_feature 1..741: note = Description of Artificial Sequence: Synthetic coding sequence
  source 1..741: mol_type = other DNA
atgcccctgctgacccagcagatccaggatgaagatgaccagtacagcctggtggccagcctggacaacgtgaggaacctgagcaccatcctgaaggccatccacttccgggagcacgccacctgctttgccaccaagaatggcatcaaggtgacagtggagaatgccaagtgtgtgcaggccaatgccttcatccagggcaccctgacagccctgaggatgtgctaccagggctacggctaccccctgatgctgttcctggaggagggcggcgtggtgacagtgtgcaagatcaacacccaggagcctgaggagaccctggactttgacttctgcagcaccaacgtcatcaacaagatcatcctgcagagcgagggcctgcgggaggccttcagcgagctggacatgaccagcgaggtgctgcagatcaccatgagcccagacaagccctacttccggctgagcacctttggaaatgccggcagcagccacctggactaccccaaggacagcgacctgatggaggccttccactgcaaccagacccaggtgaaccgctacaagatcagcctgctgaagcccagcaccaaggccctggtgctgagctgcaaggtgtccatcagaacagacaacagaggcttcctgagcctgcagtacatgatcagaaatgaagatggccagatctgctttgtggagtactactgctgcccagatgaggaggtgcctgagagcgagagctag

SEQ ID NO: 21455 - DNA, 1755 bp, synthetic construct
  misc_feature 1..1755: note = Description of Artificial Sequence: Synthetic coding sequence
  source 1..1755: mol_type = other DNA
atgaaccagcacgagctggccgtgcacaagaagaagattgaggaggtggagacctggctgaaggcccaggtgctggagcggcagcccaagcagggcggcagcatcctgctgatcactggacctcctggctgtgggaagaccaccaccctgaagatcctgagcaaggagcacggcatccaggtgcaggagtggatcaaccctgtgctgcctgacttccagaaggatgacttcaagggcatgttcaacacagagagcagcttccacatgttcccctaccagagccagattgctgtgttcaaggagttcctgctgcgggccaccaagtacaacaagctgcagatgctgggagatgacctgaggacagacaagaagatcatcctggtggaggacctgcccaaccagttctacagagacagccacaccctgcacgaggtgctgaggaaatatgtgcgcatcggccgctgccccctcatcttcatcatcagtgacagcctgagcggggacaacaaccagaggctgctcttccccaaggagatccaggaggagtgcagcatcagcaacatctccttcaaccctgtggcccccaccatcatgatgaagttcctgaacagaattgtgaccatcgaggccaacaagaatggaggcaagatcaccgtgcctgacaagaccagcctggagctgctgtgccagggctgcagcggggacatccgcagcgccatcaacagcctgcagttcagcagcagcaaaggagagaacaacctgcggcccaggaagaagggcatgagcctgaagagtgatgctgtgctgagcaagagcaagaggaggaagaagccagacagagtgtttgagaaccaggaggtgcaggccatcggcggcaaggatgtgtccctcttcctgttccgggccctgggcaagatcctgtactgcaagagggccagcctgacagagctggacagcccccggctgcccagccacctgtctgaatatgagcgggacaccctgctggtggagcctgaggaggtggtggagatgagccacatgcctggggacctcttcaacctgtacctgcaccagaactacatcgacttcttcatggagattgatgacatcgtgcgggccagcgagttcctgagctttgctgacatcctgagcggggactggaacaccaggagcctgctgcgggagtacagcaccagcatcgccacccggggcgtgatgcacagcaacaaggcccggggctacgcccactgccagggcggcggcagcagcttccggcccctgcacaagccccagtggttcctgatcaacaagaagtaccgggagaactgcctggccgccaaggccctcttcccagacttctgcctgcctgccctgtgcctgcagacccagctgctgccctacctggccctgctgaccatccccatgaggaaccaggcccagatctccttcatccaggacatcggccgcctgcccctgaagaggcacttcggccgcctgaagatggaggccctgacagaccgggagcacggcatgattgatcctgacagcggagatgaggcccagctgaatggaggccacagcgctgaggagagcctgggggagcccacccaggccaccgtgcctgagacctggagcctgcccctgagccagaacagcgccagcgagctgcctgccagccagccccagcccttcagcgcccagggcgacatggaggagaacatcatcattgaagattatgaaagtgatggcacctag

SEQ ID NO: 21456 - DNA, 2013 bp, synthetic construct
  misc_feature 1..2013: note = Description of Artificial Sequence: Synthetic coding sequence
  source 1..2013: mol_type = other DNA
atgaaccaggtgacagactgggtggaccccagctttgatgacttcctggagtgcagcggcgtgtccaccatcacagccaccagcctgggcgtgaacaacagcagccacaggaggaagaatggccccagcaccctggagagcagccgcttccctgccaggaagaggggcaacctgagcagcctggagcagatctacggcctggagaacagcaaggagtacctgtctgaaaatgagccctgggtggacaagtacaagccagagacccagcacgagctggccgtgcacaagaagaagattgaggaggtggagacctggctgaaggcccaggtgctggagcggcagcccaagcagggcggcagcatcctgctgatcactggacctcctggctgtgggaagaccaccaccctgaagatcctgagcaaggagcacggcatccaggtgcaggagtggatcaaccctgtgctgcctgacttccagaaggatgacttcaagggcatgttcaacacagagagcagcttccacatgttcccctaccagagccagattgctgtgttcaaggagttcctgctgcgggccaccaagtacaacaagctgcagatgctgggagatgacctgaggacagacaagaagatcatcctggtggaggacctgcccaaccagttctacagagacagccacaccctgcacgaggtgctgaggaaatatgtgcgcatcggccgctgccccctcatcttcatcatcagtgacagcctgagcggggacaacaaccagaggctgctcttccccaaggagatccaggaggagtgcagcatcagcaacatctccttcaaccctgtggcccccaccatcatgatgaagttcctgaacagaattgtgaccatcgaggccaacaagaatggaggcaagatcaccgtgcctgacaagaccagcctggagctgctgtgccagggctgcagcggggacatccgcagcgccatcaacagcctgcagttcagcagcagcaaaggagagaacaacctgcggcccaggaagaagggcatgagcctgaagagtgatgctgtgctgagcaagagcaagaggaggaagaagccagacagagtgtttgagaaccaggaggtgcaggccatcggcggcaaggatgtgtccctcttcctgttccgggccctgggcaagatcctgtactgcaagagggccagcctgacagagctggacagcccccggctgcccagccacctgtctgaatatgagcgggacaccctgctggtggagcctgaggaggtggtggagatgagccacatgcctggggacctcttcaacctgtacctgcaccagaactacatcgacttcttcatggagattgatgacatcgtgcgggccagcgagttcctgagctttgctgacatcctgagcggggactggaacaccaggagcctgctgcgggagtacagcaccagcatcgccacccggggcgtgatgcacagcaacaaggcccggggctacgcccactgccagggcggcggcagcagcttccggcccctgcacaagccccagtggttcctgatcaacaagaagtaccgggagaactgcctggccgccaaggccctcttcccagacttctgcctgcctgccctgtgcctgcagacccagctgctgccctacctggccctgctgaccatccccatgaggaaccaggcccagatctccttcatccaggacatcggccgcctgcccctgaagaggcacttcggccgcctgaagatggaggccctgacagaccgggagcacggcatgattgatcctgacagcggagatgaggcccagctgaatggaggccacagcgctgaggagagcctgggggagcccacccaggccaccgtgcctgagacctggagcctgcccctgagccagaacagcgccagcgagctgcctgccagccagccccagcccttcagcgcccagggcgacatggaggagaacatcatcattgaagattatgaaagtgatggcacctag

SEQ ID NO: 21457 - DNA, 2013 bp, synthetic construct; identical to SEQ ID NO: 21456
  misc_feature 1..2013: note = Description of Artificial Sequence: Synthetic coding sequence
  source 1..2013: mol_type = other DNA

SEQ ID NO: 21458 - DNA, 2013 bp, synthetic construct; identical to SEQ ID NO: 21456
  misc_feature 1..2013: note = Description of Artificial Sequence: Synthetic coding sequence
  source 1..2013: mol_type = other DNA

SEQ ID NO: 21459 - DNA, 2013 bp, synthetic construct; identical to SEQ ID NO: 21456
  misc_feature 1..2013: note = Description of Artificial Sequence: Synthetic coding sequence
  source 1..2013: mol_type = other DNA

SEQ ID NO: 21460 - DNA, 1518 bp, synthetic construct
  misc_feature 1..1518: note = Description of Artificial Sequence: Synthetic coding sequence
  source 1..1518: mol_type = other DNA
atgttcaacacagagagcagcttccacatgttcccctaccagagccagattgctgtgttcaaggagttcctgctgcgggccaccaagtacaacaagctgcagatgctgggagatgacctgaggacagacaagaagatcatcctggtggaggacctgcccaaccagttctacagagacagccacaccctgcacgaggtgctgaggaaatatgtgagaattggccgctgccccctcatcttcatcatcagtgacagcctgagcggggacaacaaccagaggctgctcttccccaaggagatccaggaggagtgcagcatcagcaacatctccttcaaccctgtggcccccaccatcatgatgaagttcctgaaccgcatcgtgaccatcgaggccaacaagaatggaggcaagatcaccgtgcctgacaagaccagcctggagctgctgtgccagggctgcagcggggacatccgcagcgccatcaacagcctgcagttcagcagcagcaagggggagaacaacctgcggcccaggaagaagggcatgagcctgaagagtgatgctgtgctgagcaagagcaagaggaggaagaagccagacagagtgtttgagaaccaggaggtgcaggccatcggcggcaaggatgtgtccctcttcctgttccgggccctgggcaagatcctgtactgcaagagggccagcctgacagagctggacagcccccggctgcccagccacctgtctgaatatgaaagagacaccctgctggtggagcctgaggaggtggtggagatgagccacatgcctggggacctcttcaacctgtacctgcaccagaactacatcgacttcttcatggagattgatgacatcgtgcgggccagcgagttcctgagctttgctgacatcctgagcggggactggaacaccaggagcctgctgcgggagtacagcaccagcatcgccacccggggcgtgatgcacagcaacaaggcccggggctacgcccactgccagggcggcggcagcagcttccggcccctgcacaagccccagtggttcctgatcaacaagaagtaccgggagaactgcctggccgccaaggccctcttcccagacttctgcctgcctgccctgtgcctgcagacccagctgctgccctacctggccctgctgaccatccccatgaggaaccaggcccagatctccttcatccaggacatcggccgcctgcccctgaagaggcacttcggccgcctgaagatggaggccctgacagaccgggagcacggcatgattgatcctgattctggagatgaggcccagctgaatggaggccacagcgctgaggagagcctgggggagcccacccaggccaccgtgcctgagacctggagcctgcccctgagccagaacagcgccagcgagctgcctgccagccagccccagcccttcagcgcccagggcgacatggaggagaacatcatcatcgaggactatgaaagtgatggcacctag

SEQ ID NO: 21461 - DNA, 2013 bp, synthetic construct; identical to SEQ ID NO: 21456
  misc_feature 1..2013: note = Description of Artificial Sequence: Synthetic coding sequence
  source 1..2013: mol_type = other DNA

SEQ ID NO: 21462 - DNA, 2046 bp, synthetic construct
  misc_feature 1..2046: note = Description of Artificial Sequence: Synthetic coding sequence
  source 1..2046: mol_type = other DNA
atgagcaagaccttcctgcggcccaaggtgagcagcaccaaggtgacagactgggtggaccccagctttgatgacttcctggagtgcagcggcgtgtccaccatcacagccaccagcctgggcgtgaacaacagcagccacaggaggaagaatggccccagcaccctggagagcagccgcttccctgccaggaagaggggcaacctgagcagcctggagcagatctacggcctggagaacagcaaggagtacctgtctgaaaatgagccctgggtggacaagtacaagccagagacccagcacgagctggccgtgcacaagaagaagattgaggaggtggagacctggctgaaggcccaggtgctggagcggcagcccaagcagggcggcagcatcctgctgatcaccggccccccaggctgcggcaagaccaccaccctgaagatcctgagcaaggagcacggcatccaggtgcaggagtggatcaaccctgtgctgcctgacttccagaaggatgacttcaagggcatgttcaacacagagagcagcttccacatgttcccctaccagagccagattgctgtgttcaaggagttcctgctgcgggccaccaagtacaacaagctgcagatgctgggagatgacctgaggacagacaagaagatcatcctggtggaggacctgcccaaccagttctacagagacagccacaccctgcacgaggtgctgaggaaatatgtgagaattggccgctgccccctcatcttcatcatcagtgacagcctgagcggggacaacaaccagaggctgctcttccccaaggagatccaggaggagtgcagcatcagcaacatctccttcaaccctgtggcccccaccatcatgatgaagttcctgaaccgcatcgtgaccatcgaggccaacaagaatggaggcaagatcaccgtgcctgacaagaccagcctggagctgctgtgccagggctgcagcggggacatccgcagcgccatcaacagcctgcagttcagcagcagcaagggggagaacaacctgcggcccaggaagaagggcatgagcctgaagagtgatgctgtgctgagcaagagcaagaggaggaagaagccagacagagtgtttgagaaccaggaggtgcaggccatcggcggcaaggatgtgtccctcttcctgttccgggccctgggcaagatcctgtactgcaagagggccagcctgacagagctggacagcccccggctgcccagccacctgtctgaatatgaaagagacaccctgctggtggagcctgaggaggtggtggagatgagccacatgcctggggacctcttcaacctgtacctgcaccagaactacatcgacttcttcatggagattgatgacatcgtgcgggccagcgagttcctgagctttgctgacatcctgagcggggactggaacaccaggagcctgctgcgggagtacagcaccagcatcgccacccggggcgtgatgcacagcaacaaggcccggggctacgcccactgccagggcggcggcagcagcttccggcccctgcacaagccccagtggttcctgatcaacaagaagtaccgggagaactgcctggccgccaaggccctcttcccagacttctgcctgcctgccctgtgcctgcagacccagctgctgccctacctggccctgctgaccatccccatgaggaaccaggcccagatctccttcatccaggacatcggccgcctgcccctgaagaggcacttcggccgcctgaagatggaggccctgacagaccgggagcacggcatgattgatcctgattctggagatgaggcccagctgaatggaggccacagcgctgaggagagcctgggggagcccacccaggccaccgtgcctgagacctggagcctgcccctgagccagaacagcgccagcgagctgcctgccagccagccccagcccttcagcgcccagggcgacatggaggagaacatcatcatcgaggactatgaaagtgatggcacctag

SEQ ID NO: 21463 - DNA, 510 bp, synthetic construct
  misc_feature 1..510: note = Description of Artificial Sequence: Synthetic coding sequence
  source 1..510: mol_type = other DNA
atgaaccaggtgacagactgggtggaccccagctttgatgacttcctggagtgcagcggcgtgtccaccatcacagccaccagcctgggcgtgaacaacagcagccacaggaggaagaatggccccagcaccctggagagcagccgcttccctgccaggaagaggggcaacctgagcagcctggagcagatctacggcctggagaacagcaaggagtacctgtctgaaaatgagccctgggtggacaagtacaagccagagacccagcacgagctggccgtgcacaagaagaagattgaggaggtggagacctggctgaaggcccaggtgctggagcggcagcccaagcagggcggcagcatcctgctgatcactggacctcctggctgtgggaagaccaccaccctgaagatcctgagcaaggagcacggcatccaggtgcaggagtggatcaaccctgtgctgcctgacttccagaaggatgacttcaagggcatgttcaacacctag

SEQ ID NO: 21464 - DNA, 66 bp, synthetic construct
  misc_feature 1..66: note = Description of Artificial Sequence: Synthetic coding sequence
  source 1..66: mol_type = other DNA
atgaaccaggtgacagactgggtggaccccagctttgatgacttcctggagtgcagcggcgtgtag

SEQ ID NO: 21465 - DNA, 2046 bp, synthetic construct; identical to SEQ ID NO: 21462
  misc_feature 1..2046: note = Description of Artificial Sequence: Synthetic coding sequence
  source 1..2046: mol_type = other DNA

SEQ ID NO: 21466 - DNA, 1518 bp, synthetic construct; identical to SEQ ID NO: 21460
  misc_feature 1..1518: note = Description of Artificial Sequence: Synthetic coding sequence
  source 1..1518: mol_type = other DNA

SEQ ID NO: 21467 - DNA, 1488 bp, synthetic construct
  misc_feature 1..1488: note = Description of Artificial Sequence: Synthetic coding sequence
  source 1..1488: mol_type = other DNA
atggacagcctggccgagagccgctggcccccaggcctggccgtgatgaagaccattgatgacctgctgcgctgtggcatctgctttgagtacttcaacatcgccatgatcatcccccagtgcagccacaactactgcagcctgtgcatcaggaagttcctgagctacaagacccagtgccccacctgctgcgtgacagtgacagagccagacctgaagaacaaccgcatcctggatgagctggtgaagagcctgaactttgccaggaaccacctgctgcagtttgccctggagagccctgccaagagccctgccagcagcagcagcaagaacctggccgtgaaggtgtacacccctgtggccagccggcagagcctgaagcagggcagccggctgatggacaacttcctgatccgggagatgagcggcagcaccagcgagctgctgatcaaggagaacaagagcaagttcagcccccagaaggaggccagccctgctgccaagaccaaggagaccaggtctgtggaggagatcgccccagaccccagcgaggccaagaggcctgagccccccagcaccagcaccctgaagcaggtgaccaaggtggactgccctgtgtgtggggtgaacatccctgagagccacatcaacaagcacctggacagctgcctgagccgggaggagaagaaggagagcctgcggagctctgtgcacaagaggaagcccctgcccaagacagtgtacaacctgctgagtgaccgggacctgaagaagaagctgaaggagcacggcctgagcatccagggcaacaagcagcagctgatcaagaggcaccaggagtttgtgcacatgtacaatgcccagtgtgatgccctgcaccccaagtctgctgctgagatcgtgcgggagattgaaaatattgagaagaccaggatgaggctggaggccagcaagctgaatgaatctgtgatggtgttcaccaaggaccagacagagaaggagattgatgagatccacagcaagtacaggaagaagcacaagtctgagttccagctgctggtggaccaggccaggaagggctacaagaagattgctggcatgagccagaagacagtgaccatcaccaaggaggatgagagcacagagaagctgagctctgtgtgcatgggccaggaggacaacatgacctctgtgaccaaccacttcagccagagcaagctggacagccctgaggagctggagccagaccgggaggaggacagcagcagctgcatcgacatccaggaggtgctgagcagcagcgagagtgacagctgcaacagcagcagcagtgacatcatccgggacctgctggaggaggaggaggcctgggaggccagccacaagaatgacctgcaggacacagagatcagcccccggcagaacagaaggaccagggctgctgagagcgctgagattgagcccaggaacaagaggaacagaaattag

SEQ ID NO: 21468 - DNA, 279 bp, synthetic construct
  misc_feature 1..279: note = Description of Artificial Sequence: Synthetic coding sequence
  source 1..279: mol_type = other DNA
atggacagcctggccgagagccgctggcccccaggcctggccgtgatgaagaccattgatgacctgctgcgctgtggcatctgctttgagtacttcaacatcgccatgatcatcccccagtgcagccacaactactgcagcctgtgcatcaggaagttcctgagctacaagacccagtgccccacctgctgcgtgacagtgacagagccagacctgaagaacaaccgcatcctggatgagctggtgaagagcctgaactttgccaggaaccacctgtag

SEQ ID NO: 21469 - DNA, 1092 bp, synthetic construct
  misc_feature 1..1092: note = Description of Artificial Sequence: Synthetic coding sequence
  source 1..1092: mol_type = other DNA
atggctgtgaccatcaccctgaagaccctgcagcagcagaccttcaagatccgcatggagccagatgagaccgtgaaggtgctgaaggagaagattgaggccgagaagggcagagatgccttccctgtggccggccagaagctgatctatgccggcaagatcctgagtgatgatgtgcccatccgggactacagaattgatgagaagaactttgtggtggtgatggtgaccaagaccaaggccggccagggcaccagcgcccctcctgaggccagccccacagctgcccctgagagcagcaccagcttccccccagcccccaccagcggcatgagccaccccccacctgctgcccgggaggacaagagccccagcgaggagagcgcccccaccaccagccctgagagcgtgtctggctctgtgcccagcagcggcagcagcggccgggaggaggatgctgccagcaccctggtgactggaagtgaatatgagaccatgctgacagagatcatgtccatgggctatgagcgggagcgggtggtggccgccctgcgggccagctacaacaacccccacagagctgtggagtacctgctgaccggcatccctggcagccctgagcctgagcacggctctgtgcaggagagccaggtgtctgagcagcctgccacagaggccgccggggagaaccccctggagttcctgcgggaccagccccagttccagaacatgaggcaggtgatccagcagaacccagccctgctgcctgccctgctgcagcagctgggccaggagaacccccagctgctgcagcagatcagccgccaccaggagcagttcatccagatgctgaatgaacctcctggagagctggccgacatcagtgatgtggagggggaggtgggcgccatcggggaggaggccccccagatgaactacatccaggtgaccccccaggagaaggaggccatcgagcggctgaaggccctgggcttccctgagagcctggtgatccaggcctactttgcctgtgagaagaatgaaaacctggccgccaacttcctgctgagccagaactttgatgatgaatag

SEQ ID NO: 21470 - DNA, 597 bp, synthetic construct
  misc_feature 1..597: note = Description of Artificial Sequence: Synthetic coding sequence
  source 1..597: mol_type = other DNA
atgctgacagagatcatgtccatgggctatgaaagagagcgggtggtggccgccctgcgggccagctacaacaacccccacagagctgtggagtacctgctgaccggcatccctggcagccctgagcctgagcacggctctgtgcaggagagccaggtgtctgagcagcctgccacagaagctgctggggagaaccccctggagttcctgcgggaccagccccagttccagaacatgaggcaggtgatccagcagaacccagccctgctgcctgccctgctgcagcagctgggccaggagaacccccagctgctgcagcagatcagccgccaccaggagcagttcatccagatgctgaatgagcccccaggagagctggccgacatcagtgatgtggagggggaggtgggcgccatcggggaggaggccccccagatgaactacatccaggtgaccccccaggagaaggaggccatcgagcggctgaaggccctgggcttccctgagagcctggtgatccaggcctactttgcctgtgagaagaatgaaaacctggccgccaacttcctgctgagccagaactttgatgatgaatag

SEQ ID NO: 21471 - DNA, 1092 bp, synthetic construct; identical to SEQ ID NO: 21469
  misc_feature 1..1092: note = Description of Artificial Sequence: Synthetic coding sequence
  source 1..1092: mol_type = other DNA

SEQ ID NO: 21472 - DNA, 927 bp, synthetic construct
  misc_feature 1..927: note = Description of Artificial Sequence: Synthetic coding sequence
  source 1..927: mol_type = other DNA
atggctgtgaccatcaccctgaagaccctgcagcagcagaccttcaagatccgcatggagccagatgagaccgtgaaggtgctgaaggagaagattgaggccgagaagggcagagatgccttccctgtggccggccagaagctgatctatgccggcaagatcctgagtgatgatgtgcccatccgggactacagaattgatgagaagaactttgtggtggtgatggtgaccaagaccaaggccggccagggcaccagcgcccctcctgaggccagccccacagctgcccctgagagcagcaccagcttccccccagcccccaccagcggcatgagccaccccccacctgctgcccgggaggacaagagccccagcgaggagagcgcccccaccaccagccctgagagcgtgtctggctctgtgcccagcagcggcagcagcggccgggaggaggatgctgccagcaccctggtgactggaagtgaatatgagaccatgctgacagagatcatgtccatgggctatgagcgggagcgggtggtggccgccctgcgggccagctacaacaacccccacagagctgtggagtacctgctgaccggcatccctggcagccctgagcctgagcacggctctgtgcaggagagccaggtgtctgagcagcctgccacagaggccgccggggagaaccccctggagttcctgcgggaccagccccagttccagaacatgaggcaggtgatccagcagaacccagccctgctgcctgccctgctgcagcagctgggccaggagaacccccagctgctgcagctgaaggccctgggcttccctgagagcctggtgatccaggcctactttgcctgtgagaagaatgaaaacctggccgccaacttcctgctgagccagaactttgatgatgaatag

SEQ ID NO: 21473 - DNA, 1230 bp, synthetic construct
  misc_feature 1..1230: note = Description of Artificial Sequence: Synthetic coding sequence
  source 1..1230: mol_type = other DNA
atgcaggtgaccctgaagaccctgcagcagcagaccttcaagattgatattgatcctgaggagaccgtgaaggccctgaaggagaagattgagagcgagaagggcaaggatgccttccctgtggccggccagaagctgatctatgccggcaagatcctgaatgatgacacagccctgaaggagtacaagattgatgagaagaactttgtggtggtgatggtgaccaagcccaaggctgtgtccaccccagccccagccaccacccagcagagcgccccagccagcaccacagctgtgaccagcagcaccaccaccaccgtggcccaggcccccacccctgtgcctgccctggcccccaccagcaccccagccagcatcaccccagccagcgccacagccagcagcgagcccgccccagccagcgctgccaagcaggagaagccagctgagaagccagctgagacccctgtggccaccagccccacagccacagacagcaccagcggggacagcagccgcagcaacctgtttgaagatgccaccagcgccctggtgacaggccagagctatgagaacatggtgacagagatcatgtccatgggctatgaaagagagcaggtgattgctgccctgcgggccagcttcaacaacccagacagagctgtggagtacctgctgatgggcatccctggggaccgggagagccaggccgtggtggaccccccccaggccgccagcactggagccccccagagcagcgctgtggccgctgctgctgccaccaccacagccaccaccaccaccaccagcagcggcggccaccccctggagttcctgaggaaccagccccagttccagcagatgaggcagatcatccagcagaaccccagcctgctgcctgccctgctgcagcagatcggccgggagaacccccagctgctgcagcagatcagccagcaccaggagcacttcatccagatgctgaatgaacctgtgcaggaggccggcggccagggcggcggcggcggcggcggcagcggcggcattgctgaggccggcagcggccacatgaactacatccaggtgaccccccaggagaaggaggccatcgagcggctgaaggccctgggcttccctgagggcctggtgatccaggcctactttgcctgtgagaagaatgaaaacctggccgccaacttcctgctgcagcagaactttgatgaggactag

SEQ ID NO: 21474 - DNA, 519 bp, synthetic construct
  misc_feature 1..519: note = Description of Artificial Sequence: Synthetic coding sequence
  source 1..519: mol_type = other DNA
atggtgaccaagcccaaggctgtgtccaccccagccccagccaccacccagcagagcgccccagccagcaccacagctgtgaccagcagcaccaccaccaccgtggcccaggcccccacccctgtgcctgccctggcccccaccagcaccccagccagcatcaccccagccagcgccacagccagcagcgagcccgccccagccagcgctgccaagcaggagaagccagctgagaagccagctgagacccctgtggccaccagccccacagccacagacagcaccagcggggacagcagccgcagcaacctgtttgaagatgccaccagcgccctggtgacaggccagagctatgagaacatggtgacagagatcatgtccatgggctatgaaagagagcaggtgattgctgccctgcgggccagcttcaacaacccagacagagctgtggagtacctgctgatgatcatcgtgaagacaggcaacaagaagaagaagcagcccctgctgggcaagtag

SEQ ID NO: 21475 - DNA, 1014 bp, synthetic construct
  misc_feature 1..1014: note = Description of Artificial Sequence: Synthetic coding sequence
  source 1..1014: mol_type = other DNA
atggtgaccaagcccaaggctgtgtccaccccagccccagccaccacccagcagagcgccccagccagcaccacagctgtgaccagcagcaccaccaccaccgtggcccaggcccccacccctgtgcctgccctggcccccaccagcaccccagccagcatcaccccagccagcgccacagccagcagcgagcccgccccagccagcgctgccaagcaggagaagccagctgagaagccagctgagacccctgtggccaccagccccacagccacagacagcaccagcggggacagcagccgcagcaacctgtttgaagatgccaccagcgccctggtgacaggccagagctatgagaacatggtgacagagatcatgtccatgggctatgaaagagagcaggtgattgctgccctgcgggccagcttcaacaacccagacagagctgtggagtacctgctgatgggcatccctggggaccgggagagccaggccgtggtggaccccccccaggccgccagcactggagccccccagagcagcgctgtggccgctgctgctgccaccaccacagccaccaccaccaccaccagcagcggcggccaccccctggagttcctgaggaaccagccccagttccagcagatgaggcagatcatccagcagaaccccagcctgctgcctgccctgctgcagcagatcggccgggagaacccccagctgctgcagcagatcagccagcaccaggagcacttcatccagatgctgaatgaacctgtgcaggaggccggcggccagggcggcggcggcggcggcggcagcggcggcattgctgaggccggcagcggccacatgaactacatccaggtgaccccccaggagaaggaggccatcgagcggctgaaggccctgggcttccctgagggcctggtgatccaggcctactttgcctgtgagaagaatgaaaacctggccgccaacttcctgctgcagcagaactttgatgaggactag

SEQ ID NO: 21476 - DNA, 441 bp, synthetic construct
  misc_feature 1..441: note = Description of Artificial Sequence: Synthetic coding sequence
  source 1..441: mol_type = other DNA
atgcaggtgaccctgaagaccctgcagcagcagaccttcaagattgatattgatcctgaggagaccgtgaaggccctgaaggagaagattgagagcgagaagggcaaggatgccttccctgtggccggccagaagctgatctatgccggcaagatcctgaatgatgacacagccctgaaggagtacaagattgatgagaagaactttgtggtggtgatggtgaccaagcccaaggctgtgtccaccccagccccagccaccacccagcagagcgccccagccagcaccacagctgtgaccagcagcaccaccaccaccgtggcccaggcccccacccctgtgcctgccctggcccccaccagcaccccagccagcatcaccccagccagcgccacagccagcagcgagcccgccccagccagcgctgccaagcaggagtag

SEQ ID NO: 21477 - DNA, 243 bp, synthetic construct
  misc_feature 1..243: note = Description of Artificial Sequence: Synthetic coding sequence
  source 1..243: mol_type = other DNA
atggtgaaggccctgaaggagaagattgaaagtgagaagggcaaggatgccttccctgtggccggccagaagctgatctatgctgggaagatcctgaatgatgacacagccctgaaggagtacaagattgatgagaagaactttgtggtggtgatggtgaccaagcccaaggctgtgtccaccccagccccagccaccacccagcagagcgccccagccagcaccacagctgtgaccagctag

SEQ ID NO: 21478 - DNA, 345 bp, synthetic construct
  misc_feature 1..345: note = Description of Artificial Sequence: Synthetic coding sequence
  source 1..345: mol_type = other DNA
tgaacagccagcagcgagcccgccccagccagcgctgccaagcaggagaagccagctgagaagccagctgagacccctgtggccaccagccccacagccacagacagcaccagcggggacagcagccgcagcaacctgtttgaagatgccaccagcgccctggtgacaggccagagctatgagaacatggtgacagagatcatgtccatgggctatgaaagagagcaggtgattgctgccctgcgggccagcttcaacaacccagacagagctgtggagtacctgctgatgatcatcgtgaagacaggcaacaagaagaagaagcagcccctgctgggcaagtag

SEQ ID NO: 21479 - DNA, 3939 bp, synthetic construct
  misc_feature 1..3939: note = Description of Artificial Sequence: Synthetic coding sequence
  source 1..3939: mol_type = other DNA
atgagccgcatcgagaagatgagcatcctgggcgtgcgcagctttggaattgaggacaaggacaagcagatcatcaccttcttcagccccctgaccatcctggtgggccccaacggggccggcaagaccaccatcattgaatgtctgaagtacatctgcaccggggacttccccccaggcaccaagggcaacacctttgtgcatgaccccaaggtggcccaggagacagatgtgcgggcccagatccggctgcagttcagagatgtgaatggagagctgattgctgtgcagaggtccatggtgtgcacccagaagagcaagaagacagagttcaagaccctggagggcgtcatcaccaggaccaagcatggagagaaggtgtccctgagcagcaaatgtgccgagattgaccgggagatgatcagcagcctgggcgtgtccaaggctgtgctgaacaacgtcatcttctgccaccaggaggacagcaactggcccctgtctgagggcaaggccctgaagcagaagtttgatgagatcttcagcgccacccgctacatcaaggccctggagaccctgcggcaggtgcggcagacccagggccagaaggtgaaggagtaccagatggagctgaagtacctgaagcagtacaaggagaaggcctgtgagatccgggaccagatcaccagcaaggaggcccagctgaccagcagcaaggagatcgtgaagagctatgaaaatgagctggaccccctgaagaaccggctgaaggagattgagcacaacctgagcaagatcatgaagctggacaatgagatcaaggccctggacagcaggaagaagcagatggagaaggacaacagcgagctggaggagaagatggagaaggtgttccagggcacagatgagcagctgaatgacctgtaccacaaccaccagaggacagtgcgggagaaggagaggaagctggtggactgccaccgggagctggagaagctgaacaaggagagccggctgctgaaccaggagaagtctgagctgctggtggagcagggccgcctgcagctgcaggccgacagacaccaggagcacatccgggcccgggacagcctcatccagagcctggccacccagctggagctggatggctttgagcggggccccttcagcgagcggcagatcaagaacttccacaagctggtgcgggagcggcaggagggggaggccaagacagccaaccagctgatgaatgactttgctgagaaggagaccctgaagcagaagcagattgatgagatccgggacaagaagacaggcctgggccgcatcatcgagctgaagtctgagatcctgagcaagaagcagaatgagctgaagaatgtgaagtatgagctgcagcagctggagggcagcagtgaccgcatcctggagctggaccaggagctgatcaaggccgagcgggagctgagcaaggccgagaagaacagcaatgtggagaccctgaagatggaggtgatcagcctgcagaatgagaaggctgacctggacaggaccctgaggaagctggaccaggagatggagcagctgaaccaccacaccaccaccaggacccagatggagatgctgaccaaggacaaggctgacaaggatgagcagatcaggaagatcaagagccgccacagtgatgagctgaccagcctgctgggctacttccccaacaagaagcagctggaggactggctgcacagcaagagcaaggagatcaaccagacccgggaccggctggccaagctgaacaaggagctggccagcagcgagcagaacaagaaccacatcaacaatgagctgaagaggaaggaggagcagctgagcagctatgaggacaagctgtttgatgtgtgtggcagccaggactttgaaagtgacctggaccggctgaaggaggagattgagaagagcagcaagcagagggccatgctggccggggccacagctgtgtacagccagttcatcacccagctgacagatgagaaccagagctgctgccctgtgtgccagagggtcttccagacagaggccgagctgcaggaggtgatcagtgacctgcagagcaagctgcggctggccccagacaagctgaagagcacagaaagtgagctgaagaagaaggagaagagaagagatgagatgctgggcctggtgcccatgaggcagagcatcatcgacctgaaggagaaggagatccctgagctgaggaacaagctgcagaatgtgaacagagacatccagaggctgaagaatgacatcgaggagcaggagaccctgctgggcaccatcatgcctgaggaggagagcgccaaggtgtgcctgacagatgtgaccatcatggagcgcttccagatggagctgaaggatgtggagaggaagatcgcccagcaggccgccaagctgcagggcatcgacctggacagaacagtgcagcaggtgaaccaggagaagcaggagaagcagcacaagctggacacagtgagcagcaagattgagctgaacaggaagctgatccaggaccagcaggagcagatccagcacctgaagagcaccaccaatgagctgaagtctgagaagctgcagatcagcaccaacctgcagaggcggcagcagctggaggagcagacagtggagctgagcacagaggtgcagagcctgtaccgggagatcaaggatgccaaggagcaggtgagccccctggagaccaccctggagaagttccagcaggagaaggaggagctgatcaacaagaagaacaccagcaacaagatcgcccaggacaagctgaatgacatcaaggagaaggtgaagaacatccacggctacatgaaggacatcgagaactacatccaggacggcaaggatgactacaagaagcagaaggagacagagctgaacaaggtgattgcccagctgtctgaatgtgagaagcacaaggagaagatcaatgaagacatgaggctgatgaggcaggacatcgacacccagaagatccaggagcgctggctgcaggacaacctgaccctgaggaagagaaatgaggagctgaaggaggtggaggaggagaggaagcagcacctgaaggagatgggccagatgcaggtgctgcagatgaagtctgagcaccagaagctggaggagaacatcgacaacatcaagaggaaccacaacctggccctgggccggcagaagggctatgaggaggagatcatccacttcaagaaggagctgcgggagccccagttcagagatgctgaggagaagtaccgggagatgatgattgtgatgaggaccacagagctggtgaacaaggacctggacatctactacaagaccctggaccaggccatcatgaagttccacagcatgaagatggaggagatcaacaagatcatccgggacctgtggaggagcacctaccggggccaggacatcgagtacatcgagatccgcagtgatgctgatgaaaatgtgtctgccagtgacaagagaagaaactacaactacagagtggtgatgctgaagggggacacagccctggacatgaggggccgctgcagcgctggccagaaggtgctggccagcctcatcatccggctggccctggccgagaccttctgcctgaactgtggcatcatcgccctggatgagcccaccaccaacctggaccgggagaacatcgagagcctggcccacgccctggtggagatcatcaagagccgcagccagcagaggaacttccagctgctggtgatcacccatgatgaagattttgtggagctgctgggccgctcagaatatgtggagaagttctaccgcatcaagaagaacatcgaccagtgcagcgagatcgtgaagtgcagcgtgagcagcctgggcttcaacgtgcactag

SEQ ID NO: 21480 - DNA, 3522 bp, synthetic construct
  misc_feature 1..3522: note = Description of Artificial Sequence: Synthetic coding sequence
  source 1..3522: mol_type = other DNA
atgatcagcagcctgggcgtgtccaaggctgtgctgaacaacgtcatcttctgccaccaggaggacagcaactggcccctgtctgagggcaaggccctgaagcagaagtttgatgagatcttcagcgccacccgctacatcaaggccctggagaccctgcggcaggtgcggcagacccagggccagaaggtgaaggagtaccagatggagctgaagtacctgaagcagtacaaggagaaggcctgtgagatccgggaccagatcaccagcaaggaggcccagctgaccagcagcaaggagatcgtgaagagctatgaaaatgagctggaccccctgaagaaccggctgaaggagattgagcacaacctgagcaagatcatgaagctggacaatgagatcaaggccctggacagcaggaagaagcagatggagaaggacaacagcgagctggaggagaagatggagaaggtgttccagggcacagatgagcagctgaatgacctgtaccacaaccaccagaggacagtgcgggagaaggagaggaagctggtggactgccaccgggagctggagaagctgaacaaggagagccggctgctgaaccaggagaagtctgagctgctggtggagcagggccgcctgcagctgcaggccgacagacaccaggagcacatccgggcccgggacagcctcatccagagcctggccacccagctggagctggatggctttgagcggggccccttcagcgagcggcagatcaagaacttccacaagctggtgcgggagcggcaggagggggaggccaagacagccaaccagctgatgaatgactttgctgagaaggagaccctgaagcagaagcagattgatgagatccgggacaagaagacaggcctgggccgcatcatcgagctgaagtctgagatcctgagcaagaagcagaatgagctgaagaatgtgaagtatgagctgcagcagctggagggcagcagtgaccgcatcctggagctggaccaggagctgatcaaggccgagcgggagctgagcaaggccgagaagaacagcaatgtggagaccctgaagatggaggtgatcagcctgcagaatgagaaggctgacctggacaggaccctgaggaagctggaccaggagatggagcagctgaaccaccacaccaccaccaggacccagatggagatgctgaccaaggacaaggctgacaaggatgagcagatcaggaagatcaagagccgccacagtgatgagctgaccagcctgctgggctacttccccaacaagaagcagctggaggactggctgcacagcaagagcaaggagatcaaccagacccgggaccggctggccaagctgaacaaggagctggccagcagcgagcagaacaagaaccacatcaacaatgagctgaagaggaaggaggagcagctgagcagctatgaggacaagctgtttgatgtgtgtggcagccaggactttgaaagtgacctggaccggctgaaggaggagattgagaagagcagcaagcagagggccatgctggccggggccacagctgtgtacagccagttcatcacccagctgacagatgagaaccagagctgctgccctgtgtgccagagggtcttccagacagaagctgagctgcaggaggtgatcagtgacctgcagagcaagctgcggctggccccagacaagctgaagagcacagagagcgagctgaagaagaaggagaagagaagagatgagatgctgggcctggtgcccatgaggcagagcatcatcgacctgaaggagaaggagatccctgagctgaggaacaagctgcagaatgtgaacagagacatccagaggctgaagaatgacatcgaggagcaggagaccctgctgggcaccatcatgcctgaggaggagagcgccaaggtgtgcctgacagatgtgaccatcatggagcgcttccagatggagctgaaggatgtggagaggaagatcgcccagcaggccgccaagctgcagggcatcgacctggacagaacagtgcagcaggtgaaccaggagaagcaggagaagcagcacaagctggacacagtgagcagcaagattgagctgaacaggaagctgatccaggaccagcaggagcagatccagcacctgaagagcaccaccaatgagctgaagtctgagaagctgcagatcagcaccaacctgcagaggcggcagcagctggaggagcagacagtggagctgagcacagaggtgcagagcctgtaccgggagatcaaggatgccaaggagcaggtgagccccctggagaccaccctggagaagttccagcaggagaaggaggagctgatcaacaagaagaacaccagcaacaagatcgcccaggacaagctgaatgacatcaaggagaaggtgaagaacatccacggctacatgaaggacatcgagaactacatccaggacggcaaggatgactacaagaagcagaaggagacagagctgaacaaggtgattgcccagctgtctgaatgtgagaagcacaaggagaagatcaatgaagacatgaggctgatgaggcaggacatcgacacccagaagatccaggagcgctggctgcaggacaacctgaccctgaggaagagaaatgaggagctgaaggaggtggaggaggagaggaagcagcacctgaaggagatgggccagatgcaggtgctgcagatgaagtctgagcaccagaagctggaggagaacatcgacaacatcaagaggaaccacaacctggccctgggccggcagaagggctatgaggaggagatcatccacttcaagaaggagctgcgggagccccagttcagagatgctgaggagaagtaccgggagatgatgattgtgatgaggaccacagagctggtgaacaaggacctggacatctactacaagaccctggaccaggccatcatgaagttccacagcatgaagatggaggagatcaacaagatcatccgggacctgtggaggagcacctaccggggccaggacatcgagtacatcgagatccgcagtgatgctgatgaaaatgtgtctgccagtgacaagagaagaaactacaactacagagtggtgatgctgaagggggacacagccctggacatgaggggccgctgcagcgctggccagaaggtgctggccagcctcatcatccggctggccctggccgagaccttctgcctgaactgtggcatcatcgccctggatgagcccaccaccaacctggacagagaaaatattgagagcctggcccacgccctggtggagatcatcaagagccgcagccagcagaggaacttccagctgctggtgatcacccatgatgaggactttgtggagctgctgggccgctcagaatatgtggagaagttctaccgcatcaagaagaacatcgaccagtgcagcgagatcgtgaagtgcagcgtgagcagcctgggcttcaacgtgcactag

SEQ ID NO: 21481 - DNA, 1020 bp, synthetic construct
  misc_feature 1..1020: note = Description of Artificial Sequence: Synthetic coding sequence
  source 1..1020: mol_type = other DNA
atggccatgcagatgcagctggaggccaatgctgacacctctgtggaggaggagagctttggcccccagcccatcagccggctggagcagtgtggcatcaatgccaatgatgtgaagaagctggaggaggccggcttccacacagtggaggccgtggcctatgcccccaagaaggagctgatcaacatcaagggcatcagcgaggccaaggctgacaagatcctggccgaggccgccaagctggtgcccatgggcttcaccacagccacagagttccaccagaggagaagtgagatcatccagatcaccaccggcagcaaggagctggacaagctgctgcagggcggcattgaaacaggcagcatcacagagatgtttggagagttcagaacaggcaagacccagatctgccacaccctggccgtgacctgccagctgcccatcgacagaggaggaggagagggcaaggccatgtacatcgacacagagggcaccttccggcctgagcggctgctggccgtggccgagagatatggcctgagcggcagtgatgtgctggacaacgtggcctatgcccgggccttcaacacagaccaccagacccagctgctgtaccaggccagcgccatgatggtggagagccgctatgccctgctgattgtggacagcgccacagccctgtacagaacagactacagcggccgcggggagctgagcgcccggcagatgcacctggcccgcttcctgaggatgctgctgcggctggctgatgaatttggagtggccgtggtgatcaccaaccaggtggtggcccaggtggatggagctgccatgtttgctgctgaccccaagaagcccatcggcggcaacatcatcgcccacgccagcaccacccggctgtacctgaggaagggccgcggggagacccgcatctgcaagatctatgacagcccctgcctgcctgaggccgaggccatgtttgccatcaatgctgatggagtgggagatgccaaggactag

SEQ ID NO: 21482 - DNA, 729 bp, synthetic construct
  misc_feature 1..729: note = Description of Artificial Sequence: Synthetic coding sequence
  source 1..729: mol_type = other DNA
atggccatgcagatgcagctggaggccaatgctgacacctctgtggaggaggagagctttggcccccagcccatcagccggctggagcagtgtggcatcaatgccaatgatgtgaagaagctggaggaggccggcttccacacagtggaggccgtggcctatgcccccaagaaggagctgatcaacatcaagggcatcagcgaggccaaggctgacaagatcctgctgctgagccacagatatggcctgagcggcagtgatgtgctggacaacgtggcctatgcccgggccttcaacacagaccaccagacccagctgctgtaccaggccagcgccatgatggtggagagccgctatgccctgctgattgtggacagcgccacagccctgtacagaacagactacagcggccgcggggagctgagcgcccggcagatgcacctggcccgcttcctgaggatgctgctgcggctggctgatgaatttggagtggccgtggtgatcaccaaccaggtggtggcccaggtggatggagctgccatgtttgctgctgaccccaagaagcccatcggcggcaacatcatcgcccacgccagcaccacccggctgtacctgaggaagggccgcggggagacccgcatctgcaagatctatgacagcccctgcctgcctgaggccgaggccatgtttgccatcaatgctgatggagtgggagatgccaaggactag

SEQ ID NO: 21483 - DNA, 1023 bp, synthetic construct
  misc_feature 1..1023: note = Description of Artificial Sequence: Synthetic coding sequence
  source 1..1023: mol_type = other DNA
atggccatgcagatgcagctggaggccaatgctgacacctctgtggaggaggagagctttggcccccagcccatcagccggctggagcagtgtggcatcaatgccaatgatgtgaagaagctggaggaggccggcttccacacagtggaggccgtggcctatgcccccaagaaggagctgatcaacatcaagggcatcagcgaggccaaggctgacaagatcctgacagagagccgctctgtggcccggctggagtgcaacagcgtcatcctggtgtactgcaccctgcggctgagcggcagcagtgacagccctgccagcgccagccgggtggtgggcaccactggaggcatcgagaccggcagcatcacagagatgtttggagagttcagaacaggcaagacccagatctgccacaccctggccgtgacctgccagctgcccatcgaccggggcggcggggagggcaaggccatgtacatcgacacagagggcaccttccggcctgagcggctgctggccgtggccgagagatatggcctgagcggcagtgatgtgctggacaacgtggcctatgcccgggccttcaacacagaccaccagacccagctgctgtaccaggccagcgccatgatggtggagagccgctatgccctgctgattgtggacagcgccacagccctgtacagaacagactacagcggccgcggggagctgagcgcccggcagatgcacctggcccgcttcctgaggatgctgctgcggctggctgatgaatttggagtggccgtggtgatcaccaaccaggtggtggcccaggtggatggagctgccatgtttgctgctgaccccaagaagcccatcggcggcaacatcatcgcccacgccagcaccacccggctgtacctgaggaagggccgcggggagacccgcatctgcaagatctatgacagcccctgcctgcctgaggccgaggccatgtttgccatcaatgctgatggagtgggagatgccaaggactag

SEQ ID NO: 21484 - DNA, 843 bp, synthetic construct
  misc_feature 1..843: note = Description of Artificial Sequence: Synthetic coding sequence
  source 1..843: mol_type = other DNA
atggccatgcagatgcagctggaggccaatgctgacacctctgtggaggaggagagctttggcccccagcccatcagccggctggagcagtgtggcatcaatgccaatgatgtgaagaagctggaggaggccggcttccacacagtggaggccgtggcctatgcccccaagaaggagctgatcaacatcaagggcatcagcgaggccaaggctgacaagatcctggccgaggccgccaagctggtgcccatgggcttcaccacagccacagagttccaccagaggagaagtgagatcatccagatcaccaccggcagcaaggagctggacaagctgctgcagggcggcattgaaacaggcagcatcacagagatgtttggagagttcagaacaggcaagacccagatctgccacaccctggccgtgacctgccagctgcccatcgacagaggaggaggagagggcaaggccatgtacatcgacacagagggcaccttccggcctgagcggctgctggccgtggccgagagatatggcctgagcggcagtgatgtgctggacaacgtggcctatgcccgggccttcaacacagaccaccagacccagctgctgtaccaggccagcgccatgatggtggagagccgctatgccctgctgattgtggacagcgccacagccctgtacagaacagactacagcggccgcggggagctgagcgcccggcagatgcacctggcccgcttcctgaggatgctgctgcggctggctgatgaaattgtgtctgaggagaggaagaggggcaaccagaacctgcagaacctgcggctgagcctgagcagctag

SEQ ID NO: 21485 - DNA, 456 bp, synthetic construct
  misc_feature 1..456: note = Description of Artificial Sequence: Synthetic coding sequence
  source 1..456: mol_type = other DNA
atggccatgcagatgcagctggaggccaatgctgacacctctgtggaggaggagagctttggcccccagcccatcagccggctggagcagtgtggcatcaatgccaatgatgtgaagaagctggaggaggccggcttccacacagtggaggccgtggcctatgcccccaagaaggagctgatcaacatcaagggcatcagcgaggccaaggctgacaagatcctggccgaggccgccaagctggtgcccatgggcttcaccacagccacagagttccaccagaggagaagtgagatcatccagatcaccaccggcagcaaggagctggacaagctgctgcagggcggcattgaaacaggcagcatcacagagatgtttggagagttcagaacaggcaagacccagatctgccacaccctggccgtgacctgccaggtgtggagcctgtggcagtag

SEQ ID NO: 21486 - DNA, 228 bp, synthetic construct
  misc_feature 1..228: note = Description of Artificial Sequence: Synthetic coding sequence
  source 1..228: mol_type = other DNA
atggccatgcagatgcagctggaggccaatgctgacacctctgtggaggaggagagctttggcccccagcccatcagccggctggagcagtgtggcatcaatgccaatgatgtgaagaagctggaggaggccggcttccacacagtggaggccgtggcctatgcccccaagaaggagctgatcaacatcaagggcatcagcgaggccaaggctgacaagatcctgtag

SEQ ID NO: 21487 - DNA, 519 bp, synthetic construct
  misc_feature 1..519: note = Description of Artificial Sequence: Synthetic coding sequence
  source 1..519: mol_type = other DNA
atggccatgcagatgcagctggaggccaatgctgacacctctgtggaggaggagagctttggcccccagcccatcagccggctggagcagtgtggcatcaatgccaatgatgtgaagaagctggaggaggccggcttccacacagtggaggccgtggcctatgcccccaagaaggagctgatcaacatcaagggcatcagcgaggccaaggctgacaagatcctggccgaggccgccaagctggtgcccatgggcttcaccacagccacagagttccaccagaggagaagtgagatcatccagatcaccaccggcagcaaggagctggacaagctgctgcagggcggcattgaaacaggcagcatcacagagatgtttggagagttcagaacaggcaagacccagatctgccacaccctggccgtgacctgccagctgcccatcgacagaggaggaggagagggcaaggccatgtacatcgacacagagggcaccttccggcctgagcggctgctgtag

SEQ ID NO: 21488 - DNA, 303 bp, synthetic construct
  misc_feature 1..303: note = Description of Artificial Sequence: Synthetic coding sequence
  source 1..303: mol_type = other DNA
atggccatgcagatgcagctggaggccaatgctgacacctctgtggaggaggagagctttggcccccagcccatcagccggctggagcagtgtggcatcaatgccaatgatgtgaagaagctggaggaggccggcttccacacagtggaggccgtggcctatgcccccaagaaggagctgatcaacatcaagggcatcagcgaggccaaggctgacaagatcctggtggagctgcggctggacctgagccagaagtgcctggagaacagcgagctgggccggcccaggagcgtcatcagatag

SEQ ID NO: 21489 - DNA, 1023 bp, synthetic construct; identical to SEQ ID NO: 21483
  misc_feature 1..1023: note = Description of Artificial Sequence: Synthetic coding sequence
  source 1..1023: mol_type = other DNA

SEQ ID NO: 21490 - DNA, 729 bp, synthetic construct
  misc_feature 1..729: note = Description of Artificial Sequence: Synthetic coding sequence
  source 1..729: mol_type = other DNA
atggccatgcagatgcagctggaggccaatgctgacacctctgtggaggaggagagctttggcccccagcccatcagccggctggagcagtgtggcatcaatgccaatgatgtgaagaagctggaggaggccggcttccacacagtggaggccgtggcctatgcccccaagaaggagctgatcaacatcaagggcatcagcgaggccaaggctgacaagatcctggccgtggccgagagatatggcctgagcggcagtgatgtgctggacaacgtggcctatgcccgggccttcaacacagaccaccagacccagctgctgtaccaggccagcgccatgatggtggagagccgctatgccctgctgattgtggacagcgccacagccctgtacagaacagactacagcggccgcggggagctgagcgcccggcagatgcacctggcccgcttcctgaggatgctgctgcggctggctgatgaatttggagtggccgtggtgatcaccaaccaggtggtggcccaggtggatggagctgccatgtttgctgctgaccccaagaagcccatcggcggcaacatcatcgcccacgccagcaccacccggctgtacctgaggaagggccgcggggagacccgcatctgcaagatctatgacagcccctgcctgcctgaggccgaggccatgtttgccatcaatgctgatggagtgggagatgccaaggactag

SEQ ID NO: 21491 - DNA, 1053 bp, synthetic construct
  misc_feature 1..1053: note = Description of Artificial Sequence: Synthetic coding sequence
  source 1..1053: mol_type = other DNA
atgggcagcaagaagctgaagagggtgggcctgagccaggagctgtgtgaccggctgagccgccaccagatcctgacctgccaggacttcctgtgcctgagccccctggagctgatgaaggtgacaggcctgagctaccggggcgtgcatgagctgctgtgcatggtgtcccgggcctgtgcccccaagatgcagacagcctacggcatcaaggcccagaggtctgctgacttcagccctgccttcctgagcaccaccctgagcgccctggatgaggccctgcatggaggagtggcctgtggcagcctgacagagatcactggacctcctggctgtgggaagacccagttctgcatcatgatgagcatcctggccaccctgcccaccaacatgggcggcctggagggcgctgtggtgtacatcgacacagaaagtgccttctctgctgagcggctggtggagattgctgagagccgcttcccccgctacttcaacacagaggagaagctgctgctgaccagcagcaaggtgcacctgtaccgggagctgacctgtgatgaggtgctgcagagaattgagagcctggaggaggagatcatcagcaagggcatcaagctggtgatcctggacagcgtggcctctgtggtgaggaaggagtttgatgcccagctgcagggcaacctgaaggagaggaacaagttcctggcccgggaggccagcagcctgaagtacctggccgaggagttcagcatccctgtgatcctgaccaaccagatcaccacccacctgagcggggccctggccagccaggccgacctggtgtccccagcagatgacctgagcctgtctgagggcaccagcggcagcagctgtgtgattgctgccctgggcaacacctggagccacagcgtgaacaccaggctcatcctgcagtacctggacagcgagcggcggcagatcctgattgccaagagccccctggcccccttcaccagctttgtgtacaccatcaaggaggagggcctggtgctgcaggcctatgcccagtgctag

SEQ ID NO: 21492 - DNA, 1101 bp, synthetic construct
  misc_feature 1..1101: note = Description of Artificial Sequence: Synthetic coding sequence
  source 1..1101: mol_type = other DNA
atgggcagcaagaagctgaagagggtgggcctgagccaggagctgtgtgaccggctgagccgccaccagatcctgacctgccaggacttcctgtgcctgagccccctggagctgatgaaggtgacaggcctgagctaccggggcgtgcatgagctgctgtgcatggtgtcccgggcctgtgcccccaagatgcagacagcctacggcatcaaggcccagaggtctgctgacttcagccctgccttcctgagcaccaccctgagcgccctggatgaggccctgcatggaggagtggcctgtggcagcctgacagagatcactggacctcctggctgtgggaagacccagttctgcatcatgatgagcatcctggccaccctgcccaccaacatgggcggcctggagggcgctgtggtgtacatcgacacagaaagtgccttctctgctgagcggctggtggagattgctgagagccgcttcccccgctacttcaacacagaggagaagctgctgctgaccagcagcaaggtgcacctgtaccgggagctgacctgtgatgaggtgctgcagagaattgagagcctggaggaggagatcatcagcaagggcatcaagctggtgatcctggacagcgtggcctctgtggtgaggaaggagtttgatgcccagctgcagggcaacctgaaggagaggaacaagttcctggcccgggaggccagcagcctgaagtacctggccgaggagttcagcatccctgtgatcctgaccaaccagatcaccacccacctgagcggggccctggccagccaggccgacctggtgtccccagcagatgacctgagcctgtctgagggcaccagcggcagcagctgtgtgattgctgccctgggcaacacctggagccacagcgtgaacaccaggctcatcctgcagtacctggacagcgagcggcggcagatcctgattgccaagagccccctggcccccttcaccagctttgtgtacaccatcaaggaggagggcctggtgctgcaggagttctggcacatctgcatcagcggcttcagcatccagaaccggctgaaggaaaatgaaagctag

SEQ ID NO: 21493 - DNA, 1053 bp, synthetic construct
  misc_feature 1..1053: note = Description of Artificial Sequence: Synthetic coding sequence
  source 1..1053: mol_type = other DNA
atgggcagcaagaagctgaagagggtgggcctgagccaggagctgtgtgaccggctgagccgccaccagatcctgacctgccaggacttcctgtgcctgagccccctggagctgatgaaggtgacaggcctgagctaccggggcgtgcatgagctgctgtgcatggtgtcccgggcctgtgcccccaagatgcagacagcctacggcatcaaggcccagaggtctgctgacttcagccctgccttcctgagcaccaccctgagcgccctggatgaggccctgcatggaggagtggcctgtggcagcctgacagagatcactggacctcctggctgtgggaagacccagttctgcatcatgatgagcatcctggccaccctgcccaccaacatgggcggcctggagggcgctgtggtgtacatcgacacagaaagtgccttctctgctgagcggctggtggagattgctgagagccgcttcccccgctacttcaacacagaggagaagctgctgctgaccagcagcaaggtgcacctgtaccgggagctgacctgtgatgaggtgctgcagagaattgagagcctggaggaggagatcatcagcaagggcatcaagctggtgatcctggacagcgtggcctctgtggtgaggaaggagtttgatgcccagctgcagggcaacctgaaggagaggaacaagttcctggcccgggaggccagcagcctgaagtacctggccgaggagttcagcatccctgtgatcctgaccaaccagatcaccacccacctgagcggggccctggccagccaggccgacctggtgtccccagcagatgacctgagcctgtctgagggcaccagcggcagcagctgtgtgattgctgccctgggcaacacctggagccacagcgtgaacaccaggctcatcctgcagtacctggacagcgagcggcggcagatcctgattgccaagagccccctggcccccttcaccagctttgtgtacaccatcaaggaggagggcctggtgctgcagggccaggagaccccctag

SEQ ID NO: 21494 - DNA, 1053 bp, synthetic construct
  misc_feature 1..1053: note = Description of Artificial Sequence: Synthetic coding sequence
  source 1..1053: mol_type = other DNA
atgggcagcaagaagctgaagagggtgggcctgagccaggagctgtgtgaccggctgagccgccaccagatcctgacctgccaggacttcctgtgcctgagccccctggagctgatgaaggtgacaggcctgagctaccggggcgtgcatgagctgctgtgcatggtgtcccgggcctgtgcccccaagatgcagacagcctacggcatcaaggcccagaggtctgctgacttcagccctgccttcctgagcaccaccctgagcgccctggatgaggccctgcatggaggagtggcctgtggcagcctgacagagatcactggacctcctggctgtgggaagacccagttctgcatcatgatgagcatcctggccaccctgcccaccaacatgggcggcctggagggcgctgtggtgtacatcgacacagaaagtgccttctctgctgagcggctggtggagattgctgagagccgcttcccccgctacttcaacacagaggagaagctgctgctgaccagcagcaaggtgcacctgtaccgggagctgacctgtgatgaggtgctgcagagaattgagagcctggaggaggagatcatcagcaagggcatcaagctggtgatcctggacagcgtggcctctgtggtgaggaaggagtttgatgcccagctgcagggcaacctgaaggagaggaacaagttcctggcccgggaggccagcagcctgaagtacctggccgaggagttcagcatccctgtgatcctgaccaaccagatcaccacccacctgagcggggccctggccagccaggccgacctggtgtccccagcagatgacctgagcctgtctgagggcaccagcggcagcagctgtgtgattgctgccctgggcaacacctggagccacagcgtgaacaccaggctcatcctgcagtacctggacagcgagcggcggcagatcctgattgccaagagccccctggcccccttcaccagctttgtgtacaccatcaaggaggagggcctggtgctgcagggccaggagaagccctag

SEQ ID NO: 21495 - DNA, 402 bp, synthetic construct
  misc_feature 1..402: note = Description of Artificial Sequence: Synthetic coding sequence
  source 1..402: mol_type = other DNA
atgggcagcaagaagctgaagagggtgggcctgagccaggagctgtgtgaccggctgagccgccaccagatcctgacctgccaggacttcctgtgcctgagccccctggagctgatgaaggtgacaggcctgagctaccggggcgtgcatgagctgctgtgcatggtgtcccgggcctgtgcccccaagatgcagacagcctacggcatcaaggcccagaggtctgctgacttcagccctgccttcctgagcaccaccctgagcgccctggatgaggccctgcatggaggagtggcctgtggcagcctgacagagatcactggacctcctggctgtgggaagacccagttctgcatcatgatgagcatcctggccaccctgcccaccaacatgggcggctag

SEQ ID NO: 21496 - DNA, 1155 bp, synthetic construct
  misc_feature 1..1155: note = Description of Artificial Sequence: Synthetic coding sequence
  source 1..1155: mol_type = other DNA
atgggcagcaagaagctgaagagggtgggcctgagccaggagctgtgtgaccggctgagccgccaccagatcctgacctgccaggacttcctgtgcctgagccccctggagctgatgaaggtgacaggcctgagctaccggggcgtgcatgagctgctgtgcatggtgtcccgggcctgtgcccccaagatgcagacagcctacggcatcaaggcccagaggtctgctgacttcagccctgccttcctgagcaccaccctgagcgccctggatgaggccctgcatggaggagtggcctgtggcagcctgacagagatcactggacctcctggctgtgggaagacccagttctgcatcatgatgagcatcctggccaccctgcccaccaacatgggcggcctggagggcgctgtggtgtacatcgacacagaaagtgccttctctgctgagcggctggtggagattgctgagagccgcttcccccgctacttcaacacagaggagaagctgctgctgaccagcagcaaggtgcacctgtaccgggagctgacctgtgatgaggtgctgcagagaattgagagcctggaggaggagatcatcagcaagggcatcaagctggtgatcctggacagcgtggcctctgtggtgaggaaggagtttgatgcccagctgcagggcaacctgaaggagaggaacaagttcctggcccgggaggccagcagcctgaagtacctggccgaggagttcagcatccctgtgatcctgaccaaccagatcaccacccacctgagcggggccctggccagccaggccgacctggtgtccccagcagatgacctgagcctgtctgagggcaccagcggcagcagctgtgtgattgctgccctgggcaacacctggagccacagcgtgaacaccaggctcatcctgcagtacctggacagcgagcggcggcagatcctgattgccaagagccccctggcccccttcaccagctttgtgtacaccatcaaggaggagggcctggtgctgcaggagaccaccttctgcagcgtgacccaggccgagctgaactgggcccctgagatcctgcccccccagcccccagagcagctgggcctgcagatgtgccaccacacccagctgatcttctag

SEQ ID NO: 21497 - DNA, 1101 bp, synthetic construct; identical to SEQ ID NO: 21492
  misc_feature 1..1101: note = Description of Artificial Sequence: Synthetic coding sequence
  source 1..1101: mol_type = other DNA

SEQ ID NO: 21498 - DNA, 228 bp, synthetic construct
  misc_feature 1..228: note = Description of Artificial Sequence: Synthetic coding sequence
  source 1..228: mol_type = other DNA
atgggcagcaagaagctgaagagggtgggcctgagccaggagctgtgtgaccggctgagccgccaccagatcctgacctgccaggacttcctgtgcctgagccccctggagctgatgaaggtgacaggcctgagctaccggggcgtgcatgagctgctgtgcatggtgtcccgggcctgtgcccccaagatgcagacagcctacggcatcaaggcccagaggagctag

SEQ ID NO: 21499 - DNA, 1131 bp, synthetic construct
  misc_feature 1..1131: note = Description of Artificial Sequence: Synthetic coding sequence
  source 1..1131: mol_type = other DNA
atgaggggcaagaccttccgctttgagatgcagagggacctggtgtccttccccctgagccctgctgtgcgggtgaagctggtgtctgctggcttccagacagctgaggagctgctggaggtgaagcccagcgagctgagcaaggaggtgggcatcagcaaggccgaggccctggagaccctgcagatcatcagaagagaatgtctgaccaacaagcccaggtatgccggcaccagcgagagccacaagaagtgcacagccctggagctgctggagcaggagcacacccagggcttcatcatcaccttctgcagcgccctggatgacatcctgggcggcggcgtgcccctgatgaagaccacagagatctgtggggcccctggggtgggcaagacccagctgtgcatgcagctggccgtggatgtgcagatccctgagtgcttcggcggcgtggccggggaggccgtgttcatcgacacagagggcagcttcatggtggacagagtggtggacctggccacagcctgcatccagcacctgcagctgattgctgagaagcacaagggggaggagcacaggaaggccctggaggacttcaccctggacaacatcctgagccacatctactacttccgctgccgggactacacagagctgctggcccaggtgtacctgctgcctgacttcctgtctgagcacagcaaggtgcggctggtgattgtggatggcatcgccttccccttcagacatgacctggatgacctgagcctgcggacccggctgctgaatggcctggcccagcagatgatcagcctggccaacaaccaccggctggccgtcatcctgaccaaccagatgaccaccaagattgacaggaaccaggccctgctggtgcctgccctgggggagagctggggccacgccgccaccatccgcctcatcttccactgggacaggaagcagaggctggccaccctgtacaagagccccagccagaaggagtgcaccgtgctcttccagatcaagccccagggcttccgggacacagtggtgaccagcgcctgcagcctgcagacagagggcagcctgagcaccaggaagaggagccgggaccctgaggaggagctgtag

SEQ ID NO: 21500 - DNA, 987 bp, synthetic construct
  misc_feature 1..987: note = Description of Artificial Sequence: Synthetic coding sequence
  source 1..987: mol_type = other DNA
atgggcgtgctgcgggtgggcctgtgccccggcctgacagaggagatgatccagctgctgcggagccaccgcatcaagacagtggtggacctggtgtctgctgacctggaggaggtggcccagaagtgtggcctgagctacaaggccctggtggccctgcggcgggtgctgctggcccagttcagcgccttccctgtgaatggagctgacctgtatgaggagctgaagaccagcacagccatcctgagcacaggcatcggccgcatccggctgtctggaaatgcccgctggctgatgcccaaggtgacagaaattgtgggcggccctggcagcggcaagacccaggtgtgcctgtgcatggccgccaacgtggcccacggcctgcagcagaatgtgctgtatgtggacagcaatggaggcctgacagccagccggctgctgcagctgctgcaggccaagacccaggatgaggaggagcaggccgaggccctgcggcgcatccaggtggtgcacgcctttgacatcttccagatgctggatgtgctgcaggagctgcggggcaccgtggcccagcaggtgacaggcagcagcggcaccgtgaaggtggtggtggtggacagcgtgacagctgtggtgagccccctgctgggcggccagcagcgggagggcctggccctgatgatgcagctggcccgggagctgaagaccctggcccgggacctgggcatggctgtggtggtgaccaaccacatcacccgggaccgggacagcggccgcctgaagccagccctgggccgctcctggagctttgtgcccagcacccgcatcctgctggacaccattgaaggagctggggccagcggcggccgcaggatggcctgcctggccaagagcagccggcagcccaccggcttccaggagatggtggacatcggcacctggggcaccagcgagcagagcgccaccctgcagggcgaccagacctag

SEQ ID NO: 21501 - DNA, 987 bp, synthetic construct
  misc_feature 1..987: note = Description of Artificial Sequence: Synthetic coding sequence
  source 1..987: mol_type = other DNA
atgggcgtgctgcgggtgggcctgtgccccggcctgacagaggagatgatccagctgctgcggagccaccgcatcaagacagtggtggacctggtgtctgctgacctggaggaggtggcccagaagtgtggcctgagctacaaggccctggtggccctgcggcgggtgctgctggcccagttcagcgccttccctgtgaatggagctgacctgtatgaggagctgaagaccagcacagccatcctgagcacaggcatcggcagcctggacaagctgctggatgctggcctgtacacaggagaggtgacagaaattgtgggcggccctggcagcggcaagacccaggtgtgcctgtgcatggccgccaacgtggcccacggcctgcagcagaatgtgctgtatgtggacagcaatggaggcctgacagccagccggctgctgcagctgctgcaggccaagacccaggatgaggaggagcaggccgaggccctgcggcgcatccaggtggtgcacgcctttgacatcttccagatgctggatgtgctgcaggagctgcggggcaccgtggcccagcaggtgacaggcagcagcggcaccgtgaaggtggtggtggtggacagcgtgacagctgtggtgagccccctgctgggcggccagcagcgggagggcctggccctgatgatgcagctggcccgggagctgaagaccctggcccgggacctgggcatggctgtggtggtgaccaaccacatcacccgggaccgggacagcggccgcctgaagccagccctgggccgctcctggagctttgtgcccagcacccgcatcctgctggacaccattgaaggagctggggccagcggcggccgcaggatggcctgcctggccaagagcagccggcagcccaccggcttccaggagatggtggacatcggcacctggggcaccagcgagcagagcgccaccctgcagggcgaccagacctag

SEQ ID NO: 21502 - DNA, 651 bp, synthetic construct
  misc_feature 1..651: note = Description of Artificial Sequence: Synthetic coding sequence
  source 1..651: mol_type = other DNA
atgggcgtgctgcgggtgggcctgtgccccggcctgacagaggagatgatccagctgctgcggagccaccgcatcaagacagtggtggacctggtgtctgctgacctggaggaggtggcccagaagtgtggcctgagctacaaggccgaggccctgcggcgcatccaggtggtgcacgcctttgacatcttccagatgctggatgtgctgcaggagctgcggggcaccgtggcccagcaggtgacaggcagcagcggcaccgtgaaggtggtggtggtggacagcgtgacagctgtggtgagccccctgctgggcggccagcagcgggagggcctggccctgatgatgcagctggcccgggagctgaagaccctggcccgggacctgggcatggctgtggtggtgaccaaccacatcacccgggaccgggacagcggccgcctgaagccagccctgggccgctcctggagctttgtgcccagcacccgcatcctgctggacaccattgaaggagctggggccagcggcggccgcaggatggcctgcctggccaagagcagccggcagcccaccggcttccaggagatggtggacatcggcacctggggcaccagcgagcagagcgccaccctgcagggcgaccagacctag

SEQ ID NO: 21503 - DNA, 357 bp, synthetic construct
  misc_feature 1..357: note = Description of Artificial Sequence: Synthetic coding sequence
  source 1..357: mol_type = other DNA
atgggcgtgctgcgggtgggcctgtgccccggcctgacagaggagatgatccagctgctgcggagccaccgcatcaagacagtggtggacctggtgtctgctgacctggaggaggtggcccagaagtgtggcctgagctacaaggccctggtggccctgcggcgggtgctgctggcccagttcagcgccttccctgtgaatggagctgacctgtatgaggagctgaagaccagcacagccatcctgagcacaggcatcggcagacatggaggccgcacccaggtgggcacctgggaggactgcagctgcctgcggagcccccagggcgaccggggcgtgggcagcggcatgctgtag

SEQ ID NO: 21504 - DNA, 852 bp, synthetic construct
  misc_feature 1..852: note = Description of Artificial Sequence: Synthetic coding sequence
  source 1..852: mol_type = other DNA
atgggcgtgctgcgggtgggcctgtgccccggcctgacagaggagatgatccagctgctgcggagccaccgcatcaagacagtggtggacctggtgtctgctgacctggaggaggtggcccagaagtgtggcctgagctacaaggccctggtggccctgcggcgggtgctgctggcccagttcagcgccttccctgtgaatggagctgacctgtatgaggagctgaagaccagcacagccatcctgagcacaggcatcggcagcctggacaagctgctggatgctggcctgtacacaggagaggtgacagaaattgtgggcggccctggcagcggcaagacccaggccgaggccctgcggcgcatccaggtggtgcacgcctttgacatcttccagatgctggatgtgctgcaggagctgcggggcaccgtggcccagcaggtgacaggcagcagcggcaccgtgaaggtggtggtggtggacagcgtgacagctgtggtgagccccctgctgggcggccagcagcgggagggcctggccctgatgatgcagctggcccgggagctgaagaccctggcccgggacctgggcatggctgtggtggtgaccaaccacatcacccgggaccgggacagcggccgcctgaagccagccctgggccgctcctggagctttgtgcccagcacccgcatcctgctggacaccatcgagggcgctggggccagcggcggccgcaggatggcctgcctggccaagagcagccggcagcccaccggcttccaggagatggtggacatcggcacctggggcaccagcgagcagagcgccaccctgcagggcgaccagacctag

SEQ ID NO: 21505 - DNA, 1047 bp, synthetic construct
  misc_feature 1..1047: note = Description of Artificial Sequence: Synthetic coding sequence
  source 1..1047: mol_type = other DNA
atgggcgtgctgcgggtgggcctgtgccccggcctgacagaggagatgatccagctgctgcggagccaccgcatcaagacagtggtggacctggtgtctgctgacctggaggaggtggcccagaagtgtggcctgagctacaagacctggagggcccacagcagcggcaacctgggcggcctgcagctgccccaggtgcctgctggccgctcctggagcggcgtgagaaatgccctgaagaaggccggcctgggccacggcggcacagatggcctgagcctgaatgcctttgatgagcggggcacagctgtgtccaccagccggctggacaagctgctggatgctggcctgtacacaggagaggtgacagaaattgtgggcggccctggcagcggcaagacccaggtgtgcctgtgcatggccgccaacgtggcccacggcctgcagcagaatgtgctgtatgtggacagcaatggaggcctgacagccagccggctgctgcagctgctgcaggccaagacccaggatgaggaggagcaggccgaggccctgcggcgcatccaggtggtgcacgcctttgacatcttccagatgctggatgtgctgcaggagctgcggggcaccgtggcccagcaggtgacaggcagcagcggcaccgtgaaggtggtggtggtggacagcgtgacagctgtggtgagccccctgctgggcggccagcagcgggagggcctggccctgatgatgcagctggcccgggagctgaagaccctggcccgggacctgggcatggctgtggtggtgaccaaccacatcacccgggaccgggacagcggccgcctgaagccagccctgggccgctcctggagctttgtgcccagcacccgcatcctgctggacaccattgaaggagctggggccagcggcggccgcaggatggcctgcctggccaagagcagccggcagcccaccggcttccaggagatggtggacatcggcacctggggcaccagcgagcagagcgccaccctgcagggcgaccagacctag

SEQ ID NO: 21506 - DNA, 648 bp, synthetic construct
  misc_feature 1..648: note = Description of Artificial Sequence: Synthetic coding sequence
  source 1..648: mol_type = other DNA
atggtgatggccgccctgcccttcagcgaggacctgaagatgccagacacctgtgtgctgccccactgccctgggaaggagaacaaggatgtggtggacctggtgtctgctgacctggaggaggtggcccagaagtgtggcctgagctacaaggccctggtggccctgcggcgggtgctgctggcccagttcagcgccttccctgtgaatggagctgacctgtatgaggagctgaagaccagcacagccatcctgagcactggaattggcagcctggacaagctgctggatgctggcctgtacaccggggaggtgacagagatcgtgggcggccctggcagcggcaagacccaggtgtgcctgtgcatggccgccaacgtggcccacggcctgcagcagaatgtgctgtatgtggacagcaatggaggcctgacagccagccggctgctgcagctgctgcaggccaagacccaggatgaggaggagcaggccgaggccctgcggcgcatccaggtggtgcacgcctttgacatcttccagatgctggatgtgctgcaggagctgcggggcaccgtggcccagcaggacggcatccctgagcacctgaaccacatcccccactgcctgcacgtgcacctgccctgctag

SEQ ID NO: 21507 - DNA, 711 bp, synthetic construct
  misc_feature 1..711: note = Description of Artificial Sequence: Synthetic coding sequence
  source 1..711: mol_type = other DNA
atgggcgtgctgcgggtgggcctgtgccccggcctgacagaggagatgatccagctgctgcggagccaccgcatcaagacagtggtggacctggtgtctgctgacctggaggaggtggcccagaagtgtggcctgagctacaaggccctggtggccctgcggcgggtgctgctggcccagttcagcgccttccctgtgaatggagctgacctgtatgaggagctgaagaccagcacagccatcctgagcacaggcatcggcagcctggacaagctgctggatgctggcctgtacacaggagaggtgacagaaattgtgggcggccctggcagcggcaagacccaggtgtgcctgtgcatggccgccaacgtggcccacggcctgcagcagaatgtgctgtatgtggacagcaatggaggcctgacagccagccggctgctgcagctgctgcaggccaagacccaggatgaggaggagcaggccgaggccctgcggcgcatccaggtggtgcacgcctttgacatcttccagatgctggatgtgctgcaggagctgcggggcaccgtggcccagcaggtgacaggcagcagcggcaccgtgaaggtggtggtggtggacagcgtgacagctgtggtgagccccctgctgggcggccagcagcgggagggcctggccctgatgatgcagctggcccgggagctgaagacctag

SEQ ID NO: 21508 - DNA, 1047 bp, synthetic construct; identical to SEQ ID NO: 21505
  misc_feature 1..1047: note = Description of Artificial Sequence: Synthetic coding sequence
  source 1..1047: mol_type = other DNA

SEQ ID NO: 21509 - DNA, 1257 bp, synthetic construct
  misc_feature 1..1257: note = Description of Artificial Sequence: Synthetic coding sequence
  source 1..1257: mol_type = other DNA
atgagcggcacagaggaggccatcctgggcggccgggacagccaccctgctgctgggggcggctctgtgctgtgcttcggccagtgccagtacacagctgaggagtaccaggccatccagaaggccctgcggcagaggctgggccctgagtacatcagcagcaggatggccggcggcggccagaaggtgtgctacatcgagggccacagggtcatcaacctggccaatgagatgtttggctacaacggctgggcccacagcatcacccagcagaatgtggactttgtggacctgaacaacgggaagttctacgtgggcgtgtgtgcctttgtgcgggtgcagctgaaggatggcagctaccatgaagatgtgggctacggcgtgtctgagggcctgaagagcaaggccctgagcctggagaaggccaggaaggaggccgtgacagatggcctgaagagggccctgcggagctttggaaatgccctgggcaactgcatcctggacaaggactacctgcggagcctgaacaagctgccccggcagctgcccctggaggtggacctgaccaaggccaagaggcaggacctggagcccagcgtggaggaggcccgctacaacagctgccggcccaacatggccctgggccacccccagctgcagcaggtgaccagccccagccggcccagccatgctgtgatcccagctgaccaggactgcagcagccgcagcctgagcagcagcgctgtggagagcgaggccacccaccagaggaagctgcggcagaagcagctgcagcagcagttccgggagaggatggagaagcagcaggtgcgggtgtccaccccatctgctgagaagtctgaggccgcccccccagcccctcctgtgacccacagcacccctgtgacagtgtctgagcccctgctggagaaggacttcctggccggcgtgacccaggagctgatcaagaccctggaggacaacagcgagaagtgggccgtgaccccagatgctggagatggagtggtgaagcccagcagcagagctgaccctgcccagaccagtgacaccctggccctgaacaaccagatggtgacccagaacagaacaccccacagcgtgtgccaccagaagccccaggccaagagcggctcctgggacctgcagacctacagcgctgaccagaggaccaccggcaactgggagagccacaggaagagccaggacatgaagaagaggaaatatgaccccagctag

SEQ ID NO: 21510 - DNA, 1257 bp, synthetic construct; identical to SEQ ID NO: 21509
  misc_feature 1..1257: note = Description of Artificial Sequence: Synthetic coding sequence
  source 1..1257: mol_type = other DNA

SEQ ID NO: 21511 - DNA, 1026 bp, synthetic construct
  misc_feature 1..1026: note = Description of Artificial Sequence: Synthetic coding sequence
  source 1..1026: mol_type = other DNA
atgtttggctacaacggctgggcccacagcatcacccagcagaatgtggactttgtggacctgaacaacgggaagttctacgtgggcgtgtgtgcctttgtgcgggtgcagctgaaggatggcagctaccatgaagatgtgggctatggagtgtctgagggcctgaagagcaaggccctgagcctggagaaggccaggaaggaggccgtgacagatggcctgaagagggccctgcggagctttggaaatgccctgggcaactgcatcctggacaaggactacctgcggagcctgaacaagctgccccggcagctgcccctggaggtggacctgaccaaggccaagaggcaggacctggagcccagcgtggaggaggcccgctacaacagctgccggcccaacatggccctgggccacccccagctgcagcaggtgaccagccccagccggcccagccacgccgtcatcccagctgaccaggactgcagcagccgcagcctgagcagcagcgctgtggagagcgaggccacccaccagaggaagctgcggcagaagcagctgcagcagcagttccgggagaggatggagaagcagcaggtgcgggtgtccacccccagcgctgagaagtctgaggccgcccccccagcccctcctgtgacccacagcacccctgtgacagtgtctgagcccctgctggagaaggacttcctggccggcgtgacccaggagctgatcaagaccctggaggacaacagcgagaagtgggccgtgaccccagatgctggagatggagtggtgaagcccagcagcagagctgaccctgcccagaccagtgacaccctggccctgaacaaccagatggtgacccagaacagaacaccccacagcgtgtgccaccagaagccccaggccaagagcggctcctgggacctgcagacctacagcgctgaccagaggaccactggaaactgggagagccacaggaagagccaggacatgaagaagaggaaatatgaccccagctag

SEQ ID NO: 21512 - DNA, 681 bp, synthetic construct
  misc_feature 1..681: note = Description of Artificial Sequence: Synthetic coding sequence
  source 1..681: mol_type = other DNA
atgagcggcacagaggaggccatcctgggcggccgggacagccaccctgctgctgggggcggctctgtgctgtgcttcggccagtgccagtacacagctgaggagtaccaggccatccagaaggccctgcggcagaggctgggccctgagtacatcagcagcaggatggccggcggcggccagaaggtgtgctacatcgagggccacagggtcatcaacctggccaatgagatgtttggctacaacggctgggcccacagcatcacccagcagaatgtggactttgtggacctgaacaacgggaagttctacgtgggcgtgtgtgcctttgtgcgggtgcagctgaaggatggcagctaccatgaagatgtgggctacggcgtgtctgagggcctgaagagcaaggccctgagcctggagaaggccaggaaggaggccgtgacagatggcctgaagagggccctgcggctgcccctgctgggcgtgtctggccgcatcctgtacagcctcttctctgtgcacagcgtgatgtgtgccggcggcctgcccacccccacagccagcgcccagacagcccccagcagcccctgcagcagcgctgtgctgcgctatgcccaggagttctgggagtgcacctggaagctgtacagcggccagaggctgcctgagatcaccaagtag

SEQ ID NO: 21513 - DNA, 2244 bp, synthetic construct
  misc_feature 1..2244: note = Description of Artificial Sequence: Synthetic coding sequence
  source 1..2244: mol_type = other DNA
atgaggaggagcctggcccccagccagctggccaagaggaagccagagggccgcagctgtgatgatgaggactggcagcccggcctggtgacccccaggaagaggaagagcagcagcgagacccagatccaggagtgcttcctgagccccttcaggaagcccctgagccagctgaccaaccagcccccctgcctggacagcagccagcacgaggccttcatccgcagcatcctgagcaagcccttcaaggtgcccatccccaactaccagggccccctgggcagccgggccctgggcctgaagagagctggggtgcggcgggccctgcatgaccccctggagaaggatgccctggtgctgtatgagcccccacccctgagcgcccatgaccagctgaagctggacaaggagaagctgcctgtgcacgtggtggtggaccccatcctgagcaaggtgctgcggccccaccagcgggagggcgtgaagttcctgtgggagtgtgtgaccagccgccgcatccctggcagccacggctgcatcatggctgatgagatgggcctgggcaagaccctgcagtgcatcaccctgatgtggaccctgctgcggcagagccctgagtgcaagccagaaattgacaaggctgtggtggtgagccccagcagcctggtgaagaactggtacaatgaggtgggcaagtggctgggcggccgcatccagcccctggccattgatggcggcagcaaggatgaaattgaccagaagctggagggcttcatgaaccagagaggagcccgggtgagcagccccatcctgatcatctcctatgagaccttccggctgcacgtgggcgtgctgcagaagggctctgtgggcctggtgatctgtgatgagggccaccggctgaagaacagcgagaaccagacctaccaggccctggacagcctgaacaccagcagaagagtgctgatcagcggcacccccatccagaatgacctgctggagtacttcagcctggtgcactttgtgaacagcggcatcctgggcacagcccacgagttcaagaagcactttgagctgcccatcctgaagggcagagatgctgctgccagcgaggccgaccggcagctgggggaggagcggctgcgggagctgaccagcatcgtgaaccgctgcctgatccggaggaccagtgacatcctgagcaagtacctgcctgtgaagattgagcaggtggtgtgctgccgcctgacccccctgcagacagagctgtacaagcgcttcctgcggcaggccaagccagctgaggagctgctggagggcaagatgtctgtgagcagcctgagcagcatcaccagcctgaagaagctgtgcaaccacccagccctgatctatgacaagtgtgtggaggaggaggatggctttgtgggcgccctggacctcttccccccaggctacagcagcaaggccctggagccccagctgagcggcaagatgctggtgctggactacatcctggccgtgaccaggagccgcagcagtgacaaggtggtgctggtgagcaactacacccagaccctggacctgtttgagaagctgtgccgggcccggcgctacctgtatgtgcggctggatggcaccatgagcatcaagaagagggccaaggtggtggagcgcttcaacagccccagcagcccagactttgtgttcatgctgagcagcaaggccggcggctgcggcctgaacctgattggagccaaccggctggtgatgtttgatcctgactggaacccagccaatgatgagcaggccatggcccgggtgtggagagatggccagaagaagacctgctacatctaccgcctgctgtctgctggcaccatcgaggagaagatcttccagaggcagagccacaagaaggccctgagcagctgtgtggtggatgaggagcaggatgtggagcggcacttcagcctgggggagctgaaggagctgttcatcctggatgaggccagcctgagtgacacccatgaccggctgcactgccgccgctgtgtgaacagccggcagatccggcccccaccagatggcagtgactgcaccagtgacctggccggctggaaccactgcacagacaagtggggcctgagagatgaggtgctgcaggccgcctgggatgctgccagcacagccatcacctttgtgttccaccagaggagccatgaggagcagaggggcctgaggtag

SEQ ID NO: 21514 - DNA, 2244 bp, synthetic construct; identical to SEQ ID NO: 21513
  misc_feature 1..2244: note = Description of Artificial Sequence: Synthetic coding sequence
  source 1..2244: mol_type = other DNA

SEQ ID NO: 21515 - DNA, 1704 bp, synthetic construct
  misc_feature 1..1704: note = Description of Artificial Sequence: Synthetic coding sequence
  source 1..1704: mol_type = other DNA
atggctgatgagatgggcctgggcaagaccctgcagtgcatcaccctgatgtggaccctgctgcggcagagccctgagtgcaagccagaaattgacaaggctgtggtggtgagccccagcagcctggtgaagaactggtacaatgaggtgggcaagtggctgggcggccgcatccagcccctggccattgatggcggcagcaaggatgaaattgaccagaagctggagggcttcatgaaccagagaggagcccgggtgagcagccccatcctgatcatctcctatgagaccttccggctgcacgtgggcgtgctgcagaagggctctgtgggcctggtgatctgtgatgagggccaccggctgaagaacagcgagaaccagacctaccaggccctggacagcctgaacaccagcagaagagtgctgatcagcggcacccccatccagaatgacctgctggagtacttcagcctggtgcactttgtgaacagcggcatcctgggcacagcccacgagttcaagaagcactttgagctgcccatcctgaagggcagagatgctgctgccagcgaggccgaccggcagctgggggaggagcggctgcgggagctgaccagcatcgtgaaccgctgcctgatccggaggaccagtgacatcctgagcaagtacctgcctgtgaagattgagcaggtggtgtgctgccgcctgacccccctgcagacagagctgtacaagcgcttcctgcggcaggccaagccagctgaggagctgctggagggcaagatgtctgtgagcagcctgagcagcatcaccagcctgaagaagctgtgcaaccacccagccctgatctatgacaagtgtgtggaggaggaggatggctttgtgggcgccctggacctcttccccccaggctacagcagcaaggccctggagccccagctgagcggcaagatgctggtgctggactacatcctggccgtgaccaggagccgcagcagtgacaaggtggtgctggtgagcaactacacccagaccctggacctgtttgagaagctgtgccgggcccggcgctacctgtatgtgcggctggatggcaccatgagcatcaagaagagggccaaggtggtggagcgcttcaacagccccagcagcccagactttgtgttcatgctgagcagcaaggccggcggctgcggcctgaacctgattggagccaaccggctggtgatgtttgatcctgactggaacccagccaatgatgagcaggccatggcccgggtgtggagagatggccagaagaagacctgctacatctaccgcctgctgtctgctggcaccatcgaggagaagatcttccagaggcagagccacaagaaggccctgagcagctgtgtggtggatgaggagcaggatgtggagcggcacttcagcctgggggagctgaaggagctgttcatcctggatgaggccagcctgagtgacacccatgaccggctgcactgccgccgctgtgtgaacagccggcagatccggcccccaccagatggcagtgactgcaccagtgacctggccggctggaaccactgcacagacaagtggggcctgagagatgaggtgctgcaggccgcctgggatgctgccagcacagccatcacctttgtgttccaccagaggagccatgaggagcagaggggcctgaggtag

SEQ ID NO: 21516 - DNA, 1176 bp, synthetic construct
  misc_feature 1..1176: note = Description of Artificial Sequence: Synthetic coding sequence
  source 1..1176: mol_type = other DNA
atgaagtgcctggtgactggaggaaatgtgaaggtgctgggcaaggctgtgcacagcctgagcagaattggagatgagctgtacctggagcccctggaggatggcctgagcctgaggacagtgaacagcagccgcagcgcctatgcctgcttcctgtttgcccccctcttcttccagcagtaccaggccgccaccccaggccaggacctgctgcgctgcaagatcctgatgaagagcttcctgagcgtcttccgcagcctggccatgctggagaagacagtggagaagtgctgcatcagcctgaatggccgcagcagccggctggtggtgcagctgcactgcaagtttggagtgaggaagacccacaacctgtccttccaggactgtgagagcctgcaggccgtgtttgatcctgccagctgcccccacatgctgcgggccccagcccgggtgctgggggaggccgtgctgcccttctccccagccctggccgaggtgaccctgggcatcggccggggccggcgggtcatcctgcggagctaccacgaggaggaggccgacagcacagccaaggccatggtgacagagatgtgcctgggggaggaggacttccagcagctgcaggcccaggagggcgtggccatcaccttctgcctgaaggagttccggggcctgctgagctttgctgagagcgccaacctgaacctgagcatccactttgatgcccctggccggcctgccatcttcaccatcaaggacagcctgctggatggccactttgtgctggccaccctgagtgacacagacagccacagccaggacctgggcagccctgagcggcaccagcctgtgccccagctgcaggcccacagcaccccccacccagatgactttgccaatgatgacatcgacagctacatgattgccatggagaccaccatcggaaatgaaggcagccgggtgctgcccagcatcagcctgagccctggcccccagccccccaagagccctggcccccacagcgaggaggaggatgaagctgagcccagcacagtgcccggcaccccaccacccaagaagttccgcagcctcttcttcggcagcatcctggcccctgtgcgcagcccccagggccccagccctgtgctggctgaagattctgagggggagggctag

SEQ ID NO: 21517 - DNA, 1752 bp, synthetic construct
  misc_feature 1..1752: note = Description of Artificial Sequence: Synthetic coding sequence
  source 1..1752: mol_type = other DNA
atgcccaagcccatcaacgtgcgggtgaccaccatggatgctgagctggagtttgccatccagcccaacaccaccgggaagcagctgtttgaccaggtggtgaagacagtgggcctgcgggaggtgtggttcttcggcctgcagtatgtggacagcaagggctacagcacctggctgaagctgaacaagaaggtgacccagcaggatgtgaagaaggagaaccccctgcagttcaagttccgggccaagttcttcccagaagatgtgtctgaggagctgatccaggagatcacccagaggctcttcttcctgcaggtgaaggaggccatcctgaatgatgagatctactgccccccagagacagctgtgctgctggccagctatgctgtgcaggccaagtacggggactacaacaaggagatccacaagccaggctacctggccaatgaccggctgctgccccagagggtgctggagcagcacaagctgaccaaggagcagtgggaggagcgcatccagaactggcatgaggagcaccggggcatgctgagagaagattccatgatggagtacctgaagatcgcccaggacctggagatgtatggagtgaactactttgagatcaagaacaagaagggcacagagctgtggctgggcgtggatgccctgggcctgaacatctatgaacatgatgacaagctgacccccaagattggcttcccctggagcgagatccggaacatctccttcaatgacaagaagtttgtgatcaagcccatcgacaagaaggccccagactttgtgttctacgccccccggctgcgcatcaacaagaggatcctggccctgtgcatgggcaaccacgagctgtacatgagaagaaggaagccagacaccatcgaggtgcagcagatgaaggcccaggcccgggaggagaagcaccagaagcagctggagcgggcccagctggagaatgagaagaagaagcgggagattgctgagaaggagaaggagcgcatcgagcgggagaaggaggagctgatggagcggctgaagcagatcgaggagcagaccatcaaggcccagaaggagctggaggagcagaccaggaaggccctggagctggaccaggagaggaagagggccaaggaggaggccgagcggctggagaaggagaggagagctgctgaggaggccaagagcgccatcgccaagcaggccgctgaccagatgaagaaccaggagcagctggccgctgagctggccgagttcaccgccaagatcgccctgctggaggaggccaagaagaagaaggaggaggaggccacagagtggcagcacaaggcctttgctgcccaggaggacctggagaagaccaaggaggagctgaagacagtgatgtctgcccctcctcctcctcctcctcctcctgtgatccccccaacagaaaatgaacatgatgaacatgatgaaaataatgctgaggccagcgctgagctgagcaatgaaggagtgatgaaccacaggtctgaggaggagcgggtgacagagacccagaagaatgaaagagtgaagaagcagctgcaggccctgagcagcgagctggcccaggccagagatgagaccaagaagacccagaatgatgtgctgcacgcagaaaatgtgaaggccggccgggacaagtacaagaccctgcggcagatccggcagggcaacaccaagcagagaattgatgaatttgaggccatgtag

SEQ ID NO: 21518 - DNA, 1815 bp, synthetic construct
  misc_feature 1..1815: note = Description of Artificial Sequence: Synthetic coding sequence
  source 1..1815: mol_type = other DNA
atgcccaagcccatcaacgtgcgggtgaccaccatggatgctgagctggagtttgccatccagcccaacaccaccgggaagcagctgtttgaccaggtggtgaagacagtgggcctgcgggaggtgtggttcttcggcctgcagtatgtggacagcaagggctacagcacctggctgaagctgaacaagaaggtgacccagcaggatgtgaagaaggagaaccccctgcagttcaagttccgggccaagttcttcccagaagatgtgtctgaggagctgatccaggagatcacccagaggctcttcttcctgcaggtgaaggaggccatcctgaatgatgagatctactgccccccagagacagctgtgctgctggccagctatgctgtgcaggccaagtacggggactacaacaaggagatccacaagccaggctacctggccaatgaccggctgctgccccagagggtgctggagcagcacaagctgaccaaggagcagtgggaggagcgcatccagaactggcatgaggagcaccggggcatgctgagagaagattccatgatggagtacctgaagatcgcccaggacctggagatgtatggagtgaactactttgagatcaagaacaagaagggcacagagctgtggctgggcgtggatgccctgggcctgaacatctatgaacatgatgacaagctgacccccaagattggcttcccctggagcgagatccggaacatctccttcaatgacaagaagtttgtgatcaagcccatcgacaagaaggccccagactttgtgttctacgccccccggctgcgcatcaacaagaggatcctggccctgtgcatgggcaaccacgagctgtacatgagaagaaggaagccagacaccatcgaggtgcagcagatgaaggcccaggcccgggaggagaagcaccagaagcagctggagcgggcccagctggagaatgagaagaagaagcgggagattgctgagaaggagaaggagcgcatcgagcgggagaaggaggagctgatggagcggctgaagcagatcgaggagcagaccatcaaggcccagaaggagctggaggagcagaccaggaaggccctggagctggaccaggagaggaagagggccaaggaggaggccgagcggctggagaaggagaggagagctgctgaggaggccaagagcgccatcgccaagcaggccgctgaccagatgaagaaccaggagcagctggccgctgagctggccgagttcaccgccaagatcgccctgctggaggaggccaagaagaagaaggaggaggaggccacagagtggcagcacaaggcctttgctgcccaggaggacctggagaagaccaaggaggagctgaagacagtgatgtctgcccctcctcctcctcctcctcctcctgtgatccccccaacagaaaatgaacatgatgaacatgatgaaaataatgctgaggccagcgctgagctgagcaatgaaggagtgatgaaccacaggtctgaggaggagcgggtgacagagacccagaagaatgaaagagtgaagaagcagctgcaggccctgagcagcgagctggcccaggccagagatgagaccaagaagacccagaatgatgtgctgcacgcagaaaatgtgaaggccggccgggacaagtacaagaccctgcggcagatccggcagggcaacaccaagcagagaattgatgaatttgaggccatgtggggccccaagctgtatgccctcttccagatgaggagctgccagagcagcatcaagcagatgtag

SEQ ID NO: 21519 - DNA, 1020 bp, synthetic construct
  misc_feature 1..1020: note = Description of Artificial Sequence: Synthetic coding sequence
  source 1..1020: mol_type = other DNA
ccccaccccaagatcaacgtgcgggtgaccaccatggatgctgagctggagtttgccatccagcccaacaccaccgggaagcagctgtttgaccaggtggtgaagacagtgggcctgcgggaggtgtggttcttcggcctgcagtatgtggacagcaagggctacagcacctggctgaagctgaacaagaaggtgacccagcaggatgtgaagaaggagaaccccctgcagttcaagttccgggccaagttcttcccagaagatgtgtctgaggagctgatccaggagatcacccagaggctcttcttcctgcaggtgaaggaggccatcctgaatgatgagatctactgccccccagagacagctgtgctgctggccagctatgctgtgcaggccaagtacggggactacaacaaggagatccacaagccaggctacctggccaatgaccggctgctgccccagagggtgctggagcagcacaagctgaccaaggagcagtgggaggagcgcatccagaactggcatgaggagcaccggggcatgctgagagaagattccatgatggagtacctgaagatcgcccaggacctggagatgtatggagtgaactactttgagatcaagaacaagaagggcacagagctgtggctgggcgtggatgccctgggcctgaacatctatgaacatgatgacaagctgacccccaagattggcttcccctggagcgagatccggaacatctccttcaatgacaagaagtttgtgatcaagcccatcgacaagaaggccccagactttgtgttctacgccccccggctgcgcatcaacaagaggatcctggccctgtgcatgggcaaccacgagctgtacatgagaagaaggaagccagacaccatcgaggtgcagcagatgaaggcccaggcccgggaggagaagcaccagaagcagctggagaggagccggctgagcaagatcaagaagaagaagaggaagaagaagaagaagaagaagaagtag

SEQ ID NO: 21520 - DNA, 1815 bp, synthetic construct; identical to SEQ ID NO: 21518
  misc_feature 1..1815: note = Description of Artificial Sequence: Synthetic coding sequence
  source 1..1815: mol_type = other DNA

SEQ ID NO: 21521 - DNA, 774 bp, synthetic construct
  misc_feature 1..774: note = Description of Artificial Sequence: Synthetic coding sequence
  source 1..774: mol_type = other DNA
atggagcggctgaagcagatcgaggagcagaccatcaaggcccagaaggagctggaggagcagaccaggaaggccctggagctggaccaggagaggaagagggccaaggaggaggccgagcggctggagaaggagcggcgggctgctgaggaggccaagagcgccatcgccaagcaggccgctgaccagatgaagaaccaggagcagctggccgctgagctggccgagttcaccgccaagatcgccctgctggaggaggccaagaagaagaaggaggaggaggccacagagtggcagcacaaggcctttgctgcccaggaggacctggagaagaccaaggaggagctgaagacagtgatgtctgcccctcctcctcctcctcctcctcctgtgattcctcccacagaaaatgaacatgatgaacatgatgagaacaatgctgaggccagcgctgagctgagcaatgaaggagtgatgaaccacaggtctgaggaggagcgggtgacagagacccagaagaatgaaagagtgaagaagcagctgcaggccctgagcagcgagctggcccaggccagagatgagaccaagaagacccagaatgatgtgctgcatgctgaaaatgtgaaggccggccgggacaagtacaagaccctgcggcagatccggcagggcaacaccaagcagagaattgatgaatttgaggccatgtggggccccaagctgtatgccctcttccagatgaggagctgccagagcagcatcaagcagatgtag

SEQ ID NO: 21522 - DNA, 762 bp, synthetic construct
  misc_feature 1..762: note = Description of Artificial Sequence: Synthetic coding sequence
  source 1..762: mol_type = other DNA
gggggccgcatcgcccgggcccacgagtttgaggccgctgtgtccttctgcaccagcgcctgggccacagagcgggaccctgtgtccaggaagcagcgggagctggaggagcagaccaggaaggccctggagctggaccaggagaggaagagggccaaggaggaggccgagcggctggagaaggagaggagagctgctgaggaggccaagagcgccatcgccaagcaggccgctgaccagatgaagaaccaggagcagctggccgctgagctggccgagttcaccgccaagatcgccctgctggaggaggccaagaagaagaaggaggaggaggccacagagtggcagcacaaggcctttgctgcccaggaggacctggagaagaccaaggaggagctgaagacagtgatgtctgcccctcctcctcctcctcctcctcctgtgatccccccaacagaaaatgaacatgatgaacatgatgaaaataatgctgaggccagcgctgagctgagcaatgaaggagtgatgaaccacaggtctgaggaggagcgggtgacagagacccagaagaatgaaagagtgaagaagcagctgcaggccctgagcagcgagctggcccaggccagagatgagaccaagaagacccagaatgatgtgctgcacgcagaaaatgtgaaggccggccgggacaagtacaagaccctgcggcagatccggcagggcaacaccaagcagagaattgatgaatttgaggccatgtag

SEQ ID NO: 21523 - DNA, 603 bp, synthetic construct
  misc_feature 1..603: note = Description of Artificial Sequence: Synthetic coding sequence
  source 1..603: mol_type = other DNA
atgcccaagcccatcaacgtgcgggtgaccaccatggatgctgagctggagtttgccatccagcccaacaccaccgggaagcagctgtttgaccaggtgacccagcaggatgtgaagaaggagaaccccctgcagttcaagttccgggccaagttcttcccagaagatgtgtctgaggagctgatccaggagatcacccagaggctcttcttcctgcaggtgaaggaggccatcctgaatgatgagatctactgccccccagagacagctgtgctgctggccagctatgctgtgcaggccaagtacggggactacaacaaggagatccacaagccaggctacctggccaatgaccggctgctgccccagagggtgctggagcagcacaagctgaccaaggagcaggatgagaccaagaagacccagaatgatgtgctgcacgcagaaaatgtgaaggccggccgggacaagtacaagaccctgcggcagatccggcagggcaacaccaagcagagaattgatgaatttgaggccatgtggggccccaagctgtatgccctcttccagatgaggagctgccagagcagcatcaagcagatgtag

SEQ ID NO: 21524 - DNA, 1815 bp, synthetic construct; identical to SEQ ID NO: 21518
  misc_feature 1..1815: note = Description of Artificial Sequence: Synthetic coding sequence
  source 1..1815: mol_type = other DNA

SEQ ID NO: 21525 - DNA, 1344 bp, synthetic construct
  misc_feature 1..1344: note = Description of Artificial Sequence: Synthetic coding sequence
  source 1..1344: mol_type = other DNA
atgctgtcctggaacctgcccttcagccccatccagctggccaacaacttcctgacctctgtgctggagcagcacaagctgaccaaggagcagtgggaggagcgcatccagaactggcatgaggagcaccggggcatgctgagagaagattccatgatggagtacctgaagatcgcccaggacctggagatgtatggagtgaactactttgagatcaagaacaagaagggcacagagctgtggctgggcgtggatgccctgggcctgaacatctatgaacatgatgacaagctgacccccaagattggcttcccctggagcgagatccggaacatctccttcaatgacaagaagtttgtgatcaagcccatcgacaagaaggccccagactttgtgttctacgccccccggctgcgcatcaacaagaggatcctggccctgtgcatgggcaaccacgagctgtacatgagaagaaggaagccagacaccatcgaggtgcagcagatgaaggcccaggcccgggaggagaagcaccagaagcagctggagcgggcccagctggagaatgagaagaagaagcgggagattgctgagaaggagaaggagcgcatcgagcgggagaaggaggagctgatggagcggctgaagcagatcgaggagcagaccatcaaggcccagaaggagctggaggagcagaccaggaaggccctggagctggaccaggagaggaagagggccaaggaggaggccgagcggctggagaaggagaggagagctgctgaggaggccaagagcgccatcgccaagcaggccgctgaccagatgaagaaccaggagcagctggccgctgagctggccgagttcaccgccaagatcgccctgctggaggaggccaagaagaagaaggaggaggaggccacagagtggcagcacaaggcctttgctgcccaggaggacctggagaagaccaaggaggagctgaagacagtgatgtctgcccctcctcctcctcctcctcctcctgtgatccccccaacagaaaatgaacatgatgaacatgatgaaaataatgctgaggccagcgctgagctgagcaatgaaggagtgatgaaccacaggtctgaggaggagcgggtgacagagacccagaagaatgaaagagtgaagaagcagctgcaggccctgagcagcgagctggcccaggccagagatgagaccaagaagacccagaatgatgtgctgcacgcagaaaatgtgaaggccggccgggacaagtacaagaccctgcggcagatccggcagggcaacaccaagcagagaattgatgaatttgaggccatgtag

SEQ ID NO: 21526 - DNA, 3234 bp, synthetic construct
  misc_feature 1..3234: note = Description of Artificial Sequence: Synthetic coding sequence
  source 1..3234: mol_type = other DNA
atggacacagacagccagaggagccacctgagcagcttcaccatgaagctgatggacaagttccacagccccaagatcaagaggacccccagcaagaagggcaagccagctgaggtgtctgtgaagatccctgagaagcctgtgaacaaggaggccacagaccgcttcctgcctgagggctaccccctgcccctggacctggagcagcaggccgtggagttcatgagcaccagcgctgtggccagccgcagccagaggcagaagaacctgtcctggctggaggagaaggagaaggaggtggtgtctgccctgcgctacttcaagaccatcgtggacaagatggccatcgacaagaaggtgctggagatgctgcccggcagcgccagcaaggtgctggaggccatcctgcccctggtgcagaatgacccccgcatccagcacagcagcgccctgagcagctgctacagccgggtgtaccagagcctggccaacctgatccgctggagcgaccaggtgatgctggagggcgtgaacagcgaggacaaggagatggtgaccaccgtgaagggcgtcatcaaggctgtgctggatggagtgaaggagctggtgcggctgaccatcgagaagcagggccggcccagccccaccagccctgtgaagcccagcagccctgccagcaagccagatggccctgctgagctgcccctgacagaccgggaggtggagatcctgaacaagaccaccggcatgagccagagcacagagctgctgcctgatgccacagatgaggaggtggccccacccaagccacccctgcccggcatccgggtggtggacaacagccccccaccagccctgccccccaagaagaggcagagcgcccccagccccaccagggtggccgtggtggcccccatgagccgggccaccagcggcagcagcctgcctgtgggcatcaaccggcaggactttgatgtggactgctacgcccagaggcggctgagcggcggcagccacagctatggaggagagagcccccggctgagcccctgcagcagcatcggcaagctgagcaagagtgatgagcagctgagcagcctggaccgggacagcggccagtgcagcaggaacaccagctgtgagaccctggaccactatgaccctgactatgagttcctgcagcaggacctgagcaatgctgaccagatcccccagcagacagcctggaacctgagccccctgcctgagagcctgggggagagcggcagccccttcctgggcccccccttccagctgcccctgggcggccacccccagccagatggccccctggcccctggccagcagacagacaccccaccagccctgcctgagaagaagagaagatctgctgccagccagacagcagatggcagcggctgccgggtgtcctatgaaagacaccccagccagtatgacaacatctctggagaggacctgcagagcacagcccccatccccagcgtgccctatgccccctttgctgccatcctgcccttccagcacggcggcagcagcgcccctgtggagtttgtgggggacttcaccgcccctgagagcactggagaccctgagaagcccccacccctgcctgagaagaagaacaagcacatgctggcctacatgcagctgctggaggactacagcgagccccagcccagcatgttctaccagaccccccagaatgagcacatctaccagcagaagaacaagctgctgatggaggtgtatggcttcagtgacagcttctctggagtggacagcgtgcaggagctggcccctcctccagccctgccccccaagcagaggcagctggagcccccagctgggaaggatggccacccccgggaccccagcgctgtgtctggagtgcctgggaaggacagcagagatggcagcgagcgggcccccaagagcccagatgccctggagagcgcccagagcgaggaggaggtggatgagctgagcctgattgaccacaatgagatcatgagccggctgaccctgaagcaggagggagatgatggcccagatgtgcggggcggcagcggggacatcctgctggtgcacgccacagaaacagacaggaaggacctggtgctgtactgtgaggccttcctgaccacctaccgcaccttcatcagccctgaggagctgatcaagaagctgcagtaccgctatgagaagttcagcccctttgctgacaccttcaagaagagggtgtccaagaacaccttctttgtgctggtgcgggtggtggatgagctgtgcctggtggagctgacagaggagatcctgaagctgctgatggagctggtgttccggctggtgtgcaatggagagctgagcctggcccgggtgctgaggaagaacatcctggacaaggtggaccagaagaagctgctgcgctgtgccaccagcagccagcccctggccgcccggggcgtggccgcccggcccggcaccctgcatgacttccacagccatgaaattgctgagcagctgaccctgctggatgctgagctgttctacaagattgagatccctgaggtgctgctgtgggccaaggagcagaatgaggagaagagccccaacctgacccagttcacagagcacttcaacaacatgagctactgggtgcgcagcatcatcatgctgcaggagaaggcccaggaccgggagcggctgctgctgaagttcatcaagatcatgaagcacctgaggaagctgaacaacttcaacagctacctggccatcctgagcgccctggacagcgcccccatccggcggctggagtggcagaagcagaccagcgagggcctggccgagtactgcaccctgattgacagcagcagcagcttccgggcctaccgggccgccctgtctgaggtggagcccccctgcatcccctacctgggcctcatcctgcaggacctgacctttgtgcacctgggcaacccagactacattgatggcaaggtgaacttcagcaagcgctggcagcagttcaacatcctggacagcatgcgctgcttccagcaggcccactatgacatgagaagaaatgatgacatcatcaacttcttcaatgacttcagtgaccacctggccgaggaggccctgtgggagctgagcctgaagatcaagcccaggaacatcaccaggaggaagacagaccgggaggagaagacctag

SEQ ID NO: 21527 - DNA, 3168 bp, synthetic construct
  misc_feature 1..3168: note = Description of Artificial Sequence: Synthetic coding sequence
  source 1..3168: mol_type = other DNA
atgagcaccagcgctgtggccagccgcagccagaggcagaagaacctgtcctggctggaggagaaggagaaggaggtggtgtctgccctgcgctacttcaagaccatcgtggacaagatggccatcgacaagaaggtgctggagatgctgcccggcagcgccagcaaggtgctggaggccatcctgcccctggtgcagaatgacccccgcatccagcacagcagcgccctgagcagctgctacagccgggtgtaccagagcctggccaacctgatccgctggagcgaccaggtgatgctggagggcgtgaacagcgaggacaaggagatggtgaccaccgtgaagggcgtcatcaaggctgtgctggatggagtgaaggagctggtgcggctgaccatcgagaagcagggccggcccagccccaccagccctgtgaagcccagcagccctgccagcaagccagatggccctgctgagctgcccctgacagaccgggaggtggagatcctgaacaagaccaccggcatgagccagagcacagagctgctgcctgatgccacagatgaggaggtggccccacccaagccacccctgcccggcatccgggtggtggacaacagccccccaccagccctgccccccaagaagaggcagagcgcccccagccccaccagggtggccgtggtggcccccatgagccgggccaccagcggcagcagcctgcctgtgggcatcaaccggcaggactttgatgtggactgctacgcccagaggcggctgagcggcggcagccacagctatggaggagagagcccccggctgagcccctgcagcagcatcggcaagctgagcaagagtgatgagcagctgagcagcctggaccgggacagcggccagtgcagcaggaacaccagctgtgagaccctggaccactatgaccctgactatgagttcctgcagcaggacctgagcaatgctgaccagatcccccagcagacagcctggaacctgagccccctgcctgagagcctgggggagagcggcagccccttcctgggcccccccttccagctgcccctgggcggccacccccagccagatggccccctggcccctggccagcagacagacaccccaccagccctgcctgagaagaagagaagatctgctgccagccagacagcagatggcagcggctgccgggtgtcctatgaaagacaccccagccagtatgacaacatctctggagaggacctgcagagcacagcccccatccccagcgtgccctatgccccctttgctgccatcctgcccttccagcacggcggcagcagcgcccctgtggagtttgtgggggacttcaccgcccctgagagcactggagaccctgagaagcccccacccctgcctgagaagaagaacaagcacatgctggcctacatgcagctgctggaggactacagcgagccccagcccagcatgttctaccagaccccccagaatgagcacatctaccagcagaagaacaagctgctgatggaggtgtatggcttcagtgacagcttctctggagtggacagcgtgcaggagctggcccctcctccagccctgccccccaagcagaggcagctggccagctgtgccgccagcagcttcagctctgtgagccactgtgtgcagcagaccaaggtggccttcaccccagaagatggcagcgctgcccagggcctgtctgtgtctgtgagcaacagcttcctgagcagacatggcagcctgcctgtgcccagcgagcccccagctgggaaggatggccacccccgggaccccagcgctgtgtctggagtgcctgggaaggacagcagagatggcagcgagcgggcccccaagagcccagatgccctggagagcgcccagagcgaggaggaggtggatgagctgagcctgattgaccacaatgagatcatgagccggctgaccctgaagcaggagggagatgatggcccagatgtgcggggcggcagcggggacatcctgctggtgcacgccacagaaacagacaggaaggacctggtgctgtactgtgaggccttcctgaccacctaccgcaccttcatcagccctgaggagctgatcaagaagctgcagtaccgctatgagaagttcagcccctttgctgacaccttcaagaagagggtgtccaagaacaccttctttgtgctggtgcgggtggtggatgagctgtgcctggtggagctgacagaggagatcctgaagctgctgatggagctggtgttccggctggtgtgcaatggagagctgagcctggcccgggtgctgaggaagaacatcctggacaaggtggaccagaagaagctgctgcgctgtgccaccagcagccagcccctggccgcccggggcgtggccgcccggcccggcaccctgcatgacttccacagccatgaaattgctgagcagctgaccctgctggatgctgagctgttctacaagattgagatccctgaggtgctgctgtgggccaaggagcagaatgaggagaagagccccaacctgacccagttcacagagcacttcaacaacatgagctactgggtgcgcagcatcatcatgctgcaggagaaggcccaggaccgggagcggctgctgctgaagttcatcaagatcatgaagcacctgaggaagctgaacaacttcaacagctacctggccatcctgagcgccctggacagcgcccccatccggcggctggagtggcagaagcagaccagcgagggcctggccgagtactgcaccctgattgacagcagcagcagcttccgggcctaccgggccgccctgtctgaggtggagcccccctgcatcccctacctgggcctcatcctgcaggacctgacctttgtgcacctgggcaacccagactacattgatggcaaggtgaacttcagcaagcgctggcagcagttcaacatcctggacagcatgcgctgcttccagcaggcccactatgacatgagaagaaatgatgacatcatcaacttcttcaatgacttcagtgaccacctggccgaggaggccctgtgggagctgagcctgaagatcaagcccaggaacatcaccaggaggaagacagaccgggaggagaagacctag

SEQ ID NO: 21528 - DNA, 3285 bp, synthetic construct
  misc_feature 1..3285: note = Description of Artificial Sequence: Synthetic coding sequence
  source 1..3285: mol_type = other DNA
atgtctgggggcctgggcctgcggcgcagccctgagatgtctgggaagattgagaaggctgacagccagaggagccacctgagcagcttcaccatgaagctgatggacaagttccacagccccaagatcaagaggacccccagcaagaagggcaagccagctgaggtgtctgtgaagatccctgagaagcctgtgaacaaggaggccacagaccgcttcctgcctgagggctaccccctgcccctggacctggagcagcaggccgtggagttcatgagcaccagcgctgtggccagccgcagccagaggcagaagaacctgtcctggctggaggagaaggagaaggaggtggtgtctgccctgcgctacttcaagaccatcgtggacaagatggccatcgacaagaaggtgctggagatgctgcccggcagcgccagcaaggtgctggaggccatcctgcccctggtgcagaatgacccccgcatccagcacagcagcgccctgagcagctgctacagccgggtgtaccagagcctggccaacctgatccgctggagcgaccaggtgatgctggagggcgtgaacagcgaggacaaggagatggtgaccaccgtgaagggcgtcatcaaggctgtgctggatggagtgaaggagctggtgcggctgaccatcgagaagcagggccggcccagccccaccagccctgtgaagcccagcagccctgccagcaagccagatggccctgctgagctgcccctgacagaccgggaggtggagatcctgaacaagaccaccggcatgagccagagcacagagctgctgcctgatgccacagatgaggaggtggccccacccaagccacccctgcccggcatccgggtggtggacaacagccccccaccagccctgccccccaagaagaggcagagcgcccccagccccaccagggtggccgtggtggcccccatgagccgggccaccagcggcagcagcctgcctgtgggcatcaaccggcaggactttgatgtggactgctacgcccagaggcggctgagcggcggcagccacagctatggaggagagagcccccggctgagcccctgcagcagcatcggcaagctgagcaagagtgatgagcagctgagcagcctggaccgggacagcggccagtgcagcaggaacaccagctgtgagaccctggaccactatgaccctgactatgagttcctgcagcaggacctgagcaatgctgaccagatcccccagcagacagcctggaacctgagccccctgcctgagagcctgggggagagcggcagccccttcctgggcccccccttccagctgcccctgggcggccacccccagccagatggccccctggcccctggccagcagacagacaccccaccagccctgcctgagaagaagagaagatctgctgccagccagacagcagatggcagcggctgccgggtgtcctatgagcggcaccccagccagtatgacaacatcagcggggaggacctgcagagcacagcccccatccccagcgtgccctatgccccctttgctgccatcctgcccttccagcacggcggcagcagcgcccctgtggagtttgtgggggacttcaccgcccctgagagcactggagaccctgagaagcccccacccctgcctgagaagaagaacaagcacatgctggcctacatgcagctgctggaggactacagcgagccccagcccagcatgttctaccagaccccccagaatgagcacatctaccagcagaagaacaagctgctgatggaggtgtatggcttcagtgacagcttcagcggcgtggacagcgtgcaggagctggcccctcctccagccctgccccccaagcagaggcagctggagcccccagctgggaaggatggccacccccgggaccccagcgctgtgtctggagtgcctgggaaggacagcagagatggcagcgagcgggcccccaagagcccagatgccctggagagcgcccagagcgaggaggaggtggatgagctgagcctgattgaccacaatgagatcatgagccggctgaccctgaagcaggagggagatgatggcccagatgtgcggggcggcagcggggacatcctgctggtgcacgccacagaaacagacaggaaggacctggtgctgtactgtgaggccttcctgaccacctaccgcaccttcatcagccctgaggagctgatcaagaagctgcagtaccgctatgagaagttcagcccctttgctgacaccttcaagaagagggtgtccaagaacaccttctttgtgctggtgcgggtggtggatgagctgtgcctggtggagctgacagaggagatcctgaagctgctgatggagctggtgttccggctggtgtgcaatggagagctgagcctggcccgggtgctgaggaagaacatcctggacaaggtggaccagaagaagctgctgcgctgtgccaccagcagccagcccctggccgcccggggcgtggccgcccggcccggcaccctgcatgacttccacagccatgaaattgctgagcagctgaccctgctggatgctgagctgttctacaagattgagatccctgaggtgctgctgtgggccaaggagcagaatgaggagaagagccccaacctgacccagttcacagagcacttcaacaacatgagctactgggtgcgcagcatcatcatgctgcaggagaaggcccaggaccgggagcggctgctgctgaagttcatcaagatcatgaagcacctgaggaagctgaacaacttcaacagctacctggccatcctgagcgccctggacagcgcccccatccggcggctggagtggcagaagcagaccagcgagggcctggccgagtactgcaccctgattgacagcagcagcagcttccgggcctacagagctgccctgtctgaggtggagcccccctgcatcccctacctgggcctcatcctgcaggacctgacctttgtgcacctgggcaacccagactacattgatggcaaggtgaacttcagcaagcgctggcagcagttcaacatcctggacagcatgcgctgcttccagcaggcccactatgacatgagaagaaatgatgacatcatcaacttcttcaatgacttcagtgaccacctggccgaggaggccctgtgggagctgagcctgaagatcaagcccaggaacatcaccaggaggaagacagaccgggaggagaagacctag

SEQ ID NO: 21529 - DNA, 3234 bp, synthetic construct; identical to SEQ ID NO: 21526
  misc_feature 1..3234: note = Description of Artificial Sequence: Synthetic coding sequence
  source 1..3234: mol_type = other DNA

SEQ ID NO: 21530 - DNA, 3288 bp, synthetic construct
  misc_feature 1..3288: note = Description of Artificial Sequence: Synthetic coding sequence
  source 1..3288: mol_type = other DNA
atgggaaatgccatcgagaagcagaagcccctgaagaggagccacctgtacccctggaagcaggacagccagaggagccacctgagcagcttcaccatgaagctgatggacaagttccacagccccaagatcaagaggacccccagcaagaagggcaagccagctgaggtgtctgtgaagatccctgagaagcctgtgaacaaggaggccacagaccgcttcctgcctgagggctaccccctgcccctggacctggagcagcaggccgtggagttcatgagcaccagcgctgtggccagccgcagccagaggcagaagaacctgtcctggctggaggagaaggagaaggaggtggtgtctgccctgcgctacttcaagaccatcgtggacaagatggccatcgacaagaaggtgctggagatgctgcccggcagcgccagcaaggtgctggaggccatcctgcccctggtgcagaatgacccccgcatccagcacagcagcgccctgagcagctgctacagccgggtgtaccagagcctggccaacctgatccgctggagcgaccaggtgatgctggagggcgtgaacagcgaggacaaggagatggtgaccaccgtgaagggcgtcatcaaggctgtgctggatggagtgaaggagctggtgcggctgaccatcgagaagcagggccggcccagccccaccagccctgtgaagcccagcagccctgccagcaagccagatggccctgctgagctgcccctgacagaccgggaggtggagatcctgaacaagaccaccggcatgagccagagcacagagctgctgcctgatgccacagatgaggaggtggccccacccaagccacccctgcccggcatccgggtggtggacaacagccccccaccagccctgccccccaagaagaggcagagcgcccccagccccaccagggtggccgtggtggcccccatgagccgggccaccagcggcagcagcctgcctgtgggcatcaaccggcaggactttgatgtggactgctacgcccagaggcggctgagcggcggcagccacagctatggaggagagagcccccggctgagcccctgcagcagcatcggcaagctgagcaagagtgatgagcagctgagcagcctggaccgggacagcggccagtgcagcaggaacaccagctgtgagaccctggaccactatgaccctgactatgagttcctgcagcaggacctgagcaatgctgaccagatcccccagcagacagcctggaacctgagccccctgcctgagagcctgggggagagcggcagccccttcctgggcccccccttccagctgcccctgggcggccacccccagccagatggccccctggcccctggccagcagacagacaccccaccagccctgcctgagaagaagagaagatctgctgccagccagacagcagatggcagcggctgccgggtgtcctatgaaagacaccccagccagtatgacaacatctctggagaggacctgcagagcacagcccccatccccagcgtgccctatgccccctttgctgccatcctgcccttccagcacggcggcagcagcgcccctgtggagtttgtgggggacttcaccgcccctgagagcactggagaccctgagaagcccccacccctgcctgagaagaagaacaagcacatgctggcctacatgcagctgctggaggactacagcgagccccagcccagcatgttctaccagaccccccagaatgagcacatctaccagcagaagaacaagctgctgatggaggtgtatggcttcagtgacagcttctctggagtggacagcgtgcaggagctggcccctcctccagccctgccccccaagcagaggcagctggagcccccagctgggaaggatggccacccccgggaccccagcgctgtgtctggagtgcctgggaaggacagcagagatggcagcgagcgggcccccaagagcccagatgccctggagagcgcccagagcgaggaggaggtggatgagctgagcctgattgaccacaatgagatcatgagccggctgaccctgaagcaggagggagatgatggcccagatgtgcggggcggcagcggggacatcctgctggtgcacgccacagaaacagacaggaaggacctggtgctgtactgtgaggccttcctgaccacctaccgcaccttcatcagccctgaggagctgatcaagaagctgcagtaccgctatgagaagttcagcccctttgctgacaccttcaagaagagggtgtccaagaacaccttctttgtgctggtgcgggtggtggatgagctgtgcctggtggagctgacagaggagatcctgaagctgctgatggagctggtgttccggctggtgtgcaatggagagctgagcctggcccgggtgctgaggaagaacatcctggacaaggtggaccagaagaagctgctgcgctgtgccaccagcagccagcccctggccgcccggggcgtggccgcccggcccggcaccctgcatgacttccacagccatgaaattgctgagcagctgaccctgctggatgctgagctgttctacaagattgagatccctgaggtgctgctgtgggccaaggagcagaatgaggagaagagccccaacctgacccagttcacagagcacttcaacaacatgagctactgggtgcgcagcatcatcatgctgcaggagaaggcccaggaccgggagcggctgctgctgaagttcatcaagatcatgaagcacctgaggaagctgaacaacttcaacagctacctggccatcctgagcgccctggacagcgcccccatccggcggctggagtggcagaagcagaccagcgagggcctggccgagtactgcaccctgattgacagcagcagcagcttccgggcctaccgggccgccctgtctgaggtggagcccccctgcatcccctacctgggcctcatcctgcaggacctgacctttgtgcacctgggcaacccagactacattgatggcaaggtgaacttcagcaagcgctggcagcagttcaacatcctggacagcatgcgctgcttccagcaggcccactatgacatgagaagaaatgatgacatcatcaacttcttcaatgacttcagtgaccacctggccgaggaggccctgtgggagctgagcctgaagatcaagcccaggaacatcaccaggaggaagacagaccgggaggagaagacctag

SEQ ID NO: 21531 - DNA, 1395 bp, synthetic construct
  misc_feature 1..1395: note = Description of Artificial Sequence: Synthetic coding sequence
  source 1..1395: mol_type = other DNA
atgagccgggccaccagcggcagcagcctgcctgtgggcatcaaccggcaggactttgatgtggactgctacgcccagaggcggctgagcggcggcagccacagctatggaggagagagcccccggctgagcccctgcagcagcatcggcaagctgagcaagagtgatgagcagctgagcagcctggaccgggacagcggccagtgcagcaggaacaccagctgtgagaccctggaccactatgaccctgactatgagttcctgcagcaggacctgagcaatgctgaccagatcccccagcagacagcctggaacctgagccccctgcctgagagcctgggggagagcggcagccccttcctgggcccccccttccagctgcccctgggcggccacccccagccagatggccccctggcccctggccagcagacagacaccccaccagccctgcctgagaagaagagaagatctgctgccagccagacagcagatggcagcggctgccgggtgtcctatgagcggcaccccagccagtatgacaacatcagcggggaggacctgcagagcacagcccccatccccagcgtgccctatgccccctttgctgccatcctgcccttccagcacggcggcagcagcgcccctgtggagtttgtgggggacttcaccgcccctgagagcactggagaccctgagaagcccccacccctgcctgagaagaagaacaagcacatgctggcctacatgcagctgctggaggactacagcgagccccagcccagcatgttctaccagaccccccagaatgagcacatctaccagcagaagaacaagctgctgatggaggtgtatggcttcagtgacagcttcagcggcgtggacagcgtgcaggagctggcccctcctccagccctgccccccaagcagaggcagctgcaggccagctgtgccgccagcagcttcagctctgtgagccactgtgtgcagcagaccaaggtggccttcaccccagaagatggcagcgctgcccagggcctgtctgtgtctgtgagcaacagcttcctgagcagacatggcagcctgcctgtgcccagctacaagtctgtgttccgcagctacagccaggactttgtgccccaccaccaggcctctgtgccccccttcctgccccccaccagcagcagcagcccccacttccccccagcccaccagagccagagcagtgacctggccgtgcccaccatggccggccccccacccagcacagtggatggccccctgagcgccagccaggagagcagcttccacggcaacacagtgtgcctgcccagcgagaccagcttcacagacagcgagcccccagctgggaaggatggccacccccgggactag

SEQ ID NO: 21532 - DNA, 3285 bp, synthetic construct; identical to SEQ ID NO: 21528
  misc_feature 1..3285: note = Description of Artificial Sequence: Synthetic coding sequence
  source 1..3285: mol_type = other DNA

SEQ ID NO: 21533 - DNA, 1011 bp, synthetic construct
  misc_feature 1..1011: note = Description of Artificial Sequence: Synthetic coding sequence
  source 1..1011: mol_type = other DNA
atggaggtgtatggcttcagtgacagcttctctggagtggacagcgtgcaggagctggcccctcctccagccctgccccccaagcagaggcagctgtctgaaaatgccagcgaggaggccggggagggggagtatgtgaacctgtacagcagcggccagagcagcgaggagctggcccccagcagaggagagcccccagctgggaaggatggccacccccgggaccccagcgctgtgtctggagtgcctgggaaggacagcagagatggcagcgagcgggcccccaagagcccagatgccctggagagcgcccagagcgaggaggaggtggatgagctgagcctgattgaccacaatgagatcatgagccggctgaccctgaagcaggagggagatgatggcccagatgtgcggggcggcagcggggacatcctgctggtgcacgccacagaaacagacaggaaggacctggtgctgtactgtgaggccttcctgaccacctaccgcaccttcatcagccctgaggagctgatcaagaagctgcagtaccgctatgagaagttcagcccctttgctgacaccttcaagaagagggtgtccaagaacaccttctttgtgctggtgcgggtggtggatgagctgtgcctggtggagctgacagaggagatcctgaagctgctgatggagctggtgttccggctggtgtgcaatggagagctgagcctggcccgggtgctgaggaagaacatcctggacaaggtggaccagaagaagctgctgcgctgtgccaccagcagccagcccctggccgcccggggcgtggccgcccggcccggcaccctgcatgacttccacagccatgaaattgctgagcagctgaccctgctggatgctgagctgttctacaagattgagatccctgaggtgctgctgtgggccaaggagcagaatgaggagaagagccccaacctgacccagttcacagagcacttcaacaacatgagctactag

SEQ ID NO: 21534 - DNA, 3174 bp, synthetic construct
  misc_feature 1..3174: note = Description of Artificial Sequence: Synthetic coding sequence
  source 1..3174: mol_type = other DNA
atgggaaatgccatcgagaagcagaagcccctgaagaggagccacctgtacccctggaagcaggacagccagaggagccacctgagcagcttcaccatgaagctgatggacaagttccacagccccaagatcaagaggacccccagcaagaagggcaagccagctgaggtgtctgtgaagatccctgagaagcctgtgaacaagaacctgtcctggctggaggagaaggagaaggaggtggtgtctgccctgcgctacttcaagaccatcgtggacaagatggccatcgacaagaaggtgctggagatgctgcccggcagcgccagcaaggtgctggaggccatcctgcccctggtgcagaatgacccccgcatccagcacagcagcgccctgagcagctgctacagccgggtgtaccagagcctggccaacctgatccgctggagcgaccaggtgatgctggagggcgtgaacagcgaggacaaggagatggtgaccaccgtgaagggcgtcatcaaggctgtgctggatggagtgaaggagctggtgcggctgaccatcgagaagcagggccggcccagccccaccagccctgtgaagcccagcagccctgccagcaagccagatggccctgctgagctgcccctgacagaccgggaggtggagatcctgaacaagaccaccggcatgagccagagcacagagctgctgcctgatgccacagatgaggaggtggccccacccaagccacccctgcccggcatccgggtggtggacaacagccccccaccagccctgccccccaagaagaggcagagcgcccccagccccaccagggtggccgtggtggcccccatgagccgggccaccagcggcagcagcctgcctgtgggcatcaaccggcaggactttgatgtggactgctacgcccagaggcggctgagcggcggcagccacagctatggaggagagagcccccggctgagcccctgcagcagcatcggcaagctgagcaagagtgatgagcagctgagcagcctggaccgggacagcggccagtgcagcaggaacaccagctgtgagaccctggaccactatgaccctgactatgagttcctgcagcaggacctgagcaatgctgaccagatcccccagcagacagcctggaacctgagccccctgcctgagagcctgggggagagcggcagccccttcctgggcccccccttccagctgcccctgggcggccacccccagccagatggccccctggcccctggccagcagacagacaccccaccagccctgcctgagaagaagagaagatctgctgccagccagacagcagatggcagcggctgccgggtgtcctatgaaagacaccccagccagtatgacaacatctctggagaggacctgcagagcacagcccccatccccagcgtgccctatgccccctttgctgccatcctgcccttccagcacggcggcagcagcgcccctgtggagtttgtgggggacttcaccgcccctgagagcactggagaccctgagaagcccccacccctgcctgagaagaagaacaagcacatgctggcctacatgcagctgctggaggactacagcgagccccagcccagcatgttctaccagaccccccagaatgagcacatctaccagcagaagaacaagctgctgatggaggtgtatggcttcagtgacagcttctctggagtggacagcgtgcaggagctggcccctcctccagccctgccccccaagcagaggcagctggagcccccagctgggaaggatggccacccccgggaccccagcgctgtgtctggagtgcctgggaaggacagcagagatggcagcgagcgggcccccaagagcccagatgccctggagagcgcccagagcgaggaggaggtggatgagctgagcctgattgaccacaatgagatcatgagccggctgaccctgaagcaggagggagatgatggcccagatgtgcggggcggcagcggggacatcctgctggtgcacgccacagaaacagacaggaaggacctggtgctgtactgtgaggccttcctgaccacctaccgcaccttcatcagccctgaggagctgatcaagaagctgcagtaccgctatgagaagttcagcccctttgctgacaccttcaagaagagggtgtccaagaacaccttctttgtgctggtgcgggtggtggatgagctgtgcctggtggagctgacagaggagatcctgaagctgctgatggagctggtgttccggctggtgtgcaatggagagctgagcctggcccgggtgctgaggaagaacatcctggacaaggtggaccagaagaagctgctgcgctgtgccaccagcagccagcccctggccgcccggggcgtggccgcccggcccggcaccctgcatgacttccacagccatgaaattgctgagcagctgaccctgctggatgctgagctgttctacaagattgagatccctgaggtgctgctgtgggccaaggagcagaatgaggagaagagccccaacctgacccagttcacagagcacttcaacaacatgagctactgggtgcgcagcatcatcatgctgcaggagaaggcccaggaccgggagcggctgctgctgaagttcatcaagatcatgaagcacctgaggaagctgaacaacttcaacagctacctggccatcctgagcgccctggacagcgcccccatccggcggctggagtggcagaagcagaccagcgagggcctggccgagtactgcaccctgattgacagcagcagcagcttccgggcctaccgggccgccctgtctgaggtggagcccccctgcatcccctacctgggcctcatcctgcaggacctgacctttgtgcacctgggcaacccagactacattgatggcaaggtgaacttcagcaagcgctggcagcagttcaacatcctggacagcatgcgctgcttccagcaggcccactatgacatgagaagaaatgatgacatcatcaacttcttcaatgacttcagtgaccacctggccgaggaggccctgtgggagctgagcctgaagatcaagcccaggaacatcaccaggaggaagacagaccgggaggagaagacctag

SEQ ID NO: 21535 - DNA, 960 bp, synthetic construct
  misc_feature 1..960: note = Description of Artificial Sequence: Synthetic coding sequence
  source 1..960: mol_type = other DNA
tgactggcccctcctccagccctgccccccaagcagaggcagctgtctgaaaatgccagcgaggaggccggggagggggagtatgtgaacctgtacagcagcggccagagcagcgaggagctggcccccagcagaggagagcccccagctgggaaggatggccacccccgggaccccagcgctgtgtctggagtgcctgggaaggacagcagagatggcagcgagcgggcccccaagagcccagatgccctggagagcgcccagagcgaggaggaggtggatgagctgagcctgattgaccacaatgagatcatgagccggctgaccctgaagcaggagggagatgatggcccagatgtgcggggcggcagcggggacatcctgctggtgcacgccacagaaacagacaggaaggacctggtgctgtactgtgaggccttcctgaccacctaccgcaccttcatcagccctgaggagctgatcaagaagctgcagtaccgctatgagaagttcagcccctttgctgacaccttcaagaagagggtgtccaagaacaccttctttgtgctggtgcgggtggtggatgagctgtgcctggtggagctgacagaggagatcctgaagctgctgatggagctggtgttccggctggtgtgcaatggagagctgagcctggcccgggtgctgaggaagaacatcctggacaaggtggaccagaagaagctgctgcgctgtgccaccagcagccagcccctggccgcccggggcgtggccgcccggcccggcaccctgcatgacttccacagccatgaaattgctgagcagctgaccctgctggatgctgagctgttctacaagattgagatccctgaggtgctgctgtgggccaaggagcagaatgaggagaagagccccaacctgacccagttcacagagcacttcaacaacatgagctactag

SEQ ID NO: 21536 - DNA, 687 bp, synthetic construct
  misc_feature 1..687: note = Description of Artificial Sequence: Synthetic coding sequence
  source 1..687: mol_type = other DNA
tgactgcctgagaagaagaacaagcacatgctggcctacatgcagctgctggaggactacagcgagccccagcccagcatgttctaccagaccccccagaatgagcacatctaccagcagaagaacaagctgctgatggaggtgtatggcttcagtgacagcttcagcggcgtggacagcgtgcaggagctggcccctcctccagccctgccccccaagcagaggcagctgcaggccagctgtgccgccagcagcttcagctctgtgagccactgtgtgcagcagaccaaggtggccttcaccccagaagatggcagcgctgcccagggcctgtctgtgtctgtgagcaacagcttcctgagcagacatggcagcctgcctgtgcccagctacaagtctgtgttccgcagctacagccaggactttgtgccccaccaccaggcctctgtgccccccttcctgccccccaccagcagcagcagcccccacttccccccagcccaccagagccagagcagtgacctggccgtgcccaccatggccggccccccacccagcacagtggatggccccctgagcgccagccaggagagcagcttccacggcaacacagtgtgcctgcccagcgagaccagcttcacagacagcgagcccccagctgggaaggatggccacccccgggactag

SEQ ID NO: 21537 - DNA, 582 bp, synthetic construct
  misc_feature 1..582: note = Description of Artificial Sequence: Synthetic coding sequence
  source 1..582: mol_type = other DNA
atgggaaatgccatcgagaagcagaagcccctgaagaggagccacctgtacccctggaagcaggacagccagaggagccacctgagcagcttcaccatgaagctgatggacaagttccacagccccaagatcaagaggacccccagcaagaagggcaagccagctgaggtgtctgtgaagatccctgagaagcctgtgaacaaggaggccacagaccgcttcctgcctgagggctaccccctgcccctggacctggagcagcaggccgtggagttcatgagcaccagcgctgtggccagccgcagccagaggcagaagaacctgtcctggctggaggagaaggagaaggaggtggtgtctgccctgcgctacttcaagaccatcgtggacaagatggccatcgacaagaaggtgctggagatgctgcccggcagcgccagcaaggtgctggaggccatcctgcccctggtgcagaatgacccccgcatccagcacagcagcgccctgagcagctgctacagccgggtgtaccagagcctggccaacctgatccgctggagcgaccaggtgatgctggagtag

SEQ ID NO: 21538 - DNA, 3072 bp, synthetic construct
  misc_feature 1..3072: note = Description of Artificial Sequence: Synthetic coding sequence
  source 1..3072: mol_type = other DNA
ttcaagaccatcgtggacaagatggccatcgacaagaaggtgctggagatgctgcccggcagcgccagcaaggtgctggaggccatcctgcccctggtgcagaatgacccccgcatccagcacagcagcgccctgagcagctgctacagccgggtgtaccagagcctggccaacctgatccgctggagcgaccaggtgatgctggagggcgtgaacagcgaggacaaggagatggtgaccaccgtgaagggcgtcatcaaggctgtgctggatggagtgaaggagctggtgcggctgaccatcgagaagcagggccggcccagccccaccagccctgtgaagcccagcagccctgccagcaagccagatggccctgctgagctgcccctgacagaccgggaggtggagatcctgaacaagaccaccggcatgagccagagcacagagctgctgcctgatgccacagatgaggaggtggccccacccaagccacccctgcccggcatccgggtggtggacaacagccccccaccagccctgccccccaagaagaggcagagcgcccccagccccaccagggtggccgtggtggcccccatgagccgggccaccagcggcagcagcctgcctgtgggcatcaaccggcaggactttgatgtggactgctacgcccagaggcggctgagcggcggcagccacagctatggaggagagagcccccggctgagcccctgcagcagcatcggcaagctgagcaagagtgatgagcagctgagcagcctggaccgggacagcggccagtgcagcaggaacaccagctgtgagaccctggaccactatgaccctgactatgagttcctgcagcaggacctgagcaatgctgaccagatcccccagcagacagcctggaacctgagccccctgcctgagagcctgggggagagcggcagccccttcctgggcccccccttccagctgcccctgggcggccacccccagccagatggccccctggcccctggccagcagacagacaccccaccagccctgcctgagaagaagagaagatctgctgccagccagacagcagatggcagcggctgccgggtgtcctatgaaagacaccccagccagtatgacaacatctctggagaggacctgcagagcacagcccccatccccagcgtgccctatgccccctttgctgccatcctgcccttccagcacggcggcagcagcgcccctgtggagtttgtgggggacttcaccgcccctgagagcactggagaccctgagaagcccccacccctgcctgagaagaagaacaagcacatgctggcctacatgcagctgctggaggactacagcgagccccagcccagcatgttctaccagaccccccagaatgagcacatctaccagcagaagaacaagctgctgatggaggtgtatggcttcagtgacagcttctctggagtggacagcgtgcaggagctggcccctcctccagccctgccccccaagcagaggcagctggccagctgtgccgccagcagcttcagctctgtgagccactgtgtgcagcagaccaaggtggccttcaccccagaagatggcagcgctgcccagggcctgtctgtgtctgtgagcaacagcttcctgagcagacatggcagcctgcctgtgcccagcgagcccccagctgggaaggatggccacccccgggaccccagcgctgtgtctggagtgcctgggaaggacagcagagatggcagcgagcgggcccccaagagcccagatgccctggagagcgcccagagcgaggaggaggtggatgagctgagcctgattgaccacaatgagatcatgagccggctgaccctgaagcaggagggagatgatggcccagatgtgcggggcggcagcggggacatcctgctggtgcacgccacagaaacagacaggaaggacctggtgctgtactgtgaggccttcctgaccacctaccgcaccttcatcagccctgaggagctgatcaagaagctgcagtaccgctatgagaagttcagcccctttgctgacaccttcaagaagagggtgtccaagaacaccttctttgtgctggtgcgggtggtggatgagctgtgcctggtggagctgacagaggagatcctgaagctgctgatggagctggtgttccggctggtgtgcaatggagagctgagcctggcccgggtgctgaggaagaacatcctggacaaggtggaccagaagaagctgctgcgctgtgccaccagcagccagcccctggccgcccggggcgtggccgcccggcccggcaccctgcatgacttccacagccatgaaattgctgagcagctgaccctgctggatgctgagctgttctacaagattgagatccctgaggtgctgctgtgggccaaggagcagaatgaggagaagagccccaacctgacccagttcacagagcacttcaacaacatgagctactgggtgcgcagcatcatcatgctgcaggagaaggcccaggaccgggagcggctgctgctgaagttcatcaagatcatgaagcacctgaggaagctgaacaacttcaacagctacctggccatcctgagcgccctggacagcgcccccatccggcggctggagtggcagaagcagaccagcgagggcctggccgagtactgcaccctgattgacagcagcagcagcttccgggcctaccgggccgccctgtctgaggtggagcccccctgcatcccctacctgggcctcatcctgcaggacctgacctttgtgcacctgggcaacccagactacattgatggcaaggtgaacttcagcaagcgctggcagcagttcaacatcctggacagcatgcgctgcttccagcaggcccactatgacatgagaagaaatgatgacatcatcaacttcttcaatgacttcagtgaccacctggccgaggaggccctgtgggagctgagcctgaagatcaagcccaggaacatcaccaggaggaagacagaccgggaggagaagacctag

SEQ ID NO: 21539 - DNA, 480 bp, synthetic construct
  misc_feature 1..480: note = Description of Artificial Sequence: Synthetic coding sequence
  source 1..480: mol_type = other DNA
atggaggtgtatggcttcagtgacagcttctctggagtggacagcgtgcaggagctggcccctcctccagccctgccccccaagcagaggcagctgtacaagtctgtgttccgcagctacagccaggactttgtgccccaccaccaggcctctgtgccccccttcctgccccccaccagcagcagcagcccccacttccccccagcccaccagagccagagcagtgacctggccgtgcccaccatggccggccccccacccagcacagtggatggccccctgagcgccagccaggagagcagcttccacggcaacacagtgtgcctgcccagcgagaccagcttcacagacagcgagcccccagctgggaaggatggccacccccgggaccccagcgctgtgtctggagtgcctgggaaggacagcagagatggcagcgagcgggcccccaagagcccagatgccctggagagcgcctag

SEQ ID NO: 21540 - DNA, 696 bp, synthetic construct
  misc_feature 1..696: note = Description of Artificial Sequence: Synthetic coding sequence
  source 1..696: mol_type = other DNA
atggaggtgtatggcttcagtgacagcttctctggagtggacagcgtgcaggagctggcccctcctccagccctgccccccaagcagaggcagctgcaggccagctgtgccgccagcagcttcagctctgtgagccactgtgtgcagcagaccaaggtggccttcaccccagaagatggcagcgctgcccagggcctgtctgtgtctgtgagcaacagcttcctgagccgccacggcagcctgcctgtgcccagctacaagagcgtcttccgcagctacagccaggactttgtgccccaccaccaggcctctgtgccccccttcctgccccccaccagcagcagcagcccccacttccccccagcccaccagagccagagcagtgacctggccgtgcccaccatggccggccccccacccagcacagtggatggccccctgagcgccagccaggagagcagcttccacggcaacacagtgtgcctgcccagcgagaccagcttcacagacagcagtgaaaatgccagcgaggaggccggggagggggagtatgtgaacctgtacagcagcggccagagcagcgaggagctggcccccagcagaggagagcccccagctgggaaggatggccacccccgggaccccagcgctgtgtctggagtgcctgggaaggacagcagagatggcagcgagtag

SEQ ID NO: 21541 - DNA, 477 bp, synthetic construct
  misc_feature 1..477: note = Description of Artificial Sequence: Synthetic coding sequence
  source 1..477: mol_type = other DNA
atgtctgggggcctgggcctgcggcgcagccctgagatgtctgggaagattgagaaggctgacagccagaggagccacctgagcagcttcaccatgaagctgatggacaagttccacagccccaagatcaagaggacccccagcaagaagggcaagccagctgaggtgtctgtgaagatccctgagaagcctgtgaacaagaacctgtcctggctggaggagaaggagaaggaggtggtgtctgccctgcgctacttcaagaccatcgtggacaagatggccatcgacaagaaggtgctggagatgctgcccggcagcgccagcaaggtgctggaggccatcctgcccctggtgcagaatgacccccgcatccagcacagcagcgccctgagcagctgctacagccgggtgtaccagagcctggccaacctgatccgctggagcgaccaggtgatgctggagggcgtgaacagctag

SEQ ID NO: 21542 - DNA, 261 bp, synthetic construct
  misc_feature 1..261: note = Description of Artificial Sequence: Synthetic coding sequence
  source 1..261: mol_type = other DNA
atggaggtgtatggcttcagtgacagcttctctggagtggacagcgtgcaggagctggcccctcctccagccctgccccccaagcagaggcagctggagcccccagctgggaaggatggccacccccgggaccccagcgctgtgtctggagtgcctgggaaggacagcagagatggcagcgagagcggcatcacctctgtgtaccgctggaacatccagaggcagcagaggctgtcctatggccacacagccagccagtag

SEQ ID NO: 21543 - DNA, 7419 bp, synthetic construct
  misc_feature 1..7419: note = Description of Artificial Sequence: Synthetic coding sequence
  source 1..7419: mol_type = other DNA
atgacagcccggggccagagccccctggcccccctgctggagaccctggaggaccccagcgccagccatggaggccagacagatgcctacctgaccctgaccagcaggatgaccggggaggagggcaaggaggtgatcacagaaattgagaagaagctgccccggctgtacaaggtgctgaagacccacatcagcagccagaacagcgagctgagcagcgctgccctgcaggccctgggcttctgcctgtacaaccccaagatcaccagcgagctgtctgaggccaatgccctggagctgctgagcaagctgaatgacaccatcaagaacagcgacaagaatgtgaggacccgggccctgtgggtgatcagcaagcagaccttccccagcgaggtggtgggcaagatggtgagcagcatcatcgacagcctggagatcctcttcaacaagggggagacccacagcgctgtggtggactttgaggccctgaatgtcatcgtgcggctcatcgagcaggcccccatccagatgggagaggaggccgtgcgctgggccaagctggtgatccccctggtggtgcacagcgcccagaaggtgcacctgcggggggccacagccctggagatgggcatgcccctgctgctgcagaagcagcaggagatcgccagcatcacagagcagctgatgaccaccaagctgatcagcgagctgcagaagctgttcatgagcaagaatgagacctacgtgctgaagctgtggcccctgtttgtgaagctgctgggccgcaccctgcacaggagcggcagcttcatcaacagcctgctgcagctggaggagctgggcttccgcagcggggcccccatgatcaagaagatcgccttcatcgcctggaagagcctgattgacaactttgccctgaacccagacatcctgtgcagcgccaagaggctgaagctgctgatgcagcccctgagcagcatccacgtgaggacagagaccctggccctgaccaagctggaggtgtggtggtacctgctgatgaggctgggcccccacctgcctgccaactttgagcaggtgtgtgtgcccctcatccagagcaccatcagcattgacagcaatgccagcccccagggcaacagctgccacgtggccaccagccctggcctgaaccccatgacccctgtgcacaagggggccagcagcccctacggggcccctggcacccccaggatgaacctgagcagcaacctgggcggcatggccaccatccccagcatccagctgctgggcctggagatgctgctgcacttcctgctgggccctgaggccctgagctttgccaagcagaacaagctggtgctgagcctggagcccctggagcaccccctcatcagcagccccagcttcttcagcaagcacgccaacaccctcatcacagctgtgcatgacagctttgtggccgtgggcaaggatgccccagatgtggtggtgtctgccatctggaaggagctgatcagcctggtgaagtctgtgacagaaagtggcaacaagaaggagaagccaggcagcgaggtgctgaccctgctgctgaagagcctggagagcatcgtgaagtctgaggtgtttcctgtgtccaagaccctggtgctgatggagatcaccatcaagggcctgccccagaaggtgctgggcagccctgcctaccaggtggccaacatggacatcctgaatggcaccccagccctcttcctgatccagctgatcttcaacaacttcctggagtgtggggtgtctgatgagcgcttcttcctgagcctggagagcctggtgggctgtgtgctgagcggccccaccagccccctggccttcagtgacagcgtgctgaatgtcatcaaccagaatgccaagcagctggagaacaaggagcacctgtggaagatgtggagcgtcatcgtgacccccctgacagagctgatcaaccagaccaatgaggtgaaccagggagatgccctggagcacaacttcagcgccatctacggggccctgaccctgcctgtgaaccacatcttcagcgagcagcgcttccctgtggccaccatgaagaccctgctgcggacctggagcgagctgtaccgggcctttgcccgctgtgccgccctggtggccacagctgaggagaacctgtgctgtgaggagctgagcagcaagatcatgagcagcctggaggatgagggcttcagcaacctgctgtttgtggaccgcatcatctacatcatcaccgtgatggtggactgcatcgacttcagcccctacaacatcaagtaccagcccaaggtgaagagcccccagaggcccagcgactggagcaagaagaagaatgagcccctgggcaagctgaccagcctcttcaagctgattgtgaaggtgatctacagcttccacaccctgtccttcaaggaggcccacagcgacaccctcttcaccatcggcaacagcatcaccggcatcatcagctctgtgctgggccacatcagcctgcccagcatgatcaggaagatctttgccaccctgacccggcccctggccctcttctatgagaacagcaagctggatgaggtgcccaaggtgtacagctgcctgaacaacaagctggagaagctgctgggggagatcatcgcctgcctgcagttctcctacacaggcacctatgacagcgagctgctggagcagctgagccccctgctgtgcatcatcttcctgcacaagaacaagcagatcaggaagcagagcgcccagttctggaatgccacctttgccaaggtgatgatgctggtgtacccagaggagctgaagcctgtgctgacccaggccaagcagaagttcctgctgctgctgcccggcctggagaccgtggagatgatggaggagagcagcggcccctacagtgatggaacagagaacagccagctgaatgtgaagatcagcggcatggagaggaagagcaatggcaagagggacagcttcctggcccagaccaagaacaagaaggagaacatgaagccagctgccaagctgaagctggagagcagcagcctgaaggtgaagggggagatcctgctggaggaggagaagagcacagactttgtgttcatccccccagagggcaaggatgccaaggagcgcatcctgacagaccaccagaaggaggtgctgaagaccaagagatgtgacatcccagccatgtacaacaacctggatgtgtcccaggacaccctcttcacccagtacagccaggaggagcccatggagatccccaccctgaccaggaagcccaaggaggacagcaagatgatgatcacagaggagcagatggacagcgacatcgtcatcccccaggatgtgacagaggactgtggcatggccgagcacctggagaagagcagcctgagcaacaatgaatgtggcagcctggacaagaccagccctgagatgagcaacagcaacaatgatgagaggaagaaggccctgatcagcagcaggaagaccagcacagaatgtgccagcagcacagagaacagctttgtggtgagcagcagctctgtgagcaacaccaccgtggccggcaccccaccctaccccaccagccggcggcagaccttcatcaccctggagaagtttgatggctctgaaaatcggcccttcagccccagccccctgaacaacatcagcagcacagtgacagtgaagaacaaccaggagaccatgatcaagacagacttcctgcccaaggccaagcagcgggagggcaccttcagcaagagtgacagcgagaagatcgtgaatggcaccaagaggagcagcagaagagctgggaaggccgagcagacaggcaacaagaggagcaagcccctgatgaggtctgagcctgagaagaacacagaggagagcgtggagggcatcgtggtgctggagaacaaccccccaggcctgctgaaccagacagaatgtgtgtctgacaaccaggtgcacctgtctgagagcaccatggagcatgacaacaccaagctgaaggccgccaccgtggagaatgctgtgctgctggagaccaacacagtggaggagaagaatgtggagatcaacctggagagcaaggagaacaccccacctgtggtgatctctgctgaccagatggtgaatgaagacagccaggtgcagatcacccccaaccagaagaccctgcggcgcagcagcagaagaagaagtgaggtggtggagagcaccacagagagccaggacaaggagaacagccaccagaagaaggagaggaggaaggaggaggagaagcccctgcagaagagccccctgcacatcaaggatgatgtgctgcccaagcagaagctgattgctgagcagaccctgcaggagaacctgattgagaagggcagcaacctgcacgagaagaccctgggggagaccagcgccaatgctgagacagagcagaacaagaagaaggctgaccctgagaacatcaagtcagaaggagatggcacccaggacatcgtggacaagagcagcgagaagctggtgcggggccgcacccgctaccagacccggcgggccagccagggcctgctgagcagcattgagaacagcgagagtgacagcagcgaggccaaggaggagggcagcaggaagaagaggtctgggaagtggaagaacaagagcaatgaatctgtggacatccaggaccaggaggagaaggtggtgaagcaggagtgcatcaaggccgagaaccagagccatgactacaaggccaccagcgaggaggatgtgtccatcaagagccccatctgtgagaagcaggatgagagcaacacagtcatctgccaggacagcacagtgaccagtgacctgctgcaggtgcctgatgacctgcccaacgtgtgtgaggagaagaatgagaccagcaaatatgcagagtacagcttcaccagcctgcctgtgcctgagagcaacctgcggaccagaaatgccatcaagaggctgcacaagagggacagctttgacaactgcagcctgggggagagcagcaagattggcatcagtgacatcagcagcctgtctgagaagaccttccagaccctggagtgccagcacaagaggagccggcgggtgagaagaagcaagggctgtgactgctgcggggagaagagccagccccaggagaagagcctgattggcctgaagaacacagaaaataatgatgtggagatcagcgagaccaagaaggcagatgtgcaggcccctgtgagccccagcgagaccagccaggccaacccctacagcgagggccagttcctggatgagcaccacagcgtgaacttccacctgggcctgaaggaggacaatgacaccatcaatgacagcctcatcgtgtctgagaccaagagcaaggagaacaccatgcaggagagcctgcccagcggcatcgtgaacttccgggaggagatctgtgacatggacagcagcgaggccatgagcctggagagccaggagagccccaatgaaaacttcaagacagtgggcccctgcctgggggacagcaagaatgtgtcccaggagagcctggagaccaaggaggagaagccagaggagacccccaagatggagctgagcctggagaatgtgacagtggagggcaatgcctgcaaggtgacagagagcaacctggagaaggccaagaccatggagctgaatgtgggcaatgaggccagcttccacggccaggagaggaccaagacaggcatcagcgaggaggccgccatcgaggagaacaagagaaatgatgacagcgaggccgacacagccaagctgaatgccaaggaggtggccacagaggagttcaacagcgacatcagcctgagtgacaacaccacccctgtgaagctgaatgcccagacagagatcagcgagcagacagctgctggggagctggatggcggcaatgatgtgtctgacctgcacagcagcgaggagaccaacaccaagatgaagaacaatgaggagatgatgattggagaggccatggccgagactggacatgatggagaaacagaaaatgaaggcatcaccaccaagaccagcaagccagatgaggccgagaccaacatgctgacagctgagatggacaactttgtgtgtgacacagtggagatgagcacagaggagggcatcattgatgccaacaagacagagaccaacacagagtacagcaagtctgaggagaagctggacaacaaccagatggtgatggagagtgacatcctgcaggaggaccaccacaccagccagaaggtggaggagcccagccagtgcctggccagcggcacagccatcagcgagctgatcatcgaggacaacaatgccagcccccagaagctgcgggagctggaccccagcctggtgtctgccaatgacagccccagcggcatgcagacccgctgtgtgtggagccccctggccagccccagcaccagcatcctgaagaggggcctgaagaggagccaggaggatgagatcagcagccctgtgaacaaggtgcggcgggtgtcctttgctgaccccatctaccaggccggcctggctgatgacatcgaccggcgctgcagcatcgtgcgcagccacagcagcaacagcagccccatcggcaagtctgtgaagaccagccccaccacccagagcaagcacaacaccaccagcgccaagggcttcctgagccctggcagccgcagccccaagttcaagagcagcaagaagtgcctgatcagcgagatggccaaggagagcatcccctgccccacagagagcgtgtacccacccctggtgaactgtgtggcccctgtggacatcatcctgccccagatcaccagcaacatgtgggcccggggcctgggccagctgatccgggccaagaacatcaagaccatcggggacctgagcaccctgacagccagcgagatcaagaccctgcccatccgcagccccaaggtgtccaatgtgaagaaggccctgcgcatctaccacgagcagcaggtgaagacccggggcctggaggagatccctgtgtttgacatcagcgagaagacagtgaatggaattgagaacaagagcctgagcccagatgaggagcggctggtgtctgacatcatcgaccctgtggccctggagatccccctgagcaagaacctgctggcccagatcagcgccctggccctgcagctggacagcgaggacctgcacaactacagcggcagccagctgtttgagatgcatgagaagctgagctgcatggccaacagcgtcatcaagaacctgcagagccgctggaggagccccagccatgaaaattccatctag

SEQ ID NO: 21544 - DNA, 264 bp, synthetic construct
  misc_feature 1..264: note = Description of Artificial Sequence: Synthetic coding sequence
  source 1..264: mol_type = other DNA
atgacagcccggggccagagccccctggcccccctgctggagaccctggaggaccccagcgccagccatggaggccagacagatgcctacctgaccctgaccagcaggatgaccggggaggagggcaaggaggtgatcacagaaattgagaagaagctgccccggctgtacaaggtgctgaagacccacatcagcagccagaacagcgagctgagcagcgctgccctgcaggccctgggcttctgcctgtacaaccccaagtag

SEQ ID NO: 21545 - DNA, 7341 bp, synthetic construct
  misc_feature 1..7341: note = Description of Artificial Sequence: Synthetic coding sequence
  source 1..7341: mol_type = other DNA
atgacagcccggggccagagccccctggcccccctgctggagaccctggaggaccccagcgccagccatggaggccagacagatgcctacctgaccctgaccagcaggatgaccggggaggagggcaaggaggtgatcacagaaattgagaagaagctgccccggctgtacaaggtgctgaagacccacatcagcagccagaacagcgagctgagcagcgctgccctgcaggccctgggcttctgcctgtacaaccccaagatcaccagcgagctgtctgaggccaatgccctggagctgctgagcaagctgaatgacaccatcaagaacagcgacaagaatgtgaggacccgggccctgtgggtgatcagcaagcagaccttccccagcgaggtggtgggcaagatggtgagcagcatcatcgacagcctggagatcctcttcaacaagggggagacccacagcgctgtggtggactttgaggccctgaatgtcatcgtgcggctcatcgagcaggcccccatccagatgggagaggaggccgtgcgctgggccaagctggtgatccccctggtggtgcacagcgcccagaaggtgcacctgcggggggccacagccctggagatgggcatgcccctgctgctgcagaagcagcaggagatcgccagcatcacagagcagctgatgaccaccaagctgatcagcgagctgcagaagctgttcatgagcaagaatgagacctacgtgctgaagctgtggcccctgtttgtgaagctgctgggccgcaccctgcacaggagcggcagcttcatcaacagcctgctgcagctggaggagctgggcttccgcagcggggcccccatgatcaagaagatcgccttcatcgcctggaagagcctgattgacaactttgccctgaacccagacatcctgtgcagcgccaagaggctgaagctgctgatgcagcccctgagcagcatccacgtgaggacagagaccctggccctgaccaagctggaggtgtggtggtacctgctgatgaggctgggcccccacctgcctgccaactttgagcaggtgtgtgtgcccctcatccagagcaccatcagcattgacagcaatgccagcccccagggcaacagctgccacgtggccaccagccctggcctgaaccccatgacccctgtgcacaagggggccagcagcccctacggggcccctggcacccccaggatgaacctgagcagcaacctgggcggcatggccaccatccccagcatccagctgctgggcctggagatgctgctgcacttcctgctgggccctgaggccctgagctttgccaagcagaacaagctggtgctgagcctggagcccctggagcaccccctcatcagcagccccagcttcttcagcaagcacgccaacaccctcatcacagctgtgcatgacagctttgtggccgtgggcaaggatgccccagatgtggtggtgtctgccatctggaaggagctgatcagcctggtgaagtctgtgacagaaagtggcaacaagaaggagaagccaggcagcgaggtgctgaccctgctgctgaagagcctggagagcatcgtgaagtctgaggtgtttcctgtgtccaagaccctggtgctgatggagatcaccatcaagggcctgccccagaaggtgctgggcagccctgcctaccaggtggccaacatggacatcctgaatggcaccccagccctcttcctgatccagctgatcttcaacaacttcctggagtgtggggtgtctgatgagcgcttcttcctgagcctggagagcctggtgggctgtgtgctgagcggccccaccagccccctggccttcagtgacagcgtgctgaatgtcatcaaccagaatgccaagcagctggagaacaaggagcacctgtggaagatgtggagcgtcatcgtgacccccctgacagagctgatcaaccagaccaatgaggtgaaccagggagatgccctggagcacaacttcagcgccatctacggggccctgaccctgcctgtgaaccacatcttcagcgagcagcgcttccctgtggccaccatgaagaccctgctgcggacctggagcgagctgtaccgggcctttgcccgctgtgccgccctggtggccacagctgaggagaacctgtgctgtgaggagctgagcagcaagatcatgagcagcctggaggatgagggcttcagcaacctgctgtttgtggaccgcatcatctacatcatcaccgtgatggtggactgcatcgacttcagcccctacaacatcaagtaccagcccaaggtgaagagcccccagaggcccagcgactggagcaagaagaagaatgagcccctgggcaagctgaccagcctcttcaagctgattgtgaaggtgatctacagcttccacaccctgtccttcaaggaggcccacagcgacaccctcttcaccatcggcaacagcatcaccggcatcatcagctctgtgctgggccacatcagcctgcccagcatgatcaggaagatctttgccaccctgacccggcccctggccctcttctatgagaacagcaagctggatgaggtgcccaaggtgtacagctgcctgaacaacaagctggagaagctgctgggggagatcatcgcctgcctgcagttctcctacacaggcacctatgacagcgagctgctggagcagctgagccccctgctgtgcatcatcttcctgcacaagaacaagcagatcaggaagcagagcgcccagttctggaatgccacctttgccaaggtgatgatgctggtgtacccagaggagctgaagcctgtgctgacccaggccaagcagaagttcctgctgctgctgcccggcctggagaccgtggagatgatggaggagagcagcggcccctacagtgatggaacagagaacagccagctgaatgtgaagatcagcggcatggagaggaagagcaatggcaagagggacagcttcctggcccagaccaagaacaagaaggagaacatgaagccagctgccaagctgaagctggagagcagcagcctgaaggtgaagggggagatcctgctggaggaggagaagagcacagactttgtgttcatccccccagagggcaaggatgccaaggagcgcatcctgacagaccaccagaaggaggtgctgaagaccaagagatgtgacatcccagccatgtacaacaacctggatgtgtcccaggacaccctcttcacccagtacagccaggaggagcccatggagatccccaccctgaccaggaagcccaaggaggacagcaagatgatgatcacagaggagcagatggacagcgacatcgtcatcccccaggatgtgacagaggactgtggcatggccgagcacctggagaagagcagcctgagcaacaatgaatgtggcagcctggacaagaccagccctgagatgagcaacagcaacaatgatgagaggaagaaggccctgatcagcagcaggaagaccagcacagaatgtgccagcagcacagagaacagctttgtggtgagcagcagctctgtgagcaacaccaccgtggccggcaccccaccctaccccaccagccggcggcagaccttcatcaccctggagaagtttgatggctctgaaaatcggcccttcagccccagccccctgaacaacatcagcagcacagtgacagtgaagaacaaccaggagaccatgatcaagacagacttcctgcccaaggccaagcagcgggagggcaccttcagcaagagtgacagcgagaagatcgtgaatggcaccaagaggagcagcagaagagctgggaaggccgagcagacaggcaacaagaggagcaagcccctgatgaggtctgagcctgagaagaacacagaggagagcgtggagggcatcgtggtgctggagaacaaccccccaggcctgctgaaccagacagaatgtgtgtctgacaaccaggtgcacctgtctgagagcaccatggagcatgacaacaccaagctgaaggccgccaccgtggagaatgctgtgctgctggagaccaacacagtggaggagaagaatgtggagatcaacctggagagcaaggagaacaccccacctgtggtgatctctgctgaccagatggtgaatgaagacagccaggtgcagatcacccccaaccagaagaccctgcggcgcagcagcagaagaagaagtgaggtggtggagagcaccacagagagccaggacaaggagaacagccaccagaagaaggagaggaggaaggaggaggagaagcccctgcagaagagccccctgcacatcaaggatgatgtgctgcccaagcagaagctgattgctgagcagaccctgcaggagaacctgattgagaagggcagcaacctgcacgagaagaccctgggggagaccagcgccaatgctgagacagagcagaacaagaagaaggctgaccctgagaacatcaagtcagaaggagatggcacccaggacatcgtggacaagagcagcgagaagctggtgcggggccgcacccgctaccagacccggcgggccagccagggcctgctgagcagcattgagaacagcgagagtgacagcagcgaggccaaggaggagggcagcaggaagaagaggtctgggaagtggaagaacaagagcaatgaatctgtggacatccaggaccaggaggagaaggtggtgaagcaggagtgcatcaaggccgagaaccagagccatgactacaaggccaccagcgaggaggatgtgtccatcaagagccccatctgtgagaagcaggatgagagcaacacagtcatctgccaggacagcacagtgaccagtgacctgctgcaggtgcctgatgacctgcccaacgtgtgtgaggagaagaatgagaccagcaaatatgcagagtacagcttcaccagcctgcctgtgcctgagagcaacctgcggaccagaaatgccatcaagaggctgcacaagagggacagctttgacaactgcagcctgggggagagcagcaagattggcatcagtgacatcagcagcctgtctgagaagaccttccagaccctggagtgccagcacaagaggagccggcgggtgagaagaagcaagggctgtgactgctgcggggagaagagccagccccaggagaagagcctgattggcctgaagaacacagaaaataatgatgtggagatcagcgagaccaagaaggcagatgtgcaggcccctgtgagccccagcgagaccagccaggccaacccctacagcgagggccagttcctggatgagcaccacagcgtgaacttccacctgggcctgaaggaggacaatgacaccatcaatgacagcctcatcgtgtctgagaccaagagcaaggagaacaccatgcaggagagcctgcccagcggcatcgtgaacttccgggaggagatctgtgacatggacagcagcgaggccatgagcctggagagccaggagagccccaatgaaaacttcaagacagtgggcccctgcctgggggacagcaagaatgtgtcccaggagagcctggagaccaaggaggagaagccagaggagacccccaagatggagctgagcctggagaatgtgacagtggagggcaatgcctgcaaggtgacagagagcaacctggagaaggccaagaccatggagctgaatgtgggcaatgaggccagcttccacggccaggagaggaccaagacaggcatcagcgaggaggccgccatcgaggagaacaagagaaatgatgacagcgaggccgacacagccaagctgaatgccaaggaggtggccacagaggagttcaacagcgacatcagcctgagtgacaacaccacccctgtgaagctgaatgcccagacagagatcagcgagcagacagctgctggggagctggatggcggcaatgatgtgtctgacctgcacagcagcgaggagaccaacaccaagatgaagaacaatgaggagatgatgattggagaggccatggccgagactggacatgatggagaaacagaaaatgaaggcatcaccaccaagaccagcaagccagatgaggccgagaccaacatgctgacagctgagatggacaactttgtgtgtgacacagtggagatgagcacagaggagggcatcattgatgccaacaagacagagaccaacacagagtacagcaagtctgaggagaagctggacaacaaccagatggtgatggagagtgacatcctgcaggaggaccaccacaccagccagaaggtggaggagcccagccagtgcctggccagcggcacagccatcagcgagctgatcatcgaggacaacaatgccagcccccagaagctgcgggagctggaccccagcctggtgtctgccaatgacagccccagcggcatgcagacccgctgtgtgtggagccccctggccagccccagcaccagcatcctgaagaggggcctgaagaggagccaggaggatgagatcagcagccctgtgaacaaggtgcggcgggtgtcctttgctgaccccatctaccaggccggcctggctgatgacatcgaccggcgctgcagcatcgtgcgcagccacagcagcaacagcagccccatcggcaagtctgtgaagaccagccccaccacccagagcaagatcagcgagatggccaaggagagcatcccctgccccacagagagcgtgtacccacccctggtgaactgtgtggcccctgtggacatcatcctgccccagatcaccagcaacatgtgggcccggggcctgggccagctgatccgggccaagaacatcaagaccatcggggacctgagcaccctgacagccagcgagatcaagaccctgcccatccgcagccccaaggtgtccaatgtgaagaaggccctgcgcatctaccacgagcagcaggtgaagacccggggcctggaggagatccctgtgtttgacatcagcgagaagacagtgaatggaattgagaacaagagcctgagcccagatgaggagcggctggtgtctgacatcatcgaccctgtggccctggagatccccctgagcaagaacctgctggcccagatcagcgccctggccctgcagctggacagcgaggacctgcacaactacagcggcagccagctgtttgagatgcatgagaagctgagctgcatggccaacagcgtcatcaagaacctgcagagccgctggaggagccccagccatgaaaattccatctag

SEQ ID NO: 21546 - DNA, 7341 bp, synthetic construct; identical to SEQ ID NO: 21545
  misc_feature 1..7341: note = Description of Artificial Sequence: Synthetic coding sequence
  source 1..7341: mol_type = other DNA

SEQ ID NO: 21547 - DNA, 1026 bp, synthetic construct
  misc_feature 1..1026: note = Description of Artificial Sequence: Synthetic coding sequence
  source 1..1026: mol_type = other DNA
atgacagcccggggccagagccccctggcccccctgctggagaccctggaggaccccagcgccagccatggaggccagacagatgcctacctgaccctgaccagcaggatgaccggggaggagggcaaggaggtgatcacagaaattgagaagaagctgccccggctgtacaaggtgctgaagacccacatcagcagccagaacagcgagctgagcagcgctgccctgcaggccctgggcttctgcctgtacaaccccaagatcaccagcgagctgtctgaggccaatgccctggagctgctgagcaagctgaatgacaccatcaagaacagcgacaagaatgtgaggacccgggccctgtgggtgatcagcaagcagaccttccccagcgaggtggtgggcaagatggtgagcagcatcatcgacagcctggagatcctcttcaacaagggggagacccacagcgctgtggtggactttgaggccctgaatgtcatcgtgcggctcatcgagcaggcccccatccagatgggagaggaggccgtgcgctgggccaagctggtgatccccctggtggtgcacagcgcccagaaggtgcacctgcggggggccacagccctggagatgggcatgcccctgctgctgcagaagcagcaggagatcgccagcatcacagagcagctgatgaccaccaccctgcacaggagcggcagcttcatcaacagcctgctgcagctggaggagctgggcttccgcagcggggcccccatgatcaagaagatcgccttcatcgcctggaagagcctgattgacaactttgccctgaacccagacatcctgtgcagcgccaagaggctgaagctgctgatgcagcccctgagcagcatccacgtgaggacagagaccctggccctgaccaagctggaggtgtggtggtacctgctgatgaggctgggcccccacctgcctgccaactttgagcaggtgctgccccccaggacagagccccgggagctgcctgagtag

SEQ ID NO: 21548 - DNA, 7419 bp, synthetic construct; identical to SEQ ID NO: 21543
  misc_feature 1..7419: note = Description of Artificial Sequence: Synthetic coding sequence
  source 1..7419: mol_type = other DNA

SEQ ID NO: 21549 - DNA, 7341 bp, synthetic construct; identical to SEQ ID NO: 21545
  misc_feature 1..7341: note = Description of Artificial Sequence: Synthetic coding sequence
  source 1..7341: mol_type = other DNA

SEQ ID NO: 21550 - DNA, 555 bp, synthetic construct
  misc_feature 1..555: note = Description of Artificial Sequence: Synthetic coding sequence
  source 1..555: mol_type = other DNA
atgagggagtacaagctggtggtgctgggcagcggaggagtgggcaagagcgccctgactgtgcagtttgtgcagggcatctttgtggagaagtatgaccccaccattgaagattcctacaggaagcaggtggaggtggactgccagcagtgcatgctggagatcctggacacagctggaacagagcagttcaccgccatgagggacctgtacatgaagaatggccagggctttgccctggtgtacagcatcacagcccagagcaccttcaatgacctgcaggacctgcgggagcagatcctgcgggtgaaggacacagaagatgtgcccatgatcctggtgggcaacaagtgtgacctggaggatgagcgggtggtgggcaaggagcagggccagaacctggcccggcagtggtgcaactgtgccttcctggagagcagcgccaagagcaagatcaacgtgaatgagatcttctatgacctggtgcggcagatcaacaggaagacccctgtggagaagaagaagcccaagaagaagagctgcctgctgctgtag

SEQ ID NO: 21551 - DNA, 555 bp, synthetic construct; identical to SEQ ID NO: 21550
  misc_feature 1..555: note = Description of Artificial Sequence: Synthetic coding sequence
  source 1..555: mol_type = other DNA

SEQ ID NO: 21552 - DNA, 390 bp, synthetic construct
  misc_feature 1..390: note = Description of Artificial Sequence: Synthetic coding sequence
  source 1..390: mol_type = other DNA
atgagggagtacaagctggtggtgctgggcagcggaggagtgggcaagagcgccctgactgtgcagtttgtgcagggcatctttgtggagaagtatgaccccaccattgaagattcctacaggaagcaggtggaggtggactgccagcagtgcatgctggagatcctggacacagctggaacagagcagttcaccgccatgagggacctgtacatgaagaatggccagggctttgccctggtgtacagcatcacagcccagagcaccttcaatgacctgcaggacctgcgggagcagatcctgcgggtgaaggacacagaagatgtgcccatgatcctggtgggcaacaagtgtgacctggaggatgagcgggtggtgggcaaggagtag

SEQ ID NO: 21553 - DNA, 555 bp, synthetic construct; identical to SEQ ID NO: 21550
  misc_feature 1..555: note = Description of Artificial Sequence: Synthetic coding sequence
  source 1..555: mol_type = other DNA

SEQ ID NO: 21554 - DNA, 555 bp, synthetic construct; identical to SEQ ID NO: 21550
  misc_feature 1..555: note = Description of Artificial Sequence: Synthetic coding sequence
  source 1..555: mol_type = other DNA

SEQ ID NO: 21555 - DNA, 1380 bp, synthetic construct
  misc_feature 1..1380: note = Description of Artificial Sequence: Synthetic coding sequence
  source 1..1380: mol_type = other DNA
atgagggcccagattgaagtcatcccctgcaagatctgtggggacaagagcagcggcatccactacggcgtcatcacctgtgagggctgcaagggcttcttcagaagaagccagcagaacaatgccagctacagctgcccccggcagaggaactgcctgattgacaggaccaacagaaaccgctgccagcactgccgcctgcagaagtgcctggccctgggcatgagcagagatgctgtgaagtttggccgcatgagcaagaagcagagggacagcctgtatgcagaggtgcagaagcaccagcagaggctgcaggagcagaggcagcagcagagcggggaggccgaggccctggcccgggtgtacagcagcagcatcagcaatggcctgagcaacctgaacaatgagaccagcggcacctacgccaatggacatgtgattgacctgcccaagtctgagggctactacaacgtggacagcggccagcccagcccagaccagagcggcctggacatgacaggcatcaagcagatcaagcaggagcccatctatgacctgacctctgtgcccaacctcttcacctacagcagcttcaacaacggccagctggcccctggcatcaccatgacagaaattgacagaattgcccagaacatcatcaagagccacctggagacctgccagtacaccatggaggagctgcaccagctggcctggcagacccacacctatgaggagatcaaggcctaccagagcaagagccgggaggccctgtggcagcagtgtgccatccagatcacccacgccatccagtatgtggtggagtttgccaagaggatcaccggcttcatggagctgtgccagaatgaccagatcctgctgctgaagagcggctgcctggaggtggtgctggtgaggatgtgccgggccttcaaccccctgaacaacacagtgctgtttgagggcaagtatggaggcatgcagatgttcaaggccctgggcagtgatgacctggtgaatgaggcctttgattttgccaagaacctgtgcagcctgcagctgacagaggaggagatcgccctcttcagcagcgctgtgctgatcagcccagaccgggcctggctgattgagcccaggaaggtgcagaagctgcaggagaagatctactttgccctgcagcacgtgatccagaagaaccacctggatgatgagaccctggccaagctgattgccaagatccccaccatcacagctgtgtgcaacctgcatggagagaagctgcaggtgttcaagcagagccaccctgagatcgtgaacaccctcttcccccccctgtacaaggagctgttcaacccagactgtgccaccggctgcaagtag

SEQ ID NO: 21556 - DNA, 1413 bp, synthetic construct
  misc_feature 1..1413: note = Description of Artificial Sequence: Synthetic coding sequence
  source 1..1413: mol_type = other DNA
atgtgtgagaaccagctgaagaccaaggcagatgccacagcccagatcgaggtgatcccctgcaagatctgtggggacaagagcagcggcatccactatggagtcatcacctgtgagggctgcaagggcttcttccgccgcagccagcagaacaatgccagctacagctgcccccggcagaggaactgcctgattgacaggaccaacagaaaccgctgccagcactgccgcctgcagaagtgcctggccctgggcatgagcagagatgctgtgaagtttggaaggatgagcaagaagcagagggacagcctgtatgcagaggtgcagaagcaccagcagaggctgcaggagcagaggcagcagcagagcggggaggccgaggccctggcccgggtgtacagcagcagcatcagcaatggcctgagcaacctgaacaatgagaccagcggcacctacgccaacggccacgtgattgacctgcccaagtctgagggctactacaacgtggacagcggccagcccagcccagaccagagcggcctggacatgacaggcatcaagcagatcaagcaggagcccatctatgacctgacctctgtgcccaacctcttcacctacagcagcttcaacaacggccagctggcccctggcatcaccatgacagaaattgaccgcatcgcccagaacatcatcaagagccacctggagacctgccagtacaccatggaggagctgcaccagctggcctggcagacccacacctatgaggagatcaaggcctaccagagcaagagccgggaggccctgtggcagcagtgtgccatccagatcacccacgccatccagtatgtggtggagtttgccaagaggatcaccggcttcatggagctgtgccagaatgaccagatcctgctgctgaagagcggctgcctggaggtggtgctggtgaggatgtgccgggccttcaaccccctgaacaacacagtgctgtttgagggcaagtatggaggcatgcagatgttcaaggccctgggcagtgatgacctggtgaatgaggcctttgattttgccaagaacctgtgcagcctgcagctgacagaggaggagatcgccctcttcagcagcgctgtgctgatcagcccagaccgggcctggctgattgagcccaggaaggtgcagaagctgcaggagaagatctactttgccctgcagcacgtgatccagaagaaccacctggatgatgagaccctggccaagctgattgccaagatccccaccatcacagctgtgtgcaacctgcacggggagaagctgcaggtgttcaagcagagccaccctgagatcgtgaacaccctcttcccccccctgtacaaggagctgttcaacccagactgtgccaccggctgcaagtag

SEQ ID NO: 21557 - DNA, 813 bp, synthetic construct
  misc_feature 1..813: note = Description of Artificial Sequence: Synthetic coding sequence
  source 1..813: mol_type = other DNA
atgggagaggccgaggcccccagctttgagatgacctggagcagcaccaccagcagcggctactgcagccaggaggacagcgacagcgagctggagcagtacttcaccgcccggaccagcctggcccggcggccccggcgggaccaggatgagcctgtggagtgggagaccccagacctgagccaggccgagattgagcagaagatcaaggagtacaatgcccagatcaacagcaacctcttcatgagcctgaacaaggatggcagctacacaggcttcatcaaggtgcagctgaagctggtgcggcctgtgtctgtgcccagcagcaagaagccacccagcctgcaggatgcccggcggggccctggccggggcacctctgtgagaagaaggaccagcttctacctgcccaaggatgctgtgaagcacctgcacgtgctgagcaggacccgggcccgggaggtgattgaggccctgctgaggaagttcctggtggtggatgaccccaggaagtttgccctgtttgagcgggcagagagacatggccaggtgtacctgaggaagctgctggatgatgagcagcccctgcggctgcggctgctggccggccccagcgacaaggccctgagctttgtgctgaaggaaaatgacagcggggaggtgaactgggatgccttctccatgcctgagctgcacaacttcctgcgcatcctgcagcgggaggaggaggagcacctgcggcagatcctgcagaagtacagctactgccggcagaagatccaggaggccctgcacgcctgccccctgggctag

SEQ ID NO: 21558 - DNA, 1035 bp, synthetic construct
  misc_feature 1..1035: note = Description of Artificial Sequence: Synthetic coding sequence
  source 1..1035: mol_type = other DNA
atgtctggagagcctgagctgattgagctgcgggagctggccccagctggccgggccgggaaaggaagaacccggctggagcgggccaatgccctgcgcatcgcccggggcacagcctgcaaccccacccggcagctggtgcccggccggggccaccgcttccagcctgctggccctgccacccacacctggtgtgacctgtgtggggacttcatctggggcgtggtgaggaagggcctgcagtgtgcccggctgtctgctgactgcaagttcacctgccactaccgctgccgggccctggtgtgcctggactgctgcggcccccgggacctgggctgggagcctgctgtggagcgggacaccaacgtggatgagcctgtggagtgggagaccccagacctgagccaggccgagattgagcagaagatcaaggagtacaatgcccagatcaacagcaacctcttcatgagcctgaacaaggatggcagctacacaggcttcatcaaggtgcagctgaagctggtgcggcctgtgtctgtgcccagcagcaagaagccacccagcctgcaggatgcccggcggggccctggccggggcacctctgtgagaagaaggaccagcttctacctgcccaaggatgctgtgaagcacctgcacgtgctgagcaggacccgggcccgggaggtgattgaggccctgctgaggaagttcctggtggtggatgaccccaggaagtttgccctgtttgagcgggcagagagacatggccaggtgtacctgaggaagctgctggatgatgagcagcccctgcggctgcggctgctggccggccccagcgacaaggccctgagctttgtgctgaaggaaaatgacagcggggaggtgaactgggatgccttctccatgcctgagctgcacaacttcctgcgcatcctgcagcgggaggaggaggagcacctgcggcagatcctgcagaagtacagctactgccggcagaagatccaggaggccctgcacgcctgccccctgggctag

SEQ ID NO: 21559 - DNA, 1023 bp, synthetic construct
  misc_feature 1..1023: note = Description of Artificial Sequence: Synthetic coding sequence
  source 1..1023: mol_type = other DNA
atgtctggagagcctgagctgattgagctgcgggagctggccccagctggccgggccgggaaaggaagaacccggctggagcgggccaatgccctgcgcatcgcccggggcacagcctgcaaccccacccggcagctggtgcccggccggggccaccgcttccagcctgctggccctgccacccacacctggtgtgacctgtgtggggacttcatctggggcgtggtgaggaagggcctgcagtgtgcccactgcaagttcacctgccactaccgctgccgggccctggtgtgcctggactgctgcggcccccgggacctgggctgggagcctgctgtggagcgggacaccaacgtggatgagcctgtggagtgggagaccccagacctgagccaggccgagattgagcagaagatcaaggagtacaatgcccagatcaacagcaacctcttcatgagcctgaacaaggatggcagctacacaggcttcatcaaggtgcagctgaagctggtgcggcctgtgtctgtgcccagcagcaagaagccacccagcctgcaggatgcccggcggggccctggccggggcacctctgtgagaagaaggaccagcttctacctgcccaaggatgctgtgaagcacctgcacgtgctgagcaggacccgggcccgggaggtgattgaggccctgctgaggaagttcctggtggtggatgaccccaggaagtttgccctgtttgagcgggcagagagacatggccaggtgtacctgaggaagctgctggatgatgagcagcccctgcggctgcggctgctggccggccccagcgacaaggccctgagctttgtgctgaaggaaaatgacagcggggaggtgaactgggatgccttctccatgcctgagctgcacaacttcctgcgcatcctgcagcgggaggaggaggagcacctgcggcagatcctgcagaagtacagctactgccggcagaagatccaggaggccctgcacgcctgccccctgggctag

SEQ ID NO: 21560 - DNA, 570 bp, synthetic construct
  misc_feature 1..570: note = Description of Artificial Sequence: Synthetic coding sequence
  source 1..570: mol_type = other DNA
atgagcctgaacaaggatggcagctacacaggcttcatcaaggtgcagctgaagctggtgcggcctgtgtctgtgcccagcagcaagaagccacccagcctgcaggatgcccggcggggccctggccggggcacctctgtgagaagaaggaccagcttctacctgcccaaggatgctgtgaagcacctgcacgtgctgagcaggacccgggcccgggaggtgattgaggccctgctgaggaagttcctggtggtggatgaccccaggaagtttgccctgtttgaaagagctgagcggcacggccaggtgtacctgaggaagctgctggatgatgagcagcccctgcggctgcggctgctggccggccccagcgacaaggccctgagctttgtgctgaaggaaaatgattctggagaggtgaactgggatgccttctccatgcctgagctgcacaacttcctgcgcatcctgcagcgggaggaggaggagcacctgcggcagatcctgcagaagtacagctactgccggcagaagatccaggaggccctgcacgcctgccccctgggctag

SEQ ID NO: 21561 - DNA, 981 bp, synthetic construct
  misc_feature 1..981: note = Description of Artificial Sequence: Synthetic coding sequence
  source 1..981: mol_type = other DNA
atggactacagccaccagaccagcctggtgccctgtggccaggacaagtacatcagcaagaatgagctgctgctgcacctgaagacctacaacctgtactatgagggccagaacctgcagctgcggcaccgggaggaggaggatgagttcatcgtggagggcctgctgaacatctcctggggcctgcggcggcccatccggctgcagatgcaggatgacaatgaaagaatccggcccccacccagcagcagctcctggcacagcggctgcaacctgggcgcccagggcaccaccctgaagcccctgactgtgcccaaggtgcagatcagcgaggtggatgcccctcctgagggggaccagatgcccagcagcacagacagccggggcctgaagcccctgcaggaggacaccccccagctgatgaggaccaggagtgatgtgggcgtgagaagaagaggaaatgtgaggacccccagcgaccagaggcgcatcagaagacaccgcttcagcatcaatggccacttctacaaccacaagacctctgtgttcaccccagcctacggctctgtgaccaacgtgcgcatcaacagcaccatgaccaccccccaggtgctgaagctgctgctgaacaagttcaagattgaaaattctgctgaggagtttgccctgtatgtggtgcacaccagcggggagaagcagaagctgaaggccacagactaccccctgattgcccgcatcctgcagggcccctgtgagcagatcagcaaggtgttcctgatggagaaggaccaggtggaggaggtgacctatgatgtggcccagtacatcaagtttgagatgcctgtgctgaagagcttcatccagaagctgcaggaggaggaggaccgggaggtgaagaagctgatgaggaagtacacagtgctgcggctgatgatccggcagaggctggaggagattgctgagaccccagccaccatctag

SEQ ID NO: 21562 - DNA, 981 bp, synthetic construct; identical to SEQ ID NO: 21561
  misc_feature 1..981: note = Description of Artificial Sequence: Synthetic coding sequence
  source 1..981: mol_type = other DNA

SEQ ID NO: 21563 - DNA, 993 bp, synthetic construct
  misc_feature 1..993: note = Description of Artificial Sequence: Synthetic coding sequence
  source 1..993: mol_type = other DNA
atgaaggaggactgcctgcccagcagccacgtgcccatcagtgacagcaagagcatccagaagagagatgtgcagggcctgtctgaggagggcaccctcatcatcgagggcctgctgaacatcgcctggggcctgcggcggcccatccggctgcagatgcaggatgaccgggagcaggtgcacctgcccagcacctcctggatgccccggcggcccagctgccccctgggctgctggagcctgctgctgggcctgagcagcctgagcctgcctgctgccatcagcgccctgcagctgagcgtcttcaggaaggagcccagcccccagaatggaaacatcacagcccagggccccagcatccagcctgtgcacaaggccgagagcagcacagacagcagcggccccctggaggaggccgaggaggccccccagctgatgaggaccaagagtgatgccagctgcatgagccagaggcggcccaagtgccgggcccctggagaggcccagaggatccgccgccaccgcttcagcatcaatggccacttctacaaccacaagaccagcgtcttcaccccagcctacggctctgtgaccaacgtgcgggtgaacagcaccatgaccaccctgcaggtgctgaccctgctgctgaacaagttccgggtggaggatggccccagcgagtttgccctgtacatcgtgcatgagagcggggagaggaccaagctgaaggactgtgagtaccccctcatcagccgcatcctgcacggcccctgtgagaagatcgcccgcatcttcctgatggaggccgacctgggcgtggaggtgccccatgaggtggcccagtacatcaagtttgagatgcctgtgctggacagctttgtggagaagctgaaggaggaggaggagcgggagatcatcaagctgaccatgaagttccaggccctgcggctgaccatgctgcagaggctggagcagctggtggaggccaagtag

SEQ ID NO: 21564 - DNA, 966 bp, synthetic construct
  misc_feature 1..966: note = Description of Artificial Sequence: Synthetic coding sequence
  source 1..966: mol_type = other DNA
atgaaggaggactgcctgcccagcagccacgtgcccatcagtgacagcaagagcatccagaagtctgagctgctgggcctgctgaagacctacaactgctaccacgagggcaagagcttccagctgcggcaccgggaggaggagggcaccctcatcatcgagggcctgctgaacatcgcctggggcctgcggcggcccatccggctgcagatgcaggatgaccgggagcaggtgcacctgcccagcacctcctggatgccccggcggcccagctgccccctgaaggagcccagcccccagaatggaaacatcacagcccagggccccagcatccagcctgtgcacaaggccgagagcagcacagacagcagcggccccctggaggaggccgaggaggccccccagctgatgaggaccaagagtgatgccagctgcatgagccagaggcggcccaagtgccgggcccctggagaggcccagaggatcagaagacaccgcttcagcatcaatggccacttctacaaccacaagacctctgtgttcaccccagcctacggctctgtgaccaacgtgcgggtgaacagcaccatgaccaccctgcaggtgctgaccctgctgctgaacaagttccgggtggaggatggccccagcgagtttgccctgtacatcgtgcatgaaagtggagagaggaccaagctgaaggactgtgagtaccccctcatcagccgcatcctgcacggcccctgtgagaagatcgcccgcatcttcctgatggaggccgacctgggcgtggaggtgccccatgaggtggcccagtacatcaagtttgagatgcctgtgctggacagctttgtggagaagctgaaggaggaggaggagcgggagatcatcaagctgaccatgaagttccaggccctgcggctgaccatgctgcagaggctggagcagctggtggaggccaagtag

SEQ ID NO: 21565 - DNA, 1239 bp, synthetic construct
  misc_feature 1..1239: note = Description of Artificial Sequence: Synthetic coding sequence
  source 1..1239: mol_type = other DNA
ggcagcaatgctgggggcggccagggcggctgccagggcctgacctgtgacagcgagagcgtgggcaccctggacatcctggaccagacccaggcctgccctgtgtccctggccagcagcagcgcccggcccccctgccccccacctggcccctgtgccgagcccagcggctgcatcgccatggctgtgtggagccccctggtgatgcctggccggcgggagggctgctgccacacccctgtgaccaatgaggagacagaggcccgggaggccaagggccagaagctgcggccctgccacaccctgggcgtgcacgtgtgcctgagcctcttccgctctgagctgctgggcctgctgaagacctacaactgctaccacgagggcaagagcttccagctgcggcaccgggaggaggagggcaccctcatcatcgagggcctgctgaacatcgcctggggcctgcggcggcccatccggctgcagatgcaggatgaccgggagcaggtgcacctgcccagcacctcctggatgccccggcggcccagctgccccctgaaggagcccagcccccagaatggaaacatcacagcccagggccccagcatccagcctgtgcacaaggccgagagcagcacagacagcagcggccccctggaggaggccgaggaggccccccagctgatgaggaccaagagtgatgccagctgcatgagccagaggcggcccaagtgccgggcccctggagaggcccagaggatccgccgccaccgcttcagcatcaatggccacttctacaaccacaagaccagcgtcttcaccccagcctacggctctgtgaccaacgtgcgggtgaacagcaccatgaccaccctgcaggtgctgaccctgctgctgaacaagttccgggtggaggatggccccagcgagtttgccctgtacatcgtgcatgagagcggggagaggaccaagctgaaggactgtgagtaccccctcatcagccgcatcctgcacggcccctgtgagaagatcgcccgcatcttcctgatggaggccgacctgggcgtggaggtgccccatgaggtggcccagtacatcaagtttgagatgcctgtgctggacagctttgtggagaagctgaaggaggaggaggagcgggagatcatcaagctgaccatgaagttccaggccctgcggctgaccatgctgcagaggctggagcagctggtggaggccaagtag

SEQ ID NO: 21566 - DNA, 393 bp, synthetic construct
  misc_feature 1..393: note = Description of Artificial Sequence: Synthetic coding sequence
  source 1..393: mol_type = other DNA
atgaaggaggactgcctgcccagcagccacgtgcccatcagtgacagcaagagcatccagaagtctgagctgctgggcctgctgaagacctacaactgctaccacgagggcaagagcttccagctgcggcaccgggaggaggagggcaccctcatcatcgagggcctgctgaacatcgcctggggcctgcggcggcccatccggctgcagatgcaggatgaccgggagcaggtgcacctgcccagcacctcctggatgccccggcggcccagctgccccctgcacctggccggcaagaagggccgcctgcagcccggcggcctgcccacccccatgcaggccgagcacgtgagccccagcctggtgctgagcctgaagttcacccgcatctag

SEQ ID NO: 21567 - DNA, 381 bp, synthetic construct
  misc_feature 1..381: note = Description of Artificial Sequence: Synthetic coding sequence
  source 1..381: mol_type = other DNA
atgaaggaggactgcctgcccagcagccacgtgcccatcagtgacagcaagagcatccagaagtctgagctgctgggcctgctgaagacctacaactgctaccacgagggcaagagcttccagctgcggcaccgggaggaggagggcaccctcatcatcgagggcctgctgaacatcgcctggggcctgcggcggcccatccggctgcagatgcaggatgaccgggagcaggtgcacctgcccagcacctcctggatgccccggcggcccagctgccccctggcccctgggggcggccggggcggccccccagcagatgctgaccaggagcggcggcagctgcacgagcctgaggaggcccaggtgccccggcccaggtag

SEQ ID NO: 21568 - DNA, 456 bp, synthetic construct
  misc_feature 1..456: note = Description of Artificial Sequence: Synthetic coding sequence
  source 1..456: mol_type = other DNA
atgaaggaggactgcctgcccagcagccacgtgcccatcagtgacagcaagagcatccagaagtctgagctgctgggcctgctgaagacctacaactgctaccacgagggcaagagcttccagctgcggcaccgggaggaggagggcaccctcatcatcgagggcctgctgaacatcgcctggggcctgcggcggcccatccggctgcagatgcaggatgaccgggagcaggtgcacctgcccagcacctcctggatgccccggcggcccagctgccccctgggctgctggagcctgctgctgggcctgagcagcctgagcctgcctgctgccatcagcgccctgcagctgagcgtcttcaggaaggagcccagcccccagaatggaaacatcacagcccagggccccagcatccagcctgtgcacaaggccgagagcagcacagacagcagctag

SEQ ID NO: 21569 - DNA, 372 bp, synthetic construct
  misc_feature 1..372: note = Description of Artificial Sequence: Synthetic coding sequence
  source 1..372: mol_type = other DNA
agcagccacgtgcccatcagtgacagcaagagcatccagaagtctgagctgctgggcctgctgaagacctacaactgctaccacgagggcaagagcttccagctgcggcaccgggaggaggagggcaccctcatcatcgagggcctgctgaacatcgcctggggcctgcggcggcccatccggctgcagatgcaggatgaccgggagcaggtgcacctgcccagcacctcctggatgccccggcggcccagctgccccctgcacctggccggcaagaagggccgcctgcagcccggcggcctgcccacccccatgcaggccgagcacgtgagccccagcctggtgctgagcctgaagttcacccgcatctag

SEQ ID NO: 21570 - DNA, 798 bp, synthetic construct
  misc_feature 1..798: note = Description of Artificial Sequence: Synthetic coding sequence
  source 1..798: mol_type = other DNA
atgacagtggacagctccatgagcagcggctactgcagcctggatgaggagctggaggactgcttcttcaccgccaagaccaccttcttcagaaatgcccagagcaagcacctgagcaagaatgtgtgcaagcctgtggaggagacccagaggcctcccaccctgcaggagatcaagcagaagattgacagctacaacacccgggagaagaactgcctgggcatgaagctgtctgaagatggcacctacacaggcttcatcaaggtgcacctgaagctgcggcggcctgtgacagtgcctgctggcatccggccccagagcatctatgatgccatcaaggaggtgaacctggccgccaccacagacaagaggaccagcttctacctgcccctggatgccatcaagcagctgcacatcagcagcaccaccaccgtgtctgaggtgatccagggcctgctgaagaagttcatggtggtggacaacccccagaagtttgccctcttcaagaggatccacaaggatggccaggtgctcttccagaagctgagcattgctgaccggcccctgtacctgcggctgctggccggccctgacacagaggtgctgagctttgtgctgaaggaaaatgaaacaggagaggtggagtgggatgccttcagcatccctgagctgcagaacttcctgaccatcctggagaaggaggagcaggacaagatccagcaggtgcagaagaagtatgacaagttccggcagaagctggaggaggccctgcgggagagccagggcaagccaggatag

SEQ ID NO: 21571 - DNA, 1179 bp, synthetic construct
  misc_feature 1..1179: note = Description of Artificial Sequence: Synthetic coding sequence
  source 1..1179: mol_type = other DNA
atggccatggccagccctgccatcggccagaggccctaccccctgctgctggaccctgagcccccacgctacctgcagagcctgagcggccctgagctgcccccacctcctccagacaggagcagccggctgtgtgtgcctgcccccctgagcacagcccctggggcccgggagggccgcagcgccaggagagctgcccggggcaacctggagcccccaccccgggccagcaggcctgcccggcccctgcggcccggcctgcagcagaggctgcggcggcggcctggggccccccggcccagagatgtgcgcagcatctttgagcagccccaggacccccgggtgcctgctgagcggggggagggccactgctttgctgagctggtgctgcccggcggccctggctggtgtgacctgtgtggccgggaggtgctgcggcaggccctgcgctgcaccaactgcaagttcacctgccacccagaatgtcgcagcctcatccagctggactgcagccagcaggagggcctgagccgggaccggcccagccctgagagcaccctgactgtgaccttcagccagaatgtgtgcaagcctgtggaggagacccagaggcctcccaccctgcaggagatcaagcagaagattgacagctacaacacccgggagaagaactgcctgggcatgaagctgtctgaagatggcacctacacaggcttcatcaaggtgcacctgaagctgcggcggcctgtgacagtgcctgctggcatccggccccagagcatctatgatgccatcaaggaggtgaacctggccgccaccacagacaagaggaccagcttctacctgcccctggatgccatcaagcagctgcacatcagcagcaccaccaccgtgtctgaggtgatccagggcctgctgaagaagttcatggtggtggacaacccccagaagtttgccctcttcaagaggatccacaaggatggccaggtgctcttccagaagctgagcattgctgaccggcccctgtacctgcggctgctggccggccctgacacagaggtgctgagctttgtgctgaaggaaaatgagaccggggaggtggagtgggatgccttcagcatccctgagctgcagaacttcctgagctcctggtgcatccagatctacctgtactactag

SEQ ID NO: 21572 - DNA, 1257 bp, synthetic construct
  misc_feature 1..1257: note = Description of Artificial Sequence: Synthetic coding sequence
  source 1..1257: mol_type = other DNA
atggccatggccagccctgccatcggccagaggccctaccccctgctgctggaccctgagcccccacgctacctgcagagcctgagcggccctgagctgcccccacctcctccagacaggagcagccggctgtgtgtgcctgcccccctgagcacagcccctggggcccgggagggccgcagcgccaggagagctgcccggggcaacctggagcccccaccccgggccagcaggcctgcccggcccctgcggcccggcctgcagcagaggctgcggcggcggcctggggccccccggcccagagatgtgcgcagcatctttgagcagccccaggacccccgggtgcctgctgagcggggggagggccactgctttgctgagctggtgctgcccggcggccctggctggtgtgacctgtgtggccgggaggtgctgcggcaggccctgcgctgcaccaactgcaagttcacctgccacccagaatgtcgcagcctcatccagctggactgcagccagcaggagggcctgagccgggaccggcccagccctgagagcaccctgactgtgaccttcagccagaatgtgtgcaagcctgtggaggagacccagaggcctcccaccctgcaggagatcaagcagaagattgacagctacaacacccgggagaagaactgcctgggcatgaagctgtctgaagatggcacctacacaggcttcatcaaggtgcacctgaagctgcggcggcctgtgacagtgcctgctggcatccggccccagagcatctatgatgccatcaaggaggtgaacctggccgccaccacagacaagaggaccagcttctacctgcccctggatgccatcaagcagctgcacatcagcagcaccaccaccgtgtctgaggtgatccagggcctgctgaagaagttcatggtggtggacaacccccagaagtttgccctcttcaagaggatccacaaggatggccaggtgctcttccagaagctgagcattgctgaccggcccctgtacctgcggctgctggccggccctgacacagaggtgctgagctttgtgctgaaggaaaatgagaccggggaggtggagtgggatgccttcagcatccctgagctgcagaacttcctgaccatcctggagaaggaggagcaggacaagatccagcaggtgcagaagaagtatgacaagttccggcagaagctggaggaggccctgcgggagagccagggcaagccaggatag

SEQ ID NO: 21573 - DNA, 1011 bp, synthetic construct
  misc_feature 1..1011: note = Description of Artificial Sequence: Synthetic coding sequence
  source 1..1011: mol_type = other DNA
atggccatggccagccctgccatcggccagaggccctaccccctgctgctggaccctgagcccccacgctacctgcagagcctgagcggccctgagctgcccccacctcctccagacaggagcagccggctgtgtgtgcctgcccccctgagcacagcccctggggcccgggagggccgcagcgccaggagagctgcccggggcaacctggagcccccaccccgggccagcaggcctgcccggcccctgcggcccggcctgcagcagaggctgcggcggcggcctggggccccccggcccagagatgtgcgcagcatctttgagcagccccaggacccccgggtgcctgctgagcggggggagggccactgctttgctgagctggtgctgcccggcggccctggctggtgtgacctgtgtggccgggaggtgctgcggcaggccctgcgctgcaccaactgcaagttcacctgccacccagaatgtcgcagcctcatccagctggactgcagccagcaggagggcctgagccgggaccggcccagccctgagagcaccctgactgtgaccttcagccagaatgtgtgcaagcctgtggaggagacccagaggcctcccaccctgcaggagatcaagcagaagattgacagctacaacacccgggagaagaactgcctgggcatgaagctgtctgaagatggcacctacacaggcttcatcaaggtgcacctgaagctgcggcggcctgtgacagtgcctgctggcatccggccccagagcatctatgatgccatcaaggaggtgaacctggccgccaccacagacaagaggaccagcttctacctgcccctggatgccatcaagcagctgcacatcagcagcaccaccaccgtgtctgaggtgatccagggcctgctgaagaagttcatggtggtggacaacccccagaagtttgccctcttcaagaggatccacaaggatggccaggtgggctgcctgctgcacccctag

SEQ ID NO: 21574 - DNA, 1182 bp, synthetic construct
  misc_feature 1..1182: note = Description of Artificial Sequence: Synthetic coding sequence
  source 1..1182: mol_type = other DNA
atggccatggccagccctgccatcggccagaggccctaccccctgctgctggaccctgagcccccacgctacctgcagagcctgagcggccctgagctgcccccacctcctccagacaggagcagccggctgtgtgtgcctgcccccctgagcacagcccctggggcccgggagggccgcagcgccaggagagctgcccggggcaacctggagcccccaccccgggccagcaggcctgcccggcccctgcggcccggcctgcagcagaggctgcggcggcggcctggggccccccggcccagagatgtgcgcagcatctttgagcagccccaggacccccgggtgcctgctgagcggggggagggccactgctttgctgagctggtgctgcccggcggccctggctggtgtgacctgtgtggccgggaggtgctgcggcaggccctgcgctgcaccaactgcaagttcacctgccacccagaatgtcgcagcctcatccagctggactgcagccagcaggagggcctgagccgggaccggcccagccctgagagcaccctgactgtgaccttcagccagaatgtgtgcaagcctgtggaggagacccagaggcctcccaccctgcaggagatcaagcagaagattgacagctacaacacccgggagaagaactgcctgggcatgaagctgtctgaagatggcacctacacaggcttcatcaaggtgcacctgaagctgcggcggcctgtgacagtgcctgctggcatccggccccagagcatctatgatgccatcaaggaggtgaacctggccgccaccacagacaagaggaccagcttctacctgcccctggatgccatcaagcagctgcacatcagcagcaccaccaccgtgtctgaggtgatccagggcctgctgaagaagttcatggtggtggacaacccccagaagtttgccctcttcaagaggatccacaaggatggccaggtgctcttccagaagctgagcattgctgaccggcccctgtacctgcggctgctggccggccctgacacagaggtgctgagctttgtgctgaaggaaaatgagaccggggaggtggagtgggatgccttcagcatccctgagctgcagaacttcttcctgagctcctggtgcatccagatctacctgtactactag

SEQ ID NO: 21575 - DNA, 555 bp, synthetic construct
  misc_feature 1..555: note = Description of Artificial Sequence: Synthetic coding sequence
  source 1..555: mol_type = other DNA
atgccccagagcaagagcaggaagatcgccatcctgggctacagatctgtgggcaagagcagcctgaccatccagtttgtggagggccagtttgtggacagctatgaccccaccatcgagaacaccttcaccaagctgatcaccgtgaatggccaggagtaccacctgcagctggtggacacagctggccaggatgagtacagcatcttcccccagacctacagcattgacatcaatggctacatcctggtgtacagcgtgaccagcatcaagagctttgaagtcatcaaggtgatccacggcaagctgctggacatggtgggcaaggtgcagatccccatcatgctggtgggcaacaagaaggacctgcacatggagagggtcatctcctatgaggagggcaaggccctggccgagagctggaatgctgccttcctggagagcagcgccaaggagaaccagacagctgtggatgtgttccgccgcatcatcctggaggccgagaagatggatggagctgccagccagggcaagagcagctgcagcgtgatgtag

SEQ ID NO: 21576 - DNA, 582 bp, synthetic construct
  misc_feature 1..582: note = Description of Artificial Sequence: Synthetic coding sequence
  source 1..582: mol_type = other DNA
atggccgccatcaggaagaagctggtgattgtgggagatggagcctgtgggaagacctgcctgctgattgtgttcagcaaggaccagtttcctgaggtgtatgtgcccaccgtgtttgagaactacgtggccgacatcgaggtggatggcaagcaggtggagctggccctgtgggacacagctggccaggaggactatgaccggctgcggcccctgagctacccagacacagatgtgatcctgatgtgcttcagcattgacagcccagacagcctggagaacatccctgagaagtggaccccagaggtgaagcacttctgccccaacgtgcccatcatcctggtgggcaacaagaaggacctgagaaatgatgagcacacccggcgggagctggccaagatgaagcaggagcctgtgaagccagaggagggccgggacatggccaacagaattggagccttcggctacatggagtgcagcgccaagaccaaggatggagtgcgggaggtgtttgagatggccaccagggctgccctgcaggcccggcggggcaagaagaagagcggctgcctggtgctgtag

SEQ ID NO: 21577 - DNA, 591 bp, synthetic construct
  misc_feature 1..591: note = Description of Artificial Sequence: Synthetic coding sequence
  source 1..591: mol_type = other DNA
atggccgccatcaggaagaagctggtggtggtgggagatggagcctgtgggaagacctgcctgctgattgtgttcagcaaggatgagttccctgaggtgtatgtgcccaccgtgtttgagaactacgtggccgacatcgaggtggatggcaagcaggtggagctggccctgtgggacacagctggccaggaggactatgaccggctgcggcccctgagctacccagacacagatgtgatcctgatgtgcttctctgtggacagcccagacagcctggagaacatccctgagaagtgggtgcctgaggtgaagcacttctgccccaacgtgcccatcatcctggtggccaacaagaaggacctgcggagtgatgagcacgtgaggacagagctggccaggatgaagcaggagcctgtgaggacagatgatggccgggccatggctgtgcgcatccaggcctatgactacctggagtgcagcgccaagaccaaggagggcgtgcgggaggtgtttgaaacagccaccagggctgccctgcagaagagatatggcagccagaatggctgcatcaactgctgcaaggtgctgtag

SEQ ID NO: 21578 - DNA, 582 bp, synthetic construct
  misc_feature 1..582: note = Description of Artificial Sequence: Synthetic coding sequence
  source 1..582: mol_type = other DNA
atggccgccatcaggaagaagctggtgattgtgggagatggagcctgtgggaagacctgcctgctgattgtgttcagcaaggaccagtttcctgaggtgtatgtgcccaccgtgtttgagaactacatcgctgacatcgaggtggatggcaagcaggtggagctggccctgtgggacacagctggccaggaggactatgaccggctgcggcccctgagctacccagacacagatgtgatcctgatgtgcttcagcattgacagcccagacagcctggagaacatccctgagaagtggaccccagaggtgaagcacttctgccccaacgtgcccatcatcctggtgggcaacaagaaggacctgcggcaggatgagcacacccggcgggagctggccaagatgaagcaggagcctgtgcgctctgaggagggccgggacatggccaaccgcatcagcgccttcggctacctggagtgcagcgccaagaccaaggagggcgtgcgggaggtgtttgagatggccaccagggctggcctgcaggtgaggaagaacaagagaagaagaggctgccccatcctgtag

SEQ ID NO: 21579 - DNA, 582 bp, synthetic construct; identical to SEQ ID NO: 21578
  misc_feature 1..582: note = Description of Artificial Sequence: Synthetic coding sequence
  source 1..582: mol_type = other DNA

SEQ ID NO: 21580 - DNA, 582 bp, synthetic construct; identical to SEQ ID NO: 21578
  misc_feature 1..582: note = Description of Artificial Sequence: Synthetic coding sequence
  source 1..582: mol_type = other DNA

SEQ ID NO: 21581 - DNA, 582 bp, synthetic construct; identical to SEQ ID NO: 21578
  misc_feature 1..582: note = Description of Artificial Sequence: Synthetic coding sequence
  source 1..582: mol_type = other DNA

SEQ ID NO: 21582 - DNA, 600 bp, synthetic construct
  misc_feature 1..600: note = Description of Artificial Sequence: Synthetic coding sequence
  source 1..600: mol_type = other DNA
atggccgccatcaggaagaagctggtgattgtgggagatggagcctgtgggaagacctgcctgctgattgtgttcagcaaggaccagtttcctgaggtgtatgtgcccaccgtgtttgagaactacatcgctgacatcgaggtggatggcaagcaggtggagctggccctgtgggacacagctggccaggaggactatgaccggctgcggcccctgagctacccagacacagatgtgatcctgatgtgcttcagcattgacagcccagacagcctggagaacatccctgagaagtggaccccagaggtgaagcacttctgccccaacgtgcccatcatcctggtgggcaacaagaaggacctgaggaaggccggcacctggaggactggatctgtgcccctggccaccctgagcgcccagccccggccccggcgggagtgtggccgctgcctgcgctggcccctgggcctggccagccgcagcgcccggacctctgtgggcggcgctgtgcccttcagcgagatccccaaggccttccccacctgccccctgcccagccagggctacagaaactacccacccaccaccccagccagctag

SEQ ID NO: 21583 - DNA, 582 bp, synthetic construct; identical to SEQ ID NO: 21578
  misc_feature 1..582: note = Description of Artificial Sequence: Synthetic coding sequence
  source 1..582: mol_type = other DNA

SEQ ID NO: 21584 - DNA, 582 bp, synthetic construct; identical to SEQ ID NO: 21578
  misc_feature 1..582: note = Description of Artificial Sequence: Synthetic coding sequence
  source 1..582: mol_type = other DNA

SEQ ID NO: 21585 - DNA, 582 bp, synthetic construct; identical to SEQ ID NO: 21578
  misc_feature 1..582: note = Description of Artificial Sequence: Synthetic coding sequence
  source 1..582: mol_type = other DNA

SEQ ID NO: 21586 - DNA, 279 bp, synthetic construct
  misc_feature 1..279: note = Description of Artificial Sequence: Synthetic coding sequence
  source 1..279: mol_type = other DNA
atggccgccatcaggaagaagctggtgattgtgggagatggagcctgtgggaagacctgcctgctgattgtgttcagcaaggaccagtttcctgaggtgtatgtgcccaccgtgtttgagaactacatcgctgacatcgaggtggatggcaagcaggtggagctggccctgtgggacacagctggccaggaggactatgaccggctgcggcccctgagctacccagacacagatgtgatcctgatgtgcttcagcattgacagcccagacagcctgtag

SEQ ID NO: 21587 - DNA, 570 bp, synthetic construct
  misc_feature 1..570: note = Description of Artificial Sequence: Synthetic coding sequence
  source 1..570: mol_type = other DNA
atggccgccatcaggaagaagctggtgattgtgggagatggagcctgtgggaagacctgcctgctgattgtgttcagcaaggaccagtttcctgaggtgtatgtgcccaccgtgtttgagaactacatcgctgacatcgaggtggatggcaagcaggtggagctggccctgtgggacacagctggccaggaggactatgaccggctgcggcccctgagctacccagacacagatgtgatcctgatgtgcttcagcattgacagcccagacagcctggagaacatccctgagaagtggaccccagaggtgaagcacttctgccccaacgtgcccatcatcctggtgggcaacaagaaggacctgcggcaggatgagcacacccggcgggagctggccaagatgaagcaggagcctgtgcgctctgaggagggccgggacatggccaaccgcatcagcgccttcggctacctggagtgcagcgccaagaccaaggagggcgtgcgggaggtgtttgagatggccaccagggctggcctgcaggtgaggaagaacaagagaagaagaggatag

SEQ ID NO: 21588 - DNA, 384 bp, synthetic construct
  misc_feature 1..384: note = Description of Artificial Sequence: Synthetic coding sequence
  source 1..384: mol_type = other DNA
atggccgccatcaggaagaagctggtgattgtgggagatggagcctgtgggaagacctgcctgctgattgtgttcagcaaggaccagtttcctgaggtgtatgtgcccaccgtgtttgagaactacatcgctgacatcgaggtggatggcaagcaggtggagctggccctgtgggacacagctggccaggaggactatgaccggctgcggcccctgagctacccagacacagatgtgatcctgatgtgcttcagcattgacagcccagacagcctggagaacatccctgagaagtggaccccagaggtgaagcacttctgccccaacgtgcccatcatcctggtgggcaacaagaaggacctgcggcaggatgagcacacctag

SEQ ID NO: 21589 - DNA, 690 bp, synthetic construct
  misc_feature 1..690: note = Description of Artificial Sequence: Synthetic coding sequence
  source 1..690: mol_type = other DNA
atggtgtccatctctggaggagacctgcccaccggcctggacttcatcagcgcccctgagcccgccctgagcagctgcagcctgggcaccagcgctggctggagccccaccatggccgccatcaggaagaagctggtgattgtgggagatggagcctgtgggaagacctgcctgctgattgtgttcagcaaggaccagtttcctgaggtgtatgtgcccaccgtgtttgagaactacatcgctgacatcgaggtggatggcaagcaggtggagctggccctgtgggacacagctggccaggaggactatgaccggctgcggcccctgagctacccagacacagatgtgatcctgatgtgcttcagcattgacagcccagacagcctggagaacatccctgagaagtggaccccagaggtgaagcacttctgccccaacgtgcccatcatcctggtgggcaacaagaaggacctgcggcaggatgagcacacccggcgggagctggccaagatgaagcaggagcctgtgcgctctgaggagggccgggacatggccaaccgcatcagcgccttcggctacctggagtgcagcgccaagaccaaggagggcgtgcgggaggtgtttgagatggccacccgggccggcctgcaggtgaggaagaacaagagaagaagaggctgccccatctag

SEQ ID NO: 21590 - DNA, 510 bp, synthetic construct
  misc_feature 1..510: note = Description of Artificial Sequence: Synthetic coding sequence
  source 1..510: mol_type = other DNA
atggccgccatcaggaagaagctggtgattgtgggagatggagcctgtgggaagacctgcctgctgattgtgttcagcaaggaccagtttcctgaggtgtatgtgcccaccgtgtttgagaactacatcgctgacatcgaggtggatggcaagcaggtggagctggccctgtgggacacagctggccaggaggactatgaccggctgcggcccctgagctacccagacacagatgtgatcctgatgtgcttcagcattgacagcccagacagcctggagaacatccctgagaagtggaccccagaggtgaagcacttctgccccaacgtgcccatcatcctggtgggcaacaagaaggacctgcggcaggatgagcacacccggcgggagctggccaagatgaagcaggagcctgtgcgctctgaggagggccgggacatggccaaccgcatcagcgccttcggctacctggagtgcagcgccaagaccaaggagggcgtgcgggagtag

SEQ ID NO: 21591 - DNA, 3144 bp, synthetic construct
  misc_feature 1..3144: note = Description of Artificial Sequence: Synthetic coding sequence
  source 1..3144: mol_type = other DNA
atgatggctgctgaggccggcagcgaggagggcggccctgtgacagctggggccggcggcggcggcgctgctgctggcagcagcgcctacccagctgtgtgccgggtgaagatcccagctgccctgcctgtggccgccgccccctacccaggcctggtggagactggagtggccggcaccctgggcggcggggccgccctgggcagcgagttcctgggcgccggctctgtggccggggccctgggcggggccggcctgactggaggcggcacagctgctggggtggccggggctgctgctggggtggccggggctgctgtggccggccccagcggggacatggccctgaccaagctgcccaccagcctgctggccgagaccctgggccctgggggcggcttcccccccctgcccccaccaccctacctgccccccctgggcgccggcctgggcaccgtggatgaaggagacagcctggatggcccagaatatgaggaggaggaggtggccatccccctgacagccccacccaccaaccagtggtaccacggcaagctggacaggaccatcgccgaggagcggctgcggcaggccggcaagagcggcagctacctgatccgggagagtgacagaagacctggcagctttgtgctgtccttcctgagccagatgaatgtggtgaaccacttccgcatcatcgccatgtgtggggactactacatcggcggccgccgcttcagcagcctgagtgacctgattggctactacagccacgtgtcctgcctgctgaagggggagaagctgctgtaccctgtggcccctcctgagcctgtggaggacagaagaagagtgcgggccatcctgccctacaccaaggtgcctgacacagatgagatctccttcctgaagggggacatgttcatcgtgcacaatgagctggaggatggctggatgtgggtgaccaacctgaggacagatgagcagggcctgattgtggaggacctggtggaggaggtgggccgggaggaggacccccatgagggcaagatctggttccacggcaagatcagcaagcaggaggcctacaacctgctgatgacagtgggccaggtgtgcagcttcctggtgcggcccagcgacaacacccctggggactacagcctgtacttccgcaccaatgaaaacatccagcgcttcaagatctgccccacccccaacaaccagttcatgatgggcggccgctactacaacagcattggagacatcatcgaccactacaggaaggagcagatcgtggagggctactacctgaaggagcctgtgcccatgcaggaccaggagcaggtgctgaatgacacagtggatggcaaggagatctacaacaccatccggaggaagaccaaggatgccttctacaagaacatcgtgaagaagggctacctgctgaagaagggcaagggcaagcgctggaagaacctgtacttcatcctggagggcagtgatgcccagctgatctactttgaaagtgagaagagggccaccaagcccaagggcctgattgacctgtctgtgtgcagcgtgtatgtggtgcatgacagcctgtttggccggcccaactgcttccagatcgtggtgcagcacttcagcgaggagcactacatcttctactttgctggggagaccccagagcaggccgaggactggatgaagggcctgcaggccttctgcaacctgaggaagagcagccctggcaccagcaacaagaggctgcggcaggtgagcagcctggtgctgcacatcgaggaggcccacaagctgcctgtgaagcacttcaccaacccctactgcaacatctacctgaacagcgtgcaggtggccaagacccacgcccgggagggccagaaccctgtgtggagcgaggagtttgtgtttgatgacctgcccccagacatcaacagatttgagatcaccctgagcaacaagaccaagaagagcaaggaccctgacatcctcttcatgcgctgccagctgagccggctgcagaagggccacgccacagatgagtggttcctgctgagcagccacatccccctgaagggcatcgagcccggcagcctgcgggtgcgggcccgctacagcatggagaagatcatgcctgaggaggagtacagcgagttcaaggagctgatcctgcagaaggagctgcacgtggtgtatgccctgagccacgtgtgtggccaggacaggaccctgctggccagcatcctgctgcgcatcttcctgcacgagaagctggagagcctgctgctgtgcaccctgaatgaccgggagatctccatggaggatgaggccaccaccctcttccgggccaccaccctggccagcaccctgatggagcagtacatgaaggccacagccacccagtttgtgcaccacgccctgaaggacagcatcctgaagatcatggagagcaagcagagctgtgagctgagccccagcaagctggagaagaatgaagatgtgaacaccaacctgacccacctgctgaacatcctgtctgagctggtggagaagatcttcatggccagcgagatcctgccccccaccctgcgctacatctacggctgcctgcagaagtctgtgcagcacaagtggcccaccaacaccaccatgaggaccagggtggtgtctggctttgtgttcctgcggctcatctgcccagccatcctgaaccccaggatgttcaacatcatcagtgacagccccagccccatcgccgcccggaccctcatcctggtggccaagtctgtgcagaacctggccaacctggtggagtttggagccaaggagccctacatggagggcgtgaaccccttcatcaagagcaacaagcacaggatgatcatgttcctggatgagctgggcaatgtgcctgagctgcctgacaccacagagcacagcaggacagacctgagccgggacctggccgccctgcacgagatctgtgtggcccacagtgatgagctgcggaccctgagcaatgaaagaggagcccagcagcacgtgctgaagaagctgctggccatcacagagctgctgcagcagaagcagaaccagtacaccaagaccaatgatgtgaggtag

SEQ ID NO: 21592 - DNA, 2613 bp, synthetic construct
  misc_feature 1..2613: note = Description of Artificial Sequence: Synthetic coding sequence
  source 1..2613: mol_type = other DNA
atgaagggctggtaccacggcaagctggacaggaccatcgccgaggagcggctgcggcaggccggcaagagcggcagctacctgatccgggagagtgaccggcggcccggcagctttgtgctgtccttcctgagccagatgaatgtggtgaaccacttccgcatcatcgccatgtgtggggactactacatcggcggccgccgcttcagcagcctgagtgacctgattggctactacagccacgtgtcctgcctgctgaagggggagaagctgctgtaccctgtggcccctcctgagcctgtggaggacagaagaagagtgcgggccatcctgccctacaccaaggtgcctgacacagatgagatctccttcctgaagggggacatgtttattgtgcacaatgagctggaggatggctggatgtgggtgaccaacctgaggacagatgagcagggcctcatcgtggaggacctggtggaggaggtgggccgggaggaggacccccatgagggcaagatctggttccacggcaagatcagcaagcaggaggcctacaacctgctgatgacagtgggccaggtgtgcagcttcctggtgcggcccagcgacaacacccctggggactacagcctgtacttccgcaccaatgaaaacatccagcgcttcaagatctgccccacccccaacaaccagttcatgatgggcggccgctactacaacagcatcggggacatcatcgaccactacaggaaggagcagatcgtggagggctactacctgaaggagcctgtgcccatgcaggaccaggagcaggtgctgaatgacacagtggatggcaaggagatctacaacaccatccggaggaagaccaaggatgccttctacaagaacatcgtgaagaagggctacctgctgaagaagggcaagggcaagcgctggaagaacctgtacttcatcctggagggcagtgatgcccagctgatctactttgagagcgagaagagggccaccaagcccaagggcctgattgacctgtctgtgtgcagcgtgtatgtggtgcatgacagcctgtttggccggcccaactgcttccagatcgtggtgcagcacttcagcgaggagcactacatcttctactttgctggggagaccccagagcaggccgaggactggatgaagggcctgcaggccttctgcaacctgaggaagagcagccctggcaccagcaacaagaggctgcggcaggtgagcagcctggtgctgcacatcgaggaggcccacaagctgcctgtgaagcacttcaccaacccctactgcaacatctacctgaacagcgtgcaggtggccaagacccacgcccgggagggccagaaccctgtgtggagcgaggagtttgtgtttgatgacctgcccccagacatcaacagatttgagatcaccctgagcaacaagaccaagaagagcaaggaccctgacatcctcttcatgcgctgccagctgagccggctgcagaagggccacgccacagatgagtggttcctgctgagcagccacatccccctgaagggcatcgagcccggcagcctgcgggtgcgggcccgctacagcatggagaagatcatgcctgaggaggagtacagcgagttcaaggagctgatcctgcagaaggagctgcacgtggtgtatgccctgagccacgtgtgtggccaggacaggaccctgctggccagcatcctgctgcgcatcttcctgcacgagaagctggagagcctgctgctgtgcaccctgaatgaccgggagatctccatggaggatgaggccaccaccctcttccgggccaccaccctggccagcaccctgatggagcagtacatgaaggccacagccacccagtttgtgcaccacgccctgaaggacagcatcctgaagatcatggagagcaagcagagctgtgagctgagccccagcaagctggagaagaatgaagatgtgaacaccaacctgacccacctgctgaacatcctgtctgagctggtggagaagatcttcatggccagcgagatcctgccccccaccctgcgctacatctacggctgcctgcagaagtctgtgcagcacaagtggcccaccaacaccaccatgaggaccagggtggtgtctggctttgtgttcctgcggctcatctgcccagccatcctgaaccccaggatgttcaacatcatcagtgacagccccagccccatcgccgcccggaccctcatcctggtggccaagtctgtgcagaacctggccaacctggtggagtttggagccaaggagccctacatggagggcgtgaaccccttcatcaagagcaacaagcacaggatgatcatgttcctggatgagctgggcaatgtgcctgagctgcctgacaccacagagcacagcaggacagacctgagccgggacctggccgccctgcacgagatctgtgtggcccacagtgatgagctgcggaccctgagcaatgaaagaggagcccagcagcacgtgctgaagaagctgctggccatcacagagctgctgcagcagaagcagaaccagtacaccaagaccaatgatgtgaggtag

SEQ ID NO: 21593 - DNA, 2646 bp, synthetic construct
  misc_feature 1..2646: note = Description of Artificial Sequence: Synthetic coding sequence
  source 1..2646: mol_type = other DNA
atgtgcctggtgaagtcctggttcctgagcatccgcagccgctggtaccacggcaagctggacaggaccatcgccgaggagcggctgcggcaggccggcaagagcggcagctacctgatccgggagagtgacagaagacctggcagctttgtgctgtccttcctgagccagatgaatgtggtgaaccacttccgcatcatcgccatgtgtggggactactacatcggcggccgccgcttcagcagcctgagtgacctgattggctactacagccacgtgtcctgcctgctgaagggggagaagctgctgtaccctgtggcccctcctgagcctgtggaggacagaagaagagtgcgggccatcctgccctacaccaaggtgcctgacacagatgagatctccttcctgaagggggacatgttcatcgtgcacaatgagctggaggatggctggatgtgggtgaccaacctgaggacagatgagcagggcctgattgtggaggacctggtggaggaggtgggccgggaggaggacccccatgagggcaagatctggttccacggcaagatcagcaagcaggaggcctacaacctgctgatgacagtgggccaggtgtgcagcttcctggtgcggcccagcgacaacacccctggggactacagcctgtacttccgcaccaatgaaaacatccagcgcttcaagatctgccccacccccaacaaccagttcatgatgggcggccgctactacaacagcattggagacatcatcgaccactacaggaaggagcagatcgtggagggctactacctgaaggagcctgtgcccatgcaggaccaggagcaggtgctgaatgacacagtggatggcaaggagatctacaacaccatccggaggaagaccaaggatgccttctacaagaacatcgtgaagaagggctacctgctgaagaagggcaagggcaagcgctggaagaacctgtacttcatcctggagggcagtgatgcccagctgatctactttgaaagtgagaagagggccaccaagcccaagggcctgattgacctgtctgtgtgcagcgtgtatgtggtgcatgacagcctgtttggccggcccaactgcttccagatcgtggtgcagcacttcagcgaggagcactacatcttctactttgctggggagaccccagagcaggccgaggactggatgaagggcctgcaggccttctgcaacctgaggaagagcagccctggcaccagcaacaagaggctgcggcaggtgagcagcctggtgctgcacatcgaggaggcccacaagctgcctgtgaagcacttcaccaacccctactgcaacatctacctgaacagcgtgcaggtggccaagacccacgcccgggagggccagaaccctgtgtggagcgaggagtttgtgtttgatgacctgcccccagacatcaacagatttgagatcaccctgagcaacaagaccaagaagagcaaggaccctgacatcctcttcatgcgctgccagctgagccggctgcagaagggccacgccacagatgagtggttcctgctgagcagccacatccccctgaagggcatcgagcccggcagcctgcgggtgcgggcccgctacagcatggagaagatcatgcctgaggaggagtacagcgagttcaaggagctgatcctgcagaaggagctgcacgtggtgtatgccctgagccacgtgtgtggccaggacaggaccctgctggccagcatcctgctgcgcatcttcctgcacgagaagctggagagcctgctgctgtgcaccctgaatgaccgggagatctccatggaggatgaggccaccaccctcttccgggccaccaccctggccagcaccctgatggagcagtacatgaaggccacagccacccagtttgtgcaccacgccctgaaggacagcatcctgaagatcatggagagcaagcagagctgtgagctgagccccagcaagctggagaagaatgaagatgtgaacaccaacctgacccacctgctgaacatcctgtctgagctggtggagaagatcttcatggccagcgagatcctgccccccaccctgcgctacatctacggctgcctgcagaagtctgtgcagcacaagtggcccaccaacaccaccatgaggaccagggtggtgtctggctttgtgttcctgcggctcatctgcccagccatcctgaaccccaggatgttcaacatcatcagtgacagccccagccccatcgccgcccggaccctcatcctggtggccaagtctgtgcagaacctggccaacctggtggagtttggagccaaggagccctacatggagggcgtgaaccccttcatcaagagcaacaagcacaggatgatcatgttcctggatgagctgggcaatgtgcctgagctgcctgacaccacagagcacagcaggacagacctgagccgggacctggccgccctgcacgagatctgtgtggcccacagtgatgagctgcggaccctgagcaatgaaagaggagcccagcagcacgtgctgaagaagctgctggccatcacagagctgctgcagcagaagcagaaccagtacaccaagaccaatgatgtgaggtag

SEQ ID NO: 21594 - DNA, 2643 bp, synthetic construct
  misc_feature 1..2643: note = Description of Artificial Sequence: Synthetic coding sequence
  source 1..2643: mol_type = other DNA
atgaggacaggctacagctctgtgcccagcaagctgcgctggtaccacggcaagctggacaggaccatcgccgaggagcggctgcggcaggccggcaagagcggcagctacctgatccgggagagtgaccggcggcccggcagctttgtgctgtccttcctgagccagatgaatgtggtgaaccacttccgcatcatcgccatgtgtggggactactacatcggcggccgccgcttcagcagcctgagtgacctgattggctactacagccacgtgtcctgcctgctgaagggggagaagctgctgtaccctgtggcccctcctgagcctgtggaggacagaagaagagtgcgggccatcctgccctacaccaaggtgcctgacacagatgagatctccttcctgaagggggacatgtttattgtgcacaatgagctggaggatggctggatgtgggtgaccaacctgaggacagatgagcagggcctcatcgtggaggacctggtggaggaggtgggccgggaggaggacccccatgagggcaagatctggttccacggcaagatcagcaagcaggaggcctacaacctgctgatgacagtgggccaggtgtgcagcttcctggtgcggcccagcgacaacacccctggggactacagcctgtacttccgcaccaatgaaaacatccagcgcttcaagatctgccccacccccaacaaccagttcatgatgggcggccgctactacaacagcatcggggacatcatcgaccactacaggaaggagcagatcgtggagggctactacctgaaggagcctgtgcccatgcaggaccaggagcaggtgctgaatgacacagtggatggcaaggagatctacaacaccatccggaggaagaccaaggatgccttctacaagaacatcgtgaagaagggctacctgctgaagaagggcaagggcaagcgctggaagaacctgtacttcatcctggagggcagtgatgcccagctgatctactttgagagcgagaagagggccaccaagcccaagggcctgattgacctgtctgtgtgcagcgtgtatgtggtgcatgacagcctgtttggccggcccaactgcttccagatcgtggtgcagcacttcagcgaggagcactacatcttctactttgctggggagaccccagagcaggccgaggactggatgaagggcctgcaggccttctgcaacctgaggaagagcagccctggcaccagcaacaagaggctgcggcaggtgagcagcctggtgctgcacatcgaggaggcccacaagctgcctgtgaagcacttcaccaacccctactgcaacatctacctgaacagcgtgcaggtggccaagacccacgcccgggagggccagaaccctgtgtggagcgaggagtttgtgtttgatgacctgcccccagacatcaacagatttgagatcaccctgagcaacaagaccaagaagagcaaggaccctgacatcctcttcatgcgctgccagctgagccggctgcagaagggccacgccacagatgagtggttcctgctgagcagccacatccccctgaagggcatcgagcccggcagcctgcgggtgcgggcccgctacagcatggagaagatcatgcctgaggaggagtacagcgagttcaaggagctgatcctgcagaaggagctgcacgtggtgtatgccctgagccacgtgtgtggccaggacaggaccctgctggccagcatcctgctgcgcatcttcctgcacgagaagctggagagcctgctgctgtgcaccctgaatgaccgggagatctccatggaggatgaggccaccaccctcttccgggccaccaccctggccagcaccctgatggagcagtacatgaaggccacagccacccagtttgtgcaccacgccctgaaggacagcatcctgaagatcatggagagcaagcagagctgtgagctgagccccagcaagctggagaagaatgaagatgtgaacaccaacctgacccacctgctgaacatcctgtctgagctggtggagaagatcttcatggccagcgagatcctgccccccaccctgcgctacatctacggctgcctgcagaagtctgtgcagcacaagtggcccaccaacaccaccatgaggaccagggtggtgtctggctttgtgttcctgcggctcatctgcccagccatcctgaaccccaggatgttcaacatcatcagtgacagccccagccccatcgccgcccggaccctcatcctggtggccaagtctgtgcagaacctggccaacctggtggagtttggagccaaggagccctacatggagggcgtgaaccccttcatcaagagcaacaagcacaggatgatcatgttcctggatgagctgggcaatgtgcctgagctgcctgacaccacagagcacagcaggacagacctgagccgggacctggccgccctgcacgagatctgtgtggcccacagtgatgagctgcggaccctgagcaatgaaagaggagcccagcagcacgtgctgaagaagctgctggccatcacagagctgctgcagcagaagcagaaccagtacaccaagaccaatgatgtgaggtag

SEQ ID NO: 21595 - DNA, 2616 bp, synthetic construct
  misc_feature 1..2616: note = Description of Artificial Sequence: Synthetic coding sequence
  source 1..2616: mol_type = other DNA
cggggagatgccagcggctggggctgcagcgagcccggccctgggggcccctggggcagccgggccggccgggtgggccagagccgggccggcttcaacatgatggctgctgaggccggcagcgaggagggcggccctgtgacagctggagctgggggcggcggcgctgctgctggcagcagcgcctacccagctgtgtgccgggtgaagatcccagctgccctgcctgtggccgccgccccctacccaggcctggtggagaccggggtggccggcaccctgggcggcggggccgccctgggcagcgagttcctgggcgccggctctgtggccggggccctgggcggggccggcctgaccggcggcggcacagctgctggggtggccggggctgctgctggggtggccggggctgctgtggccggccccagcggggacatggccctgaccaagctgcccaccagcctgctggccgagaccctgggccctgggggcggcttcccccccctgcccccaccaccctacctgccccccctgggcgccggcctgggcaccgtggatgaaggagacagcctggatggcccagaatatgaggaggaggaggtggccatccccctgacagccccacccaccaaccagtggtaccacggcaagctggacaggaccatcgccgaggagcggctgcggcaggccggcaagagcggcagctacctgatccgggagagtgaccggcggcccggcagctttgtgctgtccttcctgagccagatgaatgtggtgaaccacttccgcatcatcgccatgtgtggggactactacatcggcggccgccgcttcagcagcctgagtgacctgattggctactacagccacgtgtcctgcctgctgaagggggagaagctgctgtaccctgtggcccctcctgagcctgtggaggacagaagaagagtgcgggccatcctgccctacaccaaggtgcctgacacagatgagatctccttcctgaagggggacatgtttattgtgcacaatgagctggaggatggctggatgtgggtgaccaacctgaggacagatgagcagggcctcatcgtggaggacctggtggaggaggtgggccgggaggaggacccccatgagggcaagatctggttccacggcaagatcagcaagcaggaggcctacaacctgctgatgacagtgggccaggtgtgcagcttcctggtgcggcccagcgacaacacccctggggactacagcctgtacttccgcaccaatgaaaacatccagcgcttcaagatctgccccacccccaacaaccagttcatgatgggcggccgctactacaacagcatcggggacatcatcgaccactacaggaaggagcagatcgtggagggctactacctgaaggagcctgtgcccatgcaggaccaggagcaggtgctgaatgacacagtggatggcaaggagatctacaacaccatccggaggaagaccaaggatgccttctacaagaacatcgtgaagaagggctacctgctgaagaagggcaagggcaagcgctggaagaacctgtacttcatcctggagggcagtgatgcccagctgatctactttgagagcgagaagagggccaccaagcccaagggcctgattgacctgtctgtgtgcagcgtgtatgtggtgcatgacagcctgtttggccggcccaactgcttccagatcgtggtgcagcacttcagcgaggagcactacatcttctactttgctggggagaccccagagcaggccgaggactggatgaagggcctgcaggccttctgcaacctgaggaagagcagccctggcaccagcaacaagaggctgcggcaggtgagcagcctggtgctgcacatcgaggaggcccacaagctgcctgtgaagcacttcaccaacccctactgcaacatctacctgaacagcgtgcaggtggccaagacccacgcccgggagggccagaaccctgtgtggagcgaggagtttgtgtttgatgacctgcccccagacatcaacagatttgagatcaccctgagcaacaagaccaagaagagcaaggaccctgacatcctcttcatgcgctgccagctgagccggctgcagaagggccacgccacagatgagtggttcctgctgagcagccacatccccctgaagggcatcgagcccggcagcctgcgggtgcgggcccgctacagcatggagaagatcatgcctgaggaggagtacagcgagttcaaggagctgatcctgcagaaggagctgcacgtggtgtatgccctgagccacgtgtgtggccaggacaggaccctgctggccagcatcctgctgcgcatcttcctgcacgagaagctggagagcctgctgctgtgcaccctgaatgaccgggagatctccatggaggatgaggccaccaccctcttccgggccaccaccctggccagcaccctgatggagcagtacatgaaggccacagccacccagtttgtgcaccacgccctgaaggacagcatcctgaagatcatggagagcaagcagagctgtgagctgagcagcagcaagctgcagaaggcctag

SEQ ID NO: 21596 - DNA, 1161 bp, synthetic construct
  misc_feature 1..1161: note = Description of Artificial Sequence: Synthetic coding sequence
  source 1..1161: mol_type = other DNA
atgaacccccagatccggaaccccatggagaggatgtacagagacaccttctatgacaactttgaaaatgagcccatcctgtatggccgcagctacacctggctgtgctatgaggtgaagatcaagaggggccgcagcaacctgctgtgggacaccggggtcttccggggccctgtgctgcccaagaggcagagcaaccaccggcaggaggtgtacttccgctttgagaaccacgccgagatgtgcttcctgtcctggttctgtggcaaccggctgcctgccaacagacgcttccagatcacctggtttgtgtcctggaacccctgcctgccctgtgtggtgaaggtgaccaagttcctggccgagcaccccaacgtgaccctgaccatctctgctgcccggctgtactactacagagaccgggactggcgctgggtgctgctgcggctgcacaaggccggggcccgggtgaagatcatggactatgaagattttgcctactgctgggagaactttgtgtgcaatgaaggccagcccttcatgccctggtacaagtttgatgacaactatgccagcctgcacaggaccctgaaggagatcctgaggaaccccatggaggccatgtacccccacatcttctacttccacttcaagaacctgctgaaggcctgtggcagaaatgaatcctggctgtgcttcaccatggaggtgaccaagcaccacagcgctgtgttcaggaagaggggcgtcttcaggaaccaggtggaccctgagacccactgccacgccgagcgctgcttcctgtcctggttctgtgatgacatcctgagccccaacaccaactatgaggtgacctggtacacctcctggagcccctgcccagaatgtgccggggaggtggccgagttcctggcccggcacagcaatgtgaacctgaccatcttcaccgcccggctgtgctacttctgggacacagactaccaggagggcctgtgcagcctgagccaggagggcgcctctgtgaagatcatgggctacaaggactttgtgtcctgctggaagaactttgtgtacagtgatgatgagcccttcaagccctggaagggcctgcagaccaacttccggctgctgaagaggcggctgcgggagatcctgcagtag

SEQ ID NO: 21597 - DNA, 348 bp, synthetic construct
  misc_feature 1..348: note = Description of Artificial Sequence: Synthetic coding sequence
  source 1..348: mol_type = other DNA
atgggcggcagcctgcgggtggccgtgctgggcgcccctggggtgggcaagacagccatcatccggcagttcctgtttggagactacccagagcggcaccggcccacagatggcccccggctgtacagacctgctgtgctgctggatggagctgtgtatgacctgagcatcagagatggagatgtggccggccctggcagcagccctgggggccctgaggagtggccagatgccaaggactggagcctgcaggacacagatgcctttgtgctggtgtatgacatctgcagcccagacagctttgattatgtgaaggccctgcggcagagaattgctgagaccaggtag

SEQ ID NO: 21598 - DNA, 579 bp, synthetic construct
  misc_feature 1..579: note = Description of Artificial Sequence: Synthetic coding sequence
  source 1..579: mol_type = other DNA
atgcaggccatcaagtgtgtggtggtgggagatggagctgtgggcaagacctgcctgctgatctcctacaccaccaatgccttccctggagagtacatccccaccgtgtttgacaactacagcgccaacgtgatggtggatggcaagcctgtgaacctgggcctgtgggacacagctggccaggaggactatgaccggctgcggcccctgagctacccccagacagatgtgttcctgatctgcttcagcctggtgtccccagccagctttgaaaatgtgcgggccaagtggtacccagaggtgcgccaccactgccccaacacccccatcatcctggtgggcaccaagctggacctgagagatgacaaggacaccatcgagaagctgaaggagaagaagctgacccccatcacctacccccagggcctggccatggccaaggagattggagctgtgaagtacctggagtgcagcgccctgacccagaggggcctgaagacagtgtttgatgaggccatccgggctgtgctgtgccccccacctgtgaagaagaggaagaggaagtgcctgctgctgtag

SEQ ID NO: 21599 - DNA, 636 bp, synthetic construct
  misc_feature 1..636: note = Description of Artificial Sequence: Synthetic coding sequence
  source 1..636: mol_type = other DNA
atgcaggccatcaagtgtgtggtggtgggagatggagctgtgggcaagacctgcctgctgatctcctacaccaccaatgccttccctggagagtacatccccaccgtgtttgacaactacagcgccaacgtgatggtggatggcaagcctgtgaacctgggcctgtgggacacagctggccaggaggactatgaccggctgcggcccctgagctacccccagacagtgggggagacctacggcaaggacatcaccagccggggcaaggacaagcccatcgcagatgtgttcctgatctgcttcagcctggtgtccccagccagctttgaaaatgtgcgggccaagtggtacccagaggtgcgccaccactgccccaacacccccatcatcctggtgggcaccaagctggacctgagagatgacaaggacaccatcgagaagctgaaggagaagaagctgacccccatcacctacccccagggcctggccatggccaaggagatcggggctgtgaagtacctggagtgcagcgccctgacccagaggggcctgaagacagtgtttgatgaggccatccgggctgtgctgtgccccccacctgtgaagaagaggaagaggaagtgcctgctgctgtag

SEQ ID NO: 21600 - DNA, 579 bp, synthetic construct
  misc_feature 1..579: note = Description of Artificial Sequence: Synthetic coding sequence
  source 1..579: mol_type = other DNA
atgcaggccatcaagtgtgtggtggtgggagatggagctgtgggcaagacctgcctgctgatctcctacaccaccaatgccttccctggagagtacatccccaccgtgtttgacaactacagcgccaacgtgatggtggacagcaagcctgtgaacctgggcctgtgggacacagctggccaggaggactatgaccggctgcggcccctgagctacccccagacagatgtgttcctgatctgcttcagcctggtgtccccagccagctatgaaaatgtgcgggccaagtggttccctgaggtgcgccaccactgccccagcacccccatcatcctggtgggcaccaagctggacctgagagatgacaaggacaccatcgagaagctgaaggagaagaagctggcccccatcacctacccccagggcctggccctggccaaggagattgattctgtgaagtacctggagtgcagcgccctgacccagaggggcctgaagacagtgtttgatgaggccatccgggctgtgctgtgcccccagcccacccggcagcagaagagggcctgcagcctgctgtag

SEQ ID NO: 21601 - DNA, 261 bp, synthetic construct
  misc_feature 1..261: note = Description of Artificial Sequence: Synthetic coding sequence
  source 1..261: mol_type = other DNA
atgcaggccatcaagtgtgtggtggtgggagatggagctgtgggcaagacctgcctgctgatctcctacaccaccaatgccttccctggagagtacatccccaccgtgcccggccggccctgtgccctgctgcaggatgctgaggccggcctgagcagtgatgtggagggcgcctgctggtgccagacccaggagggccgcatgactggagaggccccagccccaccctggccagccctgcggggcccccaccacagctag

SEQ ID NO: 21602 - DNA, 558 bp, synthetic construct
  misc_feature 1..558: note = Description of Artificial Sequence: Synthetic coding sequence
  source 1..558: mol_type = other DNA
atgcaggccatcaaggctgtgggcaagacctgcctgctgatctcctacaccaccaatgccttccctggagagtacatccccaccgtgtttgacaactacagcgccaacgtgatggtggacagcaagcctgtgaacctgggcctgtgggacacagctggccaggaggactatgaccggctgcggcccctgagctacccccagacagatgtgttcctgatctgcttcagcctggtgtccccagccagctatgaaaatgtgcgggccaagtggttccctgaggtgcgccaccactgccccagcacccccatcatcctggtgggcaccaagctggacctgagagatgacaaggacaccatcgagaagctgaaggagaagaagctggcccccatcacctacccccagggcctggccctggccaaggagattgacagcgtgaagtacctggagtgcagcgccctgacccagaggggcctgaagacagtgtttgatgaggccatccgggctgtgctgtgcccccagcccacccggcagcagaagagggcctgcagcctgctgtag

SEQ ID NO: 21603 - DNA, 447 bp, synthetic construct
  misc_feature 1..447: note = Description of Artificial Sequence: Synthetic coding sequence
  source 1..447: mol_type = other DNA
atggtggacagcaagcctgtgaacctgggcctgtgggacacagctggccaggaggactatgaccggctgcggcccctgagctacccccagacagatgtgttcctgatctgcttcagcctggtgtccccagccagctatgaaaatgtgcgggccaagtggttccctgaggtgcgccaccactgccccagcacccccatcatcctggtgggcaccaagctggacctgagagatgacaaggacaccatcgagaagctgaaggagaagaagctggcccccatcacctacccccagggcctggccctggccaaggagattgattctgtgaagtacctggagtgcagcgccctgacccagaggggcctgaagacagtgtttgatgaggccatccgggctgtgctgtgcccccagcccacccggcagcagaagagggcctgcagcctgctgtag

SEQ ID NO: 21604 - DNA, 501 bp, synthetic construct
  misc_feature 1..501: note = Description of Artificial Sequence: Synthetic coding sequence
  source 1..501: mol_type = other DNA
atgcaggccatcaagtgtgtggtggtgggagatggagctgtgggcaagacctgcctgctgatctcctacaccaccaatgccttccctggagagtacatccccaccgtgtttgacaactacagcgccaacgtgatggtggacagcaagcctgtgaacctgggcctgtgggacacagctggccaggaggactatgaccggctgcggcccctgagctacccccagacagatgtgttcctgatctgcttcagcctggtgtccccagccagctatgaaaatgtgcgggccaagtggttccctgaggtgcgccaccactgccccagcacccccatcatcctggtgggcaccaagctggacctgagagatgacaaggacaccatcgagaagctgaaggagaagaagctggcccccatcacctacccccagggcctggccctggccaaggagattgattctgtgaagtacctggagtgcagcgccctgacccagaggggcctgaagtag

SEQ ID NO: 21605 - DNA, 4785 bp, synthetic construct
  misc_feature 1..4785: note = Description of Artificial Sequence: Synthetic coding sequence
  source 1..4785: mol_type = other DNA
atgaagctgtatgtgttcctggtgaacacaggcaccaccctgacctttgacacagagctgactgtgcagacagtggccgacctgaagcacgccatccagagcaagtacaagatcgccatccagcaccaggtgctggtggtgaatggaggagagtgcatggctgctgacagaagagtgtgcacctacagcgctggaacagacaccaaccccatcttcctgttcaacaaggagatgatcctgtgtgaccggcccccagccatccccaagaccaccttcagcacagaaaatgacatggagatcaaggtggaggagagcctgatgatgcctgctgtgttccacacagtggccagcaggacccagctggccctggagatgtatgaggtggccaagaagctgtgcagcttctgtgagggcctggtgcatgatgagcacctgcagcaccagggctgggccgccatcatggccaacctggaggactgcagcaacagctaccagaagctgctcttcaagtttgagagcatctacagcaactacctgcagagcattgaggacatcaagctgaagctgacccacctgggcacagctgtgtctgtgatggccaagatccccctgctggagtgcctgaccaggcacagctacagagaatgtctgggccgcctggacagcctgcctgagcatgaagattctgagaaggccgagatgaagaggagcacagagctggtgctgagcccagacatgcccaggaccaccaatgaaagcctgctgaccagcttccccaagtctgtggagcacgtgtccccagacacagcagatgctgagagcggcaaggagatccgggagagctgccagagcacagtgcaccagcaggatgagaccaccatcgacaccaaggatggagacctgcccttcttcaacgtgtccctgctggactggatcaacgtgcaggaccggcccaatgatgtggagagcctggtgaggaaatgttttgacagcatgagccggctggacccccgcatcatccggcccttcatcgccgagtgccggcagaccatcgccaagctggacaaccagaacatgaaggccatcaagggcctggaggaccggctgtatgccctggaccagatgattgccagctgtggccgcctggtgaatgagcagaaggagctggcccagggcttcctggccaaccagaagagagctgagaacctgaaggatgcctctgtgctgcctgacctgtgcctgagccacgccaaccagctgatgatcatgctgcagaaccacaggaagctgctggacatcaagcagaagtgcaccacagccaagcaggagctggccaacaacctgcacgtgcggctgaagtggtgctgctttgtgatgctgcacgccgaccaggatggagagaagctgcaggccctgctgcggctggtgattgagctgctggagcgggtgaagatcgtggaggccctgagcacagtgccccagatgtactgcctggccgtggtggaggtggtgcggaggaagatgttcatcaagcactaccgggagtgggccggggccctggtgaaggatggcaagaggctgtatgaggccgagaagagcaagcgggagagctttgggaagctgttcaggaagagcttcctgaggaacagactcttccggggcctggacagctggcccccatccttctgcacccagaagcccaggaagtttgactgtgagctgcctgacatcagcctgaaggacctgcagttcctgcagagcttctgccccagcgaggtgcagcccttcctgcgggtgcccctgctgtgtgactttgagcccctgcaccagcacgtgctggccctgcacaacctggtgaaggccgcccagagcctggatgagatgagccagaccatcacagacctgctgtctgagcagaaggcctctgtgtcccagaccagcccccagagcgccagcagccccaggatggagagcacagctggcatcaccaccaccaccagccccaggaccccaccacccctgactgtgcaggaccccctgtgcccagctgtgtgccccctggaggagctgagcccagacagcattgatgcccacacctttgattttgagaccatcccccaccccaacatcgagcagaccatccaccaggtgtccctggacctggacagcctggccgagagccctgagagtgacttcatgtctgctgtgaatgaatttgtgattgaggagaacctgagcagccccaaccccatcagtgacccccagagccctgagatgatggtggagagcctgtacagcagcgtcatcaatgccatcgacagcaggaggatgcaggacaccaacgtgtgtgggaaggaggactttggagaccacaccagcctgaatgtgcagctggagcgctgccgggtggtggcccaggacagccacttcagcatccagaccatcaaggaggacctgtgccacttccgcacctttgtgcagaaggagcagtgtgacttcagcaacagcctgaagtgcacagctgtggagatccggaacatcatcgagaaggtgaagtgcagcctggagatcaccctgaaggagaagcaccagaaggagctgctgagcctgaagaatgaatatgagggcaagctggatggcctcatcaaggagacagaagaaaatgaaaacaagatcaagaagctgaagggggagctggtgtgcctggaggaggtgctgcagaacaaggacaatgaatttgccctggtgaagcatgagaaggaggccgtcatctgcctgcagaatgagaaggaccagaagctgctggagatggagaacatcatgcacagccagaactgtgagatcaaggagctgaagcagagccgggagatcgtgctggaggacctgaagaagctgcacgtggagaatgatgagaagctgcagctgctgcgggcagagctgcagagcctggagcagagccacctgaaggagctggaggacaccctgcaggtgcgccacatccaggagtttgagaaggtgatgacagaccaccgggtgtccctggaggagctgaagaaggagaaccagcagatcatcaaccagatccaggagagccatgctgagatcatccaggagaaggagaagcagctgcaggagctgaagctgaaggtgtctgacctgagtgacacccgctgcaagctggaggtggagctggccctgaaggaggccgagacagatgagatcaagatcctgctggaggagagccgggcccagcagaaggagaccctgaagagcctgctggagcaggagacagagaacctgaggacagagatcagcaagctgaaccagaagatccaggacaacaatgaaaactaccaggtgggcctggccgagctgcggaccctgatgaccatcgagaaggaccagtgcatcagcgagctgatcagcagacatgaggaggagagcaacatcctgaaggccgagctgaacaaggtgaccagcctgcacaaccaggcctttgaaattgagaagaacctgaaggagcagatcatcgagctgcagagcaagctggacagcgagctgagcgccctggagcggcagaaggatgagaagatcacccagcaggaggagaagtatgaggccatcatccagaacctggagaaggaccggcagaagctggtgagcagccaggagcaggaccgggagcagctgatccagaagctgaactgtgagaaggatgaggccatccagacagccctgaaggagttcaagctggagcgggaggtggtggagaaggagctgctggagaaggtgaagcacctggagaaccagatcgccaagagccctgccatcgacagcaccaggggggacagcagcagcctggtggccgagctgcaggagaagctgcaggaggagaaggccaagttcctggagcagctggaggagcaggagaagaggaagaatgaggagatgcagaatgtgaggaccagcctgattgctgagcagcagaccaacttcaacacagtgctgacccgggagaagatgaggaaggagaacatcatcaatgacctgagtgacaagctgaagagcaccatgcagcagcaggagcgggacaaggacctgattgagagcctgtctgaagatcgggcccggctgctggaggagaagaagaagctggaggaggaggtgtccaagctgcggagcagcagctttgtgcccagcccctacgtggccacagcccctgagctgtatggagcctgtgcccctgagctgcccggggagagtgacagatctgctgtggagacagcagatgagggccgggtggacagcgccatggagacctccatgatgtctgtgcaggagaacatccacatgctgtctgaggagaagcagaggatcatgctgctggagaggaccctgcagctgaaggaggaggagaacaagaggctgaaccagaggctgatgagccagagcatgagctctgtgagcagccgccacagcgagaagatcgccatccgggacttccaggtgggggacctggtgctgatcatcctggatgaaagacatgacaactacgtgctcttcaccgtgagccccaccctgtacttcctgcacagcgagagcctgcctgccctggacctgaagccaggagagggcgccagcggggccagcagaagaccctgggtgctgggcaaggtgatggagaaggagtactgccaggccaagaaggcccagaaccgcttcaaggtgcccctgggcaccaagttctacagagtgaaggctgtgtcctggaacaagaaggtgtag

SEQ ID NO: 21606 - DNA, 4776 bp, synthetic construct
  misc_feature 1..4776: note = Description of Artificial Sequence: Synthetic coding sequence
  source 1..4776: mol_type = other DNA
atgaagctgtatgtgttcctggtgaacacaggcaccaccctgacctttgacacagagctgactgtgcagacagtggccgacctgaagcacgccatccagagcaagtacaagatcgccatccagcaccaggtgctggtggtgaatggaggagagtgcatggctgctgacagaagagtgtgcacctacagcgctggaacagacaccaaccccatcttcctgttcaacaaggagatgatcctgtgtgaccggcccccagccatccccaagaccaccttcagcacagaaaatgacatggagatcaaggtggaggagagcctgatgatgcctgctgtgttccacacagtggccagcaggacccagctggccctggagatgtatgaggtggccaagaagctgtgcagcttctgtgagggcctggtgcatgatgagcacctgcagcaccagggctgggccgccatcatggccaacctggaggactgcagcaacagctaccagaagctgctcttcaagtttgagagcatctacagcaactacctgcagagcattgaggacatcaagctgaagctgacccacctgggcacagctgtgtctgtgatggccaagatccccctgctggagtgcctgaccaggcacagctacagagaatgtctgggccgcctggacagcctgcctgagcatgaagattctgagaaggccgagatgaagaggagcacagagctggtgctgagcccagacatgcccaggaccaccaatgaaagcctgctgaccagcttccccaagtctgtggagcacgtgtccccagacacagcagatgctgagagcggcaaggagatccgggagagctgccagagcacagtgcaccagcaggatgagaccaccatcgacaccaaggatggagacctgcccttcttcaacgtgtccctgctggactggatcaacgtgcaggaccggcccaatgatgtggagagcctggtgaggaaatgttttgacagcatgagccggctggacccccgcatcatccggcccttcatcgccgagtgccggcagaccatcgccaagctggacaaccagaacatgaaggccatcaagggcctggaggaccggctgtatgccctggaccagatgattgccagctgtggccgcctggtgaatgagcagaaggagctggcccagggcttcctggccaaccagaagagagctgagaacctgaaggatgcctctgtgctgcctgacctgtgcctgagccacgccaaccagctgatgatcatgctgcagaaccacaggaagctgctggacatcaagcagaagtgcaccacagccaagcaggagctggccaacaacctgcacgtgcggctgaagtggtgctgctttgtgatgctgcacgccgaccaggatggagagaagctgcaggccctgctgcggctggtgattgagctgctggagcgggtgaagatcgtggaggccctgagcacagtgccccagatgtactgcctggccgtggtggaggtggtgcggaggaagatgttcatcaagcactaccgggagtgggccggggccctggtgaaggatggcaagaggctgtatgaggccgagaagagcaagcgggagagctttgggaagctgttcaggaagagcttcctgaggaacagactcttccggggcctggacagctggcccccatccttctgcacccagaagcccaggaagtttgactgtgagctgcctgacatcagcctgaaggacctgcagttcctgcagagcttctgccccagcgaggtgcagcccttcctgcgggtgcccctgctgtgtgactttgagcccctgcaccagcacgtgctggccctgcacaacctggtgaaggccgcccagagcctggatgagatgagccagaccatcacagacctgctgtctgagcagaaggcctctgtgtcccagaccagcccccagagcgccagcagccccaggatggagagcacagctggcatcaccaccaccaccagccccaggaccccaccacccctgactgtgcaggaccccctgtgcccagctgtgtgccccctggaggagctgagcccagacagcattgatgcccacacctttgattttgagaccatcccccaccccaacatcgagcagaccatccaccaggtgtccctggacctggacagcctggccgagagccctgagagtgacttcatgtctgctgtgaatgaatttgtgattgaggagaacctgagcagccccaaccccatcagtgacccccagagccctgagatgatggtggagagcctgtacagcagcgtcatcaatgccatcgacagcaggaggatgcaggacaccaacgtgtgtgggaaggaggactttggagaccacaccagcctgaatgtgcagctggagcgctgccgggtggtggcccaggacagccacttcagcatccagaccatcaaggaggacctgtgccacttccgcacctttgtgcagaaggagcagtgtgacttcagcaacagcctgaagtgcacagctgtggagatccggaacatcatcgagaaggtgaagtgcagcctggagatcaccctgaaggagaagcaccagaaggagctgctgagcctgaagaatgaatatgagggcaagctggatggcctcatcaaggagacagaagaaaatgaaaacaagatcaagaagctgaagggggagctggtgtgcctggaggaggtgctgcagaacaaggacaatgaatttgccctggtgaagcatgagaaggaggccgtcatctgcctgcagaatgagaaggaccagaagctgctggagatggagaacatcatgcacagccagaactgtgagatcaaggagctgaagcagagccgggagatcgtgctggaggacctgaagaagctgcacgtggagaatgatgagaagctgcagctgctgcgggcagagctgcagagcctggagcagagccacctgaaggagctggaggacaccctgcaggtgcgccacatccaggagtttgagaaggtgatgacagaccaccgggtgtccctggaggagctgaagaaggagaaccagcagatcatcaaccagatccaggagagccatgctgagatcatccaggagaaggagaagcagctgcaggagctgaagctgaaggtgtctgacctgagtgacacccgctgcaagctggaggtggagctggccctgaaggaggccgagacagatgagatcaagatcctgctggaggagagccgggcccagcagaaggagaccctgaagagcctgctggagcaggagacagagaacctgaggacagagatcagcaagctgaaccagaagatccaggacaacaatgaaaactaccaggtgggcctggccgagctgcggaccctgatgaccatcgagaaggaccagtgcatcagcgagctgatcagcagacatgaggaggagagcaacatcctgaaggccgagctgaacaaggtgaccagcctgcacaaccaggcctttgaaattgagaagaacctgaaggagcagatcatcgagctgcagagcaagctggacagcgagctgagcgccctggagcggcagaaggatgagaagatcacccagcaggaggagaagtatgaggccatcatccagaacctggagaaggaccggcagaagctggtgagcagccaggagcaggaccgggagcagctgatccagaagctgaactgtgagaaggatgaggccatccagacagccctgaaggagttcaagctggagcgggaggtggtggagaaggagctgctggagaaggtgaagcacctggagaaccagatcgccaagagccctgccatcgacagcaccaggggggacagcagcagcctggtggccgagctgcaggagaagctgcaggaggagaaggccaagttcctggagcagctggaggagcaggagaagaggaagaatgaggagatgcagaatgtgaggaccagcctgattgctgagcagcagaccaacttcaacacagtgctgacccgggagaagatgaggaaggagaacatcatcaatgacctgagtgacaagctgaagagcaccatgcagcagcaggagcgggacaaggacctgattgagagcctgtctgaagatcgggcccggctgctggaggagaagaagaagctggaggaggaggtgtccaagctgcggagcagcagctttgtgcccagcccctacgtggccacagcccctgagctgtatggagcctgtgcccctgagctgcccggggagagtgacagatctgctgtggagacagcagatgagggccgggtggacagcgccatggagacctccatgatgtctgtgcaggagaacatccacatgctgtctgaggagaagcagaggatcatgctgctggagaggaccctgcagctgaaggaggaggagaacaagaggctgaaccagaggctgatgagccagagcatgagctctgtgagcagccgccacagcgagaagatcgccatccgggacttccaggtgggggacctggtgctgatcatcctggatgaaagacatgacaactacgtgctcttcaccgtgagccccaccctgtacttcctgcacagcgagagcctgcctgccctggacctgaagccagccagcggggccagccggcggccctgggtgctgggcaaggtgatggagaaggagtactgccaggccaagaaggcccagaaccgcttcaaggtgcccctgggcaccaagttctacagagtgaaggctgtgtcctggaacaagaaggtgtag

SEQ ID NO: 21607 - DNA, 48 bp, synthetic construct
  misc_feature 1..48: note = Description of Artificial Sequence: Synthetic coding sequence
  source 1..48: mol_type = other DNA
atgaagctgtatgtgttcctggtgaacacaggcaccaccctgacctag

SEQ ID NO: 21608 - DNA, 4776 bp, synthetic construct; identical to SEQ ID NO: 21606
  misc_feature 1..4776: note = Description of Artificial Sequence: Synthetic coding sequence
  source 1..4776: mol_type = other DNA

SEQ ID NO: 21609 - DNA, 6471 bp, synthetic construct
  misc_feature 1..6471: note = Description of Artificial Sequence: Synthetic coding sequence
  source 1..6471: mol_type = other DNA
atgtctgacacccccagcacaggcttcagcatcatccaccccaccagcagcgagggccaggtgcccccacccaggcacctgagcctgacccaccctgtggtggccaagaggatctccttctacaagagcggggacccccagtttggaggagtgcgggtggtggtgaaccccaggagcttcaagagctttgatgccctgctggacaacctgagcaggaaggtgcccctgcccttcggcgtgaggaacatcagcaccccccggggccgccacagcatcacccggctggaggagctggaggatggagagagctacctgtgcagccacggcaggaaggtgcagcctgtggacctggacaaggcccggcggcggccccggccctggctgagcagccgggccatcagcgcccacagccccccccaccctgtggccgtggccgcccctggcatgccccggccccccaggagcctggtggtgttcagaaatggagaccccaagaccaggagagctgtgctgctgagccggcgggtgacccagagctttgaggccttcctgcagcacctgacagaggtgatgcagaggcctgtggtgaagctgtatgccacagatggccggcgggtgcccagcctgcaggccgtcatcctgagcagcggggctgtggtggccgccggccgggagcccttcaagccaggcaactatgacatccagaagtacctgctgcctgcccggctgcccggcatcagccagagggtgtaccccaagggaaatgccaagtctgagagcaggaagatcagcacccacatgagcagcagcagccgcagccagatctacagcgtgagcagcgagaagacccacaacaatgactgctacctggactacagctttgtgcctgagaagtacctggccctggagaagaatgacagccagaacctgcccatctaccccagtgaagatgacatcgagaagagcatcatcttcaaccaggacggcaccatgacagtggagatgaaggtgcgcttccgcatcaaggaggaggagaccatcaagtggaccaccaccgtgtccaagacaggccccagcaacaatgatgagaagtctgagatgtccttccctggccgcacagagagccgcagcagcggcctgaagctggccgcctgcagcttcagcgcagatgtgagccccatggagaggagcagcaaccaggagggcagcctggccgaggagatcaacatccagatgacagaccaggtggccgagacctgcagcagcgcctcctgggagaatgccaccgtggacacagacatcatccagggcacccaggaccaggccaagcaccgcttctacagaccacccaccccaggcctgcggcgggtgcggcagaagaagagcgtcatcggctctgtgaccctggtgtctgaaacagaggtgcaggagaagatgattggccagttctcctacagcgaggagcgggagagcggggagaacaagtctgagtaccacatgttcacccacagctgcagcaagatgagctctgtgagcaacaagcctgtgctggtgcagatcaacaacaatgaccagatggaggagagcagcctggagaggaagaaggagaacagcctgctgaagagcagcgccatctctgctggggtcatcgagatcaccagccagaagatgctggagatgagccacaacaacggcctgcccagcaccatcagcaacaacagcatcgtggaggaggatgtggtggactgtgtggtgctggacaacaagacaggcatcaagaacttcaagacctacggcaacaccaatgaccgcttcagccccatctctgcagatgccacccacttcagcagcaacaacagcggcacagacaagaacatcagcgaggccccagccagcgaggccagcagcacagtgacagccagaattgacaggctcatcaatgaatttgcccagtgtggcctgaccaagctgcccaagaatgagaagaagatcctgagctctgtggccagcaagaagaagaagaagagccggcagcaggccatcaacagccgctaccaggacggccagctggccaccaagggcatcctgaacaagaatgaaagaatcaacaccaagggccgcatcaccaaggagatgattgtgcaggacagcgacagccccctgaagggcggcatcctgtgtgaggaggacctgcagaagagtgacaccgtcatcgagagcaacaccttctgcagcaagagcaacctgaacagcaccatcagcaagaacttccacaggaacaagctgaacaccacccagaacagcaaggtgcagggcctgctgaccaagaggaagagccgcagcctgaacaagatcagcctgggcgcccccaagaagcgggagatcggccagagggacaaggtgttcccccacaatgaaagcaagtactgcaagagcacctttgagaacaagagcctcttccacgtgttcaacatcctggagcagaagcccaaggacttctacgccccccagagccaggccgaggtggccagcggctacctgcggggcatggccaagaagagcctggtgtccaaggtgacagacagccacatcaccctgaagagccagaagaagaggaaaggagacaaggtgaaggccagcgccatcctgagcaagcagcacgccaccacccgggccaacagcctggccagcctgaagaagccagacttccctgaggccatcgcccaccacagcatccagaactacatccagagctggctgcagaacatcaacccctaccccaccctgaagcccatcaagagcgcccctgtgtgcagaaatgagacctctgtggtgaactgcagcaacaacagcttctctggaaatgacccccacaccaacagcggcaagatcagcaactttgtgatggagagcaacaagcacatcaccaagattgctggcctgaccggggacaacctgtgcaaggagggggacaagagcttcatcgccaatgacacaggagaggaggacctgcacgagacccaggtgggcagcctgaatgatgcctacctggtgcccctgcacgagcactgcaccctgagccagagcgccatcaatgaccacaacaccaagagccacatcgctgctgagaagagcggccctgagaagaagctggtgtaccaggagatcaacctggccaggaagaggcagagcgtggaggccgccatccaggtggaccccatcgaggaggagacccccaaggacctgctgcctgtgctgatgctgcaccagctgcaggcctctgtgcccggcatccacaagacccagaatggagtggtgcagatgcctggcagcctggccggcgtgcccttccacagcgccatctgcaacagcagcaccaacctgctgctggcctggctgctggtgctgaacctgaagggctccatgaacagcttctgccaggtggatgcccacaaggccaccaacaagagcagcgagaccctggccctgctggagatcctgaagcacatcgccatcacagaggaggctgatgacctgaaggctgctgtggccaacctggtggagagcaccaccagccacttcggcctgtctgagaaggagcaggacatggtgcccatcgacctgagcgccaactgcagcacagtgaacatccagagcgtgcccaagtgcagtgaaaatgaaagaacccagggcatcagcagcctggatggcggctgcagcgccagcgaggcctgtgcccctgaggtgtgtgtgctggaggtgacctgcagcccctgtgagatgtgcaccgtgaacaaggcctacagccccaaggagacctgcaaccccagcgacaccttcttccccagtgatggctacggcgtggaccagacctccatgaacaaggcctgcttcctgggggaggtgtgcagcctgacagacaccgtcttcagtgacaaggcctgtgcccagaaggagaaccacacctatgaaggagcctgccccattgatgagacctacgtgcctgtgaatgtgtgcaacaccatcgacttcctgaacagcaaagaaaacacctacacagacaacctggacagcacagaggagctggagagaggagatgacatccagaaggacctgaacatcctgacagatcctgagtacaagaatggcttcaacaccctggtgagccaccagaatgtgagcaacctgagcagctgtggcctgtgcctgtctgagaaggaggccgagctggacaagaagcacagcagcctggatgactttgagaactgcagcctgaggaagttccaggatgaaaatgcctacaccagctttgacatggaggagcccaggaccagcgaggagcccggcagcatcaccaacagcatgaccagcagcgagaggaacatcagcgagctggagagctttgaggagctggagaaccacgacacagacatcttcaacacagtggtgaatggaggagagcaggccacagaggagctgatccaggaggaggtggaggccagcaagaccctggagctgattgacatcagcagcaagaacatcatggaggagaagaggatgaatggcatcatctatgagatcatcagcaagaggctggccaccccacccagcctggacttctgctatgacagcaagcagaacagcgagaaggagaccaatgaaggagagaccaagatggtgaagatgatggtgaagaccatggagaccggcagctacagcgagagcagcccagacctgaagaagtgcatcaagagccctgtgaccagtgactggagcgactacagaccagacagcgacagcgagcagccctacaagaccagcagtgatgaccccaatgacagcggggagctgacccaggagaaggagtacaacattggatttgtgaagagggccatcgagaagctgtatggcaaggctgacatcatcaagcccagcttcttccctggcagcaccaggaagagccaggtgtgcccctacaacagcgtggagttccagtgcagcaggaaggccagcctgtatgattctgagggccagagctttggcagcagcgagcaggtgagcagcagcagctccatgctgcaggagttccaggaggagcggcaggacaagtgtgatgtgtctgctgtgcgggacaactactgccgcggggacatcgtggagcccggcaccaagcagaatgatgacagccgcatcctgacagacatcgaggagggcgtgctgattgacaagggcaagtggctgctgaaggagaaccacctgctgaggatgagcagtgaaaatcctggcatgtgtggaaatgctgacaccacctctgtggacaccctgctggacaacaacagcagcgaggtgccctacagccacttcggcaacctggcccctggccccaccatggatgagctgagcagcagcgagctggaggagctgacccagcccctggagctgaagtgcaactacttcaacatgcctcatggcagtgacagcgagcccttccacgaggacctgctggatgtgagaaatgagacctgtgccaaggagagaattgccaaccaccacacagaggagaagggcagccaccagagcgagcgggtgtgcacctctgtgacccacagcttcatctctgctggcaacaaggtgtaccctgtgtctgatgatgccatcaagaaccagcccctgcccggcagcaacatgatccacggcaccctgcaggaggccgacagcctggacaagctgtatgccctgtgtggccagcactgccccatcctgaccgtcatcatccagcccatgaatgaagaagatcggggctttgcctacaggaaggagagtgacatcgagaacttcctgggcttctacctgtggatgaagatccacccctacctgctgcagacagacaagaatgtgttccgggaggagaacaacaaggcctccatgaggcagaacctgattgacaatgccatcggggacatctttgaccagttctacttcagcaacacctttgacctgatgggcaagaggaggaagcagaagaggatcaacttcctgggcctggaggaggagggcaacctgaagaagttccagcctgacctgaaggagcgcttctgcatgaacttcctgcacaccagcctgctggtggtgggcaatgtggacagcaacacccaggacctgagcggccagaccaatgagatcttcaaggctgtggatgagaacaacaacctgctgaacaaccgcttccagggcagcaggaccaacctgaaccaggtggtgcgggagaacatcaactgccactacttctttgagatgctgggccaggcctgcctgctggacatctgccaggtggagaccagcctgaacatcagcaacagaaacatcctggagctgtgcatgtttgaaggagaaaatctcttcatctgggaggaggaggacatcctgaacctgacagacctggagagcagccgggagcaggaggacctgtag

SEQ ID NO: 21610 - DNA, 1212 bp, synthetic construct
  misc_feature 1..1212: note = Description of Artificial Sequence: Synthetic coding sequence
  source 1..1212: mol_type = other DNA
atgaccccacccctgctgcaccacgacctgaagacccagaacatcctgctggacaatgagttccacgtgaagattgctgactttggcctgagcaagtggaggatgatgagcctgagccagagccgcagcagcaagagcgcccctgagggcggcaccatcatctacatgcccccagaaaattatgagcccggccagaagagccgggccagcatcaagcatgacatctacagctatgctgtgatcacctgggaggtgctgagcaggaagcagccctttgaagatgtgaccaaccccctgcagatcatgtacagcgtgtcccagggccacaggcctgtgatcaatgaggagagcctgccctatgacatcccccaccgggccaggatgatcagcctcatcgagagcggctgggcccagaacccagatgagcggcccagcttcctgaagtgcctgattgagctggagcctgtgctgcggacctttgaggagatcaccttcctggaggccgtcatccagctgaagaagaccaagctgcagagcgtgagcagcgccatccacctgtgtgacaagaagaagatggagctgagcctgaacatccctgtgaaccacggcccccaggaggagagctgtggcagcagccagctgcacgagaacagcggcagccctgagaccagccgcagcctgcctgccccccaggacaatgacttcctgagcaggaaggcccaggactgctacttcatgaagctgcaccactgccccggcaaccacagctgggacagcaccatcagcggcagccagagagctgccttctgtgaccacaagaccaccccctgcagcagcgccatcatcaaccccctgagcacagctggcaacagcgagcggctgcagcccggcatcgcccagcagtggatccagagcaagcgggaggacatcgtgaaccagatgacagaggcctgcctgaaccagagcctggatgccctgctgagccgggacctgatcatgaaggaggactatgagctggtgtccaccaagcccaccaggaccagcaaggtgcggcagctgctggacaccacagacatccagggcgaggagtttgccaaggtgattgtgcagaagctgaaggacaacaagcagatgggcctgcagccctacccagagatcctggtggtgagccgcagccccagcctgaacctgctgcagaacaagtccatgtag

SEQ ID NO: 21611 - DNA, 10377 bp, synthetic construct
  misc_feature 1..10377: note = Description of Artificial Sequence: Synthetic coding sequence
  source 1..10377: mol_type = other DNA
atggagaggagcggctgggcccggcagaccttcctgctggccctgctgctgggcgccaccctgcgggcccgggctgctgctggctactacccccgcttcagccccttcttcttcctgtgcacccaccacggggagctggagggagatggagagcagggcgaggtgctgatcagcctgcacatcgccggcaaccccacctactacgtgcccggccaggagtaccacgtgaccatcagcaccagcaccttctttgatggcctgctggtgacaggcctgtacaccagcacctctgtgcaggccagccagagcatcggcggcagcagcgccttcggcttcggcatcatgtctgaccaccagtttggaaaccagttcatgtgcagcgtggtggccagccacgtgagccacctgcccaccaccaacctgtccttcatctggatcgcccccccagctggcaccggctgtgtgaacttcatggccacagccacccaccggggccaggtgatcttcaaggatgccctggcccagcagctgtgtgagcagggcgcccccacagatgtgacagtgcacccccacctggccgagatccacagcgacagcatcatcctgagagatgactttgacagctaccaccagctgcagctgaaccccaacatctgggtggagtgcaacaactgtgaaacaggagagcagtgtggggccatcatgcacggcaatgctgtgaccttctgtgagccctacggcccccgggagctgatcaccaccggcctgaacaccaccacagcctctgtgctgcagttcagcatcggcagcggcagctgccgcttctcctacagcgaccccagcatcatcgtgctgtatgccaagaacaacagcgctgactggatccagctggagaagatccgggcccccagcaatgtgtccaccatcatccacatcctgtacctgcctgaagatgccaagggggagaatgtgcagttccagtggaagcaggagaacctgcgggtgggggaggtgtatgaggcctgctgggccctggacaacatcctgatcatcaacagcgcccaccggcaggtggtgctggaggacagcctggaccctgtggacaccggcaactggctgttcttccctggggccaccgtgaagcacagctgccagagtgatggcaacagcatctacttccacggcaatgaaggcagcgagttcaactttgccaccaccagagatgtggacctgagcacagaggacatccaggagcagtggagcgaggagtttgagagccagcccaccggctgggatgtgctgggcgccgtcatcggcacagaatgtggcaccattgaaagtggcctgtccatggtgttcctgaaggatggagagaggaagctgtgcacccccagcatggacaccaccggctacggcaacctgcgcttctactttgtgatgggcggcatctgtgaccccggcaacagccatgaaaatgacatcatcctgtatgccaagattgagggcaggaaggagcacatcaccctggacaccctgagctacagcagctacaaggtgcccagcctggtgtctgtggtgatcaaccctgagctgcagaccccagccaccaagttctgcctgcggcagaagaaccaccagggccacaacagaaatgtgtgggccgtggacttcttccacgtgctgcctgtgctgcccagcaccatgagccacatgatccagttcagcatcaacctgggctgcggcacccaccagcccggcaacagcgtgtccctggagttcagcaccaaccacggccgctcctggagcctgctgcacacagaatgtctgcctgagatctgtgccggcccccacctgccccacagcacagtgtacagcagcgagaactacagcggctggaaccgcatcaccatccccctgcccaatgctgccctgaccaggaacacccgcatccgctggaggcagacaggccccatcctgggcaacatgtgggccatcgacaacgtgtacatcggccccagctgcctgaagttctgcagcggccggggccagtgcaccaggcatggctgcaagtgtgaccccggcttcagcggccctgcctgtgagatggccagccagaccttccccatgttcatcagcgagagctttggcagcagccggctgagcagctaccacaacttctacagcatcagaggagctgaggtgtcctttggctgcggcgtgctggccagcggcaaggccctggtgttcaacaaggatggccggcggcagctgatcaccagcttcctggacagcagccagagccgcttcctgcagttcaccctgcggctgggcagcaagtctgtgctgagcacctgccgggccccagaccagcctggagagggcgtgctgctgcactacagctatgacaatggcatcacctggaagctgctggagcactacagctacctgagctaccacgagccccgcatcatctctgtggagctgcctggagatgccaagcagtttggcatccagttccgctggtggcagccctaccacagcagccagagagaagatgtgtgggccattgatgagatcatcatgacctctgtgctcttcaacagcatcagcctggacttcaccaacctggtggaggtgacccagagcctgggcttctacctgggcaatgtgcagccctactgcggccatgactggaccctgtgcttcaccggggacagcaagctggccagctccatgagatatgtggagacccagagcatgcagatcggggccagctacatgatccagttcagcctggtgatgggctgcggccagaagtacaccccccacatggacaaccaggtgaagctggagtacagcaccaaccacggcctgacctggcacctggtgcaggaggagtgcctgcccagcatgcccagctgccaggagttcaccagcgccagcatctaccacgccagcgagttcacccagtggaggagagtgattgtgctgctgccccagaagacctggagcagcgccacccgcttccgctggagccagagctactacacagcccaggatgagtgggccctggacagcatctacatcggccagcagtgccccaacatgtgcagcggccacggcagctgtgaccacggcatctgccgctgtgaccagggctaccagggcacagagtgccaccctgaggccgccctgcccagcaccatcatgtctgactttgagaaccagaatggctgggagagtgactggcaggaggtgattggaggagaaattgtgaagccagagcagggctgtggggtcatcagcagcggcagcagcctgtacttcagcaaggccggcaagaggcagctggtgtcctgggacctggacacctcctgggtggactttgtgcagttctacatccagatcggcggggagagcgccagctgcaacaagccagacagccgggaggagggcgtgctgctgcagtacagcaacaacggcggcatccagtggcacctgctggccgagatgtacttcagtgacttcagcaagcccaggtttgtgtacctggagctgcctgctgctgccaagaccccctgcacccgcttccgctggtggcagcccgtcttctctggagaagattatgaccagtgggccgtggatgacatcatcatcctgtctgagaagcagaagcagatcatccctgtgatcaaccccaccctgccccagaacttctatgagaagccagcctttgactaccccatgaaccagatgtctgtgtggctgatgctggccaatgaaggcatggtgaagaatgagaccttctgtgccgccaccccatctgccatgatctttgggaagagtgatggagacagatttgctgtgacccgggacctgaccctgaagccaggctacgtgctgcagttcaagctgaacatcggctgtgccaaccagttcagcagcacagcccctgtgctgctgcagtacagccatgatgctggcatgtcctggttcctggtgaaggagggctgctacccagccagcgctgggaagggctgtgagggcaacagccgggagctgtctgagcccaccatgtaccacactggagactttgaggagtggacccgcatcaccatcgtcatccccaggagcctggccagcagcaagacccgcttccgctggatccaggagagcagcagccagaagaatgtgcccccatttggcctggatggagtgtacatcagcgagccctgccccagctactgcagcggccatggagactgcatcagcggcgtgtgcttctgtgacctgggctacacagctgcccagggcacctgtgtgtccaatgtgcccaaccacaatgagatgtttgacagatttgagggcaagctgagccccctgtggtacaagatcaccggggcccaggtgggcaccggctgcggcaccctgaatgatggcaagagcctgtacttcaacggccctgggaagcgggaggccaggacagtgcccctggacaccaggaacatccggctggtgcagttctacatccagatcggcagcaagaccagcggcatcacctgcatcaagcccaggaccagaaatgaaggcctcatcgtgcagtacagcaatgacaatggcatcctgtggcacctgctgcgggagctggacttcatgtccttcctggagccccagatcatcagcattgacctgccccaggatgccaagaccccagccacagccttccgctggtggcagccccagcacggcaagcacagcgcccagtgggccctggatgatgtgctgattggcatgaatgacagcagccagacaggcttccaggacaagtttgatggcagcattgacctgcaggccaactggtaccgcatccagggcggccaggtggacatcgactgcctgtccatggacacagccctgatcttcacagaaaatattggcaagcccaggtatgcagagacctgggacttccacgtgtctgccagcaccttcctgcagtttgagatgtccatgggctgcagcaagcccttcagcaacagccacagcgtgcagctgcagtacagcctgaacaacgggaaggactggcacctggtgacagaggagtgtgtgccccccaccatcggctgcctgcactacacagagagcagcatctacaccagcgagcgcttccagaactggaagaggatcaccgtgtacctgcccctgagcaccatcagccccaggacccgcttccgctggatccaggccaactacacagtgggcgctgacagctgggccatcgacaacgtggtgctggccagcggctgcccctggatgtgcagcggccggggcatctgtgatgctggccgctgtgtgtgtgaccggggctttggaggcccctactgtgtgcctgtggtgcccctgcccagcatcctgaaggatgacttcaatggaaacctgcacccagacctgtggccagaggtgtatggagctgagcggggcaacctgaatggagagaccatcaagagcggcaccagcctcatcttcaagggggagggcctgaggatgctgatcagccgggacctggactgcaccaacaccatgtatgtgcagttcagcctgcgcttcatcgccaagagcaccccagagaggagccacagcatcctgctgcagttcagcatcagcggcggcatcacctggcacctgatggatgagttctacttcccccagaccaccaacatcctcttcatcaacgtgcccctgccctacacagcccagaccaatgccacccgcttccggctgtggcagccctacaacaacgggaagaaggaggagatctggatcgtggatgacttcatcattgatggcaacaacgtgaacaaccctgtgatgctgctggacacctttgattttggcccccgggaggacaactggttcttctacccaggcggcaacatcggcctgtactgcccctacagcagcaaaggagcccctgaggaggacagcgccatggtgtttgtgtccaatgaggtgggggagcacagcatcaccacccgggacctgaatgtgaatgaaaacaccatcatccagtttgagatcaacgtgggctgcagcacagacagcagcagcgctgaccctgtgcggctggagttcagccgggactttggagccacctggcacctgctgctgcccctgtgctaccacagcagcagccacgtgagcagcctgtgcagcacagagcaccaccccagcagcacctactatgccggcaccatgcagggctggaggcgggaggtggtgcactttgggaagctgcacctgtgtggctctgtgcgcttccgctggtaccagggcttctacccagctggcagccagcctgtgacctgggccatcgacaacgtgtacatcggcccccagtgtgaggagatgtgcaatggccagggcagctgcatcaatggcaccaagtgcatctgtgaccccggctacagcggccccacctgcaagatcagcaccaagaacccagacttcctgaaggatgactttgagggccagctggagagtgaccgcttcctgctgatgtctgggggcaagcccagcaggaaatgtggcatcctgagcagcggcaacaacctcttcttcaatgaagatggcctgaggatgctgatgacccgggacctggacctgagccacgccaggtttgtgcagttcttcatgaggctgggctgtgggaagggcgtgcctgaccccaggagccagcctgtgctgctgcagtacagcctgaatggaggcctgtcctggagcctgctgcaggagttcctgttcagcaacagcagcaatgtgggccgctacatcgccctggagatccccctgaaggcccggagcggcagcacccggctgcgctggtggcagcccagtgaaaatggccacttctacagcccctgggtgattgaccagatcctgattggaggcaacatcagcggcaacacagtgctggaggatgacttcaccaccctggacagcaggaagtggctgctgcaccctgggggcaccaagatgcctgtgtgtggcagcactggagatgccctggtgttcatcgagaaggccagcacccgctacgtggtgtccacagatgtggccgtgaatgaagacagcttcctgcagattgactttgctgccagctgcagcgtgacagacagctgctacgccatcgagctggagtacagcgtggacctgggcctgtcctggcaccccctggtgcgggactgcctgcccaccaacgtggagtgcagccgctaccacctgcagaggatcctggtgtctgacaccttcaacaagtggacccgcatcaccctgcccctgcccccctacaccaggagccaggccacccgcttccgctggcaccagcctgccccctttgacaagcagcagacctgggccatcgacaacgtgtacatcggagatggctgcatcgacatgtgcagcggccacggccgctgcatccagggcaactgtgtgtgtgatgagcagtggggcggcctgtactgtgatgatcctgagaccagcctgcccacccagctgaaggacaacttcaacagagcccccagcagccagaactggctgactgtgaatggaggcaagctgagcacagtgtgtggggctgtggccagcggcatggccctgcacttcagcggcggctgcagccggctgctggtgacagtggacctgaacctgaccaatgctgagttcatccagttctacttcatgtatggctgcctgatcacccccaacaacagaaaccagggcgtgctgctggagtacagcgtgaatggaggcatcacctggaacctgctgatggagatcttctatgaccagtacagcaagccaggctttgtgaacatcctgctgcccccagatgccaaggagatcgccacccgcttccgctggtggcagcccaggcatgatggcctggaccagaatgactgggccatcgacaacgtgctgatcagcggcagcgctgaccagaggacagtgatgctggacaccttcagcagcgcccctgtgccccagcacgagaggagccctgcagatgctggccctgtgggcagaattgcctttgacatgttcatggaggacaagacctctgtgaatgagcactggctgttccatgatgactgcaccgtggagcgcttctgtgacagcccagatggagtgatgctgtgtggcagccatgatggccgggaggtgtatgctgtgacccatgacctgacccccacagagggctggatcatgcagttcaagatctctgtgggctgcaaggtgtctgagaagatcgcccagaaccagatccacgtgcagtacagcacagactttggagtgtcctggaactacctggtgccccagtgcctgcctgctgaccccaagtgcagcggctctgtgtcccagcccagcgtcttcttccccaccaagggctggaagaggatcacctaccccctgcctgagagcctggtgggcaaccctgtgcgcttccgcttctaccagaagtacagcgacatgcagtgggccatcgacaacttctacctgggccctggctgcctggacaactgccggggccatggagactgcctgcgggagcagtgcatctgtgaccccggctacagcggccccaactgctacctgacccacaccctgaagaccttcctgaaggagagatttgacagcgaggagatcaagccagacctgtggatgagcctggagggcggcagcacctgcacagaatgtggcatcctggccgaggacacagccctgtactttggaggcagcacagtgcggcaggccgtgacccaggacctggacctgcggggggccaagttcctgcagtactggggccgcatcggcagcgagaacaacatgaccagctgccaccggcccatctgcaggaaggagggcgtgctgctggactacagcacagatggcggcatcacctggaccctgctgcacgagatggactaccagaagtacatctctgtgagacatgactacatcctgctgcctgaagatgccctgaccaacaccacccggctgcgctggtggcagccctttgtgatcagcaatggaattgtggtgtctggagtggagcgggcccagtgggccctggacaacatcctgattggaggagctgagatcaaccccagccagctggtggacacctttgatgatgagggcaccagccatgaggagaactggagcttctacccaaatgctgtgaggacagctggcttctgtggcaaccccagcttccacctgtactggcccaacaagaagaaggacaagacccacaatgccctgagcagccgggagctgatcatccagcccggctacatgatgcagttcaagatcgtggtgggctgtgaggccaccagctgtggggacctgcacagcgtgatgctggagtacaccaaggatgcccggagtgacagctggcagctggtgcagacccagtgcctgcccagcagcagcaacagcatcggctgcagccccttccagttccacgaggccaccatctacaacagcgtgaacagcagctcctggaagaggatcaccatccagctgcctgaccacgtgagcagcagcgccacccagttccgctggatccagaagggggaggagacagagaagcagagctgggccatcgaccacgtgtacatcggggaggcctgccccaagctgtgcagcggccacggctactgcaccactggagccatctgcatctgtgatgagagcttccagggagatgactgcagcgtcttcagccatgacctgcccagctacatcaaggacaactttgaaagtgcccgggtgacagaggccaactgggagaccatccagggcggcgtgattggcagcggctgcggccagctggccccctatgcccatggagacagcctgtacttcaacggctgccagatccggcaggccgccaccaagcccctggacctgacccgggccagcaagatcatgtttgtgctgcagatcggctccatgagccagacagacagctgcaacagcgacctgagcggcccccatgctgtggacaaggctgtgctgctgcagtacagcgtgaacaacggcatcacctggcacgtgattgcccagcaccagcccaaggacttcacccaggcccagagggtgtcctacaacgtgcccctggaggccaggatgaagggcgtgctgctgcgctggtggcagcccaggcacaatggaactggacatgaccagtgggccctggaccacgtggaggtggtgctgaccaggaagcagaactacatgatgaacttcagccggcagcacggcctgcggcacttctacaacagaagaagaagaagcctgcggcgctacccctag

SEQ ID NO: 21612 - DNA, 10383 bp, synthetic construct
  misc_feature 1..10383: note = Description of Artificial Sequence: Synthetic coding sequence
  source 1..10383: mol_type = other DNA
atggagaggagcggctgggcccggcagaccttcctgctggccctgctgctgggcgccaccctgcgggcccgggctgctgctggctactacccccgcttcagccccttcttcttcctgtgcacccaccacggggagctggagggagatggagagcagggcgaggtgctgatcagcctgcacatcgccggcaaccccacctactacgtgcccggccaggagtaccacgtgaccatcagcaccagcaccttctttgatggcctgctggtgacaggcctgtacaccagcacctctgtgcaggccagccagagcatcggcggcagcagcgccttcggcttcggcatcatgtctgaccaccagtttggaaaccagttcatgtgcagcgtggtggccagccacgtgagccacctgcccaccaccaacctgtccttcatctggatcgcccccccagctggcaccggctgtgtgaacttcatggccacagccacccaccggggccaggtgatcttcaaggatgccctggcccagcagctgtgtgagcagggcgcccccacagatgtgacagtgcacccccacctggccgagatccacagcgacagcatcatcctgagagatgactttgacagctaccaccagctgcagctgaaccccaacatctgggtggagtgcaacaactgtgaaacaggagagcagtgtggggccatcatgcacggcaatgctgtgaccttctgtgagccctacggcccccgggagctgatcaccaccggcctgaacaccaccacagcctctgtgctgcagttcagcatcggcagcggcagctgccgcttctcctacagcgaccccagcatcatcgtgctgtatgccaagaacaacagcgctgactggatccagctggagaagatccgggcccccagcaatgtgtccaccatcatccacatcctgtacctgcctgaagatgccaagggggagaatgtgcagttccagtggaagcaggagaacctgcgggtgggggaggtgtatgaggcctgctgggccctggacaacatcctgatcatcaacagcgcccaccggcaggtggtgctggaggacagcctggaccctgtggacaccggcaactggctgttcttccctggggccaccgtgaagcacagctgccagagtgatggcaacagcatctacttccacggcaatgaaggcagcgagttcaactttgccaccaccagagatgtggacctgagcacagaggacatccaggagcagtggagcgaggagtttgagagccagcccaccggctgggatgtgctgggcgccgtcatcggcacagaatgtggcaccattgaaagtggcctgtccatggtgttcctgaaggatggagagaggaagctgtgcacccccagcatggacaccaccggctacggcaacctgcgcttctactttgtgatgggcggcatctgtgaccccggcaacagccatgaaaatgacatcatcctgtatgccaagattgagggcaggaaggagcacatcaccctggacaccctgagctacagcagctacaaggtgcccagcctggtgtctgtggtgatcaaccctgagctgcagaccccagccaccaagttctgcctgcggcagaagaaccaccagggccacaacagaaatgtgtgggccgtggacttcttccacgtgctgcctgtgctgcccagcaccatgagccacatgatccagttcagcatcaacctgggctgcggcacccaccagcccggcaacagcgtgtccctggagttcagcaccaaccacggccgctcctggagcctgctgcacacagaatgtctgcctgagatctgtgccggcccccacctgccccacagcacagtgtacagcagcgagaactacagcggctggaaccgcatcaccatccccctgcccaatgctgccctgaccaggaacacccgcatccgctggaggcagacaggccccatcctgggcaacatgtgggccatcgacaacgtgtacatcggccccagctgcctgaagttctgcagcggccggggccagtgcaccaggcatggctgcaagtgtgaccccggcttcagcggccctgcctgtgagatggccagccagaccttccccatgttcatcagcgagagctttggcagcagccggctgagcagctaccacaacttctacagcatcagaggagctgaggtgtcctttggctgcggcgtgctggccagcggcaaggccctggtgttcaacaaggatggccggcggcagctgatcaccagcttcctggacagcagccagagccgcttcctgcagttcaccctgcggctgggcagcaagtctgtgctgagcacctgccgggccccagaccagcctggagagggcgtgctgctgcactacagctatgacaatggcatcacctggaagctgctggagcactacagctacctgagctaccacgagccccgcatcatctctgtggagctgcctggagatgccaagcagtttggcatccagttccgctggtggcagccctaccacagcagccagagagaagatgtgtgggccattgatgagatcatcatgacctctgtgctcttcaacagcatcagcctggacttcaccaacctggtggaggtgacccagagcctgggcttctacctgggcaatgtgcagccctactgcggccatgactggaccctgtgcttcaccggggacagcaagctggccagctccatgagatatgtggagacccagagcatgcagatcggggccagctacatgatccagttcagcctggtgatgggctgcggccagaagtacaccccccacatggacaaccaggtgaagctggagtacagcaccaaccacggcctgacctggcacctggtgcaggaggagtgcctgcccagcatgcccagctgccaggagttcaccagcgccagcatctaccacgccagcgagttcacccagtggaggagagtgattgtgctgctgccccagaagacctggagcagcgccacccgcttccgctggagccagagctactacacagcccaggatgagtgggccctggacagcatctacatcggccagcagtgccccaacatgtgcagcggccacggcagctgtgaccacggcatctgccgctgtgaccagggctaccagggcacagagtgccaccctgaggccgccctgcccagcaccatcatgtctgactttgagaaccagaatggctgggagagtgactggcaggaggtgattggaggagaaattgtgaagccagagcagggctgtggggtcatcagcagcggcagcagcctgtacttcagcaaggccggcaagaggcagctggtgtcctgggacctggacacctcctgggtggactttgtgcagttctacatccagatcggcggggagagcgccagctgcaacaagccagacagccgggaggagggcgtgctgctgcagtacagcaacaacggcggcatccagtggcacctgctggccgagatgtacttcagtgacttcagcaagcccaggtttgtgtacctggagctgcctgctgctgccaagaccccctgcacccgcttccgctggtggcagcccgtcttctctggagaagattatgaccagtgggccgtggatgacatcatcatcctgtctgagaagcagaagcagatcatccctgtgatcaaccccaccctgccccagaacttctatgagaagccagcctttgactaccccatgaaccagatgtctgtgtggctgatgctggccaatgaaggcatggtgaagaatgagaccttctgtgccgccaccccatctgccatgatctttgggaagagtgatggagacagatttgctgtgacccgggacctgaccctgaagccaggctacgtgctgcagttcaagctgaacatcggctgtgccaaccagttcagcagcacagcccctgtgctgctgcagtacagccatgatgctggcatgtcctggttcctggtgaaggagggctgctacccagccagcgctgggaagggctgtgagggcaacagccgggagctgtctgagcccaccatgtaccacactggagactttgaggagtggacccgcatcaccatcgtcatccccaggagcctggccagcagcaagacccgcttccgctggatccaggagagcagcagccagaagaatgtgcccccatttggcctggatggagtgtacatcagcgagccctgccccagctactgcagcggccatggagactgcatcagcggcgtgtgcttctgtgacctgggctacacagctgcccagggcacctgtgtgtccaatgtgcccaaccacaatgagatgtttgacagatttgagggcaagctgagccccctgtggtacaagatcaccggggcccaggtgggcaccggctgcggcaccctgaatgatggcaagagcctgtacttcaacggccctgggaagcgggaggccaggacagtgcccctggacaccaggaacatccggctggtgcagttctacatccagatcggcagcaagaccagcggcatcacctgcatcaagcccaggaccagaaatgaaggcctcatcgtgcagtacagcaatgacaatggcatcctgtggcacctgctgcgggagctggacttcatgtccttcctggagccccagatcatcagcattgacctgccccaggatgccaagaccccagccacagccttccgctggtggcagccccagcacggcaagcacagcgcccagtgggccctggatgatgtgctgattggcatgaatgacagcagccagacaggcttccaggacaagtttgatggcagcattgacctgcaggccaactggtaccgcatccagggcggccaggtggacatcgactgcctgtccatggacacagccctgatcttcacagaaaatattggcaagcccaggtatgcagagacctgggacttccacgtgtctgccagcaccttcctgcagtttgagatgtccatgggctgcagcaagcccttcagcaacagccacagcgtgcagctgcagtacagcctgaacaacgggaaggactggcacctggtgacagaggagtgtgtgccccccaccatcggctgcctgcactacacagagagcagcatctacaccagcgagcgcttccagaactggaagaggatcaccgtgtacctgcccctgagcaccatcagccccaggacccgcttccgctggatccaggccaactacacagtgggcgctgacagctgggccatcgacaacgtggtgctggccagcggctgcccctggatgtgcagcggccggggcatctgtgatgctggccgctgtgtgtgtgaccggggctttggaggcccctactgtgtgcctgtggtgcccctgcccagcatcctgaaggatgacttcaatggaaacctgcacccagacctgtggccagaggtgtatggagctgagcggggcaacctgaatggagagaccatcaagagcggcaccagcctcatcttcaagggggagggcctgaggatgctgatcagccgggacctggactgcaccaacaccatgtatgtgcagttcagcctgcgcttcatcgccaagagcaccccagagaggagccacagcatcctgctgcagttcagcatcagcggcggcatcacctggcacctgatggatgagttctacttcccccagaccaccaacatcctcttcatcaacgtgcccctgccctacacagcccagaccaatgccacccgcttccggctgtggcagccctacaacaacgggaagaaggaggagatctggatcgtggatgacttcatcattgatggcaacaacgtgaacaaccctgtgatgctgctggacacctttgattttggcccccgggaggacaactggttcttctacccaggcggcaacatcggcctgtactgcccctacagcagcaaaggagcccctgaggaggacagcgccatggtgtttgtgtccaatgaggtgggggagcacagcatcaccacccgggacctgaatgtgaatgaaaacaccatcatccagtttgagatcaacgtgggctgcagcacagacagcagcagcgctgaccctgtgcggctggagttcagccgggactttggagccacctggcacctgctgctgcccctgtgctaccacagcagcagccacgtgagcagcctgtgcagcacagagcaccaccccagcagcacctactatgccggcaccatgcagggctggaggcgggaggtggtgcactttgggaagctgcacctgtgtggctctgtgcgcttccgctggtaccagggcttctacccagctggcagccagcctgtgacctgggccatcgacaacgtgtacatcggcccccagtgtgaggagatgtgcaatggccagggcagctgcatcaatggcaccaagtgcatctgtgaccccggctacagcggccccacctgcaagatcagcaccaagaacccagacttcctgaaggatgactttgagggccagctggagagtgaccgcttcctgctgatgtctgggggcaagcccagcaggaaatgtggcatcctgagcagcggcaacaacctcttcttcaatgaagatggcctgaggatgctgatgacccgggacctggacctgagccacgccaggtttgtgcagttcttcatgaggctgggctgtgggaagggcgtgcctgaccccaggagccagcctgtgctgctgcagtacagcctgaatggaggcctgtcctggagcctgctgcaggagttcctgttcagcaacagcagcaatgtgggccgctacatcgccctggagatccccctgaaggcccggagcggcagcacccggctgcgctggtggcagcccagtgaaaatggccacttctacagcccctgggtgattgaccagatcctgattggaggcaacatcagcggcaacacagtgctggaggatgacttcaccaccctggacagcaggaagtggctgctgcaccctgggggcaccaagatgcctgtgtgtggcagcactggagatgccctggtgttcatcgagaaggccagcacccgctacgtggtgtccacagatgtggccgtgaatgaagacagcttcctgcagattgactttgctgccagctgcagcgtgacagacagctgctacgccatcgagctggagtacagcgtggacctgggcctgtcctggcaccccctggtgcgggactgcctgcccaccaacgtggagtgcagccgctaccacctgcagaggatcctggtgtctgacaccttcaacaagtggacccgcatcaccctgcccctgcccccctacaccaggagccaggccacccgcttccgctggcaccagcctgccccctttgacaagcagcagacctgggccatcgacaacgtgtacatcggagatggctgcatcgacatgtgcagcggccacggccgctgcatccagggcaactgtgtgtgtgatgagcagtggggcggcctgtactgtgatgatcctgagaccagcctgcccacccagctgaaggacaacttcaacagagcccccagcagccagaactggctgactgtgaatggaggcaagctgagcacagtgtgtggggctgtggccagcggcatggccctgcacttcagcggcggctgcagccggctgctggtgacagtggacctgaacctgaccaatgctgagttcatccagttctacttcatgtatggctgcctgatcacccccaacaacagaaaccagggcgtgctgctggagtacagcgtgaatggaggcatcacctggaacctgctgatggagatcttctatgaccagtacagcaagccaggctttgtgaacatcctgctgcccccagatgccaaggagatcgccacccgcttccgctggtggcagcccaggcatgatggcctggaccagaatgactgggccatcgacaacgtgctgatcagcggcagcgctgaccagaggacagtgatgctggacaccttcagcagcgcccctgtgccccagcacgagaggagccctgcagatgctggccctgtgggcagaattgcctttgacatgttcatggaggacaagacctctgtgaatgagcactggctgttccatgatgactgcaccgtggagcgcttctgtgacagcccagatggagtgatgctgtgtggcagccatgatggccgggaggtgtatgctgtgacccatgacctgacccccacagagggctggatcatgcagttcaagatctctgtgggctgcaaggtgtctgagaagatcgcccagaaccagatccacgtgcagtacagcacagactttggagtgtcctggaactacctggtgccccagtgcctgcctgctgaccccaagtgcagcggctctgtgtcccagcccagcgtcttcttccccaccaagggctggaagaggatcacctaccccctgcctgagagcctggtgggcaaccctgtgcgcttccgcttctaccagaagtacagcgacatgcagtgggccatcgacaacttctacctgggccctggctgcctggacaactgccggggccatggagactgcctgcgggagcagtgcatctgtgaccccggctacagcggccccaactgctacctgacccacaccctgaagaccttcctgaaggagagatttgacagcgaggagatcaagccagacctgtggatgagcctggagggcggcagcacctgcacagaatgtggcatcctggccgaggacacagccctgtactttggaggcagcacagtgcggcaggccgtgacccaggacctggacctgcggggggccaagttcctgcagtactggggccgcatcggcagcgagaacaacatgaccagctgccaccggcccatctgcaggaaggagggcgtgctgctggactacagcacagatggcggcatcacctggaccctgctgcacgagatggactaccagaagtacatctctgtgagacatgactacatcctgctgcctgaagatgccctgaccaacaccacccggctgcgctggtggcagccctttgtgatcagcaatggaattgtggtgtctggagtggagcgggcccagtgggccctggacaacatcctgattggaggagctgagatcaaccccagccagctggtggacacctttgatgatgagggcaccagccatgaggagaactggagcttctacccaaatgctgtgaggacagctggcttctgtggcaaccccagcttccacctgtactggcccaacaagaagaaggacaagacccacaatgccctgagcagccgggagctgatcatccagcccggctacatgatgcagttcaagatcgtggtgggctgtgaggccaccagctgtggggacctgcacagcgtgatgctggagtacaccaaggatgcccggagtgacagctggcagctggtgcagacccagtgcctgcccagcagcagcaacagcatcggctgcagccccttccagttccacgaggccaccatctacaacagcgtgaacagcagctcctggaagaggatcaccatccagctgcctgaccacgtgagcagcagcgccacccagttccgctggatccagaagggggaggagacagagaagcagagctgggccatcgaccacgtgtacatcggggaggcctgccccaagctgtgcagcggccacggctactgcaccactggagccatctgcatctgtgatgagagcttccagggagatgactgcagcgtcttcagccatgacctgcccagctacatcaaggacaactttgaaagtgcccgggtgacagaggccaactgggagaccatccagggcggcgtgattggcagcggctgcggccagctggccccctatgcccatggagacagcctgtacttcaacggctgccagatccggcaggccgccaccaagcccctggacctgacccgggccagcaagatcatgtttgtgctgcagatcggctccatgagccagacagacagctgcaacagcgacctgagcggcccccatgctgtggacaaggctgtgctgctgcagtacagcgtgaacaacggcatcacctggcacgtgattgcccagcaccagcccaaggacttcacccaggcccagagggtgtcctacaacgtgcccctggaggccaggatgaagggcgtgctgctgcgctggtggcagcccaggcacaatggaactggacatgaccagtgggccctggaccacgtggaggtggtgctcttcagcaccaggaagcagaactacatgatgaacttcagccggcagcacggcctgcggcacttctacaacagaagaagaagaagcctgcggcgctacccctag

SEQ ID NO: 21613 - DNA, 2934 bp, synthetic construct
  misc_feature 1..2934: note = Description of Artificial Sequence: Synthetic coding sequence
  source 1..2934: mol_type = other DNA
atgtgcagcggccacggccgctgcatccagggcaactgtgtgtgtgatgagcagtggggcggcctgtactgtgatgatcctgagaccagcctgcccacccagctgaaggacaacttcaacagagcccccagcagccagaactggctgactgtgaatggaggcaagctgagcacagtgtgtggggctgtggccagcggcatggccctgcacttcagcggcggctgcagccggctgctggtgacagtggacctgaacctgaccaatgctgagttcatccagttctacttcatgtatggctgcctgatcacccccaacaacagaaaccagggcgtgctgctggagtacagcgtgaatggaggcatcacctggaacctgctgatggagatcttctatgaccagtacagcaagccaggctttgtgaacatcctgctgcccccagatgccaaggagatcgccacccgcttccgctggtggcagcccaggcatgatggcctggaccagaatgactgggccatcgacaacgtgctgatcagcggcagcgctgaccagaggacagtgatgctggacaccttcagcagcgcccctgtgccccagcacgagaggagccctgcagatgctggccctgtgggccgcatcgcctttgacatgttcatggaggacaagacctctgtgaatgagcactggctgttccatgatgactgcaccgtggagcgcttctgtgacagcccagatggagtgatgctgtgtggcagccatgatggccgggaggtgtatgctgtgacccatgacctgacccccacagagggctggatcatgcagttcaagatctctgtgggctgcaaggtgtctgagaagatcgcccagaaccagatccacgtgcagtacagcacagactttggagtgtcctggaactacctggtgccccagtgcctgcctgctgaccccaagtgcagcggctctgtgtcccagcccagcgtcttcttccccaccaagggctggaagaggatcacctaccccctgcctgagagcctggtgggcaaccctgtgcgcttccgcttctaccagaagtacagcgacatgcagtgggccatcgacaacttctacctgggccctggctgcctggacaactgccggggccacggggactgcctgcgggagcagtgcatctgtgaccccggctacagcggccccaactgctacctgacccacaccctgaagaccttcctgaaggagagatttgattctgaggagatcaagccagacctgtggatgagcctggagggcggcagcacctgcacagaatgtggcatcctggccgaggacacagccctgtactttggaggcagcacagtgcggcaggccgtgacccaggacctggacctgcggggggccaagttcctgcagtactggggcagaattggcagcgagaacaacatgaccagctgccaccggcccatctgcaggaaggagggcgtgctgctggactacagcacagatggcggcatcacctggaccctgctgcacgagatggactaccagaagtacatctctgtgagacatgactacatcctgctgcctgaagatgccctgaccaacaccacccggctgcgctggtggcagcccttcgtcatcagcaatggcatcgtggtgtctggagtggagcgggcccagtgggccctggacaacatcctgattggaggagctgagatcaaccccagccagctggtggacacctttgatgatgagggcaccagccatgaggagaactggagcttctacccaaatgctgtgaggacagctggcttctgtggcaaccccagcttccacctgtactggcccaacaagaagaaggacaagacccacaatgccctgagcagccgggagctgatcatccagcccggctacatgatgcagttcaagatcgtggtgggctgtgaggccaccagctgtggggacctgcacagcgtgatgctggagtacaccaaggatgcccggagtgacagctggcagctggtgcagacccagtgcctgcccagcagcagcaacagcatcggctgcagccccttccagttccacgaggccaccatctacaacagcgtgaacagcagctcctggaagaggatcaccatccagctgcctgaccacgtgagcagcagcgccacccagttccgctggatccagaagggggaggagacagagaagcagagctgggccatcgaccacgtgtacatcggggaggcctgccccaagctgtgcagcggccacggctactgcaccaccggggccatctgcatctgtgatgagagcttccagggagatgactgcagcgtcttcagccatgacctgcccagctacatcaaggacaactttgagagcgcccgggtgacagaggccaactgggagaccatccagggcggcgtcatcggcagcggctgcggccagctggccccctatgcccacggggacagcctgtacttcaacggctgccagatccggcaggccgccaccaagcccctggacctgacccgggccagcaagatcatgtttgtgctgcagatcggctccatgagccagacagacagctgcaacagcgacctgagcggcccccatgctgtggacaaggctgtgctgctgcagtacagcgtgaacaacggcatcacctggcacgtgattgcccagcaccagcccaaggacttcacccaggcccagagggtgtcctacaacgtgcccctggaggccaggatgaagggcgtgctgctgcgctggtggcagcccaggcacaacggcaccggccatgaccagtgggccctggaccacgtggaggtggtgctggtgaccaccaggaagcagaactacatgatgaacttcagccggcagcacggcctgcggcacttctacaacagaagaagaagaagcctgcggcgctacccctag

SEQ ID NO: 21614 - DNA, 10383 bp, synthetic construct
  misc_feature 1..10383: note = Description of Artificial Sequence: Synthetic coding sequence
  source 1..10383: mol_type = other DNA
atggagaggagcggctgggcccggcagaccttcctgctggccctgctgctgggcgccaccctgcgggcccgggctgctgctggctactacccccgcttcagccccttcttcttcctgtgcacccaccacggggagctggagggagatggagagcagggcgaggtgctgatcagcctgcacatcgccggcaaccccacctactacgtgcccggccaggagtaccacgtgaccatcagcaccagcaccttctttgatggcctgctggtgacaggcctgtacaccagcacctctgtgcaggccagccagagcatcggcggcagcagcgccttcggcttcggcatcatgtctgaccaccagtttggaaaccagttcatgtgcagcgtggtggccagccacgtgagccacctgcccaccaccaacctgtccttcatctggatcgcccccccagctggcaccggctgtgtgaacttcatggccacagccacccaccggggccaggtgatcttcaaggatgccctggcccagcagctgtgtgagcagggcgcccccacagatgtgacagtgcacccccacctggccgagatccacagcgacagcatcatcctgagagatgactttgacagctaccaccagctgcagctgaaccccaacatctgggtggagtgcaacaactgtgaaacaggagagcagtgtggggccatcatgcacggcaatgctgtgaccttctgtgagccctacggcccccgggagctgatcaccaccggcctgaacaccaccacagcctctgtgctgcagttcagcatcggcagcggcagctgccgcttctcctacagcgaccccagcatcatcgtgctgtatgccaagaacaacagcgctgactggatccagctggagaagatccgggcccccagcaatgtgtccaccatcatccacatcctgtacctgcctgaagatgccaagggggagaatgtgcagttccagtggaagcaggagaacctgcgggtgggggaggtgtatgaggcctgctgggccctggacaacatcctgatcatcaacagcgcccaccggcaggtggtgctggaggacagcctggaccctgtggacaccggcaactggctgttcttccctggggccaccgtgaagcacagctgccagagtgatggcaacagcatctacttccacggcaatgaaggcagcgagttcaactttgccaccaccagagatgtggacctgagcacagaggacatccaggagcagtggagcgaggagtttgagagccagcccaccggctgggatgtgctgggcgccgtcatcggcacagaatgtggcaccattgaaagtggcctgtccatggtgttcctgaaggatggagagaggaagctgtgcacccccagcatggacaccaccggctacggcaacctgcgcttctactttgtgatgggcggcatctgtgaccccggcaacagccatgaaaatgacatcatcctgtatgccaagattgagggcaggaaggagcacatcaccctggacaccctgagctacagcagctacaaggtgcccagcctggtgtctgtggtgatcaaccctgagctgcagaccccagccaccaagttctgcctgcggcagaagaaccaccagggccacaacagaaatgtgtgggccgtggacttcttccacgtgctgcctgtgctgcccagcaccatgagccacatgatccagttcagcatcaacctgggctgcggcacccaccagcccggcaacagcgtgtccctggagttcagcaccaaccacggccgctcctggagcctgctgcacacagaatgtctgcctgagatctgtgccggcccccacctgccccacagcacagtgtacagcagcgagaactacagcggctggaaccgcatcaccatccccctgcccaatgctgccctgaccaggaacacccgcatccgctggaggcagacaggccccatcctgggcaacatgtgggccatcgacaacgtgtacatcggccccagctgcctgaagttctgcagcggccggggccagtgcaccaggcatggctgcaagtgtgaccccggcttcagcggccctgcctgtgagatggccagccagaccttccccatgttcatcagcgagagctttggcagcagccggctgagcagctaccacaacttctacagcatcagaggagctgaggtgtcctttggctgcggcgtgctggccagcggcaaggccctggtgttcaacaaggatggccggcggcagctgatcaccagcttcctggacagcagccagagccgcttcctgcagttcaccctgcggctgggcagcaagtctgtgctgagcacctgccgggccccagaccagcctggagagggcgtgctgctgcactacagctatgacaatggcatcacctggaagctgctggagcactacagctacctgagctaccacgagccccgcatcatctctgtggagctgcctggagatgccaagcagtttggcatccagttccgctggtggcagccctaccacagcagccagagagaagatgtgtgggccattgatgagatcatcatgacctctgtgctcttcaacagcatcagcctggacttcaccaacctggtggaggtgacccagagcctgggcttctacctgggcaatgtgcagccctactgcggccatgactggaccctgtgcttcaccggggacagcaagctggccagctccatgagatatgtggagacccagagcatgcagatcggggccagctacatgatccagttcagcctggtgatgggctgcggccagaagtacaccccccacatggacaaccaggtgaagctggagtacagcaccaaccacggcctgacctggcacctggtgcaggaggagtgcctgcccagcatgcccagctgccaggagttcaccagcgccagcatctaccacgccagcgagttcacccagtggaggagagtgattgtgctgctgccccagaagacctggagcagcgccacccgcttccgctggagccagagctactacacagcccaggatgagtgggccctggacagcatctacatcggccagcagtgccccaacatgtgcagcggccacggcagctgtgaccacggcatctgccgctgtgaccagggctaccagggcacagagtgccaccctgaggccgccctgcccagcaccatcatgtctgactttgagaaccagaatggctgggagagtgactggcaggaggtgattggaggagaaattgtgaagccagagcagggctgtggggtcatcagcagcggcagcagcctgtacttcagcaaggccggcaagaggcagctggtgtcctgggacctggacacctcctgggtggactttgtgcagttctacatccagatcggcggggagagcgccagctgcaacaagccagacagccgggaggagggcgtgctgctgcagtacagcaacaacggcggcatccagtggcacctgctggccgagatgtacttcagtgacttcagcaagcccaggtttgtgtacctggagctgcctgctgctgccaagaccccctgcacccgcttccgctggtggcagcccgtcttctctggagaagattatgaccagtgggccgtggatgacatcatcatcctgtctgagaagcagaagcagatcatccctgtgatcaaccccaccctgccccagaacttctatgagaagccagcctttgactaccccatgaaccagatgtctgtgtggctgatgctggccaatgaaggcatggtgaagaatgagaccttctgtgccgccaccccatctgccatgatctttgggaagagtgatggagacagatttgctgtgacccgggacctgaccctgaagccaggctacgtgctgcagttcaagctgaacatcggctgtgccaaccagttcagcagcacagcccctgtgctgctgcagtacagccatgatgctggcatgtcctggttcctggtgaaggagggctgctacccagccagcgctgggaagggctgtgagggcaacagccgggagctgtctgagcccaccatgtaccacactggagactttgaggagtggacccgcatcaccatcgtcatccccaggagcctggccagcagcaagacccgcttccgctggatccaggagagcagcagccagaagaatgtgcccccatttggcctggatggagtgtacatcagcgagccctgccccagctactgcagcggccatggagactgcatcagcggcgtgtgcttctgtgacctgggctacacagctgcccagggcacctgtgtgtccaatgtgcccaaccacaatgagatgtttgacagatttgagggcaagctgagccccctgtggtacaagatcaccggggcccaggtgggcaccggctgcggcaccctgaatgatggcaagagcctgtacttcaacggccctgggaagcgggaggccaggacagtgcccctggacaccaggaacatccggctggtgcagttctacatccagatcggcagcaagaccagcggcatcacctgcatcaagcccaggaccagaaatgaaggcctcatcgtgcagtacagcaatgacaatggcatcctgtggcacctgctgcgggagctggacttcatgtccttcctggagccccagatcatcagcattgacctgccccaggatgccaagaccccagccacagccttccgctggtggcagccccagcacggcaagcacagcgcccagtgggccctggatgatgtgctgattggcatgaatgacagcagccagacaggcttccaggacaagtttgatggcagcattgacctgcaggccaactggtaccgcatccagggcggccaggtggacatcgactgcctgtccatggacacagccctgatcttcacagaaaatattggcaagcccaggtatgcagagacctgggacttccacgtgtctgccagcaccttcctgcagtttgagatgtccatgggctgcagcaagcccttcagcaacagccacagcgtgcagctgcagtacagcctgaacaacgggaaggactggcacctggtgacagaggagtgtgtgccccccaccatcggctgcctgcactacacagagagcagcatctacaccagcgagcgcttccagaactggaagaggatcaccgtgtacctgcccctgagcaccatcagccccaggacccgcttccgctggatccaggccaactacacagtgggcgctgacagctgggccatcgacaacgtggtgctggccagcggctgcccctggatgtgcagcggccggggcatctgtgatgctggccgctgtgtgtgtgaccggggctttggaggcccctactgtgtgcctgtggtgcccctgcccagcatcctgaaggatgacttcaatggaaacctgcacccagacctgtggccagaggtgtatggagctgagcggggcaacctgaatggagagaccatcaagagcggcaccagcctcatcttcaagggggagggcctgaggatgctgatcagccgggacctggactgcaccaacaccatgtatgtgcagttcagcctgcgcttcatcgccaagagcaccccagagaggagccacagcatcctgctgcagttcagcatcagcggcggcatcacctggcacctgatggatgagttctacttcccccagaccaccaacatcctcttcatcaacgtgcccctgccctacacagcccagaccaatgccacccgcttccggctgtggcagccctacaacaacgggaagaaggaggagatctggatcgtggatgacttcatcattgatggcaacaacgtgaacaaccctgtgatgctgctggacacctttgattttggcccccgggaggacaactggttcttctacccaggcggcaacatcggcctgtactgcccctacagcagcaaaggagcccctgaggaggacagcgccatggtgtttgtgtccaatgaggtgggggagcacagcatcaccacccgggacctgaatgtgaatgaaaacaccatcatccagtttgagatcaacgtgggctgcagcacagacagcagcagcgctgaccctgtgcggctggagttcagccgggactttggagccacctggcacctgctgctgcccctgtgctaccacagcagcagccacgtgagcagcctgtgcagcacagagcaccaccccagcagcacctactatgccggcaccatgcagggctggaggcgggaggtggtgcactttgggaagctgcacctgtgtggctctgtgcgcttccgctggtaccagggcttctacccagctggcagccagcctgtgacctgggccatcgacaacgtgtacatcggcccccagtgtgaggagatgtgcaatggccagggcagctgcatcaatggcaccaagtgcatctgtgaccccggctacagcggccccacctgcaagatcagcaccaagaacccagacttcctgaaggatgactttgagggccagctggagagtgaccgcttcctgctgatgtctgggggcaagcccagcaggaaatgtggcatcctgagcagcggcaacaacctcttcttcaatgaagatggcctgaggatgctgatgacccgggacctggacctgagccacgccaggtttgtgcagttcttcatgaggctgggctgtgggaagggcgtgcctgaccccaggagccagcctgtgctgctgcagtacagcctgaatggaggcctgtcctggagcctgctgcaggagttcctgttcagcaacagcagcaatgtgggccgctacatcgccctggagatccccctgaaggcccggagcggcagcacccggctgcgctggtggcagcccagtgaaaatggccacttctacagcccctgggtgattgaccagatcctgattggaggcaacatcagcggcaacacagtgctggaggatgacttcaccaccctggacagcaggaagtggctgctgcaccctgggggcaccaagatgcctgtgtgtggcagcactggagatgccctggtgttcatcgagaaggccagcacccgctacgtggtgtccacagatgtggccgtgaatgaagacagcttcctgcagattgactttgctgccagctgcagcgtgacagacagctgctacgccatcgagctggagtacagcgtggacctgggcctgtcctggcaccccctggtgcgggactgcctgcccaccaacgtggagtgcagccgctaccacctgcagaggatcctggtgtctgacaccttcaacaagtggacccgcatcaccctgcccctgcccccctacaccaggagccaggccacccgcttccgctggcaccagcctgccccctttgacaagcagcagacctgggccatcgacaacgtgtacatcggagatggctgcatcgacatgtgcagcggccacggccgctgcatccagggcaactgtgtgtgtgatgagcagtggggcggcctgtactgtgatgatcctgagaccagcctgcccacccagctgaaggacaacttcaacagagcccccagcagccagaactggctgactgtgaatggaggcaagctgagcacagtgtgtggggctgtggccagcggcatggccctgcacttcagcggcggctgcagccggctgctggtgacagtggacctgaacctgaccaatgctgagttcatccagttctacttcatgtatggctgcctgatcacccccaacaacagaaaccagggcgtgctgctggagtacagcgtgaatggaggcatcacctggaacctgctgatggagatcttctatgaccagtacagcaagccaggctttgtgaacatcctgctgcccccagatgccaaggagatcgccacccgcttccgctggtggcagcccaggcatgatggcctggaccagaatgactgggccatcgacaacgtgctgatcagcggcagcgctgaccagaggacagtgatgctggacaccttcagcagcgcccctgtgccccagcacgagaggagccctgcagatgctggccctgtgggcagaattgcctttgacatgttcatggaggacaagacctctgtgaatgagcactggctgttccatgatgactgcaccgtggagcgcttctgtgacagcccagatggagtgatgctgtgtggcagccatgatggccgggaggtgtatgctgtgacccatgacctgacccccacagagggctggatcatgcagttcaagatctctgtgggctgcaaggtgtctgagaagatcgcccagaaccagatccacgtgcagtacagcacagactttggagtgtcctggaactacctggtgccccagtgcctgcctgctgaccccaagtgcagcggctctgtgtcccagcccagcgtcttcttccccaccaagggctggaagaggatcacctaccccctgcctgagagcctggtgggcaaccctgtgcgcttccgcttctaccagaagtacagcgacatgcagtgggccatcgacaacttctacctgggccctggctgcctggacaactgccggggccatggagactgcctgcgggagcagtgcatctgtgaccccggctacagcggccccaactgctacctgacccacaccctgaagaccttcctgaaggagagatttgacagcgaggagatcaagccagacctgtggatgagcctggagggcggcagcacctgcacagaatgtggcatcctggccgaggacacagccctgtactttggaggcagcacagtgcggcaggccgtgacccaggacctggacctgcggggggccaagttcctgcagtactggggccgcatcggcagcgagaacaacatgaccagctgccaccggcccatctgcaggaaggagggcgtgctgctggactacagcacagatggcggcatcacctggaccctgctgcacgagatggactaccagaagtacatctctgtgagacatgactacatcctgctgcctgaagatgccctgaccaacaccacccggctgcgctggtggcagccctttgtgatcagcaatggaattgtggtgtctggagtggagcgggcccagtgggccctggacaacatcctgattggaggagctgagatcaaccccagccagctggtggacacctttgatgatgagggcaccagccatgaggagaactggagcttctacccaaatgctgtgaggacagctggcttctgtggcaaccccagcttccacctgtactggcccaacaagaagaaggacaagacccacaatgccctgagcagccgggagctgatcatccagcccggctacatgatgcagttcaagatcgtggtgggctgtgaggccaccagctgtggggacctgcacagcgtgatgctggagtacaccaaggatgcccggagtgacagctggcagctggtgcagacccagtgcctgcccagcagcagcaacagcatcggctgcagccccttccagttccacgaggccaccatctacaacagcgtgaacagcagctcctggaagaggatcaccatccagctgcctgaccacgtgagcagcagcgccacccagttccgctggatccagaagggggaggagacagagaagcagagctgggccatcgaccacgtgtacatcggggaggcctgccccaagctgtgcagcggccacggctactgcaccactggagccatctgcatctgtgatgagagcttccagggagatgactgcagcgtcttcagccatgacctgcccagctacatcaaggacaactttgaaagtgcccgggtgacagaggccaactgggagaccatccagggcggcgtgattggcagcggctgcggccagctggccccctatgcccatggagacagcctgtacttcaacggctgccagatccggcaggccgccaccaagcccctggacctgacccgggccagcaagatcatgtttgtgctgcagatcggctccatgagccagacagacagctgcaacagcgacctgagcggcccccatgctgtggacaaggctgtgctgctgcagtacagcgtgaacaacggcatcacctggcacgtgattgcccagcaccagcccaaggacttcacccaggcccagagggtgtcctacaacgtgcccctggaggccaggatgaagggcgtgctgctgcgctggtggcagcccaggcacaatggaactggacatgaccagtgggccctggaccacgtggaggtggtgctggtgtccaccaggaagcagaactacatgatgaacttcagccggcagcacggcctgcggcacttctacaacagaagaagaagaagcctgcggcgctacccctag

SEQ ID NO: 21615 - DNA, 10284 bp, synthetic construct
  misc_feature 1..10284: note = Description of Artificial Sequence: Synthetic coding sequence
  source 1..10284: mol_type = other DNA
atggagaggagcggctgggcccggcagaccttcctgctggccctgctgctgggcgccaccctgcgggcccgggctgctgctggctactacccccgcttcagccccttcttcttcctgtgcacccaccacggggagctggagggagatggagagcagggcgaggtgctgatcagcctgcacatcgccggcaaccccacctactacgtgcccggccaggagtaccacgtgaccatcagcaccagcaccttctttgatggcctgctggtgacaggcctgtacaccagcacctctgtgcaggccagccagagcatcggcggcagcagcgccttcggcttcggcatcatgtctgaccaccagtttggaaaccagttcatgtgcagcgtggtggccagccacgtgagccacctgcccaccaccaacctgtccttcatctggatcgcccccccagctggcaccggctgtgtgaacttcatggccacagccacccaccggggccaggtgatcttcaaggatgccctggcccagcagctgtgtgagcagggcgcccccacagatgtgacagtgcacccccacctggccgagatccacagcgacagcatcatcctgagagatgactttgacagctaccaccagctgcagctgaaccccaacatctgggtggagtgcaacaactgtgaaacaggagagcagtgtggggccatcatgcacggcaatgctgtgaccttctgtgagccctacggcccccgggagctgatcaccaccggcctgaacaccaccacagcctctgtgctgcagttcagcatcggcagcggcagctgccgcttctcctacagcgaccccagcatcatcgtgctgtatgccaagaacaacagcgctgactggatccagctggagaagatccgggcccccagcaatgtgtccaccatcatccacatcctgtacctgcctgaagatgccaagggggagaatgtgcagttccagtggaagcaggagaacctgcgggtgggggaggtgtatgaggcctgctgggccctggacaacatcctgatcatcaacagcgcccaccggcaggtggtgctggaggacagcctggaccctgtggacaccggcaactggctgttcttccctggggccaccgtgaagcacagctgccagagtgatggcaacagcatctacttccacggcaatgaaggcagcgagttcaactttgccaccaccagagatgtggacctgagcacagaggacatccaggagcagtggagcgaggagtttgagagccagcccaccggctgggatgtgctgggcgccgtcatcggcacagaatgtggcaccattgaaagtggcctgtccatggtgttcctgaaggatggagagaggaagctgtgcacccccagcatggacaccaccggctacggcaacctgcgcttctactttgtgatgggcggcatctgtgaccccggcaacagccatgaaaatgacatcatcctgtatgccaagattgagggcaggaaggagcacatcaccctggacaccctgagctacagcagctacaaggtgcccagcctggtgtctgtggtgatcaaccctgagctgcagaccccagccaccaagttctgcctgcggcagaagaaccaccagggccacaacagaaatgtgtgggccgtggacttcttccacgtgctgcctgtgctgcccagcaccatgagccacatgatccagttcagcatcaacctgggctgcggcacccaccagcccggcaacagcgtgtccctggagttcagcaccaaccacggccgctcctggagcctgctgcacacagaatgtctgcctgagatctgtgccggcccccacctgccccacagcacagtgtacagcagcgagaactacagcggctggaaccgcatcaccatccccctgcccaatgctgccctgaccaggaacacccgcatccgctggaggcagacaggccccatcctgggcaacatgtgggccatcgacaacgtgtacatcggccccagctgcctgaagttctgcagcggccggggccagtgcaccaggcatggctgcaagtgtgaccccggcttcagcggccctgcctgtgagatggccagccagaccttccccatgttcatcagcgagagctttggcagcagccggctgagcagctaccacaacttctacagcatcagaggagctgaggtgtcctttggctgcggcgtgctggccagcggcaaggccctggtgttcaacaaggatggccggcggcagctgatcaccagcttcctggacagcagccagagccgcttcctgcagttcaccctgcggctgggcagcaagtctgtgctgagcacctgccgggccccagaccagcctggagagggcgtgctgctgcactacagctatgacaatggcatcacctggaagctgctggagcactacagctacctgagctaccacgagccccgcatcatctctgtggagctgcctggagatgccaagcagtttggcatccagttccgctggtggcagccctaccacagcagccagagagaagatgtgtgggccattgatgagatcatcatgacctctgtgctcttcaacagcatcagcctggacttcaccaacctggtggaggtgacccagagcctgggcttctacctgggcaatgtgcagccctactgcggccatgactggaccctgtgcttcaccggggacagcaagctggccagctccatgagatatgtggagacccagagcatgcagatcggggccagctacatgatccagttcagcctggtgatgggctgcggccagaagtacaccccccacatggacaaccaggtgaagctggagtacagcaccaaccacggcctgacctggcacctggtgcaggaggagtgcctgcccagcatgcccagctgccaggagttcaccagcgccagcatctaccacgccagcgagttcacccagtggaggagagtgattgtgctgctgccccagaagacctggagcagcgccacccgcttccgctggagccagagctactacacagcccaggatgagtgggccctggacagcatctacatcggccagcagtgccccaacatgtgcagcggccacggcagctgtgaccacggcatctgccgctgtgaccagggctaccagggcacagagtgccaccctgaggccgccctgcccagcaccatcatgtctgactttgagaaccagaatggctgggagagtgactggcaggaggtgattggaggagaaattgtgaagccagagcagggctgtggggtcatcagcagcggcagcagcctgtacttcagcaaggccggcaagaggcagctggtgtcctgggacctggacacctcctgggtggactttgtgcagttctacatccagatcggcggggagagcgccagctgcaacaagccagacagccgggaggagggcgtgctgctgcagtacagcaacaacggcggcatccagtggcacctgctggccgagatgtacttcagtgacttcagcaagcccaggtttgtgtacctggagctgcctgctgctgccaagaccccctgcacccgcttccgctggtggcagcccgtcttctctggagaagattatgaccagtgggccgtggatgacatcatcatcctgtctgagaagcagaagcagatcatccctgtgatcaaccccaccctgccccagaacttctatgagaagccagcctttgactaccccatgaaccagatgtctgtgtggctgatgctggccaatgaaggcatggtgaagaatgagaccttctgtgccgccaccccatctgccatgatctttgggaagagtgatggagacagatttgctgtgacccgggacctgaccctgaagccaggctacgtgctgcagttcaagctgaacatcggctgtgccaaccagttcagcagcacagcccctgtgctgctgcagtacagccatgatgctggcatgtcctggttcctggtgaaggagggctgctacccagccagcgctgggaagggctgtgagggcaacagccgggagctgtctgagcccaccatgtaccacactggagactttgaggagtggacccgcatcaccatcgtcatccccaggagcctggccagcagcaagacccgcttccgctggatccaggagagcagcagccagaagaatgtgcccccatttggcctggatggagtgtacatcagcgagccctgccccagctactgcagcggccatggagactgcatcagcggcgtgtgcttctgtgacctgggctacacagctgcccagggcacctgtgtgtccaatgtgcccaaccacaatgagatgtttgacagatttgagggcaagctgagccccctgtggtacaagatcaccggggcccaggtgggcaccggctgcggcaccctgaatgatggcaagagcctgtacttcaacggccctgggaagcgggaggccaggacagtgcccctggacaccaggaacatccggctggtgcagttctacatccagatcggcagcaagaccagcggcatcacctgcatcaagcccaggaccagaaatgaaggcctcatcgtgcagtacagcaatgacaatggcatcctgtggcacctgctgcgggagctggacttcatgtccttcctggagccccagatcatcagcattgacctgccccaggatgccaagaccccagccacagccttccgctggtggcagccccagcacggcaagcacagcgcccagtgggccctggatgatgtgctgattggcatgaatgacagcagccagacaggcttccaggacaagtttgatggcagcattgacctgcaggccaactggtaccgcatccagggcggccaggtggacatcgactgcctgtccatggacacagccctgatcttcacagaaaatattggcaagcccaggtatgcagagacctgggacttccacgtgtctgccagcaccttcctgcagtttgagatgtccatgggctgcagcaagcccttcagcaacagccacagcgtgcagctgcagtacagcctgaacaacgggaaggactggcacctggtgacagaggagtgtgtgccccccaccatcggctgcctgcactacacagagagcagcatctacaccagcgagcgcttccagaactggaagaggatcaccgtgtacctgcccctgagcaccatcagccccaggacccgcttccgctggatccaggccaactacacagtgggcgctgacagctgggccatcgacaacgtggtgctggccagcggctgcccctggatgtgcagcggccggggcatctgtgatgctggccgctgtgtgtgtgaccggggctttggaggcccctactgtgtgcctgtggtgcccctgcccagcatcctgaaggatgacttcaatggaaacctgcacccagacctgtggccagaggtgtatggagctgagcggggcaacctgaatggagagaccatcaagagcggcaccagcctcatcttcaagggggagggcctgaggatgctgatcagccgggacctggactgcaccaacaccatgtatgtgcagttcagcctgcgcttcatcgccaagagcaccccagagaggagccacagcatcctgctgcagttcagcatcagcggcggcatcacctggcacctgatggatgagttctacttcccccagaccaccaacatcctcttcatcaacgtgcccctgccctacacagcccagaccaatgccacccgcttccggctgtggcagccctacaacaacgggaagaaggaggagatctggatcgtggatgacttcatcattgatggcaacaacgtgaacaaccctgtgatgctgctggacacctttgattttggcccccgggaggacaactggttcttctacccaggcggcaacatcggcctgtactgcccctacagcagcaaaggagcccctgaggaggacagcgccatggtgtttgtgtccaatgaggtgggggagcacagcatcaccacccgggacctgaatgtgaatgaaaacaccatcatccagtttgagatcaacgtgggctgcagcacagacagcagcagcgctgaccctgtgcggctggagttcagccgggactttggagccacctggcacctgctgctgcccctgtgctaccacagcagcagccacgtgagcagcctgtgcagcacagagcaccaccccagcagcacctactatgccggcaccatgcagggctggaggcgggaggtggtgcactttgggaagctgcacctgtgtggctctgtgcgcttccgctggtaccagggcttctacccagctggcagccagcctgtgacctgggccatcgacaacgtgtacatcggcccccagtgtgaggagatgtgcaatggccagggcagctgcatcaatggcaccaagtgcatctgtgaccccggctacagcggccccacctgcaagatcagcaccaagaacccagacttcctgaaggatgactttgagggccagctggagagtgaccgcttcctgctgatgtctgggggcaagcccagcaggaaatgtggcatcctgagcagcggcaacaacctcttcttcaatgaagatggcctgaggatgctgatgacccgggacctggacctgagccacgccaggtttgtgcagttcttcatgaggctgggctgtgggaagggcgtgcctgaccccaggagccagcctgtgctgctgcagtacagcctgaatggaggcctgtcctggagcctgctgcaggagttcctgttcagcaacagcagcaatgtgggccgctacatcgccctggagatccccctgaaggcccggagcggcagcacccggctgcgctggtggcagcccagtgaaaatggccacttctacagcccctgggtgattgaccagatcctgattggaggcaacatcagcggcaacacagtgctggaggatgacttcaccaccctggacagcaggaagtggctgctgcaccctgggggcaccaagatgcctgtgtgtggcagcactggagatgccctggtgttcatcgagaaggccagcacccgctacgtggtgtccacagatgtggccgtgaatgaagacagcttcctgcagattgactttgctgccagctgcagcgtgacagacagctgctacgccatcgagctggagtacagcgtggacctgggcctgtcctggcaccccctggtgcgggactgcctgcccaccaacgtggagtgcagccgctaccacctgcagaggatcctggtgtctgacaccttcaacaagtggacccgcatcaccctgcccctgcccccctacaccaggagccaggccacccgcttccgctggcaccagcctgccccctttgacaagcagcagacctgggccatcgacaacgtgtacatcggagatggctgcatcgacatgtgcagcggccacggccgctgcatccagggcaactgtgtgtgtgatgagcagtggggcggcctgtactgtgatgatcctgagaccagcctgcccacccagctgaaggacaacttcaacagagcccccagcagccagaactggctgactgtgaatggaggcaagctgagcacagtgtgtggggctgtggccagcggcatggccctgcacttcagcggcggctgcagccggctgctggtgacagtggacctgaacctgaccaatgctgagttcatccagttctacttcatgtatggctgcctgatcacccccaacaacagaaaccagggcgtgctgctggagtacagcgtgaatggaggcatcacctggaacctgctgatggagatcttctatgaccagtacagcaagccaggctttgtgaacatcctgctgcccccagatgccaaggagatcgccacccgcttccgctggtggcagcccaggcatgatggcctggaccagaatgactgggccatcgacaacgtgctgatcagcggcagcgctgaccagaggacagtgatgctggacaccttcagcagcgcccctgtgccccagcacgagaggagccctgcagatgctggccctgtgggcagaattgcctttgacatgttcatggaggacaagacctctgtgaatgagcactggctgttccatgatgactgcaccgtggagcgcttctgtgacagcccagatggagtgatgctgtgtggcagccatgatggccgggaggtgtatgctgtgacccatgacctgacccccacagagggctggatcatgcagttcaagatctctgtgggctgcaaggtgtctgagaagatcgcccagaaccagatccacgtgcagtacagcacagactttggagtgtcctggaactacctggtgccccagtgcctgcctgctgaccccaagtgcagcggctctgtgtcccagcccagcgtcttcttccccaccaagggctggaagaggatcacctaccccctgcctgagagcctggtgggcaaccctgtgcgcttccgcttctaccagaagtacagcgacatgcagtgggccatcgacaacttctacctgggccctggctgcctggacaactgccggggccatggagactgcctgcgggagcagtgcatctgtgaccccggctacagcggccccaactgctacctgacccacaccctgaagaccttcctgaaggagagatttgacagcgaggagatcaagccagacctgtggatgagcctggagggcggcagcacctgcacagaatgtggcatcctggccgaggacacagccctgtactttggaggcagcacagtgcggcaggccgtgacccaggacctggacctgcggggggccaagttcctgcagtactggggccgcatcggcagcgagaacaacatgaccagctgccaccggcccatctgcaggaaggagggcgtgctgctggactacagcacagatggcggcatcacctggaccctgctgcacgagatggactaccagaagtacatctctgtgagacatgactacatcctgctgcctgaagatgccctgaccaacaccacccggctgcgctggtggcagccctttgtgatcagcaatggaattgtggtgtctggagtggagcgggcccagtgggccctggacaacatcctgattggaggagctgagatcaaccccagccagctggtggacacctttgatgatgagggcaccagccatgaggagaactggagcttctacccaaatgctgtgaggacagctggcttctgtggcaaccccagcttccacctgtactggcccaacaagaagaaggacaagacccacaatgccctgagcagccgggagctgatcatccagcccggctacatgatgcagttcaagatcgtggtgggctgtgaggccaccagctgtggggacctgcacagcgtgatgctggagtacaccaaggatgcccggagtgacagctggcagctggtgcagacccagtgcctgcccagcagcagcaacagcatcggctgcagccccttccagttccacgaggccaccatctacaacagcgtgaacagcagctcctggaagaggatcaccatccagctgcctgaccacgtgagcagcagcgccacccagttccgctggatccagaagggggaggagacagagaagcagagctgggccatcgaccacgtgtacatcggggaggcctgccccaagctgtgcagcggccacggctactgcaccactggagccatctgcatctgtgatgagagcttccagggagatgactgcagcgtcttcagccatgacctgcccagctacatcaaggacaactttgaaagtgcccgggtgacagaggccaactgggagaccatccagggcggcgtgattggcagcggctgcggccagctggccccctatgcccatggagacagcctgtacttcaacggctgccagatccggcaggccgccaccaagcccctggacctgacccgggccagcaagatcatgtttgtgctgcagatcggctccatgagccagacagacagctgcaacagcgacctgagcggcccccatgctgtggacaaggctgtgctgctgcagtacagcgtgaacaacggcatcacctggcacgtgattgcccagcaccagcccaaggacttcacccaggcccagagggtgtcctacaacgtgcccctggaggccaggatgaagggcgtgctgctgcgctggtggcagcccaggcacaatggaactggacatgaccagtgggccctggaccacgtggaggtggtgctgtag

SEQ ID NO: 21616 - DNA, 1668 bp, synthetic construct
  misc_feature 1..1668: note = Description of Artificial Sequence: Synthetic coding sequence
  source 1..1668: mol_type = other DNA
atgaagaagcatgactttgctgagaacctgcccagcagcctgctgatcatcatcctggtgatcttcaccctgagcggcagcaagtttggccggggcaccggcctgacccagcccagccagaggaccagcgcccggcgcagctttggccgcagcaagcgcttcagcatcaccaggagcctggatgacctggagagcgccaccgtgtctgatggagagctgaccggggctgacctgaaggactgtgtgagcaacaacagcctgagcagcaatgccagcctgcccagcgtgcagagctgccggcggctgcgggagaggagagtggcctcctgggccgtgtcctttgagcggctgctgcaggaccctgtgggcgtgcgctacttcagtgacttcctgaggaaggagttcagcgaggagaacatcctcttctggcaggcctgtgagtacttcaaccacgtgcctgcccatgacaagaaggagctgagctaccgggcccgggagatcttcagcaagttcctgtgcagcaaggccaccacccctgtgaacatcgacagccaggcccagctggctgatgatgtgctgcgggccccccacccagacatgttcaaggagcagcagctgcagatcttcaacctgatgaagtttgacagctacacccgcttcctgaagagccccctgtaccaggagtgcatcctggccgaggtggagggccgggccctgcctgacagccagcaggtgcccagcagccctgccagcaagcacagcctgggcagtgaccacagctctgtgtccacccccaagaagctgagcggcaagagcaagagcggccgcagcctgaatgaggagctgggagatgaagattctgagaagaagaggaagggggccttcttctcctggagcaggaccaggagcacaggccgcagccagaagaagcgggagcacggggaccatgctgatgatgccctgcacgccaacggcggcctgtgcagaagagagagccagggctctgtgagcagcgctggcagcctggacctgtctgaggcctgcaggaccctggcccctgagaaggacaaggccaccaagcactgctgcatccacctgcctgatggcaccagctgtgtggtggccgtgaaggccggcttcagcatcaaggacatcctgagcggcctgtgtgaaagacatggcatcaacggggctgctgctgacctcttcctggtgggcggggacaagcccctggtgctgcaccaggacagcagcatcctggagagccgggacctgcggctggagaagaggaccctcttccggctggacctggtgcccatcaacagatctgtgggcctgaaggccaagcccaccaagcctgtgacagaggtgctgcggcctgtggtggcccgctatggcctggacctgagcggcctgctggtgcggctgtctggagagaaggagcccctggacctgggcgcccccatcagcagcctggatggccagagggtggtgctggaggagaaggaccccagccggggcaaggccagcgctgacaagcagaagggcgtgcctgtgaagcagaacacagctgtgaacagcagcagcaggaaccacagcgccaccagcttcctgagcctcttccccaagctgcgggccacagagcagatgaccaacgtgggctgctag

SEQ ID NO: 21617 - DNA, 4131 bp, synthetic construct
  misc_feature 1..4131: note = Description of Artificial Sequence: Synthetic coding sequence
  source 1..4131: mol_type = other DNA
atgttccgggccggggaggccagcaagaggcccctgcccggccccagccccccccgggtgcgctctgtggaggtggcccggggccgggccggctacggcttcaccctgagcggccaggccccctgtgtgctgagctgtgtgatgaggggcagccctgctgactttgtgggcctgcgggccggggaccagatcctggccgtgaatgagatcaacgtgaagaaggccagccatgaagatgtggtgaagctgattggcaagtgcagcggcgtgctgcacatggtgattgctgagggcgtgggccgctttgagagctgcagcagtgatgaggagggcggcctgtatgagggcaagggctggctgaagcccaagctggacagcaaggccctgggcatcaacagagctgagcgggtggtggaggagatgcagagcggcggcatcttcaacatgatctttgagaaccccagcctgtgtgccagcaacagcgagcccctgaagctgaagcagaggagcctgtctgagagcgctgccaccaggtttgatgtgggccacgagagcatcaacaaccccaaccccaacatgctgagcaaggaggagatcagcaaggtgattcatgatgattctgtgttcagcatcggcctggagagccatgatgactttgccctggatgccagcatcctgaatgtggccatgattgtgggctacctgggcagcattgagctgcccagcaccagcagcaacctggagagtgacagcctgcaggccatccggggctgcatgaggcggctgcgggcagagcagaagatccacagcctggtgaccatgaagatcatgcatgactgtgtgcagctgagcacagacaaggccggcgtggtggccgagtacccagctgagaagctggccttctctgctgtgtgcccagatgaccggcgcttcttcggcctggtgaccatgcagaccaatgatgatggcagcctggcccaggaggaggagggcgccctgcggaccagctgccacgtgttcatggtggaccctgacctcttcaaccacaagatccaccagggcatcgccaggagatttggatttgagtgcacagctgaccctgacaccaacggctgcctggagttccctgccagcagcctgcctgtgctgcagttcatctctgtgctgtacagagacatgggagagctgattgagggcatgagggcccgggccttcctggatggagatgctgatgcccaccagaacaacagcaccagcagcaacagcgacagcggcatcggcaacttccaccaggaggagaagagcaacagagtgctggtggtggacctgggcggcagcagcagccgccacggccctgggggcagcgcctgggatggagtgggcggccgcggggcccagccctggggcgccccctggacaggccccttctgcccagaccctgagggcagccccccatttgaggccgcccaccagacagaccgcttctgggacctgaacaagcacctgggccctgccagccctgtggaggtgcccccagccagcctgcggagctctgtgccccccagcaagaggggcaccgtgggcgccggctgcggcttcaaccagcgctggctgcctgtgcacgtgctgcgggagtggcagtgtggccacaccagtgaccaggacagctacacagacagcacagatggctggagcagcatcaactgtggcaccctgcccccacccatgagcaagatcccagctgaccgctacagagtggagggcagctttgcccagccccccctgaatgcccccaagcgggagtggagcaggaaggccttcggcatgcagagcatcttcggcccccacagaaatgtgaggaagaccaaggaggacaagaagggcagcaagtttggccggggcaccggcctgacccagcccagccagaggaccagcgcccggcgcagctttggccgcagcaagcgcttcagcatcaccaggagcctggatgacctggagagcgccaccgtgtctgatggagagctgaccggggctgacctgaaggactgtgtgagcaacaacagcctgagcagcaatgccagcctgcccagcgtgcagagctgccggcggctgcgggagaggagagtggcctcctgggccgtgtcctttgagcggctgctgcaggaccctgtgggcgtgcgctacttcagtgacttcctgaggaaggagttcagcgaggagaacatcctcttctggcaggcctgtgagtacttcaaccacgtgcctgcccatgacaagaaggagctgagctaccgggcccgggagatcttcagcaagttcctgtgcagcaaggccaccacccctgtgaacatcgacagccaggcccagctggctgatgatgtgctgcgggccccccacccagacatgttcaaggagcagcagctgcagatcttcaacctgatgaagtttgacagctacacccgcttcctgaagagccccctgtaccaggagtgcatcctggccgaggtggagggccgggccctgcctgacagccagcaggtgcccagcagccctgccagcaagcacagcctgggcagtgaccacagctctgtgtccacccccaagaagctgagcggcaagagcaagagcggccgcagcctgaatgaggagctgggagatgaagattctgagaagaagaggaagggggccttcttctcctggagcaggaccaggagcacaggccgcagccagaagaagcgggagcacggggaccatgctgatgatgccctgcacgccaacggcggcctgtgcagaagagagagccagggctctgtgagcagcgctggcagcctggacctgtctgaggcctgcaggaccctggcccctgagaaggacaaggccaccaagcactgctgcatccacctgcctgatggcaccagctgtgtggtggccgtgaaggccggcttcagcatcaaggacatcctgagcggcctgtgtgaaagacatggcatcaacggggctgctgctgacctcttcctggtgggcggggacaagcccctggtgctgcaccaggacagcagcatcctggagagccgggacctgcggctggagaagaggaccctcttccggctggacctggtgcccatcaacagatctgtgggcctgaaggccaagcccaccaagcctgtgacagaggtgctgcggcctgtggtggcccgctatggcctggacctgagcggcctgctggtgcggctgtctggagagaaggagcccctggacctgggcgcccccatcagcagcctggatggccagagggtggtgctggaggagaaggaccccagccggggcaaggccagcgctgacaagcagaagggcgtgcctgtgaagcagaacacagctgtgaacagcagcagcaggaaccacagcgccactggagaggagaggaccctgggcaagagcaacagcatcaagatcaagggggagaatggcaagaatgcccgggacccccggctgagcaagcgggaggagagcatcgccaagattggcaagaagaagtaccagaagatcaacctggatgaagctgaggagttctttgagctgatcagcaaggcccagagcaacagagcagatgaccagaggggcctgctgaggaaggaggacctggtgctgcctgagttcctgcggctgcccccaggcagcacagagctgaccctgcccaccccagctgctgtggccaagggcttcagcaagaggtctgccactggaaatggccgggagagcgccagccagcctggagagcagtgggagcctgtgcaggagagcagtgacagccccagcaccagccctggcagcgccagcagccccccaggccccccaggcaccaccccacctggccagaagagccccagcggccccttctgcaccccccagagccctgtgtccctggcccaggagggcacagcccagatctggaagaggcagagccaggaggtggaggccggcggcatccagacagtggaggatgagcacgtggccgagctgaccctgatgggagagggggacatcagcagccccaacagcaccctgctgcccccacccagcaccccccaggaggtgcccggccccagcaggcctggcaccagccgcttctag

SEQ ID NO: 21618 - DNA, 2400 bp, synthetic construct
  misc_feature 1..2400: note = Description of Artificial Sequence: Synthetic coding sequence
  source 1..2400: mol_type = other DNA
atgaacctgggcaaggagctgagcaatgagacccacgtgtccaatgaccagcagagcgccaccgtgtctgatggagagctgaccggggctgacctgaaggactgtgtgagcaacaacagcctgagcagcaatgccagcctgcccagcgtgcagagctgccggcggctgcgggagaggagagtggcctcctgggccgtgtcctttgagcggctgctgcaggaccctgtgggcgtgcgctacttcagtgacttcctgaggaaggagttcagcgaggagaacatcctcttctggcaggcctgtgagtacttcaaccacgtgcctgcccatgacaagaaggagctgagctaccgggcccgggagatcttcagcaagttcctgtgcagcaaggccaccacccctgtgaacatcgacagccaggcccagctggctgatgatgtgctgcgggccccccacccagacatgttcaaggagcagcagctgcagatcttcaacctgatgaagtttgacagctacacccgcttcctgaagagccccctgtaccaggagtgcatcctggccgaggtggagggccgggccctgcctgacagccagcaggtgcccagcagccctgccagcaagcacagcctgggcagtgaccacagctctgtgtccacccccaagaagctgagcggcaagagcaagagcggccgcagcctgaatgaggagctgggagatgaagattctgagaagaagaggaagggggccttcttctcctggagcaggaccaggagcacaggccgcagccagaagaagcgggagcacggggaccatgctgatgatgccctgcacgccaacggcggcctgtgcagaagagagagccagggctctgtgagcagcgctggcagcctggacctgtctgaggcctgcaggaccctggcccctgagaaggacaaggccaccaagcactgctgcatccacctgcctgatggcaccagctgtgtggtggccgtgaaggccggcttcagcatcaaggacatcctgagcggcctgtgtgaaagacatggcatcaacggggctgctgctgacctcttcctggtgggcggggacaagcccctggtgctgcaccaggacagcagcatcctggagagccgggacctgcggctggagaagaggaccctcttccggctggacctggtgcccatcaacagatctgtgggcctgaaggccaagcccaccaagcctgtgacagaggtgctgcggcctgtggtggcccgctatggcctggacctgagcggcctgctggtgcggctgtctggagagaaggagcccctggacctgggcgcccccatcagcagcctggatggccagagggtggtgctggaggagaaggaccccagccggggcaaggccagcgctgacaagcagaagggcgtgcctgtgaagcagaacacagctgtgaacagcagcagcaggaaccacagcgccactggagaggagaggaccctgggcaagagcaacagcatcaagatcaagggggagaatggcaagaatgcccgggacccccggctgagcaagcgggaggagagcatcgccaagattggcaagaagaagtaccagaagatcaacctggatgaagctgaggagttctttgagctgatcagcaaggcccagagcaacagagcagatgaccagaggggcctgctgaggaaggaggacctggtgctgcctgagttcctgcggctgcccccaggcagcacagagctgaccctgcccaccccagctgctgtggccaagggcttcagcaagaggtctgccactggaaatggccgggagagcgccagccagcctggagagcagtgggagcctgtgcaggagagcagtgacagccccagcaccagccctggcagcgccagcagccccccaggccccccaggcaccaccccacctggccagaagagccccagcggccccttctgcaccccccagagccctgtgtccctggcccaggagggcacagcccagatctggaagaggcagagccaggaggtggaggccggcggcatccagacagtggaggatgagcacgtggccgagctgaccctgatgggagagggggacatcagcagccccaacagcaccctgctgcccccacccagcaccccccaggaggtgcccggccccagcaggcctggcagcggcacccacggcagccgggacctgcctgtgaaccgcatcattgatgtggacctggtgactggaagtgcccctggaagagatggcggcattgctggggcccaggccggccctggccgcagccaggccagcggcggcccccccaccagtgacctgcccggcctgggccctgtgcctggagagcccgccaagcccaagaccagcgcccaccacgccacctttgtgtag

SEQ ID NO: 21619 - DNA, 4344 bp, synthetic construct
  misc_feature 1..4344: note = Description of Artificial Sequence: Synthetic coding sequence
  source 1..4344: mol_type = other DNA
atgttccgggccggggaggccagcaagaggcccctgcccggccccagccccccccgggtgcgctctgtggaggtggcccggggccgggccggctacggcttcaccctgagcggccaggccccctgtgtgctgagctgtgtgatgaggggcagccctgctgactttgtgggcctgcgggccggggaccagatcctggccgtgaatgagatcaacgtgaagaaggccagccatgaagatgtggtgaagctgattggcaagtgcagcggcgtgctgcacatggtgattgctgagggcgtgggccgctttgagagctgcagcagtgatgaggagggcggcctgtatgagggcaagggctggctgaagcccaagctggacagcaaggccctgggcatcaacagagctgagcgggtggtggaggagatgcagagcggcggcatcttcaacatgatctttgagaaccccagcctgtgtgccagcaacagcgagcccctgaagctgaagcagaggagcctgtctgagagcgctgccaccaggtttgatgtgggccacgagagcatcaacaaccccaaccccaacatgctgagcaaggaggagatcagcaaggtgattcatgatgattctgtgttcagcatcggcctggagagccatgatgactttgccctggatgccagcatcctgaatgtggccatgattgtgggctacctgggcagcattgagctgcccagcaccagcagcaacctggagagtgacagcctgcaggccatccggggctgcatgaggcggctgcgggcagagcagaagatccacagcctggtgaccatgaagatcatgcatgactgtgtgcagctgagcacagacaaggccggcgtggtggccgagtacccagctgagaagctggccttctctgctgtgtgcccagatgaccggcgcttcttcggcctggtgaccatgcagaccaatgatgatggcagcctggcccaggaggaggagggcgccctgcggaccagctgccacgtgttcatggtggaccctgacctcttcaaccacaagatccaccagggcatcgccaggagatttggatttgagtgcacagctgaccctgacaccaacggctgcctggagttccctgccagcagcctgcctgtgctgcagttcatctctgtgctgtacagagacatgggagagctgattgagggcatgagggcccgggccttcctggatggagatgctgatgcccaccagaacaacagcaccagcagcaacagcgacagcggcatcggcaacttccaccaggaggagaagagcaacagagtgctggtggtggacctgggcggcagcagcagccgccacggccctgggggcagcgcctgggatggagtgggcggccgcggggcccagccctggggcgccccctggacaggccccttctgcccagaccctgagggcagccccccatttgaggccgcccaccagacagaccgcttctgggacctgaacaagcacctgggccctgccagccctgtggaggtgcccccagccagcctgcggagctctgtgccccccagcaagaggggcaccgtgggcgccggctgcggcttcaaccagcgctggctgcctgtgcacgtgctgcgggagtggcagtgtggccacaccagtgaccaggacagctacacagacagcacagatggctggagcagcatcaactgtggcaccctgcccccacccatgagcaagatcccagctgaccgctacagagtggagggcagctttgcccagccccccctgaatgcccccaagcgggagtggagcaggaaggccttcggcatgcagagcatcttcggcccccacagaaatgtgaggaagaccaaggaggacaagaagggcagcaagtttggccggggcaccggcctgacccagcccagccagaggaccagcgcccggcgcagctttggccgcagcaagcgcttcagcatcaccaggagcctggatgacctggagagcgccaccgtgtctgatggagagctgaccggggctgacctgaaggactgtgtgagcaacaacagcctgagcagcaatgccagcctgcccagcgtgcagagctgccggcggctgcgggagaggagagtggcctcctgggccgtgtcctttgagcggctgctgcaggaccctgtgggcgtgcgctacttcagtgacttcctgaggaaggagttcagcgaggagaacatcctcttctggcaggcctgtgagtacttcaaccacgtgcctgcccatgacaagaaggagctgagctaccgggcccgggagatcttcagcaagttcctgtgcagcaaggccaccacccctgtgaacatcgacagccaggcccagctggctgatgatgtgctgcgggccccccacccagacatgttcaaggagcagcagctgcagatcttcaacctgatgaagtttgacagctacacccgcttcctgaagagccccctgtaccaggagtgcatcctggccgaggtggagggccgggccctgcctgacagccagcaggtgcccagcagccctgccagcaagcacagcctgggcagtgaccacagctctgtgtccacccccaagaagctgagcggcaagagcaagagcggccgcagcctgaatgaggagctgggagatgaagattctgagaagaagaggaagggggccttcttctcctggagcaggaccaggagcacaggccgcagccagaagaagcgggagcacggggaccatgctgatgatgccctgcacgccaacggcggcctgtgcagaagagagagccagggctctgtgagcagcgctggcagcctggacctgtctgaggcctgcaggaccctggcccctgagaaggacaaggccaccaagcactgctgcatccacctgcctgatggcaccagctgtgtggtggccgtgaaggccggcttcagcatcaaggacatcctgagcggcctgtgtgaaagacatggcatcaacggggctgctgctgacctcttcctggtgggcggggacaagcccctggtgctgcaccaggacagcagcatcctggagagccgggacctgcggctggagaagaggaccctcttccggctggacctggtgcccatcaacagatctgtgggcctgaaggccaagcccaccaagcctgtgacagaggtgctgcggcctgtggtggcccgctatggcctggacctgagcggcctgctggtgcggctgtctggagagaaggagcccctggacctgggcgcccccatcagcagcctggatggccagagggtggtgctggaggagaaggaccccagccggggcaaggccagcgctgacaagcagaagggcgtgcctgtgaagcagaacacagctgtgaacagcagcagcaggaaccacagcgccactggagaggagaggaccctgggcaagagcaacagcatcaagatcaagggggagaatggcaagaatgcccgggacccccggctgagcaagcgggaggagagcatcgccaagattggcaagaagaagtaccagaagatcaacctggatgaagctgaggagttctttgagctgatcagcaaggcccagagcaacagagcagatgaccagaggggcctgctgaggaaggaggacctggtgctgcctgagttcctgcggctgcccccaggcagcacagagctgaccctgcccaccccagctgctgtggccaagggcttcagcaagaggtctgccactggaaatggccgggagagcgccagccagcctggagagcagtgggagcctgtgcaggagagcagtgacagccccagcaccagccctggcagcgccagcagccccccaggccccccaggcaccaccccacctggccagaagagccccagcggccccttctgcaccccccagagccctgtgtccctggcccaggagggcacagcccagatctggaagaggcagagccaggaggtggaggccggcggcatccagacagtggaggatgagcacgtggccgagctgaccctgatgggagagggggacatcagcagccccaacagcaccctgctgcccccacccagcaccccccaggaggtgcccggccccagcaggcctggcagcggcacccacggcagccgggacctgcctgtgaaccgcatcattgatgtggacctggtgactggaagtgcccctggaagagatggcggcattgctggggcccaggccggccctggccgcagccaggccagcggcggcccccccaccagtgacctgcccggcctgggccctgtgcctggagagcccgccaagcccaagaccagcgcccaccacgccacctttgtgtag

SEQ ID NO: 21620 - DNA, 4131 bp, synthetic construct; identical to SEQ ID NO: 21617
  misc_feature 1..4131: note = Description of Artificial Sequence: Synthetic coding sequence
  source 1..4131: mol_type = other DNA

SEQ ID NO: 21621 - DNA, 1500 bp, synthetic construct
  misc_feature 1..1500: note = Description of Artificial Sequence: Synthetic coding sequence
  source 1..1500: mol_type = other DNA
atgagcctgagcctcttcttccagagcgccaccgtgtctgatggagagctgaccggggctgacctgaaggactgtgtgagcaacaacagcctgagcagcaatgccagcctgcccagcgtgcagagctgccggcggctgcgggagaggagagtggcctcctgggccgtgtcctttgagcggctgctgcaggaccctgtgggcgtgcgctacttcagtgacttcctgaggaaggagttcagcgaggagaacatcctcttctggcaggcctgtgagtacttcaaccacgtgcctgcccatgacaagaaggagctgagctaccgggcccgggagatcttcagcaagttcctgtgcagcaaggccaccacccctgtgaacatcgacagccaggcccagctggctgatgatgtgctgcgggccccccacccagacatgttcaaggagcagcagctgcagatcttcaacctgatgaagtttgacagctacacccgcttcctgaagagccccctgtaccaggagtgcatcctggccgaggtggagggccgggccctgcctgacagccagcaggtgcccagcagccctgccagcaagcacagcctgggcagtgaccacagctctgtgtccacccccaagaagctgagcggcaagagcaagagcggccgcagcctgaatgaggagctgggagatgaagattctgagaagaagaggaagggggccttcttctcctggagcaggaccaggagcacaggccgcagccagaagaagcgggagcacggggaccatgctgatgatgccctgcacgccaacggcggcctgtgcagaagagagagccagggctctgtgagcagcgctggcagcctggacctgtctgaggcctgcaggaccctggcccctgagaaggacaaggccaccaagcactgctgcatccacctgcctgatggcaccagctgtgtggtggccgtgaaggccggcttcagcatcaaggacatcctgagcggcctgtgtgaaagacatggcatcaacggggctgctgctgacctcttcctggtgggcggggacaagcccctggtgctgcaccaggacagcagcatcctggagagccgggacctgcggctggagaagaggaccctcttccggctggacctggtgcccatcaacagatctgtgggcctgaaggccaagcccaccaagcctgtgacagaggtgctgcggcctgtggtggcccgctatggcctggacctgagcggcctgctggtgcggctgtctggagagaaggagcccctggacctgggcgcccccatcagcagcctggatggccagagggtggtgctggaggagaaggaccccagccggggcaaggccagcgctgacaagcagaagggcgtgcctgtgaagcagaacacagctgtgaacagcagcagcaggaaccacagcgccaccagcttcctgagcctcttccccaagctgcgggccacagagcagatgaccaacgtgggctgctag

SEQ ID NO: 21622 - DNA, 2004 bp, synthetic construct
  misc_feature 1..2004: note = Description of Artificial Sequence: Synthetic coding sequence
  source 1..2004: mol_type = other DNA
atgttccgggccggggaggccagcaagaggcccctgcccggccccagccccccccgggtgcgctctgtggaggtggcccggggccgggccggctacggcttcaccctgagcggccaggccccctgtgtgctgagctgtgtgatgaggggcagccctgctgactttgtgggcctgcgggccggggaccagatcctggccgtgaatgagatcaacgtgaagaaggccagccatgaagatgtggtgaagctgattggcaagtgcagcggcgtgctgcacatggtgattgctgagggcgtgggccgctttgagagctgcagcagtgatgaggagggcggcctgtatgagggcaagggctggctgaagcccaagctggacagcaaggccctgggcatcaacagagctgagcgggtggtggaggagatgcagagcggcggcatcttcaacatgatctttgagaaccccagcctgtgtgccagcaacagcgagcccctgaagctgaagcagaggagcctgtctgagagcgctgccaccaggtttgatgtgggccacgagagcatcaacaaccccaaccccaacatgctgagcaaggaggagatcagcaaggtgattcatgatgattctgtgttcagcatcggcctggagagccatgatgactttgccctggatgccagcatcctgaatgtggccatgattgtgggctacctgggcagcattgagctgcccagcaccagcagcaacctggagagtgacagcctgcaggccatccggggctgcatgaggcggctgcgggcagagcagaagatccacagcctggtgaccatgaagatcatgcatgactgtgtgcagctgagcacagacaaggccggcgtggtggccgagtacccagctgagaagctggccttctctgctgtgtgcccagatgaccggcgcttcttcggcctggtgaccatgcagaccaatgatgatggcagcctggcccaggaggaggagggcgccctgcggaccagctgccacgtgttcatggtggaccctgacctcttcaaccacaagatccaccagggcatcgccaggagatttggatttgagtgcacagctgaccctgacaccaacggctgcctggagttccctgccagcagcctgcctgtgctgcagttcatctctgtgctgtacagagacatgggagagctgattgagggcatgagggcccgggccttcctggatggagatgctgatgcccaccagaacaacagcaccagcagcaacagcgacagcggcatcggcaacttccaccaggaggagaagagcaacagagtgctggtggtggacctgggcggcagcagcagccgccacggccctgggggcagcgcctgggatggagtgggcggccgcggggcccagccctggggcgccccctggacaggccccttctgcccagaccctgagggcagccccccatttgaggccgcccaccagacagaccgcttctgggacctgaacaagcacctgggccctgccagccctgtggaggtgcccccagccagcctgcggagctctgtgccccccagcaagaggggcaccgtgggcgccggctgcggcttcaaccagcgctggctgcctgtgcacgtgctgcgggagtggcagtgtggccacaccagtgaccaggacagctacacagacagcacagatggctggagcagcatcaactgtggcaccctgcccccacccatgagcaagatcccagctgaccgctacagagtggagggcagctttgcccagccccccctgaatgcccccaagcgggagtggagcaggaaggccttcggcatgcagagcatcttcggcccccacagaaatgtgaggaagaccaaggaggacaagaagggcagcaagtttggccggggcaccggcctgacccagcccagccagaggaccagcgcccggcgcagctttggccgcagcaagcgcttcagcatcaccaggagcctggatgacctggagagctag

SEQ ID NO: 21623 - DNA, 636 bp, synthetic construct
  misc_feature 1..636: note = Description of Artificial Sequence: Synthetic coding sequence
  source 1..636: mol_type = other DNA
atgcagagcgccatgttcctggccgtgcagcacgactgccggcccatggacaagtctgctggcagcggccacaagtctgaggagaagcgggagaagatgaagaggaccctgctgaaggactggaagacccggctgagctacttcctgcagaacagcagcaccccaggcaagcccaagacaggcaagaagagcaagcagcaggccttcatcaagcccagccctgaggaggcccagctgtggagcgaggcctttgatgagctgctggccagcaaatatggcctggccgccttccgggccttcctgaagtctgagttctgtgaggagaacatcgagttctggctggcctgtgaggacttcaagaagaccaagagcccccagaagctgagcagcaaggccaggaagatctacacagacttcatcgagaaggaggcccccaaggagatcaacatcgacttccagaccaagaccctcatcgcccagaacatccaggaggccaccagcggctgcttcaccacagcccagaagagggtgtacagcctgatggagaacaacagctacccccgcttcctggagagcgagttctaccaggacctgtgcaagaagccccagatcaccacagagccccacgccacctag

SEQ ID NO: 21624 - DNA, 4203 bp, synthetic construct
  misc_feature 1..4203: note = Description of Artificial Sequence: Synthetic coding sequence
  source 1..4203: mol_type = other DNA
atgcccaagatcgtgctgaatggagtgacagtggacttccccttccagccctacaagtgccagcaggagtacatgaccaaggtgctggagtgcctgcagcagaaggtgaatggcatcctggagagccccaccggcaccgggaagaccctgtgcctgctgtgcaccaccctggcctggagggagcacctgagagatggcatcagcgccaggaagattgctgagcgggcccagggcgagctgttcccagaccgggccctgagctcctggggcaatgctgctgctgctgctggggaccccatcgcctgctacacagacatccccaagatcatctatgccagcaggacccacagccagctgacccaggtgatcaatgagctgaggaacaccagctaccggcccaaggtgtgtgtgctgggcagccgggagcagctgtgcatccaccctgaggtgaagaagcaggagagcaaccacctgcagatccacctgtgcaggaagaaggtggccagccgcagctgccacttctacaacaacgtggaggagaagagcctggagcaggagctggccagccccatcctggacatcgaggacctggtgaagagcggcagcaagcaccgggtgtgcccctactacctgagcaggaacctgaagcagcaggccgacatcatcttcatgccctacaactacctgctggatgccaagagcagaagagcccacaacatcgacctgaagggcaccgtggtgatctttgatgaggcccacaacgtggagaagatgtgtgaggagagcgccagctttgacctgacccctcatgacctggccagcggcctggatgtgattgaccaggtgctggaggagcagaccaaggccgcccagcagggcgagccccaccctgagttctctgctgacagccccagccctggcctgaacatggagctggaggacatcgccaagctgaagatgatcctgctgcggctggagggcgccattgatgctgtggagctgcctggagatgattctggagtgaccaagccaggcagctacatctttgagctgtttgctgaggcccagatcaccttccagaccaagggctgcatcctggacagcctggaccagatcatccagcacctggccggccgggccggggtcttcaccaacacagctggcctgcagaagctggccgacatcatccagatcgtgttttctgtggaccccagcgagggcagccctggcagccctgctggcctgggcgccctgcagagctacaaggtgcacatccacccagatgctggccacagaagaacagcccagaggagtgatgcctggagcaccacagctgccaggaagaggggcaaggtgctgagctactggtgcttcagccctggccacagcatgcatgagctggtgcggcagggcgtgcgcagcctcatcctgaccagcggcaccctggcccctgtgtcctcctttgccctggagatgcagatccccttccctgtgtgcctggagaacccccacatcatcgacaagcaccagatctgggtgggcgtggtgccccggggcccagatggagcccagctgagcagcgcctttgaccggcgcttcagcgaggagtgcctgagcagcctgggcaaggccctgggcaacatcgcccgggtggtgccctacggcctgctgatcttcttccccagctaccctgtgatggagaagagcctggagttctggagggcccgggacctggccaggaagatggaggccctgaagcccctgtttgtggagcccaggagcaagggcagcttcagcgagaccatcagcgcctactatgcccgggtggccgcccctggcagcactggagccaccttcctggccgtgtgccggggcaaggccagcgagggcctggacttcagtgacaccaacggccggggcgtcatcgtgacaggcctgccctacccacccaggatggacccccgggtggtgctgaagatgcagttcctggatgagatgaagggccagggcggggccggcggccagttcctgagcggccaggagtggtaccggcagcaggccagcagagctgtgaaccaggccatcggccgggtcatccgccaccggcaggactatggagctgtgttcctgtgtgaccacagatttgcctttgctgatgcccgggcccagctgcccagctgggtgcggccccacgtgcgggtgtatgacaactttggccacgtgatcagagatgtggcccagttcttccgggtggccgagaggaccatgcctgccccagccccccgggccacagcccccagcgtgagaggagaagatgctgtgtctgaggccaagagccctggccccttcttcagcaccaggaaggccaagagcctggacctgcacgtgcccagcctgaagcagaggagcagcggcagccctgctgctggggaccctgagagcagcctgtgtgtggagtatgagcaggagcctgtgcctgcccggcagaggccccggggcctgctggccgccctggagcacagcgagcagagagctggcagccctggagaggagcaggcccacagctgcagcaccctgagcctgctgtctgagaagaggcctgctgaggagccccggggcggcaggaagaagatccggctggtgagccaccctgaggagcctgtggccggggcccagacagaccgggccaagctgttcatggtggccgtgaagcaggagctgagccaggccaactttgccaccttcacccaggccctgcaggactacaagggcagtgatgactttgctgccctggccgcctgcctgggccccctgtttgctgaggaccccaagaagcacaacctgctgcagggcttctaccagtttgtgcggccccaccacaagcagcagtttgaggaggtgtgcatccagctgaccggccggggctgcggctacagacctgagcacagcatcccccggcggcagagggcccagcctgtgctggaccccactggaagaacagccccagaccccaagctgactgtgtccacagctgctgcccagcagctggacccccaggagcacctgaaccagggccggccccacctgagcccccggcccccacccaccggggaccccggcagccagccccagtggggcagcggcgtgccccgggccggcaagcagggccagcacgctgtgtctgcctacctggctgatgcccggcgggccctgggcagcgctggctgcagccagctgctggccgccctgacagcctacaagcaggatgatgacctggacaaggtgctggccgtgctggccgccctgaccacagccaagccagaggacttccccctgctgcaccgcttctccatgtttgtgcggccccaccacaagcagcgcttcagccagacctgcacagacctgaccggccggccctacccaggcatggagcccccaggcccccaggaggagcggctggccgtgccccctgtgctgacccaccgggccccccagcccggccccagccgctctgagaagacaggcaagacccagagcaagatcagcagcttcctgcggcagaggcctgctggcaccgtgggcgccggcggggaggatgctggccccagccagagcagcggccccccccacggccctgctgccagcgagtggggcgagccccacggccgggacattgctggccagcaggccactggagcccctgggggccccctgtctgctggctgtgtgtgccagggctgtggggctgaagatgtggtgcccttccagtgcccagcctgtgacttccagcgctgccaggcctgctggcagaggcacctgcaggccagcaggatgtgcccagcctgccacacagccagcaggaagcagagcgtgatgcaggtgttctggccagagccccacaaggaccatgaaggagctgggggcgcccggcctgtggccgctgtgcctggggtgggcgccgcctgcccagctgctggagctggctgcaccaggagcggcaggaacacccacctgcccctggccggcagaagagacagaggagctgctggggtgcggcctgtgcccccaagacacctgtgtgccgctgctgtgcccccccggcagccccatgatgtgtggcctgtgtccacagcccccctgcatgctgtgctggagctgccccgggccctgcccctgctgcagaggcccctgcggggggcctag

SEQ ID NO: 21625 - DNA, 1638 bp, synthetic construct
  misc_feature 1..1638: note = Description of Artificial Sequence: Synthetic coding sequence
  source 1..1638: mol_type = other DNA
atgcctgccccagccccccgggccacagcccccagcgtgcggggggaggatgctgtgtctgaggccaagagccctggccccttcttcagcaccaggaaggccaagagcctggacctgcacgtgcccagcctgaagcagaggagcagcggcagccctgctgctggggaccctgagagcagcctgtgtgtggagtatgagcaggagcctgtgcctgcccggcagaggccccggggcctgctggccgccctggagcacagcgagcagagagctggcagccctggagaggagcaggcccacagctgcagcaccctgagcctgctgtctgagaagaggcctgctgaggagccccggggcggcaggaagaagatccggctggtgagccaccctgaggagcctgtggccggggcccagacagaccgggccaagctgttcatggtggccgtgaagcaggagctgagccaggccaactttgccaccttcacccaggccctgcaggactacaagggcagtgatgactttgctgccctggccgcctgcctgggccccctgtttgctgaggaccccaagaagcacaacctgctgcagggcttctaccagtttgtgcggccccaccacaagcagcagtttgaggaggtgtgcatccagctgaccggccggggctgcggctacagacctgagcacagcatcccccggcggcagagggcccagcctgtgctggaccccaccggccgcacagccccagaccccaagctgactgtgtccacagctgctgcccagcagctggacccccaggagcacctgaaccagggccggccccacctgagcccccggcccccacccactggagaccccggcagccagccccagtggggcagcggcgtgcccagggctgggaagcagggccagcacgctgtgtctgcctacctggctgatgcccggcgggccctgggcagcgctggctgcagccagctgctggccgccctgacagcctacaagcaggatgatgacctggacaaggtgctggccgtgctggccgccctgaccacagccaagccagaggacttccccctgctgcaccgcttctccatgtttgtgcggccccaccacaagcagcgcttcagccagacctgcacagacctgaccggccggccctacccaggcatggagcccccaggcccccaggaggagcggctggccgtgccccctgtgctgacccaccgggccccccagcccggccccagccgctctgagaagacaggcaagacccagagcaagatcagcagcttcctgcggcagaggcctgctggcaccgtgggcgctggaggagaagatgctggccccagccagagcagcggcccccctcatggccctgctgccagcgagtggggcgagccccacggccgggacattgctggccagcaggccaccggggcccctgggggccccctgtctgctggctgtgtgtgccagggctgtggggctgaagatgtggtgcccttccagtgcccagcctgtgacttccagcgctgccaggcctgctggcagaggcacctgcaggccagcaggatgtgcccagcctgccacacagccagcaggaagcagagcgtgatgcaggtgttctggccagagccccagtag

SEQ ID NO: 21626 - DNA, 3660 bp, synthetic construct
  misc_feature 1..3660: note = Description of Artificial Sequence: Synthetic coding sequence
  source 1..3660: mol_type = other DNA
atgcccaagatcgtgctgaatggagtgacagtggacttccccttccagccctacaagtgccagcaggagtacatgaccaaggtgctggagtgcctgcagcagaaggtgaatggcatcctggagagccccaccggcaccgggaagaccctgtgcctgctgtgcaccaccctggcctggagggagcacctgagagatggcatcagcgccaggaagattgctgagcgggcccagggcgagctgttcccagaccgggccctgagctcctggggcaatgctgctgctgctgctggggaccccatcgcctgctacacagacatccccaagatcatctatgccagcaggacccacagccagctgacccaggtgatcaatgagctgaggaacaccagctaccggcccaaggtgtgtgtgctgggcagccgggagcagctgtgcatccaccctgaggtgaagaagcaggagagcaaccacctgcagatccacctgtgcaggaagaaggtggccagccgcagctgccacttctacaacaacgtggaggagaagagcctggagcaggagctggccagccccatcctggacatcgaggacctggtgaagagcggcagcaagcaccgggtgtgcccctactacctgagcaggaacctgaagcagcaggccgacatcatcttcatgccctacaactacctgctggatgccaagagcagaagagcccacaacatcgacctgaagggcaccgtggtgatctttgatgaggcccacaacgtggagaagatgtgtgaggagagcgccagctttgacctgacccctcatgacctggccagcggcctggatgtgattgaccaggtgctggaggagcagaccaaggccgcccagcagggcgagccccaccctgagttctctgctgacagccccagccctggcctgaacatggagctggaggacatcgccaagctgaagatgatcctgctgcggctggagggcgccattgatgctgtggagctgcctggagatgattctggagtgaccaagccaggcagctacatctttgagctgtttgctgaggcccagatcaccttccagaccaagggctgcatcctggacagcctggaccagatcatccagcacctggccggccgggccggggtcttcaccaacacagctggcctgcagaagctggccgacatcatccagatcgtgttttctgtggaccccagcgagggcagccctggcagccctgctggcctgggcgccctgcagagctacaaggtgcacatccacccagatgctggccacagaagaacagcccagaggagtgatgcctggagcaccacagctgccaggaagaggggcaaggtgctgagctactggtgcttcagccctggccacagcatgcatgagctggtgcggcagggcgtgcgcagcctcatcctgaccagcggcaccctggcccctgtgtcctcctttgccctggagatgcagatccccttccctgtgtgcctggagaacccccacatcatcgacaagcaccagatctgggtgggcgtggtgccccggggcccagatggagcccagctgagcagcgcctttgaccggcgcttcagcgaggagtgcctgagcagcctgggcaaggccctgggcaacatcgcccgggtggtgccctacggcctgctgatcttcttccccagctaccctgtgatggagaagagcctggagttctggagggcccgggacctggccaggaagatggaggccctgaagcccctgtttgtggagcccaggagcaagggcagcttcagcgagaccatcagcgcctactatgcccgggtggccgcccctggcagcactggagccaccttcctggccgtgtgccggggcaaggccagcgagggcctggacttcagtgacaccaacggccggggcgtcatcgtgacaggcctgccctacccacccaggatggacccccgggtggtgctgaagatgcagttcctggatgagatgaagggccagggcggggccggcggccagttcctgagcggccaggagtggtaccggcagcaggccagcagagctgtgaaccaggccatcggccgggtcatccgccaccggcaggactatggagctgtgttcctgtgtgaccacagatttgcctttgctgatgcccgggcccagctgcccagctgggtgcggccccacgtgcgggtgtatgacaactttggccacgtgatcagagatgtggcccagttcttccgggtggccgagaggaccatgcctgccccagccccccgggccacagcccccagcgtgagaggagaagatgctgtgtctgaggccaagagccctggccccttcttcagcaccaggaaggccaagagcctggacctgcacgtgcccagcctgaagcagaggagcagcggcagccctgctgctggggaccctgagagcagcctgtgtgtggagtatgagcaggagcctgtgcctgcccggcagaggccccggggcctgctggccgccctggagcacagcgagcagagagctggcagccctggagaggagcaggcccacagctgcagcaccctgagcctgctgtctgagaagaggcctgctgaggagccccggggcggcaggaagaagatccggctggtgagccaccctgaggagcctgtggccggggcccagacagaccgggccaagctgttcatggtggccgtgaagcaggagctgagccaggccaactttgccaccttcacccaggccctgcaggactacaagggcagtgatgactttgctgccctggccgcctgcctgggccccctgtttgctgaggaccccaagaagcacaacctgctgcagggcttctaccagtttgtgcggccccaccacaagcagcagtttgaggaggtgtgcatccagctgaccggccggggctgcggctacagacctgagcacagcatcccccggcggcagagggcccagcctgtgctggaccccactggaagaacagccccagaccccaagctgactgtgtccacagctgctgcccagcagctggacccccaggagcacctgaaccagggccggccccacctgagcccccggcccccacccaccggggaccccggcagccagccccagtggggcagcggcgtgccccgggccggcaagcagggccagcacgctgtgtctgcctacctggctgatgcccggcgggccctgggcagcgctggctgcagccagctgctggccgccctgacagcctacaagcaggatgatgacctggacaaggtgctggccgtgctggccgccctgaccacagccaagccagaggacttccccctgctgcaccgcttctccatgtttgtgcggccccaccacaagcagcgcttcagccagacctgcacagacctgaccggccggccctacccaggcatggagcccccaggcccccaggaggagcggctggccgtgccccctgtgctgacccaccgggccccccagcccggccccagccgctctgagaagacaggcaagacccagagcaagatcagcagcttcctgcggcagaggcctgctggcaccgtgggcgccggcggggaggatgctggccccagccagagcagcggccccccccacggccctgctgccagcgagtggggcctgtag

SEQ ID NO: 21627 - DNA, 3732 bp, synthetic construct
  misc_feature 1..3732: note = Description of Artificial Sequence: Synthetic coding sequence
  source 1..3732: mol_type = other DNA
atgcccaagatcgtgctgaatggagtgacagtggacttccccttccagccctacaagtgccagcaggagtacatgaccaaggtgctggagtgcctgcagcagaaggtgaatggcatcctggagagccccaccggcaccgggaagaccctgtgcctgctgtgcaccaccctggcctggagggagcacctgagagatggcatcagcgccaggaagattgctgagcgggcccagggcgagctgttcccagaccgggccctgagctcctggggcaatgctgctgctgctgctggggaccccatcgcctgctacacagacatccccaagatcatctatgccagcaggacccacagccagctgacccaggtgatcaatgagctgaggaacaccagctaccgcagccgctgccgggccaccctgtgggtgctggagacagccccaccccggcccaccgtgctgagccccacccggcccaaggtgtgtgtgctgggcagccgggagcagctgtgcatccaccctgaggtgaagaagcaggagagcaaccacctgcagatccacctgtgcaggaagaaggtggccagccgcagctgccacttctacaacaacgtggaggagaagagcctggagcaggagctggccagccccatcctggacatcgaggacctggtgaagagcggcagcaagcaccgggtgtgcccctactacctgagcaggaacctgaagcagcaggccgacatcatcttcatgccctacaactacctgctggatgccaagagcagaagagcccacaacatcgacctgaagggcaccgtggtgatctttgatgaggcccacaacgtggagaagatgtgtgaggagagcgccagctttgacctgacccctcatgacctggccagcggcctggatgtgattgaccaggtgctggaggagcagaccaaggccgcccagcagggcgagccccaccctgagttctctgctgacagccccagccctggcctgaacatggagctggaggacatcgccaagctgaagatgatcctgctgcggctggagggcgccattgatgctgtggagctgcctggagatgattctggagtgaccaagccaggcagctacatctttgagctgtttgctgaggcccagatcaccttccagaccaagggctgcatcctggacagcctggaccagatcatccagcacctggccggccgggccggggtcttcaccaacacagctggcctgcagaagctggccgacatcatccagatcgtgttttctgtggaccccagcgagggcagccctggcagccctgctggcctgggcgccctgcagagctacaaggtgcacatccacccagatgctggccacagaagaacagcccagaggagtgatgcctggagcaccacagctgccaggaagaggggcaaggtgctgagctactggtgcttcagccctggccacagcatgcatgagctggtgcggcagggcgtgcgcagcctcatcctgaccagcggcaccctggcccctgtgtcctcctttgccctggagatgcagatccccttccctgtgtgcctggagaacccccacatcatcgacaagcaccagatctgggtgggcgtggtgccccggggcccagatggagcccagctgagcagcgcctttgaccggcgcttcagcgaggagtgcctgagcagcctgggcaaggccctgggcaacatcgcccgggtggtgccctacggcctgctgatcttcttccccagctaccctgtgatggagaagagcctggagttctggagggcccgggacctggccaggaagatggaggccctgaagcccctgtttgtggagcccaggagcaagggcagcttcagcgagaccatcagcgcctactatgcccgggtggccgcccctggcagcactggagccaccttcctggccgtgtgccggggcaaggccagcgagggcctggacttcagtgacaccaacggccggggcgtcatcgtgacaggcctgccctacccacccaggatggacccccgggtggtgctgaagatgcagttcctggatgagatgaagggccagggcggggccggcggccagttcctgagcggccaggagtggtaccggcagcaggccagcagagctgtgaaccaggccatcggccgggtcatccgccaccggcaggactatggagctgtgttcctgtgtgaccacagatttgcctttgctgatgcccgggcccagctgcccagctgggtgcggccccacgtgcgggtgtatgacaactttggccacgtgatcagagatgtggcccagttcttccgggtggccgagaggaccatgcctgccccagccccccgggccacagcccccagcgtgagaggagaagatgctgtgtctgaggccaagagccctggccccttcttcagcaccaggaaggccaagagcctggacctgcacgtgcccagcctgaagcagaggagcagcggcagccctgctgctggggaccctgagagcagcctgtgtgtggagtatgagcaggagcctgtgcctgcccggcagaggccccggggcctgctggccgccctggagcacagcgagcagagagctggcagccctggagaggagcaggcccacagctgcagcaccctgagcctgctgtctgagaagaggcctgctgaggagccccggggcggcaggaagaagatccggctggtgagccaccctgaggagcctgtggccggggcccagacagaccgggccaagctgttcatggtggccgtgaagcaggagctgagccaggccaactttgccaccttcacccaggccctgcaggactacaagggcagtgatgactttgctgccctggccgcctgcctgggccccctgtttgctgaggaccccaagaagcacaacctgctgcagggcttctaccagtttgtgcggccccaccacaagcagcagtttgaggaggtgtgcatccagctgaccggccggggctgcggctacagacctgagcacagcatcccccggcggcagagggcccagcctgtgctggaccccactggaagaacagccccagaccccaagctgactgtgtccacagctgctgcccagcagctggacccccaggagcacctgaaccagggccggccccacctgagcccccggcccccacccaccggggaccccggcagccagccccagtggggcagcggcgtgccccgggccggcaagcagggccagcacgctgtgtctgcctacctggctgatgcccggcgggccctgggcagcgctggctgcagccagctgctggccgccctgacagcctacaagcaggatgatgacctggacaaggtgctggccgtgctggccgccctgaccacagccaagccagaggacttccccctgctgcacagcaacagcatgtttgtgcggccccaccacaagcagcgcttcagccagacctgcacagacctgaccggccggccctacccaggcatggagcccccaggcccccaggaggagcggctggccgtgccccctgtgctgacccaccgggccccccagcccggccccagccgctctgagaagacaggcaagacccagagcaagatcagcagcttcctgcggcagaggcctgctggcaccgtgggcgccggcggggaggatgctggccccagccagagcagcggccccccccacggccctgctgccagcgagtggggcctgtag

SEQ ID NO: 21628 - DNA, 3444 bp, synthetic construct
  misc_feature 1..3444: note = Description of Artificial Sequence: Synthetic coding sequence
  source 1..3444: mol_type = other DNA
atggacatcaggaagttctttggagtcatccccagcggcaagaagctggtgtctgagaccgtgaagaagaatgagaagaccaagagtgatgaggagaccctgaaggccaagaagggcatcaaggagatcaaggtgaacagcagcaggaaagaagatgacttcaagcagaagcagcccagcaagaagaagaggatcatctatgacagcgacagcgagagcgaggagaccctgcaggtgaagaatgccaagaagcccccagagaagctgcctgtgagcagcaagccaggcaagatcagccggcaggaccctgtgacctacatcagcgagacagatgaagaagatgacttcatgtgcaagaaggccgccagcaagagcaaagaaaatggccgcagcaccaacagccacctgggcaccagcaacatgaagaagaatgaggagaacaccaagaccaagaacaagcccctgagccccatcaagctgacccccacctctgtgctggactactttggaactggatctgtgcagaggagcaacaagaagatggtggccagcaagaggaaggagctgagccagaacacagatgagagcggcctgaatgatgaggccatcgccaagcagctgcagctggatgaagatgctgagctggagcggcagctgcatgaagatgaggagtttgcccggaccctggccatgctggatgaggagcccaagaccaagaaggccaggaaggacacagaagctggggagaccttcagctctgtgcaggccaacctgagcaaggccgagaagcacaagtacccccacaaggtgaagacagcccaggtgtctgatgagaggaagagctacagccccaggaagcagagcaaatatgagagcagcaaggagagccagcagcacagcaagagcagcgctgacaagattggagaggtgagcagccccaaggccagcagcaagctggccatcatgaagaggaaggaggagagcagctacaaggagattgagcctgtggccagcaagaggaaagaaaatgccatcaagctgaagggggagaccaagacccccaagaagaccaagagcagccctgccaagaaggagagcgtgtccccagaggacagcgagaagaagaggaccaactaccaggcctaccgcagctacctgaaccgggagggccccaaggccctgggcagcaaggagatccccaagggagctgagaactgcctggagggcctcatcttcgtcatcactggagtgctggagagcattgaaagagatgaggccaagagcctcatcgagagatatggaggcaaggtgactggaaatgtgtccaagaagaccaactacctggtgatgggccgggacagcggccagagcaagagtgacaaggctgctgccctgggcaccaagatcattgatgaagatggcctgctgaacctgatccgcaccatgcctgggaagaagagcaaatatgaaattgctgtggagacagagatgaagaaggagagcaagctggagaggaccccccagaagaatgtgcagggcaagaggaagatcagccccagcaagaaggagagcgagagcaagaagagccggcccaccagcaagagggacagcctggccaagaccatcaagaaggagacagatgtgttctggaagagcctggacttcaaggagcaggtggccgaggagaccagcggggacagcaaggccaggaacctggctgatgacagcagcgagaacaaggtggagaacctgctgtgggtggacaagtacaagcccaccagcctgaagaccatcatcggccagcagggcgaccagagctgtgccaacaagctgctgcgctggctgaggaactggcagaagagcagcagcgaggacaagaagcacgccaagtttgggaagttcagcggcaaggatgatggcagcagcttcaaggccgccctgctgagcggccccccaggagtgggcaagaccaccacagccagcctggtgtgccaggagctgggctacagctatgtggagctgaatgccagtgacaccaggagcaagagcagcctgaaggccatcgtggccgagagcctgaacaacaccagcatcaagggcttctacagcaatggagctgccagctctgtgtccaccaagcacgccctgatcatggatgaggtggatggcatggctggaaatgaagatagaggaggcatccaggagctgattggcctcatcaagcacaccaagatccccatcatctgcatgtgcaatgacaggaaccaccccaagatccgcagcctggtgcactactgctttgacctgcgcttccagaggccccgggtggagcagatcaagggggccatgatgagcatcgccttcaaggagggcctgaagatccccccaccagccatgaatgagatcatcctgggcgccaaccaggacatccggcaggtgctgcacaacctgtccatgtggtgtgcccggagcaaggccctgacctatgaccaggccaaggctgacagccaccgggccaagaaggacatcaagatgggcccctttgatgtggccaggaaggtgtttgctgctggggaggagacagcccacatgagcctggtggacaagagtgacctcttcttccatgactacagcatcgcccccctgtttgtgcaggagaactacatccacgtgaagcctgtggccgccggcggggacatgaagaagcacctgatgctgctgagcagagctgctgacagcatctgtgatggagacctggtggacagccagatccgcagcaagcagaactggagcctgctgcctgcccaggccatctatgcctctgtgctgcccggggagctgatgaggggctacatgacccagttccccaccttccccagctggctgggcaagcacagcagcacaggcaagcatgaccgcatcgtgcaggacctggccctgcacatgagcctgcggacctacagcagcaagaggacagtgaacatggactacctgagcctgctgagagatgccctggtgcagcccctgaccagccagggcgtggatggagtgcaggatgtggtggccctgatggacacctactacctgatgaaggaggactttgagaacatcatggagatcagctcctggggcggcaagcccagccccttcagcaagctggaccccaaggtgaaggccgccttcacccgggcctacaacaaggaggcccacctgaccccctacagcctgcaggccatcaaggccagccgccacagcaccagccccagcctggacagcgagtacaatgaggagctgaatgaagatgacagccagagtgatgagaaggaccaggatgccattgaaacagatgccatgatcaagaagaagaccaagagcagcaagcccagcaagccagagaaggacaaggagcccaggaagggcaagggcaagagcagcaagaagtag

SEQ ID NO: 21629 - DNA, 3447 bp, synthetic construct
  misc_feature 1..3447: note = Description of Artificial Sequence: Synthetic coding sequence
  source 1..3447: mol_type = other DNA
atggacatcaggaagttctttggagtcatccccagcggcaagaagctggtgtctgagaccgtgaagaagaatgagaagaccaagagtgatgaggagaccctgaaggccaagaagggcatcaaggagatcaaggtgaacagcagcaggaaagaagatgacttcaagcagaagcagcccagcaagaagaagaggatcatctatgacagcgacagcgagagcgaggagaccctgcaggtgaagaatgccaagaagcccccagagaagctgcctgtgagcagcaagccaggcaagatcagccggcaggaccctgtgacctacatcagcgagacagatgaagaagatgacttcatgtgcaagaaggccgccagcaagagcaaagaaaatggccgcagcaccaacagccacctgggcaccagcaacatgaagaagaatgaggagaacaccaagaccaagaacaagcccctgagccccatcaagctgacccccacctctgtgctggactactttggaactggatctgtgcagaggagcaacaagaagatggtggccagcaagaggaaggagctgagccagaacacagatgagagcggcctgaatgatgaggccatcgccaagcagctgcagctggatgaagatgctgagctggagcggcagctgcatgaagatgaggagtttgcccggaccctggccatgctggatgaggagcccaagaccaagaaggccaggaaggacacagaagctggggagaccttcagctctgtgcaggccaacctgagcaaggccgagaagcacaagtacccccacaaggtgaagacagcccaggtgtctgatgagaggaagagctacagccccaggaagcagagcaaatatgagagcagcaaggagagccagcagcacagcaagagcagcgctgacaagattggagaggtgagcagccccaaggccagcagcaagctggccatcatgaagaggaaggaggagagcagctacaaggagattgagcctgtggccagcaagaggaaagaaaatgccatcaagctgaagggggagaccaagacccccaagaagaccaagagcagccctgccaagaaggagagcgtgtccccagaggacagcgagaagaagaggaccaactaccaggcctaccgcagctacctgaaccgggagggccccaaggccctgggcagcaaggagatccccaagggagctgagaactgcctggagggcctcatcttcgtcatcactggagtgctggagagcattgaaagagatgaggccaagagcctcatcgagagatatggaggcaaggtgactggaaatgtgtccaagaagaccaactacctggtgatgggccgggacagcggccagagcaagagtgacaaggctgctgccctgggcaccaagatcattgatgaagatggcctgctgaacctgatccgcaccatgcctgggaagaagagcaaatatgaaattgctgtggagacagagatgaagaaggagagcaagctggagaggaccccccagaagaatgtgcagggcaagaggaagatcagccccagcaagaaggagagcgagagcaagaagagccggcccaccagcaagagggacagcctggccaagaccatcaagaaggagacagatgtgttctggaagagcctggacttcaaggagcaggtggccgaggagaccagcggggacagcaaggccaggaacctggctgatgacagcagcgagaacaaggtggagaacctgctgtgggtggacaagtacaagcccaccagcctgaagaccatcatcggccagcagggcgaccagagctgtgccaacaagctgctgcgctggctgaggaactggcagaagagcagcagcgaggacaagaagcatgctgccaagtttgggaagttcagcggcaaggatgatggcagcagcttcaaggccgccctgctgagcggccccccaggagtgggcaagaccaccacagccagcctggtgtgccaggagctgggctacagctatgtggagctgaatgccagtgacaccaggagcaagagcagcctgaaggccatcgtggccgagagcctgaacaacaccagcatcaagggcttctacagcaatggagctgccagctctgtgtccaccaagcacgccctgatcatggatgaggtggatggcatggctggaaatgaagatcggggcggcatccaggagctgattggcctcatcaagcacaccaagatccccatcatctgcatgtgcaatgacaggaaccaccccaagatccgcagcctggtgcactactgctttgacctgcgcttccagaggccccgggtggagcagatcaagggggccatgatgagcatcgccttcaaggagggcctgaagatccccccaccagccatgaatgagatcatcctgggcgccaaccaggacatccggcaggtgctgcacaacctgtccatgtggtgtgcccggagcaaggccctgacctatgaccaggccaaggctgacagccaccgggccaagaaggacatcaagatgggcccctttgatgtggccaggaaggtgtttgctgctggggaggagacagcccacatgagcctggtggacaagagtgacctcttcttccatgactacagcatcgcccccctgtttgtgcaggagaactacatccacgtgaagcctgtggccgccggcggggacatgaagaagcacctgatgctgctgagcagagctgctgacagcatctgtgatggagacctggtggacagccagatccgcagcaagcagaactggagcctgctgcctgcccaggccatctatgcctctgtgctgcctggagagctgatgaggggctacatgacccagttccccaccttccccagctggctgggcaagcacagcagcacaggcaagcatgacagaattgtgcaggacctggccctgcacatgagcctgcggacctacagcagcaagaggacagtgaacatggactacctgagcctgctgagagatgccctggtgcagcccctgaccagccagggcgtggatggagtgcaggatgtggtggccctgatggacacctactacctgatgaaggaggactttgagaacatcatggagatcagctcctggggcggcaagcccagccccttcagcaagctggaccccaaggtgaaggccgccttcacccgggcctacaacaaggaggcccacctgaccccctacagcctgcaggccatcaaggccagccgccacagcaccagccccagcctggacagcgagtacaatgaggagctgaatgaagatgacagccagagtgatgagaaggaccaggatgccatcgagacagatgccatgatcaagaagaagaccaagagcagcaagcccagcaagccagagaaggacaaggagcccaggaagggcaagggcaagagcagcaagaagtag

SEQ ID NO: 21630 - DNA, 564 bp, synthetic construct
  misc_feature 1..564: note = Description of Artificial Sequence: Synthetic coding sequence
  source 1..564: mol_type = other DNA
cctgaggacagcgagaagaagaggaccaactaccaggcctaccgcagctacctgaaccgggagggccccaaggccctgggcagcaaggagatccccaagggagctgagaactgcctggagggcctcatcttcgtcatcactggagtgctggagagcattgaaagagatgaggccaagagcctcatcgagagatatggaggcaaggtgactggaaatgtgtccaagaagaccaactacctggtgatgggccgggacagcggccagagcaagagtgacaaggctgctgccctgggcaccaagatcattgatgaagatggcctgctgaacctgatccgcaccatgcctgggaagaagagcaaatatgaaattgctgtggagacagaggagctgggctacagctatgtggagctgaatgccagtgacaccaggagcaagagcagcctgaaggccatcgtggccgagagcctgaacaacaccagcatcaagggcttctacagcaatggagctgccagctctgtgtccaccaagcacgccctgatcatggatgaggtggatggcatgtag

SEQ ID NO: 21631 - DNA, 1851 bp, synthetic construct
  misc_feature 1..1851: note = Description of Artificial Sequence: Synthetic coding sequence
  source 1..1851: mol_type = other DNA
atggtgggccagctgtctgagggcgccatcgccgccatcatgcagaagggggacaccaacatcaagcccatcctgcaggtgatcaacatccggcccatcaccactggaaacagccccccacgctaccgcctgctgatgtctgatggcctgaacaccctgagcagcttcatgctggccacccagctgaaccccctggtggaggaggagcagctgagcagcaactgtgtgtgccagatccaccgcttcatcgtgaacaccctgaaggatggaagaagagtggtgatcctgatggagctggaggtgctgaagtctgctgaggccgtgggcgtgaagattggcaaccctgtgccctacaatgaaggcctgggccagccccaggtggcccccccagccccagctgccagccctgctgccagcagccggccccagccccagaatggcagcagcggcatgggcagcacagtgtccaaggcctatggagccagcaagaccttcggcaaggctgctggccccagcctgagccacaccagcggcggcacccagagcaaggtggtgcccatcgccagcctgaccccctaccagagcaagtggaccatctgtgcccgggtgaccaacaagagccagatccgcacctggagcaacagcagaggagagggcaagctgttcagcctggagctggtggatgagagcggggagatccgggccacagccttcaatgagcaggtggacaagttcttccccctgattgaggtgaacaaggtgtactacttcagcaagggcaccctgaagatcgccaacaagcagttcaccgctgtgaagaatgactatgagatgaccttcaacaatgagacctctgtgatgccctgtgaagatgaccaccacctgcccaccgtgcagtttgacttcaccggcattgatgacctggagaacaagagcaaggacagcctggtggacatcatcggcatctgcaagagctatgaagatgccaccaagatcaccgtgcgcagcaacaaccgggaggtggccaagaggaacatctacctgatggacaccagcggcaaggtggtgacagccaccctgtggggagaagatgctgacaagtttgatggcagccggcagcctgtgctggccatcaagggggcccgggtgtctgactttggaggccgcagcctgtctgtgctgagcagcagcaccatcatcgccaacccagacatccctgaggcctacaagctgcggggctggtttgatgctgagggccaggccctggatggagtgtccatcagtgacctgaagagcggcggcgtgggcggcagcaacaccaactggaagaccctgtatgaggtgaagtctgagaacctgggccagggcgacaagccagactacttcagctctgtggccaccgtggtgtacctgaggaaggagaactgcatgtaccaggcctgccccacccaggactgcaacaagaaggtgattgaccagcagaatggcctgtaccgctgtgagaagtgtgacacagagttccccaacttcaagtacaggatgatcctgtctgtgaacattgctgacttccaggagaaccagtgggtgacctgcttccaggagagcgctgaggccatcctgggccagaatgctgcctacctgggggagctgaaggacaagaatgagcaggcctttgaggaggtgttccagaatgccaacttccgctccttcatcttccgggtgcgggtgaaggtggagacctacaatgatgagagccgcatcaaggccaccgtgatggatgtgaagcctgtggactaccgggagtatggccggcggctggtgatgagcatcagaagaagtgccctgatgtag

SEQ ID NO: 21632 - DNA, 2217 bp, synthetic construct
  misc_feature 1..2217: note = Description of Artificial Sequence: Synthetic coding sequence
  source 1..2217: mol_type = other DNA
atgaccagcagcggccctggcccccgcttcctgctgctgctgcccctgctgctgcccccagctgccagcgccagtgaccggccccggggccgggaccctgtgaaccctgagaagctgctggtgatcaccgtggccacagctgagacagagggctacctgcgcttcctgcggtctgctgagttcttcaactacacagtgaggaccctgggcctgggggaggagtggagaggaggagatgtggccaggacagtgggcggcggccagaaggtgcgctggctgaagaaggagatggagaagtatgctgaccgggaggacatgatcatcatgtttgtggacagctatgatgtgatcctggccggcagccccacagagctgctgaagaagtttgtgcagagcggcagccggctgctcttctctgctgagagcttctgctggccagagtggggcctggccgagcagtacccagaggtgggcaccgggaagcgcttcctgaacagcggcggcttcatcggctttgccaccaccatccaccagatcgtgcggcagtggaagtacaaggatgatgatgatgaccagctgttctacacccggctgtacctggaccccggcctgcgggagaagctgagcctgaacctggaccacaagagccgcatcttccagaacctgaatggagccctggatgaggtggtgctgaagtttgacaggaacagagtgcgcatcagaaatgtggcctatgacaccctgcccatcgtggtgcatggaaatggccccaccaagctgcagctgaactacctgggcaactacgtgcccaacggctggaccccagagggcggctgcggcttctgcaaccaggacaggaggaccctgcccggcggccagcccccacccagggtcttcctggccgtgtttgtggagcagcccacccccttcctgccccgcttcctgcagaggctgctgctgctggactaccccccagacagagtgaccctcttcctgcacaacaatgaggtgttccacgagccccacatcgctgacagctggccccagctgcaggaccacttctctgctgtgaagctggtgggccctgaggaggccctgagccctggagaggcccgggacatggccatggacctgtgccggcaggaccctgaatgtgagttctacttcagcctggatgctgatgctgtgctgaccaacctgcagaccctgcgcatcctgattgaagaaaataggaaggtgattgcccccatgctgagcagacatggcaagctgtggagcaacttctggggcgccctgagcccagatgagtactatgcccggtctgaggactatgtggagctggtgcagaggaagagggtgggcgtgtggaatgtgccctacatcagccaggcctacgtgatccggggggacaccctgaggatggagctgccccagagagatgtgttttctggcagtgacacagatcctgacatggccttctgcaagagcttccgggacaagggcatcttcctgcacctgagcaaccagcacgagtttggccgcctgctggccaccagccgctatgacacagagcacctgcacccagacctgtggcagatctttgacaaccctgtggactggaaggagcagtacatccacgagaactacagccgggccctggagggggagggcatcgtggagcagccctgcccagatgtgtactggttccccctgctgtctgagcagatgtgtgatgagctggtggccgagatggagcactacggccagtggagcggcggcagacatgaggacagccggctggccggcggctatgaaaatgtgcccaccgtggacatccacatgaagcaggtgggctatgaggaccagtggctgcagctgctgcggacctacgtgggccccatgacagagagcctcttccctggctaccacaccaaggcccgggctgtgatgaactttgtggtgcgctacagaccagatgagcagcccagcctgcggccccaccacgacagcagcaccttcaccctgaatgtggccctgaaccacaagggcctggactatgagggcggcggctgccgcttcctgcgctatgactgtgtgatcagcagccccaggaagggctgggccctgctgcaccctggccgcctgacccactaccacgagggcctgcccaccacctggggcacccgctacatcatggtgtcctttgtggacccctag

SEQ ID NO: 21633 - DNA, 366 bp, synthetic construct
  misc_feature 1..366: note = Description of Artificial Sequence: Synthetic coding sequence
  source 1..366: mol_type = other DNA
atggtggacatgatggacctgcccaggagccgcatcaatgccggcatgctggcccagttcatcgacaagcctgtgtgctttgtgggccgcctggagaagatccaccccaccgggaagatgttcatcctgagtgatggagagggcaagaatggcaccatcgagctgatggagcccctggatgaggagatcagcggcatcgtggaggtggtgggccgggtgacagccaaggccaccatcctgtgcaccagctatgtgcagttcaaggaggacagccacccctttgacctgggcctgtacaatgaggccgtgaagatcatccatgacttcccccagttctaccccctgggcatcgtgcagcacgactag

SEQ ID NO: 21634 - DNA, 2787 bp, synthetic construct
  misc_feature 1..2787: note = Description of Artificial Sequence: Synthetic coding sequence
  source 1..2787: mol_type = other DNA
atgccacccaagacccccaggaagacagctgccacagctgctgctgctgctgctgagcccccagcccctcctcctcctcctcctccagaagaagatcctgagcaggacagcggccctgaggacctgcccctggtgcggctggagtttgaggagacagaggagccagacttcaccgccctgtgccagaagctgaagatcccagaccacgtgcgggagcgggcctggctgacctgggagaaggtgtcctctgtggatggagtgctgggcggctacatccagaagaagaaggagctgtggggcatctgcatcttcatcgctgctgtggacctggatgagatgtccttcaccttcacagagctgcagaagaacatcgagatctctgtgcacaagttcttcaacctgctgaaggagattgacaccagcaccaaggtggacaatgccatgagccggctgctgaagaagtatgatgtgctgtttgccctcttcagcaagctggagaggacctgtgagctgatctacctgacccagcccagcagcagcatcagcacagagatcaacagcgccctggtgctgaaggtgtcctggatcaccttcctgctggccaagggggaggtgctgcagatggaggatgacctggtgatctccttccagctgatgctgtgtgtgctggactacttcatcaagctgagcccccccatgctgctgaaggagccctacaagacagctgtgatccccatcaatggcagccccaggaccccccggcggggccagaacagaagtgccagaattgccaagcagctggagaatgacacccgcatcatcgaggtgctgtgcaaggagcacgagtgcaacattgatgaggtgaagaatgtgtacttcaagaacttcatccccttcatgaacagcctgggcctggtgaccagcaatggcctgcctgaggtggagaacctgagcaagagatatgaggagatctacctgaagaacaaggacctggatgcccggctcttcctggaccatgacaagaccctgcagacagacagcattgacagctttgagacccagaggacccccaggaagagcaacctggatgaggaggtgaatgtcatccccccccacacccctgtgaggacagtgatgaacaccatccagcagctgatgatgatcctgaacagcgccagtgaccagcccagcgagaacctgatctcctacttcaacaactgcaccgtgaaccccaaggagagcatcctgaagagggtgaaggacatcggctacatcttcaaggagaagtttgccaaggctgtgggccagggctgtgtggagatcggcagccagcgctacaagctgggcgtgcggctgtactacagagtgatggagagcatgctgaagtctgaggaggagcggctgagcatccagaacttcagcaagctgctgaatgacaacatcttccacatgagcctgctggcctgtgccctggaggtggtgatggccacctacagccgcagcaccagccagaacctggacagcggcacagacctgtccttcccctggatcctgaatgtgctgaacctgaaggcctttgacttctacaaggtgattgagagcttcatcaaggccgagggcaacctgacccgggagatgatcaagcacctggagcgctgtgagcaccgcatcatggagagcctggcctggctgagtgacagccccctgtttgacctgatcaagcagagcaaggaccgggagggccccacagaccacctggagagcgcctgccccctgaacctgcccctgcagaacaaccacacagctgctgacatgtacctgagccctgtgcgcagccccaagaagaagggcagcaccaccagggtgaacagcacagccaatgctgagacccaggccaccagcgccttccagacccagaagcccctgaagagcaccagcctgagcctcttctacaagaaggtgtaccgcctggcctacctgcggctgaacaccctgtgtgagcggctgctgtctgagcaccctgagctggagcacatcatctggaccctcttccagcacaccctgcagaatgaatatgagctgatgagggacagacacctggaccagatcatgatgtgcagcatgtatggcatctgcaaggtgaagaacatcgacctgaagttcaagatcatcgtgacagcctacaaggacctgccccatgctgtgcaggagaccttcaagagggtgctgatcaaggaggaggagtatgacagcatcatcgtgttctacaacagcgtcttcatgcagaggctgaagaccaacatcctgcagtatgccagcacccggccccccaccctgagccccatcccccacatccccaggagcccctacaagttccccagcagccccctgcgcatccctgggggcaacatctacatcagccccctgaagagcccctacaagatcagcgagggcctgcccacccccaccaagatgacccccaggagccgcatcctggtgtccattggagagagctttggcaccagcgagaagttccagaagatcaaccagatggtgtgcaacagcgacagagtgctgaagaggtctgctgagggcagcaacccccccaagcccctgaagaagctgcgctttgatattgagggcagtgatgaagcagatggcagcaagcacctgcccggggagagcaagttccagcagaagctggccgagatgaccagcaccaggaccaggatgcagaagcagaagatgaatgacagcatggacaccagcaacaaggaggagaagtag

SEQ ID NO: 21635 - DNA, 162 bp, synthetic construct
  misc_feature 1..162: note = Description of Artificial Sequence: Synthetic coding sequence
  source 1..162: mol_type = other DNA
atgccacccaagacccccaggaagacagctgccacagctgctgctgctgctgctgagcccccagcccctcctcctcctcctcctccagaagaagatcctgagcaggacagcggccctgaggacctgcccctggtgcggggcagcatcaccaatggaagatag

SEQ ID NO: 21636 - DNA, 2724 bp, synthetic construct
  misc_feature 1..2724: note = Description of Artificial Sequence: Synthetic coding sequence
  source 1..2724: mol_type = other DNA
atgccacccaagaccccacctcctgaggaggaccctgagcaggacagcggccctgaggacctgcccctggtgcggctggagtttgaggagacagaggagccagacttcaccgccctgtgccagaagctgaagatcccagaccacgtgcgggagcgggcctggctgacctgggagaaggtgtcctctgtggatggagtgctgggcggctacatccagaagaagaaggagctgtggggcatctgcatcttcatcgctgctgtggacctggatgagatgtccttcaccttcacagagctgcagaagaacatcgagatctctgtgcacaagttcttcaacctgctgaaggagattgacaccagcaccaaggtggacaatgccatgagccggctgctgaagaagtatgatgtgctgtttgccctcttcagcaagctggagaggacctgtgagctgatctacctgacccagcccagcagcagcatcagcacagagatcaacagcgccctggtgctgaaggtgtcctggatcaccttcctgctggccaagggggaggtgctgcagatggaggatgacctggtgatctccttccagctgatgctgtgtgtgctggactacttcatcaagctgagcccccccatgctgctgaaggagccctacaagacagctgtgatccccatcaatggcagccccaggaccccaagaagaggccagaacagaagtgcccgcatcgccaagcagctggagaatgacacccgcatcatcgaggtgctgtgcaaggagcacgagtgcaacattgatgaggtgaagaatgtgtacttcaagaacttcatccccttcatgaacagcctgggcctggtgaccagcaatggcctgcctgaggtggagaacctgagcaagagatatgaggagatctacctgaagaacaaggacctggatgcccggctcttcctggaccatgacaagaccctgcagacagacagcattgacagctttgagacccagaggacccccaggaagagcaacctggatgaggaggtgaatgtcatccccccccacacccctgtgaggacagtgatgaacaccatccagcagctgatgatgatcctgaacagcgccagtgaccagcccagtgaaaatctcatctcctacttcaacaactgcaccgtgaaccccaaggagagcatcctgaagagggtgaaggacatcggctacatcttcaaggagaagtttgccaaggctgtgggccagggctgtgtggagatcggcagccagcgctacaagctgggcgtgcggctgtactacagagtgatggagagcatgctgaagtctgaggaggagcggctgagcatccagaacttcagcaagctgctgaatgacaacatcttccacatgagcctgctggcctgtgccctggaggtggtgatggccacctacagccgcagcaccagccagaacctggacagcggcacagacctgtccttcccctggatcctgaatgtgctgaacctgaaggcctttgacttctacaaggtgattgagagcttcatcaaggccgagggcaacctgacccgggagatgatcaagcacctggagcgctgtgagcaccgcatcatggagagcctggcctggctgagtgacagccccctgtttgacctgatcaagcagagcaaggaccgggagggccccacagaccacctggagagcgcctgccccctgaacctgcccctgcagaacaaccacacagctgctgacatgtacctgagccctgtgcgcagccccaagaagaagggcagcaccaccagggtgaacagcacagccaatgctgagacccaggccaccagcgccttccagacccagaagcccctgaagagcaccagcctgagcctcttctacaagaaggtgtaccgcctggcctacctgcggctgaacaccctgtgtgagcggctgctgtctgagcaccctgagctggagcacatcatctggaccctcttccagcacaccctgcagaatgaatatgagctgatgagggacagacacctggaccagatcatgatgtgcagcatgtatggcatctgcaaggtgaagaacatcgacctgaagttcaagatcatcgtgacagcctacaaggacctgccccatgctgtgcaggagaccttcaagagggtgctgatcaaggaggaggagtatgacagcatcatcgtgttctacaacagcgtcttcatgcagaggctgaagaccaacatcctgcagtatgccagcaccaggcctcccaccctgagccccatcccccacatccccaggagcccctacaagttccccagcagccccctgcgcatccctgggggcaacatctacatcagccccctgaagagcccctacaagatcagcgagggcctgcccacccccaccaagatgacccccaggagccgcatcctggtgtccatcggggagagctttggcaccagcgagaagttccagaagatcaaccagatggtgtgcaacagcgacagagtgctgaagaggtctgctgagggcagcaacccccccaagcccctgaagaagctgcgctttgacatcgagggcagtgatgaagcagatggcagcaagcacctgcctggagagagcaagttccagcagaagctggccgagatgaccagcaccaggaccaggatgcagaagcagaagatgaatgacagcatggacaccagcaacaaggaggagaagtag

SEQ ID NO: 21637 - DNA, 2694 bp, synthetic construct
  misc_feature 1..2694: note = Description of Artificial Sequence: Synthetic coding sequence
  source 1..2694: mol_type = other DNA
atgaacatcagcggcagcagctgtggcagccccaacagcgctgacaccagcagtgacttcaaggacctgtggaccaagctgaaggaatgtcatgaccgggaggtgcagggcctgcaggtgaaggtgaccaagctgaagcaggagcgcatcctggatgcccagaggctggaggagttcttcaccaagaaccagcagctgcgggagcagcagaaggtgctgcacgagaccatcaaggtgctggaggaccggctgcgggccggcctgtgtgacagatgtgctgtgacagaggagcacatgaggaagaagcagcaggagtttgagaacatccggcagcagaacctgaagctgatcacagagctgatgaatgaaagaaacaccctgcaggaggagaacaagaagctgtctgagcagctgcagcagaagattgaaaatgaccagcagcaccaggccgctgagctggagtgtgaagaagatgtgatcccagacagccccatcacagccttctccttctctggagtgaaccggctgcggaggaaggagaacccccacgtgcgctacatcgagcagacccacaccaagctggagcacagcgtgtgtgccaatgagatgaggaaggtgtccaagagcagcacccacccccagcacaaccccaatgaaaatgagatcctggtggccgacacctatgaccagagccagagccccatggccaaggcccacggcaccagcagctacaccccagacaagagcagcttcaacctggccaccgtggtggccgagaccctgggcctgggcgtgcaggaggagagcgagacccagggccccatgagccccctgggagatgagctgtaccactgcctggagggcaaccacaagaagcagccctttgaggagagcaccaggaacacagaggacagcctgcgcttcagtgacagcaccagcaagaccccaccccaggaggagctgcccaccagggtgagcagccctgtgtttggagccaccagcagcatcaagagcggcctggacctgaacaccagcctgagccccagcctgctgcagcccgggaagaagaagcacctgaagaccctgcccttcagcaacacctgcatcagccggctggagaagaccaggagcaagtctgaggacagcgccctcttcacccaccacagcctgggcagcgaggtgaacaagatcatcatccagagcagcaacaagcagatcctgatcaacaagaacatcagcgagagcctgggggagcagaacagaacagaatatggcaaggacagcaacacagacaagcacctggagcccctgaagagcctgggcggccgcaccagcaagaggaagaagacagaggaggagagcgagcacgaggtgtcctgcccccaggccagctttgacaaggaaaatgccttccccttccccatggacaaccagttctccatgaatggagactgtgtgatggacaagcccctggacctgagtgaccgcttcagcgccatccagaggcaggagaagagccagggcagcgagaccagcaagaacaagttccggcaggtgaccctgtatgaggccctgaagaccatccccaagggcttcagcagcagcaggaaggccagtgatggcaactgcaccctgcccaaggacagccctggagagccctgcagccaggagtgcatcatcctgcagcccctgaacaagtgcagcccagacaacaagcccagcctgcagatcaaggaggagaatgctgtgttcaagatccccctgcggccccgggagagcctggagacagaaaatgtgctggatgacatcaagtctgctggcagccatgagcccatcaagatccagaccaggagtgaccacggcggctgtgagctggcctctgtgctgcagctgaacccctgcaggacaggcaagatcaagagcctgcagaacaaccaggatgtgtcctttgagaacatccagtggagcattgatcctggagctgacctgagccagtacaagatggatgtgacagtgattgacaccaaggatggcagccagagcaagctgggcggggagaccgtggacatggactgcaccctggtgtctgagaccgtgctgctgaagatgaagaagcaggagcagaagggggagaagagcagcaatgaggagaggaagatgaatgacagcctggaggacatgtttgacaggaccacccatgaggagtatgagagctgcctggccgacagcttcagccaggccgcagatgaggaggaggagctgagcacagccaccaagaagctgcacacccacggggacaagcaggacaaggtgaagcagaaggcctttgtggagccctacttcaagggagatgagcgggagaccagcctgcagaacttcccccacatcgaggtggtgaggaagaaggaggagaggaggaagctgctgggccacacctgcaaggaatgtgagatctactatgctgacatgcctgctgaggagcgggagaagaagctggccagctgcagccgccaccgcttccgctacatcccccccaacaccccagagaacttctgggaggtgggcttccccagcacccagacctgcatggagcggggctacatcaaggaggacctggacccctgcccccggcccaagaggcggcagccctacaatgccatcttcagccccaagggcaaggagcagaagacctag

SEQ ID NO: 21638 - DNA, 2709 bp, synthetic construct
  misc_feature 1..2709: note = Description of Artificial Sequence: Synthetic coding sequence
  source 1..2709: mol_type = other DNA
atgaacatcagcggcagcagctgtggcagccccaacagcgctgacaccagcagtgacttcaaggacctgtggaccaagctgaaggaatgtcatgaccgggaggtgcagggcctgcaggtgaaggtgaccaagctgaagcaggagcgcatcctggatgcccagaggctggaggagttcttcaccaagaaccagcagctgcgggagcagcagaaggtgctgcacgagaccatcaaggtgctggaggaccggctgcgggccggcctgtgtgacagatgtgctgtgacagaggagcacatgaggaagaagcagcaggagtttgagaacatccggcagcagaacctgaagctgatcacagagctgatgaatgaaagaaacaccctgcaggaggagaacaagaagctgtctgagcagctgcagcagaagattgaaaatgaccagcagcaccaggccgctgagctggagtgtgaagaagatgtgatcccagacagccccatcacagccttctccttctctggagtgaaccggctgcggaggaaggagaacccccacgtgcgctacatcgagcagacccacaccaagctggagcacagcgtgtgtgccaatgagatgaggaaggtgtccaagagcagcacccacccccagcacaaccccaatgaaaatgagatcctggtggccgacacctatgaccagagccagagccccatggccaaggcccacggcaccagcagctacaccccagacaagagcagcttcaacctggccaccgtggtggccgagaccctgggcctgggcgtgcaggaggagagcgagacccagggccccatgagccccctgggagatgagctgtaccactgcctggagggcaaccacaagaagcagccctttgaggagagcaccaggaacacagaggacagcctgcgcttcagtgacagcaccagcaagaccccaccccaggaggagctgcccaccagggtgagcagccctgtgtttggagccaccagcagcatcaagagcggcctggacctgaacaccagcctgagccccagcctgctgcagcccgggaagaagaagcacctgaagaccctgcccttcagcaacacctgcatcagccggctggagaagaccaggagcaagtctgaggacagcgccctcttcacccaccacagcctgggcagcgaggtgaacaagatcatcatccagagcagcaacaagcagatcctgatcaacaagaacatcagcgagagcctgggggagcagaacagaacagaatatggcaaggacagcaacacagacaagcacctggagcccctgaagagcctgggcggccgcaccagcaagaggaagaagacagaggaggagagcgagcacgaggtgtcctgcccccaggccagctttgacaaggaaaatgccttccccttccccatggacaaccagttctccatgaatggagactgtgtgatggacaagcccctggacctgagtgaccgcttcagcgccatccagaggcaggagaagagccagggcagcgagaccagcaagaacaagttccggcaggtgaccctgtatgaggccctgaagaccatccccaagggcttcagcagcagcaggaaggccagtgatggcaactgcaccctgcccaaggacagccctggagagccctgcagccaggagtgcatcatcctgcagcccctgaacaagtgcagcccagacaacaagcccagcctgcagatcaaggaggagaatgctgtgttcaagatccccctgcggccccgggagagcctggagacagaaaatgtgctggatgacatcaagtctgctggcagccatgagcccatcaagatccagaccaggagtgaccacggcggctgtgagctggcctctgtgctgcagctgaacccctgcaggacaggcaagatcaagagcctgcagaacaaccaggatgtgtcctttgagaacatccagtggagcattgatcctggagctgacctgagccagtacaagatggatgtgacagtgattgacaccaaggatggcagccagagcaagctgggcggggagaccgtggacatggactgcaccctggtgtctgagaccgtgctgctgaagatgaagaagcaggagcagaagggggagaagagctccatgctgttctacattgatgaggagaggaagatgaatgacagcctggaggacatgtttgacaggaccacccatgaggagtatgagagctgcctggccgacagcttcagccaggccgcagatgaggaggaggagctgagcacagccaccaagaagctgcacacccatggagacaagcaggacaaggtgaagcagaaggcctttgtggagccctacttcaagggagatgagcgggagaccagcctgcagaacttcccccacatcgaggtggtgaggaagaaggaggagaggaggaagctgctgggccacacctgcaaggaatgtgagatctactatgctgacatgcctgctgaggagcgggagaagaagctggccagctgcagccgccaccgcttccgctacatcccccccaacaccccagagaacttctgggaggtgggcttccccagcacccagacctgcatggagcggggctacatcaaggaggacctggacccctgcccccggcccaagaggcggcagccctacaatgccatcttcagccccaagggcaaggagcagaagacctag

SEQ ID NO: 21639 - DNA, 2598 bp, synthetic construct
  misc_feature 1..2598: note = Description of Artificial Sequence: Synthetic coding sequence
  source 1..2598: mol_type = other DNA
atgaacatcagcggcagcagctgtggcagccccaacagcgctgacaccagcagtgacttcaaggacctgtggaccaagctgaaggaatgtcatgaccgggaggtgcagggcctgcaggtgaaggtgaccaagctgaagcaggagcgcatcctggatgcccagaggctggaggagttcttcaccaagaaccagcagctgcgggagcagcagaaggtgctgcacgagaccatcaaggtgctggaggaccggctgcgggccggcctgtgtgacagatgtgctgtgacagaggagcacatgaggaagaagcagcaggagtttgagaacatccggcagcagaacctgaagctgatcacagagctgatgaatgaaagaaacaccctgcaggaggagaacaagaagctgtctgagcagctgcagcagaagattgaaaatgaccagcagcaccaggccgctgagctggagtgtgaagaagatgtgatcccagacagccccatcacagccttctccttctctggagtgaaccggctgcggaggaaggagaacccccacgtgcgctacatcgagcagacccacaccaagctggagcacagcgtgtgtgccaatgagatgaggaaggtgtccaagagcagcacccacccccagcacaaccccaatgaaaatgagatcctggtggccgacacctatgaccagagccagagccccatggccaaggcccacggcaccagcagctacaccccagacaagagcagcttcaacctggccaccgtggtggccgagaccctgggcctgggcgtgcaggaggagagcgagacccagggccccatgagccccctgggagatgagctgtaccactgcctggagggcaaccacaagaagcagccctttgaggagagcaccaggaacacagaggacagcctgcgcttcagtgacagcaccagcaagaccccaccccaggaggagctgcccaccagggtgagcagccctgtgtttggagccaccagcagcatcaagagcggcctggacctgaacaccagcctgagccccagcctgctgcagcccgggaagaagaagcacctgaagaccctgcccttcagcaacacctgcatcagccggctggagaagaccaggagcaagtctgaggacagcgccctcttcacccaccacagcctgggcagcgaggtgaacaagatcatcatccagagcagcaacaagcagatcctgatcaacaagaacatcagcgagagcctgggggagcagaacagaacagaatatggcaaggacagcaacacagacaagcacctggagcccctgaagagcctgggcggccgcaccagcaagaggaagaagacagaggaggagagcgagcacgaggtgtcctgcccccaggccagctttgacaaggaaaatgccttccccttccccatggacaaccagttctccatgaatggagactgtgtgatggacaagcccctggacctgagtgaccgcttcagcgccatccagaggcaggagaagagccagggcagcgagaccagcaagaacaagttccggcaggtgaccctgtatgaggccctgaagaccatccccaagggcttcagcagcagcaggaaggccagtgatggcaactgcaccctgcccaaggacagccctggagagccctgcagccaggagtgcatcatcctgcagcccctgaacaagtgcagcccagacaacaagcccagcctgcagatcaaggaggagaatgctgtgttcaagatccccctgcggccccgggagagcctggagacagaaaatgtgctggatgacatcaagtctgctggcagccatgagcccatcaagatccagaccaggagtgaccacggcggctgtgagctggcctctgtgctgcagctgaacccctgcaggacaggcaagatcaagagcctgcagaacaaccaggatgtgtcctttgagaacatccagtggagcattgatcctggagctgacctgagccagtacaagatggatgtgacagtgattgacaccaaggatggcagccagagcaagctgggcggggagaccgtggacatggactgcaccctggtgtctgagaccgtgctgctgaagatgaagaagcaggagcagaagggggagaagagcagcaatgaggagaggaagatgaatgacagcctggaggacatgtttgacaggaccacccatgaggagtatgagagctgcctggccgacagcttcagccaggccgcagatgaggaggaggagctgagcacagccaccaagaagctgcacacccacggggacaagcaggacaaggtgaagcagaaggcctttgtggagccctacttcaagggagatgagagcatcatgcagatctgccagcagaagaaggagaagaggaactggctgcctgcccaggacacagacagcgccaccttccaccccacccaccagaggatctttgggaagctggtgttcctgcccctgcggctggtgtggaaggaggtgatcctgaggaagatcctgatcctggtgctggtgcagaaggatgtgtccctgaccacccagtacttcctgcagaaggcccggagcagaagacactag

SEQ ID NO: 21640 - DNA, 2694 bp, synthetic construct; identical to SEQ ID NO: 21637
  misc_feature 1..2694: note = Description of Artificial Sequence: Synthetic coding sequence
  source 1..2694: mol_type = other DNA

SEQ ID NO: 21641 - DNA, 2604 bp, synthetic construct
  misc_feature 1..2604: note = Description of Artificial Sequence: Synthetic coding sequence
  source 1..2604: mol_type = other DNA
atgaacatcagcggcagcagctgtggcagccccaacagcgctgacaccagcagtgacttcaaggacctgtggaccaagctgaaggaatgtcatgaccgggaggtgcagggcctgcaggtgaaggtgaccaagctgaagcaggagcgcatcctggatgcccagaggctggaggagttcttcaccaagaaccagcagctgcgggagcagcagaaggtgctgcacgagaccatcaaggtgctggaggaccggctgcgggccggcctgtgtgacagatgtgctgtgacagaggagcacatgaggaagaagcagcaggagtttgagaacatccggcagcagaacctgaagctgatcacagagctgatgaatgaaagaaacaccctgcaggaggagaacaagaagctgtctgagcagctgcagcagaagattgaaaatgaccagcagcaccaggccgctgagctggagtgtgaagaagatgtgatcccagacagccccatcacagccttctccttctctggagtgaaccggctgcggaggaaggagaacccccacgtgcgctacatcgagcagacccacaccaagctggagcacagcgtgtgtgccaatgagatgaggaaggtgtccaagagcagcacccacccccagcacaaccccaatgaaaatgagatcctggtggccgacacctatgaccagagccagagccccatggccaaggcccacggcaccagcagctacaccccagacaagagcagcttcaacctggccaccgtggtggccgagaccctgggcctgggcgtgcaggaggagagcgagacccagggccccatgagccccctgggagatgagctgtaccactgcctggagggcaaccacaagaagcagccctttgaggagagcaccaggaacacagaggacagcctgcgcttcagtgacagcaccagcaagaccccaccccaggaggagctgcccaccagggtgagcagccctgtgtttggagccaccagcagcatcaagagcggcctggacctgaacaccagcctgagccccagcctgctgcagcccgggaagaagaagcacctgaagaccctgcccttcagcaacacctgcatcagccggctggagaagaccaggagcaagtctgaggacagcgccctcttcacccaccacagcctgggcagcgaggtgaacaagatcatcatccagagcagcaacaagcagatcctgatcaacaagaacatcagcgagagcctgggggagcagaacagaacagaatatggcaaggacagcaacacagacaagcacctggagcccctgaagagcctgggcggccgcaccagcaagaggaagaagacagaggaggagagcgagcacgaggtgtcctgcccccaggccagctttgacaaggaaaatgccttccccttccccatggacaaccagttctccatgaatggagactgtgtgatggacaagcccctggacctgagtgaccgcttcagcgccatccagaggcaggagaagagccagggcagcgagaccagcaagaacaagttccggcaggtgaccctgtatgaggccctgaagaccatccccaagggcttcagcagcagcaggaaggccagtgatggcaactgcaccctgcccaaggacagccctggagagccctgcagccaggagtgcatcatcctgcagcccctgaacaagtgcagcccagacaacaagcccagcctgcagatcaaggaggagaatgctgtgttcaagatccccctgcggccccgggagagcctggagacagaaaatgtgctggatgacatcaagtctgctggcagccatgagcccatcaagatccagaccaggagtgaccacggcggctgtgagctggcctctgtgctgcagctgaacccctgcaggacaggcaagatcaagagcctgcagaacaaccaggatgtgtcctttgagaacatccagtggagcattgatcctggagctgacctgagccagtacaagatggatgtgacagtgattgacaccaaggatggcagccagagcaagctgggcggggagaccgtggacatggactgcaccctggtgtctgagaccgtgctgctgaagatgaagaagcaggagcagaagggggagaagagcagcaatgaggagaggaagatgaatgacagcctggaggacatgtttgacaggaccacccatgaggagtatgagagctgcctggccgacagcttcagccaggccgcagatgaggaggaggagctgagcacagccaccaagaagctgcacacccacggggacaagcaggacaaggtgaagcagaaggcctttgtggagccctacttcaagggagatgagagcatcatgcagatctgccagcagaagaaggagaagaggaactggctgcctgcccaggacacagacagcgccaccttccaccccacccaccagaggatctttgggaagctggtgttcctgcccctgcggctggtgtggaaggaggtgatcctgaggaagatcctgatcctggtgctggtgcagaaggatgtgtccctgaccacccagtacttcctgcagaaggcccggagcagaagacacagaagatag

SEQ ID NO: 21642 - DNA, 3045 bp, synthetic construct
  misc_feature 1..3045: note = Description of Artificial Sequence: Synthetic coding sequence
  source 1..3045: mol_type = other DNA
atgtttgaggacaagccccacgccgagggcgctgctgtggtggccgctgctggggaggccctgcaggccctgtgccaggagctgaacctggatgagggcagcgctgctgaggccctggatgacttcaccgccatccggggcaactacagcctggagggggaggtgacccactggctggcctgcagcctgtatgtggcctgcaggaagagcatcatccccaccgtgggcaagggcatcatggagggcaactgtgtgtccctgacccgcatcctgcggagcgccaagctgagcctcatccagttcttcagcaagatgaagaagtggatggacatgagcaacctgccccaggagttccgggagcgcatcgagcggctggagaggaactttgaggtgtccaccgtcatcttcaagaagtatgagcccatcttcctggacatcttccagaacccctatgaggagccccccaagctgcccaggagcaggaagcagaggcgcatcccctgcagcgtgaaggacctcttcaacttctgctggaccctgtttgtgtacaccaagggcaacttcaggatgattggagatgacctggtgaacagctaccacctgctgctgtgctgcctggacctgatctttgccaatgccatcatgtgccccaaccggcaggacctgctgaaccccagcttcaagggcctgcccagcgacttccacacagctgacttcaccgccagcgaggagcccccctgcatcatcgctgtgctgtgtgagctgcatgatggcctgctggtggaggccaagggcatcaaggagcactacttcaagccctacatcagcaagctgtttgacaggaagatcctgaagggagaatgtctgctggacctgagcagcttcacagacaacagcaaggctgtgaacaaggagtatgaggagtatgtgctgactgtgggggactttgatgagcgcatcttcctgggcgcagatgctgaggaggagatcggcacccccaggaagttcacccgggacacccccctgggcaagctgacagcccaggccaacgtggagtacaacctgcagcagcactttgagaagaagaggagctttgcccccagcacccccctgaccggccgccgctacctgcgggagaaggaggccgtcatcacccctgtggccagcgccacccagagcgtgtcccggctgcagagcatcgtggccggcctgaagaatgcccccagcgaccagctgatcaacatctttgagagctgtgtgagaaatcctgtggagaacatcatgaagatcctgaagggcatcggggagaccttctgccagcactacacccagagcacagatgagcagcccggcagccacatcgactttgctgtgaaccggctgaagctggccgagatcctgtactacaagatcctggagaccgtgatggtgcaggagacccggcggctgcacggcatggacatgtctgtgctgctggagcaggacatcttccacaggagcctgatggcctgctgcctggagatcgtgctgtttgcctacagcagccccaggaccttcccctggatcatcgaggtgctgaacctgcagcccttctacttctacaaggtgattgaggtggtgatccgctctgaggagggcctgagccgggacatggtgaagcacctgaacagcattgaggagcagatcctggagagcctggcctggagccatgacagcgccctgtgggaggccctgcaggtgtctgccaacaaggtgcccacctgtgaggaggtgatcttccccaacaactttgaaacaggaaatggaggaaatgtgcagggccacctgcccctgatgcccatgagccccctgatgcacccccgggtgaaggaggtgaggacagattctggcagcctgcggcgggacatgcagcccctgagccccatctctgtgcatgagcgctacagcagccccacagctggcagcgccaagaggcggctgtttggagaagatcctcccaaggagatgctgatggacaagatcatcacagagggcaccaagctgaagatcgcccccagcagcagcatcacagcagaaaatgtgtccatcctgcccggccagaccctgctgaccatggccacagcccctgtgacaggcaccaccggccacaaggtgaccatccccctgcatggagtggccaatgatgctggggagatcaccctcatccccctgtccatgaacaccaaccaggagagcaaggtgaagagccctgtgtccctgacagcccacagcctgattggagccagccccaagcagaccaacctgaccaaggcccaggaggtgcacagcacaggcatcaaccggcccaagaggacaggcagcctggccctcttctacaggaaggtgtaccacctggcctctgtgcggctgcgggacctgtgcctgaagctggatgtgtccaatgagctgcggaggaagatctggacctgctttgagttcaccctggtgcactgcccagacctgatgaaggacagacacctggaccagctgctgctgtgtgccttctacatcatggccaaggtgaccaaggaggagaggaccttccaggagatcatgaagagctacagaaaccagccccaggccaacagccacgtgtacagatctgtgctgctgaagagcatcccccgggaggtggtggcctacaacaagaacatcaatgatgactttgagatgattgactgtgacctggaggatgccaccaagaccccagactgcagcagcggccctgtgaaggaggagcggggggacctgatcaagttctacaacaccatctacgtgggccgggtgaagagctttgccctgaagtatgacctggccaaccaggaccacatgatggatgccccacccctgagccccttcccccacatcaagcagcagcccggcagcccccggcgcatcagccagcagcacagcatctacatcagcccccacaagaatggcagcggcctgacccccaggtctgccctgctgtacaagttcaacggcagccccagcaaggtgaggtag

SEQ ID NO: 21643 - DNA, 3207 bp, synthetic construct
  misc_feature 1..3207: note = Description of Artificial Sequence: Synthetic coding sequence
  source 1..3207: mol_type = other DNA
atgtttgaggacaagccccacgccgagggcgctgctgtggtggccgctgctggggaggccctgcaggccctgtgccaggagctgaacctggatgagggcagcgctgctgaggccctggatgacttcaccgccatccggggcaactacagcctggagggggaggtgacccactggctggcctgcagcctgtatgtggcctgcaggaagagcatcatccccaccgtgggcaagggcatcatggagggcaactgtgtgtccctgacccgcatcctgcggagcgccaagctgagcctcatccagttcttcagcaagatgaagaagtggatggacatgagcaacctgccccaggagttccgggagcgcatcgagcggctggagaggaactttgaggtgtccaccgtcatcttcaagaagtatgagcccatcttcctggacatcttccagaacccctatgaggagccccccaagctgcccaggagcaggaagcagaggcgcatcccctgcagcgtgaaggacctcttcaacttctgctggaccctgtttgtgtacaccaagggcaacttcaggatgattggagatgacctggtgaacagctaccacctgctgctgtgctgcctggacctgatctttgccaatgccatcatgtgccccaaccggcaggacctgctgaaccccagcttcaagggcctgcccagcgacttccacacagctgacttcaccgccagcgaggagcccccctgcatcatcgctgtgctgtgtgagctgcatgatggcctgctggtggaggccaagggcatcaaggagcactacttcaagccctacatcagcaagctgtttgacaggaagatcctgaagggagaatgtctgctggacctgagcagcttcacagacaacagcaaggctgtgaacaaggagtatgaggagtatgtgctgactgtgggggactttgatgagcgcatcttcctgggcgcagatgctgaggaggagatcggcacccccaggaagttcacccgggacacccccctgggcaagctgacagcccaggccaacgtggagtacaacctgcagcagcactttgagaagaagaggagctttgcccccagcacccccctgaccggccgccgctacctgcgggagaaggaggccgtcatcacccctgtggccagcgccacccagagcgtgtcccggctgcagagcatcgtggccggcctgaagaatgcccccagcgaccagctgatcaacatctttgagagctgtgtgagaaatcctgtggagaacatcatgaagatcctgaagggcatcggggagaccttctgccagcactacacccagagcacagatgagcagcccggcagccacatcgactttgctgtgaaccggctgaagctggccgagatcctgtactacaagatcctggagaccgtgatggtgcaggagacccggcggctgcacggcatggacatgtctgtgctgctggagcaggacatcttccacaggagcctgatggcctgctgcctggagatcgtgctgtttgcctacagcagccccaggaccttcccctggatcatcgaggtgctgaacctgcagcccttctacttctacaaggtgattgaggtggtgatccgctctgaggagggcctgagccgggacatggtgaagcacctgaacagcattgaggagcagatcctggagagcctggcctggagccatgacagcgccctgtgggaggccctgcaggtgtctgccaacaaggtgcccacctgtgaggaggtgatcttccccaacaactttgaaacaggaaatggaggaaatgtgcagggccacctgcccctgatgcccatgagccccctgatgcacccccgggtgaaggaggtgaggacagattctggcagcctgcggcgggacatgcagcccctgagccccatctctgtgcatgagcgctacagcagccccacagctggcagcgccaagaggcggctgtttggagaagatcctcccaaggagatgctgatggacaagatcatcacagagggcaccaagctgaagatcgcccccagcagcagcatcacagcagaaaatgtgtccatcctgcccggccagaccctgctgaccatggccacagcccctgtgacaggcaccaccggccacaaggtgaccatccccctgcatggagtggccaatgatgctggggagatcaccctcatccccctgtccatgaacaccaaccaggagagcaaggtgaagagccctgtgtccctgacagcccacagcctgattggagccagccccaagcagaccaacctgaccaaggcccaggaggtgcacagcacaggcatcaaccggcccaagaggacaggcagcctggccctcttctacaggaaggtgtaccacctggcctctgtgcggctgcgggacctgtgcctgaagctggatgtgtccaatgagctgcggaggaagatctggacctgctttgagttcaccctggtgcactgcccagacctgatgaaggacagacacctggaccagctgctgctgtgtgccttctacatcatggccaaggtgaccaaggaggagaggaccttccaggagatcatgaagagctacagaaaccagccccaggccaacagccacgtgtacagatctgtgctgctgaagagcatcccccgggaggtggtggcctacaacaagaacatcaatgatgactttgagatgattgactgtgacctggaggatgccaccaagaccccagactgcagcagcggccctgtgaaggaggagcggggggacctgatcaagttctacaacaccatctacgtgggccgggtgaagagctttgccctgaagtatgacctggccaaccaggaccacatgatggatgccccacccctgagccccttcccccacatcaagcagcagcccggcagcccccggcgcatcagccagcagcacagcatctacatcagcccccacaagaatggcagcggcctgacccccaggtctgccctgctgtacaagttcaacggcagccccagcaagagcctgaaggacatcaacaacatgatccggcagggcgagcagaggaccaagaagagggtgattgccatcgacagtgatgctgagagccctgccaagagggtgtgccaggagaatgatgatgtgctgctgaagaggctgcaggatgtggtgtctgagcgggccaaccactag

SEQ ID NO: 21644 - DNA, 3420 bp, synthetic construct
  misc_feature 1..3420: note = Description of Artificial Sequence: Synthetic coding sequence
  source 1..3420: mol_type = other DNA
atgcccagcggcggggaccagagccccccacctcctcctcctcctcctgctgctgctgccagtgatgaggaggaggaggatgatggagaggccgaggatgctgcccccccagctgagagccccaccccccagatccagcagagatttgatgagctgtgcagccggctgaacatggatgaagctgcccgggcagaggcctgggacagctaccgctccatgtctgagagctacaccctggagggcaatgacctgcactggctggcctgtgccctgtatgtggcctgcaggaagtctgtgcccaccgtgtccaagggcaccgtggagggcaactacgtgtccctgacccgcatcctgaagtgcagcgagcagagcctcatcgagttcttcaacaagatgaagaagtgggaggacatggccaacctgcccccccacttccgggagaggacagagcggctggagaggaacttcaccgtgtctgctgtgatcttcaagaagtatgagcccatcttccaggacatcttcaagtacccccaggaggagcagccccggcagcagaggggcaggaagcagaggcggcagccctgcaccgtgtctgagatcttccacttctgctgggtgctcttcatctatgccaagggcaacttccccatgatcagtgatgacctggtgaacagctaccacctgctgctgtgtgccctggacctggtgtatggaaatgccctgcagtgcagcaacaggaaggagctggtgaaccccaacttcaagggcctgtctgaggacttccacgccaaggacagcaagcccagcagtgaccccccctgcatcatcgagaagctgtgcagcctgcatgatggcctggtgctggaggccaagggcatcaaggagcacttctggaagccctacatcaggaagctgtatgagaagaagctgctgaagggcaaggaggagaacctgaccggcttcctggagcccggcaactttggagagagcttcaaggccatcaacaaggcctatgaggagtatgtgctgtctgtgggcaacctggatgagcgcatcttcctgggggaggatgctgaggaggagatcggcaccctgagccgctgcctgaatgccggcagcggcacagaaacagctgagcgggtgcagatgaagaacatcctgcagcagcactttgacaagagcaaggccctgcgcatcagcacccccctgactggagtgcgctacatcaaggagaacagcccctgtgtgacccctgtgtccacagccacccacagcctgagccggctgcacaccatgctgaccggcctgagaaatgcccccagcgagaagctggagcagatcctgcggacctgcagccgggaccccacccaggccatcgccaaccggctgaaggagatgtttgagatctacagccagcacttccagccagatgaggacttcagcaactgtgccaaggagatcgccagcaagcacttccgctttgctgagatgctgtactacaaggtgctggagagcgtgattgagcaggagcagaagaggctgggggacatggacctgagcggcatcctggagcaggatgccttccacaggagcctgctggcctgctgcctggaggtggtgaccttctcctacaagcccccaggcaacttccccttcatcacagagatctttgatgtgcccctgtaccacttctacaaggtgattgaggtgttcatccgggcagaagatggcctgtgccgggaggtggtgaagcacctgaaccagatcgaggagcagatcctggaccacctggcctggaagccagagagccccctgtgggagaagatccgggacaatgaaaatagagtgcccacctgtgaggaggtgatgccaccccagaacctggagcgggcagatgagatctgcatcgccggcagccccctgaccccccggcgggtgacagaggtgcgggctgacacaggaggcctgggccgcagcatcaccagccccaccaccctgtatgaccgctacagcagccccccagccagcaccacccggcggcggctgtttgtggagaatgacagccccagtgatggcggcaccccaggccgcatgccaccccagcccctggtgaatgctgtgcctgtgcagaatgtgtctggagagaccgtgtctgtgacccctgtgcccggccagaccctggtgaccatggccacagccaccgtgacagccaacaacggccagacagtgaccatccctgtgcagggcatcgccaatgaaaatggaggcatcaccttcttccctgtgcaggtgaatgtgggcggccaggcccaggccgtgacaggcagcatccagcccctgagcgcccaggccctggccggcagcctgagcagccagcaggtgacaggcaccaccctgcaggtgcccggccaggtggccatccagcagatcagccctgggggccagcagcagaagcagggccagagcgtgaccagcagcagcaaccggcccaggaagaccagcagcctgagcctcttcttcaggaaggtgtaccacctggccgctgtgcggctgcgggacctgtgtgccaagctggacatcagtgatgagctgaggaagaagatctggacctgctttgagttcagcatcatccagtgcccagagctgatgatggacagacacctggaccagctgctgatgtgtgccatctacgtgatggccaaggtgaccaaggaggacaagagcttccagaacatcatgcgctgctaccgcacccagccccaggcccggagccaggtgtacagatctgtgctgatcaagggcaagaggaagagaagaaattctggcagcagtgacagccgcagccaccagaacagccccacagagctgaacaaggacaggaccagccgggacagcagccctgtgatgaggagcagcagcaccctgcctgtgccccagcccagcagcgccccacccacccccacccggctgactggagccaacagcgacatggaggaggaggagcggggggacctgatccagttctacaacaacatctacatcaagcagatcaagacctttgccatgaagtacagccaggccaacatggatgccccacccctgagcccctacccctttgtgaggacaggcagcccccggcgcatccagctgagccagaaccaccctgtgtacatcagcccccacaagaatgagaccatgctgagcccccgggagaagatcttctactacttcagcaacagccccagcaagaggctgcgggagatcaacagcatgatcagaactggagagacccccaccaagaagaggggcatcctgctggaggatggcagcgagagccctgccaagaggatctgcccagagaaccacagcgccctgctgcggcggctgcaggatgtggccaatgaccggggcagccactag

SEQ ID NO: 21645 - DNA, 2550 bp, synthetic construct
  misc_feature 1..2550: note = Description of Artificial Sequence: Synthetic coding sequence
  source 1..2550: mol_type = other DNA
atggagagccgctgtgtggcccaggccggcatgcagtggcatgacctgggcagcctgcagcccctgcccccacgcttcaagcgcttcttctgcctgagcctgctgagcagctgtgagtacagcaaggccatcaacaaggcctatgaggagtatgtgctgtctgtgggcaacctggatgagcgcatcttcctgggggaggatgctgaggaggagatcggcaccctgagccgctgcctgaatgccggcagcggcacagaaacagctgagcgggtgcagatgaagaacatcctgcagcagcactttgacaagagcaaggccctgcgcatcagcacccccctgactggagtgcgctacatcaaggagaacagcccctgtgtgacccctgtgtccacagccacccacagcctgagccggctgcacaccatgctgaccggcctgagaaatgcccccagcgagaagctggagcagatcctgcggacctgcagccgggaccccacccaggccatcgccaaccggctgaaggagatgtttgagatctacagccagcacttccagccagatgaggacttcagcaactgtgccaaggagatcgccagcaagcacttccgctttgctgagatgctgtactacaaggtgctggagagcgtgattgagcaggagcagaagaggctgggggacatggacctgagcggcatcctggagcaggatgccttccacaggagcctgctggcctgctgcctggaggtggtgaccttctcctacaagcccccaggcaacttccccttcatcacagagatctttgatgtgcccctgtaccacttctacaaggtgattgaggtgttcatccgggcagaagatggcctgtgccgggaggtggtgaagcacctgaaccagatcgaggagcagatcctggaccacctggcctggaagccagagagccccctgtgggagaagatccgggacaatgaaaatagagtgcccacctgtgaggaggtgatgccaccccagaacctggagcgggcagatgagatctgcatcgccggcagccccctgaccccccggcgggtgacagaggtgcgggctgacacaggaggcctgggccgcagcatcaccagccccaccaccctgtatgaccgctacagcagccccccagccagcaccacccggcggcggctgtttgtggagaatgacagccccagtgatggcggcaccccaggccgcatgccaccccagcccctggtgaatgctgtgcctgtgcagaatgtgtctggagagaccgtgtctgtgacccctgtgcccggccagaccctggtgaccatggccacagccaccgtgacagccaacaacggccagacagtgaccatccctgtgcagggcatcgccaatgaaaatggaggcatcaccttcttccctgtgcaggtgaatgtgggcggccaggcccaggccgtgacaggcagcatccagcccctgagcgcccaggccctggccggcagcctgagcagccagcaggtgacaggcaccaccctgcaggtgcccggccaggtggccatccagcagatcagccctgggggccagcagcagaagcagggccagagcgtgaccagcagcagcaaccggcccaggaagaccagcagcctgagcctcttcttcaggaaggtgtaccacctggccgctgtgcggctgcgggacctgtgtgccaagctggacatcagtgatgagctgaggaagaagatctggacctgctttgagttcagcatcatccagtgcccagagctgatgatggacagacacctggaccagctgctgatgtgtgccatctacgtgatggccaaggtgaccaaggaggacaagagcttccagaacatcatgcgctgctaccgcacccagccccaggcccggagccaggtgtacagatctgtgctgatcaagggcaagaggaagagaagaaattctggcagcagtgacagccgcagccaccagaacagccccacagagctgaacaaggacaggaccagccgggacagcagccctgtgatgaggagcagcagcaccctgcctgtgccccagcccagcagcgccccacccacccccacccggctgactggagccaacagcgacatggaggaggaggagcggggggacctgatccagttctacaacaacatctacatcaagcagatcaagacctttgccatgaagtacagccaggccaacatggatgccccacccctgagcccctacccctttgtgaggacaggcagcccccggcgcatccagctgagccagaaccaccctgtgtacatcagcccccacaagaatgagaccatgctgagcccccgggagaagatcttctactacttcagcaacagccccagcaagaggctgcgggagatcaacagcatgatcagaactggagagacccccaccaagaagaggggcatcctgctggaggatggcagcgagagccctgccaagaggatctgcccagagaaccacagcgccctgctgcggcggctgcaggatgtggccaatgaccggggcagccactag

SEQ ID NO: 21646 - DNA, 1668 bp, synthetic construct
  misc_feature 1..1668: note = Description of Artificial Sequence: Synthetic coding sequence
  source 1..1668: mol_type = other DNA
atgcagagcctgaccaagggaaatgacctgcactggctggcctgtgccctgtatgtggcctgcaggaagtctgtgcccaccgtgtccaagggcaccgtggagggcaactacgtgtccctgacccgcatcctgaagtgcagcgagcagagcctcatcgagttcttcaacaagatgaagaagtgggaggacatggccaacctgcccccccacttccgggagaggacagagcggctggagaggaacttcaccgtgtctgctgtgatcttcaagaagtatgagcccatcttccaggacatcttcaagtacccccaggaggagcagccccggcagcagaggggcaggaagcagaggcggcagccctgcaccgtgtctgagatcttccacttctgctgggtgctcttcatctatgccaagggcaacttccccatgatcagtgatgacctggtgaacagctaccacctgctgctgtgtgccctggacctggtgtatggaaatgccctgcagtgcagcaacaggaaggagctggtgaaccccaacttcaagggcctgtctgaggacttccacgccaaggacagcaagcccagcagtgaccccccctgcatcatcgagaagctgtgcagcctgcatgatggcctggtgctggaggccaagggcatcaaggagcacttctggaagccctacatcaggaagctgtatgagaagaagctgctgaagggcaaggaggagaacctgaccggcttcctggagcccggcaactttggagagagcttcaaggccatcaacaaggcctatgaggagtatgtgctgtctgtgggcaacctggatgagcgcatcttcctgggggaggatgctgaggaggagatcggcaccctgagccgctgcctgaatgccggcagcggcacagaaacagctgagcgggtgcagatgaagaacatcctgcagcagcactttgacaagagcaaggccctgcgcatcagcacccccctgactggagtgcgctacatcaaggagaacagcccctgtgtgacccctgtgtccacagccacccacagcctgagccggctgcacaccatgctgaccggcctgagaaatgcccccagcgagaagctggagcagatcctgcggacctgcagccgggaccccacccaggccatcgccaaccggctgaaggagatgtttgagatctacagccagcacttccagccagatgaggacttcagcaactgtgccaaggagatcgccagcaagcacttccgctttgctgagatgctgtactacaaggtgctggagagcgtgattgagcaggagcagaagaggctgggggacatggacctgagcggcatcctggagcaggatgccttccacaggagcctgctggcctgctgcctggaggtggtgaccttctcctacaagcccccaggcaacttccccttcatcacagagatctttgatgtgcccctgtaccacttctacaaggtgattgaggtgttcatccgggcagaagatggcctgtgccgggaggtggtgaagcacctgaaccagatcgaggagcagatcctggaccacctggcctggaagccagagagccccctgtgggagaagatccgggacaatgaaaatagagtgcccacctgtgaggaggtgatgccaccccagaacctggagtag

SEQ ID NO: 21647 - DNA, 1557 bp, synthetic construct
  misc_feature 1..1557: note = Description of Artificial Sequence: Synthetic coding sequence
  source 1..1557: mol_type = other DNA
atgatcagtgatgacctggtgaacagctaccacctgctgctgtgtgccctggacctggtgtatggaaatgccctgcagtgcagcaacaggaaggagctggtgaaccccaacttcaagggcctgtctgaggacttccacgccaaggacagcaagcccagcagtgaccccccctgcatcatcgagaagctgtgcagcctgcatgatggcctggtgctggaggccaagggcatcaaggagcacttctggaagccctacatcaggaagctgtatgagaagaagctgctgaagggcaaggaggagaacctgaccggcttcctggagcccggcaactttggagagagcttcaaggccatcaacaaggcctatgaggagtatgtgctgtctgtgggcaacctggatgagcgcatcttcctgggggaggatgctgaggaggagatcggcaccctgagccgctgcctgaatgccggcagcggcacagaaacagctgagcgggtgcagatgaagaacatcctgcagcagcactttgacaagagcaaggccctgcgcatcagcacccccctgactggagtgcgctacatcaaggagaacagcccctgtgtgacccctgtgtccacagccacccacagcctgagccggctgcacaccatgctgaccggcctgagaaatgcccccagcgagaagctggagcagatcctgcggacctgcagccgggaccccacccaggccatcgccaaccggctgaaggagatgtttgagatctacagccagcacttccagccagatgaggacttcagcaactgtgccaaggagatcgccagcaagcacttccgctttgctgagatgctgtactacaaggtgctggagagcgtgattgagcaggagcagaagaggctgggggacatggacctgagcggcatcctggagcaggatgccttccacaggagcctgctggcctgctgcctggaggtggtgaccttctcctacaagcccccaggcaacttccccttcatcacagagatctttgatgtgcccctgtaccacttctacaaggtgattgaggtgttcatccgggcagaagatggcctgtgccgggaggtggtgaagcacctgaaccagatcgaggagcagatcctggaccacctggcctggaagccagagagccccctgtgggagaagatccgggacaatgaaaatagagtgcccacctgtgaggaggtgatgccaccccagaacctggagcgggcagatgagatctgcatcgccggcagcccccggcgcatccagctgagccagaaccaccctgtgtacatcagcccccacaagaatgagaccatgctgagcccccgggagaagatcttctactacttcagcaacagccccagcaagaggctgcgggagatcaacagcatgatcagaactggagagacccccaccaagaagaggggcatcctgctggaggatggcagcgagagccctgccaagaggatctgcccagagaaccacagcgccctgctgcggcggctgcaggatgtggccaatgaccggggcagccactag

SEQ ID NO: 21648 - DNA, 1347 bp, synthetic construct
  misc_feature 1..1347: note = Description of Artificial Sequence: Synthetic coding sequence
  source 1..1347: mol_type = other DNA
atgtttgactgcatggatgtgctgtctgtgtccccaggccagatcctggacttctacacagccagccccagcagctgcatgctgcaggagaaggccctgaaggcctgcttcagcggcctgacccagacagagtggcagcaccgccacacagcccagagcattgagacccagagcaccagcagcgaggagctggtgcccagcccccccagccccctgcccccaccccgggtgtacaagccctgctttgtgtgccaggacaagagcagcggctaccactatggagtgtctgcctgtgagggctgcaagggcttcttccgccgcagcatccagaagaacatgatctacacctgccaccgggacaagaactgtgtgatcaacaaggtgaccaggaaccgctgccagtactgccgcctgcagaagtgctttgaggtgggcatgagcaaggagagcgtgagaaatgacaggaacaagaagaagaaggagaccagcaagcaggagtgcacagagagctatgagatgacagctgagctggatgacctgacagagaagatcaggaaggcccaccaggagaccttccccagcctgtgccagctgggcaagtacaccaccaacagcagcgctgaccaccgggtgcggctggacctgggcctgtgggacaagttcagcgagctggccaccaagtgcatcatcaagatcgtggagtttgccaagaggctgcccggcttcaccggcctgaccatcgctgaccagatcaccctgctgaaggccgcctgcctggacatcctgatcctgcgcatctgcacccgctacaccccagagcaggacaccatgaccttcagtgatggcctgaccctgaacagaacccagatgcacaatgccggcttcggccccctgacagacctggtgttcacctttgccaaccagctgctgcccctggagatggatgacacagaaacaggcctgctgagcgccatctgcctgatctgtggggaccggcaggacctggaggagcccaccaaggtggacaagctgcaggagcccctgctggaggccctgaagatctacatcaggaagagaagacccagcaagccccacatgttccccaagatcctgatgaagatcacagacctgcggagcatcagcgccaagggagctgagagggtcatcaccctgaagatggagatccctggctccatgccacccctcatccaggagatgctggagaacagcgagggccacgagcccctgacccccagcagcagcggcaacacagctgagcacagccccagcatcagccccagctctgtggagaacagcggcgtgtcccagagccccctggtgcagtag

SEQ ID NO: 21649 - DNA, 1368 bp, synthetic construct
  misc_feature 1..1368: note = Description of Artificial Sequence: Synthetic coding sequence
  source 1..1368: mol_type = other DNA
atgaccaccagcggccacgcctgccctgtgcctgctgtgaatggccacatgacccactacccagccaccccctaccccctgctcttcccccctgtgattggaggcctgagcctgccccccctgcacggcctgcacggccaccccccaccttctggctgcagcacccccagccctgccaccatcgagacccagagcaccagcagcgaggagctggtgcccagcccccccagccccctgcccccaccccgggtgtacaagccctgctttgtgtgccaggacaagagcagcggctaccactacggcgtgtctgcctgtgagggctgcaagggcttcttcagaagaagcatccagaagaacatgatctacacctgccaccgggacaagaactgtgtgatcaacaaggtgaccaggaaccgctgccagtactgccgcctgcagaagtgctttgaggtgggcatgagcaaggagagcgtgagaaatgacaggaacaagaagaagaaggagaccagcaagcaggagtgcacagagagctatgagatgacagctgagctggatgacctgacagagaagatcaggaaggcccaccaggagaccttccccagcctgtgccagctgggcaagtacaccaccaacagcagcgctgaccaccgggtgcggctggacctgggcctgtgggacaagttcagcgagctggccaccaagtgcatcatcaagatcgtggagtttgccaagaggctgcccggcttcaccggcctgaccatcgctgaccagatcaccctgctgaaggccgcctgcctggacatcctgatcctgcgcatctgcacccgctacaccccagagcaggacaccatgaccttcagtgatggcctgaccctgaacagaacccagatgcacaatgccggcttcggccccctgacagacctggtgttcacctttgccaaccagctgctgcccctggagatggatgacacagagaccggcctgctgagcgccatctgcctgatctgtggggaccggcaggacctggaggagcccaccaaggtggacaagctgcaggagcccctgctggaggccctgaagatctacatcaggaagaggcggcccagcaagccccacatgttccccaagatcctgatgaagatcacagacctgcggagcatcagcgccaagggagctgagagggtcatcaccctgaagatggagatccctggctccatgcctcctctcatccaggagatgctggagaacagcgagggccacgagcccctgacccccagcagcagcggcaacacagctgagcacagccccagcatcagccccagctctgtggagaacagcggcgtgtcccagagccccctggtgcagtag

SEQ ID NO: 21650 - DNA, 1011 bp, synthetic construct
  misc_feature 1..1011: note = Description of Artificial Sequence: Synthetic coding sequence
  source 1..1011: mol_type = other DNA
atgatctacacctgccaccgggacaagaactgtgtgatcaacaaggtgaccaggaaccgctgccagtactgccgcctgcagaagtgctttgaggtgggcatgagcaaggagagcgtgagaaatgacaggaacaagaagaagaaggagaccagcaagcaggagtgcacagagagctatgagatgacagctgagctggatgacctgacagagaagatcaggaaggcccaccaggagaccttccccagcctgtgccagctgggcaagtacaccaccaacagcagcgctgaccaccgggtgcggctggacctgggcctgtgggacaagttcagcgagctggccaccaagtgcatcatcaagatcgtggagtttgccaagaggctgcccggcttcaccggcctgaccatcgctgaccagatcaccctgctgaaggccgcctgcctggacatcctgatcctgcgcatctgcacccgctacaccccagagcaggacaccatgaccttcagtgatggcctgaccctgaacagaacccagatgcacaatgccggcttcggccccctgacagacctggtgttcacctttgccaaccagctgctgcccctggagatggatgacacagaaacaggcctgctgagcgccatctgcctgatctgtggggaccggcaggacctggaggagcccaccaaggtggacaagctgcaggagcccctgctggaggccctgaagatctacatcaggaagagaagacccagcaagccccacatgttccccaagatcctgatgaagatcacagacctgcggagcatcagcgccaagggagctgagagggtcatcaccctgaagatggagatccctggctccatgccacccctcatccaggagatgctggagaacagcgagggccacgagcccctgacccccagcagcagcggcaacacagctgagcacagccccagcatcagccccagctctgtggagaacagcggcgtgtcccagagccccctggtgcagtag

SEQ ID NO: 21651 - DNA, 1011 bp, synthetic construct; identical to SEQ ID NO: 21650
  misc_feature 1..1011: note = Description of Artificial Sequence: Synthetic coding sequence
  source 1..1011: mol_type = other DNA

SEQ ID NO: 21652 - DNA, 1326 bp, synthetic construct
  misc_feature 1..1326: note = Description of Artificial Sequence: Synthetic coding sequence
  source 1..1326: mol_type = other DNA
atgaccaccagcggccacgcctgccctgtgcctgctgtgaatggccacatgacccactacccagccaccccctaccccctgctcttcccccctgtgattggaggcctgagcctgccccccctgcacggcctgcacggccaccccccaccttctggctgcagcacccccagccctgccaccatcgagacccagagcaccagcagcgaggagctggtgcccagcccccccagccccctgcccccaccccgggtgtacaagccctgctttgtgtgccaggacaagagcagcggctaccactacggcgtgtctgcctgtgagggctgcaagggcttcttcagaagaagcatccagaagaacatgatctacacctgccaccgggacaagaactgtgtgatcaacaaggtgaccaggaaccgctgccagtactgccgcctgcagaagtgctttgaggtgggcatgagcaaggagagcgtgagaaatgacaggaacaagaagaagaaggagaccagcaagcaggagtgcacagagagctatgagatgacagctgagctggatgacctgacagagaagatcaggaaggcccaccaggagaccttccccagcctgtgccagctgggcaagtacaccaccaacagcagcgctgaccaccgggtgcggctggacctgggcctgtgggacaagttcagcgagctggccaccaagtgcatcatcaagatcgtggagtttgccaagaggctgcccggcttcaccggcctgaccatcgctgaccagatcaccctgctgaaggccgcctgcctggacatcctgatcctgcgcatctgcacccgctacaccccagagcaggacaccatgaccttcagtgatggcctgaccctgaacagaacccagatgcacaatgccggcttcggccccctgacagacctggtgttcacctttgccaaccagctgctgcccctggagatggatgacacagagaccggcctgctgagcgccatctgcctgatctgtggggaccggcaggacctggaggagcccaccaaggtggacaagctgcaggagcccctgctggaggccctgaagatctacatcaggaagaggcggcccagcaagccccacatgttccccaagatcctgatgaagatcacagacctgcggagcatcagcgccaagggagctgagagggtcatcaccctgaagatggagatccctgagggccacgagcccctgacccccagcagcagcggcaacacagctgagcacagccccagcatcagccccagctctgtggagaacagcggcgtgtcccagagccccctggtgcagtag

SEQ ID NO: 21653 - DNA, 462 bp, synthetic construct
  misc_feature 1..462: note = Description of Artificial Sequence: Synthetic coding sequence
  source 1..462: mol_type = other DNA
atggaccccccagctggctttgtgcgggccggcaacccagctgtggccgccccccagagccccctgagccctgagggcgcccacttccgggccgcccaccaccccaggagcacaggcagccgctgccccggcagcctgcagcccagccggcccctggtggccaactggctgcagagcctgcctgagatgcctgtggacttcaccggctactggaagatgctggtgaatgaaaattttgaggagtacctgcgggccctggatgtgaatgtggccctgaggaagatcgccaacctgctgaagccagacaaggagatcgtgcaggatggagaccacatgatcatccgcaccctgagcaccttcaggaactacatcatggacttccaggtgggcaaggagtttgaggaggacctgaccggcattgatgacaggaagtgcatgtctgaaacaggcttcagcagctag

SEQ ID NO: 21654 - DNA, 405 bp, synthetic construct
  misc_feature 1..405: note = Description of Artificial Sequence: Synthetic coding sequence
  source 1..405: mol_type = other DNA
atgacccgggaccagaatggcacctgggagatggagagcaatgaaaattttgagggctacatgaaggccctggacatcgactttgccaccaggaagattgctgtgcggctgacccagaccaaggtgattgaccaggatggagacaacttcaagaccaagaccaccagcaccttcagaaattatgatgtggacttcaccgtgggcgtggagtttgatgagtacaccaagagcctggacaacagacatgtgaaggccctggtgacctgggagggagatgtgctggtgtgtgtgcagaagggggagaaggaaaatagaggctggaagcagtggattgaaggagacaagctgtacctggagctgacctgtggggaccaggtgtgccggcaggtgttcaagaagaagtag

SEQ ID NO: 21655 - DNA, 474 bp, synthetic construct
  misc_feature 1..474: note = Description of Artificial Sequence: Synthetic coding sequence
  source 1..474: mol_type = other DNA
atggaccccccagctggctttgtgcgggccggcaacccagctgtggccgccccccagagccccctgagccctgagggcgcccacttccgggccgcccaccaccccaggagcacaggcagccgctgccccggcagcctgcagcccagccggcccctggtggccaactggctgcagagcctgcctgagatgcctgtggacttcaccggctactggaagatgctggtgaatgaaaattttgaggagtacctgcgggccctggatgtgaatgtggccctgaggaagatcgccaacctgctgaagccagacaaggagatcgtgcaggatggagaccacatgatcatccgcaccctgagcaccttcaggaactacatcatggacttccaggtgggcaaggagtttgaggaggacctgaccggcattgatgacaggaagtgcatggccggcgtgcagagccgggacctgagcagcctgtag

SEQ ID NO: 21656 - DNA, 3756 bp, synthetic construct
  misc_feature 1..3756: note = Description of Artificial Sequence: Synthetic coding sequence
  source 1..3756: mol_type = other DNA
atgaggcggggcggctggaggaagagagcagaaaatgatggctgggagacctggggcggctacatggccgccaaggtgcagaagctggaggagcagttcagaagtgatgctgccatgcagaaggatggcaccagcagcaccatcttcagcggcgtggccatctacgtgaatggctacacagaccccagcgctgaggagctgaggaagctgatgatgctgcacggcggccagtaccacgtgtactacagccgcagcaagaccacccacatcatcgccaccaacctgcccaatgccaagatcaaggagctgaagggggagaaggtgatccggcctgagtggatcgtggagagcatcaaggccggccgcctgctgagctacatcccctaccagctgtacaccaagcagagctctgtgcagaagggcctgtccttcaaccctgtgtgcaggcctgaggaccccctgcccggccccagcaacatcgccaagcagctgaacaacagagtgaaccacatcgtgaagaagattgaaacagaaaatgaggtgaaggtgaatggcatgaacagctggaatgaggaggatgagaacaatgacttctcctttgtggacctggagcagaccagccctggcaggaagcagaatggcatcccccacccccggggcagcacagccatcttcaacggccacacccccagcagcaatggagccctgaagacccaggactgcctggtgcccatggtgaacagcgtggccagccggctgagccctgccttcagccaggaggaggacaaggccgagaagagcagcacagacttccgggactgcaccctgcagcagctgcagcagagcaccaggaacacagatgccctgaggaacccccacaggaccaacagcttcagcctgagccccctgcacagcaacaccaagatcaacggggcccaccacagcacagtgcagggccccagcagcaccaagagcaccagctctgtgtccaccttcagcaaggccgcccccagcgtgcccagcaagcccagcgactgcaacttcatcagcaacttctacagccacagccggctgcaccacatctccatgtggaagtgtgagctgacagaatttgtgaacaccctgcagaggcagagcaatggcatcttccctggccgggagaagctgaagaagatgaagacaggccgcagcgccctggtggtgacagacaccggggacatgtctgtgctgaacagccccaggcaccagagctgcatcatgcacgtggacatggactgcttctttgtgtctgtgggcatccggaacagaccagacctgaagggcaagcctgtggccgtgaccagcaacagaggcaccggccgggcccccctgcggcctggggccaacccccagctggagtggcagtactaccagaacaagatcctgaagggcaaggctgctgacatcccagacagcagcctgtgggagaacccagattctgcccaggccaatggaattgattctgtgctgagcagagctgagatcgccagctgcagctatgaggcccggcagctgggcatcaagaatggcatgttcttcggccacgccaagcagctgtgccccaacctgcaggccgtgccctatgacttccacgcctacaaggaggtggcccagaccctgtatgagaccctggccagctacacccacaacatcgaggccgtgtcctgtgatgaggccctggtggacatcacagagatcctggccgagaccaagctgaccccagatgaatttgccaatgctgtgaggatggagatcaaggaccagaccaagtgtgccgcctctgtgggcatcggcagcaacatcctgctggccaggatggccaccaggaaggccaagccagatggccagtaccacctgaagccagaggaggtggatgacttcatccggggccagctggtgaccaacctgcccggggtgggccacagcatggagagcaagctggccagcctgggcatcaagacctgtggggacctgcagtacatgaccatggccaagctgcagaaggagtttggccccaagacaggccagatgctgtaccgcttctgccggggcctggatgacaggcctgtgaggacagagaaggagaggaagtctgtgtctgctgagatcaactacggcatccgcttcacccagcccaaggaggccgaggccttcctgctgagcctgtctgaggagatccagaggcggctggaggccaccggcatgaagggcaagaggctgaccctgaagatcatggtgaggaagccaggggcccctgtggagacagccaagtttggaggccacggcatctgtgacaacatcgccaggacagtgaccctggaccaggccacagacaatgccaagatcatcggcaaggccatgctgaacatgttccacaccatgaagctgaacatcagtgacatgaggggcgtgggcatccacgtgaaccagctggtgcccaccaacctgaaccccagcacctgccccagccggcccagcgtgcagagcagccacttccccagcggcagctacagcgtgagagatgtgttccaggtgcagaaggccaagaagagcacagaggaggagcacaaggaggtgttccgggctgctgtggacctggagatcagcagcgccagcaggacctgcaccttcctgccccccttccctgcccacctgcccaccagcccagacaccaacaaggccgagagcagcggcaagtggaatggcctgcacacccctgtgtctgtgcagagccggctgaacctgagcattgaggtgcccagccccagccagctggaccagagcgtgctggaggccctgcccccagacctgcgggagcaggtggagcaggtgtgtgctgtgcagcaggccgagagccacggggacaagaagaaggagcctgtgaatggctgcaacacaggcatcctgccccagcctgtgggcaccgtgctgctgcagatccctgagccccaggagagcaacagtgatgctggcatcaacctgattgccctgcctgccttcagccaggtggaccctgaggtgtttgctgccctgcctgctgagctgcagcgggagctgaaggccgcctatgaccagaggcagaggcagggcgagaacagcacccaccagcagagcgccagcgcctctgtgcccaagaaccccctgctgcacctgaaggctgctgtgaaggagaagaagaggaacaagaagaagaagaccatcggcagccccaagaggatccagagccccctgaacaacaagctgctgaacagccctgccaagaccctgcccggggcctgtggcagcccccagaagctgattgatggcttcctgaagcatgagggccccccagctgagaagcccctggaggagctgagcgccagcaccagcggcgtgcccggcctgagcagcctgcagagcgaccctgctggctgtgtgcggcccccagcccccaacctggccggggctgtggagttcaatgatgtgaagaccctgctgcgggagtggatcaccaccatcagtgaccccatggaggaggacatcctgcaggtggtgaagtactgcacagacctgattgaggagaaggacctggagaagctggacctggtgatcaagtacatgaagaggctgatgcagcagagcgtggagagcgtgtggaacatggcctttgacttcatcctggacaacgtgcaggtggtgctgcagcagacctacggcagcaccctgaaggtgacctag

SEQ ID NO: 21657 - DNA, 3753 bp, synthetic construct
  misc_feature 1..3753: note = Description of Artificial Sequence: Synthetic coding sequence
  source 1..3753: mol_type = other DNA
atgaggcggggcggctggaggaagagagcagaaaatgatggctgggagacctggggcggctacatggccgccaaggtgcagaagctggaggagcagttcagaagtgatgctgccatgcagaaggatggcaccagcagcaccatcttcagcggcgtggccatctacgtgaatggctacacagaccccagcgctgaggagctgaggaagctgatgatgctgcacggcggccagtaccacgtgtactacagccgcagcaagaccacccacatcatcgccaccaacctgcccaatgccaagatcaaggagctgaagggggagaaggtgatccggcctgagtggatcgtggagagcatcaaggccggccgcctgctgagctacatcccctaccagctgtacaccaagcagagctctgtgcagaagggcctgtccttcaaccctgtgtgcaggcctgaggaccccctgcccggccccagcaacatcgccaagcagctgaacaacagagtgaaccacatcgtgaagaagattgaaacagaaaatgaggtgaaggtgaatggcatgaacagctggaatgaggaggatgagaacaatgacttctcctttgtggacctggagcagaccagccctggcaggaagcagaatggcatcccccacccccggggcagcacagccatcttcaacggccacacccccagcagcaatggagccctgaagacccaggactgcctggtgcccatggtgaacagcgtggccagccggctgagccctgccttcagccaggaggaggacaaggccgagaagagcagcacagacttccgggactgcaccctgcagcagctgcagcagagcaccaggaacacagatgccctgaggaacccccacaggaccaacagcttcagcctgagccccctgcacagcaacaccaagatcaacggggcccaccacagcacagtgcagggccccagcagcaccaagagcaccagctctgtgtccaccttcagcaaggccgcccccagcgtgcccagcaagcccagcgactgcaacttcatcagcaacttctacagccacagccggctgcaccacatctccatgtggaagtgtgagctgacagaatttgtgaacaccctgcagaggcagagcaatggcatcttccctggccgggagaagctgaagaagatgaagacaggccgcagcgccctggtggtgacagacaccggggacatgtctgtgctgaacagccccaggcaccagagctgcatcatgcacgtggacatggactgcttctttgtgtctgtgggcatccggaacagaccagacctgaagggcaagcctgtggccgtgaccagcaacagaggcaccggccgggcccccctgcggcctggggccaacccccagctggagtggcagtactaccagaacaagatcctgaagggcaaggctgacatcccagacagcagcctgtgggagaacccagacagcgcccaggccaacggcatcgacagcgtgctgagcagagctgagatcgccagctgcagctatgaggcccggcagctgggcatcaagaatggcatgttctttggacatgccaagcagctgtgccccaacctgcaggccgtgccctatgacttccacgcctacaaggaggtggcccagaccctgtatgagaccctggccagctacacccacaacattgaagctgtgtcctgtgatgaggccctggtggacatcacagagatcctggccgagaccaagctgaccccagatgaatttgccaatgctgtgaggatggagatcaaggaccagaccaagtgtgccgcctctgtgggcatcggcagcaacatcctgctggccaggatggccaccaggaaggccaagccagatggccagtaccacctgaagccagaggaggtggatgacttcatccggggccagctggtgaccaacctgcccggggtgggccacagcatggagagcaagctggccagcctgggcatcaagacctgtggggacctgcagtacatgaccatggccaagctgcagaaggagtttggccccaagacaggccagatgctgtaccgcttctgccggggcctggatgacaggcctgtgaggacagagaaggagaggaagtctgtgtctgctgagatcaactacggcatccgcttcacccagcccaaggaggccgaggccttcctgctgagcctgtctgaggagatccagaggcggctggaggccaccggcatgaagggcaagaggctgaccctgaagatcatggtgaggaagccaggggcccctgtggagacagccaagtttggaggccacggcatctgtgacaacatcgccaggacagtgaccctggaccaggccacagacaatgccaagatcatcggcaaggccatgctgaacatgttccacaccatgaagctgaacatcagtgacatgagaggagtgggcatccacgtgaaccagctggtgcccaccaacctgaaccccagcacctgccccagccggcccagcgtgcagagcagccacttccccagcggcagctacagcgtgagagatgtgttccaggtgcagaaggccaagaagagcacagaggaggagcacaaggaggtgttccgggctgctgtggacctggagatcagcagcgccagcaggacctgcaccttcctgccccccttccctgcccacctgcccaccagcccagacaccaacaaggccgagagcagcggcaagtggaatggcctgcacacccctgtgtctgtgcagagccggctgaacctgagcattgaggtgcccagccccagccagctggaccagagcgtgctggaggccctgcccccagacctgcgggagcaggtggagcaggtgtgtgctgtgcagcaggccgagagccatggagacaagaagaaggagcctgtgaatggctgcaacacaggcatcctgccccagcctgtgggcaccgtgctgctgcagatccctgagccccaggagagcaacagtgatgctggcatcaacctgattgccctgcctgccttcagccaggtggaccctgaggtgtttgctgccctgcctgctgagctgcagcgggagctgaaggccgcctatgaccagaggcagaggcagggcgagaacagcacccaccagcagagcgccagcgcctctgtgcccaagaaccccctgctgcacctgaaggctgctgtgaaggagaagaagaggaacaagaagaagaagaccatcggcagccccaagaggatccagagccccctgaacaacaagctgctgaacagccctgccaagaccctgcccggggcctgtggcagcccccagaagctgattgatggcttcctgaagcatgagggccccccagctgagaagcccctggaggagctgagcgccagcaccagcggcgtgcccggcctgagcagcctgcagagcgaccctgctggctgtgtgcggcccccagcccccaacctggccggggctgtggagttcaatgatgtgaagaccctgctgcgggagtggatcaccaccatcagtgaccccatggaggaggacatcctgcaggtggtgaagtactgcacagacctgattgaggagaaggacctggagaagctggacctggtgatcaagtacatgaagaggctgatgcagcagagcgtggagagcgtgtggaacatggcctttgacttcatcctggacaacgtgcaggtggtgctgcagcagacctacggcagcaccctgaaggtgacctag

SEQ ID NO: 21658 - DNA, 2916 bp, synthetic construct
  misc_feature 1..2916: note = Description of Artificial Sequence: Synthetic coding sequence
  source 1..2916: mol_type = other DNA
atggccaccgtgcgggccagcctgcggggggccctgctgctgctgctggccgtggccggcgtggccgaggtggccggcggcctggcccctggcagcgctggggccctgtgctgcaaccacagcaaggacaaccagatgtgcagagatgtgtgtgagcagatcttcagcagcaagtctgagagccggctgaagcacctgctgcagagggccccagactactgcccagagaccatggtggagatctggaactgcatgaacagcagcctgcccggggtcttcaagaagagtgatggctgggtgggcctgggctgctgtgagctggccatcgccctggagtgccggcaggcctgcaagcaggccagcagcaagaatgacatcagcaaggtgtgcaggaaggagtatgaaaatgccctcttcagctgcatcagcagaaatgagatgggctctgtgtgctgcagctatgccggccaccacaccaactgccgggagtactgccaggccatcttcagaacagacagcagccctggccccagccagatcaaggctgtggagaactactgtgccagcatcagcccccagctgatccactgtgtgaacaactacacccagagctaccccatgaggaaccccacagacagcctgtactgctgtgacagagcagaagatcatgcctgccagaatgcctgcaagaggatcctgatgagcaagaagacagagatggagatcgtggatggcctgattgagggctgcaagacccagcccctgccccaggaccccctgtggcagtgcttcctggagagcagccagagcgtgcaccctggggtgacagtgcaccccccacccagcacaggcctggatggagccaagctgcactgctgcagcaaggccaacaccagcacctgccgggagctgtgcaccaagctgtacagcatgtcctggggcaacacccagagctggcaggagtttgaccgcttctgtgagtacaaccctgtggaggtgtccatgctgacctgcctggctgatgtgcgggagccctgccagctgggctgcaggaacctgacctactgcaccaacttcaacaaccggcccacagagctgttccgcagctgcaatgcccagagcgaccagggcgccatgaatgacatgaagctgtgggagaagggcagcatcaagatgcccttcatcaacatccctgtgctggacatcaagaagtgccagcctgagatgtggaaggccatcgcctgcagcctgcagatcaagccctgccacagcaagagccggggcagcatcatctgcaagagtgactgtgtggagatcctgaagaagtgtggggaccagaacaagtttcctgaggaccacacagctgagagcatctgtgagctgctgagccccacagatgacctgaagaactgcatccccctggacacctacctgcggcccagcaccctgggcaacatcgtggaggaggtgacccacccctgcaaccccaacccctgcccagccaatgagctgtgtgaggtgaacaggaagggctgccccagcggggacccctgcctgccctacttctgtgtgcagggctgcaagctgggggaggccagtgacttcatcgtgcggcagggcaccctcatccaggtgcccagcagcgctggggaggtgggctgctacaagatctgcagctgtggccagagcggcctgctggagaactgcatggagatgcactgcatcgacctgcagaagagctgcatcgtgggcggcaagaggaagagccacggcaccagcttcagcattgactgcaatgtgtgcagctgctttgctggcaacctggtgtgcagcacccggctgtgcctgtctgagcacagcagtgaagatgacaggaggaccttcaccggcctgccctgcaactgtgccgaccagtttgtgcctgtgtgtggccagaatggccgcacctaccccagcgcctgcatcgcccgctgtgtgggcctgcaggaccaccagtttgaatttggcagctgcatgagcaaggacccctgcaaccccaacccctgccagaagaaccagcgctgcatccccaagccccaggtgtgcctgaccacctttgacaagtttggctgcagccagtatgaatgtgtgccccggcagctggcctgtgaccaggtgcaggaccctgtgtgtgacacagaccacatggagcacaacaacctgtgcaccctgtaccagaggggcaagagcctgagctacaagggcccctgccagcccttctgccgggccacagagcctgtgtgtggccacaacggggagacctacagctctgtgtgtgccgcctacagcgacagagtggccgtggactactacggggactgccaggccgtgggcgtgctgtctgagcacagctctgtggctgaatgtgcctctgtgaagtgccccagcctgctggccgccggctgcaagcccatcatccccccaggggcctgctgccccctgtgtgccggcatgctgcgggtgctgtttgacaaggagaagctggacaccatcgccaaggtgaccaacaagaagcccatcaccgtgctggagatcctgcagaagatccgcatgcacgtgtctgtgccccagtgtgatgtgtttggctacttcagcattgaaagtgaaattgtcatcctgatcatccctgtggaccactaccccaaggccctgcagatcgaggcctgcaacaaggaggccgagaagattgagagcctcatcaacagcgacagccccaccctggccagccacgtgcccctgagcgccctgatcatcagccaggtgcaggtgagcagctctgtgcccagcgctggggtgcgggcccggcccagctgccacagcctgctgctgcccctgagcctgggcctggccctgcacctgctgtggacctacaactag

SEQ ID NO: 21659 - DNA, 735 bp, synthetic construct
  misc_feature 1..735: note = Description of Artificial Sequence: Synthetic coding sequence
  source 1..735: mol_type = other DNA
atgaaggagcggcgggccagccagaagctgagcagcaagagcatcatggaccccaaccagaatgtgaagtgcaagatcgtggtggtgggggacagccagtgtgggaagacagccctgctgcacgtgtttgccaaggactgcttccctgagaactacgtgcccaccgtgtttgagaactacacagccagctttgaaattgacacccagagaattgagctgagcctgtgggacaccagcggcagcccctactatgacaacgtgcggcccctgagctacccagacagtgatgctgtgctgatctgctttgacatcagcaggcctgagaccctggacagcgtgctgaagaagtggaagggggagatccaggagttctgccccaacaccaagatgctgctggtgggctgcaagagtgacctgaggacagatgtgtccaccctggtggagctgagcaaccaccggcagacccctgtgtcctatgaccagggcgccaacatggccaagcagattggagctgccacctacatcgagtgcagcgccctgcagagtgaaaattctgtgcgggacatcttccacgtggccaccctggcctgtgtgaacaagaccaacaagaatgtgaagaggaacaagagccagagggccaccaagaggatcagccacatgcccagcaggcctgagctgtctgctgtggccacagacctgaggaaggacaaggccaagagctgcaccgtgatgtag

SEQ ID NO: 21660 - DNA, 735 bp, synthetic construct; identical to SEQ ID NO: 21659
  misc_feature 1..735: note = Description of Artificial Sequence: Synthetic coding sequence
  source 1..735: mol_type = other DNA

SEQ ID NO: 21661 - DNA, 348 bp, synthetic construct
  misc_feature 1..348: note = Description of Artificial Sequence: Synthetic coding sequence
  source 1..348: mol_type = other DNA
atgctgctggtgggctgcaagagtgacctgaggacagatgtgtccaccctggtggagctgagcaaccaccggcagacccctgtgtcctatgaccagggcgccaacatggccaagcagatcggggccgccacctacattgaatgttctgccctgcagagcgagaacagcgtgcgggacatcttccacgtggccaccctggcctgtgtgaacaagaccaacaagaatgtgaagaggaacaagagccagagggccaccaagaggatcagccacatgcccagcaggcctgagctgtctgctgtggccacagacctgaggaaggacaaggccaagagctgcaccgtgatgtag

SEQ ID NO: 21662 - DNA, 351 bp, synthetic construct
  misc_feature 1..351: note = Description of Artificial Sequence: Synthetic coding sequence
  source 1..351: mol_type = other DNA
atgaaggagcggcgggccagccagaagctgagcagcaagagcatcatggaccccaaccagaatgtgaagtgcaagatcgtggtggtgggggacagccagtgtgggaagacagccctgctgcacgtgtttgccaaggactgcttccctgagaactacgtgcccaccgtgtttgagaactacacagccagctttgaaattgacacccagagaattgagctgagcctgtgggacaccagcggcagcccctactatgacaacgtgcggcccctgagctacccagacagtgatgctgtgctgatctgctttgacatcagcaggcctgagaccctggacagcgtgctgaagaagtag

SEQ ID NO: 21663 - DNA, 351 bp, synthetic construct; identical to SEQ ID NO: 21662
  misc_feature 1..351: note = Description of Artificial Sequence: Synthetic coding sequence
  source 1..351: mol_type = other DNA

SEQ ID NO: 21664 - DNA, 615 bp, synthetic construct
  misc_feature 1..615: note = Description of Artificial Sequence: Synthetic coding sequence
  source 1..615: mol_type = other DNA
atggccgagcaggagcccacagctgagcagctggcccagattgctgctgaaaatgaggaggatgagcacagcgtgaactacaagcccccagcccagaagagcatccaggagatccaggagctggacaaggatgatgagagcctgaggaagtacaaggaggccctgctgggccgggtggccgtgtctgctgaccccaacgtgcccaacgtggtggtgacaggcctgaccctggtgtgcagcagcgcccctggccccctggagctggacctgactggagacctggagagcttcaagaagcagagctttgtgctgaaggagggcgtggagtaccgcatcaagatctccttccgggtgaaccgggagatcgtgtctggcatgaagtacatccagcacacctacagaaaaggagtgaagattgacaagacagactacatggtgggcagctatggccccagggctgaggagtatgagttcctgacccctgtggaggaggcccccaagggcatgctggcccggggcagctacagcatcaagagccgcttcacagatgatgacaagacagaccacctgtcctgggagtggaacctgaccatcaagaaggactggaaggactag

SEQ ID NO: 21665 - DNA, 537 bp, synthetic construct
  misc_feature 1..537: note = Description of Artificial Sequence: Synthetic coding sequence
  source 1..537: mol_type = other DNA
atggccgagcaggagcccacagctgagcagctggcccagattgctgctgaaaatgaggaggatgagcacagcgtgaactacaagcccccagcccagaagagcatccaggagatccaggagctggacaaggatgatgagagcctgaggaagtacaaggaggccctgctgggccgggtggccgtgtctgctgaccccaacgtgcccaacgtggtggtgacaggcctgaccctggtgtgcagcagcgcccctggccccctggagctggacctgactggagacctggagagcttcaagaagcagagctttgtgctgaaggagggcgtggagtaccgcatcaagatctccttccgggtgaaccgggagatcgtgtctggcatgaagtacatccagcacacctacagaaaaggagtgaagattgacaagacagactacatggtgggcagctacagcatcaagagccgcttcacagatgatgacaagacagaccacctgtcctgggagtggaacctgaccatcaagaaggactggaaggactag

SEQ ID NO: 21666 - DNA, 615 bp, synthetic construct; identical to SEQ ID NO: 21664
  misc_feature 1..615: note = Description of Artificial Sequence: Synthetic coding sequence
  source 1..615: mol_type = other DNA

SEQ ID NO: 21667 - DNA, 3576 bp, synthetic construct
  misc_feature 1..3576: note = Description of Artificial Sequence: Synthetic coding sequence
  source 1..3576: mol_type = other DNA
atggaggccatgagcccccagcaggagaccctgggcggccagcccggccgcagcagcagcctgactggagtgtcccggctggccggcggcagctgcaccaagaagaagatgaagaccctggccgagcggcggcgcagcgcccccagcctcatcctggacaaggccctgcagaagaggcccaccacccgggacagccccagcgcctctgtggacacctgcaccttcctgagcagcctggtgtgcagcaacagaaccctgctgattgatggccgggcagagctgaagaggggcctgcagaggcaggagcggcacctgttcctgttcaatgacctgtttgtggtggccaagatcaagtacaacaacaacttcaagatcaagaacaagatcaagctgacagacatgtggacagccagctgtgtggatgaggtgggggagggcaacaccaatgccatgaagagctttgtgctgggctggcccaccgtgaactttgtggccaccttcagcagccctgagcagaaggacaagtggctgagcctgctgcagcgctacatcaacctggagaaggagaaggactaccccaagagcatccccctgaagatctttgccaaggacatcggcaactgtgcctacagcaagaccatcaccgtgatgaacagcgacacagccaatgaagtcatcaacatgagcctgcccatgctgggcatcaccggcagcgagcgggactaccagctgtgggtgaacagcggcaaggaggaggccccctaccccctcatcggccacgagtacccctacggcatcaagatgagccacctgcgggacagcgccctgctgaccccaggcagcaaggacagcaccacccccttcaacctgcaggagcccttcctgatggagcagctgccccgggagatgcagtgccagttcatcctgaagcccagccggctggccgccgcccagcagctgagtgacagcggccacaagaccttcaagagaagaagaagcatcatcaactgggccttctggaggggcagcagcacccacctggacaacctgcccagcagccccaccagccccatgcctggccagctgtttggcatcagcctgcccaacatctgtgaaaatgacaacctgcccaagcctgtgctggacatgctgttcttcctgaaccagaagggccccctgaccaagggcatcttccggcagagcgccaacgtgaagagctgccgggagctgaaggagaagctgaacagcggcgtggaggtgcacctggactgtgagagcatcttcgtcatcgcctctgtgctgaaggacttcctgaggaacatccctggcagcatcttcagcagtgacctgtatgaccactgggtgtctgtgatggaccagggcaatgatgaggagaagatcaacacagtgcagaggctgctggaccagctgccccgggccaacgtggtgctgctgcgctacctgtttggagtgctgcacaacatcgagcagcacagcagcagcaaccagatgacagccttcaacctggccgtgtgtgtggcccccagcatcctgtggcccccagccagcagcagccctgagctggagaatgagttcaccaagaaggtgtccctgctgatccagttcctgattgagaactgcctgcgcatctttggagaggagatcaccagcctcttccgggaggtgtctgtgcgctgtgacacccgggagaatgccagtgacatcagctgcttccagctgaatgacagcagctatgacagcctggagaatgagctgaatgaagatgtggatgccccctgcagcgacctggtgaagaagctgggccagggcagccgctccatggacagcgtgctgaccctgagtgactatgacctggaccagcctgaggtggagggcctgctgaccctgagtgactttgacctggcccacagcaaggatgaagatgtgcagatgaagaggcccctggagagcaagcctgtgaacatcctggtgtacaccaagatccccctgcgggaccacgcccgggcccccagcgccatgtgcacccccagctacctgagcacagctgctgccaatgctgccaagagcctgcggcggcaccggcgctgcagcgagcccagcattgactacctggacagcaagctgagctacctgcgggagttctaccagaagaagctgaggaagagcagctgtgatgccatcctgagccagaaggatgaggactacctgaagcagaaccagcccctgcaggaggagggcaagacctgcttcaagcagagcctggtgactggaacagatgtgtccaagaagaatgccaccacccagaacaccaagaagaagagcctgagcggcagcgagggcaaccacgtgaagctgttccccaagagcaagcctgtggccatctctgtggccagctacagccccatgagcagccaggaccacagcaagaaccagccctttgatgtgaacaccagcggctacagccccccccacacagcagatgccctgaagggccccaggacccaccggcgctgcagcgagcccaacatcgaggaccagaacaggaagctgacctacctgcggggcatctacagcaagaagcagcacaagaccagctgtgaggccggcctgctgcatggagaggaggactacctgaagaggcacaagagcctgcagatggagggccagaagctgatcaaccagagcctggtgatgggcatcgaggtgggcaagagcagcgccaccaaccagaacacagagaaggtgctgcccccccggctgaacctgtgccccaggaccagctacagcagcctgagcagccctggcaccagccccagcggcagctctgtgagcagccaggacagcgccttcagccagatcagcgagcacagcgtcttcacccccacagagaccagcagccccatcgactgcaccttccaggcccagaggaagcgggaggacctgagcccagacttcagcaatgccagccacgtgtctggcatgcctggccccagcagcggccaggcctgcagcaggcctgcctacaccaagaaggacaccatggagtggcacagccagatgcacagcgtgaccctgcaccccagcacctggctgagaaatggagtggccagcctgaagaactggagcctgaagaagaaggccaaggccgcccggcctgaggaggagaagatcgccagccccaagggccccctggagcccccaccccacgccagcggcgtgcctgaggccaacagcctgcaggaggagcagaaggacctgcccctgcgggctgctgagggcctgagccctgtgcagagcgcccagcgctgcagcagcagccccttccaggacagcgagcggcactgcagcagccccttcagcctggtggagagccggctgaagctgtgcatgaagagccatgaggagattgagcccggcagccagagcagcagcggcagcctgccctgggagcgggccagcgccagctcctggaccctggaggatgccaccagcccagacagcggccccaccgtggtgtgtgacattgaagatcgctacctgaccaaggacatctag

SEQ ID NO: 21668 - DNA, 3498 bp, synthetic construct
  misc_feature 1..3498: note = Description of Artificial Sequence: Synthetic coding sequence
  source 1..3498: mol_type = other DNA
atgaccttctggatcatcatcaacaagaagatgaagaccctggccgagcggcggcgcagcgcccccagcctcatcctggacaaggccctgcagaagaggcccaccacccgggacagccccagcgcctctgtggacacctgcaccttcctgagcagcctggtgtgcagcaacagaaccctgctgattgatggccgggcagagctgaagaggggcctgcagaggcaggagcggcacctgttcctgttcaatgacctgtttgtggtggccaagatcaagtacaacaacaacttcaagatcaagaacaagatcaagctgacagacatgtggacagccagctgtgtggatgaggtgggggagggcaacaccaatgccatgaagagctttgtgctgggctggcccaccgtgaactttgtggccaccttcagcagccctgagcagaaggacaagtggctgagcctgctgcagcgctacatcaacctggagaaggagaaggactaccccaagagcatccccctgaagatctttgccaaggacatcggcaactgtgcctacagcaagaccatcaccgtgatgaacagcgacacagccaatgaagtcatcaacatgagcctgcccatgctgggcatcaccggcagcgagcgggactaccagctgtgggtgaacagcggcaaggaggaggccccctaccccctcatcggccacgagtacccctacggcatcaagatgagccacctgcgggacagcgccctgctgaccccaggcagcaaggacagcaccacccccttcaacctgcaggagcccttcctgatggagcagctgccccgggagatgcagtgccagttcatcctgaagcccagccggctggccgccgcccagcagctgagtgacagcggccacaagaccttcaagagaagaagaagcatcatcaactgggccttctggaggggcagcagcacccacctggacaacctgcccagcagccccaccagccccatgcctggccagctgtttggcatcagcctgcccaacatctgtgaaaatgacaacctgcccaagcctgtgctggacatgctgttcttcctgaaccagaagggccccctgaccaagggcatcttccggcagagcgccaacgtgaagagctgccgggagctgaaggagaagctgaacagcggcgtggaggtgcacctggactgtgagagcatcttcgtcatcgcctctgtgctgaaggacttcctgaggaacatccctggcagcatcttcagcagtgacctgtatgaccactgggtgtctgtgatggaccagggcaatgatgaggagaagatcaacacagtgcagaggctgctggaccagctgccccgggccaacgtggtgctgctgcgctacctgtttggagtgctgcacaacatcgagcagcacagcagcagcaaccagatgacagccttcaacctggccgtgtgtgtggcccccagcatcctgtggcccccagccagcagcagccctgagctggagaatgagttcaccaagaaggtgtccctgctgatccagttcctgattgagaactgcctgcgcatctttggagaggagatcaccagcctcttccgggaggtgtctgtgcgctgtgacacccgggagaatgccagtgacatcagctgcttccagctgaatgacagcagctatgacagcctggagaatgagctgaatgaagatgtggatgccccctgcagcgacctggtgaagaagctgggccagggcagccgctccatggacagcgtgctgaccctgagtgactatgacctggaccagcctgaggtggagggcctgctgaccctgagtgactttgacctggcccacagcaaggatgaagatgtgcagatgaagaggcccctggagagcaagcctgtgaacatcctggtgtacaccaagatccccctgcgggaccacgcccgggcccccagcgccatgtgcacccccagctacctgagcacagctgctgccaatgctgccaagagcctgcggcggcaccggcgctgcagcgagcccagcattgactacctggacagcaagctgagctacctgcgggagttctaccagaagaagctgaggaagagcagctgtgatgccatcctgagccagaaggatgaggactacctgaagcagaaccagcccctgcaggaggagggcaagacctgcttcaagcagagcctggtgactggaacagatgtgtccaagaagaatgccaccacccagaacaccaagaagaagagcctgagcggcagcgagggcaaccacgtgaagctgttccccaagagcaagcctgtggccatctctgtggccagctacagccccatgagcagccaggaccacagcaagaaccagccctttgatgtgaacaccagcggctacagccccccccacacagcagatgccctgaagggccccaggacccaccggcgctgcagcgagcccaacatcgaggaccagaacaggaagctgacctacctgcggggcatctacagcaagaagcagcacaagaccagctgtgaggccggcctgctgcatggagaggaggactacctgaagaggcacaagagcctgcagatggagggccagaagctgatcaaccagagcctggtgatgggcatcgaggtgggcaagagcagcgccaccaaccagaacacagagaaggtgctgcccccccggctgaacctgtgccccaggaccagctacagcagcctgagcagccctggcaccagccccagcggcagctctgtgagcagccaggacagcgccttcagccagatcagcgagcacagcgtcttcacccccacagagaccagcagccccatcgactgcaccttccaggcccagaggaagcgggaggacctgagcccagacttcagcaatgccagccacgtgtctggcatgcctggccccagcagcggccaggcctgcagcaggcctgcctacaccaagaaggacaccatggagtggcacagccagatgcacagcgtgaccctgcaccccagcacctggctgagaaatggagtggccagcctgaagaactggagcctgaagaagaaggccaaggccgcccggcctgaggaggagaagatcgccagccccaagggccccctggagcccccaccccacgccagcggcgtgcctgaggccaacagcctgcaggaggagcagaaggacctgcccctgcgggctgctgagggcctgagccctgtgcagagcgcccagcgctgcagcagcagccccttccaggacagcgagcggcactgcagcagccccttcagcctggtggagagccggctgaagctgtgcatgaagagccatgaggagattgagcccggcagccagagcagcagcggcagcctgccctgggagcgggccagcgccagctcctggaccctggaggatgccaccagcccagacagcggccccaccgtggtgtgtgacattgaagatcgctacctgaccaaggacatctag

SEQ ID NO: 21669 - DNA, 3507 bp, synthetic construct
  misc_feature 1..3507: note = Description of Artificial Sequence: Synthetic coding sequence
  source 1..3507: mol_type = other DNA
atgtctgcccgggagcggcagcctgccctgaagaagaagatgaagaccctggccgagaggagaagaagtgcccccagcctcatcctggacaaggccctgcagaagaggcccaccacccgggacagccccagcgcctctgtggacacctgcaccttcctgagcagcctggtgtgcagcaacagaaccctgctgattgatggccgggcagagctgaagaggggcctgcagaggcaggagcggcacctgttcctgttcaatgacctgtttgtggtggccaagatcaagtacaacaacaacttcaagatcaagaacaagatcaagctgacagacatgtggacagccagctgtgtggatgaggtgggggagggcaacaccaatgccatgaagagctttgtgctgggctggcccaccgtgaactttgtggccaccttcagcagccctgagcagaaggacaagtggctgagcctgctgcagcgctacatcaacctggagaaggagaaggactaccccaagagcatccccctgaagatctttgccaaggacatcggcaactgtgcctacagcaagaccatcaccgtgatgaacagcgacacagccaatgaggtgatcaacatgagcctgcccatgctgggcatcactggaagtgagcgggactaccagctgtgggtgaacagcggcaaggaggaggccccctaccccctgattggacatgagtacccctacggcatcaagatgagccacctgcgggacagcgccctgctgaccccaggcagcaaggacagcaccacccccttcaacctgcaggagcccttcctgatggagcagctgccccgggagatgcagtgccagttcatcctgaagcccagccggctggccgccgcccagcagctgagtgacagcggccacaagaccttcaagagaagaagaagcatcatcaactgggccttctggaggggcagcagcacccacctggacaacctgcccagcagccccaccagccccatgcctggccagctgtttggcatcagcctgcccaacatctgtgaaaatgacaacctgcccaagcctgtgctggacatgctgttcttcctgaaccagaagggccccctgaccaagggcatcttccggcagagcgccaacgtgaagagctgccgggagctgaaggagaagctgaacagcggcgtggaggtgcacctggactgtgagagcatctttgtgattgcctctgtgctgaaggacttcctgaggaacatccctggcagcatcttcagcagtgacctgtatgaccactgggtgtctgtgatggaccagggcaatgatgaggagaagatcaacacagtgcagaggctgctggaccagctgccccgggccaacgtggtgctgctgcgctacctgtttggagtgctgcacaacatcgagcagcacagcagcagcaaccagatgacagccttcaacctggccgtgtgtgtggcccccagcatcctgtggcccccagccagcagcagccctgagctggagaatgagttcaccaagaaggtgtccctgctgatccagttcctgattgagaactgcctgcgcatctttggagaggagatcaccagcctcttccgggaggtgtctgtgcgctgtgacaccagagaaaatgccagtgacatcagctgcttccagctgaatgacagcagctatgacagcctggagaatgagctgaatgaagatgtggatgccccctgcagcgacctggtgaagaagctgggccagggcagccgctccatggattctgtgctgaccctgagtgactatgacctggaccagcctgaggtggagggcctgctgaccctgagtgactttgacctggcccacagcaaggatgaagatgtgcagatgaagaggcccctggagagcaagcctgtgaacatcctggtgtacaccaagatccccctgcgggaccacgcccgggcccccagcgccatgtgcacccccagctacctgagcacagctgctgccaatgctgccaagagcctgcggcggcaccggcgctgcagcgagcccagcattgactacctggacagcaagctgagctacctgcgggagttctaccagaagaagctgaggaagagcagctgtgatgccatcctgagccagaaggatgaggactacctgaagcagaaccagcccctgcaggaggagggcaagacctgcttcaagcagagcctggtgactggaacagatgtgtccaagaagaatgccaccacccagaacaccaagaagaagagcctgagcggcagcgagggcaaccacgtgaagctgttccccaagagcaagcctgtggccatctctgtggccagctacagccccatgagcagccaggaccacagcaagaaccagccctttgatgtgaacaccagcggctacagccccccccacacagcagatgccctgaagggccccaggacccaccggcgctgcagcgagcccaacatcgaggaccagaacaggaagctgacctacctgcggggcatctacagcaagaagcagcacaagaccagctgtgaggccggcctgctgcacggggaggaggactacctgaagaggcacaagagcctgcagatggagggccagaagctgatcaaccagagcctggtgatgggcatcgaggtgggcaagagcagcgccaccaaccagaacacagagaaggtgctgcccccccggctgaacctgtgccccaggaccagctacagcagcctgagcagccctggcaccagccccagcggcagctctgtgagcagccaggacagcgccttcagccagatcagcgagcacagcgtcttcacccccacagagaccagcagccccatcgactgcaccttccaggcccagaggaagcgggaggacctgagcccagacttcagcaatgccagccacgtgtctggcatgcctggccccagcagcggccaggcctgcagcaggcctgcctacaccaagaaggacaccatggagtggcacagccagatgcacagcgtgaccctgcaccccagcacctggctgagaaatggagtggccagcctgaagaactggagcctgaagaagaaggccaaggccgcccggcctgaggaggagaagatcgccagccccaagggccccctggagcccccacctcatgccagcggcgtgcctgaggccaacagcctgcaggaggagcagaaggacctgcccctgcgggctgctgagggcctgagccctgtgcagagcgcccagcgctgcagcagcagccccttccaggacagcgagcggcactgcagcagccccttcagcctggtggagagccggctgaagctgtgcatgaagagccatgaggagattgagcccggcagccagagcagcagcggcagcctgccctgggagcgggccagcgccagctcctggaccctggaggatgccaccagcccagattctggccccaccgtggtgtgtgacatcgaggaccgctacctgaccaaggacatctag

SEQ ID NO: 21670 - DNA, 3468 bp, synthetic construct
  misc_feature 1..3468: note = Description of Artificial Sequence: Synthetic coding sequence
  source 1..3468: mol_type = other DNA
atgaagaccctggccgagcggcggcgcagcgcccccagcctcatcctggacaaggccctgcagaagaggcccaccacccgggacagccccagcgcctctgtggacacctgcaccttcctgagcagcctggtgtgcagcaacagaaccctgctgattgatggccgggcagagctgaagaggggcctgcagaggcaggagcggcacctgttcctgttcaatgacctgtttgtggtggccaagatcaagtacaacaacaacttcaagatcaagaacaagatcaagctgacagacatgtggacagccagctgtgtggatgaggtgggggagggcaacaccaatgccatgaagagctttgtgctgggctggcccaccgtgaactttgtggccaccttcagcagccctgagcagaaggacaagtggctgagcctgctgcagcgctacatcaacctggagaaggagaaggactaccccaagagcatccccctgaagatctttgccaaggacatcggcaactgtgcctacagcaagaccatcaccgtgatgaacagcgacacagccaatgaagtcatcaacatgagcctgcccatgctgggcatcaccggcagcgagcgggactaccagctgtgggtgaacagcggcaaggaggaggccccctaccccctcatcggccacgagtacccctacggcatcaagatgagccacctgcgggacagcgccctgctgaccccaggcagcaaggacagcaccacccccttcaacctgcaggagcccttcctgatggagcagctgccccgggagatgcagtgccagttcatcctgaagcccagccggctggccgccgcccagcagctgagtgacagcggccacaagaccttcaagagaagaagaagcatcatcaactgggccttctggaggggcagcagcacccacctggacaacctgcccagcagccccaccagccccatgcctggccagctgtttggcatcagcctgcccaacatctgtgaaaatgacaacctgcccaagcctgtgctggacatgctgttcttcctgaaccagaagggccccctgaccaagggcatcttccggcagagcgccaacgtgaagagctgccgggagctgaaggagaagctgaacagcggcgtggaggtgcacctggactgtgagagcatcttcgtcatcgcctctgtgctgaaggacttcctgaggaacatccctggcagcatcttcagcagtgacctgtatgaccactgggtgtctgtgatggaccagggcaatgatgaggagaagatcaacacagtgcagaggctgctggaccagctgccccgggccaacgtggtgctgctgcgctacctgtttggagtgctgcacaacatcgagcagcacagcagcagcaaccagatgacagccttcaacctggccgtgtgtgtggcccccagcatcctgtggcccccagccagcagcagccctgagctggagaatgagttcaccaagaaggtgtccctgctgatccagttcctgattgagaactgcctgcgcatctttggagaggagatcaccagcctcttccgggaggtgtctgtgcgctgtgacacccgggagaatgccagtgacatcagctgcttccagctgaatgacagcagctatgacagcctggagaatgagctgaatgaagatgtggatgccccctgcagcgacctggtgaagaagctgggccagggcagccgctccatggacagcgtgctgaccctgagtgactatgacctggaccagcctgaggtggagggcctgctgaccctgagtgactttgacctggcccacagcaaggatgaagatgtgcagatgaagaggcccctggagagcaagcctgtgaacatcctggtgtacaccaagatccccctgcgggaccacgcccgggcccccagcgccatgtgcacccccagctacctgagcacagctgctgccaatgctgccaagagcctgcggcggcaccggcgctgcagcgagcccagcattgactacctggacagcaagctgagctacctgcgggagttctaccagaagaagctgaggaagagcagctgtgatgccatcctgagccagaaggatgaggactacctgaagcagaaccagcccctgcaggaggagggcaagacctgcttcaagcagagcctggtgactggaacagatgtgtccaagaagaatgccaccacccagaacaccaagaagaagagcctgagcggcagcgagggcaaccacgtgaagctgttccccaagagcaagcctgtggccatctctgtggccagctacagccccatgagcagccaggaccacagcaagaaccagccctttgatgtgaacaccagcggctacagccccccccacacagcagatgccctgaagggccccaggacccaccggcgctgcagcgagcccaacatcgaggaccagaacaggaagctgacctacctgcggggcatctacagcaagaagcagcacaagaccagctgtgaggccggcctgctgcatggagaggaggactacctgaagaggcacaagagcctgcagatggagggccagaagctgatcaaccagagcctggtgatgggcatcgaggtgggcaagagcagcgccaccaaccagaacacagagaaggtgctgcccccccggctgaacctgtgccccaggaccagctacagcagcctgagcagccctggcaccagccccagcggcagctctgtgagcagccaggacagcgccttcagccagatcagcgagcacagcgtcttcacccccacagagaccagcagccccatcgactgcaccttccaggcccagaggaagcgggaggacctgagcccagacttcagcaatgccagccacgtgtctggcatgcctggccccagcagcggccaggcctgcagcaggcctgcctacaccaagaaggacaccatggagtggcacagccagatgcacagcgtgaccctgcaccccagcacctggctgagaaatggagtggccagcctgaagaactggagcctgaagaagaaggccaaggccgcccggcctgaggaggagaagatcgccagccccaagggccccctggagcccccaccccacgccagcggcgtgcctgaggccaacagcctgcaggaggagcagaaggacctgcccctgcgggctgctgagggcctgagccctgtgcagagcgcccagcgctgcagcagcagccccttccaggacagcgagcggcactgcagcagccccttcagcctggtggagagccggctgaagctgtgcatgaagagccatgaggagattgagcccggcagccagagcagcagcggcagcctgccctgggagcgggccagcgccagctcctggaccctggaggatgccaccagcccagacagcggccccaccgtggtgtgtgacattgaagatcgctacctgaccaaggacatctag

SEQ ID NO: 21671 - DNA, 3468 bp, synthetic construct; identical to SEQ ID NO: 21670
  misc_feature 1..3468: note = Description of Artificial Sequence: Synthetic coding sequence
  source 1..3468: mol_type = other DNA

SEQ ID NO: 21672 - DNA, 2196 bp, synthetic construct
  misc_feature 1..2196: note = Description of Artificial Sequence: Synthetic coding sequence
  source 1..2196: mol_type = other DNA
atggaccagggcaatgatgaggagaagatcaacacagtgcagaggctgctggaccagctgccccgggccaacgtggtgctgctgcgctacctgtttggagtgctgcacaacatcgagcagcacagcagcagcaaccagatgacagccttcaacctggccgtgtgtgtggcccccagcatcctgtggcccccagccagcagcagccctgagctggagaatgagttcaccaagaaggtgtccctgctgatccagttcctgattgagaactgcctgcgcatctttggagaggagatcaccagcctcttccgggaggtgtctgtgcgctgtgacaccagagaaaatgccagtgacatcagctgcttccagctgaatgacagcagctatgacagcctggagaatgagctgaatgaagatgtggatgccccctgcagcgacctggtgaagaagctgggccagggcagccgctccatggattctgtgctgaccctgagtgactatgacctggaccagcctgaggtggagggcctgctgaccctgagtgactttgacctggcccacagcaaggatgaagatgtgcagatgaagaggcccctggagagcaagcctgtgaacatcctggtgtacaccaagatccccctgcgggaccacgcccgggcccccagcgccatgtgcacccccagctacctgagcacagctgctgccaatgctgccaagagcctgcggcggcaccggcgctgcagcgagcccagcattgactacctggacagcaagctgagctacctgcgggagttctaccagaagaagctgaggaagagcagctgtgatgccatcctgagccagaaggatgaggactacctgaagcagaaccagcccctgcaggaggagggcaagacctgcttcaagcagagcctggtgactggaacagatgtgtccaagaagaatgccaccacccagaacaccaagaagaagagcctgagcggcagcgagggcaaccacgtgaagctgttccccaagagcaagcctgtggccatctctgtggccagctacagccccatgagcagccaggaccacagcaagaaccagccctttgatgtgaacaccagcggctacagccccccccacacagcagatgccctgaagggccccaggacccaccggcgctgcagcgagcccaacatcgaggaccagaacaggaagctgacctacctgcggggcatctacagcaagaagcagcacaagaccagctgtgaggccggcctgctgcacggggaggaggactacctgaagaggcacaagagcctgcagatggagggccagaagctgatcaaccagagcctggtgatgggcatcgaggtgggcaagagcagcgccaccaaccagaacacagagaaggtgctgcccccccggctgaacctgtgccccaggaccagctacagcagcctgagcagccctggcaccagccccagcggcagctctgtgagcagccaggacagcgccttcagccagatcagcgagcacagcgtcttcacccccacagagaccagcagccccatcgactgcaccttccaggcccagaggaagcgggaggacctgagcccagacttcagcaatgccagccacgtgtctggcatgcctggccccagcagcggccaggcctgcagcaggcctgcctacaccaagaaggacaccatggagtggcacagccagatgcacagcgtgaccctgcaccccagcacctggctgagaaatggagtggccagcctgaagaactggagcctgaagaagaaggccaaggccgcccggcctgaggaggagaagatcgccagccccaagggccccctggagcccccacctcatgccagcggcgtgcctgaggccaacagcctgcaggaggagcagaaggacctgcccctgcgggctgctgagggcctgagccctgtgcagagcgcccagcgctgcagcagcagccccttccaggacagcgagcggcactgcagcagccccttcagcctggtggagagccggctgaagctgtgcatgaagagccatgaggagattgagcccggcagccagagcagcagcggcagcctgccctgggagcgggccagcgccagctcctggaccctggaggatgccaccagcccagattctggccccaccgtggtgtgtgacatcgaggacaggaactgctgctag

SEQ ID NO: 21673 - DNA, 3498 bp, synthetic construct; identical to SEQ ID NO: 21668
  misc_feature 1..3498: note = Description of Artificial Sequence: Synthetic coding sequence
  source 1..3498: mol_type = other DNA

SEQ ID NO: 21674 - DNA, 4542 bp, synthetic construct
  misc_feature 1..4542: note = Description of Artificial Sequence: Synthetic coding sequence
  source 1..4542: mol_type = other DNA
atgatgatggccaggaagcaggatgtgcgcatccccacctacaacatctctgtggtgggcctgagcggcacagagaaggagaagggccagtgtggcatcggcaagagctgcctgtgcaacagatttgtgcggcccagcgcagatgagttccacctggaccacacctctgtgctgagcaccagtgactttggaggccgggtggtgaacaatgaccacttcctgtactggggcgaggtgagccgcagcctggaggactgtgtggagtgcaagatgcacatcgtggagcagacagagttcattgatgaccagaccttccagccccacaggagcacagccctgcagccctacatcaagagagctgctgccaccaagctggccagcgctgagaagctgatgtacttctgcacagaccagctgggcctggagcaggactttgagcagaagcagatgccagatggcaagctgctggtggatggcttcctgctgggcattgatgtgtcccggggcatgaacagaaactttgatgaccagctgaagtttgtgagcaacctgtacaaccagctggccaagaccaagaagcccatcgtggtggtgctgaccaagtgtgatgaaggagtggagcgctacatcagagatgcccacacctttgccctgagcaagaagaacctgcaggtggtggagaccagcgcccggagcaatgtgaatgtggacctggccttcagcaccctggtgcagctgattgacaagagccggggcaagaccaagatcatcccctactttgaggccctgaagcagcagagccagcagatcgccacagccaaggacaagtatgagtggctggtgagccgcatcgtgaagaaccacaatgaaaactggctgtctgtgtccaggaagatgcaggccagccctgagtaccaggactatgtgtacctggagggcacccagaaggccaagaagctgttcctgcagcacatccaccggctgaagcatgagcacattgaaagaagaaggaagctgtacctggccgccctgcccctggcctttgaggccctgatccccaacctggatgaaattgaccacctgagctgcatcaaggccaagaagctgctggagaccaagccagagttcctgaagtggtttgtggtgctggaggagaccccctgggatgccaccagccacatcgacaacatggagaatgaaagaatcccctttgacctgatggacacagtgcctgctgagcagctgtatgaggcccacctggagaagctgagaaatgaaaggaagagggtggagatgagaagagccttcaaggagaacctggagaccagccccttcatcacccctgggaagccctgggaggaggcccgctccttcatcatgaatgaagacttctaccagtggctggaggagagcgtgtacatggacatctacggcaagcaccagaagcagatcatcgacaaggccaaggaggagttccaggagctgctgctggagtacagcgagctgttctatgagctggagctggatgccaagcccagcaaggagaagatgggcgtcatccaggatgtgctgggggaggagcagcgcttcaaggccctgcagaagctgcaggccgagagagatgccctgatcctgaagcacatccactttgtgtaccaccccaccaaggagacctgccccagctgcccagcctgtgtggatgccaagattgagcacctgatcagcagccgcttcatccggcccagcgacaggaaccagaagaacagcctgagtgaccccaacatcgaccgcatcaacctggtgatcctgggcaaggatggcctggcccgggagctggccaatgagatccgggccctgtgcaccaatgatgacaagtatgtgattgatggcaagatgtatgagctgagcctgcggcccatcgagggcaatgtgcggctgcctgtgaacagcttccagacccccaccttccagccccacggctgcctgtgcctgtacaacagcaaggagagcctgtcctatgtggtggagagcattgagaagagccgggagagcaccctgggccggcgggacaaccacctggtgcacctgcccctgaccctcatcctggtgaacaagagaggagacaccagcggggagaccctgcacagcctcatccagcagggccagcagatcgccagcaagctgcagtgtgtgttcctggaccctgccagcgctggcatcggctacggcaggaacatcaatgagaagcagatcagccaggtgctgaagggcctgctggacagcaagaggaacctgaacctggtgagcagcacagccagcatcaaggacctggctgatgtggacctgcgcatcgtgatgtgcctgatgtgtggggaccccttcagcgcagatgacatcctcttccctgtgctgcagagccagacctgcaagagcagccactgcggcagcaacaacagcgtgctgctggagctgcccatcggcctgcacaagaagagaattgagctgtctgtgctgagctaccacagcagcttcagcatcaggaagagccggctggtgcacggctacatcgtgttctacagcgccaagaggaaggccagcctggccatgctgcgggccttcctgtgtgaggtgcaggacatcatccccatccagctggtggccctgacagatggagctgtggatgtgctggacaatgacctgagccgggagcagctgacagaaggagaggagatcgcccaggagattgatggccgcttcaccagcatcccctgcagccagccccagcacaagctggagatcttccaccccttcttcaaggatgtggtggagaagaagaacatcatcgaggccacccacatgtatgacaatgctgctgaggcctgcagcaccacagaggaggtgttcaacagccccagggctggcagccccctgtgcaacagcaacctgcaggacagtgaagaagatattgagcccagctacagcctcttccgggaggacaccagcctgcccagcctgagcaaggaccacagcaagctgtccatggagctggagggcaatgatggcctgtccttcatcatgagcaactttgagagcaagctgaacaacaaggtgcccccacctgtgaagcccaagccccctgtgcactttgagatcaccaagggggacctgagctacctggaccagggccacagagatggccagaggaagtctgtgagcagcagcccctggctgccccaggacggctttgaccccagcgactatgcagagcccatggatgctgtggtgaagcccagaaatgaggaggagaacatctacagcgtgccccatgacagcacccagggcaagatcatcaccatccggaacatcaacaaggcccagagcaatggcagcggaaatggaagtgacagcgagatggacaccagcagcctggagcggggcaggaaggtgtccatcgtgtccaagcctgtgctgtaccgcacccgctgcacccggctgggccgctttgccagctaccgcaccagcttctctgtgggcagtgatgatgagctgggccccatcaggaagaaggaggaggaccaggccagccagggctacaagggggacaatgctgtgatcccctatgaaacagatgaggaccccaggagaagaaacatcctgcggagcctgcggaggaacaccaagaagcccaagcccaagccccggcccagcatcaccaaggccacctgggagagcaactactttggagtgcccctgaccaccgtggtgaccccagagaagcccatccccatcttcatcgagcgctgcatcgagtacatcgaggccaccggcctgagcacagagggcatctacagagtgtctggcaacaagtctgagatggagagcctgcagaggcagtttgaccaggaccacaacctggacctggccgagaaggacttcaccgtgaacacagtggccggggccatgaagagcttcttcagcgagctgcctgaccccctggtgccctacaacatgcagattgacctggtggaggcccacaagatcaatgaccgggagcagaagctgcacgccctgaaggaggtgctgaagaagttccccaaggaaaatcatgaggtgttcaagtatgtgatcagccacctgaacaaggtgagccacaacaacaaggtgaacctgatgaccagcgagaacctgagcatctgcttctggcccaccctgatgaggccagacttcagcaccatggatgccctgacagccaccaggacctaccagaccatcatcgagctgttcatccagcagtgccccttcttcttctacaaccggcccatcacagagcccccaggggcccggcccagcagccccagcgctgtggccagcacagtgcccttcctgaccagcacccctgtgaccagccagcccagccccccccagagccccccacccaccccccagagccccatgcagcccctgctgcccagccccctgcacccccaccggcccaccccccagcccagcaggaacatcccctggcagaccaaggagcactag

SEQ ID NO: 21675 - DNA, 4500 bp, synthetic construct
  misc_feature 1..4500: note = Description of Artificial Sequence: Synthetic coding sequence
  source 1..4500: mol_type = other DNA
atgatgatggccaggaagcaggatgtgcgcatccccacctacaacatctctgtggtgggcctgagcggcacagagaaggagaagggccagtgtggcatcggcaagagctgcctgtgcaacagatttgtgcggcccagcgcagatgagttccacctggaccacacctctgtgctgagcaccagtgactttggaggccgggtggtgaacaatgaccacttcctgtactggggcgaggtgagccgcagcctggaggactgtgtggagtgcaagatgcacatcgtggagcagacagagttcattgatgaccagaccttccagccccacaggagcacagccctgcagccctacatcaagagagctgctgccaccaagctggccagcgctgagaagctgatgtacttctgcacagaccagctgggcctggagcaggactttgagcagaagcagatgccagatggcaagctgctggtggatggcttcctgctgggcattgatgtgtcccggggcatgaacagaaactttgatgaccagctgaagtttgtgagcaacctgtacaaccagctggccaagaccaagaagcccatcgtggtggtgctgaccaagtgtgatgaaggagtggagcgctacatcagagatgcccacacctttgccctgagcaagaagaacctgcaggtggtggagaccagcgcccggagcaatgtgaatgtggacctggccttcagcaccctggtgcagctgattgacaagagccggggcaagaccaagatcatcccctactttgaggccctgaagcagcagagccagcagatcgccacagccaaggacaagtatgagtggctggtgagccgcatcgtgaagaaccacaatgaaaactggctgtctgtgtccaggaagatgcaggccagccctgagtaccaggactatgtgtacctggagggcacccagaaggccaagaagctgttcctgcagcacatccaccggctgaagcatgagcacattgaaagaagaaggaagctgtacctggccgccctgcccctggcctttgaggccctgatccccaacctggatgaaattgaccacctgagctgcatcaaggccaagaagctgctggagaccaagccagagttcctgaagtggtttgtggtgctggaggagaccccctgggatgccaccagccacatcgacaacatggagaatgaaagaatcccctttgacctgatggacacagtgcctgctgagcagctgtatgaggcccacctggagaagctgagaaatgaaaggaagagggtggagatgagaagagccttcaaggagaacctggagaccagccccttcatcacccctgggaagccctgggaggaggcccgctccttcatcatgaatgaagacttctaccagtggctggaggagagcgtgtacatggacatctacggcaagcaccagaagcagatcatcgacaaggccaaggaggagttccaggagctgctgctggagtacagcgagctgttctatgagctggagctggatgccaagcccagcaaggagaagatgggcgtcatccaggatgtgctgggggaggagcagcgcttcaaggccctgcagaagctgcaggccgagagagatgccctgatcctgaagcacatccactttgtgtaccaccccaccaaggagacctgccccagctgcccagcctgtgtggatgccaagattgagcacctgatcagcagccgcttcatccggcccagcgacaggaaccagaagaacagcctgagtgaccccaacatcgaccgcatcaacctggtgatcctgggcaaggatggcctggcccgggagctggccaatgagatccgggccctgtgcaccaatgatgacaagtatgtgattgatggcaagatgtatgagctgagcctgcggcccatcgagggcaatgtgcggctgcctgtgaacagcttccagacccccaccttccagccccacggctgcctgtgcctgtacaacagcaaggagagcctgtcctatgtggtggagagcattgagaagagccgggagagcaccctgggccggcgggacaaccacctggtgcacctgcccctgaccctcatcctggtgaacaagagaggagacaccagcggggagaccctgcacagcctcatccagcagggccagcagatcgccagcaagctgcagtgtgtgttcctggaccctgccagcgctggcatcggctacggcaggaacatcaatgagaagcagatcagccaggtgctgaagggcctgctggacagcaagaggaacctgaacctggtgagcagcacagccagcatcaaggacctggctgatgtggacctgcgcatcgtgatgtgcctgatgtgtggggaccccttcagcgcagatgacatcctcttccctgtgctgcagagccagacctgcaagagcagccactgcggcagcaacaacagcgtgctgctggagctgcccatcggcctgcacaagaagagaattgagctgtctgtgctgagctaccacagcagcttcagcatcaggaagagccggctggtgcacggctacatcgtgttctacagcgccaagaggaaggccagcctggccatgctgcgggccttcctgtgtgaggtgcaggacatcatccccatccagctggtggccctgacagatggagctgtggatgtgctggacaatgacctgagccgggagcagctgacagaaggagaggagatcgcccaggagattgatggccgcttcaccagcatcccctgcagccagccccagcacaagctggagatcttccaccccttcttcaaggatgtggtggagaagaagaacatcatcgaggccacccacatgtatgacaatgctgctgaggcctgcagcaccacagaggaggtgttcaacagccccagggctggcagccccctgtgcaacagcaacctgcaggacagtgaagaagatattgagcccagctacagcctcttccgggaggacaccagcctgcccagcctgagcaaggaccacagcaagctgtccatggagctggagggcaatgatggcctgtccttcatcatgagcaactttgagagcaagctgaacaacaaggtgcccccacctgtgaagcccaagccccctgtgcactttgagatcaccaagggggacctgagctacctggaccagggccacagagatggccagaggaagtctgtgagcagcagcccctggctgccccaggacggctttgaccccagcgactatgcagagcccatggatgctgtggtgaagcccagaaatgaggaggagaacatctacagcgtgccccatgacagcacccagggcaagatcatcaccatccggaacatcaacaaggcccagagcaatggcagcggaaatggaagtgacagcgagatggacaccagcagcctggagcggggcaggaaggtgtccatcgtgtccaagcctgtgctgtaccgcacccgctgcacccggctgggccgctttgccagctaccgcaccagcttctctgtgggcagtgatgatgagctgggccccatcaggaagaaggaggaggaccaggccagccagggctacaagggggacaatgctgtgatcccctatgaaacagatgaggaccccaggagaagaaacatcctgcggagcctgcggaggaacaccaagaagcccaagcccaagccccggcccagcatcaccaaggccacctgggagagcaactactttggagtgcccctgaccaccgtggtgaccccagagaagcccatccccatcttcatcgagcgctgcatcgagtacatcgaggccaccggcctgagcacagagggcatctacagagtgtctggcaacaagtctgagatggagagcctgcagaggcagtttgaccaggaccacaacctggacctggccgagaaggacttcaccgtgaacacagtggccggggccatgaagagcttcttcagcgagctgcctgaccccctggtgccctacaacatgcagattgacctggtggaggcccacaagatcaatgaccgggagcagaagctgcacgccctgaaggaggtgctgaagaagttccccaaggaaaatcatgaggtgttcaagtatgtgatcagccacctgaacaaggtgagccacaacaacaaggtgaacctgatgaccagcgagaacctgagcatctgcttctggcccaccctgatgaggccagacttcagcaccatggatgccctgacagccaccaggacctaccagaccatcatcgagctgttcatccagcagtgccccttcttcttctacaaccggcccatcacagagcccccaggggcccggcccagcagccccagcgctgtggccagcacagtgcccttcctgaccagcacccctgtgaccagccagcccagccccccccagagccccccacccaccccccagagccccatgcagcccctgctgcccagccagctgcaggccgagcacaccctgtag

SEQ ID NO: 21676 - DNA, 2250 bp, synthetic construct
  misc_feature 1..2250: note = Description of Artificial Sequence: Synthetic coding sequence
  source 1..2250: mol_type = other DNA
atgatgatggccaggaagcaggatgtgcgcatccccacctacaacatctctgtggtgggcctgagcggcacagagaaggagaagggccagtgtggcatcggcaagagctgcctgtgcaacagatttgtgcggcccagcgcagatgagttccacctggaccacacctctgtgctgagcaccagtgactttggaggccgggtggtgaacaatgaccacttcctgtactggggcgaggtgagccgcagcctggaggactgtgtggagtgcaagatgcacatcgtggagcagacagagttcattgatgaccagaccttccagccccacaggagcacagccctgcagccctacatcaagagagctgctgccaccaagctggccagcgctgagaagctgatgtacttctgcacagaccagctgggcctggagcaggactttgagcagaagcagatgccagatggcaagctgctggtggatggcttcctgctgggcattgatgtgtcccggggcatgaacagaaactttgatgaccagctgaagtttgtgagcaacctgtacaaccagctggccaagaccaagaagcccatcgtggtggtgctgaccaagtgtgatgaaggagtggagcgctacatcagagatgcccacacctttgccctgagcaagaagaacctgcaggtggtggagaccagcgcccggagcaatgtgaatgtggacctggccttcagcaccctggtgcagctgattgacaagagccggggcaagaccaagatcatcccctactttgaggccctgaagcagcagagccagcagatcgccacagccaaggacaagtatgagtggctggtgagccgcatcgtgaagaaccacaatgaaaactggctgtctgtgtccaggaagatgcaggccagccctgagtaccaggactatgtgtacctggagggcacccagaaggccaagaagctgttcctgcagcacatccaccggctgaagcatgagcacattgaaagaagaaggaagctgtacctggccgccctgcccctggcctttgaggccctgatccccaacctggatgaaattgaccacctgagctgcatcaaggccaagaagctgctggagaccaagccagagttcctgaagtggtttgtggtgctggaggagaccccctgggatgccaccagccacatcgacaacatggagaatgaaagaatcccctttgacctgatggacacagtgcctgctgagcagctgtatgaggcccacctggagaagctgagaaatgaaaggaagagggtggagatgagaagagccttcaaggagaacctggagaccagccccttcatcacccctgggaagccctgggaggaggcccgctccttcatcatgaatgaagacttctaccagtggctggaggagagcgtgtacatggacatctacggcaagcaccagaagcagatcatcgacaaggccaaggaggagttccaggagctgctgctggagtacagcgagctgttctatgagctggagctggatgccaagcccagcaaggagaagatgggcgtcatccaggatgtgctgggggaggagcagcgcttcaaggccctgcagaagctgcaggccgagagagatgccctgatcctgaagcacatccactttgtgtaccaccccaccaaggagacctgccccagctgcccagcctgtgtggatgccaagattgagcacctgatcagcagccgcttcatccggcccagcgacaggaaccagaagaacagcctgagtgaccccaacatcgaccgcatcaacctggtgatcctgggcaaggatggcctggcccgggagctggccaatgagatccgggccctgtgcaccaatgatgacaagtatgtgattgatggcaagatgtatgagctgagcctgcggcccatcgagggcaatgtgcggctgcctgtgaacagcttccagacccccaccttccagccccacggctgcctgtgcctgtacaacagcaaggagagcctgtcctatgtggtggagagcattgagaagagccgggagagcaccctgggccggcgggacaaccacctggtgcacctgcccctgaccctcatcctggtgaacaagagaggagacaccagcggggagaccctgcacagcctcatccagcagggccagcagatcgccagcaagctgcagtgtgtgttcctggaccctgccagcgctggagctgctgacctgtcctggctgggccccatctag

SEQ ID NO: 21677 - DNA, 978 bp, synthetic construct
  misc_feature 1..978: note = Description of Artificial Sequence: Synthetic coding sequence
  source 1..978: mol_type = other DNA
atggacatgtggacagccctgctgatcctgcaggccctgctgctgcccagcctggctgatggagccaccccagccctgcgctttgtggccgtgggggactggggcggcgtgcccaatgcccccttccacacagcccgggagatggccaatgccaaggagatcgccaggacagtgcagatcctgggcgctgacttcatcctgagcctgggggacaacttctacttcaccggggtgcaggacatcaatgacaagcgcttccaggagacctttgaagatgtgttcagtgacaggagcctgaggaaggtgccctggtacgtgctggccggcaaccacgaccacctgggcaatgtgtctgcccagatcgcctacagcaagatcagcaagcgctggaacttccccagccccttctaccgcctgcacttcaagatcccccagaccaacgtgtctgtggccatcttcatgctggacacagtgaccctgtgtggcaacagtgatgacttcctgagccagcagcctgagcggcccagagatgtgaagctggcccggacccagctgtcctggctgaagaagcagctggccgccgccagagaagattatgtgctggtggccggccactaccctgtgtggagcattgctgagcacggccccacccactgcctggtgaagcagctgcggcccctgctggccacctatggagtgacagcctacctgtgtggccatgaccacaacctgcagtacctgcaggatgaaaatggagtgggctacgtgctgagcggggccggcaacttcatggaccccagcaagaggcaccagaggaaggtgcccaacggctacctgcgcttccactatggaacagaggacagcctgggcggctttgcctacgtggagatcagcagcaaggagatgacagtgacctacatcgaggccagcggcaagagcctcttcaagacccggctgccccggcgggcccggccctag

SEQ ID NO: 21678 - DNA, 2349 bp, synthetic construct
  misc_feature 1..2349: note = Description of Artificial Sequence: Synthetic coding sequence
  source 1..2349: mol_type = other DNA
atgaacagcgctgagcagacagtgacctggctgatcaccctgggcgtgctggagagccccaagaagaccatcagtgaccctgagggcttcctgcaggccagcctgaaggatggagtggtgctgtgccgcctgctggagcggctgctgcccggcaccatcgagaaggtgtacccagagcccaggtctgagagtgaatgtctgagcaacatccgggagttcctgcggggctgtggggccagcctgcggctggagacctttgatgccaatgacctgtaccagggccagaacttcaacaaggtgctgagcagcctggtgaccctgaacaaggtgacagctgacatcggcctgggcagtgacagcgtgtgtgcccggcccagcagccaccgcatcaagagctttgacagcctgggcagccagagcctgcacaccaggaccagcaagctgttccagggccagtaccgcagcctggacatgacagacaacagcaacaaccagctggtggtgcgggccaagttcaacttccagcagaccaatgaagatgagctgtccttcagcaaaggagatgtgattcatgtgaccagggtggaggagggcggctggtgggagggcaccctgaatggccgcacaggctggttccccagcaactacgtgcgggaggtgaaggccagcgagaagcctgtgagccccaagagcggcaccctgaagagcccccccaagggctttgacaccacagccatcaacaagagctactacaacgtggtgctgcagaacatcctggagacagaaaatgagtacagcaaggagctgcagacagtgctgagcacctacctgcggcccctgcagaccagcgagaagctgagcagcgccaacatctcctacctgatgggcaacctggaggagatctgcagcttccagcagatgctggtgcagagcctggaggagtgcaccaagctgcctgaggcccagcagagggtgggcggctgcttcctgaacctgatgccccagatgaagaccctgtacctgacctactgtgccaaccaccccagcgctgtgaatgtgctgacagagcacagcgaggagctgggggagttcatggagaccaagggggccagcagccctggcatcctggtgctgaccaccggcctgagcaagcccttcatgaggctggacaagtaccccaccctgctgaaggagctggagcggcacatggaggactaccacacagaccggcaggacatccagaagtccatggccgccttcaagaacctgagcgcccagtgccaggaggtgaggaagaggaaggagctggagctgcagatcctgacagaggccatccggaactgggagggagatgacatcaagaccctgggcaatgtgacctacatgagccaggtgctgatccagtgtgccggcagcgaggagaagaatgaaagatacctgctgctcttccccaacgtgctgctgatgctgagcgccagccccaggatgagcggcttcatctaccagggcaagctgcccaccaccggcatgaccatcaccaagctggaggacagcgagaaccacagaaatgcctttgagatcagcggctccatgattgaaagaatcctggtgtcctgcaacaaccagcaggacctgcaggagtgggtggagcacctgcagaagcagaccaaggtgacctctgtgggcaaccccaccatcaagccccacagcgtgcccagccacaccctgcccagccaccctgtgacccccagcagcaagcacgccgacagcaagccagcccccctgaccccagcctaccacaccctgccccaccccagccaccacggcaccccccacaccaccatcaactggggccccctggagccccccaagacccccaagccctggagcctgagctgcctgcggcctgccccacccctgcggcccagcgctgccctgtgctacaaggaggacctgagcaagagccccaagaccatgaagaagctgctgcccaagaggaagccagagaggaagcccagtgatgaggagtttgccagcaggaagagcacagctgccctggaggaggatgcccagatcctgaaggtgattgaggcctactgcaccagcgccaagacccggcagaccctgaacagcacctggcagggcacagacctgatgcacaaccacgtgctggctgatgatgaccagcccagcctggacagcctgggcagaagaagcagcctgagccggctggagcccagcgacctgtctgaagattctgactatgacagcatctggacagcccacagctacaggatgggcagcaccagcaggaagagctgctgcagctacatcagccaccagaactag

SEQ ID NO: 21679 - DNA, 2196 bp, synthetic construct
  misc_feature 1..2196: note = Description of Artificial Sequence: Synthetic coding sequence
  source 1..2196: mol_type = other DNA
atgaacagcgctgagcagacagtgacctggctgatcaccctgggcgtgctggagagccccaagaagaccatcagtgaccctgagggcttcctgcaggccagcctgaaggatggagtggtgctgtgccgcctgctggagcggctgctgcccggcaccatcgagaaggtgtacccagagcccaggtctgagagtgaatgtctgagcaacatccgggagttcctgcggggctgtggggccagcctgcggctggaggacatgacagacaacagcaacaaccagctggtggtgcgggccaagttcaacttccagcagaccaatgaagatgagctgtccttcagcaaaggagatgtgattcatgtgaccagggtggaggagggcggctggtgggagggcaccctgaatggccgcacaggctggttccccagcaactacgtgcgggaggtgaaggccagcgagaagcctgtgagccccaagagcggcaccctgaagagcccccccaagggctttgacaccacagccatcaacaagagctactacaacgtggtgctgcagaacatcctggagacagaaaatgagtacagcaaggagctgcagacagtgctgagcacctacctgcggcccctgcagaccagcgagaagctgagcagcgccaacatctcctacctgatgggcaacctggaggagatctgcagcttccagcagatgctggtgcagagcctggaggagtgcaccaagctgcctgaggcccagcagagggtgggcggctgcttcctgaacctgatgccccagatgaagaccctgtacctgacctactgtgccaaccaccccagcgctgtgaatgtgctgacagagcacagcgaggagctgggggagttcatggagaccaagggggccagcagccctggcatcctggtgctgaccaccggcctgagcaagcccttcatgaggctggacaagtaccccaccctgctgaaggagctggagcggcacatggaggactaccacacagaccggcaggacatccagaagtccatggccgccttcaagaacctgagcgcccagtgccaggaggtgaggaagaggaaggagctggagctgcagatcctgacagaggccatccggaactgggagggagatgacatcaagaccctgggcaatgtgacctacatgagccaggtgctgatccagtgtgccggcagcgaggagaagaatgaaagatacctgctgctcttccccaacgtgctgctgatgctgagcgccagccccaggatgagcggcttcatctaccagggcaagctgcccaccaccggcatgaccatcaccaagctggaggacagcgagaaccacagaaatgcctttgagatcagcggctccatgattgaaagaatcctggtgtcctgcaacaaccagcaggacctgcaggagtgggtggagcacctgcagaagcagaccaaggtgacctctgtgggcaaccccaccatcaagccccacagcgtgcccagccacaccctgcccagccaccctgtgacccccagcagcaagcacgccgacagcaagccagcccccctgaccccagcctaccacaccctgccccaccccagccaccacggcaccccccacaccaccatcaactggggccccctggagccccccaagacccccaagccctggagcctgagctgcctgcggcctgccccacccctgcggcccagcgctgccctgtgctacaaggaggacctgagcaagagccccaagaccatgaagaagctgctgcccaagaggaagccagagaggaagcccagtgatgaggagtttgccagcaggaagagcacagctgccctggaggaggatgcccagatcctgaaggtgattgaggcctactgcaccagcgccaagacccggcagaccctgaacagcagcagcaggaaggagagcgccccccaggtgctgctgcctgaggaggagaagatcatcgtggaggagaccaagagcaatggccagaccgtcatcgaggagaagagcctggtggacacagtgtatgccctgaaggatgaggtgcaggagctgcggcaggacaacaagaagatgaagaagagcctggaggaggagcagagggccaggaaggacctggagaagctggtgaggaaggtgctgaagaacatgaatgaccctgcctgggatgagaccaacctgtag

SEQ ID NO: 21680 - DNA, 1878 bp, synthetic construct
  misc_feature 1..1878: note = Description of Artificial Sequence: Synthetic coding sequence
  source 1..1878: mol_type = other DNA
atgacagacaacagcaacaaccagctggtggtgcgggccaagttcaacttccagcagaccaatgaagatgagctgtccttcagcaaaggagatgtgatccacgtgaccagggtggaggagggcggctggtgggagggcaccctgaatggaagaacaggctggttccccagcaactacgtgcgggaggtgaaggccagcgagaagcctgtgagccccaagagcggcaccctgaagagcccccccaagggctttgacaccacagccatcaacaagagctactacaacgtggtgctgcagaacatcctggagacagaaaatgagtacagcaaggagctgcagacagtgctgagcacctacctgcggcccctgcagaccagcgagaagctgagcagcgccaacatctcctacctgatgggcaacctggaggagatctgcagcttccagcagatgctggtgcagagcctggaggagtgcaccaagctgcctgaggcccagcagagggtgggcggctgcttcctgaacctgatgccccagatgaagaccctgtacctgacctactgtgccaaccaccccagcgctgtgaatgtgctgacagagcacagcgaggagctgggggagttcatggagaccaagggggccagcagccctggcatcctggtgctgaccaccggcctgagcaagcccttcatgaggctggacaagtaccccaccctgctgaaggagctggagcggcacatggaggactaccacacagaccggcaggacatccagaagtccatggccgccttcaagaacctgagcgcccagtgccaggaggtgaggaagaggaaggagctggagctgcagatcctgacagaggccatccggaactgggagggagatgacatcaagaccctgggcaatgtgacctacatgagccaggtgctgatccagtgtgccggcagcgaggagaagaatgaaagatacctgctgctcttccccaacgtgctgctgatgctgagcgccagccccaggatgagcggcttcatctaccagggcaagctgcccaccaccggcatgaccatcaccaagctggaggacagcgagaaccacagaaatgcctttgagatcagcggctccatgattgagcgcatcctggtgtcctgcaacaaccagcaggacctgcaggagtgggtggagcacctgcagaagcagaccaaggtgacctctgtgggcaaccccaccatcaagccccacagcgtgcccagccacaccctgcccagccaccctgtgacccccagcagcaagcatgctgacagcaagccagcccccctgaccccagcctaccacaccctgccccaccccagccaccacggcaccccccacaccaccatcaactggggccccctggagccccccaagacccccaagccctggagcctgagctgcctgcggcctgccccacccctgcggcccagcgctgccctgtgctacaaggaggacctgagcaagagccccaagaccatgaagaagctgctgcccaagaggaagccagagaggaagcccagtgatgaggagtttgccagcaggaagagcacagctgccctggaggaggatgcccagatcctgaaggtgattgaggcctactgcaccagcgccaagacccggcagaccctgaacagcacctggcagggcacagacctgatgcacaaccacgtgctggctgatgatgaccagcccagcctggacagcctgggccgccgcagcagcctgagccggctggagcccagcgacctgtctgaggacagcgactatgacagcatctggacagcccacagctacaggatgggcagcaccagcaggaagagctgctgcagctacatcagccaccagaactag

SEQ ID NO: 21681 - DNA, 1941 bp, synthetic construct
  misc_feature 1..1941: note = Description of Artificial Sequence: Synthetic coding sequence
  source 1..1941: mol_type = other DNA
atgacagacaacagcaacaaccagctggtggtgcgggccaagttcaacttccagcagaccaatgaagatgagctgtccttcagcaaaggagatgtgatccacgtgaccagggtggaggagggcggctggtgggagggcaccctgaatggaagaacaggctggttccccagcaactacgtgcgggaggtgaaggccagcgagaagcctgtgagccccaagagcggcaccctgaagagcccccccaagggctttgacaccacagccatcaacaagagctactacaacgtggtgctgcagaacatcctggagacagaaaatgagtacagcaaggagctgcagacagtgctgagcacctacctgcggcccctgcagaccagcgagaagctgagcagcgccaacatctcctacctgatgggcaacctggaggagatctgcagcttccagcagatgctggtgcagagcctggaggagtgcaccaagctgcctgaggcccagcagagggtgggcggctgcttcctgaacctgatgccccagatgaagaccctgtacctgacctactgtgccaaccaccccagcgctgtgaatgtgctgacagagcacagcgaggagctgggggagttcatggagaccaagggggccagcagccctggcatcctggtgctgaccaccggcctgagcaagcccttcatgaggctggacaagtaccccaccctgctgaaggagctggagcggcacatggaggactaccacacagaccggcaggacatccagaagtccatggccgccttcaagaacctgagcgcccagtgccaggaggtgaggaagaggaaggagctggagctgcagatcctgacagaggccatccggaactgggagggagatgacatcaagaccctgggcaatgtgacctacatgagccaggtgctgatccagtgtgccggcagcgaggagaagaatgaaagatacctgctgctcttccccaacgtgctgctgatgctgagcgccagccccaggatgagcggcttcatctaccagggcaagctgcccaccaccggcatgaccatcaccaagctggaggacagcgagaaccacagaaatgcctttgagatcagcggctccatgattgagcgcatcctggtgtcctgcaacaaccagcaggacctgcaggagtgggtggagcacctgcagaagcagaccaaggtgacctctgtgggcaaccccaccatcaagccccacagcgtgcccagccacaccctgcccagccaccctgtgacccccagcagcaagcatgctgacagcaagccagcccccctgaccccagcctaccacaccctgccccaccccagccaccacggcaccccccacaccaccatcaactggggccccctggagccccccaagacccccaagccctggagcctgagctgcctgcggcctgccccacccctgcggcccagcgctgccctgtgctacaaggaggacctgagcaagagccccaagaccatgaagaagctgctgcccaagaggaagccagagaggaagcccagtgatgaggagtttgccagcaggaagagcacagctgccctggaggaggatgcccagatcctgaaggtgattgaggcctactgcaccagcgccaagacccggcagaccctgaacagcagcagcaggaaggagagcgccccccaggtgctgctgcctgaggaggagaagatcatcgtggaggagaccaagagcaatggccagacagtgattgaggagaagagcctggtggacacagtgtatgccctgaaggatgaggtgcaggagctgcggcaggacaacaagaagatgaagaagagcctggaggaggagcagagggccaggaaggacctggagaagctggtgaggaaggtgctgaagaacatgaatgaccctgcctgggatgagaccaacctgtag

SEQ ID NO: 21682 - DNA, 2166 bp, synthetic construct
  misc_feature 1..2166: note = Description of Artificial Sequence: Synthetic coding sequence
  source 1..2166: mol_type = other DNA
atgaagacctttgatgccaatgacctgtaccagggccagaacttcaacaaggtgctgagcagcctggtgaccctgaacaaggtgacagctgacatcggcctgggcagtgacagcgtgtgtgcccggcccagcagccaccgcatcaagagctttgacagcctgggcagccagagcctgcacaccaggaccagcaagctgttccagggccagtaccgcagcctggacatgacagacaacagcaacaaccagctggtggtgcgggccaagttcaacttccagcagaccaatgaagatgagctgtccttcagcaaaggagatgtgattcatgtgaccagggtggaggagggcggctggtgggagggcaccctgaatggccgcacaggctggttccccagcaactacgtgcgggaggtgaaggccagcgagaagcctgtgagccccaagagcggcaccctgaagagcccccccaagggctttgacaccacagccatcaacaagagctactacaacgtggtgctgcagaacatcctggagacagaaaatgagtacagcaaggagctgcagacagtgctgagcacctacctgcggcccctgcagaccagcgagaagctgagcagcgccaacatctcctacctgatgggcaacctggaggagatctgcagcttccagcagatgctggtgcagagcctggaggagtgcaccaagctgcctgaggcccagcagagggtgggcggctgcttcctgaacctgatgccccagatgaagaccctgtacctgacctactgtgccaaccaccccagcgctgtgaatgtgctgacagagcacagcgaggagctgggggagttcatggagaccaagggggccagcagccctggcatcctggtgctgaccaccggcctgagcaagcccttcatgaggctggacaagtaccccaccctgctgaaggagctggagcggcacatggaggactaccacacagaccggcaggacatccagaagtccatggccgccttcaagaacctgagcgcccagtgccaggaggtgaggaagaggaaggagctggagctgcagatcctgacagaggccatccggaactgggagggagatgacatcaagaccctgggcaatgtgacctacatgagccaggtgctgatccagtgtgccggcagcgaggagaagaatgaaagatacctgctgctcttccccaacgtgctgctgatgctgagcgccagccccaggatgagcggcttcatctaccagggcaagctgcccaccaccggcatgaccatcaccaagctggaggacagcgagaaccacagaaatgcctttgagatcagcggctccatgattgaaagaatcctggtgtcctgcaacaaccagcaggacctgcaggagtgggtggagcacctgcagaagcagaccaaggtgacctctgtgggcaaccccaccatcaagccccacagcgtgcccagccacaccctgcccagccaccctgtgacccccagcagcaagcacgccgacagcaagccagcccccctgaccccagcctaccacaccctgccccaccccagccaccacggcaccccccacaccaccatcaactggggccccctggagccccccaagacccccaagccctggagcctgagctgcctgcggcctgccccacccctgcggcccagcgctgccctgtgctacaaggaggacctgagcaagagccccaagaccatgaagaagctgctgcccaagaggaagccagagaggaagcccagtgatgaggagtttgccagcaggaagagcacagctgccctggaggaggatgcccagatcctgaaggtgattgaggcctactgcaccagcgccaagacccggcagaccctgaacagcagcagcaggaaggagagcgccccccaggtgctgctgcctgaggaggagaagatcatcgtggaggagaccaagagcaatggccagaccgtcatcgaggagaagagcctggtggacacagtgtatgccctgaaggatgaggtgcaggagctgcggcaggacaacaagaagatgaagaagagcctggaggaggagcagagggccaggaaggacctggagaagctggtgaggaaggtgctgaagaacatgaatgaccctgcctgggatgagaccaacctgtag

SEQ ID NO: 21683 - DNA, 2262 bp, synthetic construct
  misc_feature 1..2262: note = Description of Artificial Sequence: Synthetic coding sequence
  source 1..2262: mol_type = other DNA
atgaacagcgctgagcagacagtgacctggctgatcaccctgggcgtgctggagagccccaagaagaccatcagtgaccctgagggcttcctgcaggccagcctgaaggatggagtggtgctgtgccgcctgctggagcggctgctgcccggcaccatcgagaagacctttgatgccaatgacctgtaccagggccagaacttcaacaaggtgctgagcagcctggtgaccctgaacaaggtgacagctgacatcggcctgggcagtgacagcgtgtgtgcccggcccagcagccaccgcatcaagagctttgacagcctgggcagccagagcctgcacaccaggaccagcaagctgttccagggccagtaccgcagcctggacatgacagacaacagcaacaaccagctggtggtgcgggccaagttcaacttccagcagaccaatgaagatgagctgtccttcagcaaaggagatgtgatccacgtgaccagggtggaggagggcggctggtgggagggcaccctgaatggaagaacaggctggttccccagcaactacgtgcgggaggtgaaggccagcgagaagcctgtgagccccaagagcggcaccctgaagagcccccccaagggctttgacaccacagccatcaacaagagctactacaacgtggtgctgcagaacatcctggagacagaaaatgagtacagcaaggagctgcagacagtgctgagcacctacctgcggcccctgcagaccagcgagaagctgagcagcgccaacatctcctacctgatgggcaacctggaggagatctgcagcttccagcagatgctggtgcagagcctggaggagtgcaccaagctgcctgaggcccagcagagggtgggcggctgcttcctgaacctgatgccccagatgaagaccctgtacctgacctactgtgccaaccaccccagcgctgtgaatgtgctgacagagcacagcgaggagctgggggagttcatggagaccaagggggccagcagccctggcatcctggtgctgaccaccggcctgagcaagcccttcatgaggctggacaagtaccccaccctgctgaaggagctggagcggcacatggaggactaccacacagaccggcaggacatccagaagtccatggccgccttcaagaacctgagcgcccagtgccaggaggtgaggaagaggaaggagctggagctgcagatcctgacagaggccatccggaactgggagggagatgacatcaagaccctgggcaatgtgacctacatgagccaggtgctgatccagtgtgccggcagcgaggagaagaatgaaagatacctgctgctcttccccaacgtgctgctgatgctgagcgccagccccaggatgagcggcttcatctaccagggcaagctgcccaccaccggcatgaccatcaccaagctggaggacagcgagaaccacagaaatgcctttgagatcagcggctccatgattgagcgcatcctggtgtcctgcaacaaccagcaggacctgcaggagtgggtggagcacctgcagaagcagaccaaggtgacctctgtgggcaaccccaccatcaagccccacagcgtgcccagccacaccctgcccagccaccctgtgacccccagcagcaagcatgctgacagcaagccagcccccctgaccccagcctaccacaccctgccccaccccagccaccacggcaccccccacaccaccatcaactggggccccctggagccccccaagacccccaagccctggagcctgagctgcctgcggcctgccccacccctgcggcccagcgctgccctgtgctacaaggaggacctgagcaagagccccaagaccatgaagaagctgctgcccaagaggaagccagagaggaagcccagtgatgaggagtttgccagcaggaagagcacagctgccctggaggaggatgcccagatcctgaaggtgattgaggcctactgcaccagcgccaagacccggcagaccctgaacagcacctggcagggcacagacctgatgcacaaccacgtgctggctgatgatgaccagcccagcctggacagcctgggccgccgcagcagcctgagccggctggagcccagcgacctgtctgaggacagcgactatgacagcatctggacagcccacagctacaggatgggcagcaccagcaggaagagctgctgcagctacatcagccaccagaactag

SEQ ID NO: 21684 - DNA, 2412 bp, synthetic construct
  misc_feature 1..2412: note = Description of Artificial Sequence: Synthetic coding sequence
  source 1..2412: mol_type = other DNA
atgaacagcgctgagcagacagtgacctggctgatcaccctgggcgtgctggagagccccaagaagaccatcagtgaccctgagggcttcctgcaggccagcctgaaggatggagtggtgctgtgccgcctgctggagcggctgctgcccggcaccatcgagaaggtgtacccagagcccaggtctgagagtgaatgtctgagcaacatccgggagttcctgcggggctgtggggccagcctgcggctggagctgctcttcccccccagccagcccccccagcacctggtgaccaccatcctgctgagcgccagcacctttgatgccaatgacctgtaccagggccagaacttcaacaaggtgctgagcagcctggtgaccctgaacaaggtgacagctgacatcggcctgggcagtgacagcgtgtgtgcccggcccagcagccaccgcatcaagagctttgacagcctgggcagccagagcctgcacaccaggaccagcaagctgttccagggccagtaccgcagcctggacatgacagacaacagcaacaaccagctggtggtgcgggccaagttcaacttccagcagaccaatgaagatgagctgtccttcagcaaaggagatgtgatccacgtgaccagggtggaggagggcggctggtgggagggcaccctgaatggaagaacaggctggttccccagcaactacgtgcgggaggtgaaggccagcgagaagcctgtgagccccaagagcggcaccctgaagagcccccccaagggctttgacaccacagccatcaacaagagctactacaacgtggtgctgcagaacatcctggagacagaaaatgagtacagcaaggagctgcagacagtgctgagcacctacctgcggcccctgcagaccagcgagaagctgagcagcgccaacatctcctacctgatgggcaacctggaggagatctgcagcttccagcagatgctggtgcagagcctggaggagtgcaccaagctgcctgaggcccagcagagggtgggcggctgcttcctgaacctgatgccccagatgaagaccctgtacctgacctactgtgccaaccaccccagcgctgtgaatgtgctgacagagcacagcgaggagctgggggagttcatggagaccaagggggccagcagccctggcatcctggtgctgaccaccggcctgagcaagcccttcatgaggctggacaagtaccccaccctgctgaaggagctggagcggcacatggaggactaccacacagaccggcaggacatccagaagtccatggccgccttcaagaacctgagcgcccagtgccaggaggtgaggaagaggaaggagctggagctgcagatcctgacagaggccatccggaactgggagggagatgacatcaagaccctgggcaatgtgacctacatgagccaggtgctgatccagtgtgccggcagcgaggagaagaatgaaagatacctgctgctcttccccaacgtgctgctgatgctgagcgccagccccaggatgagcggcttcatctaccagggcaagctgcccaccaccggcatgaccatcaccaagctggaggacagcgagaaccacagaaatgcctttgagatcagcggctccatgattgagcgcatcctggtgtcctgcaacaaccagcaggacctgcaggagtgggtggagcacctgcagaagcagaccaaggtgacctctgtgggcaaccccaccatcaagccccacagcgtgcccagccacaccctgcccagccaccctgtgacccccagcagcaagcatgctgacagcaagccagcccccctgaccccagcctaccacaccctgccccaccccagccaccacggcaccccccacaccaccatcaactggggccccctggagccccccaagacccccaagccctggagcctgagctgcctgcggcctgccccacccctgcggcccagcgctgccctgtgctacaaggaggacctgagcaagagccccaagaccatgaagaagctgctgcccaagaggaagccagagaggaagcccagtgatgaggagtttgccagcaggaagagcacagctgccctggaggaggatgcccagatcctgaaggtgattgaggcctactgcaccagcgccaagacccggcagaccctgaacagcacctggcagggcacagacctgatgcacaaccacgtgctggctgatgatgaccagcccagcctggacagcctgggccgccgcagcagcctgagccggctggagcccagcgacctgtctgaggacagcgactatgacagcatctggacagcccacagctacaggatgggcagcaccagcaggaagagctgctgcagctacatcagccaccagaactag

SEQ ID NO: 21685 - DNA, 1941 bp, synthetic construct; identical to SEQ ID NO: 21681
  misc_feature 1..1941: note = Description of Artificial Sequence: Synthetic coding sequence
  source 1..1941: mol_type = other DNA

SEQ ID NO: 21686 - DNA, 201 bp, synthetic construct
  misc_feature 1..201: note = Description of Artificial Sequence: Synthetic coding sequence
  source 1..201: mol_type = other DNA
atgacagacaacagcaacaaccagctggtggtgcgggccaagttcaacttccagcagaccaatgaagatgagctgtccttcagcaaaggagatgtgatccacgtgaccagggtggaggagggcggctggtgggagggcaccctgaatggaagaacaggctggttccccagcaactacgtgcgggaggtgaaggccagctag

SEQ ID NO: 21687 - DNA, 1344 bp, synthetic construct
  misc_feature 1..1344: note = Description of Artificial Sequence: Synthetic coding sequence
  source 1..1344: mol_type = other DNA
atgacagacaacagcaacaaccagctggtggtgcgggccaagttcaacttccagcagaccaatgaagatgagctgtccttcagcaaaggagatgtgatccacgtgaccagggtggaggagggcggctggtgggagggcaccctgaatggaagaacaggctggttccccagcaactacgtgcgggaggtgaaggccagcgagaagcctgtgagccccaagagcggcaccctgaagagcccccccaagggctttgacaccacagccatcaacaagagctactacaacgtggtgctgcagaacatcctggagacagaaaatgagtacagcaaggagctgcagacagtgctgagcacctacctgcggcccctgcagaccagcgagaagctgagcagcgccaacatctcctacctgatgggcaacctggaggagatctgcagcttccagcagatgctggtgcagagcctggaggagtgcaccaagctgcctgaggcccagcagagggtgggcggctgcttcctgaacctgatgccccagatgaagaccctgtacctgacctactgtgccaaccaccccagcgctgtgaatgtgctgacagagcacagcgaggagctgggggagttcatggagaccaagggggccagcagccctggcatcctggtgctgaccaccggcctgagcaagcccttcatgaggctggacaagtaccccaccctgctgaaggagctggagcggcacatggaggactaccacacagaccggcaggacatccagaagtccatggccgccttcaagaacctgagcgcccagtgccaggaggtgaggaagaggaaggagctggagctgcagatcctgacagaggccatccggaactgggagggagatgacatcaagaccctgggcaatgtgacctacatgagccaggtgctgatccagtgtgccggcagcgaggagaagaatgaaagatacctgctgctcttccccaacgtgctgctgatgctgagcgccagccccaggatgagcggcttcatctaccagggcaagctgcccaccaccggcatgaccatcaccaagctggaggacagcgagaaccacagaaatgcctttgagatcagcggctccatgattgagcgcatcctggtgtcctgcaacaaccagcaggacctgcaggagtgggtggagcacctgcagaagcagaccaaggtgacctctgtgggcaaccccaccatcaagccccacagcgtgcccagccacaccctgcccagccaccctgtgacccccagcagcaagcatgctgacagcaagccagcccccctgaccccagcctaccacaccctgccccactag

SEQ ID NO: 21688 - DNA, 186 bp, synthetic construct
  misc_feature 1..186: note = Description of Artificial Sequence: Synthetic coding sequence
  source 1..186: mol_type = other DNA
atgacagacaacagcaacaaccagctggtggtgcgggccaagttcaacttccagcagaccaatgaagatgagctgtccttcagcaaaggagatgtgatccacgtgaccagggtggaggagggcggctggtgggagggcaccctgaatggaagaacaggctggttccccagcaactacgtgaggtag

SEQ ID NO: 21689 - DNA, 120 bp, synthetic construct
  misc_feature 1..120: note = Description of Artificial Sequence: Synthetic coding sequence
  source 1..120: mol_type = other DNA
atgacagacaacagcaacaaccagctggtggtgcgggccaagttcaacttccagcagaccaatgaagatgagctgtccttcagcaaaggagatgtgatccacgtgaccagggtggagtag

SEQ ID NO: 21690 - DNA, 546 bp, synthetic construct
  misc_feature 1..546: note = Description of Artificial Sequence: Synthetic coding sequence
  source 1..546: mol_type = other DNA
atgtgcttccccaggagctctgtgaccacagatgaccaccagctggatggcatcaagagcacccgggccccagcccctggctgctgctgctgccccagcgagaccctgcggagcggggaggtggcccggagcagcgctgagagccggcggctgctcttcaagccagatgccacagatgagaaccctgtgccccacgtgctgtgccagagccccttctgcagtgaatgtccccacggcacccaggactaccacacagaccggcaggacatccagaagtccatggccgccttcaagaacctgagcgcccagtgccaggaggtgaggaagaggaaggagctggagctgcagatcctgacagaggccatccggaactgggagggagatgacatcaagaccctgggcaatgtgacctacatgagccaggtgctgatccagtgtgccggcagcgaggagaagaatgaaagatacctgctgctcttccccaacgtgctgctgatgctgagcgccagccccaggatgagcggcttcatctaccagggcgcctag

SEQ ID NO: 21691 - DNA, 2070 bp, synthetic construct
  misc_feature 1..2070: note = Description of Artificial Sequence: Synthetic coding sequence
  source 1..2070: mol_type = other DNA
atcccccccagcaagcccctgcggggcagcagcctgtggggctgctggagccggcccaagaccatcagtgaccctgagggcttcctgcaggccagcctgaaggatggagtggtgctgtgccgcctgctggagcggctgctgcccggcaccatcgagaaggtgtacccagagcccaggtctgagagtgaatgtctgagcaacatccgggagttcctgcggggctgtggggccagcctgcggctggagacctttgatgccaatgacctgtaccagggccagaacttcaacaaggtgctgagcagcctggtgaccctgaacaaggtgacagctgacatcggcctgggcagtgacagcgtgtgtgcccggcccagcagccaccgcatcaagagctttgacagcctgggcagccagagcctgcacaccaggaccagcaagctgttccagggccagtaccgcagcctggacatgacagacaacagcaacaaccagctggtggtgcgggccaagttcaacttccagcagaccaatgaagatgagctgtccttcagcaaaggagatgtgattcatgtgaccagggtggaggagggcggctggtgggagggcaccctgaatggccgcacaggctggttccccagcaactacgtgcgggaggtgaaggccagcgagaagcctgtgagccccaagagcggcaccctgaagagcccccccaagggctttgacaccacagccatcaacaagagctactacaacgtggtgctgcagaacatcctggagacagaaaatgagtacagcaaggagctgcagacagtgctgagcacctacctgcggcccctgcagaccagcgagaagctgagcagcgccaacatctcctacctgatgggcaacctggaggagatctgcagcttccagcagatgctggtgcagagcctggaggagtgcaccaagctgcctgaggcccagcagagggtgggcggctgcttcctgaacctgatgccccagatgaagaccctgtacctgacctactgtgccaaccaccccagcgctgtgaatgtgctgacagagcacagcgaggagctgggggagttcatggagaccaagggggccagcagccctggcatcctggtgctgaccaccggcctgagcaagcccttcatgaggctggacaagtaccccaccctgctgaaggagctggagcggcacatggaggactaccacacagaccggcaggacatccagaagtccatggccgccttcaagaacctgagcgcccagtgccaggaggtgaggaagaggaaggagctggagctgcagatcctgacagaggccatccggaactgggagggagatgacatcaagaccctgggcaatgtgacctacatgagccaggtgctgatccagtgtgccggcagcgaggagaagaatgaaagatacctgctgctcttccccaacgtgctgctgatgctgagcgccagccccaggatgagcggcttcatctaccagggcaagctgcccaccaccggcatgaccatcaccaagctggaggacagcgagaaccacagaaatgcctttgagatcagcggctccatgattgaaagaatcctggtgtcctgcaacaaccagcaggacctgcaggagtgggtggagcacctgcagaagcagaccaaggtgacctctgtgggcaaccccaccatcaagccccacagcgtgcccagccacaccctgcccagccaccctgtgacccccagcagcaagcacgccgacagcaagccagcccccctgaccccagcctaccacaccctgccccaccccagccaccacggcaccccccacaccaccatcaactggggccccctggagccccccaagacccccaagccctggagcctgagctgcctgcggcctgccccacccctgcggcccagcgctgccctgtgctacaaggaggacctgagcaagagccccaagaccatgaagaagctgctgcccaagaggaagccagagaggaagcccatgaggagcagcaggcctgggaaggcccagctgctgtggaagaagatgctgcgcttctag

SEQ ID NO: 21692 - DNA, 4065 bp, synthetic construct
  misc_feature 1..4065: note = Description of Artificial Sequence: Synthetic coding sequence
  source 1..4065: mol_type = other DNA
atgagcactggagacagctttgagaccaggtttgagaagatggacaacctgctgcgggaccccaagtctgaggtgaacagcgactgcctgctggatggcctggatgccctggtgtatgacctggacttccctgccctgaggaagaacaagaacatcgacaacttcctgagccgctacaaggacaccatcaacaagatccgggacctgaggatgaaggccgaggactatgaggtggtgaaggtgattggccgcggggcctttggagaggtgcagctggtgcgccacaagagcaccaggaaggtgtatgccatgaagctgctgagcaagtttgagatgatcaagagaagtgacagcgccttcttctgggaggagcgggacatcatggcctttgccaacagcccctgggtggtgcagctgttctacgccttccaggatgaccgctacctgtacatggtgatggagtacatgcctggaggagacctggtgaacctgatgagcaactatgatgtgcctgagaagtgggcccgcttctacacagctgaggtggtgctggccctggatgccatccacagcatgggcttcatccacagagatgtgaagccagacaacatgctgctggacaagagcggccacctgaagctggccgactttggcacctgcatgaagatgaacaaggagggcatggtgcgctgtgacacagctgtgggcaccccagactacatcagccctgaggtgctgaagagccagggcggagatggctactacggccgggagtgtgactggtggagcgtgggcgtcttcctgtatgagatgctggtgggggacacccccttctacgccgacagcctggtgggcacctacagcaagatcatgaaccacaagaacagcctgaccttcccagatgacaatgacatcagcaaggaggccaagaacctgatctgtgccttcctgacagaccgggaggtgcggctgggcagaaatggagtggaggagatcaagaggcacctgttcttcaagaatgaccagtgggcctgggagaccctgcgggacacagtggcccctgtggtgcctgacctgagcagtgacatcgacaccagcaactttgatgacctggaggaggacaagggggaggaggagaccttccccatccccaaggcctttgtgggcaaccagctgccctttgtgggcttcacctactacagcaacagacgctacctgagcagcgccaaccccaatgacaacagaaccagcagcaatgctgacaagagcctgcaggagagcctgcagaagaccatctacaagctggaggagcagctgcacaatgagatgcagctgaaggatgagatggagcagaagtgcaggaccagcaacatcaagctggacaagatcatgaaggagctggatgaggagggcaaccagaggaggaacctggagagcacagtgtcccagatcgagaaggagaagatgctgctgcagcaccgcatcaatgagtaccagaggaaggccgagcaggagaatgagaagagaagaaatgtggagaatgaggtgtccaccctgaaggaccagctggaggacctgaagaaggtgtcccagaacagccagctggccaatgagaagctgagccagctgcagaagcagctggaggaggccaatgacctgctgaggacagaaagtgacacagctgtgcggctgaggaagagccacacagagatgagcaagagcatcagccagctggagagcctgaaccgggagctgcaggagaggaaccgcatcctggagaacagcaagagccagacagacaaggactactaccagctgcaggccatcctggaggccgagcggcgggaccggggccatgattctgagatgattggagacctgcaggcccgcatcaccagcctgcaggaggaggtgaagcacctgaagcacaacctggagaaggtggagggggagaggaaggaggcccaggacatgctgaaccacagcgagaaggagaagaacaacctggagattgacctgaactacaagctgaagagcctgcagcagaggctggagcaggaggtgaatgagcacaaggtgaccaaggcccggctgacagacaagcaccagagcattgaggaggccaagtctgtggccatgtgtgagatggagaagaagctgaaggaggagcgggaggcccgggagaaggcagaaaatagagtggtgcagatcgagaagcagtgcagcatgctggatgtggacctgaagcagagccagcagaagctggagcacctgactggaaacaaggagaggatggaggatgaggtgaagaacctgaccctgcagctggagcaggagagcaacaagaggctgctgctgcagaatgagctgaagacccaggcctttgaagctgacaacctgaagggcctggagaagcagatgaagcaggagatcaacaccctgctggaggccaagaggctgctggagtttgagctggcccagctgaccaagcagtacagaggaaatgaaggccagatgagggagctgcaggaccagctggaggccgagcagtacttcagcaccctgtacaagacccaggtgaaggagctgaaggaggagattgaggagaagaaccgggagaacctgaagaagatccaggagctgcagaatgagaaggagaccctggccacccagctggacctggccgagaccaaggccgagagcgagcagctggcccggggcctgctggaggagcagtactttgagctgacccaggagagcaagaaggccgccagcaggaaccggcaggagatcacagacaaggaccacacagtgtcccggctggaggaggccaacagcatgctgaccaaggacatcgagatcctgcggcgggagaatgaggagctgacagagaagatgaagaaggccgaggaggagtacaagctggagaaggaggaggagatcagcaacctgaaggccgcctttgagaagaacatcaacacagagaggaccctgaagacccaggccgtgaacaagctggccgagatcatgaacaggaaggacttcaagattgacaggaagaaggccaacacccaggacctgaggaagaaggagaaggaaaataggaagctgcagctggagctgaaccaggagcgggagaagttcaaccagatggtggtgaagcaccagaaggagctgaatgacatgcaggcccagctggtggaggagtgtgcccacagaaatgagctgcagatgcagctggccagcaaggagagtgacatcgagcagctgcgggccaagctgctggacctgagtgacagcacctctgtggccagcttccccagcgcagatgaaacagatggcaacctgcctgagagcagaattgagggctggctgtctgtgcccaacagaggcaacatcaagagatatggctggaagaagcagtatgtggtggtgagcagcaagaagatcctcttctacaatgatgagcaggacaaggagcagagcaaccccagcatggtgctggacatcgacaagctgttccacgtgcggcctgtgacccagggagatgtgtacagagctgagacagaggagatccccaagatcttccagatcctgtatgccaatgaaggagaatgtaggaaggatgtggagatggagcctgtgcagcaggccgagaagaccaacttccagaaccacaagggccacgagttcatccccaccctgtaccacttccctgccaactgtgatgcctgtgccaagcccctgtggcacgtgttcaagcccccaccagccctggagtgccgccgctgccacgtgaagtgccaccgggaccacctggacaagaaggaggacctgatctgcccctgcaaggtgtcctatgatgtgaccagcgcccgggacatgctgctgctggcctgcagccaggatgagcagaagaagtgggtgacccacctggtgaagaagatccccaagaacccccccagcggctttgtgcgggccagccccaggaccctgagcaccaggagcacagccaaccagagcttcaggaaggtggtgaagaacaccagcggcaagaccagctag

SEQ ID NO: 21693 - DNA, 471 bp, synthetic construct
  misc_feature 1..471: note = Description of Artificial Sequence: Synthetic coding sequence
  source 1..471: mol_type = other DNA
atggccccagcccgggccggcttctgccccctgctgctgctgctgctgctgggcctgtgggtggccgagatccctgtgtctgccaagcccaagggcatgaccagcagccagtggttcaagatccagcacatgcagcccagcccccaggcctgcaacagcgccatgaagaacatcaacaagcacaccaagcgctgcaaggacctgaacaccttcctgcacgagcccttcagctctgtggccgccacctgccagacccccaagatcgcctgcaagaatggagacaagaactgccaccagagccatggagctgtgtccctgaccatgtgcaagctgaccagcggcaagcaccccaactgccgctacaaggagaagaggcagaacaagagctatgtggtggcctgcaagccaccccagaagaaggacagccagcagttccacctggtgcctgtgcacctggacagagtgctgtag

SEQ ID NO: 21694 - DNA, 471 bp, synthetic construct; identical to SEQ ID NO: 21693
  misc_feature 1..471: note = Description of Artificial Sequence: Synthetic coding sequence
  source 1..471: mol_type = other DNA

SEQ ID NO: 21695 - DNA, 831 bp, synthetic construct
  misc_feature 1..831: note = Description of Artificial Sequence: Synthetic coding sequence
  source 1..831: mol_type = other DNA
atgctgcagcaggacagcaatgatgacacagaagatgtgtccctgtttgatgctgaggaggagaccaccaaccggcccaggaaggccaagatccgccaccctgtggccagcttcttccacctgttcttccgggtgtctgccatcatcgtgtgcctgctgtgtgagctgctgagcagcagcttcatcacctgcatggtgaccatcatcctgctgctgagctgtgacttctgggccgtgaagaatgtgacaggccgcctgatggtgggcctgcgctggtggaaccacattgatgaagatggcaagagccactgggtgtttgagagcaggaaggagagcagccaggagaacaagacagtgtctgaggccgagagccgcatcttctggctgggcctcatcgcctgcagcgtgctgtgggtgatctttgccttcagcgccctcttctccttcaccgtgaagtggctgcggcgcagccgccacatcgcccagacaggcctgaaggtgctgggcagccgggaccccccagccagcgccttccagagcgctggcatcaccggggtgagccgctgccccggccaccccagcaggaagttccaccaggtggacatcaacagcttcacccgcatcacagaccgggccctgtactggaagccagccccccggctgagcagcccccccctgcgggccgcccctggcaactgccagcagatggccccagcccggctcttcctgagcctgcggctgtgggcctggaggggcggcggggagagccccaacagccggggcaccggggagcccggccccaagttccacctggccagcggcatgcactag

SEQ ID NO: 21696 - DNA, 1419 bp, synthetic construct
  misc_feature 1..1419: note = Description of Artificial Sequence: Synthetic coding sequence
  source 1..1419: mol_type = other DNA
atggaccatggaggagtgggcccctatgagctgggcatggagcactgtgagaagtttgagatcagcgagacctctgtgaacagaggccctgagaagatccggcctgagtgctttgagctgctgcgggtgctgggcaagggcggctacggcaaggtgttccaggtgaggaaggtgactggagccaacacaggcaagatctttgccatgaaggtgctgaagaaggccatgattgtgagaaatgccaaggacacagcccacaccaaggccgagaggaacatcctggaggaggtgaagcaccccttcatcgtggacctgatctatgccttccagacaggaggcaagctgtacctgatcctggagtacctgtctggaggagagctgttcatgcagctggagcgggagggcatcttcatggaggacacagcctgcttctacctggccgagatctccatggccctgggccacctgcaccagaagggcatcatctacagagacctgaagccagagaacatcatgctgaaccaccagggccacgtgaagctgacagactttggcctgtgcaaggagagcatccatgatggcaccgtgacccacaccttctgtggcaccatcgagtacatggcccctgagatcctgatgaggagcggccacaacagagctgtggactggtggagcctgggcgccctgatgtatgacatgctgactggagccccacccttcaccggagaaaataggaagaagaccatcgacaagatcctgaagtgcaagctgaacctgcccccctacctgacccaggaggcccgggacctgctgaagaagctgctgaagagaaatgctgccagccggctgggcgccggccctggagatgctggggaggtgcaggcccaccccttcttccgccacatcaactgggaggagctgctggccaggaaggtggagccccccttcaagcccctgctgcagagcgaggaggatgtgtcccagtttgacagcaagttcacccggcagacccctgtggacagcccagatgacagcaccctgtctgagagcgccaaccaggtgttcctgggcttcacctacgtggcccccagcgtgctggagagcgtgaaggagaagttctcctttgagcccaagatccgcagcccccggcgcttcatcggcagccccaggacccctgtgtcccctgtgaagttcagccctggggacttctggggccgcggggccagcgccagcacagccaacccccagacccctgtggagtaccccatggagaccagcggcatcgagcagatggatgtgaccatgtctggagaggccagcgcccccctgcccatccggcagcccaacagcggcccctacaagaagcaggccttccccatgatcagcaagaggcctgagcacctgaggatgaacctgtag

SEQ ID NO: 21697 - DNA, 1356 bp, synthetic construct
  misc_feature 1..1356: note = Description of Artificial Sequence: Synthetic coding sequence
  source 1..1356: mol_type = other DNA
atgagaagaagaagaagaagagatggcttctacccagccccagacttccgggaccgggaggccgaggacatggccggcgtgtttgacatcgacctggaccagccagaagatgctggctctgaagatgagctggaggagggcggccagctgaatgaatccatggaccacggcggcgtgggcccctatgagctgggcatggagcactgtgagaagtttgagatcagcgagacctctgtgaacagaggccctgagaagatccggccagaatgttttgagctgctgcgggtgctgggcaaaggaggctacggcaaggtgttccaggtgaggaaggtgactggagccaacacaggcaagatctttgccatgaaggtgctgaagaaggccatgattgtgagaaatgccaaggacacagcccacaccaaggccgagaggaacatcctggaggaggtgaagcaccccttcatcgtggacctgatctatgccttccagacaggaggcaagctgtacctgatcctggagtacctgagcggcggggagctgttcatgcagctggagcgggagggcatcttcatggaggacacagcctgcttctacctggccgagatctccatggccctgggccacctgcaccagaagggcatcatctacagagacctgaagccagagaacatcatgctgaaccaccagggccacgtgaagctgacagactttggcctgtgcaaggagagcatccatgatggcaccgtgacccacaccttctgtggcaccatcgagtacatggcccctgagatcctgatgaggagcggccacaacagagctgtggactggtggagcctgggcgccctgatgtatgacatgctgaccggggccccacccttcaccggggagaacaggaagaagaccatcgacaagatcctgaagtgcaagctgaacctgcccccctacctgacccaggaggcccgggacctgctgaagaagctgctgaagagaaatgctgccagccggctgggcgccggccctggagatgctggggaggtgcaggcccaccccttcttccgccacatcaactgggaggagctgctggccaggaaggtggagccccccttcaagcccctgctgcagagtgaagaagatgtgtcccagtttgacagcaagttcacccggcagacccctgtggacagcccagatgacagcaccctgtctgagagcgccaaccaggtgttcctgggcttcacctacgtggcccccagcgtgctggagagcgtgaaggagaagttctcctttgagcccaagatccgcagcccccggcgcttcatcggcagccccaggacccctgtgtccacagccatgtgctag

SEQ ID NO: 21698 - DNA, 1509 bp, synthetic construct
  misc_feature 1..1509: note = Description of Artificial Sequence: Synthetic coding sequence
  source 1..1509: mol_type = other DNA
atgagaagaagaagaagaagagatggcttctacccagccccagacttccgggaccgggaggccgaggacatggccggcgtgtttgacatcgacctggaccagccagaagatgctggctctgaagatgagctggaggagggcggccagctgaatgaatccatggaccacggcggcgtgggcccctatgagctgggcatggagcactgtgagaagtttgagatcagcgagacctctgtgaacagaggccctgagaagatccggccagaatgttttgagctgctgcgggtgctgggcaaaggaggctacggcaaggccatgattgtgagaaatgccaaggacacagcccacaccaaggccgagaggaacatcctggaggaggtgaagcaccccttcatcgtggacctgatctatgccttccagacaggaggcaagctgtacctgatcctggagtacctgtctggaggagagctgttcatgcagctggagcgggagggcatcttcatggaggacacagcctgcttctacctggccgagatctccatggccctgggccacctgcaccagaagggcatcatctacagagacctgaagccagagaacatcatgctgaaccaccagggccacgtgaagctgacagactttggcctgtgcaaggagagcatccatgatggcaccgtgacccacaccttctgtggcaccatcgagtacatggcccctgagatcctgatgaggagcggccacaacagagctgtggactggtggagcctgggcgccctgatgtatgacatgctgactggagccccacccttcaccggagaaaataggaagaagaccatcgacaagatcctgaagtgcaagctgaacctgcccccctacctgacccaggaggcccgggacctgctgaagaagctgctgaagagaaatgctgccagccggctgggcgccggccctggagatgctggggaggtgcaggcccaccccttcttccgccacatcaactgggaggagctgctggccaggaaggtggagccccccttcaagcccctgctgcagagcgaggaggatgtgtcccagtttgacagcaagttcacccggcagacccctgtggacagcccagatgacagcaccctgtctgagagcgccaaccaggtgttcctgggcttcacctacgtggcccccagcgtgctggagagcgtgaaggagaagttctcctttgagcccaagatccgcagcccccggcgcttcatcggcagccccaggacccctgtgtcccctgtgaagttcagccctggggacttctggggccgcggggccagcgccagcacagccaacccccagacccctgtggagtaccccatggagaccagcggcatcgagcagatggatgtgaccatgtctggagaggccagcgcccccctgcccatccggcagcccaacagcggcccctacaagaagcaggccttccccatgatcagcaagaggcctgagcacctgaggatgaacctgtag

SEQ ID NO: 21699 - DNA, 1932 bp, synthetic construct
  misc_feature 1..1932: note = Description of Artificial Sequence: Synthetic coding sequence
  source 1..1932: mol_type = other DNA
atgaaggtgctgaagaaggccaccctgaaggtgcgggacagagtgaggaccaagatggagcgggacatcctggctgatgtgaaccacccctttgtggtgaagctgcactacgccttccagacagagggcaagctgtacctgatcctggacttcctgcggggcggggacctcttcacccggctgagcaaggaggtgatgttcacagaggaggatgtgaagttctacctggccgagctggccctgggcctggaccacctgcacagcctgggcatcatctacagagacctgaagccagagaacatcctgctggatgaggagggccacatcaagctgacagactttggcctgagcaaggaggccatcgaccacgagaagaaggcctacagcttctgtggcaccgtggagtacatggcccctgaggtggtgaaccggcagggccacagccacagcgctgactggtggagctatggagtgctgatgtttgagatgctgaccggcagcctgcccttccagggcaaggacaggaaggagaccatgaccctcatcctgaaggccaagctgggcatgccccagttcctgagcacagaggcccagagcctgctgcgggccctcttcaagagaaatcctgccaaccggctgggcagcggcccagatggagctgaggagatcaagagacatgtgttctacagcaccatcgactggaacaagctgtacagaagagagatcaagccacccttcaagccagctgtggcccagccagatgacaccttctactttgacacagagttcaccagcaggacccccaaggacagccctggcatccccccatctgctggggcccaccagctgttccggggcttctcctttgtggccaccggcctgatggaggatgatggcaagccccgggccccccaggcccccctgcacagcgtggtgcagcagctgcacggcaagaacctggtgttcagtgatggctacgtggtgaaggagaccatcggcgtgggcagctacagcgagtgcaagagatgtgtgcacaaggccaccaacatggagtatgctgtgaaggtgattgacaagagcaagagggaccccagcgaggagattgagatcctgctgcgctatggccagcaccccaacatcatcaccctgaaggatgtgtatgatgatggcaagcacgtgtacctggtgacagagctgatgaggggcggggagctgctggacaagatcctgcggcagaagttcttcagcgagcgggaggccagctttgtgctgcacaccatcggcaagacagtggagtacctgcacagccagggcgtggtgcaccgggacctgaagcccagcaacatcctgtatgtggatgaaagtggcaacccagaatgtctgcgcatctgtgactttggatttgccaagcagctgcgggcagaaaatggcctgctgatgaccccctgctacacagccaactttgtggcccctgaggtgctgaagaggcagggctatgatgagggctgtgacatctggagcctgggcatcctgctgtacaccatgctggccggctacaccccatttgccaacggccccagcgacaccccagaggagatcctgaccagaattggcagcggcaagttcaccctgagcggcggcaactggaacacagtgtctgaaacagccaaggacctggtgtccaagatgctgcacgtggacccccaccagaggctgacagccaagcaggtgctgcagcacccctgggtgacccagaaggacaagctgccccagagccagctgagccaccaggacctgcagctggtgaagggggccatggccgccacctacagcgccctgaacagcagcaagcccaccccccagctgaagcccatcgagagcagcatcctggcccagaggagagtgaggaagctgcccagcaccaccctgtag

SEQ ID NO: 21700 - DNA, 687 bp, synthetic construct
  misc_feature 1..687: note = Description of Artificial Sequence: Synthetic coding sequence
  source 1..687: mol_type = other DNA
atgccccagttcctgagcacagaggcccagagcctgctgcgggccctcttcaagagaaatcctgccaaccggctgggcagcggcccagatggagctgaggagatcaagagacatgtgttctacagcaccatcgactggaacaagctgtacagaagagagatcaagccacccttcaagccagctgtggcccagccagatgacaccttctactttgacacagagttcaccagcaggacccccaaggacagccctggcatccccccatctgctggggcccaccagctgttccggggcttctcctttgtggccaccggcctgatggaggatgatggcaagccccgggccccccaggcccccctgcacagcgtggtgcaggtgattgacaagagcaagagggaccccagcgaggagattgagatcctgctgcgctatggccagcaccccaacatcatcaccctgaaggatgtgtatgatgatggcaagcacgtgtacctggtgacagagctgatgaggggcggggagctgctggacaagatcctgcggcagaagttcttcagcgagcgggaggccagctttgtgctgcacaccatcggcaagacagtggagtacctgcacagccagggcgtggtgcaccgggacctgaagcccagcaacatcctgtatgtggatgaaagtggcaacccctag

SEQ ID NO: 21701 - DNA, 2208 bp, synthetic construct
  misc_feature 1..2208: note = Description of Artificial Sequence: Synthetic coding sequence
  source 1..2208: mol_type = other DNA
atgcccctggcccagctgaaggagccctggcccctgatggagctggtgcccctggaccctgaaaatggccagaccagcggggaggaggccggcctgcagcccagcaaggatgaaggagtgctgaaggagatcagcatcacccaccacgtgaaggccggcagcgagaaggctgaccccagccactttgagctgctgaaggtgctgggccagggcagctttgggaaggtgttcctggtgaggaaggtgaccaggccagattctggccacctgtatgccatgaaggtgctgaagaaggccaccctgaaggtgcgggacagagtgaggaccaagatggagcgggacatcctggctgatgtgaaccacccctttgtggtgaagctgcactacgccttccagacagagggcaagctgtacctgatcctggacttcctgcggggcggggacctcttcacccggctgagcaaggaggtgatgttcacagaggaggatgtgaagttctacctggccgagctggccctgggcctggaccacctgcacagcctgggcatcatctacagagacctgaagccagagaacatcctgctggatgaggagggccacatcaagctgacagactttggcctgagcaaggaggccatcgaccacgagaagaaggcctacagcttctgtggcaccgtggagtacatggcccctgaggtggtgaaccggcagggccacagccacagcgctgactggtggagctatggagtgctgatgtttgagatgctgaccggcagcctgcccttccagggcaaggacaggaaggagaccatgaccctcatcctgaaggccaagctgggcatgccccagttcctgagcacagaggcccagagcctgctgcgggccctcttcaagagaaatcctgccaaccggctgggcagcggcccagatggagctgaggagatcaagagacatgtgttctacagcaccatcgactggaacaagctgtacagaagagagatcaagccacccttcaagccagctgtggcccagccagatgacaccttctactttgacacagagttcaccagcaggacccccaaggacagccctggcatccccccatctgctggggcccaccagctgttccggggcttctcctttgtggccaccggcctgatggaggatgatggcaagccccgggccccccaggcccccctgcacagcgtggtgcagcagctgcacggcaagaacctggtgttcagtgatggctacgtggtgaaggagaccatcggcgtgggcagctacagcgagtgcaagagatgtgtgcacaaggccaccaacatggagtatgctgtgaaggtgattgacaagagcaagagggaccccagcgaggagattgagatcctgctgcgctatggccagcaccccaacatcatcaccctgaaggatgtgtatgatgatggcaagcacgtgtacctggtgacagagctgatgaggggcggggagctgctggacaagatcctgcggcagaagttcttcagcgagcgggaggccagctttgtgctgcacaccatcggcaagacagtggagtacctgcacagccagggcgtggtgcaccgggacctgaagcccagcaacatcctgtatgtggatgaaagtggcaacccagaatgtctgcgcatctgtgactttggatttgccaagcagctgcgggcagaaaatggcctgctgatgaccccctgctacacagccaactttgtggcccctgaggtgctgaagaggcagggctatgatgagggctgtgacatctggagcctgggcatcctgctgtacaccatgctggccggctacaccccatttgccaacggccccagcgacaccccagaggagatcctgaccagaattggcagcggcaagttcaccctgagcggcggcaactggaacacagtgtctgaaacagccaaggacctggtgtccaagatgctgcacgtggacccccaccagaggctgacagccaagcaggtgctgcagcacccctgggtgacccagaaggacaagctgccccagagccagctgagccaccaggacctgcagctggtgaagggggccatggccgccacctacagcgccctgaacagcagcaagcccaccccccagctgaagcccatcgagagcagcatcctggcccagaggagagtgaggaagctgcccagcaccaccctgtag

SEQ ID NO: 21702 - DNA, 501 bp, synthetic construct
  misc_feature 1..501: note = Description of Artificial Sequence: Synthetic coding sequence
  source 1..501: mol_type = other DNA
gcccagccagatgacaccttctactttgacacagagttcaccagcaggacccccaaggacagccctggcatccccccatctgctggggcccaccagctgttccggggcttctcctttgtggccaccggcctgatggaggatgatggcaagccccgggccccccaggcccccctgcacagcgtggtgcaggtgattgacaagagcaagagggaccccagcgaggagattgagatcctgctgcgctatggccagcaccccaacatcatcaccctgaaggatgtgtatgatgatggcaagcacgtgtacctggtgacagagctgatgaggggcggggagctgctggacaagatcctgcggcagaagttcttcagcgagcgggaggccagctttgtgctgcacaccatcggcaagacagtggagtacctgcacagccagggcgtggtgcaccgggacctgaagcccagcaacatcctgtatgtggatgaaagtggcaacccctag

SEQ ID NO: 21703 - DNA, 2160 bp, synthetic construct
  misc_feature 1..2160: note = Description of Artificial Sequence: Synthetic coding sequence
  source 1..2160: mol_type = other DNA
atgcagaccccagctgacttcccccgggtggagcgggacctggtgccctgccccaggaaggatgaaggagtgctgaaggagatcagcatcacccaccacgtgaaggccggcagcgagaaggctgaccccagccactttgagctgctgaaggtgctgggccagggcagctttgggaaggtgttcctggtgaggaaggtgaccaggccagattctggccacctgtatgccatgaaggtgctgaagaaggccaccctgaaggtgcgggacagagtgaggaccaagatggagcgggacatcctggctgatgtgaaccacccctttgtggtgaagctgcactacgccttccagacagagggcaagctgtacctgatcctggacttcctgcggggcggggacctcttcacccggctgagcaaggaggtgatgttcacagaggaggatgtgaagttctacctggccgagctggccctgggcctggaccacctgcacagcctgggcatcatctacagagacctgaagccagagaacatcctgctggatgaggagggccacatcaagctgacagactttggcctgagcaaggaggccatcgaccacgagaagaaggcctacagcttctgtggcaccgtggagtacatggcccctgaggtggtgaaccggcagggccacagccacagcgctgactggtggagctatggagtgctgatgtttgagatgctgaccggcagcctgcccttccagggcaaggacaggaaggagaccatgaccctcatcctgaaggccaagctgggcatgccccagttcctgagcacagaggcccagagcctgctgcgggccctcttcaagagaaatcctgccaaccggctgggcagcggcccagatggagctgaggagatcaagagacatgtgttctacagcaccatcgactggaacaagctgtacagaagagagatcaagccacccttcaagccagctgtggcccagccagatgacaccttctactttgacacagagttcaccagcaggacccccaaggacagccctggcatccccccatctgctggggcccaccagctgttccggggcttctcctttgtggccaccggcctgatggaggatgatggcaagccccgggccccccaggcccccctgcacagcgtggtgcagcagctgcacggcaagaacctggtgttcagtgatggctacgtggtgaaggagaccatcggcgtgggcagctacagcgagtgcaagagatgtgtgcacaaggccaccaacatggagtatgctgtgaaggtgattgacaagagcaagagggaccccagcgaggagattgagatcctgctgcgctatggccagcaccccaacatcatcaccctgaaggatgtgtatgatgatggcaagcacgtgtacctggtgacagagctgatgaggggcggggagctgctggacaagatcctgcggcagaagttcttcagcgagcgggaggccagctttgtgctgcacaccatcggcaagacagtggagtacctgcacagccagggcgtggtgcaccgggacctgaagcccagcaacatcctgtatgtggatgaaagtggcaacccagaatgtctgcgcatctgtgactttggatttgccaagcagctgcgggcagaaaatggcctgctgatgaccccctgctacacagccaactttgtggcccctgaggtgctgaagaggcagggctatgatgagggctgtgacatctggagcctgggcatcctgctgtacaccatgctggccggctacaccccatttgccaacggccccagcgacaccccagaggagatcctgaccagaattggcagcggcaagttcaccctgagcggcggcaactggaacacagtgtctgaaacagccaaggacctggtgtccaagatgctgcacgtggacccccaccagaggctgacagccaagcaggtgctgcagcacccctgggtgacccagaaggacaagctgccccagagccagctgagccaccaggacctgcagctggtgaagggggccatggccgccacctacagcgccctgaacagcagcaagcccaccccccagctgaagcccatcgagagcagcatcctggcccagaggagagtgaggaagctgcccagcaccaccctgtag

SEQ ID NO: 21704 - DNA, 2202 bp, synthetic construct
  misc_feature 1..2202: note = Description of Artificial Sequence: Synthetic coding sequence
  source 1..2202: mol_type = other DNA
atggacctgtccatgaagaagtttgctgtgcggcgcttcttctctgtgtacctgcggaggaagagccgcagcaagagcagcagcctgagccggctggaggaggagggcgtggtgaaggagattgacatcagccaccacgtgaaggagggctttgagaaggctgaccccagccagtttgagctgctgaaggtgctgggccagggcagctatggcaaggtgttcctggtgaggaaggtgaagggcagtgatgctggccagctgtatgccatgaaggtgctgaagaaggccaccctgaaggtgcgggacagagtgcgcagcaagatggagcgggacatcctggccgaggtgaaccaccccttcatcgtgaagctgcactacgccttccagacagagggcaagctgtacctgatcctggacttcctgcggggcggggacctcttcacccggctgagcaaggaggtgatgttcacagaagaagatgtgaagttctacctggccgagctggccctggccctggaccacctgcacagcctgggcatcatctacagagacctgaagccagagaacatcctgctggatgaggagggccacatcaagatcacagactttggcctgagcaaggaggccatcgaccatgacaagagggcctacagcttctgtggcaccatcgagtacatggcccctgaggtggtgaacagaagaggccacacccagagcgctgactggtggagctttggagtgctgatgtttgagatgctgaccggcagcctgcccttccagggcaaggacaggaaggagaccatggccctgatcctgaaggccaagctgggcatgccccagttcctgtctggagaggcccagagcctgctgcgggccctcttcaagaggaacccctgcaaccggctgggcgccggcattgatggagtggaggagatcaagaggcaccccttctttgtgaccatcgactggaacaccctgtacaggaaggagatcaagccacccttcaagccagctgtgggccggcctgaggacaccttccactttgatcctgagttcaccgcccggacccccacagacagccctggggtgccccccagcgccaatgcccaccacctgttccggggcttctcctttgtggccagcagcctcatccaggagcccagccagcaggacctgcacaaggtgcctgtgcaccccatcgtgcagcagctgcacggcaacaacatccacttcacagatggctatgagatcaaggaggacattggagtgggcagctacagcgtgtgcaagagatgtgtgcacaaggccacagacacagaatatgctgtgaagatcatcgacaagagcaagagggaccccagcgaggagattgagatcctgctgcgctatggccagcaccccaacatcatcaccctgaaggatgtgtatgatgatggcaagtttgtgtacctggtgatggagctgatgagaggaggagagctgctggaccgcatcctgcggcagcgctacttcagcgagcgggaggccagtgatgtgctgtgcaccatcaccaagaccatggactacctgcacagccagggcgtggtgcaccgggacctgaagcccagcaacatcctgtacagagatgagagcggcagccctgagagcatccgggtgtgtgactttggatttgccaagcagctgcgggctggaaatggcctgctgatgaccccctgctacacagccaactttgtggcccctgaggtgctgaagaggcagggctatgatgctgcctgtgacatctggagcctgggcatcctgctgtacaccatgctggccggcttcaccccatttgccaatggaccagatgacaccccagaggagatcctggcccgcatcggcagcggcaagtatgccctgagcggcggcaactgggacagcatcagtgatgctgccaaggatgtggtgtccaagatgctgcacgtggacccccaccagaggctgacagccatgcaggtgctgaagcacccctgggtggtgaaccgggagtacctgagccccaaccagctgagccggcaggatgtgcacctggtgaagggggccatggccgccacctactttgccctgaacagaacaccccaggccccccggctggagcctgtgctgagcagcaacctggcccagaggcggggcatgaagaggctgaccagcacccggctgtag

SEQ ID NO: 21705 - DNA, 501 bp, synthetic construct
  misc_feature 1..501: note = Description of Artificial Sequence: Synthetic coding sequence
  source 1..501: mol_type = other DNA
atgttcacagaagaagatgtgaagttctacctggccgagctggccctggccctggaccacctgcacagcctgggcatcatctacagagacctgaagccagagaacatcctgctggatgaggagggccacatcaagatcacagactttggcctgagcaaggaggccatcgaccatgacaagagggcctacagcttctgtggcaccatcgagtacatggcccctgaggtggtgaacagaagaggccacacccagagcgctgactggtggagctttggagtgctgatgtttgagatgctgaccggcagcctgcccttccagggcaaggacaggaaggagaccatggccctgatcctgaaggccaagctgggcatgccccagttcctgtctggagaggcccagagcctgctgcgggccctcttcaagaggaacccctgcaaccggctgggggagaagacagccctgtgcccccgggtgtcctgcagccggctgctgggcttctag

SEQ ID NO: 21706 - DNA, 1935 bp, synthetic construct
  misc_feature 1..1935: note = Description of Artificial Sequence: Synthetic coding sequence
  source 1..1935: mol_type = other DNA
atgaaggtgctgaagaaggccaccctgaaggtgcgggacagagtgcgcagcaagatggagcgggacatcctggccgaggtgaaccaccccttcatcgtgaagctgcactacgccttccagacagagggcaagctgtacctgatcctggacttcctgcggggcggggacctcttcacccggctgagcaaggaggtgatgttcacagaggaggatgtgaagttctacctggccgagctggccctggccctggaccacctgcacagcctgggcatcatctacagagacctgaagccagagaacatcctgctggatgaggagggccacatcaagatcacagactttggcctgagcaaggaggccatcgaccatgacaagagggcctacagcttctgtggcaccatcgagtacatggcccctgaggtggtgaacagaagaggccacacccagagcgctgactggtggagctttggagtgctgatgtttgagatgctgaccggcagcctgcccttccagggcaaggacaggaaggagaccatggccctgatcctgaaggccaagctgggcatgccccagttcctgagcggggaggcccagagcctgctgcgggccctcttcaagaggaacccctgcaaccggctgggcgccggcattgatggagtggaggagatcaagaggcaccccttctttgtgaccatcgactggaacaccctgtacaggaaggagatcaagccacccttcaagccagctgtgggccggcctgaggacaccttccactttgatcctgagttcaccgcccggacccccacagacagccctggggtgcccccatctgccaatgcccaccacctgttccggggcttctcctttgtggccagcagcctcatccaggagcccagccagcaggacctgcacaaggtgcctgtgcaccccatcgtgcagcagctgcacggcaacaacatccacttcacagatggctatgagatcaaggaggacatcggcgtgggcagctacagcgtgtgcaagagatgtgtgcacaaggccacagacacagaatatgctgtgaagatcatcgacaagagcaagagggaccccagcgaggagattgagatcctgctgcgctatggccagcaccccaacatcatcaccctgaaggatgtgtatgatgatggcaagtttgtgtacctggtgatggagctgatgaggggcggggagctgctggaccgcatcctgcggcagcgctacttcagcgagcgggaggccagtgatgtgctgtgcaccatcaccaagaccatggactacctgcacagccagggcgtggtgcaccgggacctgaagcccagcaacatcctgtacagagatgaaagtggcagccctgagagcatccgggtgtgtgactttggatttgccaagcagctgcgggctggaaatggcctgctgatgaccccctgctacacagccaactttgtggcccctgaggtgctgaagaggcagggctatgatgctgcctgtgacatctggagcctgggcatcctgctgtacaccatgctggccggcttcaccccatttgccaacggcccagatgacaccccagaggagatcctggccagaattggcagcggcaagtatgccctgagcggcggcaactgggacagcatcagtgatgctgccaaggatgtggtgtccaagatgctgcacgtggacccccaccagaggctgacagccatgcaggtgctgaagcacccctgggtggtgaaccgggagtacctgagccccaaccagctgagccggcaggatgtgcacctggtgaagggggccatggccgccacctactttgccctgaacagaacaccccaggccccccggctggagcctgtgctgagcagcaacctggcccagaggcggggcatgaagaggctgaccagcacccggctgtag

SEQ ID NO: 21707 - DNA, 1935 bp, synthetic construct; identical to SEQ ID NO: 21706
  misc_feature 1..1935: note = Description of Artificial Sequence: Synthetic coding sequence
  source 1..1935: mol_type = other DNA

SEQ ID NO: 21708 - DNA, 2226 bp, synthetic construct
  misc_feature 1..2226: note = Description of Artificial Sequence: Synthetic coding sequence
  source 1..2226: mol_type = other DNA
atgcccatcgcccagctgctggagctgtggaagaagattgaggtggagcccatggagattgagaccacagaggaggacctgaacctggatgtggagcccaccacagaggacacagctgaggaggaggagggcgtggtgaaggagattgacatcagccaccacgtgaaggagggctttgagaaggctgaccccagccagtttgagctgctgaaggtgctgggccagggcagctatggcaaggtgttcctggtgaggaaggtgaagggcagtgatgctggccagctgtatgccatgaaggtgctgaagaaggccaccctgaaggtgcgggacagagtgcgcagcaagatggagcgggacatcctggccgaggtgaaccaccccttcatcgtgaagctgcactacgccttccagacagagggcaagctgtacctgatcctggacttcctgcggggcggggacctcttcacccggctgagcaaggaggtgatgttcacagaagaagatgtgaagttctacctggccgagctggccctggccctggaccacctgcacagcctgggcatcatctacagagacctgaagccagagaacatcctgctggatgaggagggccacatcaagatcacagactttggcctgagcaaggaggccatcgaccatgacaagagggcctacagcttctgtggcaccatcgagtacatggcccctgaggtggtgaacagaagaggccacacccagagcgctgactggtggagctttggagtgctgatgtttgagatgctgaccggcagcctgcccttccagggcaaggacaggaaggagaccatggccctgatcctgaaggccaagctgggcatgccccagttcctgtctggagaggcccagagcctgctgcgggccctcttcaagaggaacccctgcaaccggctgggcgccggcattgatggagtggaggagatcaagaggcaccccttctttgtgaccatcgactggaacaccctgtacaggaaggagatcaagccacccttcaagccagctgtgggccggcctgaggacaccttccactttgatcctgagttcaccgcccggacccccacagacagccctggggtgccccccagcgccaatgcccaccacctgttccggggcttctcctttgtggccagcagcctcatccaggagcccagccagcaggacctgcacaaggtgcctgtgcaccccatcgtgcagcagctgcacggcaacaacatccacttcacagatggctatgagatcaaggaggacattggagtgggcagctacagcgtgtgcaagagatgtgtgcacaaggccacagacacagaatatgctgtgaagatcatcgacaagagcaagagggaccccagcgaggagattgagatcctgctgcgctatggccagcaccccaacatcatcaccctgaaggatgtgtatgatgatggcaagtttgtgtacctggtgatggagctgatgagaggaggagagctgctggaccgcatcctgcggcagcgctacttcagcgagcgggaggccagtgatgtgctgtgcaccatcaccaagaccatggactacctgcacagccagggcgtggtgcaccgggacctgaagcccagcaacatcctgtacagagatgagagcggcagccctgagagcatccgggtgtgtgactttggatttgccaagcagctgcgggctggaaatggcctgctgatgaccccctgctacacagccaactttgtggcccctgaggtgctgaagaggcagggctatgatgctgcctgtgacatctggagcctgggcatcctgctgtacaccatgctggccggcttcaccccatttgccaatggaccagatgacaccccagaggagatcctggcccgcatcggcagcggcaagtatgccctgagcggcggcaactgggacagcatcagtgatgctgccaaggatgtggtgtccaagatgctgcacgtggacccccaccagaggctgacagccatgcaggtgctgaagcacccctgggtggtgaaccgggagtacctgagccccaaccagctgagccggcaggatgtgcacctggtgaagggggccatggccgccacctactttgccctgaacagaacaccccaggccccccggctggagcctgtgctgagcagcaacctggcccagaggcggggcatgaagaggctgaccagcacccggctgtag

SEQ ID NO: 21709 - DNA, 516 bp, synthetic construct
  misc_feature 1..516: note = Description of Artificial Sequence: Synthetic coding sequence
  source 1..516: mol_type = other DNA
atgcccatcgcccagctgctggagctgtggaagaagattgaggtggagcccatggagattgagaccacagaggaggacctgaacctggatgtggagcccaccacagaggacacagctgaggagggcaagagtgacagcgctgcctgcaagaccaaggtggccggctctgtggaggaggagggcgtggtgaaggagattgacatcagccaccacgtgaaggagggctttgagaaggctgaccccagccagtttgagctgctgaaggtgctgggccagggcagctatggcaaggtgttcctggtgaggaaggtgaagggcagtgatgctggccagctgtatgccatgaaggtgctgaagaaggccaccctgaaggtgcgggacagagtgcgcagcaagatggagcgggacatcctggccgaggtgaaccaccccttcatcgtgaagctgcactacgccttccagacagagggcaagctgtacctgatcctggacttcctgcggggcggggacctgtag

SEQ ID NO: 21710 - DNA, 2277 bp, synthetic construct
  misc_feature 1..2277: note = Description of Artificial Sequence: Synthetic coding sequence
  source 1..2277: mol_type = other DNA
atgcccatcgcccagctgctggagctgtggaagaagattgaggtggagcccatggagattgagaccacagaggaggacctgaacctggatgtggagcccaccacagaggacacagctgaggagggcaagagtgacagcgctgcctgcaagaccaaggtggccggctctgtggaggaggagggcgtggtgaaggagattgacatcagccaccacgtgaaggagggctttgagaaggctgaccccagccagtttgagctgctgaaggtgctgggccagggcagctatggcaaggtgttcctggtgaggaaggtgaagggcagtgatgctggccagctgtatgccatgaaggtgctgaagaaggccaccctgaaggtgcgggacagagtgcgcagcaagatggagcgggacatcctggccgaggtgaaccaccccttcatcgtgaagctgcactacgccttccagacagagggcaagctgtacctgatcctggacttcctgcggggcggggacctcttcacccggctgagcaaggaggtgatgttcacagaggaggatgtgaagttctacctggccgagctggccctggccctggaccacctgcacagcctgggcatcatctacagagacctgaagccagagaacatcctgctggatgaggagggccacatcaagatcacagactttggcctgagcaaggaggccatcgaccatgacaagagggcctacagcttctgtggcaccatcgagtacatggcccctgaggtggtgaacagaagaggccacacccagagcgctgactggtggagctttggagtgctgatgtttgagatgctgaccggcagcctgcccttccagggcaaggacaggaaggagaccatggccctgatcctgaaggccaagctgggcatgccccagttcctgagcggggaggcccagagcctgctgcgggccctcttcaagaggaacccctgcaaccggctgggcgccggcattgatggagtggaggagatcaagaggcaccccttctttgtgaccatcgactggaacaccctgtacaggaaggagatcaagccacccttcaagccagctgtgggccggcctgaggacaccttccactttgatcctgagttcaccgcccggacccccacagacagccctggggtgcccccatctgccaatgcccaccacctgttccggggcttctcctttgtggccagcagcctcatccaggagcccagccagcaggacctgcacaaggtgcctgtgcaccccatcgtgcagcagctgcacggcaacaacatccacttcacagatggctatgagatcaaggaggacatcggcgtgggcagctacagcgtgtgcaagagatgtgtgcacaaggccacagacacagaatatgctgtgaagatcatcgacaagagcaagagggaccccagcgaggagattgagatcctgctgcgctatggccagcaccccaacatcatcaccctgaaggatgtgtatgatgatggcaagtttgtgtacctggtgatggagctgatgaggggcggggagctgctggaccgcatcctgcggcagcgctacttcagcgagcgggaggccagtgatgtgctgtgcaccatcaccaagaccatggactacctgcacagccagggcgtggtgcaccgggacctgaagcccagcaacatcctgtacagagatgaaagtggcagccctgagagcatccgggtgtgtgactttggatttgccaagcagctgcgggctggaaatggcctgctgatgaccccctgctacacagccaactttgtggcccctgaggtgctgaagaggcagggctatgatgctgcctgtgacatctggagcctgggcatcctgctgtacaccatgctggccggcttcaccccatttgccaacggcccagatgacaccccagaggagatcctggccagaattggcagcggcaagtatgccctgagcggcggcaactgggacagcatcagtgatgctgccaaggatgtggtgtccaagatgctgcacgtggacccccaccagaggctgacagccatgcaggtgctgaagcacccctgggtggtgaaccgggagtacctgagccccaaccagctgagccggcaggatgtgcacctggtgaagggggccatggccgccacctactttgccctgaacagaacaccccaggccccccggctggagcctgtgctgagcagcaacctggcccagaggcggggcatgaagaggctgaccagcacccggctgtag

SEQ ID NO: 21711 - DNA, 888 bp, synthetic construct
  misc_feature 1..888: note = Description of Artificial Sequence: Synthetic coding sequence
  source 1..888: mol_type = other DNA
atgtctggggccctggatgtgctgcagatgaaggaggaggatgtgctgaagttcctggccgccggcacccacctgggcggcaccaacctggacttccagatggagcagtacatctacaagaggaagagtgatggcatctacatcatcaacctgaagaggacctgggagaagctgctgctggccgcccgggccatcgtggccattgaaaatccagcagatgtgtctgtcatcagcagcaggaacacaggccagagagctgtgctgaagtttgctgctgccaccggggccacccccatcgccggccgcttcaccccaggcaccttcaccaaccagatccaggccgccttccgggagccccggctgctggtggtgacagaccccagggctgaccaccagcccctgacagaggccagctatgtgaacctgcccaccatcgccctgtgcaacacagacagccccctgcgctacgtggacatcgccatcccctgcaacaacaagggggcccacagcgtgggcctgatgtggtggatgctggcccgggaggtgctgaggatgaggggcaccatcagccgggagcacccctgggaggtgatgccagacctgtacttctacagagatcctgaggagattgagaaggaggagcaggccgctgctgagaaggctgtgaccaaggaggagttccagggcgagtggacagccccagcccctgagttcaccgccacccagcctgaggtggccgactggagcgagggcgtgcaggtgcccagcgtgcccatccagcagttccccacagaggactggagcgcccagcctgccacagaggactggagcgctgcccccacagcccaggccacagagtgggtgggcgccaccacagactggagctag

SEQ ID NO: 21712 - DNA, 795 bp, synthetic construct
  misc_feature 1..795: note = Description of Artificial Sequence: Synthetic coding sequence
  source 1..795: mol_type = other DNA
atgtctggggccctggatgtgctgcagatgaaggaggaggatgtgctgaagttcctggccgccggcacccacctgggcggcaccaacctggacttccagatggagcagtacatctacaagaggaagagtgatggcatctacatcatcaacctgaagaggacctgggagaagctgctgctggccgcccgggccatcgtggccattgaaaatccagcagatgtgtctgtcatcagcagcaggaacacaggccagagagctgtgctgaagtttgctgctgccaccggggccacccccatcgccggccgcttcaccccaggcaccttcaccaaccagatccaggccgccttccgggagccccggctgctggtggtgacagaccccagggctgaccaccagcccctgacagaggccagctatgtgaacctgcccaccatcgccctgtgcaacacagacagccccctgcgctacgtggacatcgccatcccctgcaacaacaagggggcccacagcgtgggcctgatgtggtggatgctggcccgggaggtgctgaggatgaggggcaccatcagccgggagcacccctgggaggtgatgccagacctgtacttctacagagatcctgaggagattgagaaggaggagcaggccgctgctgagaaggctgtgaccaaggaggagttccagggcgagtggacagccccagcccctgagttcaccgccacccagcctgaggtggccgactggagcgagggcgtgcaggtgcccagcgtgcccatccagcagttccccacctag

SEQ ID NO: 21713 - DNA, 1458 bp, synthetic construct
  misc_feature 1..1458: note = Description of Artificial Sequence: Synthetic coding sequence
  source 1..1458: mol_type = other DNA
atgggagagcccggcttctttgtgactggagacagagctgggggccgctcctggtgcctgcggcgggtgggcatgtctgctggctggctgctgctggaggatggctgtgaggtgacagtgggccggggcttcggcgtgacctaccagctggtgtccaagatctgccccctgatgatcagcaggaaccactgtgtgctgaagcagaaccctgagggccagtggaccatcatggacaacaagagcctgaatggagtgtggctgaacagagcccggctggagcccctgcgggtgtacagcatccaccagggcgactacatccagctgggcgtgcccctggagaacaaggaaaatgcagaatatgaatatgaggtgacagaggaggactgggagaccatctacccctgcctgagccccaagaatgaccagatgattgagaagaacaaggagctgcggaccaagaggaagttcagcctggatgagctggccggccctggagctgagggccccagcaacctgaagagcaagatcaacaaggtgtcctgtgagagcggccagcctgtgaagagccagggcaagggggaggtggccagcacccccagcgacaacctggaccccaagctgacagccctggagcccagcaagaccaccggggcccccatctacccaggcttccccaaggtgacagaggtgcaccacgagcagaaggccagcaacagcagcgccagccagaggagcctgcagatgttcaaggtgaccatgagccgcatcctgcggctgaagatccagatgcaggagaagcatgaagctgtgatgaatgtgaagaagcagacccagaagggcaacagcaagaaggtggtgcagatggagcaggagctgcaggacctgcagagccagctgtgtgccgagcaggcccagcagcaggcccgggtggagcagctggagaagaccttccaggaggaggagcagcacctgcagggcctggagatcgcccagggcgagaaggacctgaagcagcagctggcccaggccctgcaggagcactgggccctgatggaggagctgaacagaagcaagaaggactttgaggccatcatccaggccaagaacaaggagctggagcagaccaaggaggagaaggagaagatgcaggcccagaaggaggaggtgctgagccacatgaatgatgtgctggagaatgagctgcagtgcatcatctgcagcgagtacttcattgaagctgtgaccctgaactgtgcccacagcttctgcagctactgcatcaatgagtggatgaagaggaagattgagtgccccatctgcaggaaggacatcaagagcaagacctacagcctggtgctggacaactgcatcaacaagatggtgaacaacctgagcagcgaggtgaaggagaggagaattgtgctgatccgggagaggaaggccaagaggctcttctag

SEQ ID NO: 21714 - DNA, 297 bp, synthetic construct
  misc_feature 1..297: note = Description of Artificial Sequence: Synthetic coding sequence
  source 1..297: mol_type = other DNA
atgggagagcccggcttctttgtgactggagacagagctgggggccgctcctggtgcctgcggcgggtgggcatgtctgctggctggctgctgctggaggatggctgtgaggtgacagtgggccggggcttcggcgtgacctaccagctggtgtccaagatctgccccctgatgatcagcaggaaccactgtgtgctgaagcagaaccctgagggccagtggaccatcatggacaacaagagcttccccagcgagaaggccgaggacttcaccgctgctggggagcgcttcctgtag

SEQ ID NO: 21715 - DNA, 1347 bp, synthetic construct
  misc_feature 1..1347: note = Description of Artificial Sequence: Synthetic coding sequence
  source 1..1347: mol_type = other DNA
atgggagagcccggcttctttgtgactggagacagagctgggggccgctcctggtgcctgcggcgggtgggcatgtctgctggctggctgctgctggaggatggctgtgaggtgacagtgggccggggcttcggcgtgacctaccagctggtgtccaagatctgccccctgatgatcagcaggaaccactgtgtgctgaagcagaaccctgagggccagtggaccatcatggacaacaagagcctgaatggagtgtggctgaacagagcccggctggagcccctgcgggtgtacagcatccaccagggcgactacatccagctgggcgtgcccctggagaacaaggaaaatgcagaatatgaatatgaggtgacagaggaggactgggagaccatctacccctgcctgagccccaagaatgaccagatgattgagaagaacaaggagctgcggaccaagaggaagttcagcctggatgagctggccggccctggagctgagggccccagcaacctgaagagcaagatcaacaaggtgtcctgtgagagcggccagcctgtgaagagccagggcaagggggaggtggccagcacccccagcgacaacctggaccccaagctgacagccctggagcccagcaagaccaccggggcccccatctacccaggcttccccaaggtgacagaggtgcaccacgagcagaaggccagcaacagcagcgccagccagaggagcctgcagatgttcaaggtgaccatgagccgcatcctgcggctgaagatccagatgcaggagaagcatgaagctgtgatgaatgtgaagaagcagacccagaagggcaacagcaagaaggtggtgcagatggagcaggagctgcaggacctgcagagccagctgtgtgccgagcaggcccagcagcaggcccgggtggagcagctggagaagaccttccaggaggaggagcagcacctgcagggcctggagatcgcccagggcgagaaggacctgaagcagcagctggcccaggccctgcaggagcactgggccctgatggaggagctgaacagaagcaagaaggactttgaggccatcatccaggccaagaacaaggagctggagcagaccaaggaggagaaggagaagatgcaggcccagaaggaggaggtgctgagccacatgaatgatgtgctggagaatgagctgcagtgcatcatctgcagcgagtacttcatcgagcagagggactgcagcgaggaccgggccctgcgggcctttgagcggctgcccggcagcgccagcctgcgctggagcggcggcttcagcctggccgtgacccccctgctgtag

SEQ ID NO: 21716 - DNA, 1593 bp, synthetic construct
  misc_feature 1..1593: note = Description of Artificial Sequence: Synthetic coding sequence
  source 1..1593: mol_type = other DNA
atggctgatgacattgatattgaggccatgctggaggccccctacaagaaggatgagaacaagctgagcagcgccaacggccacgaggagaggagcaagaagaggaagaagagcaagagccgcagccgcagccatgagaggaagaggagcaagagcaaggagaggaagaggagccgggaccgggagaggaagaagagcaagagccgggagaggaagaggagccgcagcaaggagcggcggcgcagccgcagccgcagccgggaccggcgcttccggggccgctaccgcagcccctacagcggccccaagttcaacagcgccatccggggcaagattggcctgccccacagcatcaagctgagcagaagaagaagccgcagcaagagccccttcaggaaggacaagagccctgtgcgggagcccatcgacaacctgaccccagaggagagagatgccaggacagtgttctgcatgcagctggccgcccgcatccggccccgggacctggaggagttcttcagcacagtgggcaaggtgagagatgtgaggatgatcagtgacaggaacagcagaagaagcaagggcatcgcctacgtggagtttgtggatgtgtcctctgtgcccctggccatcggcctgaccggccagagggtgctgggcgtgcccatcatcgtgcaggccagccaggccgagaagaacagagctgctgccatggccaacaacctgcagaagggcagcgctggccccatgaggctgtatgtgggcagcctgcacttcaacatcacagaggacatgctgcggggcatctttgagcccttcggccgcatcgagagcatccagctgatgatggattctgaaacaggccgcagcaagggctacggcttcatcaccttcagtgacagtgaatgtgccaagaaggccctggagcagctgaatggatttgagctggccggccggcccatgaaggtgggccacgtgacagagaggacagatgccagcagcgccagcagcttcctggacagtgatgagctggagaggactggaattgacctgggcaccaccggccgcctgcagctgatggcccggctggccgagggcaccggcctgcagatccccccagctgcccagcaggccctgcagatgagcggcagcctggcctttggagctgtggccgagttctcctttgtgattgacctgcagacccggctgagccagcagacagaggccagcgccctggccgctgctgcctctgtgcagcccctggccacccagtgcttccagctgagcaacatgttcaacccccagacagaggaggaggtgggctgggacacagagatcaaggatgatgtgattgaggagtgcaacaagcatggaggagtcatccacatctacgtggacaagaacagcgcccagggcaatgtgtatgtgaagtgccccagcattgctgctgccatcgctgctgtgaatgccctgcacggccgctggtttgctgggaagatgatcacagctgcctacgtgcccctgcccacctaccacaacctcttcccagacagcatgacagccacccagctgctggtgcccagcagaagatag

SEQ ID NO: 21717 - DNA, 1272 bp, synthetic construct
  misc_feature 1..1272: note = Description of Artificial Sequence: Synthetic coding sequence
  source 1..1272: mol_type = other DNA
atggctgatgacattgatattgaggccatgctggaggccccctacaagaaggatgagaacaagctgagcagcgccaacggccacgaggagaggagcaagaagaggaagaagagcaagagccgcagccgcagccatgagaggaagaggagcaagagcaaggagaggaagaggagccgggaccgggagaggaagaagagcaagagccgggagaggaagaggagccgcagcaaggagcggcggcgcagccgcagccgcagccgggaccggcgcttccggggccgctaccgcagcccctacagcggccccaagttcaacagcgccatccggggcaagattggcctgccccacagcatcaagctgagcagaagaagaagccgcagcaagagccccttcaggaaggacaagagccctgtgcgggagcccatcgacaacctgaccccagaggagagagatgccaggacagtgttctgcatgcagctggccgcccgcatccggccccgggacctggaggagttcttcagcacagtgggcaaggtgagagatgtgaggatgatcagtgacaggaacagcagaagaagcaagggcatcgcctacgtggagtttgtggatgtgtcctctgtgcccctggccatcggcctgaccggccagagggtgctgggcgtgcccatcatcgtgcaggccagccaggccgagaagaacagagctgctgccatggccaacaacctgcagaagggcagcgctggccccatgaggctgtatgtgggcagcctgcacttcaacatcacagaggacatgctgcggggcatctttgagcccttcggccgcatcgagagcatccagctgatgatggattctgaaacaggccgcagcaagggctacggcttcatcaccttcagtgacagtgaatgtgccaagaaggccctggagcagctgaatggatttgagctggccggccggcccatgaaggtgggccacgtgacagagaggacagatgccagcagcgccagcagcttcctggacagtgatgagctggagaggactggaattgacctgggcaccaccggccgcctgcagctgatggcccggctggccgagggcaccggcctgcagatccccccagctgcccagcaggccctgcagatgagcggcagcctggcctttggagctgtggccgacctgcagacccggctgagccagcagacagaggccctgtttgtgatcatgttctggaatgagatctggagcgacaacatgatcaccctgcagctgtag

SEQ ID NO: 21718 - DNA, 1575 bp, synthetic construct
  misc_feature 1..1575: note = Description of Artificial Sequence: Synthetic coding sequence
  source 1..1575: mol_type = other DNA
atggctgatgacattgatattgaggccatgctggaggccccctacaagaaggatgagaacaagctgagcagcgccaacggccacgaggagaggagcaagaagaggaagaagagcaagagccgcagccgcagccatgagaggaagaggagcaagagcaaggagaggaagaggagccgggaccgggagaggaagaagagcaagagccgggagaggaagaggagccgcagcaaggagcggcggcgcagccgcagccgcagccgggaccggcgcttccggggccgctaccgcagcccctacagcggccccaagttcaacagcgccatccggggcaagattggcctgccccacagcatcaagctgagcagaagaagaagccgcagcaagagccccttcaggaaggacaagagccctgtgcgggagcccatcgacaacctgaccccagaggagagagatgccaggacagtgttctgcatgcagctggccgcccgcatccggccccgggacctggaggagttcttcagcacagtgggcaaggtgagagatgtgaggatgatcagtgacaggaacagcagaagaagcaagggcatcgcctacgtggagtttgtggatgtgtcctctgtgcccctggccatcggcctgaccggccagagggtgctgggcgtgcccatcatcgtgcaggccagccaggccgagaagaacagagctgctgccatggccaacaacctgcagaagggcagcgctggccccatgaggctgtatgtgggcagcctgcacttcaacatcacagaggacatgctgcggggcatctttgagcccttcggccgcatcgagagcatccagctgatgatggattctgaaacaggccgcagcaagggctacggcttcatcaccttcagtgacagtgaatgtgccaagaaggccctggagcagctgaatggatttgagctggccggccggcccatgaaggtgggccacgtgacagagaggacagatgccagcagcgccagcagcttcctggacagtgatgagctggagaggactggaattgacctgggcaccaccggccgcctgcagctgatggcccggctggccgagggcaccggcctgcagatccccccagctgcccagcaggccctgcagatgagcggcagcctggcctttggagctgtggccgacctgcagacccggctgagccagcagacagaggccagcgccctggccgctgctgcctctgtgcagcccctggccacccagtgcttccagctgagcaacatgttcaacccccagacagaggaggaggtgggctgggacacagagatcaaggatgatgtgattgaggagtgcaacaagcatggaggagtcatccacatctacgtggacaagaacagcgcccagggcaatgtgtatgtgaagtgccccagcattgctgctgccatcgctgctgtgaatgccctgcacggccgctggtttgctgggaagatgatcacagctgcctacgtgcccctgcccacctaccacaacctcttcccagacagcatgacagccacccagctgctggtgcccagcagaagatag

SEQ ID NO: 21719 - DNA, 696 bp, synthetic construct
  misc_feature 1..696: note = Description of Artificial Sequence: Synthetic coding sequence
  source 1..696: mol_type = other DNA
atggctgatgacattgatattgaggccatgctggaggccccctacaagaaggatgagaacaagctgagcagcgccaacggccacgaggagaggagcaagaagaggaagaagagcaagagccgcagccgcagccatgagaggaagaggagcaagagcaaggagaggaagaggagccgggaccgggagaggaagaagagcaagagccgggagaggaagaggagccgcagcaaggagcggcggcgcagccgcagccgcagccgggaccggcgcttccggggccgctaccgcagcccctacagcggccccaagttcaacagcgccatccggggcaagattggcctgccccacagcatcaagctgcggcggcgcagccgcagcaagagccccttcaggaaggacaagagccctgtgcgggagcccatcgacaacctgaccccagaggagagagatgccaggacagtgttctgcatgcagctggccgcccgcatccggccccgggacctggaggagttcttcagcacagtgggcaaggtgagagatgtgaggatgatcagtgacaggaacagccgccgcagcaaaggaattgcctacgtggagtttgtggatgtgtcctctgtgcccctggccatcggcctgaccggccagagggtgctgggcgtgcccatcatcgtgcaggccagccaggccgagaagtag

SEQ ID NO: 21720 - DNA, 1122 bp, synthetic construct
  misc_feature 1..1122: note = Description of Artificial Sequence: Synthetic coding sequence
  source 1..1122: mol_type = other DNA
atgcagctggccgcccgcatccggccccgggacctggaggagttcttcagcacagtgggcaaggtgagagatgtgaggatgatcagtgacaggaacagccgccgcagcaaaggaattgcctacgtggagtttgtggatgtgtcctctgtgcccctggccatcggcctgaccggccagagggtgctgggcgtgcccatcatcgtgcaggccagccaggccgagaagaacagagctgctgccatggccaacaacctgcagaagggcagcgctggccccatgaggctgtatgtgggcagcctgcacttcaacatcacagaggacatgctgcggggcatctttgagcccttcggcagaattgagagcatccagctgatgatggacagcgagaccggccgcagcaagggctacggcttcatcaccttcagtgacagtgaatgtgccaagaaggccctggagcagctgaatggatttgagctggccggccggcccatgaaggtgggccacgtgacagagaggacagatgccagcagcgccagcagcttcctggacagtgatgagctggagaggacaggcatcgacctgggcaccaccggccgcctgcagctgatggcccggctggccgagggcaccggcctgcagatccccccagctgcccagcaggccctgcagatgagcggcagcctggccttcggggctgtggccgagttctcctttgtgattgacctgcagacccggctgagccagcagacagaggccagcgccctggccgccgccgcctctgtgcagcccctggccacccagtgcttccagctgagcaacatgttcaacccccagacagaggaggaggtgggctgggacacagagatcaaggatgatgtgattgaggagtgcaacaagcacggcggcgtcatccacatctacgtggacaagaacagcgcccagggcaatgtgtatgtgaagtgccccagcattgctgctgccatcgctgctgtgaatgccctgcacggccgctggtttgctgggaagatgatcacagctgcctacgtgcccctgcccacctaccacaacctcttcccagacagcatgacagccacccagctgctggtgcccagcagaagatag

SEQ ID NO: 21721 - DNA, 582 bp, synthetic construct
  misc_feature 1..582: note = Description of Artificial Sequence: Synthetic coding sequence
  source 1..582: mol_type = other DNA
atggctgatgacattgatattgaggccatgctggaggccccctacaagaaggatgagaacaagctgagcagcgccaacggccacgaggagaggagcaagaagaggaagaagagcaagagccgcagccgcagccatgagaggaagaggagcaagagcaaggagaggaagaggagccgggaccgggagaggaagaagagcaagagccgggagaggaagaggagccgcagcaaggagcggcggcgcagccgcagccgcagccgggaccggcgcttccggggccgctaccgcagcccctacagcggccccaagttcaacagcgccatccggggcaagattggcctgccccacagcatcaagctgagcagaagaagaagccgcagcaagagccccttcaggaaggacaagagccctgtgcgggagcccatcgacaacctgaccccagaggagagagatgccaggacagtgttctgcatgcagctggccgcccgcatccggccccgggacctggaggagttcttcagcacagtgggcaaggtgagagatgtgaggatgatcagtgacaggaacagcagaagaagctag

SEQ ID NO: 21722 - DNA, 1014 bp, synthetic construct
  misc_feature 1..1014: note = Description of Artificial Sequence: Synthetic coding sequence
  source 1..1014: mol_type = other DNA
tgaagccccttcaggaaggacaagagccctgtgcgggagcccatcgacaacctgaccccagaggagagagatgccaggacagtgttctgcatgcagctggccgcccgcatccggccccgggacctggaggagttcttcagcacagtgggcaaggtgagagatgtgaggatgatcagtgacaggaacagccgccgcagcaaaggaattgcctacgtggagtttgtggatgtgtcctctgtgcccctggccatcggcctgaccggccagagggtgctgggcgtgcccatcatcgtgcaggccagccaggccgagaagaacagagctgctgccatggccaacaacctgcagaagggcagcgctggccccatgaggctgtatgtgggcagcctgcacttcaacatcacagaggacatgctgcggggcatctttgagcccttcggccgcttcagtgacagtgaatgtgccaagaaggccctggagcagctgaatggatttgagctggccggccggcccatgaaggtgggccacgtgacagagaggacagatgccagcagcgccagcagcttcctggacagtgatgagctggagaggacaggcatcgacctgggcaccaccggccgcctgcagctgatggcccggctggccgagggcaccggcctgcagatccccccagctgcccagcaggccctgcagatgagcggcagcctggccttcggggctgtggccgagttctcctttgtgattgacctgcagacccggctgagccagcagacagaggccagcgccctggccgccgccgcctctgtgcagcccctggccacccagtgcttccagctgagcaacatgttcaacccccagacagaggaggaggtgggctgggacacagagatcaaggatgatgtgattgaggagtgcaacaagcacggcggcgtcatccacatctacgtggacaagaacagcgcccagggcaatgtgtatgtgaagtgccccagcattgctgctgccatcgcctag

SEQ ID NO: 21723 - DNA, 1527 bp, synthetic construct
  misc_feature 1..1527: note = Description of Artificial Sequence: Synthetic coding sequence
  source 1..1527: mol_type = other DNA
atggctgatgacattgatattgaggccatgctggaggccccctacaagaaggatgagaacaagctgagcagcgccaacggccacgaggagaggagcaagaagaggaagaagagcaagagccgcagccgcagccatgagaggaagaggagcaagagcaaggagaggaagaggagccgggaccgggagaggaagaagagcaagagccgggagaggaagaggagccgcagcaaggagcggcggcgcagccgcagccgcagccgggaccggcgcttccggggccgctaccgcagcccctacagaagaagaagccgcagcaagagccccttcaggaaggacaagagccctgtgcgggagcccatcgacaacctgaccccagaggagagagatgccaggacagtgttctgcatgcagctggccgcccgcatccggccccgggacctggaggagttcttcagcacagtgggcaaggtgagagatgtgaggatgatcagtgacaggaacagcagaagaagcaagggcatcgcctacgtggagtttgtggatgtgtcctctgtgcccctggccatcggcctgaccggccagagggtgctgggcgtgcccatcatcgtgcaggccagccaggccgagaagaacagagctgctgccatggccaacaacctgcagaagggcagcgctggccccatgaggctgtatgtgggcagcctgcacttcaacatcacagaggacatgctgcggggcatctttgagcccttcggccgcatcgagagcatccagctgatgatggattctgaaacaggccgcagcaagggctacggcttcatcaccttcagtgacagtgaatgtgccaagaaggccctggagcagctgaatggatttgagctggccggccggcccatgaaggtgggccacgtgacagagaggacagatgccagcagcgccagcagcttcctggacagtgatgagctggagaggactggaattgacctgggcaccaccggccgcctgcagctgatggcccggctggccgagggcaccggcctgcagatccccccagctgcccagcaggccctgcagatgagcggcagcctggcctttggagctgtggccgagttctcctttgtgattgacctgcagacccggctgagccagcagacagaggccagcgccctggccgctgctgcctctgtgcagcccctggccacccagtgcttccagctgagcaacatgttcaacccccagacagaggaggaggtgggctgggacacagagatcaaggatgatgtgattgaggagtgcaacaagcatggaggagtcatccacatctacgtggacaagaacagcgcccagggcaatgtgtatgtgaagtgccccagcattgctgctgccatcgctgctgtgaatgccctgcacggccgctggtttgctgggaagatgatcacagctgcctacgtgcccctgcccacctaccacaacctcttcccagacagcatgacagccacccagctgctggtgcccagcagaagatag

SEQ ID NO: 21724 - DNA, 1176 bp, synthetic construct
  misc_feature 1..1176: note = Description of Artificial Sequence: Synthetic coding sequence
  source 1..1176: mol_type = other DNA
atggtggaggccgacaggcctgggaagctgttcatcggcggcctgaacacagagaccaatgagaaggccctggaggccgtgtttgggaagtatggccgcatcgtggaggtgctgctgatgaaggaccgggagaccaacaagagccggggctttgcctttgtgacctttgagagccctgcagatgccaaggatgctgcccgggacatgaatggcaagagcctggatggcaaggccatcaaggtggagcaggccaccaagcccagctttgaaagtggaagaagaggccccccacctccacccaggagccggggccccccccggggcctgcggggcggccggggcggcagcggcggcacccggggcccccccagccggggcggccacatggatgatggcggctacagcatgaacttcaacatgagcagcagccggggccccctgcctgtgaagaggggccccccacccaggtctgggggccccccacccaagaggtctgcccccagcggccctgtgcgcagcagcagcggcatgggcggccgggcccctgtgtcccggggccgggacagctatggaggccccccaagaagagagcccctgcccagcagaagagatgtgtacctgagccccagagatgatggctacagcaccaaggacagctacagcagccgggactaccccagcagccgggacacccgggactatgcccccccaccccgggactacacctacagagattatggccacagcagcagcagagatgactaccccagccggggctacagcgacagagatggctacggccgggaccgggactacagcgaccaccccagcggcggcagctacagagacagctatgagagctatggcaacagccgcagcgccccacccacccggggccccccacccagctatggaggcagcagccgctatgatgactacagcagcagcagagatggctacggcggcagccgggacagctacagcagcagcagaagtgacctgtacagcagcggccgggacagagtgggccggcaggagcggggcctgccccccagcatggagcggggctaccccccaccccgggacagctacagcagcagcagcagaggagccccccggggcggcggccggggcggcagcagaagtgacagaggaggcggccgcagccgctactag

SEQ ID NO: 21725 - DNA, 309 bp, synthetic construct
  misc_feature 1..309: note = Description of Artificial Sequence: Synthetic coding sequence
  source 1..309: mol_type = other DNA
tgaatgttcatctgcccccaggagatgatgggcatcctgctgaagacagccatccaggccgagatcacccaggtgctggtgatcctggagatcatgcaccaccaccacgagatcatcctgaccgtcatcatggtgattcctgtgcacgtgatgaccatccaccaggaggacatcgccatcgagatggacatggtggtgattgtgaccatccagatcatccaggtggaggtgcccacagagatccacatgagggtgatggtgggggactttgcccactacggccggggcgtgctgattgacagccagtag

SEQ ID NO: 21726 - DNA, 591 bp, synthetic construct
  misc_feature 1..591: note = Description of Artificial Sequence: Synthetic coding sequence
  source 1..591: mol_type = other DNA
atggtggaggccgacaggcctgggaagctgttcatcggcggcctgaacacagagaccaatgagaaggccctggaggccgtgtttgggaagtatggccgcatcgtggaggtgctgctgatgaaggaccgggagaccaacaagagccggggctttgcctttgtgacctttgagagccctgcagatgccaaggatgctgcccgggacatgaatggcaagctgctgtaccacgtggaggagatcgtgatggaggtgcacctggagggcaaccgctgccccctggtggagatgttcatctgcccccaggagatgatgggcatcctgctgaagacagccatccaggccgagatcacccaggtgctggtgatcctggagatcatgcaccaccaccacgagatcatcctgaccgtcatcatggtgattcctgtgcacgtgatgaccatccaccaggaggacatcgccatcgagatggacatggtggtgattgtgaccatccagatcatccaggtggaggtgcccacagagatccacatgagggtgatggtgggggactttgcccactacggccggggcgtgctgattgacagccagtag

SEQ ID NO: 21727 - DNA, 1137 bp, synthetic construct
  misc_feature 1..1137: note = Description of Artificial Sequence: Synthetic coding sequence
  source 1..1137: mol_type = other DNA
atggtggaggccgacaggcctgggaagctgttcatcggcggcctgaacacagagaccaatgagaaggccctggaggccgtgtttgggaagtatggccgcatcgtggaggtgctgctgatgaaggaccgggagagccctgcagatgccaaggatgctgcccgggacatgaatggcaagagcctggatggcaaggccatcaaggtggagcaggccaccaagcccagctttgagagcggccggcggggccccccacctccacccaggagccggggccccccccggggcctgcggggcggccggggcggcagcggcggcacccggggcccccccagcagaggaggccacatggatgatggcggctacagcatgaacttcaacatgagcagcagccggggccccctgcctgtgaagaggggccccccacccaggtctgggggccccccacccaagaggtctgcccccagcggccctgtgcgcagcagcagcggcatgggcggccgggcccctgtgtcccggggccgggacagctatggaggccccccccggcgggagcccctgcccagcagaagagatgtgtacctgagccccagagatgatggctacagcaccaaggacagctacagcagccgggactaccccagcagccgggacacccgggactatgcccccccaccccgggactacacctacagagattatggccacagcagcagcagagatgactaccccagccggggctacagcgacagagatggctacggccgggaccgggactacagcgaccaccccagcggcggcagctacagagacagctatgagagctatggcaacagccgcagcgccccacccacccggggccccccacccagctatggaggcagcagccgctatgatgactacagcagcagcagagatggctatggaggcagccgggacagctacagcagcagcagaagtgacctgtacagcagcggccgggacagagtgggccggcaggagcggggcctgcccccatccatggagcggggctaccccccaccccgggacagctacagcagcagcagcagaggagccccccggggcggcggccggggcggcagcagaagtgaccggggcggcggccgcagccgctactag

SEQ ID NO: 21728 - DNA, 1443 bp, synthetic construct
  misc_feature 1..1443: note = Description of Artificial Sequence: Synthetic coding sequence
  source 1..1443: mol_type = other DNA
atggccagtgacagcatctttgagagcttccccagctacccccagtgcttcatgagggagtgcatcctgggcatgaaccccagcagagatgtgcatgatgccagcaccagccgccgcttcaccccacccagcacagccctgagccctgggaagatgtctgaggccctgcccctgggcgccccagatgctggagctgccctggccggcaagctgcggagcggggaccgctccatggtggaggtgctggccgaccaccctggagagctggtgaggacagacagccccaacttcctgtgcagcgtgctgcccacccactggcgctgcaacaagaccctgcccatcgccttcaaggtggtggccctgggagatgtgcctgatggcaccctggtgacagtgatggctggaaatgatgagaactacagcgctgagctgagaaatgccacagctgccatgaagaaccaggtggcccgcttcaatgacctgcgctttgtgggccgcagcggccggggcaagagcttcaccctgaccatcaccgtcttcaccaaccccccccaggtggccacctaccaccgggccatcaagatcaccgtggatggcccccgggagccccggcggcaccggcagaagctggatgaccagaccaagccaggcagcctgtccttcagcgagcggctgtctgagctggagcagctgcggaggacagccatgagggtgagcccccaccacccagcccccacccccaacccccgggccagcctgaaccacagcacagccttcaacccccagccccagagccagatgcaggacacccggcagatccagcccagccccccctggagctatgaccagagctaccagtacctgggcagcatcgccagccccagcgtgcacccagccacccccatcagccctggccgggccagcggcatgaccaccctgtctgctgagctgagcagccggctgagcacagccccagacctgacagccttcagtgacccccggcagtttcctgccctgcccagcatcagtgaccccaggatgcactacccaggggccttcacctacagccccacccctgtgaccagcggcatcggcatcggcatgtctgccatgggcagcgccacccgctaccacacctacctgcccccaccctacccaggcagcagccaggcccagggcggccccttccaggccagcagccccagctaccacctgtactatggagccagcgctggcagctaccagttctccatggtgggcggggagaggagccccccacgcatcctgcccccctgcaccaatgccagcactggaagtgccctgctgaaccccagcctgcccaaccagagtgatgtggtggaggccgagggcagccacagcaacagccccaccaacatggcccccagcgcccggctggaggaggccgtgtggaggccctactag

SEQ ID NO: 21729 - DNA, 1407 bp, synthetic construct
  misc_feature 1..1407: note = Description of Artificial Sequence: Synthetic coding sequence
  source 1..1407: mol_type = other DNA
atgcctgctgccccccggggccctgcccagggcgaggccgccgcccggaccaggagcagagatgccagcaccagccgccgcttcaccccacccagcacagccctgagccctgggaagatgtctgaggccctgcccctgggcgccccagatgctggagctgccctggccggcaagctgcggagcggggaccgctccatggtggaggtgctggccgaccaccctggagagctggtgaggacagacagccccaacttcctgtgcagcgtgctgcccacccactggcgctgcaacaagaccctgcccatcgccttcaaggtggtggccctgggagatgtgcctgatggcaccctggtgacagtgatggctggaaatgatgagaactacagcgctgagctgagaaatgccacagctgccatgaagaaccaggtggcccgcttcaatgacctgcgctttgtgggccgcagcggccggggcaagagcttcaccctgaccatcaccgtcttcaccaaccccccccaggtggccacctaccaccgggccatcaagatcaccgtggatggcccccgggagccccggcggcaccggcagaagctggatgaccagaccaagccaggcagcctgtccttcagcgagcggctgtctgagctggagcagctgcggaggacagccatgagggtgagcccccaccacccagcccccacccccaacccccgggccagcctgaaccacagcacagccttcaacccccagccccagagccagatgcaggacacccggcagatccagcccagccccccctggagctatgaccagagctaccagtacctgggcagcatcgccagccccagcgtgcacccagccacccccatcagccctggccgggccagcggcatgaccaccctgtctgctgagctgagcagccggctgagcacagccccagacctgacagccttcagtgacccccggcagtttcctgccctgcccagcatcagtgaccccaggatgcactacccaggggccttcacctacagccccacccctgtgaccagcggcatcggcatcggcatgtctgccatgggcagcgccacccgctaccacacctacctgcccccaccctacccaggcagcagccaggcccagggcggccccttccaggccagcagccccagctaccacctgtactatggagccagcgctggcagctaccagttctccatggtgggcggggagaggagccccccacgcatcctgcccccctgcaccaatgccagcactggaagtgccctgctgaaccccagcctgcccaaccagagtgatgtggtggaggccgagggcagccacagcaacagccccaccaacatggcccccagcgcccggctggaggaggccgtgtggaggccctactag

SEQ ID NO: 21730 - DNA, 1362 bp, synthetic construct
  misc_feature 1..1362: note = Description of Artificial Sequence: Synthetic coding sequence
  source 1..1362: mol_type = other DNA
atgagaattcctgtggatgccagcaccagccgccgcttcaccccacccagcacagccctgagccctgggaagatgtctgaggccctgcccctgggcgccccagatgctggggccgccctggccggcaagctgcggagcggggaccgctccatggtggaggtgctggccgaccaccctggagagctggtgaggacagacagccccaacttcctgtgcagcgtgctgcccacccactggcgctgcaacaagaccctgcccatcgccttcaaggtggtggccctgggagatgtgcctgatggcaccctggtgacagtgatggctggaaatgatgagaactacagcgctgagctgagaaatgccacagctgccatgaagaaccaggtggcccgcttcaatgacctgcgctttgtgggccgcagcggccggggcaagagcttcaccctgaccatcaccgtcttcaccaaccccccccaggtggccacctaccaccgggccatcaagatcaccgtggatggcccccgggagcccaggaggcaccggcagaagctggatgaccagaccaagccaggcagcctgtccttcagcgagcggctgtctgagctggagcagctgcggaggacagccatgagggtgagcccccaccacccagcccccacccccaacccccgggccagcctgaaccacagcacagccttcaacccccagccccagagccagatgcaggacacccggcagatccagcccagccccccctggagctatgaccagagctaccagtacctgggcagcatcgccagccccagcgtgcacccagccacccccatcagccctggccgggccagcggcatgaccaccctgtctgctgagctgagcagccggctgagcacagccccagacctgacagccttcagtgacccccggcagtttcctgccctgcccagcatcagtgaccccaggatgcactacccaggggccttcacctacagccccacccctgtgaccagcggcattggaattggcatgtctgccatgggcagcgccacccgctaccacacctacctgcccccaccctacccaggcagcagccaggcccagggcggccccttccaggccagcagccccagctaccacctgtactacggggccagcgctggcagctaccagttctccatggtgggcggggagaggagccccccacgcatcctgcccccctgcaccaatgccagcacaggcagcgccctgctgaaccccagcctgcccaaccagagtgatgtggtggaggccgagggcagccacagcaacagccccaccaacatggcccccagcgcccggctggaggaggccgtgtggaggccctactag

SEQ ID NO: 21731 - DNA, 1428 bp, synthetic construct
  misc_feature 1..1428: note = Description of Artificial Sequence: Synthetic coding sequence
  source 1..1428: mol_type = other DNA
atgaaccccagcagagatgtgcatgatgccagcaccagccgccgcttcaccccacccagcacagccctgagccctgggaagatgtctgaggccctgcccctgggcgccccagatgctggagctgccctggccggcaagctgcggagcggggaccgctccatggtggaggtgctggccgaccaccctggagagctggtgaggacagacagccccaacttcctgtgcagcgtgctgcccacccactggcgctgcaacaagaccctgcccatcgccttcaaggtggtggccctgggagatgtgcctgatggcaccctggtgacagtgatggctggaaatgatgagaactacagcgctgagctgagaaatgccacagctgccatgaagaaccaggtggcccgcttcaatgacctgcgctttgtgggccgcagcggccggggcaagagcttcaccctgaccatcaccgtcttcaccaaccccccccaggtggccacctaccaccgggccatcaagatcaccgtggatggcccccgggagccccggcggcaccggcagaagctggatgaccagaccaagccaggcagcctgtccttcagcgagcggctgtctgagctggagcagctgcggaggacagccatgagggtgagcccccaccacccagcccccacccccaacccccgggccagcctgaaccacagcacagccttcaacccccagccccagagccagatgcaggacacccggcagatccagcccagccccccctggagctatgaccagagctaccagtacctgggcagcatcgccagccccagcgtgcacccagccacccccatcagccctggccgggccagcggcatgaccaccctgtctgctgagctgagcagccggctgagcacagccccagacctgacagccttcagtgacccccggcagtttcctgccctgcccagcatcagtgaccccaggatgcactacccaggggccttcacctacagccccacccctgtgaccagcggcatcggcatcggcatgtctgccatgggcagcgccacccgctaccacacctacctgcccccaccctacccaggcagcagccaggcccagggcggccccttccaggccagcagccccagctaccacctgtactatggagccagcgctggcagctaccagttctccatggtgggcggggagaggagccccccacgcatcctgcccccctgcaccaatgccagcactggaagtgccctgctgaaccccagcctgcccaaccagagtgatgtggtggaggccgagggcagccacagcaacagccccaccaacatggcccgggccagctgcagccggcaggcccggcgggaccccggcccctgggcccggcccccatcctggggccggggccggcccacagcccgcatcagcctgtag

SEQ ID NO: 21732 - DNA, 99 bp, synthetic construct
  misc_feature 1..99: note = Description of Artificial Sequence: Synthetic coding sequence
  source 1..99: mol_type = other DNA
atggccagtgacagcatctttgagagcttccccagctacccccagtgcttcatgagggagtgcatcctgggcatgaaccccagcagagatgtgcactag

SEQ ID NO: 21733 - DNA, 414 bp, synthetic construct
  misc_feature 1..414: note = Description of Artificial Sequence: Synthetic coding sequence
  source 1..414: mol_type = other DNA
atgcaggacacccggcagatccagcccagccccccctggagctatgaccagagctaccagtacctgggcagcatcgccagccccagcgtgcacccagccacccccatcagccctggccgggccagcggcatgaccaccctgtctgctgagctgagcagccggctgagcacagccccagacctgacagccttcagtgacccccggcagtttcctgccctgcccagcatcagtgaccccaggatgcactacccaggggccttcacctacagccccacccctgtgaccagcggcatcggcatcggcatgtctgccatgggcagcgccacccgctaccacacctacctgcccccaccctacccaggcagcagccaggcccagggcggccccttccaggccagcagccccagctactag

SEQ ID NO: 21734 - DNA, 1443 bp, synthetic construct; identical to SEQ ID NO: 21728
  misc_feature 1..1443: note = Description of Artificial Sequence: Synthetic coding sequence
  source 1..1443: mol_type = other DNA

SEQ ID NO: 21735 - DNA, 576 bp, synthetic construct
  misc_feature 1..576: note = Description of Artificial Sequence: Synthetic coding sequence
  source 1..576: mol_type = other DNA
atgaaccccagcagagatgtgcatgatgccagcaccagccgccgcttcaccccacccagcacagccctgagccctgggaagatgtctgaggccctgcccctgggcgccccagatgctggagctgccctggccggcaagctgcggagcggggaccgctccatggtggaggtgctggccgaccaccctggagagctggtgaggacagacagccccaacttcctgtgcagcgtgctgcccacccactggcgctgcaacaagaccctgcccatcgccttcaaggtggtggccctgggagatgtgcctgatggcaccctggtgacagtgatggctggaaatgatgagaactacagcgctgagctgagaaatgccacagctgccatgaagaaccaggtggcccgcttcaatgacctgcgctttgtgggccgcagcggccggggcaagagcttcaccctgaccatcaccgtcttcaccaaccccccccaggtggccacctaccaccgggccatcaagatcaccgtggatggcccccgggagcccaggaacagcctgacctggccccgctacccccacatctag

SEQ ID NO: 21736 - DNA, 753 bp, synthetic construct
  misc_feature 1..753: note = Description of Artificial Sequence: Synthetic coding sequence
  source 1..753: mol_type = other DNA
atgagaattcctgtggatgccagcaccagccgccgcttcaccccacccagcacagccctgagccctgggaagatgtctgaggccctgcccctgggcgccccagatgctggggccgccctggccggcaagctgcggagcggggaccgctccatggtggaggtgctggccgaccaccctggagagctggtgaggacagacagccccaacttcctgtgcagcgtgctgcccacccactggcgctgcaacaagaccctgcccatcgccttcaaggtggtggccctgggagatgtgcctgatggcaccctggtgacagtgatggctggaaatgatgagaactacagcgctgagctgagaaatgccacagctgccatgaagaaccaggtggcccgcttcaatgacctgcgctttgtgggccgcagcggccggggcaagagcttcaccctgaccatcaccgtcttcaccaaccccccccaggtggccacctaccaccgggccatcaagatcaccgtggatggcccccgggagcccaggaggcaccggcagaagctggatgaccagaccaagccaggcagcctgtccttcagcgagcggctgtctgagctggagcagctgcggaggacagccatgagggtgagcccccaccacccagcccccacccccaacccccgggccagcctgaaccacagcacagccttcaacccccagccccagagccagatgcaggaggaggacacagccccctggcgctgctag

SEQ ID NO: 21737 - DNA, 1770 bp, synthetic construct
  misc_feature 1..1770: note = Description of Artificial Sequence: Synthetic coding sequence
  source 1..1770: mol_type = other DNA
atgctgcacagcccccacaagcagccccagaaccacaagtgtggggccaacttcctgcaggaggacagcaagaagagcctggtgttcaagtggctgatctctgctggccactaccagcccccccggcccacagagagcttcaaggccgccagcagcatctacaacagaggctacaagttctacctgaagaagaagggcggcaccatggccagcaacagcctcttcagcacagtgaccccctgccagcagaacttcttctgggaccccagcaccagccgccgcttcagcccccccagcagcagcctgcagcccgggaagatgtctgatgtgtcccctgtggtggccgcccagcagcagcagcagcagcagcagcagcagcagcagcagcagcagcagcagcagcagcagcagcagcaggaggccgctgctgctgctgctgctgctgctgctgctgctgctgctgctgctgctgtgccccggctgcggccccctcatgacaacagaaccatggtggagatcatcgctgaccaccctgctgagctggtgaggacagacagccccaacttcctgtgcagcgtgctgcccagccactggcgctgcaacaagaccctgcctgtggccttcaaggtggtggccctgggggaggtgcctgatggcaccgtggtgacagtgatggctggaaatgatgagaactacagcgctgagctgagaaatgccagcgctgtgatgaagaaccaggtggcccgcttcaatgacctgcgctttgtgggccgcagcggccggggcaagagcttcaccctgaccatcaccgtcttcaccaaccccccccaggtggccacctaccaccgggccatcaaggtgacagtggatggcccccgggagccccggcggcaccggcagaagctggatgacagcaagcccagcctcttcagtgaccggctgagtgacctgggccgcatcccccaccccagcatgagggtgggcgtgcccccccagaacccccggcccagcctgaacagcgcccccagccccttcaacccccagggccagagccagatcacagacccccggcaggcccagagcagccccccctggagctatgaccagagctaccccagctacctgagccagatgaccagccccagcatccacagcaccacccccctgagcagcacccggggcaccggcctgcctgccatcacagatgtgccccggcgcatcagtgatgatgacacagccaccagtgacttctgcctgtggcccagcaccctgagcaagaagagccaggccggggccagcgagctgggccccttcagtgacccccggcagttccccagcatcagcagcctgacagagagccgcttcagcaaccccaggatgcactacccagccaccttcacctacaccccacctgtgaccagcggcatgagcctgggcatgtctgccaccacccactaccacacctacctgcccccaccctacccaggcagcagccagagccagagcggccccttccagaccagcagcaccccctacctgtactacggcaccagcagcggcagctaccagttccccatggtgcctggaggagacaggagccccagcaggatgctgcccccctgcaccaccaccagcaatggcagcaccctgctgaaccccaacctgcccaaccagaatgatggagtggatgctgatggcagccacagcagcagccccaccgtgctgaacagcagcggccgcatggatgagagcgtgtggaggccctactag

SEQ ID NO: 21738 - DNA, 1524 bp, synthetic construct
  misc_feature 1..1524: note = Description of Artificial Sequence: Synthetic coding sequence
  source 1..1524: mol_type = other DNA
atgagaattcctgtggaccccagcaccagccgccgcttcagcccccccagcagcagcctgcagcccgggaagatgtctgatgtgtcccctgtggtggccgcccagcagcagcagcagcagcagcagcagcagcagcagcagcagcagcagcagcagcagcagcagcagcaggaggccgctgctgctgctgctgctgctgctgctgctgctgctgctgctgctgctgtgccccggctgcggccccctcatgacaacagaaccatggtggagatcatcgctgaccaccctgctgagctggtgaggacagacagccccaacttcctgtgcagcgtgctgcccagccactggcgctgcaacaagaccctgcctgtggccttcaaggtggtggccctgggggaggtgcctgatggcaccgtggtgacagtgatggctggaaatgatgagaactacagcgctgagctgagaaatgccagcgctgtgatgaagaaccaggtggcccgcttcaatgacctgcgctttgtgggccgcagcggccggggcaagagcttcaccctgaccatcaccgtcttcaccaaccccccccaggtggccacctaccaccgggccatcaaggtgacagtggatggcccccgggagccccggcggcaccggcagaagctggatgacagcaagcccagcctcttcagtgaccggctgagtgacctgggccgcatcccccaccccagcatgagggtgggcgtgcccccccagaacccccggcccagcctgaacagcgcccccagccccttcaacccccagggccagagccagatcacagacccccggcaggcccagagcagccccccctggagctatgaccagagctaccccagctacctgagccagatgaccagccccagcatccacagcaccacccccctgagcagcacccggggcaccggcctgcctgccatcacagatgtgccccggcgcatcagtgatgatgacacagccaccagtgacttctgcctgtggcccagcaccctgagcaagaagagccaggccggggccagcgagctgggccccttcagtgacccccggcagttccccagcatcagcagcctgacagagagccgcttcagcaaccccaggatgcactacccagccaccttcacctacaccccacctgtgaccagcggcatgagcctgggcatgtctgccaccacccactaccacacctacctgcccccaccctacccaggcagcagccagagccagagcggccccttccagaccagcagcaccccctacctgtactacggcaccagcagcggcagctaccagttccccatggtgcctggaggagacaggagccccagcaggatgctgcccccctgcaccaccaccagcaatggcagcaccctgctgaaccccaacctgcccaaccagaatgatggagtggatgctgatggcagccacagcagcagccccaccgtgctgaacagcagcggccgcatggatgagagcgtgtggaggccctactag

SEQ ID NO: 21739 - DNA, 1458 bp, synthetic construct
  misc_feature 1..1458: note = Description of Artificial Sequence: Synthetic coding sequence
  source 1..1458: mol_type = other DNA
atgagaattcctgtggaccccagcaccagccgccgcttcagcccccccagcagcagcctgcagcccgggaagatgtctgatgtgtcccctgtggtggccgcccagcagcagcagcagcagcagcagcagcagcagcagcagcagcagcagcagcagcagcagcagcagcaggaggccgctgctgctgctgctgctgctgctgctgctgctgctgctgctgctgctgtgccccggctgcggccccctcatgacaacagaaccatggtggagatcatcgctgaccaccctgctgagctggtgaggacagacagccccaacttcctgtgcagcgtgctgcccagccactggcgctgcaacaagaccctgcctgtggccttcaaggtggtggccctgggggaggtgcctgatggcaccgtggtgacagtgatggctggaaatgatgagaactacagcgctgagctgagaaatgccagcgctgtgatgaagaaccaggtggcccgcttcaatgacctgcgctttgtgggccgcagcggccggggcaagagcttcaccctgaccatcaccgtcttcaccaaccccccccaggtggccacctaccaccgggccatcaaggtgacagtggatggcccccgggagccccggcggcaccggcagaagctggatgacagcaagcccagcctcttcagtgaccggctgagtgacctgggccgcatcccccaccccagcatgagggtgggcgtgcccccccagaacccccggcccagcctgaacagcgcccccagccccttcaacccccagggccagagccagatcacagacccccggcaggcccagagcagccccccctggagctatgaccagagctaccccagctacctgagccagatgaccagccccagcatccacagcaccacccccctgagcagcacccggggcaccggcctgcctgccatcacagatgtgccccggcgcatcagcggggccagcgagctgggccccttcagtgacccccggcagttccccagcatcagcagcctgacagagagccgcttcagcaaccccaggatgcactacccagccaccttcacctacaccccacctgtgaccagcggcatgagcctgggcatgtctgccaccacccactaccacacctacctgcccccaccctacccaggcagcagccagagccagagcggccccttccagaccagcagcaccccctacctgtactacggcaccagcagcggcagctaccagttccccatggtgcctggaggagacaggagccccagcaggatgctgcccccctgcaccaccaccagcaatggcagcaccctgctgaaccccaacctgcccaaccagaatgatggagtggatgctgatggcagccacagcagcagccccaccgtgctgaacagcagcggccgcatggatgagagcgtgtggaggccctactag

SEQ ID NO: 21740 - DNA, 1500 bp, synthetic construct
  misc_feature 1..1500: note = Description of Artificial Sequence: Synthetic coding sequence
  source 1..1500: mol_type = other DNA
atggccagcaacagcctcttcagcacagtgaccccctgccagcagaacttcttctgggaccccagcaccagccgccgcttcagcccccccagcagcagcctgcagcccgggaagatgtctgatgtgtcccctgtggtggccgcccagcagcagcagcagcagcagcagcagcagcagcagcagcagcagcagcagcagcagcagcagcagcaggaggccgctgctgctgctgctgctgctgctgctgctgctgctgctgctgctgctgtgccccggctgcggccccctcatgacaacagaaccatggtggagatcatcgctgaccaccctgctgagctggtgaggacagacagccccaacttcctgtgcagcgtgctgcccagccactggcgctgcaacaagaccctgcctgtggccttcaaggtggtggccctgggggaggtgcctgatggcaccgtggtgacagtgatggctggaaatgatgagaactacagcgctgagctgagaaatgccagcgctgtgatgaagaaccaggtggcccgcttcaatgacctgcgctttgtgggccgcagcggccggggcaagagcttcaccctgaccatcaccgtcttcaccaaccccccccaggtggccacctaccaccgggccatcaaggtgacagtggatggcccccgggagccccggcggcaccggcagaagctggatgacagcaagcccagcctcttcagtgaccggctgagtgacctgggccgcatcccccaccccagcatgagggtgggcgtgcccccccagaacccccggcccagcctgaacagcgcccccagccccttcaacccccagggccagagccagatcacagacccccggcaggcccagagcagccccccctggagctatgaccagagctaccccagctacctgagccagatgaccagccccagcatccacagcaccacccccctgagcagcacccggggcaccggcctgcctgccatcacagatgtgccccggcgcatcagcggggccagcgagctgggccccttcagtgacccccggcagttccccagcatcagcagcctgacagagagccgcttcagcaaccccaggatgcactacccagccaccttcacctacaccccacctgtgaccagcggcatgagcctgggcatgtctgccaccacccactaccacacctacctgcccccaccctacccaggcagcagccagagccagagcggccccttccagaccagcagcaccccctacctgtactacggcaccagcagcggcagctaccagttccccatggtgcctggaggagacaggagccccagcaggatgctgcccccctgcaccaccaccagcaatggcagcaccctgctgaaccccaacctgcccaaccagaatgatggagtggatgctgatggcagccacagcagcagccccaccgtgctgaacagcagcggccgcatggatgagagcgtgtggaggccctactag

SEQ ID NO: 21741 - DNA, 1566 bp, synthetic construct
  misc_feature 1..1566: note = Description of Artificial Sequence: Synthetic coding sequence
  source 1..1566: mol_type = other DNA
atggccagcaacagcctcttcagcacagtgaccccctgccagcagaacttcttctgggaccccagcaccagccgccgcttcagcccccccagcagcagcctgcagcccgggaagatgtctgatgtgtcccctgtggtggccgcccagcagcagcagcagcagcagcagcagcagcagcagcagcagcagcagcagcagcagcagcagcagcaggaggccgctgctgctgctgctgctgctgctgctgctgctgctgctgctgctgctgtgccccggctgcggccccctcatgacaacagaaccatggtggagatcatcgctgaccaccctgctgagctggtgaggacagacagccccaacttcctgtgcagcgtgctgcccagccactggcgctgcaacaagaccctgcctgtggccttcaaggtggtggccctgggggaggtgcctgatggcaccgtggtgacagtgatggctggaaatgatgagaactacagcgctgagctgagaaatgccagcgctgtgatgaagaaccaggtggcccgcttcaatgacctgcgctttgtgggccgcagcggccggggcaagagcttcaccctgaccatcaccgtcttcaccaaccccccccaggtggccacctaccaccgggccatcaaggtgacagtggatggcccccgggagccccggcggcaccggcagaagctggatgacagcaagcccagcctcttcagtgaccggctgagtgacctgggccgcatcccccaccccagcatgagggtgggcgtgcccccccagaacccccggcccagcctgaacagcgcccccagccccttcaacccccagggccagagccagatcacagacccccggcaggcccagagcagccccccctggagctatgaccagagctaccccagctacctgagccagatgaccagccccagcatccacagcaccacccccctgagcagcacccggggcaccggcctgcctgccatcacagatgtgccccggcgcatcagtgatgatgacacagccaccagtgacttctgcctgtggcccagcaccctgagcaagaagagccaggccggggccagcgagctgggccccttcagtgacccccggcagttccccagcatcagcagcctgacagagagccgcttcagcaaccccaggatgcactacccagccaccttcacctacaccccacctgtgaccagcggcatgagcctgggcatgtctgccaccacccactaccacacctacctgcccccaccctacccaggcagcagccagagccagagcggccccttccagaccagcagcaccccctacctgtactacggcaccagcagcggcagctaccagttccccatggtgcctggaggagacaggagccccagcaggatgctgcccccctgcaccaccaccagcaatggcagcaccctgctgaaccccaacctgcccaaccagaatgatggagtggatgctgatggcagccacagcagcagccccaccgtgctgaacagcagcggccgcatggatgagagcgtgtggaggccctactag

SEQ ID NO: 21742 - DNA, 1566 bp, synthetic construct; identical to SEQ ID NO: 21741
  misc_feature 1..1566: note = Description of Artificial Sequence: Synthetic coding sequence
  source 1..1566: mol_type = other DNA

SEQ ID NO: 21743 - DNA, 1704 bp, synthetic construct
  misc_feature 1..1704: note = Description of Artificial Sequence: Synthetic coding sequence
  source 1..1704: mol_type = other DNA
atgctgcacagcccccacaagcagccccagaaccacaagtgtggggccaacttcctgcaggaggacagcaagaagagcctggtgttcaagtggctgatctctgctggccactaccagcccccccggcccacagagagcttcaaggccgccagcagcatctacaacagaggctacaagttctacctgaagaagaagggcggcaccatggccagcaacagcctcttcagcacagtgaccccctgccagcagaacttcttctgggaccccagcaccagccgccgcttcagcccccccagcagcagcctgcagcccgggaagatgtctgatgtgtcccctgtggtggccgcccagcagcagcagcagcagcagcagcagcagcagcagcagcagcagcagcagcagcagcagcagcagcaggaggccgctgctgctgctgctgctgctgctgctgctgctgctgctgctgctgctgtgccccggctgcggccccctcatgacaacagaaccatggtggagatcatcgctgaccaccctgctgagctggtgaggacagacagccccaacttcctgtgcagcgtgctgcccagccactggcgctgcaacaagaccctgcctgtggccttcaaggtggtggccctgggggaggtgcctgatggcaccgtggtgacagtgatggctggaaatgatgagaactacagcgctgagctgagaaatgccagcgctgtgatgaagaaccaggtggcccgcttcaatgacctgcgctttgtgggccgcagcggccggggcaagagcttcaccctgaccatcaccgtcttcaccaaccccccccaggtggccacctaccaccgggccatcaaggtgacagtggatggcccccgggagccccggcggcaccggcagaagctggatgacagcaagcccagcctcttcagtgaccggctgagtgacctgggccgcatcccccaccccagcatgagggtgggcgtgcccccccagaacccccggcccagcctgaacagcgcccccagccccttcaacccccagggccagagccagatcacagacccccggcaggcccagagcagccccccctggagctatgaccagagctaccccagctacctgagccagatgaccagccccagcatccacagcaccacccccctgagcagcacccggggcaccggcctgcctgccatcacagatgtgccccggcgcatcagcggggccagcgagctgggccccttcagtgacccccggcagttccccagcatcagcagcctgacagagagccgcttcagcaaccccaggatgcactacccagccaccttcacctacaccccacctgtgaccagcggcatgagcctgggcatgtctgccaccacccactaccacacctacctgcccccaccctacccaggcagcagccagagccagagcggccccttccagaccagcagcaccccctacctgtactacggcaccagcagcggcagctaccagttccccatggtgcctggaggagacaggagccccagcaggatgctgcccccctgcaccaccaccagcaatggcagcaccctgctgaaccccaacctgcccaaccagaatgatggagtggatgctgatggcagccacagcagcagccccaccgtgctgaacagcagcggccgcatggatgagagcgtgtggaggccctactag

SEQ ID NO: 21744 - DNA, 1248 bp, synthetic construct
  misc_feature 1..1248: note = Description of Artificial Sequence: Synthetic coding sequence
  source 1..1248: mol_type = other DNA
atgagaattcctgtggaccccagcaccagccgccgcttcaccccacccagccctgccttcccctgtggcggcggcggcggcaagatgggagaaaattctggggccctgagcgcccaggccgctgtgggccctgggggccgggcccggcctgaggtgcgctccatggtggatgtgctggccgaccatgctggggagctggtgaggacagacagccccaacttcctgtgcagcgtgctgcccagccactggcgctgcaacaagaccctgcctgtggccttcaaggtggtggccctgggagatgtgcctgatggcaccgtggtgacagtgatggctggaaatgatgagaactacagcgctgagctgagaaatgccagcgctgtgatgaagaaccaggtggcccgcttcaatgacctgcgctttgtgggccgcagcggccggggcaagagcttcaccctgaccatcaccgtcttcaccaaccccacccaggtggccacctaccaccgggccatcaaggtgacagtggatggcccccgggagcccaggaggcaccggcagaagctggaggaccagaccaagcccttcccagacagatttggagacctggagcggctgaggatgagggtgacccccagcacccccagcccccggggcagcctgagcaccaccagccacttcagcagccagccccagacccccatccagggcaccagcgagctgaaccccttcagtgacccccggcagtttgaccgctccttccccaccctgcccaccctgacagagagccgcttcccagaccccaggatgcactacccaggggccatgtctgctgccttcccctacagcgccaccccatctggcaccagcatcagcagcctgtctgtggccggcatgcctgccaccagccgcttccaccacacctacctgcccccaccctacccaggggccccccagaaccagagcggccccttccaggccaaccccagcccctaccacctgtactacggcaccagcagcggcagctaccagttctccatggtggccggcagcagcagtggaggagacaggagccccaccaggatgctggccagctgcaccagcagcgctgcctctgtggccgccggcaacctgatgaaccccagcctgggcggccagagtgatggagtggaggctgatggcagccacagcaacagccccacagccctgagcaccccaggccgcatggatgaggccgtgtggaggccctactag

SEQ ID NO: 21745 - DNA, 1290 bp, synthetic construct
  misc_feature 1..1290: note = Description of Artificial Sequence: Synthetic coding sequence
  source 1..1290: mol_type = other DNA
atggccagcaacagcatctttgacagcttccccacctacagccccaccttcatccgggaccccagcaccagccgccgcttcaccccacccagccctgccttcccctgtggcggcggcggcggcaagatgggagaaaattctggggccctgagcgcccaggccgctgtgggccctgggggccgggcccggcctgaggtgcgctccatggtggatgtgctggccgaccatgctggggagctggtgaggacagacagccccaacttcctgtgcagcgtgctgcccagccactggcgctgcaacaagaccctgcctgtggccttcaaggtggtggccctgggagatgtgcctgatggcaccgtggtgacagtgatggctggaaatgatgagaactacagcgctgagctgagaaatgccagcgctgtgatgaagaaccaggtggcccgcttcaatgacctgcgctttgtgggccgcagcggccggggcaagagcttcaccctgaccatcaccgtcttcaccaaccccacccaggtggccacctaccaccgggccatcaaggtgacagtggatggcccccgggagcccaggaggcaccggcagaagctggaggaccagaccaagcccttcccagacagatttggagacctggagcggctgaggatgagggtgacccccagcacccccagcccccggggcagcctgagcaccaccagccacttcagcagccagccccagacccccatccagggcaccagcgagctgaaccccttcagtgacccccggcagtttgaccgctccttccccaccctgcccaccctgacagagagccgcttcccagaccccaggatgcactacccaggggccatgtctgctgccttcccctacagcgccaccccatctggcaccagcatcagcagcctgtctgtggccggcatgcctgccaccagccgcttccaccacacctacctgcccccaccctacccaggggccccccagaaccagagcggccccttccaggccaaccccagcccctaccacctgtactacggcaccagcagcggcagctaccagttctccatggtggccggcagcagcagtggaggagacaggagccccaccaggatgctggccagctgcaccagcagcgctgcctctgtggccgccggcaacctgatgaaccccagcctgggcggccagagtgatggagtggaggctgatggcagccacagcaacagccccacagccctgagcaccccaggccgcatggatgaggccgtgtggaggccctactag

SEQ ID NO: 21746 - DNA, 1290 bp, synthetic construct; identical to SEQ ID NO: 21745
  misc_feature 1..1290: note = Description of Artificial Sequence: Synthetic coding sequence
  source 1..1290: mol_type = other DNA

SEQ ID NO: 21747 - DNA, 1089 bp, synthetic construct
  misc_feature 1..1089: note = Description of Artificial Sequence: Synthetic coding sequence
  source 1..1089: mol_type = other DNA
atgagaattcctgtggaccccagcaccagccgccgcttcaccccacccagccctgccttcccctgtggcggcggcggcggcaagatgggagaaaattctggggccctgagcgcccaggccgctgtgggccctgggggccgggcccggcctgaggtgcgctccatggtggatgtgctggccgaccatgctggggagctggtgaggacagacagccccaacttcctgtgcagcgtgctgcccagccactggcgctgcaacaagaccctgcctgtggccttcaaggtggtggccctgggagatgtgcctgatggcaccgtggtgacagtgatggctggaaatgatgagaactacagcgctgagctgagaaatgccagcgctgtgatgaagaaccaggtggcccgcttcaatgacctgcgctttgtgggccgcagcggccggggcaagagcttcaccctgaccatcaccgtcttcaccaaccccacccaggtggccacctaccaccgggccatcaaggtgacagtggatggcccccgggagcccaggaggaccagcgagctgaaccccttcagtgacccccggcagtttgacaggagcttccccaccctgcccaccctgacagagagccgcttcccagaccccaggatgcactacccaggggccatgtctgctgccttcccctacagcgccacccccagcggcaccagcatcagcagcctgtctgtggccggcatgcctgccaccagccgcttccaccacacctacctgcccccaccctacccaggggccccccagaaccagagcggccccttccaggccaaccccagcccctaccacctgtactacggcaccagcagcggcagctaccagttctccatggtggccggcagcagcagcggcggggacaggagccccaccaggatgctggccagctgcaccagcagcgctgcctctgtggccgccggcaacctgatgaaccccagcctgggcggccagagtgatggagtggaggctgatggcagccacagcaacagccccacagccctgagcaccccaggccgcatggatgaagctgtgtggaggccctactag

SEQ ID NO: 21748 - DNA, 969 bp, synthetic construct
  misc_feature 1..969: note = Description of Artificial Sequence: Synthetic coding sequence
  source 1..969: mol_type = other DNA
atggtggtggccctgggagatgtgcctgatggcaccgtggtgacagtgatggctggaaatgatgagaactacagcgctgagctgagaaatgccagcgctgtgatgaagaaccaggtggcccgcttcaatgacctgcgctttgtgggccgcagcggccggggcaagagcttcaccctgaccatcaccgtcttcaccaaccccacccaggtggccacctaccaccgggccatcaaggtgacagtggatggcccccgggagccccggcggcaccggcagaagctggaggaccagaccaagcccttcccagacagatttggagacctggagcggctgaggatgagggtgacccccagcacccccagcccccggggcagcctgagcaccaccagccacttcagcagccagccccagacccccatccagggcaccagcgagctgaaccccttcagtgacccccggcagtttgacaggagcttccccaccctgcccaccctgacagagagccgcttcccagaccccaggatgcactacccaggggccatgtctgctgccttcccctacagcgccacccccagcggcaccagcatcagcagcctgtctgtggccggcatgcctgccaccagccgcttccaccacacctacctgcccccaccctacccaggggccccccagaaccagagcggccccttccaggccaaccccagcccctaccacctgtactacggcaccagcagcggcagctaccagttctccatggtggccggcagcagcagcggcggggacaggagccccaccaggatgctggccagctgcaccagcagcgctgcctctgtggccgccggcaacctgatgaaccccagcctgggcggccagagtgatggagtggaggctgatggcagccacagcaacagccccacagccctgagcaccccaggccgcatggatgaagctgtgtggaggccctactag

SEQ ID NO: 21749 - DNA, 2439 bp, synthetic construct
  misc_feature 1..2439: note = Description of Artificial Sequence: Synthetic coding sequence
  source 1..2439: mol_type = other DNA
atggacttcagccggctgcacatgtacagccccccccagtgtgtgcctgaaaatacaggctacacctacgccctgagcagcagctacagcagtgatgccctggactttgaaacagagcacaagctggaccctgtgtttgacagccccaggatgagcagaagaagcctgcggctggccaccacagcctgcaccctgggagatggagaggccgtgggcgctgacagcggcaccagcagcgctgtgtccctgaagaacagagctgcccggaccaccaagcagaggaggagcaccaacaagagcgccttcagcatcaaccacgtgtcccggcaggtgaccagcagcggcgtgagccacggcggcaccgtgtccctgcaggatgctgtgacccggcggccccctgtgctggatgagagctggatccgggagcagaccaccgtggaccacttctggggcctggatgatgatggagacctgaagggcggcaacaaggccgccatccagggcaatggagatgtgggcgctgctgctgccacagcccacaacggcttcagctgcagcaactgcagcatgctgtctgagaggaaggatgtgctgacagcccaccctgctgcccctggccctgtgtcccgggtgtacagccgggacaggaaccagaagtgtgatgactgcaagggcaagaggcacctggatgcccaccctggccgggccggcaccctgtggcacatctgggcctgtgccggctacttcctgctgcagatcctgcggagaattggagctgtgggccaggccgtgtccaggacagcctggagcgccctgtggctggccgtggtggcccctgggaaggccgccagcggggtcttctggtggctgggcatcggctggtaccagtttgtgaccctcatctcctggctgaatgtgttcctgctgacccgctgcctgaggaacatctgcaagttcctggtgctgctgatccccctcttcctgctgctggccggcctgagcctgcggggccagggcaacttcttctccttcctgcctgtgctgaactgggcctccatgcacaggacccagagggtggatgacccccaggatgtgttcaagcccaccaccagccggctgaagcagcccctgcagggcgacagcgaggccttcccctggcactggatgtctggagtggagcagcaggtggccagcctgagcggccagtgccaccaccacggggagaacctgcgggagctgaccaccctgctgcagaagctgcaggcccgggtggaccagatggagggcggggccgccggccccagcgcctctgtgagagatgctgtgggccagcccccccgggagacagacttcatggccttccaccaggagcacgaggtgaggatgagccacctggaggacatcctgggcaagctgcgggagaagtctgaggccatccagaaggagctggagcagaccaagcagaagaccatctctgctgtgggggagcagctgctgcccaccgtggagcacctgcagctggagctggaccagctgaagtctgagctgagctcctggaggcatgtgaagacaggctgtgagaccgtggatgctgtgcaggagcgggtggatgtgcaggtgcgggagatggtgaagctgctcttcagcgaggaccagcagggcggcagcctggagcagctgctgcagcgcttcagcagccagtttgtgtccaaaggagacctgcagaccatgctgcgggacctgcagctgcagatcctgagaaatgtgacccaccacgtgtctgtgaccaagcagctgcccaccagcgaggccgtggtgtctgctgtgtctgaggccggggccagcggcatcacagaggcccaggcccgggccatcgtgaacagcgccctgaagctgtacagccaggacaagacaggcatggtggactttgccctggagagcggcggcggcagcatcctgagcacccgctgcagcgagacctatgagaccaagacagccctgatgagcctgtttggcatccccctgtggtacttcagccagagcccccgggtggtgatccagcctgacatctacccaggcaactgctgggccttcaagggcagccagggctacctggtggtgcggctgtccatgatgatccaccctgctgccttcaccctggagcacatccccaagaccctgagccccaccggcaacatcagcagcgcccccaaggactttgctgtgtatggcctggagaatgagtaccaggaggagggccagctgctgggccagttcacctatgaccaggatggagagagcctgcagatgttccaggccctgaagaggccagatgacacagccttccagatcgtggagctgcgcatcttcagcaactggggccaccctgagtacacctgcctgtaccgcttccgggtgcatggagagcctgtgaagtag

SEQ ID NO: 21750 - DNA, 2109 bp, synthetic construct
  misc_feature 1..2109: note = Description of Artificial Sequence: Synthetic coding sequence
  source 1..2109: mol_type = other DNA
atgagcagaagaagcctgcggctggccaccacagcctgcaccctgggagatggagaggccgtgggcgctgacagcggcaccagcagcgctgtgtccctgaagaacagagctgcccggaccaccaagcagaggaggagcaccaacaagagcgccttcagcatcaaccacgtgtcccggcaggtgaccagcagcggcgtgagccacggcggcaccgtgtccctgcaggatgctgtgacccggcggccccctgtgctggatgagagctggatccgggagcagaccaccgtggaccacttctggggcctggatgatgatggagacctgaagggcggcaacaaggccgccatccagggcaatggagatgtgggcgctgctgctgccacagcccacaacggcttcagctgcagcaactgcagcatgctgtctgagaggaaggatgtgctgacagcccaccctgctgcccctggccctgtgtcccgggtgtacagccgggacaggaaccagaagtggaaggccgccagcggggtcttctggtggctgggcatcggctggtaccagtttgtgaccctcatctcctggctgaatgtgttcctgctgacccgctgcctgaggaacatctgcaagttcctggtgctgctgatccccctcttcctgctgctggccggcctgagcctgcggggccagggcaacttcttctccttcctgcctgtgctgaactgggcctccatgcacaggacccagagggtggatgacccccaggatgtgttcaagcccaccaccagccggctgaagcagcccctgcagggcgacagcgaggccttcccctggcactggatgtctggagtggagcagcaggtggccagcctgagcggccagtgccaccaccacggggagaacctgcgggagctgaccaccctgctgcagaagctgcaggcccgggtggaccagatggagggcggggccgccggccccagcgcctctgtgagagatgctgtgggccagcccccccgggagacagacttcatggccttccaccaggagcacgaggtgaggatgagccacctggaggacatcctgggcaagctgcgggagaagtctgaggccatccagaaggagctggagcagaccaagcagaagaccatctctgctgtgggggagcagctgctgcccaccgtggagcacctgcagctggagctggaccagctgaagtctgagctgagctcctggaggcatgtgaagacaggctgtgagaccgtggatgctgtgcaggagcgggtggatgtgcaggtgcgggagatggtgaagctgctcttcagcgaggaccagcagggcggcagcctggagcagctgctgcagcgcttcagcagccagtttgtgtccaaaggagacctgcagaccatgctgcgggacctgcagctgcagatcctgagaaatgtgacccaccacgtgtctgtgaccaagcagctgcccaccagcgaggccgtggtgtctgctgtgtctgaggccggggccagcggcatcacagaggcccaggcccgggccatcgtgaacagcgccctgaagctgtacagccaggacaagacaggcatggtggactttgccctggagagcggcggcggcagcatcctgagcacccgctgcagcgagacctatgagaccaagacagccctgatgagcctgtttggcatccccctgtggtacttcagccagagcccccgggtggtgatccagcctgacatctacccaggcaactgctgggccttcaagggcagccagggctacctggtggtgcggctgtccatgatgatccaccctgctgccttcaccctggagcacatccccaagaccctgagccccaccggcaacatcagcagcgcccccaaggactttgctgtgtatggcctggagaatgagtaccaggaggagggccagctgctgggccagttcacctatgaccaggatggagagagcctgcagatgttccaggccctgaagaggccagatgacacagccttccagatcgtggagctgcgcatcttcagcaactggggccaccctgagtacacctgcctgtaccgcttccgggtgcatggagagcctgtgaagtag

SEQ ID NO: 21751 - DNA, 2358 bp, synthetic construct
  misc_feature 1..2358: note = Description of Artificial Sequence: Synthetic coding sequence
  source 1..2358: mol_type = other DNA
atggacttcagccggctgcacatgtacagccccccccagtgtgtgcctgaaaatacaggctacacctacgccctgagcagcagctacagcagtgatgccctggactttgaaacagagcacaagctggaccctgtgtttgacagccccaggatgagcagaagaagcctgcggctggccaccacagcctgcaccctgggagatggagaggccgtgggcgctgacagcggcaccagcagcgctgtgtccctgaagaacagagctgcccggaccaccaagcagaggaggagcaccaacaagagcgccttcagcatcaaccacgtgtcccggcaggtgaccagcagcggcgtgagccacggcggcaccgtgtccctgcaggatgctgtgacccggcggccccctgtgctggatgagagctggatccgggagcagaccaccgtggaccacttctggggcctggatgatgatggagacctgaagggcggcaacaaggccgccatccagggcaatggagatgtgggcgctgctgctgccacagcccacaacggcttcagctgcagcaactgcagcatgctgtctgagaggaaggatgtgctgacagcccaccctgctgcccctggccctgtgtcccgggtgtacagccgggacaggaaccagaagtgctacttcctgctgcagatcctgcggcgcatcggggctgtgggccaggccgtgtccaggacagcctggagcgccctgtggctggccgtggtggcccctgggaaggccgccagcggggtcttctggtggctgggcatcggctggtaccagtttgtgaccctcatctcctggctgaatgtgttcctgctgacccgctgcctgaggaacatctgcaagttcctggtgctgctgatccccctcttcctgctgctggccggcctgagcctgcggggccagggcaacttcttctccttcctgcctgtgctgaactgggcctccatgcacaggacccagagggtggatgacccccaggatgtgttcaagcccaccaccagccggctgaagcagcccctgcagggcgacagcgaggccttcccctggcactggatgtctggagtggagcagcaggtggccagcctgagcggccagtgccaccaccacggggagaacctgcgggagctgaccaccctgctgcagaagctgcaggcccgggtggaccagatggagggcggcgctgctggccccagcgcctctgtgagagatgctgtgggccagcccccccgggagacagacttcatggccttccaccaggagcacgaggtgaggatgagccacctggaggacatcctgggcaagctgcgggagaagtctgaggccatccagaaggagctggagcagaccaagcagaagaccatctctgctgtgggggagcagctgctgcccaccgtggagcacctgcagctggagctggaccagctgaagtctgagctgagctcctggaggcatgtgaagacaggctgtgaaacagtggatgctgtgcaggagcgggtggatgtgcaggtgcgggagatggtgaagctgctcttcagcgaggaccagcagggcggcagcctggagcagctgctgcagcgcttcagcagccagtttgtgtccaagggggacctgcagaccatgctgcgggacctgcagctgcagatcctgagaaatgtgacccaccacgtgtctgtgaccaagcagctgcccaccagcgaggccgtggtgtctgctgtgtctgaggccggggccagcggcatcacagaggcccaggcccgggccatcgtgaacagcgccctgaagctgtacagccaggacaagacaggcatggtggactttgccctggagagcggcggcggcagcatcctgagcacccgctgcagcgagacctatgagaccaagacagccctgatgagcctgtttggcatccccctgtggtacttcagccagagcccccgggtggtgatccagcctgacatctacccaggcaactgctgggccttcaagggcagccagggctacctggtggtgcggctgtccatgatgatccaccctgctgccttcaccctggagcacatccccaagaccctgagccccactggaaacatcagcagcgcccccaaggactttgctgtgtatggcctggagaatgagtaccaggaggagggccagctgctgggccagttcacctatgaccaggatggagagagcctgcagatgttccaggccctgaagaggccagatgacacagccttccagatcgtggagctgcgcatcttcagcaactggggccaccctgagtacacctgcctgtaccgcttccgggtgcacggggagcctgtgaagtag

SEQ ID NO: 21752 - DNA, 774 bp, synthetic construct
  misc_feature 1..774: note = Description of Artificial Sequence: Synthetic coding sequence
  source 1..774: mol_type = other DNA
atggacttcagccggctgcacatgtacagccccccccagtgtgtgcctgaaaatacaggctacacctacgccctgagcagcagctacagcagtgatgccctggactttgaaacagagcacaagctggaccctgtgtttgacagccccaggatgagcagaagaagcctgcggctggccaccacagcctgcaccctgggagatggagaggccgtgggcgctgacagcggcaccagcagcgctgtgtccctgaagaacagagctgcccggaccaccaagcagaggaggagcaccaacaagagcgccttcagcatcaaccacgtgtcccggcaggtgaccagcagcggcgtgagccacggcggcaccgtgtccctgcaggatgctgtgacccggcggccccctgtgctggatgagagctggatccgggagcagaccaccgtggaccacttctggggcctggatgatgatggagacctgaagggcggcaacaaggccgccatccagggcaatggagatgtgggcgctgctgctgccacagcccacaacggcttcagctgcagcaactgcagcatgctgtctgagaggaaggatgtgctgacagcccaccctgctgcccctggccctgtgtcccgggtgtacagccgggacaggaaccagaagtgcaagagccagagcttcaagacccagaagaaggtgtgcttccccaacctgatcttccccttctgcaagagccagtgcctgcactacctgtcctggaggctgaagatcatcccctag

SEQ ID NO: 21753 - DNA, 2469 bp, synthetic construct
  misc_feature 1..2469: note = Description of Artificial Sequence: Synthetic coding sequence
  source 1..2469: mol_type = other DNA
atggacttcagccggctgcacatgtacagccccccccagtgtgtgcctgaaaatacaggctacacctacgccctgagcagcagctacagcagtgatgccctggactttgaaacagagcacaagctggaccctgtgtttgacagccccaggatgagcagaagaagcctgcggctggccaccacagcctgcaccctgggagatggagaggccgtgggcgctgacagcggcaccagcagcgctgtgtccctgaagaacagagctgcccggaccaccaagcagaggaggagcaccaacaagagcgccttcagcatcaaccacgtgtcccggcaggtgaccagcagcggcgtgagccacggcggcaccgtgtccctgcaggatgctgtgacccggcggccccctgtgctggatgagagctggatccgggagcagaccaccgtggaccacttctggggcctggatgatgatggagacctgaagggcggcaacaaggccgccatccagggcaatggagatgtgggcgctgctgctgccacagcccacaacggcttcagctgcagcaactgcagcatgctgtctgagaggaaggatgtgctgacagcccaccctgctgcccctggccctgtgtcccgggtgtacagccgggacaggaaccagaagtgtgatgactgcaagggcaagaggcacctggatgcccacacagctgcccacagccagagcccccggctgcccggccgggccggcaccctgtggcacatctgggcctgtgccggctacttcctgctgcagatcctgcggagaattggagctgtgggccaggccgtgtccaggacagcctggagcgccctgtggctggccgtggtggcccctgggaaggccgccagcggggtcttctggtggctgggcatcggctggtaccagtttgtgaccctcatctcctggctgaatgtgttcctgctgacccgctgcctgaggaacatctgcaagttcctggtgctgctgatccccctcttcctgctgctggccggcctgagcctgcggggccagggcaacttcttctccttcctgcctgtgctgaactgggcctccatgcacaggacccagagggtggatgacccccaggatgtgttcaagcccaccaccagccggctgaagcagcccctgcagggcgacagcgaggccttcccctggcactggatgtctggagtggagcagcaggtggccagcctgagcggccagtgccaccaccacggggagaacctgcgggagctgaccaccctgctgcagaagctgcaggcccgggtggaccagatggagggcggggccgccggccccagcgcctctgtgagagatgctgtgggccagcccccccgggagacagacttcatggccttccaccaggagcacgaggtgaggatgagccacctggaggacatcctgggcaagctgcgggagaagtctgaggccatccagaaggagctggagcagaccaagcagaagaccatctctgctgtgggggagcagctgctgcccaccgtggagcacctgcagctggagctggaccagctgaagtctgagctgagctcctggaggcatgtgaagacaggctgtgagaccgtggatgctgtgcaggagcgggtggatgtgcaggtgcgggagatggtgaagctgctcttcagcgaggaccagcagggcggcagcctggagcagctgctgcagcgcttcagcagccagtttgtgtccaaaggagacctgcagaccatgctgcgggacctgcagctgcagatcctgagaaatgtgacccaccacgtgtctgtgaccaagcagctgcccaccagcgaggccgtggtgtctgctgtgtctgaggccggggccagcggcatcacagaggcccaggcccgggccatcgtgaacagcgccctgaagctgtacagccaggacaagacaggcatggtggactttgccctggagagcggcggcggcagcatcctgagcacccgctgcagcgagacctatgagaccaagacagccctgatgagcctgtttggcatccccctgtggtacttcagccagagcccccgggtggtgatccagcctgacatctacccaggcaactgctgggccttcaagggcagccagggctacctggtggtgcggctgtccatgatgatccaccctgctgccttcaccctggagcacatccccaagaccctgagccccaccggcaacatcagcagcgcccccaaggactttgctgtgtatggcctggagaatgagtaccaggaggagggccagctgctgggccagttcacctatgaccaggatggagagagcctgcagatgttccaggccctgaagaggccagatgacacagccttccagatcgtggagctgcgcatcttcagcaactggggccaccctgagtacacctgcctgtaccgcttccgggtgcatggagagcctgtgaagtag

SEQ ID NO: 21754 - DNA, 1752 bp, synthetic construct
  misc_feature 1..1752: note = Description of Artificial Sequence: Synthetic coding sequence
  source 1..1752: mol_type = other DNA
atgaagctgtcctatgaaagtgagaactacaagctgaagacccatgagagcaaggactgtgagagcgagagctacaagagcaagagccatgagagcaaggcccacgccagctactacggccgcatgaatgtgcgggaggtgctgcgggaggatggccacctgtctgtgaatggagaggccctgtggaaggccgccagcggggtcttctggtggctgggcatcggctggtaccagtttgtgaccctcatctcctggctgaatgtgttcctgctgacccgctgcctgaggaacatctgcaagttcctggtgctgctgatccccctcttcctgctgctggccggcctgagcctgcggggccagggcaacttcttctccttcctgcctgtgctgaactgggcctccatgcacaggacccagagggtggatgacccccaggatgtgttcaagcccaccaccagccggctgaagcagcccctgcagggcgacagcgaggccttcccctggcactggatgtctggagtggagcagcaggtggccagcctgagcggccagtgccaccaccacggggagaacctgcgggagctgaccaccctgctgcagaagctgcaggcccgggtggaccagatggagggcggggccgccggccccagcgccagcacagacttcatggccttccaccaggagcacgaggtgaggatgagccacctggaggacatcctgggcaagctgcgggagaagtctgaggccatccagaaggagctggagcagaccaagcagaagaccatctctgctgtgggggagcagctgctgcccaccgtggagcacctgcagctggagctggaccagctgaagtctgagctgagctcctggaggcatgtgaagacaggctgtgaaacagtggatgctgtgcaggagcgggtggatgtgcaggtgcgggagatggtgaagctgctcttcagcgaggaccagcagggcggcagcctggagcagctgctgcagcgcttcagcagccagtttgtgtccaagggggacctgcagaccatgctgcgggacctgcagctgcagatcctgagaaatgtgacccaccacgtgtctgtgaccaagcagctgcccaccagcgaggccgtggtgtctgctgtgtctgaggccggggccagcggcatcacagaggcccaggcccgggccatcgtgaacagcgccctgaagctgtacagccaggacaagacaggcatggtggactttgccctggagagcggcggcggcagcatcctgagcacccgctgcagcgagacctatgagaccaagacagccctgatgagcctgtttggcatccccctgtggtacttcagccagagcccccgggtggtgatccagcctgacatctacccaggcaactgctgggccttcaagggcagccagggctacctggtggtgcggctgtccatgatgatccaccctgctgccttcaccctggagcacatccccaagaccctgagccccactggaaacatcagcagcgcccccaaggactttgctgtgtatggcctggagaatgagtaccaggaggagggccagctgctgggccagttcacctatgaccaggatggagagagcctgcagatgttccaggccctgaagaggccagatgacacagccttccagatcgtggagctgcgcatcttcagcaactggggccaccctgagtacacctgcctgtaccgcttccgggtgcacggggagcctgtgaagtag

SEQ ID NO: 21755 - DNA, 342 bp, synthetic construct
  misc_feature 1..342: note = Description of Artificial Sequence: Synthetic coding sequence
  source 1..342: mol_type = other DNA
atggacttcagccggctgcacatgtacagccccccccagtgtgtgcctgaaaatacaggctacacctacgccctgagcagcagctacagcagtgatgccctggactttgaaacagagcacaagctggaccctgtgtttgacagccccaggatgagcagaagaagcctgcggctggccaccacagcctgcaccctgggagatggagaggccgtgggcgctgacagcggcaccagcagcgctgtgtccctgaagaacagagctgcccggaccaccaagcagaggaggagcaccaacaagagcgccttcagcatcaaccacgtgtcccggcaggtgaccagctag

SEQ ID NO: 21756 - DNA, 267 bp, synthetic construct
  misc_feature 1..267: note = Description of Artificial Sequence: Synthetic coding sequence
  source 1..267: mol_type = other DNA
atggacttcagccggctgcacatgtacagccccccccagtgtgtgcctgaaaatacaggctacacctacgccctgagcagcagctacagcagtgatgccctggactttgaaacagagcacaagctggaccctgtgtttgacagccccaggatgagcagaagaagcctgcggctggccaccacagcctgcaccctgggagatggagaggccgtgggcgctgacagcggcaccagcagcgctgtgtccctgaagaacagagctgcctag

SEQ ID NO: 21757 - DNA, 2109 bp, synthetic construct; identical to SEQ ID NO: 21750
  misc_feature 1..2109: note = Description of Artificial Sequence: Synthetic coding sequence
  source 1..2109: mol_type = other DNA

SEQ ID NO: 21758 - DNA, 525 bp, synthetic construct
  misc_feature 1..525: note = Description of Artificial Sequence: Synthetic coding sequence
  source 1..525: mol_type = other DNA
atggacttcagccggctgcacatgtacagccccccccagtgtgtgcctgaaaatacaggctacacctacgccctgagcagcagctacagcagtgatgccctggactttgaaacagagcacaagctggaccctgtgtttgacagccccaggatgagcagaagaagcctgcggctggccaccacagcctgcaccctgggagatggagaggccgtgggcgctgacagcggcaccagcagcgctgtgtccctgaagaacagagctgcccggaccaccaagcagaggaggagcaccaacaagagcgccttcagcatcaaccacgtgtcccggcaggtgaccagcagcggcgtgagccacggcggcaccgtgtccctgcaggatgctgtgacccggcggccccctgtgctggatgagagctggatccgggagcagaccaccgtggaccacttctggggcctggatgatgatggagacctgaagggcggcaacaaggccgccatccagggcaatggagatgtgggcgcctag

SEQ ID NO: 21759 - DNA, 408 bp, synthetic construct
  misc_feature 1..408: note = Description of Artificial Sequence: Synthetic coding sequence
  source 1..408: mol_type = other DNA
atggacttcagccggctgcacatgtacagccccccccagtgtgtgcctgaaaatacaggctacacctacgccctgagcagcagctacagcagtgatgccctggactttgaaacagagcacaagctggaccctgtgtttgacagccccaggatgagcagaagaagcctgcggctggccaccacagcctgcaccctgggagatggagaggccgtgggcgctgacagcggcaccagcagcgctgtgtccctgaagaacagagctgcccggaccaccaagcagaggaggagcaccaacaagagcgccttcagcatcaaccacgtgtcccggcaggtgaccagcagcggcgtgagccacggcggcaccgtgtccctgcaggatgctgtgacccggcggccccctgtgctgtag

SEQ ID NO: 21760 - DNA, 267 bp, synthetic construct; identical to SEQ ID NO: 21756
  misc_feature 1..267: note = Description of Artificial Sequence: Synthetic coding sequence
  source 1..267: mol_type = other DNA

SEQ ID NO: 21761 - DNA, 2049 bp, synthetic construct
  misc_feature 1..2049: note = Description of Artificial Sequence: Synthetic coding sequence
  source 1..2049: mol_type = other DNA
atggacttcagccggctgcacatgtacagccccccccagtgtgtgcctgaaaatacaggctacacctacgccctgagcagcagctacagcagtgatgccctggactttgaaacagagcacaagctggaccctgtgtttgacagccccaggatgagcagaagaagcctgcggctggccaccacagcctgcaccctgggagatggagaggccgtgggcgctgacagcggcaccagcagcgctgtgtccctgaagaacagagctgcccggaccaccaagcagaggaggagcaccaacaagagcgccttcagcatcaaccacgtgtcccggcaggtgaccagcagcggcgtgagccacggcggcaccgtgtccctgcaggatgctgtgacccggcggccccctgtgctggatgagagctggatccgggagcagaccaccgtggaccacttctggggcaaggccgccagcggggtcttctggtggctgggcatcggctggtaccagtttgtgaccctcatctcctggctgaatgtgttcctgctgacccgctgcctgaggaacatctgcaagttcctggtgctgctgatccccctcttcctgctgctgggcctgagcctgcggggccagggcaacttcttctccttcctgcctgtgctgaactgggcctccatgcacaggacccagagggtggatgacccccaggatgtgttcaagcccaccaccagccggctgaagcagcccctgcagggcgacagcgaggccttcccctggcactggatgtctggagtggagcagcaggtggccagcctgagcggccagtgccaccaccacggggagaacctgcgggagctgaccaccctgctgcagaagctgcaggcccgggtggaccagatggagggcggggccgccggccccagcgcctctgtgagagatgctgtgggccagcccccccgggagacagacttcatggccttccaccaggagcacgaggtgaggatgagccacctggaggacatcctgggcaagctgcgggagaagtctgaggccatccagaaggagctggagcagaccaagcagaagaccatctctgctgtgggggagcagctgctgcccaccgtggagcacctgcagctggagctggaccagctgaagtctgagctgagctcctggaggcatgtgaagacaggctgtgagaccgtggatgctgtgcaggagcgggtggatgtgcaggtgcgggagatggtgaagctgctcttcagcgaggaccagcagggcggcagcctggagcagctgctgcagcgcttcagcagccagtttgtgtccaaaggagacctgcagaccatgctgcgggacctgcagctgcagatcctgagaaatgtgacccaccacgtgtctgtgaccaagcagctgcccaccagcgaggccgtggtgtctgctgtgtctgaggccggggccagcggcatcacagaggcccaggcccgggccatcgtgaacagcgccctgaagctgtacagccaggacaagacaggcatggtggactttgccctggagagcggcggcggcagcatcctgagcacccgctgcagcgagacctatgagaccaagacagccctgatgagcctgtttggcatccccctgtggtacttcagccagagcccccgggtggtgatccagcctgacatctacccaggcaactgctgggccttcaagggcagccagggctacctggtggtgcggctgtccatgatgatccaccctgctgccttcaccctggagcacatccccaagaccctgagccccaccggcaacatcagcagcgcccccaaggactttgctgtgtatggcctggagaatgagtaccaggaggagggccagctgctgggccagttcacctatgaccaggatggagagagcctgcagatgttccaggccctgaagaggccagatgacacagccttccagatcgtggagctgcgcatcttcagcaactggggccaccctgagtacacctgcctgtaccgcttccgggtgcatggagagcctgtgaagtag

SEQ ID NO: 21762 - DNA, 2925 bp, synthetic construct
  misc_feature 1..2925: note = Description of Artificial Sequence: Synthetic coding sequence
  source 1..2925: mol_type = other DNA
atgggagatgtgaggaaggccaaggaggccctggccgaggtgcagatccccccaccagatgctggccccagcccccgctgcaagcccccacctgctgagcggctgctgggccctggaagaagaagaagaggcctgcggcggcggcgggaggccgtgtggtttgaggtggtgaacatggacttcagccggctgcacatgtacagccccccccagtgtgtgcctgaaaatacaggctacacctacgccctgagcagcagctacagcagtgatgccctggactttgaaacagagcacaagctggaccctgtgtttgacagccccaggatgagcagaagaagcctgcggctggccaccacagcctgcaccctgggagatggagaggccgtgggcgctgacagcggcaccagcagcgctgtgtccctgaagaacagagctgcccggaccaccaagcagaggaggagcaccaacaagagcgccttcagcatcaaccacgtgtcccggcaggtgaccagcagcggcgtgagccacggcggcaccgtgtccctgcaggatgctgtgacccggcggccccctgtgctggatgagagctggatccgggagcagaccaccgtggaccacttctggggcctggatgatgatggagacctgaagggcggcaacaaggccgccatccagggcaatggagatgtgggcgctgctgctgccacagcccacaacggcttcagctgcagcaactgcagcatgctgtctgagaggaaggatgtgctgacagcccaccctgctgcccctggccctgtgtcccgggtgtacagccgggacaggaaccagaagtgtggggccagcttctacgtgaaccgcatcctgtggctggcccgctacacagccagcagcttcagcagcttcctggtgcagctgttccaggtggtgctgatgaagctgtcctatgaaagtgagaactacaagctgaagacccatgagagcaaggactgtgagagcgagagctacaagagcaagagccatgagagcaaggcccacgccagctactacggccgcatgaatgtgcgggaggtgctgcgggaggatggccacctgtctgtgaatggagaggccctgtgtgatgactgcaagggcaagaggcacctggatgcccacacagctgcccacagccagagcccccggctgcccggccgggccggcaccctgtggcacatctgggcctgtgccggctacttcctgctgcagatcctgcggagaattggagctgtgggccaggccgtgtccaggacagcctggagcgccctgtggctggccgtggtggcccctgggaaggccgccagcggggtcttctggtggctgggcatcggctggtaccagtttgtgaccctcatctcctggctgaatgtgttcctgctgacccgctgcctgaggaacatctgcaagttcctggtgctgctgatccccctcttcctgctgctggccggcctgagcctgcggggccagggcaacttcttctccttcctgcctgtgctgaactgggcctccatgcacaggacccagagggtggatgacccccaggatgtgttcaagcccaccaccagccggctgaagcagcccctgcagggcgacagcgaggccttcccctggcactggatgtctggagtggagcagcaggtggccagcctgagcggccagtgccaccaccacggggagaacctgcgggagctgaccaccctgctgcagaagctgcaggcccgggtggaccagatggagggcggggccgccggccccagcgcctctgtgagagatgctgtgggccagcccccccgggagacagacttcatggccttccaccaggagcacgaggtgaggatgagccacctggaggacatcctgggcaagctgcgggagaagtctgaggccatccagaaggagctggagcagaccaagcagaagaccatctctgctgtgggggagcagctgctgcccaccgtggagcacctgcagctggagctggaccagctgaagtctgagctgagctcctggaggcatgtgaagacaggctgtgagaccgtggatgctgtgcaggagcgggtggatgtgcaggtgcgggagatggtgaagctgctcttcagcgaggaccagcagggcggcagcctggagcagctgctgcagcgcttcagcagccagtttgtgtccaaaggagacctgcagaccatgctgcgggacctgcagctgcagatcctgagaaatgtgacccaccacgtgtctgtgaccaagcagctgcccaccagcgaggccgtggtgtctgctgtgtctgaggccggggccagcggcatcacagaggcccaggcccgggccatcgtgaacagcgccctgaagctgtacagccaggacaagacaggcatggtggactttgccctggagagcggcggcggcagcatcctgagcacccgctgcagcgagacctatgagaccaagacagccctgatgagcctgtttggcatccccctgtggtacttcagccagagcccccgggtggtgatccagcctgacatctacccaggcaactgctgggccttcaagggcagccagggctacctggtggtgcggctgtccatgatgatccaccctgctgccttcaccctggagcacatccccaagaccctgagccccaccggcaacatcagcagcgcccccaaggactttgctgtgtatggcctggagaatgagtaccaggaggagggccagctgctgggccagttcacctatgaccaggatggagagagcctgcagatgttccaggccctgaagaggccagatgacacagccttccagatcgtggagctgcgcatcttcagcaactggggccaccctgagtacacctgcctgtaccgcttccgggtgcatggagagcctgtgaagtag

SEQ ID NO: 21763 - DNA, 837 bp, synthetic construct
  misc_feature 1..837: note = Description of Artificial Sequence: Synthetic coding sequence
  source 1..837: mol_type = other DNA
atgggccgcatcagccctggcagccctggcctgcccaggacagtgtggtttgaggtggtgaacatggacttcagccggctgcacatgtacagccccccccagtgtgtgcctgagaacacaggctacacctacgccctgagcagcagctacagcagtgatgccctggactttgaaacagagcacaagctggaccctgtgtttgacagccccaggatgagccgccgcagcctgcggctggccaccacagcctgcaccctgggagatggagaggccgtgggcgctgacagcggcaccagcagcgctgtgtccctgaagaacagagctgcccggaccaccaagcagaggaggagcaccaacaagagcgccttcagcatcaaccacgtgtcccggcaggtgaccagcagtggagtgtcccatggaggcaccgtgtccctgcaggatgctgtgaccaggaggcctcctgtgctggatgagagctggatccgggagcagaccaccgtggaccacttctggggcctggatgatgatggagacctgaagggcggcaacaaggccgccatccagggcaatggagatgtgggcgctgctgctgccacagcccacaacggcttcagctgcagcaactgcagcatgctgtctgagaggaaggatgtgctgacagcccaccctgctgcccctggccctgtgtcccgggtgtacagccgggacaggaaccagaagtgcaagagccagagcttcaagacccagaagaaggtgtgcttccccaacctgatcttccccttctgcaagagccagtgcctgcactacctgtcctggaggctgaagatcatcccctag

SEQ ID NO: 21764 - DNA, 360 bp, synthetic construct
  misc_feature 1..360: note = Description of Artificial Sequence: Synthetic coding sequence
  source 1..360: mol_type = other DNA
atggacttcagccggctgcacatgtacagccccccccagtgtgtgcctgaaaatacaggctacacctacgccctgagcagcagctacagcagtgatgccctggactttgaaacagagcacaagctggaccctgtgtttgacagccccaggatgagcagaagaagcctgcggctggccaccacagcctgcaccctgggagatggagaggccgtgggcgctgacagcggcaccagcagcgctgtgtccctgaagaacagagctgcccggaccaccaagcagaggaggagcaccaacaagagcgccttcagcatcaaccacgtgtcccggcaggtgaccagcagcggcgtgagccacggctag

SEQ ID NO: 21765 - DNA, 2352 bp, synthetic construct
  misc_feature 1..2352: note = Description of Artificial Sequence: Synthetic coding sequence
  source 1..2352: mol_type = other DNA
atggtgatcatgtctgagttctctgctgaccctgctggccagggccagggccagcagaagcccctgcgggtgggcttctatgacattgaaagaaccctgggcaaaggaaactttgctgtggtgaagctggcccggcaccgggtgaccaagacccaggtggccatcaagatcatcgacaagacccggctggacagcagcaacctggagaagatctaccgggaggtgcagctgatgaagctgctgaaccacccccacatcatcaagctgtaccaggtgatggagaccaaggacatgctgtacatcgtgacagaatttgccaagaatggagagatgtttgactacctgaccagcaatggccacctgtctgaaaatgaggccaggaagaagttctggcagatcctgtctgctgtggagtactgccacgaccaccacatcgtgcaccgggacctgaagacagagaacctgctgctggatggcaacatggacatcaagctggccgactttggcttcggcaacttctacaagagcggggagcccctgagcacctggtgtggcagccccccctatgctgcccctgaggtgtttgagggcaaggagtatgagggcccccagctggacatctggagcctgggcgtggtgctgtatgtgctggtgtgtggcagcctgccctttgatggccccaacctgcccaccctgcggcagagggtgctggagggccgcttccgcatccccttcttcatgagccaggactgtgagagcctcatccggaggatgctggtggtggaccctgcccggcgcatcaccatcgcccagatccggcagcaccgctggatgagagctgagccctgcctgcccggccctgcctgcccagccttcagcgcccacagctacaccagcaacctgggggactatgatgagcaggccctgggcatcatgcagaccctgggcgtggaccggcagaggacagtggagagcctgcagaacagcagctacaaccactttgctgccatctactacctgctgctggagcggctgaaggagtacagaaatgcccagtgtgcccggcccggccctgcccggcagccccggcccaggagcagtgacctgagcggcctggaggtgccccaggagggcctgagcacagaccccttccggcctgccctgctgtgcccccagccccagaccctggtgcagagcgtgctgcaggccgagatggactgtgagctgcagagcagcctgcagtggcccctcttcttccctgtggatgccagctgcagcggggtcttccggcccaggcctgtgagccccagcagcctgctggacacagccatcagcgaggaggcccggcagggccctggcctggaggaggagcaggacacccaggagagcctgcccagcagcacaggccgccgccacaccctggccgaggtgtccacccggctgagccccctgacagccccctgcatcgtggtgagccccagcaccacagccagccctgctgagggcaccagcagtgacagctgcctgaccttcagcgccagcaagagccctgctggcctgagcggcaccccagccacccagggcctgctgggcgcctgcagccctgtgcggctggccagccccttcctgggcagccagagcgccacccctgtgctgcaggcccagggcggcctgggcggcgctgtgctgctgcctgtgtccttccaggagggccggcgggccagtgacaccagcctgacccagggcctgaaggccttccggcagcagctgaggaagaccaccaggaccaagggcttcctgggcctgaacaagatcaagggcctggcccggcaggtgtgccaggccccagccagccgggccagcagaggaggcctgagccccttccacgccccagcccagagccctggcctgcacggcggggccgccggcagccgggagggctggagcctgctggaggaggtgctggagcagcagaggctgctgcagctgcagcaccaccctgctgctgcccctggctgcagccaggccccccagcctgccccagcccccttcgtcatcgccccctgtgatggccctggggccgcccccctgcccagcaccctgctgaccagcggcctgcccctgctgcccccacccctgctgcagacaggagccagccctgtggccagcgctgcccagctgctggacacccacctgcacatcggcaccggccccacagccctgcctgctgtgcccccaccccggctggcccggctggcccctggctgtgagcccctgggcctgctgcagggcgactgtgagatggaggacctgatgccctgcagcctgggcacctttgtgctggtgcagtag

SEQ ID NO: 21766 - DNA, 3744 bp, synthetic construct
  misc_feature 1..3744: note = Description of Artificial Sequence: Synthetic coding sequence
  source 1..3744: mol_type = other DNA
atggaggatgctggagctgctggccctggccctgagcctgagcctgagcctgagcctgagcctgagcccgcccctgagcctgagcctgagcccaagccaggagctggcaccagcgaggccttcagccggctgtggacagatgtgatgggcatcctggatggcagcctgggcaacattgatgacctggcccagcagtatgctgactactacaacacctgcttcagtgatgtgtgtgagaggatggaggagctgaggaagagaagagtgtcccaggacctggaggtggagaagccagatgccagccccaccagcctgcagctgcggagccagatcgaggagagcctgggcttctgcagcgctgtgtccaccccagaggtggagaggaagaaccccctgcacaagagcaacagcgaggacagctctgtgggcaagggggactggaagaagaagaacaagtacttctggcagaacttcaggaagaaccagaagggcatcatgaggcagaccagcaaaggagaagatgtgggctacgtggccagcgagatcaccatgtctgatgaggagcgcatccagctgatgatgatggtgaaggagaagatgatcaccatcgaggaggccctggcccggctgaaggagtatgaggcccagcaccggcagagcgctgccctggaccctgctgactggccagatggcagctaccccacctttgatggcagcagcaactgcaacagccgggagcagagtgatgatgaaacagaggagagcgtgaagttcaagaggctgcacaagctggtgaacagcaccaggagagtgaggaagaagctgatccgggtggaggagatgaagaagcccagcacagagggcggggaggagcacgtgtttgagaacagccctgtgctggatgagaggtctgccctgtacagcggcgtgcacaagaagcccctcttctttgatggcagccctgagaagcccccagaagatgacagcgacagcctgaccaccagccccagcagcagcagcctggacacctggggcgccggcaggaagctggtgaagaccttcagcaagggggagagccggggcctcatcaagccacccaagaagatgggcaccttcttctcctacccagaggaggagaaggcccagaaggtgagccgcagcctgacagaaggagagatgaagaagggcctgggcagcctgagccacggccgcacctgcagctttggaggctttgacctgaccaacagaagcctgcacgtgggcagcaacaacagcgaccccatgggcaaggagggggactttgtgtacaaggaggtgatcaagagccccacagccagccgcatcagcctgggcaagaaggtgaagtctgtgaaggagaccatgaggaagaggatgagcaagaagtacagcagctctgtgtctgagcaggacagcggcctggatggcatgcctggcagccccccacccagccagcctgaccctgagcacctggacaagcccaagctgaaggccggcggctctgtggagagcctgcggagcagcctgagcggccagagctccatgagcggccagacagtgtccaccacagacagcagcaccagcaaccgggagagcgtgaagtcagaagatggagatgatgaggagcccccctaccggggccccttctgtggccgggcccgggtgcacacagacttcacccccagcccctatgacacagacagcctgaagctgaagaagggggacatcatcgacatcatcagcaagccacccatgggcacctggatgggcctgctgaacaacaaggtgggcaccttcaagttcatctacgtggatgtgctgtctgaagatgaggagaagcccaagaggcccaccaggagaagaaggaagggccggcccccccagcccaagtctgtggaggacctgctggaccgcatcaacctgaaggagcacatgcccaccttcctgttcaacggctatgaggacctggacaccttcaagctgctggaggaggaggacctggatgagctgaacatccgggaccctgagcacagagctgtgctgctgacagctgtggagctgctgcaggagtatgacagcaacagcgaccagagcggcagccaggagaagctgctggtggacagccagggcctgagcggctgcagcccccgggacagcggctgctatgagagcagcgagaacctggagaatggcaagaccaggaaggccagcctgctgagcgccaagagcagcacagagcccagcctgaagagcttcagcaggaaccagctgggcaactaccccaccctgcccctgatgaagtctggagatgccctgaagcagggccaggaggagggccgcctgggcggcggcctggccccagacaccagcaagagctgtgaccccccaggagtgacaggcctgaacaagaacagaagaagcctgcctgtgtccatctgccgcagctgtgagaccctggagggcccccagacagtggacacctggcccaggagccacagcctggatgacctgcaggtggagcctggagctgagcaggatgtgcccacagaggtgacagagcccccaccccagatcgtgcctgaggtgccccagaagaccacagccagcagcaccaaggcccagcccctggagcaggacagcgctgtggacaatgccctgctgctgacccagagcaagcgcttcagcgagccccagaagctgaccaccaagaagctggagggcagcattgctgccagcggccggggcctgagccccccccagtgcctgcccaggaactatgatgcccagcccccaggggccaagcacggcctggcccggacccccctggagggccacaggaaaggacatgaatttgagggcacccaccaccccctgggcaccaaggagggcgtggatgctgagcagaggatgcagcccaagatccccagccagcccccacctgtgcctgccaagaagagccgggagcggctggccaacggcctgcaccctgtgcccatgggccccagcggggccctgcccagcccagatgccccctgcctgcctgtgaagaggggcagccctgccagccccaccagccccagcgactgccccccagccctggccccccggcccctgagcggccaggcccctggcagcccccccagcacccggcccccaccctggctgtctgagctgcctgagaacaccagcctgcaggagcacggcgtgaagctgggccctgccctgaccaggaaggtgtcctgtgcccggggcgtggacctggagaccctgacagagaacaagctgcatgctgagggcatcgacctgacagaggagccctacagcgacaagcacggccgctgtggcatccctgaggccctggtgcagagatatgcagaggacctggaccagcctgagagagatgtggccgccaacatggaccagatccgggtgaagcagctgaggaagcagcacaggatggccatccccagcggcggcctgacagagatctgcaggaagcctgtgtccccaggctgcatcagctctgtgtctgactggctgatcagcatcggcctgcccatgtatgccggcaccctgagcacagctggcttcagcaccctgagccaggtgcccagcctgagccacacctgcctgcaggaggccggcatcacagaggagcggcacatcaggaagctgctgtctgctgcccggctcttcaagctgcccccaggccctgaggccatgtag

SEQ ID NO: 21767 - DNA, 255 bp, synthetic construct
  misc_feature 1..255: note = Description of Artificial Sequence: Synthetic coding sequence
  source 1..255: mol_type = other DNA
atggaggagcaggactgcagagatggcagcctgggcaacattgatgacctggcccagcagtatgctgactactacaacacctgcttcagtgatgtgtgtgagaggatggaggagctgaggaagagaagagtgtcccaggacctggaggtggagaagccagatgccagccccaccagcctgcagctgcggagccagatcgaggagagcctgggcttctgcagcgctgtgtccaccccagaggtggagaggaagtag

SEQ ID NO: 21768 - DNA, 249 bp, synthetic construct
  misc_feature 1..249: note = Description of Artificial Sequence: Synthetic coding sequence
  source 1..249: mol_type = other DNA
caggcccaggacttcaaggatggcagcctgggcaacattgatgacctggcccagcagtatgctgactactacaacacctgcttcagtgatgtgtgtgagaggatggaggagctgaggaagagaagagtgtcccaggacctggaggtggagaagccagatgccagccccaccagcctgcagctgcggagccagatcgaggagagcctgggcttctgcagcgctgtgtccaccccagaggtggagaggtag

SEQ ID NO: 21769 - DNA, 2091 bp, synthetic construct
  misc_feature 1..2091: note = Description of Artificial Sequence: Synthetic coding sequence
  source 1..2091: mol_type = other DNA
atgcccaagcccagccgggagcagagtgatgatgaaacagaggagagcgtgaagttcaagaggctgcacaagctggtgaacagcacccggcgggtgaggaagaagctgatccgggtggaggagatgaagaagcccagcacagaaggaggagaggagcacgtgtttgagaacagccctgtgctggatgagaggtctgccctgtacagcggcgtgcacaagaagcccctcttctttgatggcagccctgagaagcccccagaagatgacagcgacagcctgaccaccagccccagcagcagcagcctggacacctggggcgccggcaggaagctggtgaagaccttcagcaaaggagagagccggggcctcatcaagccacccaagaagatgggcaccttcttctcctacccagaggaggagaaggcccagaaggtgagccgcagcctgacagaaggagagatgaagaagggcctgggcagcctgagccacggccgcacctgcagctttggaggctttgacctgaccaacagaagcctgcacgtgggcagcaacaacagcgaccccatgggcaaggagggggactttgtgtacaaggaggtgatcaagagccccacagccagccgcatcagcctgggcaagaaggtgaagtctgtgaaggagaccatgaggaagaggatgagcaagaagtacagcagctctgtgtctgagcaggacagcggcctggatggcatgcctggcagccccccacccagccagcctgaccctgagcacctggacaagcccaagctgaaggccggcggctctgtggagagcctgcggagcagcctgagcggccagagctccatgagcggccagacagtgtccaccacagacagcagcaccagcaaccgggagagcgtgaagtcagaagatggagatgatgaggagcccccctaccggggccccttctgtggccgggcccgggtgcacacagacttcacccccagcccctatgacacagacagcctgaagctgaagaagggggacatcatcgacatcatcagcaagccacccatgggcacctggatgggcctgctgaacaacaaggtgggcaccttcaagttcatctacgtggatgtgctgtctgaagatgaggagaagcccaagaggcccaccaggagaagaaggaagggccggcccccccagcccaagtctgtggaggacctgctggaccgcatcaacctgaaggagcacatgcccaccttcctgttcaacggctatgaggacctggacaccttcaagctgctggaggaggaggacctggatgagctgaacatccgggaccctgagcacagagctgtgctgctgacagctgtggagctgctgcaggagtatgacagcaacagcgaccagagcggcagccaggagaagctgctggtggacagccagggcctgagcggctgcagcccccgggacagcggctgctatgagagcagcgagaacctggagaatggcaagaccaggaaggccagcctgctgagcgccaagagcagcacagagcccagcctgaagagcttcagcaggaaccagctgggcaactaccccaccctgcccctgatgaagtctggagatgccctgaagcagggccaggaggagggccgcctgggcggcggcctggccccagacaccagcaagagctgtgaccccccaggagtgacaggcctgaacaagaacagaagaagcctgcctgtgtccatctgccgcagctgtgagaccctggagggcccccagacagtggacacctggcccaggagccacagcctggatgacctgcaggtggagcccggggctgagcaggatgtgcccacagaggtgacagagcccccaccccagatcgtgcctgaggtgccccagaagaccacagccagcagcaccaaggcccagcccctggagcaggacagcgctgtggacaatgccctgctgctgacccagagcaagcgcttcagcgagccccagaagctgaccaccaagaagctggagggcagcattgctgccagcggccggggcctgagccccccccagtgcctgcccagaaattatgatgcccagtag

SEQ ID NO: 21770 - DNA, 1974 bp, synthetic construct
  misc_feature 1..1974: note = Description of Artificial Sequence: Synthetic coding sequence
  source 1..1974: mol_type = other DNA
atgggcacctggatgggcctgctgaacaacaaggtgggcaccttcaagttcatctacgtggatgtgctgtctgaagatgaggagaagcccaagaggcccaccaggagaagaaggaagggccggcccccccagcccaagtctgtggaggacctgctggaccgcatcaacctgaaggagcacatgcccaccttcctgttcaacggctatgaggacctggacaccttcaagctgctggaggaggaggacctggatgagctgaacatccgggaccctgagcacagagctgtgctgctgacagctgtggagctgctgcaggagtatgacagcaacagcgaccagagcggcagccaggagaagctgctggtggacagccagggcctgagcggctgcagcccccgggacagcggctgctatgagagcagcgagaacctggagaatggcaagaccaggaaggccagcctgctgagcgccaagagcagcacagagcccagcctgaagagcttcagcaggaaccagctgggcaactaccccaccctgcccctgatgaagtctggagatgccctgaagcagggccaggaggagggccgcctgggcggcggcctggccccagacaccagcaagagctgtgaccccccaggagtgacaggcctgaacaagaacagaagaagcctgcctgtgtccatctgccgcagctgtgagaccctggagggcccccagacagtggacacctggcccaggagccacagcctggatgacctgcaggtggagcctggagctgagcaggatgtgcccacagaggtgacagagcccccaccccagatcgtgcctgaggtgccccagaagaccacagccagcagcaccaaggcccagcccctggagcaggacagcgctgtggacaatgccctgctgctgacccagagcaagcgcttcagcgagccccagaagctgaccaccaagaagctggagggcagcattgctgccagcggccggggcctgagccccccccagtgcctgcccaggaactatgatgcccagcccccaggggccaagcacggcctggcccggacccccctggagggccacaggaaaggacatgaatttgagggcacccaccaccccctgggcaccaaggagggcgtggatgctgagcagaggatgcagcccaagatccccagccagcccccacctgtgcctgccaagaagagccgggagcggctggccaacggcctgcaccctgtgcccatgggccccagcggggccctgcccagcccagatgccccctgcctgcctgtgaagaggggcagccctgccagccccaccagccccagcgactgccccccagccctggccccccggcccctgagcggccaggcccctggcagcccccccagcacccggcccccaccctggctgtctgagctgcctgagaacaccagcctgcaggagcacggcgtgaagctgggccctgccctgaccaggaaggtgtcctgtgcccggggcgtggacctggagaccctgacagagaacaagctgcatgctgagggcatcgacctgacagaggagccctacagcgacaagcacggccgctgtggcatccctgaggccctggtgcagagatatgcagaggacctggaccagcctgagagagatgtggccgccaacatggaccagatccgggtgaagcagctgaggaagcagcacaggatggccatccccagcggcggcctgacagagatctgcaggaagcctgtgtccccaggctgcatcagctctgtgtctgactggctgatcagcatcggcctgcccatgtatgccggcaccctgagcacagctggcttcagcaccctgagccaggtgcccagcctgagccacacctgcctgcaggaggccggcatcacagaggagcggcacatcaggaagctgctgtctgctgcccggctcttcaagctgcccccaggccctgaggccatgtag

SEQ ID NO: 21771 - DNA, 621 bp, synthetic construct
  misc_feature 1..621: note = Description of Artificial Sequence: Synthetic coding sequence
  source 1..621: mol_type = other DNA
atgctgcccccagccatccacttctacctgctgcccctggcctgcatcctgatgaagagctgcctggccttcaagaatgatgccacagagatcctgtacagccacgtggtgaagcctgtgcctgcccaccccagcagcaacagcaccctgaaccaggccagaaatggaggccgccacttcagcaacacaggcctggacaggaacaccagggtgcaggtgggctgccgggagctgcggagcaccaagtacatcagtgatggccagtgcaccagcatcagccccctgaaggagctggtgtgtgctggagaatgtctgcccctgcctgtgctgcccaactggattggaggcggctacggcaccaagtactggagcagaagaagcagccaggagtggaggtgtgtgaatgacaagaccaggacccagaggatccagctgcagtgccaggacggcagcaccaggacctacaagatcaccgtggtgacagcctgcaagtgcaagcgctacacccggcagcacaatgaaagcagccacaactttgagagcatgagccctgccaagcctgtgcagcaccaccgggagaggaagagggccagcaagagcagcaagcacagcatgtcctag

SEQ ID NO: 21772 - DNA, 693 bp, synthetic construct
  misc_feature 1..693: note = Description of Artificial Sequence: Synthetic coding sequence
  source 1..693: mol_type = other DNA
atgctgcccccagccatccacttctacctgctgcccctggcctgcatcctgatgaagagctgcctggccttcaagaatgatgccacagagatcctgtacagccacgtggtgaagcctgtgcctgcccaccccagcagcaacagcaccctgaaccaggccagaaatggaggccgccacttcagcaacacaggcctggacaggaacagaacagagagcctgacccggcagaactacttctggctgtttcctggggccttcctgcggcagctgcaggaggcccgggtgcaggtgggctgccgggagctgcggagcaccaagtacatcagtgatggccagtgcaccagcatcagccccctgaaggagctggtgtgtgctggagaatgtctgcccctgcctgtgctgcccaactggattggaggcggctacggcaccaagtactggagcagaagaagcagccaggagtggaggtgtgtgaatgacaagaccaggacccagaggatccagctgcagtgccaggacggcagcaccaggacctacaagatcaccgtggtgacagcctgcaagtgcaagcgctacacccggcagcacaatgaaagcagccacaactttgagagcatgagccctgccaagcctgtgcagcaccaccgggagaggaagagggccagcaagagcagcaagcacagcatgtcctag

SEQ ID NO: 21773 - DNA, 2229 bp, synthetic construct
  misc_feature 1..2229: note = Description of Artificial Sequence: Synthetic coding sequence
  source 1..2229: mol_type = other DNA
atgggcagcgagaacagcgccctgaagagctacaccctgcgggagccccccttcaccctgcccagcggcctggccgtgtacccagctgtgctgcaggacggcaagtttgcctctgtgtttgtgtacaagagagaaaatgaagacaaggtgaacaaggccgccaagcacctgaagaccctgcggcacccctgcctgctgcgcttcctgagctgcaccgtggaggctgatggcatccacctggtgacagagcgggtgcagcccctggaggtggccctggagaccctgagcagcgctgaggtgtgtgccggcatctatgacatcctgctggccctgatcttcctgcatgaccggggccacctgacccacaacaacgtgtgcctgagctctgtgtttgtgtctgaagatggccactggaagctgggcggcatggagaccgtgtgcaaggtgtcccaggccaccccagagttcctgcggagcatccagagcatccgggaccctgccagcatccccccagaggagatgagccctgagttcaccaccctgcctgaatgtcatggccacgccagagatgccttctcctttggcaccctggtggagagcctgctgaccatcctgaatgagcaggtgtctgcagatgtgctgagcagcttccagcagaccctgcacagcaccctgctgaaccccatccccaagtgcaggcctgccctgtgcaccctgctgagccatgacttcttcagaaatgacttcctggaggtggtgaacttcctgaagagcctgaccctgaagtctgaggaggagaagacagagttcttcaagttcctgctggacagagtgtcctgcctgtctgaggagctgattgccagccggctggtgcccctgctgctgaaccagctggtgtttgctgagcctgtggccgtgaagagcttcctgccctacctgctgggccccaagaaggaccacgcccagggcgagaccccctgcctgctgagccctgccctcttccagagcagggtcatccctgtgctgctgcagctgtttgaggtgcatgaggagcacgtgaggatggtgctgctgagccacatcgaggcctacgtggagcacttcacccaggagcagctgaagaaggtgatcctgccccaggtgctgctgggcctgcgggacaccagtgacagcatcgtggccatcaccctgcacagcctggccgtgctggtgtccctgctgggccctgaggtggtggtgggcggggagaggaccaagatcttcaagaggacagcccccagcttcaccaagaacacagacctgagcctggaggacagccccatgtgtgtggtgtgcagccaccacagccagatcagccccatcctggagaaccccttcagcagcatcttccccaagtgcttcttcagcggcagcacccccatcaacagcaagaagcacatccagagggactactacaacaccctgctgcagacaggagaccccttcagccagcccatcaagttccccatcaatggcctgagtgatgtgaagaacaccagcgaggacagcgagaacttccccagcagcagcaagaagtctgaggagtggccagactggagcgagcctgaggagcctgagaaccagacagtgaacatccagatctggccccgggagccctgtgatgatgtgaagagccagtgcaccaccctggatgtggaggagagctcctgggatgactgtgagcccagcagcctggacaccaaggtgaaccctgggggcggcatcacagccaccaagcctgtgaccagcggggagcagaagcccatcccagccctgctgagcctgacagaggagagcatgccctggaagagcagcctgccccagaagatcagcctggtgcagagaggagatgatgctgaccagatcgagccccccaaggtgagcagccaggagcggcccctgaaggtgcccagcgagctgggcctgggggaggagttcaccatccaggtgaagaagaagcctgtgaaggaccctgagatggactggtttgctgacatgatccctgagatcaagcccagcgctgccttcctgatcctgcctgagctgaggacagagatggtgcccaagaaggatgatgtgtcccctgtgatgcagttcagcagcaagtttgctgctgctgagatcacagaaggagaggccgagggctgggaggaggagggggagctgaactgggaggacaacaactggtag

SEQ ID NO: 21774 - DNA, 2067 bp, synthetic construct
  misc_feature 1..2067: note = Description of Artificial Sequence: Synthetic coding sequence
  source 1..2067: mol_type = other DNA
atgggcagcgagaacagcgccctgaagagctacaccctgcgggagccccccttcaccctgcccagcggcctggccgtgtacccagctgtgctgcaggacggcaagtttgcctctgtgtttgtgtacaagagagaaaatgaagacaaggtgaacaaggccgccaagcacctgaagaccctgcggcacccctgcctgctgcgcttcctgagctgcaccgtggaggctgatggcatccacctggtgacagagcgggtgcagcccctggaggtggccctggagaccctgagcagcgctgaggtgtgtgccggcatctatgacatcctgctggccctgatcttcctgcatgaccggggccacctgacccacaacaacgtgtgcctgagctctgtgtttgtgtctgaagatggccactggaagctgggcggcatggagaccgtgtgcaaggtgtcccaggccaccccagagttcctgcggagcatccagagcatccgggaccctgccagcatccccccagaggagatgagccctgagttcaccaccctgcctgaatgtcatggccacgccagagatgccttctcctttggcaccctggtggagagcctgctgaccatcctgaatgagcaggtgtctgcagatgtgctgagcagcttccagcagaccctgcacagcaccctgctgaaccccatccccaagtgcaggcctgccctgtgcaccctgctgagccatgacttcttcagaaatgacttcctggaggtggtgaacttcctgaagagcctgaccctgaagtctgaggaggagaagacagagttcttcaagttcctgctggacagagtgtcctgcctgtctgaggagctgattgccagccggctggtgcccctgctgctgaaccagctggtgtttgctgagcctgtggccgtgaagagcttcctgccctacctgctgggccccaagaaggaccacgcccagggcgagaccccctgcctgctgagccctgccctcttccagagcagggtcatccctgtgctgctgcagctgtttgaggtgcatgaggagcacgtgaggatggtgctgctgagccacatcgaggcctacgtggagcacttcacccaggagcagctgaagaaggtgatcctgccccaggtgctgctgggcctgcgggacaccagtgacagcatcgtggccatcaccctgcacagcctggccgtgctggtgtccctgctgggccctgaggtggtggtgggcggggagaggaccaagatcttcaagaggacagcccccagcttcaccaagaacacagacctgagcctggagggggaccccttcagccagcccatcaagttccccatcaatggcctgagtgatgtgaagaacaccagcgaggacagcgagaacttccccagcagcagcaagaagtctgaggagtggccagactggagcgagcctgaggagcctgagaaccagacagtgaacatccagatctggccccgggagccctgtgatgatgtgaagagccagtgcaccaccctggatgtggaggagagctcctgggatgactgtgagcccagcagcctggacaccaaggtgaaccctgggggcggcatcacagccaccaagcctgtgaccagcggggagcagaagcccatcccagccctgctgagcctgacagaggagagcatgccctggaagagcagcctgccccagaagatcagcctggtgcagagaggagatgatgctgaccagatcgagccccccaaggtgagcagccaggagcggcccctgaaggtgcccagcgagctgggcctgggggaggagttcaccatccaggtgaagaagaagcctgtgaaggaccctgagatggactggtttgctgacatgatccctgagatcaagcccagcgctgccttcctgatcctgcctgagctgaggacagagatggtgcccaagaaggatgatgtgtcccctgtgatgcagttcagcagcaagtttgctgctgctgagatcacagaaggagaggccgagggctgggaggaggagggggagctgaactgggaggacaacaactggtag

SEQ ID NO: 21775 - DNA, 2229 bp, synthetic construct; identical to SEQ ID NO: 21773
  misc_feature 1..2229: note = Description of Artificial Sequence: Synthetic coding sequence
  source 1..2229: mol_type = other DNA

SEQ ID NO: 21776 - DNA, 1767 bp, synthetic construct
  misc_feature 1..1767: note = Description of Artificial Sequence: Synthetic coding sequence
  source 1..1767: mol_type = other DNA
atgggcagcgagaacagcgccctgaagagctacaccctgcgggagccccccttcaccctgcccagcggcctggccgtgtacccagctgtgctgcaggacggcaagtttgcctctgtgtttgtgtacaagagagaaaatgaagacaaggtgaacaaggccgccaagcacctgaagaccctgcggcacccctgcctgctgcgcttcctgagctgcaccgtggaggctgatggcatccacctggtgacagagcgggtgcagcccctggaggtggccctggagaccctgagcagcgctgaggtgtgtgccggcatctatgacatcctgctggccctgatcttcctgcatgaccggggccacctgacccacaacaacgtgtgcctgagctctgtgtttgtgtctgaagatggccactggaagctgggcggcatggagaccgtgtgcaaggtgtcccaggccaccccagagttcctgcggagcatccagagcatccgggaccctgccagcatccccccagaggagatgagccctgagttcaccaccctgcctgaatgtcatggccacgccagagatgccttctcctttggcaccctggtggagagcctgctgaccatcctgaatgagcaggtgtctgcagatgtgctgagcagcttccagcagaccctgcacagcaccctgctgaaccccatccccaagtgcaggcctgccctgtgcaccctgctgagccatgacttcttcagaaatgacttcctggaggtggtgaacttcctgaagagcctgaccctgaagtctgaggaggagaagacagagttcttcaagttcctgctggacagagtgtcctgcctgtctgaggagctgattgccagccggctggtgcccctgctgctgaaccagctggtgtttgctgagcctgtggccgtgaagagcttcctgccctacctgctgggccccaagaaggaccacgcccagggcgagaccccctgcctgctgagccctgccctcttccagagcagggtcatccctgtgctgctgcagctgtttgaggtgcatgaggagcacgtgaggatggtgctgctgagccacatcgaggcctacgtggagcacttcacccaggagcagctgaagaaggtgatcctgccccaggtgctgctgggcctgcgggacaccagtgacagcatcgtggccatcaccctgcacagcctggccgtgctggtgtccctgctgggccctgaggtggtggtgggcggggagaggaccaagatcttcaagaggacagcccccagcttcaccaagaacacagacctgagcctggagggggaccccttcagccagcccatcaagttccccatcaatggcctgagtgatgtgaagaacaccagcgaggacagcgagaacttccccagcagcagcaagaagtctgaggagtggccagactggagcgagcctgaggagcctgagaaccagacagtgaacatccagatctggccccgggagccctgtgatgatgtgaagagccagtgcaccaccctggatgtggaggagagctcctgggatgactgtgagcccagcagcctggacaccaaggtgaaccctgggggcggcatcacagccaccaagcctgtgaccagcggggagcagaagcccatcccagccctgctgagcctgacagaggagagcatgccctggaagagcagcctgccccagaagatcagcctggtgcagagaggagatgatgctgaccagatcgagccccccaaggtgagcagctag

SEQ ID NO: 21777 - DNA, 1008 bp, synthetic construct
  misc_feature 1..1008: note = Description of Artificial Sequence: Synthetic coding sequence
  source 1..1008: mol_type = other DNA
atgaagctgcctgcccgggtcttcttcaccctgggcagccggctgccctgtggcctggccccccggcgcttcttctcctatggcaccaagatcctgtaccagaacacagaggccctgcagagcaagttcttcagccccctgcagaaggccatgctgccccccaacagcttccagggcaaggtggccttcatcactggaggcggcaccggcctgggcaagggcatgaccaccctgctgagcagcctgggcgcccagtgtgtgattgccagcaggaagatggatgtgctgaaggccacagctgagcagatcagcagccagacaggcaacaaggtgcacgccatccagtgtgatgtgcgggaccctgacatggtgcagaacacagtgtctgagctgatcaaggtggccggccaccccaacatcgtcatcaacaatgctgctggcaacttcatcagccccacagagcggctgagccccaatgcctggaagaccatcacagacatcgtgctgaatggaacagcctttgtgaccctggagatcggcaagcagctgatcaaggcccagaagggggccgccttcctgagcatcaccaccatctatgcagagaccggcagcggctttgtggtgcccagcgccagcgccaaggccggcgtggaggccatgagcaagagcctggccgctgagtggggcaagtatggcatgaggttcaacgtcatccagcccggccccatcaagaccaagggggccttcagccggctggaccccaccggcacctttgagaaggagatgattggccgcatcccctgtggccgcctgggcaccgtggaggagctggccaacctggccgccttcctgtgcagcgactatgcctcctggatcaatggagctgtgatcaagtttgatggaggagaggaggtgctgatcagcggggagttcaatgacctgaggaaggtgaccaaggagcagtgggacaccatcgaggagctgatcaggaagaccaagggcagctag

SEQ ID NO: 21778 - DNA, 945 bp, synthetic construct
  misc_feature 1..945: note = Description of Artificial Sequence: Synthetic coding sequence
  source 1..945: mol_type = other DNA
atgggcatcggccgctctgagggcggcagaagaggagctgccctgggcgtgctgctggccctgggcgccgccctgctggccgtgggcagcgcctctgaatatgactatgtgtccttccagagcgacatcggcccctaccagagcggccgcttctacaccaagccaccccagtgtgtggacatcccagctgacctgcggctgtgccacaacgtgggctacaagaagatggtgctgcccaacctgctggagcacgagaccatggccgaggtgaagcagcaggccagctcctgggtgcccctgctgaacaagaactgccacgccggcacccaggtgttcctgtgcagcctgtttgcccctgtgtgcctggaccggcccatctacccctgccgctggctgtgtgaggccgtgcgggacagctgtgagcctgtgatgcagttcttcggcttctactggccagagatgctgaagtgtgacaagtttcctgaaggagatgtgtgcatcgccatgaccccaccaaatgccacagaggccagcaagccccagggcaccaccgtgtgccccccctgtgacaatgagctgaagtctgaggccatcatcgagcacctgtgtgccagcgagtttgccctgaggatgaagatcaaggaggtgaagaaggaaaatggagacaagaagatcgtgcccaagaagaagaagcccctgaagctgggccccatcaagaagaaggacctgaagaagctggtgctgtacctgaagaatggagctgactgcccctgccaccagctggacaacctgagccaccacttcctgatcatgggcaggaaggtgaagagccagtacctgctgacagccatccacaagtgggacaagaagaacaaggagttcaagaacttcatgaagaagatgaagaaccatgaatgtcccaccttccagagcgtcttcaagtag

SEQ ID NO: 21779 - DNA, 1041 bp, synthetic construct
  misc_feature 1..1041: note = Description of Artificial Sequence: Synthetic coding sequence
  source 1..1041: mol_type = other DNA
atgttcctgagcatcctggtggccctgtgcctgtggctgcacctggccctgggcgtgcggggggccccctgtgaggccgtgcgcatccccatgtgccgccacatgccctggaacatcaccaggatgcccaaccacctgcaccacagcacccaggagaatgccatcctggccatcgagcagtatgaggagctggtggatgtgaactgcagcgctgtgctgcgcttcttcctgtgtgccatgtatgcccccatctgcaccctggagttcctgcatgaccccatcaagccctgcaagtctgtgtgccagagggccagagatgactgtgagcccctgatgaagatgtacaaccacagctggccagagagcctggcctgtgatgagctgcctgtgtatgaccggggcgtgtgcatcagccctgaggccatcgtgacagacctgcctgaagatgtgaagtggattgacatcaccccagacatgatggtgcaggagcggcccctggatgtggactgcaagaggctgagcccagaccgctgcaagtgcaagaaggtgaagcccaccctggccacctacctgagcaagaactacagctatgtgatccacgccaagatcaaggctgtgcagaggagcggctgcaatgaggtgaccaccgtggtggatgtgaaggagatcttcaagagcagcagccccatccccaggacccaggtgcccctcatcaccaacagcagctgccagtgcccccacatcctgccccaccaggatgtgctgatcatgtgctatgagtggaggagcaggatgatgctgctggagaactgcctggtggagaagtggagggaccagctgagcaagaggagcatccagtgggaggagcggctgcaggagcagaggagaacagtgcaggacaagaagaagacagctggccgcaccagccgcagcaacccccccaagcccaagggcaagcccccagcccccaagccagccagccccaagaagaacatcaagaccaggtctgcccagaagaggaccaaccccaagagggtgtag

SEQ ID NO: 21780 - DNA, 1032 bp, synthetic construct
  misc_feature 1..1032: note = Description of Artificial Sequence: Synthetic coding sequence
  source 1..1032: mol_type = other DNA
atgagggtggccggccgggagggccgcttcctgtctgctggggtggccgcccgggagggcagcgccatgttcctgagcatcctggtggccctgtgcctgtggctgcacctggccctgggcgtgcggggggccccctgtgaggccgtgcgcatccccatgtgccgccacatgccctggaacatcaccaggatgcccaaccacctgcaccacagcacccaggagaatgccatgtatgcccccatctgcaccctggagttcctgcatgaccccatcaagccctgcaagtctgtgtgccagagggccagagatgactgtgagcccctgatgaagatgtacaaccacagctggccagagagcctggcctgtgatgagctgcctgtgtatgacagaggagtgtgcatcagccctgaggccatcgtgacagacctgcctgaagatgtgaagtggattgacatcaccccagacatgatggtgcaggagcggcccctggatgtggactgcaagaggctgagcccagaccgctgcaagtgcaagaaggtgaagcccaccctggccacctacctgagcaagaactacagctatgtgattcatgccaagatcaaggctgtgcagaggagcggctgcaatgaggtgaccaccgtggtggatgtgaaggagatcttcaagagcagcagccccatccccaggacccaggtgcccctcatcaccaacagcagctgccagtgcccccacatcctgccccaccaggatgtgctgatcatgtgctatgagtggaggagcaggatgatgctgctggagaactgcctggtggagaagtggagggaccagctgagcaagaggagcatccagtgggaggagcggctgcaggagcagaggagaacagtgcaggacaagaagaagacagctggccgcaccagccgcagcaacccccccaagcccaagggcaagcccccagcccccaagccagccagccccaagaagaacatcaagaccaggtctgcccagaagaggaccaaccccaagagggtgtag

SEQ ID NO: 21781 - DNA, 954 bp, synthetic construct
  misc_feature 1..954: note = Description of Artificial Sequence: Synthetic coding sequence
  source 1..954: mol_type = other DNA
atgagagctgctgctgctgggggcggcgtgaggacagctgccctggccctgctgctgggcgccctgcactgggccccagcccgctgtgaggagtatgactactacggctggcaggccgagcccctgcacggccgcagctacagcaagccaccccagtgcctggacatcccagctgacctgcccctgtgccacacagtgggctacaagaggatgaggctgcccaacctgctggagcacgagagcctggccgaggtgaagcagcaggccagctcctggctgcccctgctggccaagcgctgccacagcgacacccaggtgttcctgtgcagcctgtttgcccctgtgtgcctggaccggcccatctacccctgccgcagcctgtgtgaggccgtgcgggccggctgtgcccccctgatggaggcctacggcttcccctggccagagatgctgcactgccacaagttccccctggacaatgacctgtgcatcgctgtgcagtttggccacctgcctgccacagcccctcctgtgaccaagatctgtgcccagtgtgagatggagcacagcgcagatggcctgatggagcagatgtgcagcagtgactttgtggtgaagatgaggatcaaggagatcaagattgaaaatggagacaggaagctgattggagcccagaagaagaagaagctgctgaagccaggccccctgaagaggaaggacaccaagaggctggtgctgcacatgaagaatggagctggctgcccctgcccccagctggacagcctggccggcagcttcctggtgatgggcaggaaggtggatggccagctgctgctgatggctgtgtaccgctgggacaagaagaacaaggagatgaagtttgctgtgaagttcatgttctcctacccctgcagcctgtactaccccttcttctatggagctgctgagccccactag

SEQ ID NO: 21782 - DNA, 903 bp, synthetic construct
  misc_feature 1..903: note = Description of Artificial Sequence: Synthetic coding sequence
  source 1..903: mol_type = other DNA
atgagaattgctgtgatctgcttctgcctgctgggcatcacctgtgccatccctgtgaagcaggccgacagcggcagcagcgaggagaagcagctgtacaacaagtacccagatgctgtggccacctggctgaacccagaccccagccagaagcagaacctgctggccccccagaccctgcccagcaagagcaatgaaagccatgaccacatggatgacatggatgatgaagatgatgatgaccacgtggacagccaggacagcattgacagcaatgacagtgatgatgtggatgacacagatgacagccaccagagtgatgagagccaccacagtgatgaaagtgatgagctggtgacagacttccccacagacctgcctgccacagaggtgttcacccctgtggtgcccaccgtggacacctatgatggccgcggggacagcgtggtgtatggcctgcggagcaagagcaagaagttcagaagaccagacatccagtacccagatgccacagatgaggacatcaccagccacatggagagcgaggagctgaatggagcctacaaggccatccctgtggcccaggacctgaatgcccccagcgactgggacagccggggcaaggacagctatgagaccagccagctggatgaccagagcgctgagacccacagccacaagcagagccggctgtacaagaggaaggccaatgatgagagcaatgagcacagtgatgtgattgacagccaggagctgagcaaggtgtcccgggagttccacagccatgagttccacagccatgaggacatgctggtggtggaccccaagagcaaggaggaggacaagcacctgaagttccgcatcagccatgagctggacagcgccagcagcgaggtgaactag

SEQ ID NO: 21783 - DNA, 879 bp, synthetic construct
  misc_feature 1..879: note = Description of Artificial Sequence: Synthetic coding sequence
  source 1..879: mol_type = other DNA
atgagaattgctgtgatctgcttctgcctgctgggcatcacctgtgccatccctgtgaagcaggccgacagcggcagcagcgaggagaagcagctgtacaacaagtacccagatgctgtggccacctggctgaacccagaccccagccagaagcagaacctgctggccccccagaatgctgtgtcctctgaggagaccaatgacttcaagcaggagaccctgcccagcaagagcaatgaaagccatgaccacatggatgacatggatgatgaagatgatgatgaccaccagagtgatgagagccaccacagtgatgaaagtgatgagctggtgacagacttccccacagacctgcctgccacagaggtgttcacccctgtggtgcccaccgtggacacctatgatggccgcggggacagcgtggtgtatggcctgcggagcaagagcaagaagttcagaagaccagacatccagtacccagatgccacagatgaggacatcaccagccacatggagagcgaggagctgaatggagcctacaaggccatccctgtggcccaggacctgaatgcccccagcgactgggacagccggggcaaggacagctatgagaccagccagctggatgaccagagcgctgagacccacagccacaagcagagccggctgtacaagaggaaggccaatgatgagagcaatgagcacagtgatgtgattgacagccaggagctgagcaaggtgtcccgggagttccacagccatgagttccacagccatgaggacatgctggtggtggaccccaagagcaaggaggaggacaagcacctgaagttccgcatcagccatgagctggacagcgccagcagcgaggtgaactag

SEQ ID NO: 21784 - DNA, 864 bp, synthetic construct
  misc_feature 1..864: note = Description of Artificial Sequence: Synthetic coding sequence
  source 1..864: mol_type = other DNA
atgagaattgctgtgatctgcttctgcctgctgggcatcacctgtgccatccctgtgaagcaggccgacagcggcagcagcgaggagaagcagaatgctgtgagcagcgaggagaccaatgacttcaagcaggagaccctgcccagcaagagcaatgaaagccatgaccacatggatgacatggatgatgaagatgatgatgaccacgtggacagccaggacagcattgacagcaatgacagtgatgatgtggatgacacagatgacagccaccagagtgatgagagccaccacagtgatgaaagtgatgagctggtgacagacttccccacagacctgcctgccacagaggtgttcacccctgtggtgcccaccgtggacacctatgatggccgcggggacagcgtggtgtatggcctgcggagcaagagcaagaagttccggcggccagacatccagtacccagatgccacagatgaggacatcaccagccacatggagagcgaggagctgaatggagcctacaaggccatccctgtggcccaggacctgaatgcccccagcgactgggacagccggggcaaggacagctatgagaccagccagctggatgaccagagcgctgagacccacagccacaagcagagccggctgtacaagaggaaggccaatgatgagagcaatgagcacagtgatgtgattgacagccaggagctgagcaaggtgtcccgggagttccacagccatgagttccacagccatgaggacatgctggtggtggaccccaagagcaaggaggaggacaagcacctgaagttccgcatcagccatgagctggacagcgccagcagcgaggtgaactag

SEQ ID NO: 21785 - DNA, 945 bp, synthetic construct
  misc_feature 1..945: note = Description of Artificial Sequence: Synthetic coding sequence
  source 1..945: mol_type = other DNA
atgagaattgctgtgatctgcttctgcctgctgggcatcacctgtgccatccctgtgaagcaggccgacagcggcagcagcgaggagaagcagctgtacaacaagtacccagatgctgtggccacctggctgaacccagaccccagccagaagcagaacctgctggccccccagaatgctgtgtcctctgaggagaccaatgacttcaagcaggagaccctgcccagcaagagcaatgaaagccatgaccacatggatgacatggatgatgaagatgatgatgaccacgtggacagccaggacagcattgacagcaatgacagtgatgatgtggatgacacagatgacagccaccagagtgatgagagccaccacagtgatgaaagtgatgagctggtgacagacttccccacagacctgcctgccacagaggtgttcacccctgtggtgcccaccgtggacacctatgatggccgcggggacagcgtggtgtatggcctgcggagcaagagcaagaagttcagaagaccagacatccagtacccagatgccacagatgaggacatcaccagccacatggagagcgaggagctgaatggagcctacaaggccatccctgtggcccaggacctgaatgcccccagcgactgggacagccggggcaaggacagctatgagaccagccagctggatgaccagagcgctgagacccacagccacaagcagagccggctgtacaagaggaaggccaatgatgagagcaatgagcacagtgatgtgattgacagccaggagctgagcaaggtgtcccgggagttccacagccatgagttccacagccatgaggacatgctggtggtggaccccaagagcaaggaggaggacaagcacctgaagttccgcatcagccatgagctggacagcgccagcagcgaggtgaactag

SEQ ID NO: 21786 - DNA, 822 bp, synthetic construct
  misc_feature 1..822: note = Description of Artificial Sequence: Synthetic coding sequence
  source 1..822: mol_type = other DNA
atgagaattgctgtgatctgcttctgcctgctgggcatcacctgtgccatccctgtgaagcaggccgacagcggcagcagcgaggagaagcagaccctgcccagcaagagcaatgaaagccatgaccacatggatgacatggatgatgaagatgatgatgaccacgtggacagccaggacagcattgacagcaatgacagtgatgatgtggatgacacagatgacagccaccagagtgatgagagccaccacagtgatgaaagtgatgagctggtgacagacttccccacagacctgcctgccacagaggtgttcacccctgtggtgcccaccgtggacacctatgatggccgcggggacagcgtggtgtatggcctgcggagcaagagcaagaagttccggcggccagacatccagtacccagatgccacagatgaggacatcaccagccacatggagagcgaggagctgaatggagcctacaaggccatccctgtggcccaggacctgaatgcccccagcgactgggacagccggggcaaggacagctatgagaccagccagctggatgaccagagcgctgagacccacagccacaagcagagccggctgtacaagaggaaggccaatgatgagagcaatgagcacagtgatgtgattgacagccaggagctgagcaaggtgtcccgggagttccacagccatgagttccacagccatgaggacatgctggtggtggaccccaagagcaaggaggaggacaagcacctgaagttccgcatcagccatgagctggacagcgccagcagcgaggtgaactag

SEQ ID NO: 21787 - DNA, 2370 bp, synthetic construct
  misc_feature 1..2370: note = Description of Artificial Sequence: Synthetic coding sequence
  source 1..2370: mol_type = other DNA
atgaggacctaccactacatccccctcttcatctggacctacatgttccacacagtggacaccatcctgctgcaggagaagcccaacagctacctgagcagcaagaagattgctggcctgaccaaggatgatggcaagatgctgcggaggaccaagaggggctggatgtggaaccagttcttcctgctggaggagtacacaggaacagacacccagtatgtgggcaagctgcacacagaccaggacaagggagatggcaacctgaagtacatcctgactggagatggagctggcagcctgtttgtgattgatgaaaatactggagacatccacgccgccaagaagctggaccgggaggagaagagcctgtacatcctgcgggccaaggccatcgacaggaagacaggccggcaggtggagcctgagagcgagttcatcatcaagatccatgacatcaatgacaatgagcccaagttcaccaaggacctgtacacagcctctgtgcctgagatgtctggagtgggcaccagcgtcatccaggtgacagccacagatgctgatgatgccaactacggcaacagcgccaaggtggtgtacagcatcctgcagggccagccctacttctctgtggaccctgagagcggcatcatcaagacagccctgcctgacatgagcagagaaaatcgggagcagtaccaggtggtgatccaggccaaggacatgggcggccagatgggcggcctgagcggcaccaccaccgtgaacatcaccctgacagatgtgaacaacaaccccccacgcttcccccagagcacctaccagttcaacagccctgagagcgtgcccctgggcacccacctgggccgcatcaaggccaatgaccctgatgtgggagaaaatgctgagatggagtacagcattgctgaaggagatggagctgacatgtttgatgtgatcacagacaaggacacccaggagggcatcatcaccgtgaagcagaacctggactttgagaaccagatgctgtacaccctgcgggtggatgccagcaacacccacccagacccccgcttcctgcacctgggccccttcaaggacacagctgtggtgaagatctctgtggaggacattgatgagccccctgtgttcaccaaggtgtcctacctgattgaggtggatgaagatgtgaaggagggcagcatcatcggccaggtgacagcctatgaccctgatgccaggaacaacctgatcaagtacagcgtggacagacacacagacatggaccgcatcttcggcatccacagtgaaaatggcagcatcttcaccctgaaggccctggaccgggagagcagcccctggcacaacatcaccgtgacagccacagagatcaacaaccccaagcagagcagccacatccctgtgttcatccgcatcctggacatcaatgaccacgcccctgagtttgccatgtactatgagacctttgtgtgtgaaaatgccaagccaggccagctgatccagacagtgtctgtgatggacaaggatgatcctccccggggccacaagttcttctttgagcctgtgcctgagttcaccctgaaccccaacttcaccatcgtggacaacaaggacaacacagctggcatcatgaccaggaaggatggctacagcaggaacaagatgagcacctacctgctgcccatcctgatctttgacaatgactaccccatccagagcagcacaggcaccctgaccatccgggtgtgtgcctgtgacaaccagggcaacatgcagagctgcacagctgaggccctgatcctgtctgctggcctgagcactggagccctggtggccatcctgctgtgtgtgctgatcctgctgatcctggtggtgctgtttgctgccctgaagaggcagaggaagaaggagcccctcatcatcagcaaggatgatgtgcgggacaacatcgtgacctacaatgatgaaggaggaggagaggaggacacccaggcctttgacatcggcaccctgaggaaccctgaggcccgggaggacagcaagctgcggagagatgtgatgcctgagaccatcttccagatcagaagaacagtgcccctgtgggagaacattgatgtgcaggacttcatccaccggcggctgaaggaaaatgatgctgaccccagcgccccaccctatgacagcctggccacctacgcctatgagggcaatgacagcattgctgacagcctgagcagcctggagagcctgacagctgactgcaaccaggactatgactacctgagtgactggggcccccgcttcaagaagctggccgacatgtatggaggagatgacagcgaccgggactag

SEQ ID NO: 21788 - DNA, 162 bp, synthetic construct
  misc_feature 1..162: note = Description of Artificial Sequence: Synthetic coding sequence
  source 1..162: mol_type = other DNA
atgagggcctggatcttcttcctgctgtgcctggccggccgggccctggccgccccccagcaggaggccctgcctgatgaaacagaggtggtggaggagaccgtggccgaggtgacagaggtgtctgtgggcgccaaccctgtgcaggtggaggtgggctag

SEQ ID NO: 21789 - DNA, 336 bp, synthetic construct
  misc_feature 1..336: note = Description of Artificial Sequence: Synthetic coding sequence
  source 1..336: mol_type = other DNA
atgagggcctggatcttcttcctgctgtgcctggccggccgggccctggccgccccccagcaggaggccctgcctgatgaaacagaggtggtggaggagaccgtggccgaggtgacagaggtgtctgtgggcgccaaccctgtgcaggtggaggtgggggagtttgatgatggagctgaggagacagaggaggaggtggtggccgagaacccctgccagaaccaccactgcaagcacggcaaggtgtgtgagctggatgagaacaacacccccatgtgtgtgtgccaggaccccaccagctgcccagcccccatcggggagtttgagaaggtgtag

SEQ ID NO: 21790 - DNA, 276 bp, synthetic construct
  misc_feature 1..276: note = Description of Artificial Sequence: Synthetic coding sequence
  source 1..276: mol_type = other DNA
atgaagctggccgtgaccctgaccctggtgaccctggccctgtgctgcagcagcgccagcgctgagatctgccccagcttccagagggtgattgagaccctgctgatggacacccccagcagctatgaggccgccatggagctgttctccccagaccaggacatgagggaggccggggcccagctgaagaagctggtggacaccctgccccagaagccccgggagagcatcatcaagctgatggagaagatcgcccagagcagcctgtgcaactag

SEQ ID NO: 21791 - DNA, 1380 bp, synthetic construct
  misc_feature 1..1380: note = Description of Artificial Sequence: Synthetic coding sequence
  source 1..1380: mol_type = other DNA
atgatcaagcgcttcctggaggacaccacagatgatggagagctgagcaagtttgtgaaggacttctctggaaatgccagctgccaccccccagaggccaagacctgggccagccggccccaggtgcctgagccccggccccaggccccagacctgtatgatgatgacctggagttccggccccccagccggccccagagcagtgacaaccagcagtacttctgtgccccagcccccctgagccccagcgcccggcccaggagcccctggggcaagctggacccctatgacagcagtgaagatgacaaggagtatgtgggctttgccaccctgcccaaccaggtgcacaggaagtctgtgaagaagggctttgacttcaccctgatggtggccggggagagcggcctgggcaagagcaccctggtgaacagcctcttcctgacagacctgtacagagacaggaagctgctgggcgctgaggagcgcatcatgcagacagtggagatcaccaagcatgctgtggacatcgaggagaagggcgtgcggctgcggctgaccatcgtggacaccccaggctttggagatgctgtgaacaacacagagtgctggaagcctgtggccgagtacatcgaccagcagtttgagcagtacttcagagatgagagcggcctgaacaggaagaacatccaggacaacagagtgcactgctgcctgtacttcatcagccccttcggccacggcctgcggcccctggatgtggagttcatgaaggccctgcaccagagggtgaacatcgtgcccatcctggccaaggctgacaccctgaccccacctgaggtggaccacaagaagaggaagatccgggaggagattgagcacttcggcatcaagatctaccagttcccagactgtgacagtgatgaagatgaggacttcaagctgcaggaccaggccctgaaggagagcatcccctttgctgtgattggcagcaacacagtggtggaggcccggggcagaagagtgcggggccgcctgtacccctggggcatcgtggaggtggagaaccctggccactgtgactttgtgaagctgcggaccatgctggtgaggacccacatgcaggacctgaaggatgtgacccgggagacccactatgagaactaccgggcccagtgcatccagagcatgacccggctggtggtgaaggagaggaacagaaacaagctgacccgggagagcggcacagacttccccatcccagctgtgcccccaggcacagatcctgagacagagaagctgatccgggagaaggatgaggagctgcggaggatgcaggagatgctgcacaagatccagaagcagatgaaggagaactactag

SEQ ID NO: 21792 - DNA, 1437 bp, synthetic construct
  misc_feature 1..1437: note = Description of Artificial Sequence: Synthetic coding sequence
  source 1..1437: mol_type = other DNA
atggacaggagcctgggctggcagggcaacagcgtgcctgaggacagaacagaagctggcatcaagcgcttcctggaggacaccacagatgatggagagctgagcaagtttgtgaaggacttctctggaaatgccagctgccaccccccagaggccaagacctgggccagccggccccaggtgcctgagccccggccccaggccccagacctgtatgatgatgacctggagttccggccccccagccggccccagagcagtgacaaccagcagtacttctgtgccccagcccccctgagccccagcgcccggcccaggagcccctggggcaagctggacccctatgacagcagtgaagatgacaaggagtatgtgggctttgccaccctgcccaaccaggtgcacaggaagtctgtgaagaagggctttgacttcaccctgatggtggccggggagagcggcctgggcaagagcaccctggtgaacagcctcttcctgacagacctgtacagagacaggaagctgctgggcgctgaggagcgcatcatgcagacagtggagatcaccaagcatgctgtggacatcgaggagaagggcgtgcggctgcggctgaccatcgtggacaccccaggctttggagatgctgtgaacaacacagagtgctggaagcctgtggccgagtacatcgaccagcagtttgagcagtacttcagagatgaaagtggcctgaacaggaagaacatccaggacaacagagtgcactgctgcctgtacttcatcagcccctttggacatggcctgcggcccctggatgtggagttcatgaaggccctgcaccagagggtgaacatcgtgcccatcctggccaaggctgacaccctgaccccacctgaggtggaccacaagaagaggaagatccgggaggagattgagcacttcggcatcaagatctaccagttcccagactgtgacagtgatgaagatgaggacttcaagctgcaggaccaggccctgaaggagagcatcccctttgctgtgattggcagcaacacagtggtggaggcccggggccggcgggtgcggggccgcctgtacccctggggcatcgtggaggtggagaaccctggccactgtgactttgtgaagctgcggaccatgctggtgaggacccacatgcaggacctgaaggatgtgacccgggagacccactatgagaactaccgggcccagtgcatccagagcatgacccggctggtggtgaaggagaggaacagaaacaagctgacccgggagagcggcacagacttccccatcccagctgtgcccccaggcacagatcctgagacagagaagctgatccgggagaaggatgaggagctgcggaggatgcaggagatgctgcacaagatccagaagcagatgaaggagaactactag

SEQ ID NO: 21793 - DNA, 1380 bp, synthetic construct; identical to SEQ ID NO: 21791
  misc_feature 1..1380: note = Description of Artificial Sequence: Synthetic coding sequence
  source 1..1380: mol_type = other DNA

SEQ ID NO: 21794 - DNA, 1413 bp, synthetic construct
  misc_feature 1..1413: note = Description of Artificial Sequence: Synthetic coding sequence
  source 1..1413: mol_type = other DNA
atgcctggcttctacagcgtgatgacagatgaggagatcaagcgcttcctggaggacaccacagatgatggagagctgagcaagtttgtgaaggacttctctggaaatgccagctgccaccccccagaggccaagacctgggccagccggccccaggtgcctgagccccggccccaggccccagacctgtatgatgatgacctggagttccggccccccagccggccccagagcagtgacaaccagcagtacttctgtgccccagcccccctgagccccagcgcccggcccaggagcccctggggcaagctggacccctatgacagcagtgaagatgacaaggagtatgtgggctttgccaccctgcccaaccaggtgcacaggaagtctgtgaagaagggctttgacttcaccctgatggtggccggggagagcggcctgggcaagagcaccctggtgaacagcctcttcctgacagacctgtacagagacaggaagctgctgggcgctgaggagcgcatcatgcagacagtggagatcaccaagcatgctgtggacatcgaggagaagggcgtgcggctgcggctgaccatcgtggacaccccaggctttggagatgctgtgaacaacacagagtgctggaagcctgtggccgagtacatcgaccagcagtttgagcagtacttcagagatgaaagtggcctgaacaggaagaacatccaggacaacagagtgcactgctgcctgtacttcatcagcccctttggacatggcctgcggcccctggatgtggagttcatgaaggccctgcaccagagggtgaacatcgtgcccatcctggccaaggctgacaccctgaccccacctgaggtggaccacaagaagaggaagatccgggaggagattgagcacttcggcatcaagatctaccagttcccagactgtgacagtgatgaagatgaggacttcaagctgcaggaccaggccctgaaggagagcatcccctttgctgtgattggcagcaacacagtggtggaggcccggggccggcgggtgcggggccgcctgtacccctggggcatcgtggaggtggagaaccctggccactgtgactttgtgaagctgcggaccatgctggtgaggacccacatgcaggacctgaaggatgtgacccgggagacccactatgagaactaccgggcccagtgcatccagagcatgacccggctggtggtgaaggagaggaacagaaacaagctgacccgggagagcggcacagacttccccatcccagctgtgcccccaggcacagatcctgagacagagaagctgatccgggagaaggatgaggagctgcggaggatgcaggagatgctgcacaagatccagaagcagatgaaggagaactactag

SEQ ID NO: 21795 - DNA, 825 bp, synthetic construct
  misc_feature 1..825: note = Description of Artificial Sequence: Synthetic coding sequence
  source 1..825: mol_type = other DNA
atgatcaagcgcttcctggaggacaccacagatgatggagagctgagcaagtttgtgaaggacttctctggaaatgccagctgccaccccccagaggccaagacctgggccagccggccccaggtgcctgagccccggccccaggccccagacctgtatgatgatgacctggagttccggccccccagccggccccagagcagtgacaaccagcagtacttctgtgccccagcccccctgagccccagcgcccggcccaggagcccctggggcaagctggacccctatgacagcagtgaagatgacaaggagtatgtgggctttgccaccctgcccaaccaggtgcacaggaagtctgtgaagaagggctttgacttcaccctgatggtggccggggagagcggcctgggcaagagcaccctggtgaacagcctcttcctgacagacctgtacagagacaggaagctgctgggcgctgaggagcgcatcatgcagacagtggagatcaccaagcatgctgtggacatcgaggagaagggcgtgcggctgcggctgaccatcgtggacaccccaggctttggagatgctgtgaacaacacagagtgctggaagcctgtggccgagtacatcgaccagcagtttgagcagtacttcagagatgagagcggcctgaacaggaagaacatccaggacaacagagtgcactgctgcctgtacttcatcagccccttcggccacggctacggccccagcctgcggctgctggcccctcctggagctgtgaagggcaccggccaggagcaccagggccagggctgccactag

SEQ ID NO: 21796 - DNA, 1479 bp, synthetic construct
  misc_feature 1..1479: note = Description of Artificial Sequence: Synthetic coding sequence
  source 1..1479: mol_type = other DNA
tacagcagccctgccctcttcagcagcagagctgccccccagaagcccaggaaggagggcagccaggccgccggcctgctggtgttcagtgacagcctggagatcaagcgcttcctggaggacaccacagatgatggagagctgagcaagtttgtgaaggacttctctggaaatgccagctgccaccccccagaggccaagacctgggccagccggccccaggtgcctgagccccggccccaggccccagacctgtatgatgatgacctggagttccggccccccagccggccccagagcagtgacaaccagcagtacttctgtgccccagcccccctgagccccagcgcccggcccaggagcccctggggcaagctggacccctatgacagcagtgaagatgacaaggagtatgtgggctttgccaccctgcccaaccaggtgcacaggaagtctgtgaagaagggctttgacttcaccctgatggtggccggggagagcggcctgggcaagagcaccctggtgaacagcctcttcctgacagacctgtacagagacaggaagctgctgggcgctgaggagcgcatcatgcagacagtggagatcaccaagcatgctgtggacatcgaggagaagggcgtgcggctgcggctgaccatcgtggacaccccaggctttggagatgctgtgaacaacacagagtgctggaagcctgtggccgagtacatcgaccagcagtttgagcagtacttcagagatgaaagtggcctgaacaggaagaacatccaggacaacagagtgcactgctgcctgtacttcatcagcccctttggacatggcctgcggcccctggatgtggagttcatgaaggccctgcaccagagggtgaacatcgtgcccatcctggccaaggctgacaccctgaccccacctgaggtggaccacaagaagaggaagatccgggaggagattgagcacttcggcatcaagatctaccagttcccagactgtgacagtgatgaagatgaggacttcaagctgcaggaccaggccctgaaggagagcatcccctttgctgtgattggcagcaacacagtggtggaggcccggggccggcgggtgcggggccgcctgtacccctggggcatcgtggaggtggagaaccctggccactgtgactttgtgaagctgcggaccatgctggtgaggacccacatgcaggacctgaaggatgtgacccgggagacccactatgagaactaccgggcccagtgcatccagagcatgacccggctggtggtgaaggagaggaacagaaacaagctgacccgggagagcggcacagacttccccatcccagctgtgcccccaggcacagatcctgagacagagaagctgatccgggagaaggatgaggagctgcggaggatgcaggagatgctgcacaagatccagaagcagatgaaggagaactactag

SEQ ID NO: 21797 - DNA, 996 bp, synthetic construct
  misc_feature 1..996: note = Description of Artificial Sequence: Synthetic coding sequence
  source 1..996: mol_type = other DNA
atggtggccggggagagcggcctgggcaagagcaccctggtgaacagcctcttcctgacagacctgtacagagacaggaagctgctgggcgctgaggagcgcatcatgcagacagtggagatcaccaagcatgctgtggacatcgaggagaagggcgtgcggctgcggctgaccatcgtggacaccccaggctttggagatgctgtgaacaacacagagtgctggaagcctgtggccgagtacatcgaccagcagtttgagcagtacttcagagatgagagcggcctgaacaggaagaacatccaggacaacagagtgcactgctgcctgtacttcatcagccccttcggccacggcctgcggcccctggatgtggagttcatgaaggccctgcaccagagggtgaacatcgtgcccatcctggccaaggctgacaccctgaccccacctgaggtggaccacaagaagaggaagatccgggaggagattgagcacttcggcatcaagatctaccagttcccagactgtgacagtgatgaagatgaggacttcaagctgcaggaccaggccctgaaggagagcatcccctttgctgtgattggcagcaacacagtggtggaggcccggggcagaagagtgcggggccgcctgtacccctggggcatcgtggaggtggagaaccctggccactgtgactttgtgaagctgcggaccatgctggtgaggacccacatgcaggacctgaaggatgtgacccgggagacccactatgagaactaccgggcccagtgcatccagagcatgacccggctggtggtgaaggagaggaacagaaacaagctgacccgggagagcggcacagacttccccatcccagctgtgcccccaggcacagatcctgagacagagaagctgatccgggagaaggatgaggagctgcggaggatgcaggagatgctgcacaagatccagaagcagatgaaggagaactactag

SEQ ID NO: 21798 - DNA, 1311 bp, synthetic construct
  misc_feature 1..1311: note = Description of Artificial Sequence: Synthetic coding sequence
  source 1..1311: mol_type = other DNA
atgtctgtgtctgcccggtctgctgctgctgaggagaggtctgtgaacagcagcaccatgggccagcagaagaacctggagggctacgtgggctttgccaacctgcccaaccaggtgtacaggaagtctgtgaagaggggctttgagttcaccctgatggtggtgggggagagcggcctgggcaagagcaccctcatcaacagcctcttcctgacagacctgtacagccctgagtacccaggccccagccaccgcatcaagaagacagtgcaggtggagcagagcaaggtgctgatcaaggagggcggcgtgcagctgctgctgaccatcgtggacaccccaggctttggagatgctgtggacaacagcaactgctggcagcccgtcatcgactacatcgacagcaagtttgaggactacctgaatgctgagagccgggtgaacagacggcagatgccagacaacagagtgcagtgctgcctgtacttcatcgcccccagcggccacggcctgaagcccctggacatcgagttcatgaagaggctgcacgagaaggtgaacatcatccccctcatcgccaaggctgacaccctgaccccagaggagtgccagcagttcaagaagcagatcatgaaggagatccaggagcacaagatcaagatctatgagttccctgagacagatgatgaggaggagaacaagctggtgaagaagatcaaggaccggctgcccctggccgtggtgggcagcaacaccatcatcgaggtgaatggcaagagggtgcggggccggcagtacccctggggcgtggccgaggtggagaatggagagcactgtgacttcaccatcctgaggaacatgctgatccgcacccacatgcaggacctgaaggatgtgaccaacaacgtgcactatgagaactaccgcagcaggaagctggccgctgtgacctacaatggagtggacaacaacaagaacaagggccagctgaccaagagccccctggcccagatggaggaggagcggcgggagcacgtggccaagatgaagaagatggagatggagatggagcaggtgtttgagatgaaggtgaaggagaaggtgcagaagctgaaggacagcgaggccgagctgcagaggagacatgagcagatgaagaagaacctggaggcccagcacaaggagctggaggagaagaggcggcagtttgaagatgagaaggccaactgggaggcccagcagaggatcctggagcagcagaacagcagcaggaccctggagaagaacaagaagaagggcaagatcttctag

SEQ ID NO: 21799 - DNA, 1317 bp, synthetic construct
  misc_feature 1..1317: note = Description of Artificial Sequence: Synthetic coding sequence
  source 1..1317: mol_type = other DNA
atgtctgtgtctgcccggtctgctgctgctgaggagaggtctgtgaacagcagcaccatggaggtggcccagcagaagaacctggagggctacgtgggctttgccaacctgcccaaccaggtgtacaggaagtctgtgaagaggggctttgagttcaccctgatggtggtgggggagagcggcctgggcaagagcaccctcatcaacagcctcttcctgacagacctgtacagccctgagtacccaggccccagccaccgcatcaagaagacagtgcaggtggagcagagcaaggtgctgatcaaggagggcggcgtgcagctgctgctgaccatcgtggacaccccaggctttggagatgctgtggacaacagcaactgctggcagcccgtcatcgactacatcgacagcaagtttgaggactacctgaatgctgagagccgggtgaacagacggcagatgccagacaacagagtgcagtgctgcctgtacttcatcgcccccagcggccacggcctgaagcccctggacatcgagttcatgaagaggctgcacgagaaggtgaacatcatccccctcatcgccaaggctgacaccctgaccccagaggagtgccagcagttcaagaagcagatcatgaaggagatccaggagcacaagatcaagatctatgagttccctgagacagatgatgaggaggagaacaagctggtgaagaagatcaaggaccggctgcccctggccgtggtgggcagcaacaccatcatcgaggtgaatggcaagagggtgcggggccggcagtacccctggggcgtggccgaggtggagaatggagagcactgtgacttcaccatcctgaggaacatgctgatccgcacccacatgcaggacctgaaggatgtgaccaacaacgtgcactatgagaactaccgcagcaggaagctggccgctgtgacctacaatggagtggacaacaacaagaacaagggccagctgaccaagagccccctggcccagatggaggaggagcggcgggagcacgtggccaagatgaagaagatggagatggagatggagcaggtgtttgagatgaaggtgaaggagaaggtgcagaagctgaaggacagcgaggccgagctgcagaggagacatgagcagatgaagaagaacctggaggcccagcacaaggagctggaggagaagaggcggcagtttgaagatgagaaggccaactgggaggcccagcagaggatcctggagcagcagaacagcagcaggaccctggagaagaacaagaagaagggcaagatcttctag

SEQ ID NO: 21800 - DNA, 1311 bp, synthetic construct
  misc_feature 1..1311: note = Description of Artificial Sequence: Synthetic coding sequence
  source 1..1311: mol_type = other DNA
atgtctgtgtctgcccggtctgctgctgctgaggagaggtctgtgaacagcagcaccatggtgcagcagaagaacctggagggctacgtgggctttgccaacctgcccaaccaggtgtacaggaagtctgtgaagaggggctttgagttcaccctgatggtggtgggggagagcggcctgggcaagagcaccctcatcaacagcctcttcctgacagacctgtacagccctgagtacccaggccccagccaccgcatcaagaagacagtgcaggtggagcagagcaaggtgctgatcaaggagggcggcgtgcagctgctgctgaccatcgtggacaccccaggctttggagatgctgtggacaacagcaactgctggcagcccgtcatcgactacatcgacagcaagtttgaggactacctgaatgctgagagccgggtgaacagacggcagatgccagacaacagagtgcagtgctgcctgtacttcatcgcccccagcggccacggcctgaagcccctggacatcgagttcatgaagaggctgcacgagaaggtgaacatcatccccctcatcgccaaggctgacaccctgaccccagaggagtgccagcagttcaagaagcagatcatgaaggagatccaggagcacaagatcaagatctatgagttccctgagacagatgatgaggaggagaacaagctggtgaagaagatcaaggaccggctgcccctggccgtggtgggcagcaacaccatcatcgaggtgaatggcaagagggtgcggggccggcagtacccctggggcgtggccgaggtggagaatggagagcactgtgacttcaccatcctgaggaacatgctgatccgcacccacatgcaggacctgaaggatgtgaccaacaacgtgcactatgagaactaccgcagcaggaagctggccgctgtgacctacaatggagtggacaacaacaagaacaagggccagctgaccaagagccccctggcccagatggaggaggagcggcgggagcacgtggccaagatgaagaagatggagatggagatggagcaggtgtttgagatgaaggtgaaggagaaggtgcagaagctgaaggacagcgaggccgagctgcagaggagacatgagcagatgaagaagaacctggaggcccagcacaaggagctggaggagaagaggcggcagtttgaagatgagaaggccaactgggaggcccagcagaggatcctggagcagcagaacagcagcaggaccctggagaagaacaagaagaagggcaagatcttctag

SEQ ID NO: 21801 - DNA, 267 bp, synthetic construct
  misc_feature 1..267: note = Description of Artificial Sequence: Synthetic coding sequence
  source 1..267: mol_type = other DNA
atgaagaagatggagatggagatggagcaggtgtttgagatgaaggtgaaggagaaggtgcagaagctgaaggacagcgaggccgagctgcagaggagacatgagcagatgaagaagaacctggaggcccagcacaaggagctggaggagaagaggcggcagtttgaagatgagaaggccaactgggaggcccagcagaggatcctggagcagcagaacagcagcaggaccctggagaagaacaagaagaagggcaagatcttctag

SEQ ID NO: 21802 - DNA, 1155 bp, synthetic construct
  misc_feature 1..1155: note = Description of Artificial Sequence: Synthetic coding sequence
  source 1..1155: mol_type = other DNA
atggtggtgggggagagcggcctgggcaagagcaccctcatcaacagcctcttcctgacagacctgtacagccctgagtacccaggccccagccaccgcatcaagaagacagtgcaggtggagcagagcaaggtgctgatcaaggagggcggcgtgcagctgctgctgaccatcgtggacaccccaggctttggagatgctgtggacaacagcaactgctggcagcccgtcatcgactacatcgacagcaagtttgaggactacctgaatgctgagagccgggtgaacagacggcagatgccagacaacagagtgcagtgctgcctgtacttcatcgcccccagcggccacggcctgaagcccctggacatcgagttcatgaagaggctgcacgagaaggtgaacatcatccccctcatcgccaaggctgacaccctgaccccagaggagtgccagcagttcaagaagcagatcatgaaggagatccaggagcacaagatcaagatctatgagttccctgagacagatgatgaggaggagaacaagctggtgaagaagatcaaggaccggctgcccctggccgtggtgggcagcaacaccatcatcgaggtgaatggcaagagggtgcggggccggcagtacccctggggcgtggccgaggtggagaatggagagcactgtgacttcaccatcctgaggaacatgctgatccgcacccacatgcaggacctgaaggatgtgaccaacaacgtgcactatgagaactaccgcagcaggaagctggccgctgtgacctacaatggagtggacaacaacaagaacaagggccagctgaccaagagccccctggcccagatggaggaggagcggcgggagcacgtggccaagatgaagaagatggagatggagatggagcaggtgtttgagatgaaggtgaaggagaaggtgcagaagctgaaggacagcgaggccgagctgcagaggagacatgagcagatgaagaagaacctggaggcccagcacaaggagctggaggagaagaggcggcagtttgaagatgagaaggccaactgggaggcccagcagaggatcctggagcagcagaacagcagcaggaccctggagaagaacaagaagaagggcaagatcttctag

SEQ ID NO: 21803 - DNA, 708 bp, synthetic construct
  misc_feature 1..708: note = Description of Artificial Sequence: Synthetic coding sequence
  source 1..708: mol_type = other DNA
atgtctgtgtctgcccggtctgctgctgctgaggagaggtctgtgaacagcagcaccatgggccagcagaagaacctggagggctacgtgggctttgccaacctgcccaaccaggtgtacaggaagtctgtgaagaggggctttgagttcaccctgatggtggtgggggagagcggcctgggcaagagcaccctcatcaacagcctcttcctgacagacctgtacagccctgagtacccaggccccagccaccgcatcaagaagacagtgcaggtggagcagagcaaggtgctgatcaaggagggcggcgtgcagctgctgctgaccatcgtggacaccccaggctttggagatgctgtggacaacagcaactgctggcagcccgtcatcgactacatcgacagcaagtttgaggactacctgaatgctgagagccgggtgaacagacggcagatgccagacaacagagtgcagtgctgcctgtacttcatcgcccccagcggccacggcctgaagcccctggacatcgagttcatgaagaggctgcacgagaaggtgaacatcatccccctcatcgccaaggctgacaccctgaccccagaggagtgccagcagttcaagaagcagatcatgaaggagatccaggagcacaagatcaagatctatgagttccctgagacagccaagaagaagaagaagaagaagtag

SEQ ID NO: 21804 - DNA, 1155 bp, synthetic construct; identical to SEQ ID NO: 21802
  misc_feature 1..1155: note = Description of Artificial Sequence: Synthetic coding sequence
  source 1..1155: mol_type = other DNA

SEQ ID NO: 21805 - DNA, 1146 bp, synthetic construct
  misc_feature 1..1146: note = Description of Artificial Sequence: Synthetic coding sequence
  source 1..1146: mol_type = other DNA
gtcacccatgagaccatcgtggagcagcagaagaacctggagggctacgtgggctttgccaacctgcccaaccaggtgtacaggaagtctgtgaagaggggctttgagttcaccctgatggtggtgggggagagcggcctgggcaagagcaccctcatcaacagcctcttcctgacagacctgtacagccctgagtacccaggccccagccaccgcatcaagaagacagtgcaggtggagcagagcaaggtgctgatcaaggagggcggcgtgcagctgctgctgaccatcgtggacaccccaggctttggagatgctgtggacaacagcaactgctggcagcctgtgattgactacatcgacagcaagtttgaggactacctgaatgctgagagccgggtgaacagacggcagatgccagacaacagagtgcagtgctgcctgtacttcatcgcccccagcggccacggcctgaagcccctggacatcgagttcatgaagaggctgcacgagaaggtgaacatcatccccctgattgccaaggctgacaccctgaccccagaggagtgccagcagttcaagaagcagatcatgaaggagatccaggagcacaagatcaagatctatgagttccctgagacagatgatgaggaggagaacaagctggtgaagaagatcaaggaccggctgcccctggccgtggtgggcagcaacaccatcatcgaggtgaatggcaagagggtgcggggccggcagtacccctggggcgtggccgaggtggagaatggagagcactgtgacttcaccatcctgaggaacatgctgatccgcacccacatgcaggacctgaaggatgtgaccaacaacgtgcactatgagaactaccgcagcaggaagctggccgctgtgacctacaacggggtggacaacaacaagaacaagggccagctgaccaagagccccctggcccagatggaggaggagcggcgggagcacgtggccaagatgaagaagatggagatggagatggagcaggtgtttgagatgaaggtgaaggagaaggtgcagaagctgaaggacagcgaggccgaggtgatcagcctcatcagccacctgctggccgacatcgtgttcctgttcaagtag

SEQ ID NO: 21806 - DNA, 1149 bp, synthetic construct
  misc_feature 1..1149: note = Description of Artificial Sequence: Synthetic coding sequence
  source 1..1149: mol_type = other DNA
atgggagagagcggcctgggcaagagcaccctcatcaacagcctcttcctgacagacctgtacagccctgagtacccaggccccagccaccgcatcaagaagacagtgcaggtggagcagagcaaggtgctgatcaaggagggcggcgtgcagctgctgctgaccatcgtggacaccccaggctttggagatgctgtggacaacagcaactgctggcagcccgtcatcgactacatcgacagcaagtttgaggactacctgaatgctgagagccgggtgaacagacggcagatgccagacaacagagtgcagtgctgcctgtacttcatcgcccccagcggccacggcctgaagcccctggacatcgagttcatgaagaggctgcacgagaaggtgaacatcatccccctcatcgccaaggctgacaccctgaccccagaggagtgccagcagttcaagaagcagatcatgaaggagatccaggagcacaagatcaagatctatgagttccctgagacagatgatgaggaggagaacaagctggtgaagaagatcaaggaccggctgcccctggccgtggtgggcagcaacaccatcatcgaggtgaatggcaagagggtgcggggccggcagtacccctggggcgtggccgaggtggagaatggagagcactgtgacttcaccatcctgaggaacatgctgatccgcacccacatgcaggacctgaaggatgtgaccaacaacgtgcactatgagaactaccgcagcaggaagctggccgctgtgacctacaatggagtggacaacaacaagaacaagggccagctgaccaagagccccctggcccagatggaggaggagcggcgggagcacgtggccaagatgaagaagatggagatggagatggagcaggtgtttgagatgaaggtgaaggagaaggtgcagaagctgaaggacagcgaggccgagctgcagaggagacatgagcagatgaagaagaacctggaggcccagcacaaggagctggaggagaagaggcggcagtttgaagatgagaaggccaactgggaggcccagcagaggatcctggagcagcagaacagcagcaggaccctggagaagaacaagaagaagggcaagatcttctag

SEQ ID NO: 21807 - DNA, 1302 bp, synthetic construct
  misc_feature 1..1302: note = Description of Artificial Sequence: Synthetic coding sequence
  source 1..1302: mol_type = other DNA
atggaggtggtggacccccagcagctgggcatgttcacagaaggagagctgatgtctgtgggcatggacaccttcatccacagaattgacagcacagaggtgatctaccagcccaggaggaagagggccaagctgattggcaagtacctgatgggagacctgctgggggagggcagctatggcaaggtgaaggaggtgctggacagcgagaccctgtgccggcgggctgtgaagatcctgaagaagaagaagctgcggcgcatccccaacggggaggccaacgtgaagaaggagatccagctgctgcggcggctgcggcacaagaatgtcatccagctggtggatgtgctgtacaatgaggagaagcagaagatgtacatggtgatggagtactgtgtgtgtggcatgcaggagatgctggacagcgtgcctgagaagcgcttccctgtgtgccaggcccacggctacttctgccagctgattgatggcctggagtacctgcacagccagggcatcgtgcacaaggacatcaagccaggcaacctgctgctgaccaccggcggcaccctgaagatcagtgacctgggcgtggccgaggccctgcacccctttgctgctgatgacacctgcaggaccagccagggcagccctgccttccagcccccagagatcgccaacggcctggacaccttcagcggcttcaaggtggacatctggagcgctggggtgaccctgtacaacatcaccaccggcctgtacccctttgaaggagacaacatctacaagctgtttgaaaatattggcaagggcagctatgccatccctggggactgtggcccccccctgagtgacctgctgaagggcatgctggagtatgagcccgccaagcgcttcagcatccggcagatccggcagcacagctggttcaggaagaagcaccccccagctgaggcccctgtgcccatcccccccagcccagacaccaaggaccgctggaggtccatgacagtggtgccctacctggaggacctgcatggagcagatgaagatgaggacctgtttgatattgaagatgacatcatctacacccaggacttcaccgtgcccggccaggtgcctgaggaggaggccagccacaacggccagaggcggggcctgcccaaggctgtgtgcatgaatggaacagaagctgcccagctgagcaccaagagcagagctgagggccgggcccccaacccagccaggaaggcctgcagcgccagcagcaagatccggcggctgagcgcctgcaagcagcagtag

SEQ ID NO: 21808 - DNA, 1299 bp, synthetic construct
  misc_feature 1..1299: note = Description of Artificial Sequence: Synthetic coding sequence
  source 1..1299: mol_type = other DNA
atggaggtggtggacccccagcagctgggcatgttcacagaaggagagctgatgtctgtgggcatggacaccttcatccacagaattgacagcacagaggtgatctaccagcccaggaggaagagggccaagctgattggcaagtacctgatgggagacctgctgggggagggcagctatggcaaggtgaaggaggtgctggacagcgagaccctgtgccggcgggctgtgaagatcctgaagaagaagaagctgcggcgcatccccaacggggaggccaacgtgaagaaggagatccagctgctgcggcggctgcggcacaagaatgtcatccagctggtggatgtgctgtacaatgaggagaagcagaagatgtacatggtgatggagtactgtgtgtgtggcatgcaggagatgctggacagcgtgcctgagaagcgcttccctgtgtgccaggcccacggctacttctgccagctgattgatggcctggagtacctgcacagccagggcatcgtgcacaaggacatcaagccaggcaacctgctgctgaccaccggcggcaccctgaagatcagtgacctgggcgtggccgaggccctgcacccctttgctgctgatgacacctgcaggaccagccagggcagccctgccttccagcccccagagatcgccaacggcctggacaccttcagcggcttcaaggtggacatctggagcgctggggtgaccctgtacaacatcaccaccggcctgtacccctttgaaggagacaacatctacaagctgtttgaaaatattggcaagggcagctatgccatccctggggactgtggcccccccctgagtgacctgctgaagggcatgctggagtatgagcccgccaagcgcttcagcatccggcagatccggcagcacagctggttcaggaagaagcaccccccagctgaggcccctgtgcccatcccccccagcccagacaccaaggaccgctggaggtccatgacagtggtgccctacctggaggacctgcatggagcagatgaagatgaggacctgtttgatattgaagatgacatcatctacacccaggacttcaccgtgcccggccaggtgcctgaggaggaggccagccacaacggccagaggcggggcctgcccaaggctgtgtgcatgaatggaacagaagctgcccagctgagcaccaagagcagagctgaggccggcccccccaccctgcctgcccggcctgctgccagcagcaagatccggcggctgagcgcctgcaagcagcagtag

SEQ ID NO: 21809 - DNA, 1248 bp, synthetic construct
  misc_feature 1..1248: note = Description of Artificial Sequence: Synthetic coding sequence
  source 1..1248: mol_type = other DNA
atggaggacctgtgtgtggccaacaccctgtttgccctgaacctcttcaagcacctggccaaggccagccccacccagaacctcttcctgagcccctggagcatcagcagcaccatggccatggtgtacatgggcagccggggcagcacagaggaccagatggccaaggtgctgcagttcaatgaggtgggcgccaatgctgtgacccccatgaccccagagaacttcaccagctgtggcttcatgcagcagatccagaagggcagctacccagatgccatcctgcaggcccaggccgctgacaagatccacagcagcttccgcagcctgagcagcgccatcaatgccagcacaggcaactacctgctggagagcgtgaacaagctgtttggagagaagagcgccagcttccgggaggagtacatccggctgtgccagaagtactacagcagcgagccccaggccgtggacttcctggagtgtgccgaggaggccaggaagaagatcaacagctgggtgaagacccagaccaagggcaagatccccaacctgctgcctgagggctctgtggatggagacaccaggatggtgctggtgaatgctgtgtacttcaagggcaagtggaagaccccatttgagaagaagctgaatggcctgtaccccttccgggtgaacagcgcccagaggacccctgtgcagatgatgtacctgcgggagaagctgaacatcggctacatcgaggacctgaaggcccagatcctggagctgccctatgctggagatgtgtccatgttcctgctgctgcctgatgaaattgctgatgtgtccacaggcctggagctgctggagagcgagatcacctatgacaagctgaacaagtggaccagcaaggacaagatggccgaggatgaggtggaggtgtacatcccccagttcaagctggaggagcactatgagctgcggagcatcctgcgctccatgggcatggaggatgccttcaacaagggccgggccaacttcagcggcatgtctgaaagaaatgacctcttcctgtctgaggtgttccaccaggccatggtggatgtgaatgaggagggcacagaagctgctgctggcactggaggagtgatgacaggccgcactggacatggaggcccccagtttgtggccgaccaccccttcctgttcctgatcatgcacaagatcaccaactgcatcctcttcttcggccgcttcagcagcccctag

SEQ ID NO: 21810 - DNA, 342 bp, synthetic construct
  misc_feature 1..342: note = Description of Artificial Sequence: Synthetic coding sequence
  source 1..342: mol_type = other DNA
atggaggacctgtgtgtggccaacaccctgtttgccctgaacctcttcaagcacctggccaaggccagccccacccagaacctcttcctgagcccctggagcatcagcagcaccatggccatggtgtacatgggcagccggggcagcacagaggaccagatggccaaggtgctgcagttcaatgaggtgggcgccaatgctgtgacccccatgaccccagagaacttcaccagctgtggcttcatgcagcagatccagaagggcagctacccagatgccatcctgcaggcccaggccgctgacaagatccacagcagcttccgcagcctgagcagcgcctag

SEQ ID NO: 21811 - DNA, 486 bp, synthetic construct
  misc_feature 1..486: note = Description of Artificial Sequence: Synthetic coding sequence
  source 1..486: mol_type = other DNA
atggaggacctgtgtgtggccaacaccctgtttgccctgaacctcttcaagcacctggccaaggccagccccacccagaacctcttcctgagcccctggagcatcagcagcaccatggccatggtgtacatgggcagccggggcagcacagaggaccagatggccaaggtgctgcagttcaatgaggtgggcgccaatgctgtgacccccatgaccccagagaacttcaccagctgtggcttcatgcagcagatccagaagggcagctacccagatgccatcctgcaggcccaggccgctgacaagatccacagcagcttccgcagcctgagcagcgccatcaatgccagcacaggcaactacctgctggagagcgtgaacaagctgtttggagagaagagcgccagcttccgggaggagtacatccggctgtgccagaagtactacagcagcgagccccaggccgtggacttcctggagtgctag

SEQ ID NO: 21812 - DNA, 399 bp, synthetic construct
  misc_feature 1..399: note = Description of Artificial Sequence: Synthetic coding sequence
  source 1..399: mol_type = other DNA
atggaggacctgtgtgtggccaacaccctgtttgccctgaacctcttcaagcacctggccaaggccagccccacccagaacctcttcctgagcccctggagcatcagcagcaccatggccatggtgtacatgggcagccggggcagcacagaggaccagatggccaaggtgctgcagttcaatgaggtgggcgccaatgctgtgacccccatgaccccagagaacttcaccagctgtggcttcatgcagcagatccagaagggcagctacccagatgccatcctgcaggcccaggccgctgacaagatccacagcagcttccgcagcctgagcagcgccatcaatgccagcacaggcaactacctgctggagagcgtgaacaagctgtttggagagtag

SEQ ID NO: 21813 - DNA, 1248 bp, synthetic construct; identical to SEQ ID NO: 21809
  misc_feature 1..1248: note = Description of Artificial Sequence: Synthetic coding sequence
  source 1..1248: mol_type = other DNA

SEQ ID NO: 21814 - DNA, 2280 bp, synthetic construct
  misc_feature 1..2280: note = Description of Artificial Sequence: Synthetic coding sequence
  source 1..2280: mol_type = other DNA
atggccggcctgaccctgtttgtgggccgcctgccccccagcgcccggtctgagcagctggaggagctgttcagccaggtgggccctgtgaagcagtgctttgtggtgacagagaagggcagcaaggcctgccggggcttcggctacgtgaccttctccatgctggaggatgtgcagagggccctgaaggagatcaccacctttgagggctgcaagatcaacgtgacagtggccaagaagaagctgaggaacaagaccaaggagaagggcaagaatgaaaattctgagtgccccaagaaggagcccaaggccaagaaggccaaggtggccgacaagaaggcccggctcatcatccggaacctgtccttcaagtgcagtgaagatgacctgaagacagtgtttgcccagtttggagctgtgctggaggtgaacatccccaggaagccagatggcaagatgaggggcttcggctttgtgcagttcaagaacctgctggaggccggcaaggccctgaagggcatgaacatgaaggagatcaagggccgcacagtggccgtggactgggccgtggccaaggacaagtacaaggacacccagagcgtgtctgccatcggggaggagaagagccatgagagcaagcaccaggagagcgtgaagaagaagggccgggaggaggaggacatggaggaggaggagaatgatgatgatgatgatgatgatgatgaagaagatggagtgtttgatgatgaagatgaggaggaggagaacatcgagagcaaggtgaccaagcctgtgcagatccagaagagagctgtgaagaggcctgccccagccaagagcagtgaccacagcgaggaggacagcgacctggaggagagtgacagcattgatgatggagaggagctggcccagagcgacaccagcacagaggagcaggaggacaaggctgtgcaggtgagcaacaagaagaagaggaagctgcccagtgatgtgaatgaaggcaagacagtgttcatccggaacctgagctttgacagcgaggaggaggagctgggggagctgctgcagcagtttggagagctgaagtatgtgcgcatcgtgctgcacccagacacagagcacagcaagggctgtgcctttgcccagttcatgacccaggaggccgcccagaagtgcctgctggccgccagcccagaaaatgaggccggcggcctgaagctggatggccggcagctgaaggtggacctggccgtgaccagagatgaagctgccaagctgcagaccaccaaggtgaagaagcccaccggcaccaggaacctgtacctggcccgggagggcctcatccgggccggcaccaaggctgctgagggcgtgtctgctgctgacatggccaagcgggagagatttgagctgctgaagcaccagaagctgaaggaccagaacatctttgtgtccaggacccggctgtgcctgcacaacctgcccaaggctgtggatgacaagcagctgaggaagctgctgctgagcgccaccagcggggagaagggcgtgcgcatcaaggaatgtcgggtgatgagggacctgaagggcgtgcacggcaacatgaagggccagagcctgggctacgcctttgctgagttccaggagcacgagcacgccctgaaggccctgcggctcatcaacaacaaccctgagatcttcggccccctgaagaggcccatcgtggagttcagcctggaggacaggaggaagctgaagatgaaggagctgcgcatccagaggagcctgcagaagatgaggagcaagccagccactggagagccccagaagggccagcctgagcccgccaaggaccagcagcagaaggccgcccagcaccacacagaggagcagagcaaggtgcccccagagcagaagaggaaggccggcagcacctcctggacaggcttccagaccaaggccgaggtggagcaggtggagctgcctgatggcaagaagaggaggaaggtgctggccctgcccagccaccggggccccaagatccggctgcgggacaagggcaaggtgaagcctgtgcaccccaagaagcccaagccccagatcaaccagtggaagcaggagaagcagcagctgagcagcgagcaggtgtccaggaagaaggccaagggcaacaagacagagacccgcttcaaccagctggtggagcagtacaagcagaagctgctgggccccagcaagggggcccccctggccaagaggagcaagtggtttgacagctag

SEQ ID NO: 21815 - DNA, 1164 bp, synthetic construct
  misc_feature 1..1164: note = Description of Artificial Sequence: Synthetic coding sequence
  source 1..1164: mol_type = other DNA
atgcagatgagccctgccctgacctgcctggtgctgggcctggccctggtgtttggagagggcagcgctgtgcaccaccccccatcctatgtggcccaggccagcaaggacagaaatgtggtgttcagcccctatggagtggcctctgtgctggccatgctgcagctgaccaccggcggggagacccagcagcagatccaggccgccatgggcttcaagattgatgacaagggcatggccccagccctgcggcacctgtacaaggagctgatgggcccctggaacaaggatgagatcagcaccacagatgccatctttgtgcagagggacctgaagctggtgcagggcttcatgccccacttcttccgcctcttccgcagcacagtgaagcaggtggacttcagcgaggtggagcgggcccgcttcatcatcaatgactgggtgaagacccacaccaagggcatgatcagcaacctgctgggcaaaggagctgtggaccagctgacccggctggtgctggtgaatgccctgtacttcaacggccagtggaagacccccttcccagacagcagcacccaccggcggctcttccacaagagtgatggcagcacagtgtctgtgcccatgatggcccagaccaacaagttcaactacacagagttcaccaccccagatggccactactatgacatcctggagctgccctaccatggagacaccctgtccatgtttattgctgccccctatgagaaggaggtgcccctgagcgccctgaccaacatcctgagcgcccagctgatcagccactggaagggcaacatgacccggctgccccggctgctggtgctgcccaagttcagcctggagacagaggtggacctgaggaagcccctggagaacctgggcatgacagacatgttccggcagttccaggccgacttcaccagcctgagtgaccaggagcccctgcacgtggcccaggccctgcagaaggtgaagattgaggtgaatgaaagtggcaccgtggccagcagcagcacagctgtgattgtgtctgccaggatggcccctgaggagatcatcatggaccggcccttcctgtttgtggtgcgccacaaccccactggaacagtgctcttcatgggccaggtgatggagccctag

SEQ ID NO: 21816 - DNA, 540 bp, synthetic construct
  misc_feature 1..540: note = Description of Artificial Sequence: Synthetic coding sequence
  source 1..540: mol_type = other DNA
atgatggcccagaccaacaagttcaactacacagagttcaccaccccagatggccactactatgacatcctggagctgccctaccatggagacaccctgtccatgtttattgctgccccctatgagaaggaggtgcccctgagcgccctgaccaacatcctgagcgcccagctgatcagccactggaagggcaacatgacccggctgccccggctgctggtgctgcccaagttcagcctggagacagaggtggacctgaggaagcccctggagaacctgggcatgacagacatgttccggcagttccaggccgacttcaccagcctgagtgaccaggagcccctgcacgtggcccaggccctgcagaaggtgaagattgaggtgaatgaaagtggcaccgtggccagcagcagcacagctgtgattgtgtctgccaggatggcccctgaggagatcatcatggaccggcccttcctgtttgtggtgcgccacaaccccactggaacagtgctcttcatgggccaggtgatggagccctag

SEQ ID NO: 21817 - DNA, 711 bp, synthetic construct
  misc_feature 1..711: note = Description of Artificial Sequence: Synthetic coding sequence
  source 1..711: mol_type = other DNA
atgctgagcaagggcctgaagaggaagcgggaggaggaggaggagaaggagcccctggccgtggacagctggtggctggaccccggccacacagctgtggcccaggcccctcctgctgtggccagcagcagcctgtttgacctgtctgtgctgaagctgcaccacagcctgcagcagagcgagccagacctgcggcacctggtgctggtggtgaacaccctgcggcgcatccaggcctccatggccccagctgctgccctgccccctgtgcccagccccccagctgcccccagcgtggccgacaacctgctggccagcagtgatgctgccctgagcgcctccatggccagcctgctggaggacctgagccacatcgagggcctgagccaggccccccagcccctggctgatgagggccccccaggccgcagcattggaggagctgcccccagcctgggcgccctggacctgctgggccctgccaccggctgcctgctggatgatggcctggagggcctgtttgaagatattgacacctccatgtatgacaatgagctgtgggccccagccagcgagggcctgaagccaggcccagaagatggccctgggaaggaggaggcccctgagctggatgaagctgagctggactacctgatggatgtgctggtgggcacccaggccctggagaggcctcctggccctggccgctag

SEQ ID NO: 21818 - DNA, 1527 bp, synthetic construct
  misc_feature 1..1527: note = Description of Artificial Sequence: Synthetic coding sequence
  source 1..1527: mol_type = other DNA
atgctgcccacccaggccggggctgctgctgccctgggccggggcagcgccctgggcggcagcctgaacagaacacccaccggccggcctgggggcggcggcggcaccaggggggccaacggcggccgggtgcctggaaatggagctggcctgggccctggccgcctggagcgggaggccgctgctgctgctgccaccaccccagcccccacagctggggccctgtacagcggcagcgagggggacagcgagagcggggaggaggaggagctgggcgctgagcggcggggcctgaagaggagcctgtctgagatggagatcggcatggtggtgggcggccctgaggccagcgctgctgccactggaggctacggccctgtgtctggagctgtgtctggggccaagccaggcaagaagacccggggccgggtgaagatcaagatggagttcatcgacaacaagctgcggcgctacaccaccttcagcaagaggaagacaggcatcatgaagaaggcctatgagctgagcaccctgaccggcacccaggtgctgctgctggtggccagcgagactggacatgtgtacacctttgccaccaggaagctgcagcccatgatcaccagcgagaccgggaaggccctgatccagacctgcctgaacagcccagacagccccccaagaagtgaccccaccacagaccagaggatgtctgccactggatttgaggagacagacctgacctaccaggtgtctgagagtgacagcagcggggagaccaaggacaccctgaagccagccttcaccgtgaccaacctgcccggcaccaccagcaccatccagacagcccccagcaccagcaccaccatgcaggtgagcagcggccccagcttccccatcaccaactacctggcccctgtgtctgcctctgtgagccccagcgctgtgtcctctgccaatggaacagtgctgaagagcacaggcagcggccctgtgtcctctgggggcctgatgcagctgcccaccagcttcaccctgatgcctggaggagctgtggcccagcaggtgcctgtgcaggccatccaggtgcaccaggccccccagcaggccagccccagccgggacagcagcacagacctgacccagaccagcagcagcggcaccgtgaccctgcctgccaccatcatgaccagctctgtgcccaccaccgtgggcggccacatgatgtaccccagcccccatgctgtgatgtatgcccccaccagcggcctgggagatggcagcctgactgtgctgaatgccttcagccaggcccccagcaccatgcaggtgagccacagccaggtgcaggagcctggaggagtgccccaggtgttcctgacagccagcagcggcaccgtgcagatccctgtgtctgctgtgcagctgcaccagatggctgtgattggccagcaggccggcagcagcagcaacctgacagagctgcaggtggtgaacctggacacagcccacagcaccaagtctgagtag

SEQ ID NO: 21819 - DNA, 915 bp, synthetic construct
  misc_feature 1..915: note = Description of Artificial Sequence: Synthetic coding sequence
  source 1..915: mol_type = other DNA
atgatcaccagcgagaccgggaaggccctgatccagacctgcctgaacagcccagacagccccccaagaagtgaccccaccacagaccagaggatgtctgccactggatttgaggagacagacctgacctaccaggtgtctgagagtgacagcagcggggagaccaaggacaccctgaagccagccttcaccgtgaccaacctgcccggcaccaccagcaccatccagacagcccccagcaccagcaccaccatgcaggtgagcagcggccccagcttccccatcaccaactacctggcccctgtgtctgcctctgtgagccccagcgctgtgtcctctgccaatggaacagtgctgaagagcacaggcagcggccctgtgtcctctgggggcctgatgcagctgcccaccagcttcaccctgatgcctggaggagctgtggcccagcaggtgcctgtgcaggccatccaggtgcaccaggccccccagcaggccagccccagccgggacagcagcacagacctgacccagaccagcagcagcggcaccgtgaccctgcctgccaccatcatgaccagctctgtgcccaccaccgtgggcggccacatgatgtaccccagcccccatgctgtgatgtatgcccccaccagcggcctgggagatggcagcctgactgtgctgaatgccttcagccaggcccccagcaccatgcaggtgagccacagccaggtgcaggagcctggaggagtgccccaggtgttcctgacagccagcagcggcaccgtgcagatccctgtgtctgctgtgcagctgcaccagatggctgtgattggccagcaggccggcagcagcagcaacctgacagagctgcaggtggtgaacctggacacagcccacagcaccaagtctgagtag

SEQ ID NO: 21820 - DNA, 834 bp, synthetic construct
  misc_feature 1..834: note = Description of Artificial Sequence: Synthetic coding sequence
  source 1..834: mol_type = other DNA
atgtctgccccagctgccaaggtgtccaagaaggagctgaacagcaaccatgatggagcagatgagaccagcgagaaggagcagcaggaggccatcgagcacattgatgaggtgcagaatgaaattgaccggctgaatgagcaggccagcgaggagatcctgaaggtggagcagaagtacaacaagctgcggcagcccttcttccagaagaggtctgagctgattgccaagatccccaacttctgggtgaccacctttgtgaaccacccccaggtgtctgccctgctgggggaggaggatgaggaggccctgcactacctgaccagggtggaggtgacagaatttgaggacatcaagagcggctacagaattgacttctactttgatgagaacccctactttgagaacaaggtgctgagcaaggagttccacctgaatgaaagtggggaccccagcagcaagagcacagagatcaagtggaagagcggcaaggacctgaccaagaggagcagccagacccagaacaaggccagcaggaagaggcagcacgaggagcctgagagcttcttcacctggttcacagaccacagtgatgctggagcagatgagctgggggaggtgatcaaggatgacatctggcccaaccccctgcagtactacctggtgcctgacatggatgatgaggagggggagggggaggaggatgatgatgatgatgaggaggaggagggcctggaggacattgatgaggagggagatgaagatgaaggagaagaagatgaagatgatgatgaaggagaggagggggaggaggatgaaggagaagatgactag

SEQ ID NO: 21821 - DNA, 798 bp, synthetic construct
  misc_feature 1..798: note = Description of Artificial Sequence: Synthetic coding sequence
  source 1..798: mol_type = other DNA
atgcccaggagccaccagcccccacctcctcctcatgagaaggagcagcaggaggccatcgagcacattgatgaggtgcagaatgaaattgaccggctgaatgagcaggccagcgaggagatcctgaaggtggagcagaagtacaacaagctgcggcagcccttcttccagaagaggtctgagctgattgccaagatccccaacttctgggtgaccacctttgtgaaccacccccaggtgtctgccctgctgggggaggaggatgaggaggccctgcactacctgaccagggtggaggtgacagaatttgaggacatcaagagcggctacagaattgacttctactttgatgagaacccctactttgagaacaaggtgctgagcaaggagttccacctgaatgaaagtggggaccccagcagcaagagcacagagatcaagtggaagagcggcaaggacctgaccaagaggagcagccagacccagaacaaggccagcaggaagaggcagcacgaggagcctgagagcttcttcacctggttcacagaccacagtgatgctggagcagatgagctgggggaggtgatcaaggatgacatctggcccaaccccctgcagtactacctggtgcctgacatggatgatgaggagggggagggggaggaggatgatgatgatgatgaggaggaggagggcctggaggacattgatgaggagggagatgaagatgaaggagaagaagatgaagatgatgatgaaggagaggagggggaggaggatgaaggagaagatgactag

SEQ ID NO: 21822 - DNA, 801 bp, synthetic construct
  misc_feature 1..801: note = Description of Artificial Sequence: Synthetic coding sequence
  source 1..801: mol_type = other DNA
atgatgcccaggagccaccagcccccacctcctcctcatgagaaggagcagcaggaggccatcgagcacattgatgaggtgcagaatgaaattgaccggctgaatgagcaggccagcgaggagatcctgaaggtggagcagaagtacaacaagctgcggcagcccttcttccagaagaggtctgagctgattgccaagatccccaacttctgggtgaccacctttgtgaaccacccccaggtgtctgccctgctgggggaggaggatgaggaggccctgcactacctgaccagggtggaggtgacagaatttgaggacatcaagagcggctacagaattgacttctactttgatgagaacccctactttgagaacaaggtgctgagcaaggagttccacctgaatgaaagtggggaccccagcagcaagagcacagagatcaagtggaagagcggcaaggacctgaccaagaggagcagccagacccagaacaaggccagcaggaagaggcagcacgaggagcctgagagcttcttcacctggttcacagaccacagtgatgctggagcagatgagctgggggaggtgatcaaggatgacatctggcccaaccccctgcagtactacctggtgcctgacatggatgatgaggagggggagggggaggaggatgatgatgatgatgaggaggaggagggcctggaggacattgatgaggagggagatgaagatgaaggagaggaggatgaagatgatgatgaaggagaggagggggaggaggatgaaggagaagatgactag

SEQ ID NO: 21823 - DNA, 873 bp, synthetic construct
  misc_feature 1..873: note = Description of Artificial Sequence: Synthetic coding sequence
  source 1..873: mol_type = other DNA
atggcccccaagaggcagagccccctgcccccccagaagaagaagccccggcccccaccagccctgggccctgaggagaccagcgccagcgctggcctgcccaagaagggggagaaggagcagcaggaggccatcgagcacattgatgaggtgcagaatgaaattgaccggctgaatgagcaggccagcgaggagatcctgaaggtggagcagaagtacaacaagctgcggcagcccttcttccagaagaggtctgagctgattgccaagatccccaacttctgggtgaccacctttgtgaaccacccccaggtgtctgccctgctgggggaggaggatgaggaggccctgcactacctgaccagggtggaggtgacagaatttgaggacatcaagagcggctacagaattgacttctactttgatgagaacccctactttgagaacaaggtgctgagcaaggagttccacctgaatgaaagtggggaccccagcagcaagagcacagagatcaagtggaagagcggcaaggacctgaccaagaggagcagccagacccagaacaaggccagcaggaagaggcagcacgaggagcctgagagcttcttcacctggttcacagaccacagtgatgctggagcagatgagctgggggaggtgatcaaggatgacatctggcccaaccccctgcagtactacctggtgcctgacatggatgatgaggagggggagggggaggaggatgatgatgatgatgaggaggaggagggcctggaggacattgatgaggagggagatgaagatgaaggagaggaggatgaagatgatgatgaaggagaggagggggaggaggatgaaggagaagatgactag

SEQ ID NO: 21824 - DNA, 807 bp, synthetic construct
  misc_feature 1..807: note = Description of Artificial Sequence: Synthetic coding sequence
  source 1..807: mol_type = other DNA
atgggctgccgggacctgctgcccagcctgaagcccaccctgctggagaaggagcagcaggaggccatcgagcacattgatgaggtgcagaatgaaattgaccggctgaatgagcaggccagcgaggagatcctgaaggtggagcagaagtacaacaagctgcggcagcccttcttccagaagaggtctgagctgattgccaagatccccaacttctgggtgaccacctttgtgaaccacccccaggtgtctgccctgctgggggaggaggatgaggaggccctgcactacctgaccagggtggaggtgacagaatttgaggacatcaagagcggctacagaattgacttctactttgatgagaacccctactttgagaacaaggtgctgagcaaggagttccacctgaatgaaagtggggaccccagcagcaagagcacagagatcaagtggaagagcggcaaggacctgaccaagaggagcagccagacccagaacaaggccagcaggaagaggcagcacgaggagcctgagagcttcttcacctggttcacagaccacagtgatgctggagcagatgagctgggggaggtgatcaaggatgacatctggcccaaccccctgcagtactacctggtgcctgacatggatgatgaggagggggagggggaggaggatgatgatgatgatgaggaggaggagggcctggaggacattgatgaggagggagatgaagatgaaggagaggaggatgaagatgatgatgaaggagaggagggggaggaggatgaaggagaagatgactag

SEQ ID NO: 21825 - DNA, 99 bp, synthetic construct
  misc_feature 1..99: note = Description of Artificial Sequence: Synthetic coding sequence
  source 1..99: mol_type = other DNA
atggcccccaagaggcagagccccctgcccccccagaagaagaagccccggcccccaccagccctgggccctgaggagaccagcgccagcgctggatag

SEQ ID NO: 21826 - DNA, 942 bp, synthetic construct
  misc_feature 1..942: note = Description of Artificial Sequence: Synthetic coding sequence
  source 1..942: mol_type = other DNA
atgaccgggaaggccaccccacccagcctgtacagctggaggggcgtgctcttcacctgcctgcctgctgcccggaccaggaagaggaaggagatgagccggcagacagccacagccctgcccaccggcaccagcaagtgcccccccagccagagggtgcctgccctgaccggcaccacagccagcaacaatgacctggccagcctgtttgaatgtcctgtgtgctttgattatgtgctgccccccatcctgcagtgccagagcggccacctggtgtgcagcaactgccggcccaagctgacctgctgccccacctgccggggccccctgggcagcatccggaacctggccatggagaaggtggccaacagcgtgctcttcccctgcaagtatgccagcagcggctgtgagatcaccctgccccacacagagaaggctgaccacgaggagctgtgtgagttccggccctacagctgcccctgccctggggccagctgcaagtggcagggcagcctggatgctgtgatgccccacctgatgcaccagcacaagagcatcaccaccctgcagggcgaggacatcgtgttcctggccacagacatcaacctgcccggggctgtggactgggtgatgatgcagagctgcttcggcttccacttcatgctggtgctggagaagcaggagaagtatgatggccaccagcagttctttgccatcgtgcagctgattggcaccaggaagcaggccgagaactttgcctaccgcctggagctgaatggccacagaagaaggctgacctgggaggccacccccaggagcatccacgagggcatcgccacagccatcatgaacagcgactgcctggtgtttgacaccagcatcgcccagctgtttgctgaaaatggaaacctgggcatcaacgtgaccatctccatgtgctag

SEQ ID NO: 21827 - DNA, 897 bp, synthetic construct
  misc_feature 1..897: note = Description of Artificial Sequence: Synthetic coding sequence
  source 1..897: mol_type = other DNA
atggtgatcatcatcttcctgctgcccccctacgtgttcatcagcgagatgagccggcagacagccacagccctgcccaccggcaccagcaaatgtcctcccagccagagggtgcctgccctgaccggcaccacagccagcaacaatgacctggccagcctgtttgagtgccctgtgtgctttgattatgtgctgccccccatcctgcagtgccagagcggccacctggtgtgcagcaactgccggcccaagctgacctgctgccccacctgccggggccccctgggcagcatccggaacctggccatggagaaggtggccaacagcgtgctcttcccctgcaagtatgccagcagcggctgtgagatcaccctgccccacacagagaaggctgaccacgaggagctgtgtgagttccggccctacagctgcccctgccctggggccagctgcaagtggcagggcagcctggatgctgtgatgccccacctgatgcaccagcacaagagcatcaccaccctgcagggagaagatattgtgttcctggccacagacatcaacctgcctggagctgtggactgggtgatgatgcagagctgcttcggcttccacttcatgctggtgctggagaagcaggagaagtatgatggccaccagcagttctttgccatcgtgcagctgattggcaccaggaagcaggctgaaaattttgcctaccgcctggagctgaatggccacagaagaaggctgacctgggaggccacccccaggagcatccacgagggcatcgccacagccatcatgaacagcgactgcctggtgtttgacaccagcatcgcccagctgtttgctgaaaatggaaacctgggcatcaacgtgaccatctccatgtgctag

SEQ ID NO: 21828 - DNA, 849 bp, synthetic construct
  misc_feature 1..849: note = Description of Artificial Sequence: Synthetic coding sequence
  source 1..849: mol_type = other DNA
atgagccggcagacagccacagccctgcccaccggcaccagcaaatgtcctcccagccagagggtgcctgccctgaccggcaccacagccagcaacaatgacctggccagcctgtttgagtgccctgtgtgctttgattatgtgctgccccccatcctgcagtgccagagcggccacctggtgtgcagcaactgccggcccaagctgacctgctgccccacctgccggggccccctgggcagcatccggaacctggccatggagaaggtggccaacagcgtgctcttcccctgcaagtatgccagcagcggctgtgagatcaccctgccccacacagagaaggctgaccacgaggagctgtgtgagttccggccctacagctgcccctgccctggggccagctgcaagtggcagggcagcctggatgctgtgatgccccacctgatgcaccagcacaagagcatcaccaccctgcagggagaagatattgtgttcctggccacagacatcaacctgcctggagctgtggactgggtgatgatgcagagctgcttcggcttccacttcatgctggtgctggagaagcaggagaagtatgatggccaccagcagttctttgccatcgtgcagctgattggcaccaggaagcaggctgaaaattttgcctaccgcctggagctgaatggccacagaagaaggctgacctgggaggccacccccaggagcatccacgagggcatcgccacagccatcatgaacagcgactgcctggtgtttgacaccagcatcgcccagctgtttgctgaaaatggaaacctgggcatcaacgtgaccatctccatgtgctag

SEQ ID NO: 21829 - DNA, 708 bp, synthetic construct
  misc_feature 1..708: note = Description of Artificial Sequence: Synthetic coding sequence
  source 1..708: mol_type = other DNA
atgacctttgacctgaccaagatcaccaagaccagcagcagctttgaggtgaggacctgggaccctgagggcgtcatcttctacggggacaccaaccccaaggatgactggttcatgctgggcctgagagatggccggcctgagatccagctgcacaaccactgggcccagctgactgtgggcgccggcccccggctggatgatggccgctggcaccaggtggaggtgaagatggagggggacagcgtgctgctggaggtggatggagaggaggtgctgcggctgcggcaggtgtctggccccctgaccagcaagaggcaccccatcatgagaattgccctgggcggcctgctcttccctgccagcaacctgcggctgcccctggtgcctgccctggatggctgcctgcggcgggacagctggctggacaagcaggccgagatcagcgccagcgcccccaccagcctgcggagctgtgatgtggagagcaaccctggcatcttcctgcccccaggcacccaggccgagttcaacctgcgggacatcccccagccccatgctgagccctgggccttcagcctggacctgggcctgaagcaggccgccggcagcggccacctgctggccctgggcaccccagagaaccccagctggctgagcctgcacctgcaggaccaggagaagaccctgccccccctgtttgcctag

SEQ ID NO: 21830 - DNA, 1209 bp, synthetic construct
  misc_feature 1..1209: note = Description of Artificial Sequence: Synthetic coding sequence
  source 1..1209: mol_type = other DNA
atggagagccggggccccctggccaccagccggctgctgctgctgctgctgctgctgctgctgcggcacacccggcagggctgggccctgcggcctgtgctgcccacccagagcgcccatgaccccccagctgtgcacctgagcaatggacctggccaggagcccatcgctgtgatgacctttgacctgaccaagatcaccaagaccagcagcagctttgaggtgaggacctgggaccctgagggcgtcatcttctacggggacaccaaccccaaggatgactggttcatgctgggcctgagagatggccggcctgagatccagctgcacaaccactgggcccagctgactgtgggcgccggcccccggctggatgatggccgctggcaccaggtggaggtgaagatggagggggacagcgtgctgctggaggtggatggagaggaggtgctgcggctgcggcaggtgtctggccccctgaccagcaagaggcaccccatcatgagaattgccctgggcggcctgctcttccctgccagcaacctgcggctgcccctggtgcctgccctggatggctgcctgcggcgggacagctggctggacaagcaggccgagatcagcgccagcgcccccaccagcctgcggagctgtgatgtggagagcaaccctggcatcttcctgcccccaggcacccaggccgagttcaacctgcgggacatcccccagccccatgctgagccctgggccttcagcctggacctgggcctgaagcaggccgccggcagcggccacctgctggccctgggcaccccagagaaccccagctggctgagcctgcacctgcaggaccagaaggtggtgctgagcagcggcagcggccctggcctggacctgcccctggtgctgggcctgcccctgcagctgaagctgtccatgagccgggtggtgctgagccagggcagcaagatgaaggccctggccctgccccccctgggcctggcccccctgctgaacctgtgggccaagccccagggccgcctcttcctgggcgccctgcctggagaggacagcagcaccagcttctgcctgaatggcctgtgggcccagggccagaggctggatgtggaccaggccctgaacagaagccatgagatctggacccacagctgcccccagagccctggaaatggaacagatgccagccactag

SEQ ID NO: 21831 - DNA, 882 bp, synthetic construct
  misc_feature 1..882: note = Description of Artificial Sequence: Synthetic coding sequence
  source 1..882: mol_type = other DNA
atggagagccggggccccctggccaccagccggctgctgctgctgctgctgctgctgctgctgcggcacacccggcagggctgggccctgcggcctgtgctgcccacccagagcgcccatgaccccccagctgtgcacctgagcaatggacctggccaggagcccatcgctgtgatgacctttgacctgaccaagatcaccaagaccagcagcagctttgaggtgaggacctgggaccctgagggcgtcatcttctacggggacaccaaccccaaggatgactggttcatgctgggcctgagagatggccggcctgagatccagctgcacaaccactgggcccagctgactgtgggcgccggcccccggctggatgatggccgctggcaccaggtggaggtgaagatggagggggacagcgtgctgctggaggtggatggagaggaggtgctgcggctgcggcaggtgtctggccccctgaccagcaagaggcaccccatcatgagaattgccctgggcggcctgctcttccctgccagcaacctgcggctgcccctggtgcctgccctggatggctgcctgcggcgggacagctggctggacaagcaggccgagatcagcgccagcgcccccaccagcctgcggagctgtgatgtggagagcaaccctggcatcttcctgcccccaggcacccaggccgagttcaacctgcgggacatcccccagccccatgctgagccctgggccttcagcctggacctgggcctgaagcaggccgccggcagcggccacctgctggccctgggcaccccagagaaccccagctggctgagcctgcacctgcaggaccaggagaagaccctgccccccctgtttgcctag

SEQ ID NO: 21832 - DNA, 720 bp, synthetic construct
  misc_feature 1..720: note = Description of Artificial Sequence: Synthetic coding sequence
  source 1..720: mol_type = other DNA
atggagagccggggccccctggccaccagccggctgctgctgctgctgctgctgctgctgctgcggcacacccggcagggctgggccctgcggcctgtgctgcccacccagagcgcccatgaccccccagctgtgcacctgagcaatggacctggccaggagcccatcgctgtgatgacctttgacctgaccaagatcaccaagaccagcagcagctttgaggtgaggacctgggaccctgagggcgtcatcttctacggggacaccaaccccaaggatgactggttcatgctgggcctgagagatggccggcctgagatccagctgcacaaccactgggcccagctgactgtgggcgccggcccccggctggatgatggccgctggcaccagctggtgcctgccctggatggctgcctgcggcgggacagctggctggacaagcaggccgagatcagcgccagcgcccccaccagcctgcggagctgtgatgtggagagcaaccctggcatcttcctgcccccaggcacccaggccgagttcaacctgcgggacatcccccagccccatgctgagccctgggccttcagcctggacctgggcctgaagcaggccgccggcagcggccacctgctggccctgggcaccccagagaaccccagctggctgagcctgcacctgcaggaccaggagaagaccctgccccccctgtttgcctag

SEQ ID NO: 21833 - DNA, 864 bp, synthetic construct
  misc_feature 1..864: note = Description of Artificial Sequence: Synthetic coding sequence
  source 1..864: mol_type = other DNA
atggagagccggggccccctggccaccagccggctgctgctgctgctgctgctgctgctgctgcggcacacccggcagggctgggccctgcggcctgtgctgcccacccagagcgcccatgaccccccagctgtgcacctgagcaatggacctggccaggagcccatcgctgtgatgacctttgacctgaccaagatcaccaagaccagcagcagctttgaggtgaggacctgggaccctgagggcgtcatcttctacggggacaccaaccccaaggatgactggttcatgctgggcctgagagatggccggcctgagatccagctgcacaaccactgggcccagctgactgtgggcgccggcccccggctggatgatggccgctggcaccaggtggaggtgaagatggagggggacagcgtgctgctggaggtggatggagaggaggtgctgcggctgcggcaggtgtctggccccctgaccagcaagaggcaccccatcatgagaattgccctgggcggcctgctcttccctgccagcaacctgcggctgcccctggtgcctgccctggatggctgcctgcggcgggacagctggctggacaagcaggccgagatcagcgccagcgcccccaccagcctgcggagctgtgatgtggagagcaaccctggcatcttcctgcccccaggcacccaggccgagttcaacctgcggggggaggacagcagcaccagcttctgcctgaatggcctgtgggcccagggccagaggctggatgtggaccaggccctgaacagaagccatgagatctggacccacagctgcccccagagccctggaaatggaacagatgccagccactag

SEQ ID NO: 21834 - DNA, 423 bp, synthetic construct
  misc_feature 1..423: note = Description of Artificial Sequence: Synthetic coding sequence
  source 1..423: mol_type = other DNA
atggagagccggggccccctggccaccagccggctgctgctgctgctgctgctgctgctgctgcggcacacccggcagggctgggccctgcggcctgtgctgcccacccagagcgcccatgaccccccagctgtgcacctgagcaatggacctggccaggagcccatcgctgtgatgacctttgacctgaccaagatcaccaagaccagcagcagctttgaggtgaggacctgggaccctgagggcgtcatcttctacggggacaccaaccccaaggatgactggttcatgctgggcctgagagatggccggcctgagatccagctgcacaaccactgggcccagctgactgtgggcgccggcccccggctggatgatggccgctggcaccaggagaagaccctgccccccctgtttgcctag

SEQ ID NO: 21835 - DNA, 1155 bp, synthetic construct
  misc_feature 1..1155: note = Description of Artificial Sequence: Synthetic coding sequence
  source 1..1155: mol_type = other DNA
atggagagccggggccccctggccaccagccggctgctgctgctgctgctgctgctgctgctgcggcacacccggcagggctgggccctgcggcctgtgctgcccacccagagcgcccatgaccccccagctgtgcacctgagcaatggacctggccaggagcccatcgctgtgatgacctttgacctgaccaagatcaccaagaccagcagcagctttgaggtgaggacctgggaccctgagggcgtcatcttctacggggacaccaaccccaaggatgactggttcatgctgggcctgagagatggccggcctgagatccagctgcacaaccactgggcccagctgactgtgggcgccggcccccggctggatgatggccgctggcaccaggtggaggtgaagatggagggggacagcgtgctgctggaggtggatggagaggaggtgctgcggctgcggcaggtgtctggccccctgaccagcaagaggcaccccatcatgagaattgccctgggcggcctgctcttccctgccagcaacctgcggctgcctgctgagatcagcgccagcgcccccaccagcctgcggagctgtgatgtggagagcaaccctggcatcttcctgcccccaggcacccaggccgagttcaacctgcgggacatcccccagccccatgctgagccctgggccttcagcctggacctgggcctgaagcaggccgccggcagcggccacctgctggccctgggcaccccagagaaccccagctggctgagcctgcacctgcaggaccagaaggtggtgctgagcagcggcagcggccctggcctggacctgcccctggtgctgggcctgcccctgcagctgaagctgtccatgagccgggtggtgctgagccagggcagcaagatgaaggccctggccctgccccccctgggcctggcccccctgctgaacctgtgggccaagccccagggccgcctcttcctgggcgccctgcctggagaggacagcagcaccagcttctgcctgaatggcctgtgggcccagggccagaggctggatgtggaccaggccctgaacagaagccatgagatctggacccacagctgcccccagagccctggaaatggaacagatgccagccactag

SEQ ID NO: 21836 - DNA, 1116 bp, synthetic construct
  misc_feature 1..1116: note = Description of Artificial Sequence: Synthetic coding sequence
  source 1..1116: mol_type = other DNA
atgagccccagcaccttccagatcacagacatgaccaggaggagctgccagaacctgggctacacagctgccagcccccaggcccctgaggccgccagcaacacaggaaatgctgagagagctgaggaggtgcctggagagggcagcctcttcctgcaggccgagacccgggcctggttccagaagacccaggcccactggctgctgcagcacggggccgccccagcctggttccacggcttcatcacccggcgggaggccgagcggctgctggagcccaagccccagggctgctacctggtgcgcttcagcgagagcgctgtgacctttgtgctgacctaccgcagcaggacctgctgccgccacttcctgctggcccagctgagagatggaagacatgtggtgctgggggaggacagcgcccacgcccggctgcaggacctgctgctgcactacacagcccaccccctgagcccctacggggagaccctgacagagcccctggcccggcagaccccagagcccgccggcctgagcctgaggacagaggagagcaactttggcagcaagagccaggaccccaacccccagtacagccccatcatcaagcagggccaggcccctgtgcccatgcagaaggagggcgctggggagaaggagcccagccagctgctgcggcccaagccacccatcccagccaagccccagctgcccccagaggtgtacaccatccctgtgcccaggcacaggcctgccccccggcccaagcccagcaaccccatctacaatgaaccagatgagcccatcgccttctacgccatgggccggggcagccctggagaggcccccagcaacatctacgtggaggtggaggatgagggcctgcctgccaccctgggccaccctgtgctgaggaagtcctggagcaggcctgtgcctgggggccagaacacaggaggcagccagctgcacagcgagaacagcgtcatcggccagggcccccccctgccccaccagcccccaccagcctggaggcacaccctgccccacaacctgagccggcaggtgctgcaggaccggggccaggcctggctgcccctgggccccccccagtag

SEQ ID NO: 21837 - DNA, 1170 bp, synthetic construct
  misc_feature 1..1170: note = Description of Artificial Sequence: Synthetic coding sequence
  source 1..1170: mol_type = other DNA
atggagttccccctggcccagatctgcccccagggcagccatgaggcccccatccccaccttcagcaccttccagatcacagacatgaccaggaggagctgccagaacctgggctacacagctgccagcccccaggcccctgaggccgccagcaacacaggaaatgctgagagagctgaggaggtgcctggagagggcagcctcttcctgcaggccgagacccgggcctggttccagaagacccaggcccactggctgctgcagcacggggccgccccagcctggttccacggcttcatcacccggcgggaggccgagcggctgctggagcccaagccccagggctgctacctggtgcgcttcagcgagagcgctgtgacctttgtgctgacctaccgcagcaggacctgctgccgccacttcctgctggcccagctgagagatggaagacatgtggtgctgggggaggacagcgcccacgcccggctgcaggacctgctgctgcactacacagcccaccccctgagcccctacggggagaccctgacagagcccctggcccggcagaccccagagcccgccggcctgagcctgaggacagaggagagcaactttggcagcaagagccaggaccccaacccccagtacagccccatcatcaagcagggccaggcccctgtgcccatgcagaaggagggcgctggggagaaggagcccagccagctgctgcggcccaagccacccatcccagccaagccccagctgcccccagaggtgtacaccatccctgtgcccaggcacaggcctgccccccggcccaagcccagcaaccccatctacaatgaaccagatgagcccatcgccttctacgccatgggccggggcagccctggagaggcccccagcaacatctacgtggaggtggaggatgagggcctgcctgccaccctgggccaccctgtgctgaggaagtcctggagcaggcctgtgcctgggggccagaacacaggaggcagccagctgcacagcgagaacagcgtcatcggccagggcccccccctgccccaccagcccccaccagcctggaggcacaccctgccccacaacctgagccggcaggtgctgcaggaccggggccaggcctggctgcccctgggccccccccagtag

SEQ ID NO: 21838 - DNA, 1200 bp, synthetic construct
  misc_feature 1..1200: note = Description of Artificial Sequence: Synthetic coding sequence
  source 1..1200: mol_type = other DNA
atggagttccccctggcccagatctgcccccagggcagccatgaggcccccatccccaccttcagcaccttccagatcacagacatgaccaggaggagctgccagaacctgggctacacagctgccagcccccaggcccctgaggccgccagcaacacaggaaatgctgagagagctgaggaggtgcctggagagggcagcctcttcctgcaggccgagacccgggcctggttccagaagacccaggcccactggctgctgcagcacggggccgccccagcctggttccacggcttcatcacccggcgggtgcggccccccctgtctgtgacccaccgggaggccgagcggctgctggagcccaagccccagggctgctacctggtgcgcttcagcgagagcgctgtgacctttgtgctgacctaccgcagcaggacctgctgccgccacttcctgctggcccagctgagagatggaagacatgtggtgctgggggaggacagcgcccacgcccggctgcaggacctgctgctgcactacacagcccaccccctgagcccctacggggagaccctgacagagcccctggcccggcagaccccagagcccgccggcctgagcctgaggacagaggagagcaactttggcagcaagagccaggaccccaacccccagtacagccccatcatcaagcagggccaggcccctgtgcccatgcagaaggagggcgctggggagaaggagcccagccagctgctgcggcccaagccacccatcccagccaagccccagctgcccccagaggtgtacaccatccctgtgcccaggcacaggcctgccccccggcccaagcccagcaaccccatctacaatgaaccagatgagcccatcgccttctacgccatgggccggggcagccctggagaggcccccagcaacatctacgtggaggtggaggatgagggcctgcctgccaccctgggccaccctgtgctgaggaagtcctggagcaggcctgtgcctgggggccagaacacaggaggcagccagctgcacagcgagaacagcgtcatcggccagggcccccccctgccccaccagcccccaccagcctggaggcacaccctgccccacaacctgagccggcaggtgctgcaggaccggggccaggcctggctgcccctgggccccccccagtag

SEQ ID NO: 21839 - DNA, 2823 bp, synthetic construct
  misc_feature 1..2823: note = Description of Artificial Sequence: Synthetic coding sequence
  source 1..2823: mol_type = other DNA
atgatcctggagcagtatgtggtggtgagcaactacaagaagcaggagaacagcgagctgagcctgcaggccggggaggtggtggatgtgattgagaagaatgaaagtggctggtggtttgtgtccaccagcgaggagcagggctgggtgcctgccacctacctggaggcccagaatggcaccagagatgacagcgacatcaacaccagcaagacaggagaggaggagaagtatgtgacagtgcagccctacaccagccagagcaaggatgagatcggctttgagaagggcgtgacagtggaggtgatcaggaagaacctggagggctggtggtacatccgctacctgggcaaggagggctgggccccagccagctacctgaagaaggccaaggatgacctgcccaccaggaagaagaacctggccggccctgtggagatcatcggcaacatcatggagatcagcaacctgctgaacaagaaggccagcggggacaaggagaccccacctgctgagggggagggccacgaggcccccatcgccaagaaggagatcagcctgcccatcctgtgcaatgccagcaatggatctgctgtgggcgtgcctgacagaacagtgtcccggctggcccagggcagccctgctgtggccagaattgccccccagagggcccagatcagcagccccaacctgcggacccggcccccaccccggcgggagagcagcctgggcttccagctgcccaagcccccagagcccccatctgtggaggtggagtactacaccatcgccgagttccagagctgcatcagtgatggcatctccttccggggcggccagaaggccgaggtgattgacaagaacagcggcggctggtggtacgtgcagattggagagaaggagggctgggccccagccagctacatcgacaagaggaagaagcccaacctgagcaggaggaccagcaccctgacccggcccaaggtgcccccaccagccccacccagcaagcccaaggaggccgaggagggccccaccggggccagcgagagccaggacagccccaggaagctgaagtatgaggagccagaatatgacatcccagccttcggctttgacagcgagcctgagctgtctgaggagcctgtggaggaccgggccagcggggagaggaggcctgcccagccccaccggcccagccctgccagcagcctgcagagggcccgcttcaaggtgggggagagcagtgaagatgtggccctggaggaggagaccatctatgaaaatgaaggcttccggccctatgcagaggacaccctgagcgcccggggcagcagcggggacagcgacagccctggcagcagcagcctgagcctgaccaggaagaacagccccaagagcggcagccccaagagcagcagcctgctgaagctgaaggccgagaagaatgcccaggccgagatgggcaagaaccacagcagcgccagcttcagcagcagcatcaccatcaacaccacctgctgcagcagcagcagcagcagcagcagcagcctgagcaagaccagcggggacctgaagcccaggtctgccagtgatgctggcatccggggcacccccaaggtgcgggccaagaaggatgctgatgccaatgccggcctgaccagctgcccccgggccaagcccagcgtgcggcccaagcccttcctgaacagagctgagagccagagccaggagaagatggacatcagcaccctgcggcggcagctgcggcccaccggccagctgcggggcggcctgaagggcagcaagtcagaagattctgagctgcccccccagacagccagcgaggcccccagcgagggcagcagaagaagcagcagtgacctgatcaccctgcctgccaccaccccaccctgccccaccaagaaggagtgggagggccctgccaccagctacatgacctgcagcgcctaccagaaggtgcaggacagcgagatctccttccctgctggggtggaggtgcaggtgctggagaagcaggagagcggctggtggtacgtgcgctttggagagctggagggctgggcccccagccactacctggtgctggatgaaaatgagcagcctgaccccagcggcaaggagctggacacagtgcctgccaagggccggcagaatgaaggcaagagtgacagcctggagaagattgaaagaagagtgcaggccctgaacacagtgaaccagagcaagaaggccaccccacccatccccagcaagcccccaggcggctttgggaagaccagcggcaccccagctgtgaagatgagaaatggagtgcggcaggtggccgtgcggccccagagcgtgtttgtgtccccaccacccaaggacaacaacctgagctgtgccctgcggagaaatgaaagcctgacagccacagatggcctgcggggcgtgagaagaaacagcagcttcagcacagcccggtctgctgctgctgaggccaagggccgcctggccgagagagctgccagccagggcagtgacagccccctgctgcctgcccagagaaattccatccctgtgtcccctgtgcggcccaagcccatcgagaagagccagttcatccacaacaacctgaaggatgtgtatgtgtccattgctgactatgaaggagatgaggagacagctggcttccaggagggcgtgtccatggaggtgctggagaggaaccccaacggctggtggtactgccagatcctggatggagtgaagcccttcaagggctgggtgcccagcaactacctggagaagaagaactag

SEQ ID NO: 21840 - DNA, 3318 bp, synthetic construct
  misc_feature 1..3318: note = Description of Artificial Sequence: Synthetic coding sequence
  source 1..3318: mol_type = other DNA
atgctggcctactgtgtgcaggatgccaccgtggtggatgtggagaagagaagaaaccccagcaagcactacgtgtacatcatcaacgtgacctggagcgacagcaccagccagaccatctaccgccgctacagcaagttctttgacctgcagatgcagctgctggacaagttccccatcgagggcggccagaaggaccccaagcagaggatcatccccttcctgcccgggaagatcctcttccgccgcagccacatcagagatgtggccgtgaagaggctgaagcccattgatgagtactgccgggccctggtgcggctgcccccccacatcagccagtgtgatgaggtgttccgcttctttgaggcccggccagaagatgtgaacccccccaaggaggactatggcagcagcaagaggaagtctgtgtggctgagctcctgggccgagagccccaagaaggatgtgactggagcagatgccacagctgagcccatgatcctggagcagtatgtggtggtgagcaactacaagaagcaggagaacagcgagctgagcctgcaggccggggaggtggtggatgtgattgagaagaatgaaagtggctggtggtttgtgtccaccagcgaggagcagggctgggtgcctgccacctacctggaggcccagaatggcaccagagatgacagcgacatcaacaccagcaagacaggagaggaggagaagtatgtgacagtgcagccctacaccagccagagcaaggatgaaattggatttgagaagggcgtgacagtggaggtgatcaggaagaacctggagggctggtggtacatccgctacctgggcaaggagggctgggccccagccagctacctgaagaaggccaaggatgacctgcccaccaggaagaagaacctggccggccctgtggagatcatcggcaacatcatggagatcagcaacctgctgaacaagaaggccagcggggacaaggagaccccacctgctgagggggagggccacgaggcccccatcgccaagaaggagatcagcctgcccatcctgtgcaatgccagcaatggcagcgctgtgggcgtgcctgacagaacagtgtcccggctggcccagggcagccctgctgtggcccgcatcgccccccagagggcccagatcagcagccccaacctgcggacccggcccccaccaagaagagagagcagcctgggcttccagctgcccaagcccccagagccccccagcgtggaggtggagtactacaccatcgccgagttccagagctgcatcagtgatggcatctccttccggggcggccagaaggccgaggtgattgacaagaacagcggcggctggtggtacgtgcagatcggggagaaggagggctgggccccagccagctacatcgacaagaggaagaagcccaacctgagcaggaggaccagcaccctgacccggcccaaggtgcccccaccagccccacccagcaagcccaaggaggccgaggagggccccactggagccagcgagagccaggacagccccaggaagctgaagtatgaggagccagaatatgacatcccagcctttggatttgattctgagcctgagctgtctgaggagcctgtggaggaccgggccagcggggagcggcggcctgcccagccccaccggcccagccctgccagcagcctgcagagggcccgcttcaaggtgggggagagcagtgaagatgtggccctggaggaggagaccatctatgaaaatgaaggcttccggccctatgcagaggacaccctgagcgcccggggcagcagcggggacagcgacagccctggcagcagcagcctgagcctgaccaggaagaacagccccaagagcggcagccccaagagcagcagcctgctgaagctgaaggccgagaagaatgcccaggccgagatgggcaagaaccacagcagcgccagcttcagcagcagcatcaccatcaacaccacctgctgcagcagcagcagcagcagcagcagcagcctgagcaagaccagcggggacctgaagcccaggtctgccagtgatgctggcatccggggcacccccaaggtgcgggccaagaaggatgctgatgccaatgccggcctgaccagctgcccccgggccaagcccagcgtgcggcccaagcccttcctgaacagagctgagagccagagccaggagaagatggacatcagcaccctgcggcggcagctgcggcccaccggccagctgcggggcggcctgaagggcagcaagtctgaggacagcgagctgcccccccagacagccagcgaggcccccagcgagggcagccgccgcagcagcagtgacctgatcaccctgcctgccaccaccccaccctgccccaccaagaaggagtgggagggccctgccaccagctacatgacctgcagcgcctaccagaaggtgcaggacagcgagatctccttccctgctggggtggaggtgcaggtgctggagaagcaggagagcggctggtggtacgtgcgctttggagagctggagggctgggcccccagccactacctggtgctggatgaaaatgagcagcctgaccccagcggcaaggagctggacacagtgcctgccaagggccggcagaatgaaggcaagagtgacagcctggagaagattgaaagaagagtgcaggccctgaacacagtgaaccagagcaagaaggccaccccacccatccccagcaagcccccaggcggctttgggaagaccagcggcaccccagctgtgaagatgagaaatggagtgcggcaggtggccgtgcggccccagagcgtgtttgtgagccccccacccaaggacaacaacctgagctgtgccctgcggagaaatgaaagcctgacagccacagatggcctgcggggcgtgagaagaaacagcagcttcagcacagcccggtctgctgctgctgaggccaagggccgcctggccgagcgggccgccagccagggcagtgacagccccctgctgcctgcccagaggaacagcatccctgtgtcccctgtgcggcccaagcccatcgagaagagccagttcatccacaacaacctgaaggatgtgtatgtgtccattgctgactatgaaggagatgaggagacagctggcttccaggagggcgtgtccatggaggtgctggagaggaaccccaacggctggtggtactgccagatcctggatggagtgaagcccttcaagggctgggtgcccagcaactacctggagaagaagaactag

SEQ ID NO: 21841 - DNA, 3402 bp, synthetic construct
  misc_feature 1..3402: note = Description of Artificial Sequence: Synthetic coding sequence
  source 1..3402: mol_type = other DNA
atgctggcctactgtgtgcaggatgccaccgtggtggatgtggagaagagaagaaaccccagcaagcactacgtgtacatcatcaacgtgacctggagcgacagcaccagccagaccatctaccgccgctacagcaagttctttgacctgcagatgcagctgctggacaagttccccatcgagggcggccagaaggaccccaagcagaggatcatccccttcctgcccgggaagatcctcttccgccgcagccacatcagagatgtggccgtgaagaggctgaagcccattgatgagtactgccgggccctggtgcggctgcccccccacatcagccagtgtgatgaggtgttccgcttctttgaggcccggccagaagatgtgaacccccccaaggaggactatggcagcagcaagaggaagtctgtgtggctgagctcctgggccgagagccccaagaaggatgtgactggagcagatgccacagctgagcccatgatcctggagcagtatgtggtggtgagcaactacaagaagcaggagaacagcgagctgagcctgcaggccggggaggtggtggatgtgattgagaagaatgaaagtggctggtggtttgtgtccaccagcgaggagcagggctgggtgcctgccacctacctggaggcccagaatggcaccagagatgacagcgacatcaacaccagcaagacaggagaggtgtccaagaggaggaaggcccacctgcggcggctggaccggcgctggaccctgggcggcatggtgaaccggcagcacagccgggaggagaagtatgtgacagtgcagccctacaccagccagagcaaggatgaaattggatttgagaagggcgtgacagtggaggtgatcaggaagaacctggagggctggtggtacatccgctacctgggcaaggagggctgggccccagccagctacctgaagaaggccaaggatgacctgcccaccaggaagaagaacctggccggccctgtggagatcatcggcaacatcatggagatcagcaacctgctgaacaagaaggccagcggggacaaggagaccccacctgctgagggggagggccacgaggcccccatcgccaagaaggagatcagcctgcccatcctgtgcaatgccagcaatggcagcgctgtgggcgtgcctgacagaacagtgtcccggctggcccagggcagccctgctgtggcccgcatcgccccccagagggcccagatcagcagccccaacctgcggacccggcccccaccaagaagagagagcagcctgggcttccagctgcccaagcccccagagccccccagcgtggaggtggagtactacaccatcgccgagttccagagctgcatcagtgatggcatctccttccggggcggccagaaggccgaggtgattgacaagaacagcggcggctggtggtacgtgcagatcggggagaaggagggctgggccccagccagctacatcgacaagaggaagaagcccaacctgagcaggaggaccagcaccctgacccggcccaaggtgcccccaccagccccacccagcaagcccaaggaggccgaggagggccccactggagccagcgagagccaggacagccccaggaagctgaagtatgaggagccagaatatgacatcccagcctttggatttgattctgagcctgagctgtctgaggagcctgtggaggaccgggccagcggggagcggcggcctgcccagccccaccggcccagccctgccagcagcctgcagagggcccgcttcaaggtgggggagagcagtgaagatgtggccctggaggaggagaccatctatgaaaatgaaggcttccggccctatgcagaggacaccctgagcgcccggggcagcagcggggacagcgacagccctggcagcagcagcctgagcctgaccaggaagaacagccccaagagcggcagccccaagagcagcagcctgctgaagctgaaggccgagaagaatgcccaggccgagatgggcaagaaccacagcagcgccagcttcagcagcagcatcaccatcaacaccacctgctgcagcagcagcagcagcagcagcagcagcctgagcaagaccagcggggacctgaagcccaggtctgccagtgatgctggcatccggggcacccccaaggtgcgggccaagaaggatgctgatgccaatgccggcctgaccagctgcccccgggccaagcccagcgtgcggcccaagcccttcctgaacagagctgagagccagagccaggagaagatggacatcagcaccctgcggcggcagctgcggcccaccggccagctgcggggcggcctgaagggcagcaagtctgaggacagcgagctgcccccccagacagccagcgaggcccccagcgagggcagccgccgcagcagcagtgacctgatcaccctgcctgccaccaccccaccctgccccaccaagaaggagtgggagggccctgccaccagctacatgacctgcagcgcctaccagaaggtgcaggacagcgagatctccttccctgctggggtggaggtgcaggtgctggagaagcaggagagcggctggtggtacgtgcgctttggagagctggagggctgggcccccagccactacctggtgctggatgaaaatgagcagcctgaccccagcggcaaggagctggacacagtgcctgccaagggccggcagaatgaaggcaagagtgacagcctggagaagattgaaagaagagtgcaggccctgaacacagtgaaccagagcaagaaggccaccccacccatccccagcaagcccccaggcggctttgggaagaccagcggcaccccagctgtgaagatgagaaatggagtgcggcaggtggccgtgcggccccagagcgtgtttgtgagccccccacccaaggacaacaacctgagctgtgccctgcggagaaatgaaagcctgacagccacagatggcctgcggggcgtgagaagaaacagcagcttcagcacagcccggtctgctgctgctgaggccaagggccgcctggccgagcgggccgccagccagggcagtgacagccccctgctgcctgcccagaggaacagcatccctgtgtcccctgtgcggcccaagcccatcgagaagagccagttcatccacaacaacctgaaggatgtgtatgtgtccattgctgactatgaaggagatgaggagacagctggcttccaggagggcgtgtccatggaggtgctggagaggaaccccaacggctggtggtactgccagatcctggatggagtgaagcccttcaagggctgggtgcccagcaactacctggagaagaagaactag

SEQ ID NO: 21842 - DNA, 3183 bp, synthetic construct
  misc_feature 1..3183: note = Description of Artificial Sequence: Synthetic coding sequence
  source 1..3183: mol_type = other DNA
tgattctttgacctgcagatgcagctgctggacaagttccccattgaaggaggccagaaggaccccaagcagaggatcatccccttcctgcccgggaagatcctcttcagaagaagccacatcagagatgtggccgtgaagaggctgaagcccattgatgagtactgccgggccctggtgcggctgcccccccacatcagccagtgtgatgaggtgttccgcttctttgaggcccggccagaagatgtgaacccccccaaggaggactatggcagcagcaagaggaagtctgtgtggctgagctcctgggccgagagccccaagaaggatgtgactggagcagatgccacagctgagcccatgatcctggagcagtatgtggtggtgagcaactacaagaagcaggagaacagcgagctgagcctgcaggccggggaggtggtggatgtgattgagaagaatgaaagtggctggtggtttgtgtccaccagcgaggagcagggctgggtgcctgccacctacctggaggcccagaatggcaccagagatgacagcgacatcaacaccagcaagacaggagaggaggagaagtatgtgacagtgcagccctacaccagccagagcaaggatgagatcggctttgagaagggcgtgacagtggaggtgatcaggaagaacctggagggctggtggtacatccgctacctgggcaaggagggctgggccccagccagctacctgaagaaggccaaggatgacctgcccaccaggaagaagaacctggccggccctgtggagatcatcggcaacatcatggagatcagcaacctgctgaacaagaaggccagcggggacaaggagaccccacctgctgagggggagggccacgaggcccccatcgccaagaaggagatcagcctgcccatcctgtgcaatgccagcaatggatctgctgtgggcgtgcctgacagaacagtgtcccggctggcccagggcagccctgctgtggccagaattgccccccagagggcccagatcagcagccccaacctgcggacccggcccccaccccggcgggagagcagcctgggcttccagctgcccaagcccccagagcccccatctgtggaggtggagtactacaccatcgccgagttccagagctgcatcagtgatggcatctccttccggggcggccagaaggccgaggtgattgacaagaacagcggcggctggtggtacgtgcagattggagagaaggagggctgggccccagccagctacatcgacaagaggaagaagcccaacctgagcaggaggaccagcaccctgacccggcccaaggtgcccccaccagccccacccagcaagcccaaggaggccgaggagggccccaccggggccagcgagagccaggacagccccaggaagctgaagtatgaggagccagaatatgacatcccagccttcggctttgacagcgagcctgagctgtctgaggagcctgtggaggaccgggccagcggggagaggaggcctgcccagccccaccggcccagccctgccagcagcctgcagagggcccgcttcaaggtgggggagagcagtgaagatgtggccctggaggaggagaccatctatgaaaatgaaggcttccggccctatgcagaggacaccctgagcgcccggggcagcagcggggacagcgacagccctggcagcagcagcctgagcctgaccaggaagaacagccccaagagcggcagccccaagagcagcagcctgctgaagctgaaggccgagaagaatgcccaggccgagatgggcaagaaccacagcagcgccagcttcagcagcagcatcaccatcaacaccacctgctgcagcagcagcagcagcagcagcagcagcctgagcaagaccagcggggacctgaagcccaggtctgccagtgatgctggcatccggggcacccccaaggtgcgggccaagaaggatgctgatgccaatgccggcctgaccagctgcccccgggccaagcccagcgtgcggcccaagcccttcctgaacagagctgagagccagagccaggagaagatggacatcagcaccctgcggcggcagctgcggcccaccggccagctgcggggcggcctgaagggcagcaagtcagaagattctgagctgcccccccagacagccagcgaggcccccagcgagggcagcagaagaagcagcagtgacctgatcaccctgcctgccaccaccccaccctgccccaccaagaaggagtgggagggccctgccaccagctacatgacctgcagcgcctaccagaaggtgcaggacagcgagatctccttccctgctggggtggaggtgcaggtgctggagaagcaggagagcggctggtggtacgtgcgctttggagagctggagggctgggcccccagccactacctggtgctggatgaaaatgagcagcctgaccccagcggcaaggagctggacacagtgcctgccaagggccggcagaatgaaggcaagagtgacagcctggagaagattgaaagaagagtgcaggccctgaacacagtgaaccagagcaagaaggccaccccacccatccccagcaagcccccaggcggctttgggaagaccagcggcaccccagctgtgaagatgagaaatggagtgcggcaggtggccgtgcggccccagagcgtgtttgtgtccccaccacccaaggacaacaacctgagctgtgccctgcggagaaatgaaagcctgacagccacagatggcctgcggggcgtgagaagaaacagcagcttcagcacagcccggtctgctgctgctgaggccaagggccgcctggccgagagagctgccagccagggcagtgacagccccctgctgcctgcccagagaaattccatccctgtgtcccctgtgcggcccaagcccatcgagaagagccagttcatccacaacaacctgaaggatgtgtatgtgtccattgctgactatgaaggagatgaggagacagctggcttccaggagggcgtgtccatggaggtgctggagaggaaccccaacggctggtggtactgccagatcctggatggagtgaagcccttcaagggctgggtgcccagcaactacctggagaagaagaactag

SEQ ID NO: 21843 - DNA, 1110 bp, synthetic construct
  misc_feature 1..1110: note = Description of Artificial Sequence: Synthetic coding sequence
  source 1..1110: mol_type = other DNA
atgagcatctgctgctgcttcttcttccgggactatggcagcagcaagaggaagtctggagcagatgccacagctgagcccatgatcctggagcagtatgtggtggtgagcaactacaagaagcaggagaacagcgagctgagcctgcaggccggggaggtggtggatgtgattgagaagaatgaaagtggctggtggtttgtgtccaccagcgaggagcagggctgggtgcctgccacctacctggaggcccagaatggcaccagagatgacagcgacatcaacaccagcaagacaggagaggtgtccaagaggaggaaggcccacctgcggcggctggaccggcgctggaccctgggcggcatggtgaaccggcagcacagccgggaggagaagtatgtgacagtgcagccctacaccagccagagcaaggatgaaattggatttgagaagggcgtgacagtggaggtgatcaggaagaacctggagggctggtggtacatccgctacctgggcaaggagggctgggccccagccagctacctgaagaaggccaaggatgacctgcccaccaggaagaagaacctggccggccctgtggagatcatcggcaacatcatggagatcagcaacctgctgaacaagaaggccagcggggacaaggagaccccacctgctgagggggagggccacgaggcccccatcgccaagaaggagatcagcctgcccatcctgtgcaatgccagcaatggcagcgctgtgggcgtgcctgacagaacagtgtcccggctggcccagggcagccctgctgtggcccgcatcgccccccagagggcccagatcagcagccccaacctgcggacccggcccccaccaagaagagagagcagcctgacagagagccgctgccggcaggccggcgtgcagtggcatgacctgggcagcctgcagagcccccacccccgcttcaagcgcttcagctgcctgagcctgctgagctcctgggaccaccgccacatgccaccccacccagccaacttcctgatcttcctgattgagaccggcttccaccacgtgggccaggacggcctgcacctgctgaccagctag

SEQ ID NO: 21844 - DNA, 2898 bp, synthetic construct
  misc_feature 1..2898: note = Description of Artificial Sequence: Synthetic coding sequence
  source 1..2898: mol_type = other DNA
atgcctgtgacagccaccgggaagatcctcttccgccgcagccacatcagagatgtggccgtgaagaggctgaagcccattgatgagtactgccgggccctggtgcggctgcccccccacatcagccagtgtgatgaggtgttccgcttctttgaggcccggccagaagatgtgaacccccccaaggaggactatggcagcagcaagaggaagagcggggctgatgccacagctgagcccatgatcctggagcagtatgtggtggtgagcaactacaagaagcaggagaacagcgagctgagcctgcaggccggggaggtggtggatgtgattgagaagaatgaaagtggctggtggtttgtgtccaccagcgaggagcagggctgggtgcctgccacctacctggaggcccagaatggcaccagagatgacagcgacatcaacaccagcaagacaggagaggtgtccaagaggaggaaggcccacctgcggcggctggaccggcgctggaccctgggcggcatggtgaaccggcagcacagccgggaggagaagtatgtgacagtgcagccctacaccagccagagcaaggatgagatcggctttgagaagggcgtgacagtggaggtgatcaggaagaacctggagggctggtggtacatccgctacctgggcaaggagggctgggccccagccagctacctgaagaaggccaaggatgacctgcccaccaggaagaagaacctggccggccctgtggagatcatcggcaacatcatggagatcagcaacctgctgaacaagaaggccagcggggacaaggagaccccacctgctgagggggagggccacgaggcccccatcgccaagaaggagatcagcctgcccatcctgtgcaatgccagcaatggatctgctgtgggcgtgcctgacagaacagtgtcccggctggcccagggcagccctgctgtggccagaattgccccccagagggcccagatcagcagccccaacctgcggacccggcccccaccccggcgggagagcagcctgggcttccagctgcccaagcccccagagcccccatctgtggaggtggagtactacaccatcgccgagttccagagctgcatcagtgatggcatctccttccggggcggccagaaggccgaggtgattgacaagaacagcggcggctggtggtacgtgcagattggagagaaggagggctgggccccagccagctacatcgacaagaggaagaagcccaacctgagcaggaggaccagcaccctgacccggcccaaggtgcccccaccagccccacccagcaagcccaaggaggccgaggagggccccaccggggccagcgagagccaggacagccccaggaagctgaagtatgaggagccagaatatgacatcccagccttcggctttgacagcgagcctgagctgtctgaggagcctgtggaggaccgggccagcggggagaggaggcctgcccagccccaccggcccagccctgccagcagcctgcagagggcccgcttcaaggtgggggagagcagtgaagatgtggccctggaggaggagaccatctatgaaaatgaaggcttccggccctatgcagaggacaccctgagcgcccggggcagcagcggggacagcgacagccctggcagcagcagcctgagcctgaccaggaagaacagccccaagagcggcagccccaagagcagcagcctgctgaagctgaaggccgagaagaatgcccaggccgagatgggcaagaaccacagcagcgccagcttcagcagcagcatcaccatcaacaccacctgctgcagcagcagcagcagcagcagcagcagcctgagcaagaccagcggggacctgaagcccaggtctgccagtgatgctggcatccggggcacccccaaggtgcgggccaagaaggatgctgatgccaatgccggcctgaccagctgcccccgggccaagcccagcgtgcggcccaagcccttcctgaacagagctgagagccagagccaggagaagatggacatcagcaccctgcggcggcagctgcggcccaccggccagctgcggggcggcctgaagggcagcaagtcagaagattctgagctgcccccccagacagccagcgaggcccccagcgagggcagcagaagaagcagcagtgacctgatcaccctgcctgccaccaccccaccctgccccaccaagaaggagtgggagggccctgccaccagctacatgacctgcagcgcctaccagaaggtgcaggacagcgagatctccttccctgctggggtggaggtgcaggtgctggagaagcaggagagcggctggtggtacgtgcgctttggagagctggagggctgggcccccagccactacctggtgctggatgaaaatgagcagcctgaccccagcggcaaggagctggacacagtgcctgccaagggccggcagaatgaaggcaagagtgacagcctggagaagattgaaagaagagtgcaggccctgaacacagtgaaccagagcaagaaggccaccccacccatccccagcaagcccccaggcggctttgggaagaccagcggcaccccagctgtgaagatgagaaatggagtgcggcaggtggccgtgcggcccatcgagaagagccagttcatccacaacaacctgaaggatgtgtatgtgtccattgctgactatgaaggagatgaggagacagctggcttccaggagggcgtgtccatggaggtgctggagaggaaccccaacggctggtggtactgccagatcctggatggagtgaagcccttcaagggctgggtgcccagcaactacctggagaagaagaactag

SEQ ID NO: 21845 - DNA, 2907 bp, synthetic construct
  misc_feature 1..2907: note = Description of Artificial Sequence: Synthetic coding sequence
  source 1..2907: mol_type = other DNA
atgatcctggagcagtatgtggtggtgagcaactacaagaagcaggagaacagcgagctgagcctgcaggccggggaggtggtggatgtgattgagaagaatgaaagtggctggtggtttgtgtccaccagcgaggagcagggctgggtgcctgccacctacctggaggcccagaatggcaccagagatgacagcgacatcaacaccagcaagacaggagaggtgtccaagaggaggaaggcccacctgcggcggctggaccggcgctggaccctgggcggcatggtgaaccggcagcacagccgggaggagaagtatgtgacagtgcagccctacaccagccagagcaaggatgagatcggctttgagaagggcgtgacagtggaggtgatcaggaagaacctggagggctggtggtacatccgctacctgggcaaggagggctgggccccagccagctacctgaagaaggccaaggatgacctgcccaccaggaagaagaacctggccggccctgtggagatcatcggcaacatcatggagatcagcaacctgctgaacaagaaggccagcggggacaaggagaccccacctgctgagggggagggccacgaggcccccatcgccaagaaggagatcagcctgcccatcctgtgcaatgccagcaatggatctgctgtgggcgtgcctgacagaacagtgtcccggctggcccagggcagccctgctgtggccagaattgccccccagagggcccagatcagcagccccaacctgcggacccggcccccaccccggcgggagagcagcctgggcttccagctgcccaagcccccagagcccccatctgtggaggtggagtactacaccatcgccgagttccagagctgcatcagtgatggcatctccttccggggcggccagaaggccgaggtgattgacaagaacagcggcggctggtggtacgtgcagattggagagaaggagggctgggccccagccagctacatcgacaagaggaagaagcccaacctgagcaggaggaccagcaccctgacccggcccaaggtgcccccaccagccccacccagcaagcccaaggaggccgaggagggccccaccggggccagcgagagccaggacagccccaggaagctgaagtatgaggagccagaatatgacatcccagccttcggctttgacagcgagcctgagctgtctgaggagcctgtggaggaccgggccagcggggagaggaggcctgcccagccccaccggcccagccctgccagcagcctgcagagggcccgcttcaaggtgggggagagcagtgaagatgtggccctggaggaggagaccatctatgaaaatgaaggcttccggccctatgcagaggacaccctgagcgcccggggcagcagcggggacagcgacagccctggcagcagcagcctgagcctgaccaggaagaacagccccaagagcggcagccccaagagcagcagcctgctgaagctgaaggccgagaagaatgcccaggccgagatgggcaagaaccacagcagcgccagcttcagcagcagcatcaccatcaacaccacctgctgcagcagcagcagcagcagcagcagcagcctgagcaagaccagcggggacctgaagcccaggtctgccagtgatgctggcatccggggcacccccaaggtgcgggccaagaaggatgctgatgccaatgccggcctgaccagctgcccccgggccaagcccagcgtgcggcccaagcccttcctgaacagagctgagagccagagccaggagaagatggacatcagcaccctgcggcggcagctgcggcccaccggccagctgcggggcggcctgaagggcagcaagtcagaagattctgagctgcccccccagacagccagcgaggcccccagcgagggcagcagaagaagcagcagtgacctgatcaccctgcctgccaccaccccaccctgccccaccaagaaggagtgggagggccctgccaccagctacatgacctgcagcgcctaccagaaggtgcaggacagcgagatctccttccctgctggggtggaggtgcaggtgctggagaagcaggagagcggctggtggtacgtgcgctttggagagctggagggctgggcccccagccactacctggtgctggatgaaaatgagcagcctgaccccagcggcaaggagctggacacagtgcctgccaagggccggcagaatgaaggcaagagtgacagcctggagaagattgaaagaagagtgcaggccctgaacacagtgaaccagagcaagaaggccaccccacccatccccagcaagcccccaggcggctttgggaagaccagcggcaccccagctgtgaagatgagaaatggagtgcggcaggtggccgtgcggccccagagcgtgtttgtgtccccaccacccaaggacaacaacctgagctgtgccctgcggagaaatgaaagcctgacagccacagatggcctgcggggcgtgagaagaaacagcagcttcagcacagcccggtctgctgctgctgaggccaagggccgcctggccgagagagctgccagccagggcagtgacagccccctgctgcctgcccagagaaattccatccctgtgtcccctgtgcggcccaagcccatcgagaagagccagttcatccacaacaacctgaaggatgtgtatgtgtccattgctgactatgaaggagatgaggagacagctggcttccaggagggcgtgtccatggaggtgctggagaggaaccccaacggctggtggtactgccagatcctggatggagtgaagcccttcaagggctgggtgcccagcaactacctggagaagaagaactag

SEQ ID NO: 21846 - DNA, 3003 bp, synthetic construct
  misc_feature 1..3003: note = Description of Artificial Sequence: Synthetic coding sequence
  source 1..3003: mol_type = other DNA
atgaatggcagcttcctgctgcggctgctcttccctgtggccagcatcctgcctgagaccgtgctgctgcggggagcagatgccacagctgagcccatgatcctggagcagtatgtggtggtgagcaactacaagaagcaggagaacagcgagctgagcctgcaggccggggaggtggtggatgtgattgagaagaatgaaagtggctggtggtttgtgtccaccagcgaggagcagggctgggtgcctgccacctacctggaggcccagaatggcaccagagatgacagcgacatcaacaccagcaagacaggagaggtgtccaagaggaggaaggcccacctgcggcggctggaccggcgctggaccctgggcggcatggtgaaccggcagcacagccgggaggagaagtatgtgacagtgcagccctacaccagccagagcaaggatgagatcggctttgagaagggcgtgacagtggaggtgatcaggaagaacctggagggctggtggtacatccgctacctgggcaaggagggctgggccccagccagctacctgaagaaggccaaggatgacctgcccaccaggaagaagaacctggccggccctgtggagatcatcggcaacatcatggagatcagcaacctgctgaacaagaaggccagcggggacaaggagaccccacctgctgagggggagggccacgaggcccccatcgccaagaaggagatcagcctgcccatcctgtgcaatgccagcaatggatctgctgtgggcgtgcctgacagaacagtgtcccggctggcccagggcagccctgctgtggccagaattgccccccagagggcccagatcagcagccccaacctgcggacccggcccccaccccggcgggagagcagcctgggcttccagctgcccaagcccccagagcccccatctgtggaggtggagtactacaccatcgccgagttccagagctgcatcagtgatggcatctccttccggggcggccagaaggccgaggtgattgacaagaacagcggcggctggtggtacgtgcagattggagagaaggagggctgggccccagccagctacatcgacaagaggaagaagcccaacctgagcaggaggaccagcaccctgacccggcccaaggtgcccccaccagccccacccagcaagcccaaggaggccgaggagggccccaccggggccagcgagagccaggacagccccaggaagctgaagtatgaggagccagaatatgacatcccagccttcggctttgacagcgagcctgagctgtctgaggagcctgtggaggaccgggccagcggggagaggaggcctgcccagccccaccggcccagccctgccagcagcctgcagagggcccgcttcaaggtgggggagagcagtgaagatgtggccctggaggaggagaccatctatgaaaatgaaggcttccggccctatgcagaggacaccctgagcgcccggggcagcagcggggacagcgacagccctggcagcagcagcctgagcctgaccaggaagaacagccccaagagcggcagccccaagagcagcagcctgctgaagctgaaggccgagaagaatgcccaggccgagatgggcaagaaccacagcagcgccagcttcagcagcagcatcaccatcaacaccacctgctgcagcagcagcagcagcagcagcagcagcctgagcaagaccagcggggacctgaagcccaggtctgccagtgatgctggcatccggggcacccccaaggtgcgggccaagaaggatgctgatgccaatgccggcctgaccagctgcccccgggccaagcccagcgtgcggcccaagcccttcctgaacagagctgagagccagagccaggagaagatggacatcagcaccctgcggcggcagctgcggcccaccggccagctgcggggcggcctgaagggcagcaagtcagaagattctgagctgcccccccagacagccagcgaggcccccagcgagggcagcagaagaagcagcagtgacctgatcaccctgcctgccaccaccccaccctgccccaccaagaaggagtgggagggccctgccaccagctacatgacctgcagcgcctaccagaaggtgcaggacagcgagatctccttccctgctggggtggaggtgcaggtgctggagaagcaggagagcggctggtggtacgtgcgctttggagagctggagggctgggcccccagccactacctggtgctggatgaaaatgagcagcctgaccccagcggcaaggagctggacacagtgcctgccaagggccggcagaatgaaggcaagagtgacagcctggagaagattgaaagaagagtgcaggccctgaacacagtgaaccagagcaagaaggccaccccacccatccccagcaagcccccaggcggctttgggaagaccagcggcaccccagctgtgaagatgagaaatggagtgcggcaggtggccgtgcggccccagagcgtgtttgtgtccccaccacccaaggacaacaacctgagctgtgccctgcggagaaatgaaagcctgacagccacagatggcctgcggggcgtgagaagaaacagcagcttcagcacagcccggtctgctgctgctgaggccaagggccgcctggccgagagagctgccagccagggcagtgacagccccctgctgcctgcccagagaaattccatccctgtgtcccctgtgcggcccaagcccatcgagaagagccagttcatccacaacaacctgaaggatgtgtatgtgtccattgctgactatgaaggagatgaggagacagctggcttccaggagggcgtgtccatggaggtgctggagaggaaccccaacggctggtggtactgccagatcctggatggagtgaagcccttcaagggctgggtgcccagcaactacctggagaagaagaactag

SEQ ID NO: 21847 - DNA, 414 bp, synthetic construct
  misc_feature 1..414: note = Description of Artificial Sequence: Synthetic coding sequence
  source 1..414: mol_type = other DNA
atgaacaagctgagcggcggcggcggccgccgcaccagggtggagggcggccagctgggcggggaggagtggaccaggcatggcagctttgtgaacaagcccacccggggctggctgcaccccaatgacaaggtgatgggccctggggtgtcctacctggtgcgctacatgggctgtgtggaggtgctgcagagcatgagggccctggacttcaacaccaggacccaggtgacccgggaggccatcagcctggtgtgtgaggccgtgcctggggccaagggggccaccaggaggaggaagccctgcagccggcccctgagcagcatcctgggccgcagcaacctgaagtttgctggcatgcccatcaccctgactgtgtccaccagcagcctgaacctgatggctgctgactag

SEQ ID NO: 21848 - DNA, 918 bp, synthetic construct
  misc_feature 1..918: note = Description of Artificial Sequence: Synthetic coding sequence
  source 1..918: mol_type = other DNA
atggccggctttgatggcagcgcctgggatgaggaggaggaggagcccccagaccaccagtactacaatgacttccctgggaaggagccccccctgggcggcgtggtggacatgaggctgcgggagggcgccgcccctggggccgcccggcccacagccccaaatgcccagacccccagccacctgggcgccaccctgcctgtgggccagcctgtgggcggggaccctgaggtgaggaagcagatgcctcctcctccaccctgccccggccgggagctgtttgatgaccccagctatgtgaatgtgcagaacctggacaaggcccggcaggccgtgggcggggccggcccccccaacccagccatcaatggaagtgccccccgggacctgtttgacatgaagccctttgaagatgccctgcgggtgcccccaccaccccagagcgtgtccatggccgagcagctgcggggggagccctggttccacggcaagctgagcagaagagaggccgaggccctgctgcagctgaatggagacttcctggtgcgggagagcaccaccaccccaggccagtatgtgctgaccggcctgcagagcggccagcccaagcacctgctgctggtggaccctgagggcgtgcgctggggctttgccatgctgcccaagctgttcctgaacagccgggcccaggtgatccggctgcccaggcctccccgggtgctgggcctgcaggcccggaccaccatgcccagcctgcacatcttcttctgcaccgtgtacaccctgctgcggcatgccaacttcctgcaggtgaagaagggcgtgtacagcagccagctgcacagcttccgggcagatgtggcctttgccttcagccacttcacagacctgagcatccccaccaccgtgtccttctag

SEQ ID NO: 21849 - DNA, 1563 bp, synthetic construct
  misc_feature 1..1563: note = Description of Artificial Sequence: Synthetic coding sequence
  source 1..1563: mol_type = other DNA
atgagcaacctgcggctggccaacccagctgggggccggcccggcagcaaaggagagcccggccgggcagcagatgatggagagggcatcgtgggcgccgccatgccagacagcggccccctgcccctgctgcaggacatgaacaagctgagcggcggcggcggccgccgcaccagggtggagggcggccagctgggcggggaggagtggaccaggcatggcagctttgtgaacaagcccacccggggctggctgcaccccaatgacaaggtgatgggccctggggtgtcctacctggtgcgctacatgggctgtgtggaggtgctgcagagcatgagggccctggacttcaacaccaggacccaggtgacccgggaggccatcagcctggtgtgtgaggccgtgcctggggccaagggggccaccaggaggaggaagccctgcagccggcccctgagcagcatcctgggccgcagcaacctgaagtttgctggcatgcccatcaccctgactgtgtccaccagcagcctgaacctgatggctgctgactgcaagcagatcatcgccaaccaccacatgcagagcatcagctttgccagcggcggggaccctgacacagcagaatatgtggcctacgtggccaaggaccctgtgaaccagagggcctgccacatcctggagtgcccagagggcctggcccaggatgtgatcagcaccatcggccaggcctttgagctgcgcttcaagcagtacctgagaaatccacccaagctggtgacccctcatgacaggatggccggctttgatggcagcgcctgggatgaggaggaggaggagcccccagaccaccagtactacaatgacttccctgggaaggagccccccctgggcggcgtggtggacatgaggctgcgggagggcgccgcccctggggccgcccggcccacagccccaaatgcccagacccccagccacctgggcgccaccctgcctgtgggccagcctgtgggcggggaccctgaggtgaggaagcagatgcctcctcctccaccctgcccagctggccgggagctgtttgatgaccccagctatgtgaatgtgcagaacctggacaaggcccggcaggccgtgggcggggccggcccccccaacccagccatcaatggcagcgccccccgggacctgtttgacatgaagccctttgaagatgccctgcgggtgcccccaccaccccagagcgtgtccatggccgagcagctgcggggggagccctggttccacggcaagctgagccggcgggaggccgaggccctgctgcagctgaatggagacttcctggtgcgggagagcaccaccaccccaggccagtatgtgctgaccggcctgcagagcggccagcccaagcacctgctgctggtggaccctgagggcgtggtgaggaccaaggaccacagatttgagagcgtgagccacctgatctcctaccacatggacaaccacctgcccatcatctctgctggcagcgagctgtgcctgcagcagcctgtggagaggaagctgtag

SEQ ID NO: 21850 - DNA, 1752 bp, synthetic construct
  misc_feature 1..1752: note = Description of Artificial Sequence: Synthetic coding sequence
  source 1..1752: mol_type = other DNA
atggacctgctgccccccaagcccaagtacaaccccctgagaaatgaaagcctgagcagcctggaggagggcgccagcggcagcaccccacctgaggagctgcccagccccagcgccagcagcctgggccccatcctgccccccctgcctggagatgacagccccaccaccctgtgcagcttcttccccaggatgagcaacctgcggctggccaacccagctgggggccggcccggcagcaaaggagagcccggccgggcagcagatgatggagagggcatcgtgggcgccgccatgccagacagcggccccctgcccctgctgcaggacatgaacaagctgagcggcggcggcggccgccgcaccagggtggagggcggccagctgggcggggaggagtggaccaggcatggcagctttgtgaacaagcccacccggggctggctgcaccccaatgacaaggtgatgggccctggggtgtcctacctggtgcgctacatgggctgtgtggaggtgctgcagagcatgagggccctggacttcaacaccaggacccaggtgacccgggaggccatcagcctggtgtgtgaggccgtgcctggggccaagggggccaccaggaggaggaagccctgcagccggcccctgagcagcatcctgggccgcagcaacctgaagtttgctggcatgcccatcaccctgactgtgtccaccagcagcctgaacctgatggctgctgactgcaagcagatcatcgccaaccaccacatgcagagcatcagctttgccagcggcggggaccctgacacagcagaatatgtggcctacgtggccaaggaccctgtgaaccagagggcctgccacatcctggagtgcccagagggcctggcccaggatgtgatcagcaccatcggccaggcctttgagctgcgcttcaagcagtacctgagaaatccacccaagctggtgacccctcatgacaggatggccggctttgatggcagcgcctgggatgaggaggaggaggagcccccagaccaccagtactacaatgacttccctgggaaggagccccccctgggcggcgtggtggacatgaggctgcgggagggcgccgcccctggggccgcccggcccacagccccaaatgcccagacccccagccacctgggcgccaccctgcctgtgggccagcctgtgggcggggaccctgaggtgaggaagcagatgcctcctcctccaccctgccccggccgggagctgtttgatgaccccagctatgtgaatgtgcagaacctggacaaggcccggcaggccgtgggcggggccggcccccccaacccagccatcaatggaagtgccccccgggacctgtttgacatgaagccctttgaagatgccctgcgggtgcccccaccaccccagagcgtgtccatggccgagcagctgcggggggagccctggttccacggcaagctgagcagaagagaggccgaggccctgctgcagctgaatggagacttcctggtgcgggagagcaccaccaccccaggccagtatgtgctgaccggcctgcagagcggccagcccaagcacctgctgctggtggaccctgagggcgtggtgaggaccaaggaccacagatttgaatctgtgagccacctgatctcctaccacatggacaaccacctgcccatcatctctgctggcagcgagctgtgcctgcagcagcctgtggagaggaagctgtag

SEQ ID NO: 21851 - DNA, 1155 bp, synthetic construct
  misc_feature 1..1155: note = Description of Artificial Sequence: Synthetic coding sequence
  source 1..1155: mol_type = other DNA
atggacctgctgccccccaagcccaagtacaaccccctgagaaatgaaagcctgagcatcctgggccgcagcaacctgaagtttgctggcatgcccatcaccctgactgtgtccaccagcagcctgaacctgatggctgctgactgcaagcagatcatcgccaaccaccacatgcagagcatcagctttgccagcggcggggaccctgacacagcagaatatgtggcctacgtggccaaggaccctgtgaaccagagggcctgccacatcctggagtgcccagagggcctggcccaggacgtcatcagcaccatcggccaggcctttgagctgcgcttcaagcagtacctgaggaacccccccaagctggtgacccctcatgacaggatggccggctttgatggcagcgcctgggatgaggaggaggaggagcccccagaccaccagtactacaatgacttccctgggaaggagccccccctgggcggcgtggtggacatgaggctgcgggagggcgccgcccctggagctgcccggcccacagccccaaatgcccagacccccagccacctgggcgccaccctgcctgtgggccagcctgtgggcggggaccctgaggtgaggaagcagatgcctcctcctccaccctgccccggccgggagctgtttgatgaccccagctatgtgaatgtgcagaacctggacaaggcccggcaggccgtgggcggggccggcccccccaacccagccatcaatggcagcgccccccgggacctgtttgacatgaagccctttgaagatgccctgcgggtgcccccaccaccccagagcgtgtccatggccgagcagctgcggggggagccctggttccacggcaagctgagccggcgggaggccgaggccctgctgcagctgaatggagacttcctggtgcgggagagcaccaccaccccaggccagtatgtgctgaccggcctgcagagcggccagcccaagcacctgctgctggtggaccctgagggcgtggtgaggaccaaggaccacagatttgagagcgtgagccacctgatctcctaccacatggacaaccacctgcccatcatctctgctggcagcgagctgtgcctgcagcagcctgtggagaggaagctgtag

SEQ ID NO: 21852 - DNA, 1422 bp, synthetic construct
  misc_feature 1..1422: note = Description of Artificial Sequence: Synthetic coding sequence
  source 1..1422: mol_type = other DNA
atgaacaagctgagcggcggcggcggccgccgcaccagggtggagggcggccagctgggcggggaggagtggaccaggcatggcagctttgtgaacaagcccacccggggctggctgcaccccaatgacaaggtgatgggccctggggtgtcctacctggtgcgctacatgggctgtgtggaggtgctgcagagcatgagggccctggacttcaacaccaggacccaggtgacccgggaggccatcagcctggtgtgtgaggccgtgcctggggccaagggggccaccaggaggaggaagccctgcagccggcccctgagcagcatcctgggccgcagcaacctgaagtttgctggcatgcccatcaccctgactgtgtccaccagcagcctgaacctgatggctgctgactgcaagcagatcatcgccaaccaccacatgcagagcatcagctttgccagcggcggggaccctgacacagcagaatatgtggcctacgtggccaaggaccctgtgaaccagagggcctgccacatcctggagtgcccagagggcctggcccaggatgtgatcagcaccatcggccaggcctttgagctgcgcttcaagcagtacctgagaaatccacccaagctggtgacccctcatgacaggatggccggctttgatggcagcgcctgggatgaggaggaggaggagcccccagaccaccagtactacaatgacttccctgggaaggagccccccctgggcggcgtggtggacatgaggctgcgggagggcgccgcccctggggccgcccggcccacagccccaaatgcccagacccccagccacctgggcgccaccctgcctgtgggccagcctgtgggcggggaccctgaggtgaggaagcagatgcctcctcctccaccctgccccggccgggagctgtttgatgaccccagctatgtgaatgtgcagaacctggacaaggcccggcaggccgtgggcggggccggcccccccaacccagccatcaatggaagtgccccccgggacctgtttgacatgaagccctttgaagatgccctgcgggtgcccccaccaccccagagcgtgtccatggccgagcagctgcggggggagccctggttccacggcaagctgagcagaagagaggccgaggccctgctgcagctgaatggagacttcctggtgcgggagagcaccaccaccccaggccagtatgtgctgaccggcctgcagagcggccagcccaagcacctgctgctggtggaccctgagggcgtggtgaggaccaaggaccacagatttgaatctgtgagccacctgatctcctaccacatggacaaccacctgcccatcatctctgctggcagcgagctgtgcctgcagcagcctgtggagaggaagctgtag

SEQ ID NO: 21853 - DNA, 1425 bp, synthetic construct
  misc_feature 1..1425: note = Description of Artificial Sequence: Synthetic coding sequence
  source 1..1425: mol_type = other DNA
atgaacaagctgagcggcggcggcggccgccgcaccagggtggagggcggccagctgggcggggaggagtggaccaggcatggcagctttgtgaacaagcccacccggggctggctgcaccccaatgacaaggtgatgggccctggggtgtcctacctggtgcgctacatgggctgtgtggaggtgctgcagagcatgagggccctggacttcaacaccaggacccaggtgacccgggaggccatcagcctggtgtgtgaggccgtgcctggggccaagggggccaccaggaggaggaagccctgcagccggcccctgagcagcatcctgggccgcagcaacctgaagtttgctggcatgcccatcaccctgactgtgtccaccagcagcctgaacctgatggctgctgactgcaagcagatcatcgccaaccaccacatgcagagcatcagctttgccagcggcggggaccctgacacagcagaatatgtggcctacgtggccaaggaccctgtgaaccagagggcctgccacatcctggagtgcccagagggcctggcccaggatgtgatcagcaccatcggccaggcctttgagctgcgcttcaagcagtacctgagaaatccacccaagctggtgacccctcatgacaggatggccggctttgatggcagcgcctgggatgaggaggaggaggagcccccagaccaccagtactacaatgacttccctgggaaggagccccccctgggcggcgtggtggacatgaggctgcgggagggcgccgcccctggggccgcccggcccacagccccaaatgcccagacccccagccacctgggcgccaccctgcctgtgggccagcctgtgggcggggaccctgaggtgaggaagcagatgcctcctcctccaccctgcccagctggccgggagctgtttgatgaccccagctatgtgaatgtgcagaacctggacaaggcccggcaggccgtgggcggggccggcccccccaacccagccatcaatggcagcgccccccgggacctgtttgacatgaagccctttgaagatgccctgcgggtgcccccaccaccccagagcgtgtccatggccgagcagctgcggggggagccctggttccacggcaagctgagccggcgggaggccgaggccctgctgcagctgaatggagacttcctggtgcgggagagcaccaccaccccaggccagtatgtgctgaccggcctgcagagcggccagcccaagcacctgctgctggtggaccctgagggcgtggtgaggaccaaggaccacagatttgagagcgtgagccacctgatctcctaccacatggacaaccacctgcccatcatctctgctggcagcgagctgtgcctgcagcagcctgtggagaggaagctgtag

SEQ ID NO: 21854 - DNA, 603 bp, synthetic construct
  misc_feature 1..603: note = Description of Artificial Sequence: Synthetic coding sequence
  source 1..603: mol_type = other DNA
atgaacaagctgagcggcggcggcggccgccgcaccagggtggagggcggccagctgggcggggaggagtggaccaggcatggcagctttgtgaacaagcccacccggggctggctgcaccccaatgacaaggtgatgggccctggggtgtcctacctggtgcgctacatgggctgtgtggaggtgctgcagagcatgagggccctggacttcaacaccaggacccaggtgacccgggaggccatcagcctggtgtgtgaggccgtgcctggggccaagggggccaccaggaggaggaagccctgcagccggcccctgagcagcatcctgggccgcagcaacctgaagtttgctggcatgcccatcaccctgactgtgtccaccagcagcctgaacctgatggctgctgactgcaagcaggacacagcagaatatgtggcctacgtggccaaggaccctgtgaaccagagggcctgccacatcctggagtgcccagagggcctggcccaggatgtgatcagcaccatcggccaggcctttgagctgcgcttcaagcagtacctgagaaatccacccaagctggtgacccctcatgacagatag

SEQ ID NO: 21855 - DNA, 603 bp, synthetic construct
  misc_feature 1..603: note = Description of Artificial Sequence: Synthetic coding sequence
  source 1..603: mol_type = other DNA
atgcccatcaccctgactgtgtccaccagcagcctgaacctgatggctgctgactgcaagcaggacacagcagaatatgtggcctacgtggccaaggaccctgtgaaccagagggcctgccacatcctggagtgcccagagggcctggcccaggacgtcatcagcaccatcggccaggcctttgagctgcgcttcaagcagtacctgaggaacccccccaagctggtgacccctcatgacaggatggccggctttgatggcagcgcctgggatgaggaggaggaggagcccccagaccaccagtactacaatgacttccctgggaaggagccccccctgggcggcgtggtggacatgaggctgcgggagggcgccgcccctggagctgcccggcccacagccccaaatgcccagacccccagccacctgggcgccaccctgcctgtgggccagcctgtgggcggggaccctgaggtgaggaagcagatgcctcctcctccaccctgcccagctggccgggagctgtttgatgaccccagctatgtgaatgtgcagaacctggacaaggcccggcaggccgtgggcggggccggccccccatag

SEQ ID NO: 21856 - DNA, 393 bp, synthetic construct
  misc_feature 1..393: note = Description of Artificial Sequence: Synthetic coding sequence
  source 1..393: mol_type = other DNA
atgcccatcaccctgactgtgtccaccagcagcctgaacctgatggctgctgactgcaagcagatcatcgccaaccaccacatgcagagcatcagctttgccagcggcggggaccctgacacagcagaatatgtggcctacgtggccaaggaccctgtgaaccagagggcctgccacatcctggagtgcccagagggcctggcccaggacgtcatcagcaccatcggccaggcctttgagctgcgcttcaagcagtacctgaggaacccccccaagctggtgacccctcatgacaggatggccggctttgatggcagcgcctgggatgaggaggaggaggagcccccagaccaccagtactacaatgacttccctgggaaggagcccccatag

SEQ ID NO: 21857 - DNA, 894 bp, synthetic construct
  misc_feature 1..894: note = Description of Artificial Sequence: Synthetic coding sequence
  source 1..894: mol_type = other DNA
tgagatgaggaggaggaggagcccccagaccaccagtactacaatgacttccctgggaaggagccccccctgggcggcgtggtggacatgaggctgcgggagggcgccgcccctggggccgcccggcccacagccccaaatgcccagacccccagccacctgggcgccaccctgcctgtgggccagcctgtgggcggggaccctgaggtgaggaagcagatgcctcctcctccaccctgccccggccgggagctgtttgatgaccccagctatgtgaatgtgcagaacctggacaaggcccggcaggccgtgggcggggccggcccccccaacccagccatcaatggaagtgccccccgggacctgtttgacatgaagccctttgaagatgccctgcgggtgcccccaccaccccagagcgtgtccatggccgagcagctgcggggggagccctggttccacggcaagctgagcagaagagaggccgaggccctgctgcagctgaatggagacttcctggtgcgggagagcaccaccaccccaggccagtatgtgctgaccggcctgcagagcggccagcccaagcacctgctgctggtggaccctgagggcgtgcgctggggctttgccatgctgcccaagctgttcctgaacagccgggcccaggtgatccggctgcccaggcctccccgggtgctgggcctgcaggcccggaccaccatgcccagcctgcacatcttcttctgcaccgtgtacaccctgctgcggcatgccaacttcctgcaggtgaagaagggcgtgtacagcagccagctgcacagcttccgggcagatgtggcctttgccttcagccacttcacagacctgagcatccccaccaccgtgtccttctag

SEQ ID NO: 21858 - DNA, 1755 bp, synthetic construct
  misc_feature 1..1755: note = Description of Artificial Sequence: Synthetic coding sequence
  source 1..1755: mol_type = other DNA
atggacctgctgccccccaagcccaagtacaaccccctgagaaatgaaagcctgagcagcctggaggagggcgccagcggcagcaccccacctgaggagctgcccagccccagcgccagcagcctgggccccatcctgccccccctgcctggagatgacagccccaccaccctgtgcagcttcttccccaggatgagcaacctgcggctggccaacccagctgggggccggcccggcagcaaaggagagcccggccgggcagcagatgatggagagggcatcgtgggcgccgccatgccagacagcggccccctgcccctgctgcaggacatgaacaagctgagcggcggcggcggccgccgcaccagggtggagggcggccagctgggcggggaggagtggaccaggcatggcagctttgtgaacaagcccacccggggctggctgcaccccaatgacaaggtgatgggccctggggtgtcctacctggtgcgctacatgggctgtgtggaggtgctgcagagcatgagggccctggacttcaacaccaggacccaggtgacccgggaggccatcagcctggtgtgtgaggccgtgcctggggccaagggggccaccaggaggaggaagccctgcagccggcccctgagcagcatcctgggccgcagcaacctgaagtttgctggcatgcccatcaccctgactgtgtccaccagcagcctgaacctgatggctgctgactgcaagcagatcatcgccaaccaccacatgcagagcatcagctttgccagcggcggggaccctgacacagcagaatatgtggcctacgtggccaaggaccctgtgaaccagagggcctgccacatcctggagtgcccagagggcctggcccaggatgtgatcagcaccatcggccaggcctttgagctgcgcttcaagcagtacctgagaaatccacccaagctggtgacccctcatgacaggatggccggctttgatggcagcgcctgggatgaggaggaggaggagcccccagaccaccagtactacaatgacttccctgggaaggagccccccctgggcggcgtggtggacatgaggctgcgggagggcgccgcccctggggccgcccggcccacagccccaaatgcccagacccccagccacctgggcgccaccctgcctgtgggccagcctgtgggcggggaccctgaggtgaggaagcagatgcctcctcctccaccctgcccagctggccgggagctgtttgatgaccccagctatgtgaatgtgcagaacctggacaaggcccggcaggccgtgggcggggccggcccccccaacccagccatcaatggcagcgccccccgggacctgtttgacatgaagccctttgaagatgccctgcgggtgcccccaccaccccagagcgtgtccatggccgagcagctgcggggggagccctggttccacggcaagctgagccggcgggaggccgaggccctgctgcagctgaatggagacttcctggtgcgggagagcaccaccaccccaggccagtatgtgctgaccggcctgcagagcggccagcccaagcacctgctgctggtggaccctgagggcgtggtgaggaccaaggaccacagatttgagagcgtgagccacctgatctcctaccacatggacaaccacctgcccatcatctctgctggcagcgagctgtgcctgcagcagcctgtggagaggaagctgtag

SEQ ID NO: 21859 - DNA, 1749 bp, synthetic construct
  misc_feature 1..1749: note = Description of Artificial Sequence: Synthetic coding sequence
  source 1..1749: mol_type = other DNA
atgacccagggccctgggggccgggcccccccagcccccccagcccctcctgagcctgaggcccccaccaccttctgtgccctgctgcccaggatgccccagtggaagtttgctgcccctgggggcttcctgggccggggccctgctgctgcccgggccgccggggccagcggcggcgctgacccccagcctgagcctgctggccctggaggagtgcctgccctggccgctgctgtgctgggcgcctgtgagccccgctgtgccgccccctgccccctgcctgccctgagccgctgccgcggggccggcagccggggcagcagaggaggaagaggagctgctggcagcggagatgctgctgctgctgctgagtggatcaggaagggcagcttcatccacaagccagcccacggctggctgcacccagatgcccgggtgctgggccctggggtgtcctatgtggtgcgctacatgggctgcatcgaggtgctgcgctccatgaggagcctggacttcaacaccaggacccaggtgacccgggaggccatcaaccggctgcatgaagctgtgcctggggtgcggggctcctggaagaagaaggcccccaacaaggccctggcctctgtgctgggcaagagcaacctgcgctttgctggcatgagcatcagcatccacatcagcacagatggcctgagcctgtctgtgcctgccacccggcaggtgattgccaaccaccacatgcccagcatcagctttgccagcggcggggacacagacatgacagattatgtggcctacgtggccaaggaccccatcaaccagagggcctgccacatcctggagtgctgtgagggcctggcccagagcatcatcagcacagtgggccaggcctttgagctgcgcttcaagcagtacctgcacagcccccccaaggtggccctgcccccagagcggctggccggccctgaggagagcgcctggggagatgaggaggacagcctggagcacaactactacaacagcatccctgggaaggagccccccctgggcggcctggtggacagccggctggccctgacccagccctgtgccctgacagccctggaccagggccccagccccagcctgagagatgcctgcagcctgccctgggatgtgggcagcactggaacagcccctcctggagatggctacgtgcaggctgatgcccggggccccccagaccacgaggagcacctgtatgtgaacacccagggcctggatgcccctgagcctgaggacagccccaagaaggacctgtttgacatgaggccctttgaagatgccctgaagctgcatgaatgttctgtggccgccggcgtgacagctgcccccctgcccctggaggaccagtggcccagcccccccacccggcgggcccctgtggcccccacagaggagcagctgcggcaggagccctggtaccacggccgcatgagccggcgggctgctgagaggatgctgcgggcagatggagacttcctggtgcgggacagcgtgaccaaccctggccagtatgtgctgaccggcatgcacgccggccagcccaagcacctgctgctggtggaccctgagggcgtggtgaggaccaaggatgtgctgtttgagagcatcagccacctgattgaccaccacctgcagaatggccagcccatcgtggccgctgagagcgagctgcacctgcggggcgtggtgtcccgggagccctag

SEQ ID NO: 21860 - DNA, 1833 bp, synthetic construct
  misc_feature 1..1833: note = Description of Artificial Sequence: Synthetic coding sequence
  source 1..1833: mol_type = other DNA
atgctggacttcttcaccatcttcagcaagggcggcctggtgctgtggtgcttccagggcgtgtctgacagctgcaccggccctgtgaatgccctgatccgctctgtgctgctgcaggtgggcttccagaagatcctgaccctgacctacgtggacaagctgattgatgatgtgcacaggctcttccgggacaagtacagaacagagatccagcagcagagcgccctgagcctgctgaatggcacctttgacttccagaatgacttcctgcggctgctgcgggaggccgaggagagcagcaagatccgggcccccaccaccatgaagaagtttgaggacagcgagaaggccaagaagcctgtgcgctccatgattgagaccagaggagagaagcccaaggagaaggccaagaacagcaagaagaagggggccaagaaggagggcagtgatggccccctggccaccagcaagcctgtgcctgctgagaagagcggcctgcctgtgggcccagaaaatggagtggagctgagcaaggaggagctgatccggaggaagcgggaggagttcatccagaagcacggccggggcatggagaagagcaacaagagcaccaagagtgatgcccccaaggagaagggcaagaaggccccccgggtgtgggagctgggcggctgtgccaacaaggaggtgctggactacagcacccccaccaccaacggcaccccagaggccgccctgtctgaggacatcaacctgatccggggcaccggcagcggcggccagctgcaggacctggactgcagcagcagtgatgatgagggcgccgcccagaacagcaccaagcccagcgccaccaagggcaccctgggcggcatgtttggcatgctgaagggcctggtgggcagcaagagcctgagccgggaggacatggagagcgtgctggacaagatgagggaccacctgattgccaagaatgtggccgctgacattgctgtgcagctgtgtgagagcgtggccaacaagctggagggcaaggtgatgggcaccttcagcacagtgaccagcacagtgaagcaggccctgcaggagagcctggtgcagatcctgcagccccagaggagagtggacatgctgcgggacatcatggatgcccagaggcggcagaggccctacgtggtgaccttctgtggggtgaatggagtgggcaagagcaccaacctggccaagatctccttctggctgctggagaatggcttctctgtgctgattgctgcctgtgacaccttccgggccggggctgtggagcagctgcggacccacacccggcggctgagcgccctgcaccccccagagaagcatggaggccgcaccatggtgcagctgtttgagaagggctacggcaaggatgctgctggcatcgccatggaggccatcgcctttgccaggaaccagggctttgatgtggtgctggtggacacagctggccgcatgcaggacaatgcccccctgatgacagccctggccaagctgatcaccgtgaacaccccagacctggtgctgtttgtgggggaggccctggtgggcaatgaagctgtggaccagctggtgaagttcaacagagccctggccgaccacagcatggcccagaccccccggctgattgatggcatcgtgctgaccaagtttgacaccattgatgacaaggtgggcgccgccatctccatgacctacatcaccagcaagcccatcgtgtttgtgggcaccggccagacctactgtgacctgcggagcctgaatgccaaggctgtggtggccgccctgatgaaggcctag

SEQ ID NO: 21861 - DNA, 2253 bp, synthetic construct
  misc_feature 1..2253: note = Description of Artificial Sequence: Synthetic coding sequence
  source 1..2253: mol_type = other DNA
atgagccagtggtatgagctgcagcagctggacagcaagttcctggagcaggtgcaccagctgtatgatgacagcttccccatggagatccggcagtacctggcccagtggctggagaagcaggactgggagcacgccgccaatgatgtgtcctttgccaccatccgcttccatgacctgctgagccagctggatgaccagtacagccgcttcagcctggagaacaacttcctgctgcagcacaacatcaggaagagcaagaggaacctgcaggacaacttccaggaggaccccatccagatgtccatgatcatctacagctgcctgaaggaggagaggaagatcctggagaatgcccagcgcttcaaccaggcccagagcggcaacatccagagcacagtgatgctggacaagcagaaggagctggacagcaaggtgagaaatgtgaaggacaaggtgatgtgcatcgagcacgagatcaagagcctggaggacctgcaggatgaatatgacttcaagtgcaagaccctgcagaaccgggagcacgagaccaatggagtggccaagagtgaccagaagcaggagcagctgctgctgaagaagatgtacctgatgctggacaacaagaggaaggaggtggtgcacaagatcatcgagctgctgaatgtgacagagctgacccagaatgccctgatcaatgatgagctggtggagtggaagaggcggcagcagagcgcctgcatcggcggccccccaaatgcctgcctggaccagctgcagaactggttcaccatcgtggccgagagcctgcagcaggtgcggcagcagctgaagaagctggaggagctggagcagaagtacacctatgaacatgaccccatcaccaagaacaagcaggtgctgtgggacaggaccttcagcctcttccagcagctgatccagagcagctttgtggtggagcggcagccctgcatgcccacccacccccagaggcccctggtgctgaagacaggagtgcagttcaccgtgaagctgcggctgctggtgaagctgcaggagctgaactacaacctgaaggtgaaggtgctgtttgacaaggatgtgaatgaaagaaacacagtgaagggcttcaggaagttcaacatcctgggcacccacaccaaggtgatgaacatggaggagagcaccaacggcagcctggccgctgagttccgccacctgcagctgaaggagcagaagaatgccggcaccaggaccaatgaaggccccctgattgtgacagaggagctgcacagcctgagctttgagacccagctgtgccagcccggcctggtgattgacctggagaccaccagcctgcctgtggtggtgatcagcaatgtgtcccagctgcccagcggctgggccagcatcctgtggtacaacatgctggtggccgagcccaggaacctgtccttcttcctgaccccaccctgtgcccgctgggcccagctgtctgaggtgctgtcctggcagttcagctctgtgaccaagaggggcctgaatgtggaccagctgaacatgctgggggagaagctgctgggccccaatgccagcccagatggcctcatcccctggacccgcttctgcaaggagaacatcaatgacaagaacttccccttctggctgtggattgagagcatcctggagctgatcaagaagcacctgctgcccctgtggaatgatggctgcatcatgggcttcatcagcaaggagcgggagcgggccctgctgaaggaccagcagcccggcaccttcctgctgcgcttcagcgagagcagccgggagggcgccatcaccttcacctgggtggagaggagccagaatggaggagagccagacttccacgctgtggagccctacaccaagaaggagctgtctgctgtgaccttcccagacatcatccggaactacaaggtgatggctgctgagaacatccctgagaaccccctgaagtacctgtaccccaacatcgacaaggaccacgccttcggcaagtactacagccggcccaaggaggcccctgagcccatggagctggatggccccaagggcaccggctacatcaagacagagctgatctctgtgtctgaggtgcaccccagccggctgcagaccacagacaacctgctgcccatgagccctgaggagtttgatgaggtgtccagaattgtgggctctgtggagtttgacagcatgatgaacacagtgtag

SEQ ID NO: 21862 - DNA, 2139 bp, synthetic construct
  misc_feature 1..2139: note = Description of Artificial Sequence: Synthetic coding sequence
  source 1..2139: mol_type = other DNA
atgagccagtggtatgagctgcagcagctggacagcaagttcctggagcaggtgcaccagctgtatgatgacagcttccccatggagatccggcagtacctggcccagtggctggagaagcaggactgggagcacgccgccaatgatgtgtcctttgccaccatccgcttccatgacctgctgagccagctggatgaccagtacagccgcttcagcctggagaacaacttcctgctgcagcacaacatcaggaagagcaagaggaacctgcaggacaacttccaggaggaccccatccagatgtccatgatcatctacagctgcctgaaggaggagaggaagatcctggagaatgcccagcgcttcaaccaggcccagagcggcaacatccagagcacagtgatgctggacaagcagaaggagctggacagcaaggtgagaaatgtgaaggacaaggtgatgtgcatcgagcacgagatcaagagcctggaggacctgcaggatgaatatgacttcaagtgcaagaccctgcagaaccgggagcacgagaccaatggagtggccaagagtgaccagaagcaggagcagctgctgctgaagaagatgtacctgatgctggacaacaagaggaaggaggtggtgcacaagatcatcgagctgctgaatgtgacagagctgacccagaatgccctgatcaatgatgagctggtggagtggaagaggcggcagcagagcgcctgcatcggcggccccccaaatgcctgcctggaccagctgcagaactggttcaccatcgtggccgagagcctgcagcaggtgcggcagcagctgaagaagctggaggagctggagcagaagtacacctatgaacatgaccccatcaccaagaacaagcaggtgctgtgggacaggaccttcagcctcttccagcagctgatccagagcagctttgtggtggagcggcagccctgcatgcccacccacccccagaggcccctggtgctgaagacaggagtgcagttcaccgtgaagctgcggctgctggtgaagctgcaggagctgaactacaacctgaaggtgaaggtgctgtttgacaaggatgtgaatgaaagaaacacagtgaagggcttcaggaagttcaacatcctgggcacccacaccaaggtgatgaacatggaggagagcaccaacggcagcctggccgctgagttccgccacctgcagctgaaggagcagaagaatgccggcaccaggaccaatgaaggccccctgattgtgacagaggagctgcacagcctgagctttgagacccagctgtgccagcccggcctggtgattgacctggagaccaccagcctgcctgtggtggtgatcagcaatgtgtcccagctgcccagcggctgggccagcatcctgtggtacaacatgctggtggccgagcccaggaacctgtccttcttcctgaccccaccctgtgcccgctgggcccagctgtctgaggtgctgtcctggcagttcagctctgtgaccaagaggggcctgaatgtggaccagctgaacatgctgggggagaagctgctgggccccaatgccagcccagatggcctcatcccctggacccgcttctgcaaggagaacatcaatgacaagaacttccccttctggctgtggattgagagcatcctggagctgatcaagaagcacctgctgcccctgtggaatgatggctgcatcatgggcttcatcagcaaggagcgggagcgggccctgctgaaggaccagcagcccggcaccttcctgctgcgcttcagcgagagcagccgggagggcgccatcaccttcacctgggtggagaggagccagaatggaggagagccagacttccacgctgtggagccctacaccaagaaggagctgtctgctgtgaccttcccagacatcatccggaactacaaggtgatggctgctgagaacatccctgagaaccccctgaagtacctgtaccccaacatcgacaaggaccacgccttcggcaagtactacagccggcccaaggaggcccctgagcccatggagctggatggccccaagggcaccggctacatcaagacagagctgatctctgtgtctgaggtgtag

SEQ ID NO: 21863 - DNA, 2145 bp, synthetic construct
  misc_feature 1..2145: note = Description of Artificial Sequence: Synthetic coding sequence
  source 1..2145: mol_type = other DNA
atgtggatgagccagtggtatgagctgcagcagctggacagcaagttcctggagcaggtgcaccagctgtatgatgacagcttccccatggagatccggcagtacctggcccagtggctggagaagcaggactgggagcacgccgccaatgatgtgtcctttgccaccatccgcttccatgacctgctgagccagctggatgaccagtacagccgcttcagcctggagaacaacttcctgctgcagcacaacatcaggaagagcaagaggaacctgcaggacaacttccaggaggaccccatccagatgtccatgatcatctacagctgcctgaaggaggagaggaagatcctggagaatgcccagcgcttcaaccaggcccagagcggcaacatccagagcacagtgatgctggacaagcagaaggagctggacagcaaggtgagaaatgtgaaggacaaggtgatgtgcatcgagcacgagatcaagagcctggaggacctgcaggatgaatatgacttcaagtgcaagaccctgcagaaccgggagcacgagaccaatggagtggccaagagtgaccagaagcaggagcagctgctgctgaagaagatgtacctgatgctggacaacaagaggaaggaggtggtgcacaagatcatcgagctgctgaatgtgacagagctgacccagaatgccctgatcaatgatgagctggtggagtggaagaggcggcagcagagcgcctgcatcggcggccccccaaatgcctgcctggaccagctgcagaactggttcaccatcgtggccgagagcctgcagcaggtgcggcagcagctgaagaagctggaggagctggagcagaagtacacctatgaacatgaccccatcaccaagaacaagcaggtgctgtgggacaggaccttcagcctcttccagcagctgatccagagcagctttgtggtggagcggcagccctgcatgcccacccacccccagaggcccctggtgctgaagacaggagtgcagttcaccgtgaagctgcggctgctggtgaagctgcaggagctgaactacaacctgaaggtgaaggtgctgtttgacaaggatgtgaatgaaagaaacacagtgaagggcttcaggaagttcaacatcctgggcacccacaccaaggtgatgaacatggaggagagcaccaacggcagcctggccgctgagttccgccacctgcagctgaaggagcagaagaatgccggcaccaggaccaatgaaggccccctgattgtgacagaggagctgcacagcctgagctttgagacccagctgtgccagcccggcctggtgattgacctggagaccaccagcctgcctgtggtggtgatcagcaatgtgtcccagctgcccagcggctgggccagcatcctgtggtacaacatgctggtggccgagcccaggaacctgtccttcttcctgaccccaccctgtgcccgctgggcccagctgtctgaggtgctgtcctggcagttcagctctgtgaccaagaggggcctgaatgtggaccagctgaacatgctgggggagaagctgctgggccccaatgccagcccagatggcctcatcccctggacccgcttctgcaaggagaacatcaatgacaagaacttccccttctggctgtggattgagagcatcctggagctgatcaagaagcacctgctgcccctgtggaatgatggctgcatcatgggcttcatcagcaaggagcgggagcgggccctgctgaaggaccagcagcccggcaccttcctgctgcgcttcagcgagagcagccgggagggcgccatcaccttcacctgggtggagaggagccagaatggaggagagccagacttccacgctgtggagccctacaccaagaaggagctgtctgctgtgaccttcccagacatcatccggaactacaaggtgatggctgctgagaacatccctgagaaccccctgaagtacctgtaccccaacatcgacaaggaccacgccttcggcaagtactacagccggcccaaggaggcccctgagcccatggagctggatggccccaagggcaccggctacatcaagacagagctgatctctgtgtctgaggtgtag

SEQ ID NO: 21864 - DNA, 2253 bp, synthetic construct; identical to SEQ ID NO: 21861
  misc_feature 1..2253: note = Description of Artificial Sequence: Synthetic coding sequence
  source 1..2253: mol_type = other DNA

SEQ ID NO: 21865 - DNA, 543 bp, synthetic construct
  misc_feature 1..543: note = Description of Artificial Sequence: Synthetic coding sequence
  source 1..543: mol_type = other DNA
atgagccagtggtatgagctgcagcagctggacagcaagttcctggagcaggtgcaccagctgtatgatgacagcttccccatggagatccggcagtacctggcccagtggctggagaagcaggactgggagcacgccgccaatgatgtgtcctttgccaccatccgcttccatgacctgctgagccagctggatgaccagtacagccgcttcagcctggagaacaacttcctgctgcagcacaacatcaggaagagcaagaggaacctgcaggacaacttccaggaggaccccatccagatgtccatgatcatctacagctgcctgaaggaggagaggaagatcctggagaatgcccagcgcttcaaccaggcccagagcggcaacatccagagcacagtgatgctggacaagcagaaggagctggacagcaaggtgagaaatgtgaaggacaaggtgatgtgcatcgagcacgagatcaagagcctggaggacctgcaggatgaatatgacttcaagtgcaagaccctgcagaacagatag

SEQ ID NO: 21866 - DNA, 213 bp, synthetic construct
  misc_feature 1..213: note = Description of Artificial Sequence: Synthetic coding sequence
  source 1..213: mol_type = other DNA
atgagccagtggtatgagctgcagcagctggacagcaagttcctggagcaggtgcaccagctgtatgatgacagcttccccatggagatccggcagtacctggcccagtggctggagaagcaggactgggagcacgccgccaatgatgtgtcctttgccaccatccgcttccatgacctgctgagccagctggatgaccagtacagcaggtag

SEQ ID NO: 21867 - DNA, 582 bp, synthetic construct
  misc_feature 1..582: note = Description of Artificial Sequence: Synthetic coding sequence
  source 1..582: mol_type = other DNA
atgagccagtggtatgagctgcagcagctggacagcaagttcctggagcaggtgcaccagctgtatgatgacagcttccccatggagatccggcagtacctggcccagtggctggagaagcaggactgggagcacgccgccaatgatgtgtcctttgccaccatccgcttccatgacctgctgagccagctggatgaccagtacagccgcttcagcctggagaacaacttcctgctgcagcacaacatcaggaagagcaagaggaacctgcaggacaacttccaggaggaccccatccagatgtccatgatcatctacagctgcctgaaggaggagaggaagatcctggagaatgcccagcgcttcaaccaggcccagagcggcaacatccagagcacagtgatgctggacaagcagaaggagctggacagcaaggtgagaaatgtgaaggacaaggtgatgtgcatcgagcacgagatcaagagcctggaggacctgcaggatgaatatgacttcaagtgcaagaccctgcagaacagaggcagcagcagccagaacaacagagtggccgagtgccactag

SEQ ID NO: 21868 - DNA, 453 bp, synthetic construct
  misc_feature 1..453: note = Description of Artificial Sequence: Synthetic coding sequence
  source 1..453: mol_type = other DNA
atgagccagtggtatgagctgcagcagctggacagcaagttcctggagcaggtgcaccagctgtatgatgacagcttccccatggagatccggcagtacctggcccagtggctggagaagcaggactgggagcacgccgccaatgatgtgtcctttgccaccatccgcttccatgacctgctgagccagctggatgaccagtacagccgcttcagcctggagaacaacttcctgctgcagcacaacatcaggaagagcaagaggaacctgcaggacaacttccaggaggaccccatccagatgtccatgatcatctacagctgcctgaaggaggagaggaagatcctggagaatgcccagcgcttcaaccaggcccagagcggcaacatccagagcacagtgatgctggacaagcagaaggagctggacagcaaggtgagaaatgtgaagtag

SEQ ID NO: 21869 - DNA, 582 bp, synthetic construct; identical to SEQ ID NO: 21867
  misc_feature 1..582: note = Description of Artificial Sequence: Synthetic coding sequence
  source 1..582: mol_type = other DNA

SEQ ID NO: 21870 - DNA, 483 bp, synthetic construct
  misc_feature 1..483: note = Description of Artificial Sequence: Synthetic coding sequence
  source 1..483: mol_type = other DNA
gaatgtcatgaggaccccatccagatgtccatgatcatctacagctgcctgaaggaggagaggaagatcctggagaatgcccagcgcttcaaccaggcccagagcggcaacatccagagcacagtgatgctggacaagcagaaggagctggacagcaaggtgagaaatgtgaaggacaaggtgatgtgcatcgagcacgagatcaagagcctggaggacctgcaggatgaatatgacttcaagtgcaagaccctgcagaaccgggagcacgagaccaatggagtggccaagagtgaccagaagcaggagcagctgctgctgaagaagatgtacctgatgctggacaacaagaggaaggaggtggtgcacaagatcatcgagctgctgaatgtgacagagctgacccagaatgccctgatcaatgatgagctggtggagtggaagaggcggcagcagagcgcctgcatcggcggccccccatag

SEQ ID NO: 21871 - DNA, 2556 bp, synthetic construct
  misc_feature 1..2556: note = Description of Artificial Sequence: Synthetic coding sequence
  source 1..2556: mol_type = other DNA
atggcccagtgggagatgctgcagaacctggacagccccttccaggaccagctgcaccagctgtacagccacagcctgctgcctgtggacatccggcagtacctggccgtgtggattgaggaccagaactggcaggaggccgccctgggcagtgatgacagcaaggccaccatgctgttcttccacttcctggaccagctgaactatgaatgtggccgctgcagccaggaccctgagagcctgctgctgcagcacaacctgaggaagttctgccgggacatccagcccttcagccaggaccccacccagctggccgagatgatcttcaacctgctgctggaggagaagaggatcctgatccaggcccagagggcccagctggagcagggcgagcctgtgctggagacccctgtggagagccagcagcatgaaattgagagccgcatcctggacctgcgggccatgatggagaagctggtgaagagcatcagccagctgaaggaccagcaggatgtgttctgcttccgctacaagatccaggccaagggcaagacccccagcctggacccccaccagaccaaggagcagaagatcctgcaggagaccctgaatgagctggacaagaggaggaaggaggtgctggatgccagcaaggccctgctgggccgcctgaccaccctcatcgagctgctgctgcccaagctggaggagtggaaggcccagcagcagaaggcctgcatccgggcccccatcgaccacggcctggagcagctggagacctggttcaccgctggggccaagctgctcttccacctgcggcagctgctgaaggagctgaagggcctgagctgcctggtgtcctaccaggatgaccccctgaccaagggcgtggacctgagaaatgcccaggtgacagagctgctgcagaggctgctgcaccgggcctttgtggtggagacccagccctgcatgccccagaccccccaccggcccctcatcctgaagacaggcagcaagttcaccgtgaggacccggctgctggtgcggctgcaggagggcaatgaaagcctgactgtggaggtgtccattgacagaaatccaccccagctgcagggcttcaggaagttcaacatcctgaccagcaaccagaagaccctgaccccagagaagggccagagccagggcctcatctgggactttggctacctgaccctggtggagcagaggtctgggggcagcggcaagggcagcaacaagggccccctgggcgtgacagaggagctgcacatcatctccttcaccgtgaagtacacctaccagggcctgaagcaggagctgaagacagacaccctgcctgtggtgatcatcagcaacatgaaccagctgagcatcgcctgggcctctgtgctgtggttcaacctgctgagccccaacctgcagaaccagcagttcttcagcaacccccccaaggccccctggagcctgctgggccctgccctgtcctggcagttcagcagctatgtgggccggggcctgaacagcgaccagctgtccatgctgaggaacaagctgtttggccagaactgcaggacagaggaccccctgctgtcctgggccgacttcaccaagcgggagagccccccaggcaagctgcccttctggacctggctggacaagatcctggagctggtgcatgaccacctgaaggacctgtggaatgatggccgcatcatgggctttgtgagccgcagccaggagcggcggctgctgaagaagaccatgagcggcaccttcctgctgcgcttcagcgagagcagcgagggcggcatcacctgctcctgggtggagcaccaggatgatgacaaggtgctgatctacagcgtgcagccctacaccaaggaggtgctgcagagcctgcccctgacagagatcatccgccactaccagctgctgacagaggagaacatccctgagaaccccctgcgcttcctgtacccccgcatccccagagatgaggccttcggctgctactaccaggagaaggtgaacctgcaggagaggaggaagtacctgaagcacaggctcatcgtggtgagcaaccggcaggtggatgagctgcagcagcccctggagctgaagccagagcctgagctggagagcctggagctggagctgggcctggtgcctgagcctgagctgagcctggacctggagcccctgctgaaggccggcctggacctgggccctgagctggagagcgtgctggagagcaccctggagcctgtgattgagcccaccctgtgcatggtgtcccagacagtgcctgagccagaccagggccctgtgtcccagcctgtgcctgagccagacctgccctgtgacctgcggcacctgaacacagagcccatggagatcttcaggaactgtgtgaagattgaggagatcatgcccaacggggaccccctgctggccggccagaacacagtggatgaggtgtatgtgtcccggcccagccacttctacacagatggccccctgatgcccagcgacttctag

SEQ ID NO: 21872 - DNA, 1383 bp, synthetic construct
  misc_feature 1..1383: note = Description of Artificial Sequence: Synthetic coding sequence
  source 1..1383: mol_type = other DNA
atggcccagtgggagatgctgcagaacctggacagccccttccaggaccagctgcaccagctgtacagccacagcctgctgcctgtggacatccggcagtacctggccgtgtggattgaggaccagaactggcaggaggccgccctgggcagtgatgacagcaaggccaccatgctgttcttccacttcctggaccagctgaactatgaatgtggccgctgcagccaggaccctgagagcctgctgctgcagcacaacctgaggaagttctgccgggacatccaggaccccacccagctggccgagatgatcttcaacctgctgctggaggagaagaggatcctgatccaggcccagagggcccagctggagcagggcgagcctgtgctggagacccctgtggagagccagcagcatgaaattgagagccgcatcctggacctgcgggccatgatggagaagctggtgaagagcatcagccagctgaaggaccagcaggatgtgttctgcttccgctacaagatccaggccaagggcaagacccccagcctggacccccaccagaccaaggagcagaagatcctgcaggagaccctgaatgagctggacaagaggaggaaggaggtgctggatgccagcaaggccctgctgggccgcctgaccaccctcatcgagctgctgctgcccaagctggaggagtggaaggcccagcagcagaaggcctgcatccgggcccccatcgaccacggcctggagcagctggagacctggttcaccgctggggccaagctgctcttccacctgcggcagctgctgaaggagctgaagggcctgagctgcctggtgtcctaccaggatgaccccctgaccaagggcgtggacctgagaaatgcccaggtgacagagctgctgcagaggctgctgcaccgggcctttgtggtggagacccagccctgcatgccccagaccccccaccggcccctcatcctgaagacaggcagcaagttcaccgtgaggacccggctgctggtgcggctgcaggagggcaatgaaagcctgactgtggaggtgtccattgacagaaatccaccccagctgcagggcttcaggaagttcaacatcctgaccagcaaccagaagaccctgaccccagagaagggccagagccagggcctcatctgggactttggctacctgaccctggtggagcagaggtctgggggcagcggcaagggcagcaacaagggccccctgggcgtgacagaggagctgcacatcatctccttcaccgtgaagtacacctaccagggcctgaagcaggagctgaaggtgtctgaaaatggaggccagggcgagaggaagcagctgtggaagaaggcctag

SEQ ID NO: 21873 - DNA, 2544 bp, synthetic construct
  misc_feature 1..2544: note = Description of Artificial Sequence: Synthetic coding sequence
  source 1..2544: mol_type = other DNA
atggcccagtgggagatgctgcagaacctggacagccccttccaggaccagctgcaccagctgtacagccacagcctgctgcctgtggacatccggcagtacctggccgtgtggattgaggaccagaactggcaggaggccgccctgggcagtgatgacagcaaggccaccatgctgttcttccacttcctggaccagctgaactatgaatgtggccgctgcagccaggaccctgagagcctgctgctgcagcacaacctgaggaagttctgccgggacatccaggaccccacccagctggccgagatgatcttcaacctgctgctggaggagaagaggatcctgatccaggcccagagggcccagctggagcagggcgagcctgtgctggagacccctgtggagagccagcagcatgaaattgagagccgcatcctggacctgcgggccatgatggagaagctggtgaagagcatcagccagctgaaggaccagcaggatgtgttctgcttccgctacaagatccaggccaagggcaagacccccagcctggacccccaccagaccaaggagcagaagatcctgcaggagaccctgaatgagctggacaagaggaggaaggaggtgctggatgccagcaaggccctgctgggccgcctgaccaccctcatcgagctgctgctgcccaagctggaggagtggaaggcccagcagcagaaggcctgcatccgggcccccatcgaccacggcctggagcagctggagacctggttcaccgctggggccaagctgctcttccacctgcggcagctgctgaaggagctgaagggcctgagctgcctggtgtcctaccaggatgaccccctgaccaagggcgtggacctgagaaatgcccaggtgacagagctgctgcagaggctgctgcaccgggcctttgtggtggagacccagccctgcatgccccagaccccccaccggcccctcatcctgaagacaggcagcaagttcaccgtgaggacccggctgctggtgcggctgcaggagggcaatgaaagcctgactgtggaggtgtccattgacagaaatccaccccagctgcagggcttcaggaagttcaacatcctgaccagcaaccagaagaccctgaccccagagaagggccagagccagggcctcatctgggactttggctacctgaccctggtggagcagaggtctgggggcagcggcaagggcagcaacaagggccccctgggcgtgacagaggagctgcacatcatctccttcaccgtgaagtacacctaccagggcctgaagcaggagctgaagacagacaccctgcctgtggtgatcatcagcaacatgaaccagctgagcatcgcctgggcctctgtgctgtggttcaacctgctgagccccaacctgcagaaccagcagttcttcagcaacccccccaaggccccctggagcctgctgggccctgccctgtcctggcagttcagcagctatgtgggccggggcctgaacagcgaccagctgtccatgctgaggaacaagctgtttggccagaactgcaggacagaggaccccctgctgtcctgggccgacttcaccaagcgggagagccccccaggcaagctgcccttctggacctggctggacaagatcctggagctggtgcatgaccacctgaaggacctgtggaatgatggccgcatcatgggctttgtgagccgcagccaggagcggcggctgctgaagaagaccatgagcggcaccttcctgctgcgcttcagcgagagcagcgagggcggcatcacctgctcctgggtggagcaccaggatgatgacaaggtgctgatctacagcgtgcagccctacaccaaggaggtgctgcagagcctgcccctgacagagatcatccgccactaccagctgctgacagaggagaacatccctgagaaccccctgcgcttcctgtacccccgcatccccagagatgaggccttcggctgctactaccaggagaaggtgaacctgcaggagaggaggaagtacctgaagcacaggctcatcgtggtgagcaaccggcaggtggatgagctgcagcagcccctggagctgaagccagagcctgagctggagagcctggagctggagctgggcctggtgcctgagcctgagctgagcctggacctggagcccctgctgaaggccggcctggacctgggccctgagctggagagcgtgctggagagcaccctggagcctgtgattgagcccaccctgtgcatggtgtcccagacagtgcctgagccagaccagggccctgtgtcccagcctgtgcctgagccagacctgccctgtgacctgcggcacctgaacacagagcccatggagatcttcaggaactgtgtgaagattgaggagatcatgcccaacggggaccccctgctggccggccagaacacagtggatgaggtgtatgtgtcccggcccagccacttctacacagatggccccctgatgcccagcgacttctag

SEQ ID NO: 21874 - DNA, 2313 bp, synthetic construct
  misc_feature 1..2313: note = Description of Artificial Sequence: Synthetic coding sequence
  source 1..2313: mol_type = other DNA
atggcccagtggaaccagctgcagcagctggacacccgctacctggagcagctgcaccagctgtacagcgacagcttccccatggagctgcggcagttcctggccccctggattgagagccaggactgggcctatgctgccagcaaggagagccacgccaccctggtgttccacaacctgctgggggagattgaccagcagtacagccgcttcctgcaggagagcaatgtgctgtaccagcacaacctgcggcgcatcaagcagttcctgcagagccgctacctggagaagcccatggagatcgcccgcatcgtggcccgctgcctgtgggaggagagccggctgctgcagacagctgccacagctgcccagcagggcggccaggccaaccaccccacagctgctgtggtgacagagaagcagcagatgctggagcagcacctgcaggatgtgaggaagagggtgcaggacctggagcagaagatgaaggtggtggagaacctgcaggatgactttgacttcaactacaagaccctgaagagccagggcgacatgcaggacctgaatggaaacaaccagagcgtgacccggcagaagatgcagcagctggagcagatgctgacagccctggaccagatgaggaggagcatcgtgtctgagctggccggcctgctgagcgccatggagtatgtgcagaagaccctgacagatgaggagctggccgactggaagaggcggcagcagatcgcctgcatcggcggcccccccaacatctgcctggaccggctggagaactggatcaccagcctggccgagagccagctgcagacccggcagcagatcaagaagctggaggagctgcagcagaaggtgtcctacaagggggaccccatcgtgcagcaccggcccatgctggaggagagaattgtggagctgttcaggaacctgatgaagagcgcctttgtggtggagcggcagccctgcatgcccatgcacccagaccggcccctggtgatcaagacaggagtgcagttcaccaccaaggtgcggctgctggtgaagtttcctgagctgaactaccagctgaagatcaaggtgtgcatcgacaaggacagcggagatgtggccgccctgcggggcagcaggaagttcaacatcctgggcaccaacaccaaggtgatgaacatggaggagagcaacaacggcagcctgtctgctgagttcaagcacctgaccctgcgggagcagagatgtggaaatggaggccgggccaactgtgatgccagcctgattgtgacagaggagctgcacctgatcacctttgaaacagaggtgtaccaccagggcctgaagattgacctggagacccacagcctgcctgtggtggtgatcagcaacatctgccagatgcccaatgcctgggccagcatcctgtggtacaacatgctgaccaacaaccccaagaatgtgaacttcttcaccaagccacccatcggcacctgggaccaggtggccgaggtgctgtcctggcagttcagcagcaccaccaagaggggcctgagcattgagcagctgaccaccctggccgagaagctgctgggccctggggtgaactacagcggctgccagatcacctgggccaagttctgcaaggagaacatggccggcaagggcttctccttctgggtgtggctggacaacatcatcgacctggtgaagaagtacatcctggccctgtggaatgaaggctacatcatgggcttcatcagcaaggagcgggagcgggccatcctgagcaccaagcccccaggcaccttcctgctgcgcttcagcgagagcagcaaggagggcggcgtgaccttcacctgggtggagaaggacatcagcggcaagacccagatccagagcgtggagccctacaccaagcagcagctgaacaacatgagctttgctgagatcatcatgggctacaagatcatggatgccaccaacatcctggtgagccccctggtgtacctgtacccagacatccccaaggaggaggccttcggcaagtactgcaggcctgagagccaggagcaccctgaggccgaccccggcagcgctgccccctacctgaagaccaagttcatctgtgtgacccccaccacctgcagcaacaccatcgacctgcccatgagccccaggaccctggacagcctgatgcagtttggaaacaacggggagggcgctgagcccagcgctgggggccagtttgagagcctgacctttgacatggagctgaccagtgaatgtgccaccagccccatgtag

SEQ ID NO: 21875 - DNA, 2019 bp, synthetic construct
  misc_feature 1..2019: note = Description of Artificial Sequence: Synthetic coding sequence
  source 1..2019: mol_type = other DNA
atggagatcgcccgcatcgtggcccgctgcctgtgggaggagagccggctgctgcagacagctgccacagctgcccagcagggcggccaggccaaccaccccacagctgctgtggtgacagagaagcagcagatgctggagcagcacctgcaggatgtgaggaagagggtgcaggacctggagcagaagatgaaggtggtggagaacctgcaggatgactttgacttcaactacaagaccctgaagagccagggcgacatgcaggacctgaatggaaacaaccagagcgtgacccggcagaagatgcagcagctggagcagatgctgacagccctggaccagatgaggaggagcatcgtgtctgagctggccggcctgctgagcgccatggagtatgtgcagaagaccctgacagatgaggagctggccgactggaagaggcggcagcagatcgcctgcatcggcggcccccccaacatctgcctggaccggctggagaactggatcaccagcctggccgagagccagctgcagacccggcagcagatcaagaagctggaggagctgcagcagaaggtgtcctacaagggggaccccatcgtgcagcaccggcccatgctggaggagagaattgtggagctgttcaggaacctgatgaagagcgcctttgtggtggagcggcagccctgcatgcccatgcacccagaccggcccctggtgatcaagacaggagtgcagttcaccaccaaggtgcggctgctggtgaagtttcctgagctgaactaccagctgaagatcaaggtgtgcatcgacaaggacagcggagatgtggccgccctgcggggcagcaggaagttcaacatcctgggcaccaacaccaaggtgatgaacatggaggagagcaacaacggcagcctgtctgctgagttcaagcacctgaccctgcgggagcagagatgtggaaatggaggccgggccaactgtgatgccagcctgattgtgacagaggagctgcacctgatcacctttgaaacagaggtgtaccaccagggcctgaagattgacctggagacccacagcctgcctgtggtggtgatcagcaacatctgccagatgcccaatgcctgggccagcatcctgtggtacaacatgctgaccaacaaccccaagaatgtgaacttcttcaccaagccacccatcggcacctgggaccaggtggccgaggtgctgtcctggcagttcagcagcaccaccaagaggggcctgagcattgagcagctgaccaccctggccgagaagctgctgggccctggggtgaactacagcggctgccagatcacctgggccaagttctgcaaggagaacatggccggcaagggcttctccttctgggtgtggctggacaacatcatcgacctggtgaagaagtacatcctggccctgtggaatgaaggctacatcatgggcttcatcagcaaggagcgggagcgggccatcctgagcaccaagcccccaggcaccttcctgctgcgcttcagcgagagcagcaaggagggcggcgtgaccttcacctgggtggagaaggacatcagcggcaagacccagatccagagcgtggagccctacaccaagcagcagctgaacaacatgagctttgctgagatcatcatgggctacaagatcatggatgccaccaacatcctggtgagccccctggtgtacctgtacccagacatccccaaggaggaggccttcggcaagtactgcaggcctgagagccaggagcaccctgaggccgaccccggcagcgctgccccctacctgaagaccaagttcatctgtgtgacccccaccacctgcagcaacaccatcgacctgcccatgagccccaggaccctggacagcctgatgcagtttggaaacaacggggagggcgctgagcccagcgctgggggccagtttgagagcctgacctttgacatggagctgaccagtgaatgtgccaccagccccatgtag

SEQ ID NO: 21876 - DNA, 2310 bp, synthetic construct
  misc_feature 1..2310: note = Description of Artificial Sequence: Synthetic coding sequence
  source 1..2310: mol_type = other DNA
atggcccagtggaaccagctgcagcagctggacacccgctacctggagcagctgcaccagctgtacagcgacagcttccccatggagctgcggcagttcctggccccctggattgagagccaggactgggcctatgctgccagcaaggagagccacgccaccctggtgttccacaacctgctgggggagattgaccagcagtacagccgcttcctgcaggagagcaatgtgctgtaccagcacaacctgcggcgcatcaagcagttcctgcagagccgctacctggagaagcccatggagatcgcccgcatcgtggcccgctgcctgtgggaggagagccggctgctgcagacagctgccacagctgcccagcagggcggccaggccaaccaccccacagctgctgtggtgacagagaagcagcagatgctggagcagcacctgcaggatgtgaggaagagggtgcaggacctggagcagaagatgaaggtggtggagaacctgcaggatgactttgacttcaactacaagaccctgaagagccagggcgacatgcaggacctgaatggaaacaaccagagcgtgacccggcagaagatgcagcagctggagcagatgctgacagccctggaccagatgaggaggagcatcgtgtctgagctggccggcctgctgagcgccatggagtatgtgcagaagaccctgacagatgaggagctggccgactggaagaggcggcagcagatcgcctgcatcggcggcccccccaacatctgcctggaccggctggagaactggatcaccagcctggccgagagccagctgcagacccggcagcagatcaagaagctggaggagctgcagcagaaggtgtcctacaagggggaccccatcgtgcagcaccggcccatgctggaggagagaattgtggagctgttcaggaacctgatgaagagcgcctttgtggtggagcggcagccctgcatgcccatgcacccagaccggcccctggtgatcaagacaggagtgcagttcaccaccaaggtgcggctgctggtgaagtttcctgagctgaactaccagctgaagatcaaggtgtgcatcgacaaggacagcggagatgtggccgccctgcggggcagcaggaagttcaacatcctgggcaccaacaccaaggtgatgaacatggaggagagcaacaacggcagcctgtctgctgagttcaagcacctgaccctgcgggagcagagatgtggaaatggaggccgggccaactgtgatgccagcctgattgtgacagaggagctgcacctgatcacctttgaaacagaggtgtaccaccagggcctgaagattgacctggagacccacagcctgcctgtggtggtgatcagcaacatctgccagatgcccaatgcctgggccagcatcctgtggtacaacatgctgaccaacaaccccaagaatgtgaacttcttcaccaagccacccatcggcacctgggaccaggtggccgaggtgctgtcctggcagttcagcagcaccaccaagaggggcctgagcattgagcagctgaccaccctggccgagaagctgctgggccctggggtgaactacagcggctgccagatcacctgggccaagttctgcaaggagaacatggccggcaagggcttctccttctgggtgtggctggacaacatcatcgacctggtgaagaagtacatcctggccctgtggaatgaaggctacatcatgggcttcatcagcaaggagcgggagcgggccatcctgagcaccaagcccccaggcaccttcctgctgcgcttcagcgagagcagcaaggagggcggcgtgaccttcacctgggtggagaaggacatcagcggcaagacccagatccagagcgtggagccctacaccaagcagcagctgaacaacatgagctttgctgagatcatcatgggctacaagatcatggatgccaccaacatcctggtgagccccctggtgtacctgtacccagacatccccaaggaggaggccttcggcaagtactgcaggcctgagagccaggagcaccctgaggccgaccctggagctgccccctacctgaagaccaagttcatctgtgtgacccccaccacctgcagcaacaccatcgacctgcccatgagccccaggaccctggacagcctgatgcagtttggaaataatggagagggcgctgagcccagcgctgggggccagtttgagagcctgacctttgacatggagctgaccagtgaatgtgccaccagccccatgtag

SEQ ID NO: 21877 - DNA, 2169 bp, synthetic construct
  misc_feature 1..2169: note = Description of Artificial Sequence: Synthetic coding sequence
  source 1..2169: mol_type = other DNA
atggcccagtggaaccagctgcagcagctggacacccgctacctggagcagctgcaccagctgtacagcgacagcttccccatggagctgcggcagttcctggccccctggattgagagccaggactgggcctatgctgccagcaaggagagccacgccaccctggtgttccacaacctgctgggggagattgaccagcagtacagccgcttcctgcaggagagcaatgtgctgtaccagcacaacctgcggcgcatcaagcagttcctgcagagccgctacctggagaagcccatggagatcgcccgcatcgtggcccgctgcctgtgggaggagagccggctgctgcagacagctgccacagctgcccagcagggcggccaggccaaccaccccacagctgctgtggtgacagagaagcagcagatgctggagcagcacctgcaggatgtgaggaagagggtgcaggacctggagcagaagatgaaggtggtggagaacctgcaggatgactttgacttcaactacaagaccctgaagagccagggcgacatgcaggacctgaatggaaacaaccagagcgtgacccggcagaagatgcagcagctggagcagatgctgacagccctggaccagatgaggaggagcatcgtgtctgagctggccggcctgctgagcgccatggagtatgtgcagaagaccctgacagatgaggagctggccgactggaagaggcggcagcagatcgcctgcatcggcggcccccccaacatctgcctggaccggctggagaactggatcaccagcctggccgagagccagctgcagacccggcagcagatcaagaagctggaggagctgcagcagaaggtgtcctacaagggggaccccatcgtgcagcaccggcccatgctggaggagagaattgtggagctgttcaggaacctgatgaagagcgcctttgtggtggagcggcagccctgcatgcccatgcacccagaccggcccctggtgatcaagacaggagtgcagttcaccaccaaggtgcggctgctggtgaagtttcctgagctgaactaccagctgaagatcaaggtgtgcatcgacaaggacagcggagatgtggccgccctgcggggcagcaggaagttcaacatcctgggcaccaacaccaaggtgatgaacatggaggagagcaacaacggcagcctgtctgctgagttcaagcacctgaccctgcgggagcagagatgtggaaatggaggccgggccaactgtgatgccagcctgattgtgacagaggagctgcacctgatcacctttgaaacagaggtgtaccaccagggcctgaagattgacctggagacccacagcctgcctgtggtggtgatcagcaacatctgccagatgcccaatgcctgggccagcatcctgtggtacaacatgctgaccaacaaccccaagaatgtgaacttcttcaccaagccacccatcggcacctgggaccaggtggccgaggtgctgtcctggcagttcagcagcaccaccaagaggggcctgagcattgagcagctgaccaccctggccgagaagctgctgggccctggggtgaactacagcggctgccagatcacctgggccaagttctgcaaggagaacatggccggcaagggcttctccttctgggtgtggctggacaacatcatcgacctggtgaagaagtacatcctggccctgtggaatgaaggctacatcatgggcttcatcagcaaggagcgggagcgggccatcctgagcaccaagcccccaggcaccttcctgctgcgcttcagcgagagcagcaaggagggcggcgtgaccttcacctgggtggagaaggacatcagcggcaagacccagatccagagcgtggagccctacaccaagcagcagctgaacaacatgagctttgctgagatcatcatgggctacaagatcatggatgccaccaacatcctggtgagccccctggtgtacctgtacccagacatccccaaggaggaggccttcggcaagtactgcaggcctgagagccaggagcaccctgaggccgaccccggcagcgctgccccctacctgaagaccaagttcatctgtgtgacccccttcattgatgctgtgtggaagtag

SEQ ID NO: 21878 - DNA, 2247 bp, synthetic construct
  misc_feature 1..2247: note = Description of Artificial Sequence: Synthetic coding sequence
  source 1..2247: mol_type = other DNA
atgagccagtggaaccaggtgcagcagctggagatcaagttcctggagcaggtggaccagttctatgatgacaacttccccatggagatccgccacctgctggcccagtggattgagaaccaggactgggaggccgccagcaacaatgagaccatggccaccatcctgctgcagaacctgctgatccagctggatgagcagctgggccgggtgtccaaggagaagaacctgctgctgatccacaacctgaagaggatcaggaaggtgctgcagggcaagttccacggcaaccccatgcacgtggccgtggtgatcagcaactgcctgcgggaggagcggcgcatcctggccgccgccaacatgcctgtgcagggccccctggagaagagcctgcagagcagctctgtgtctgagcggcagagaaatgtggagcacaaggtggccgccatcaagaacagcgtgcagatgacagagcaggacaccaagtacctggaggacctgcaggatgaatttgactaccgctacaagaccatccagaccatggaccagagcgacaagaacagcgccatggtgaaccaggaggtgctgaccctgcaggagatgctgaacagcctggacttcaagaggaaggaggccctgagcaagatgacccagatcatccatgaaacagacctgctgatgaacaccatgctgattgaggagctgcaggactggaagaggcggcagcagatcgcctgcattggaggccccctgcacaacggcctggaccagctgcagaactgcttcaccctgctggccgagagcctcttccagctgcggcggcagctggagaagctggaggagcagagcaccaagatgacctatgaaggagaccccatccccatgcagaggacccacatgctggagcgggtgaccttcctgatctacaacctcttcaagaacagctttgtggtggagcggcagccctgcatgcccacccacccccagaggcccctggtgctgaagaccctcatccagttcaccgtgaagctgcggctgctgatcaagctgcctgagctgaactaccaggtgaaggtgaaggccagcattgacaagaatgtgtccaccctgagcaacagaagatttgtgctgtgtggcaccaacgtgaaggccatgagcattgaggagagcagcaatggcagcctgtctgtggagttccgccacctgcagcccaaggagatgaagagcagcgctgggggcaaaggaaatgaaggctgccacatggtgacagaggagctgcacagcatcacctttgagacccagatctgcctgtatggcctgaccatcgacctggagaccagcagcctgcctgtggtgatgatcagcaatgtgtcccagctgcccaatgcctgggccagcatcatctggtacaacgtgtccaccaatgacagccagaacctggtgttcttcaacaaccccccaccagccaccctgagccagctgctggaggtgatgtcctggcagttcagcagctatgtgggccggggcctgaacagcgaccagctgcacatgctggccgagaagctgactgtgcagagcagctacagtgatggccacctgacctgggccaagttctgcaaggagcacctgcccgggaagagcttcaccttctggacctggctggaggccatcctggacctgatcaagaagcacatcctgcccctgtggattgatggctacgtgatgggctttgtgtccaaggagaaggagcggctgctgctgaaggacaagatgcctggcaccttcctgctgcgcttcagcgagagccacctgggcggcatcaccttcacctgggtggaccacagcgagagcggggaggtgcgcttccacagcgtggagccctacaacaagggccgcctgagcgccctgccctttgctgacatcctgcgggactacaaggtgatcatggccgagaacatccctgagaaccccctgaagtacctgtacccagacatccccaaggacaaggccttcggcaagcactacagcagccagccctgtgaggtgtcccggcccacagagcggggggacaagggctacgtgcccagcgtcttcatccccatcagcaccatccgcagtgacagcacagagccccacagccccagcgacctgctgcccatgagccccagcgtgtatgctgtgctgcgggagaacctgagccccaccaccattgaaacagccatgaagagcccctacagcgctgagtag

SEQ ID NO: 21879 - DNA, 2247 bp, synthetic construct; identical to SEQ ID NO: 21878
  misc_feature 1..2247: note = Description of Artificial Sequence: Synthetic coding sequence
  source 1..2247: mol_type = other DNA

SEQ ID NO: 21880 - DNA, 354 bp, synthetic construct
  misc_feature 1..354: note = Description of Artificial Sequence: Synthetic coding sequence
  source 1..354: mol_type = other DNA
atgagccagtggaaccaggtgcagcagctggagatcaagttcctggagcaggtggaccagttctatgatgacaacttccccatggagatccgccacctgctggcccagtggattgagaaccaggactgggaggccgccagcaacaatgagaccatggccaccatcctgctgcagaacctgctgatccagctggatgagcagctgggccgggtgtccaaggagaagaacctgctgctgatccacaacctgaagaggatcaggaaggtgctgcagagccctggcctggccacagcccagctgcccctggacagacatggagagacctgcatccagaggagcaagagctgcccctag

SEQ ID NO: 21881 - DNA, 78 bp, synthetic construct
  misc_feature 1..78: note = Description of Artificial Sequence: Synthetic coding sequence
  source 1..78: mol_type = other DNA
atgagccagtggaaccaggtgcagcagctggagatcaagttcctggagcaggtggaccagttctatgatgacaactag

SEQ ID NO: 21882 - DNA, 240 bp, synthetic construct
  misc_feature 1..240: note = Description of Artificial Sequence: Synthetic coding sequence
  source 1..240: mol_type = other DNA
atgagccagtggaaccaggtgcagcagctggagatcaagttcctggagcaggtggaccagttctatgatgacaacttccccatggagatccgccacctgctggcccagtggattgagaaccaggactgggaggccgccagcaacaatgagaccatggccaccatcctgctgcagaacctgctgatccagctggatgagcagctgggccgggtgtccaaggagaagaacctgctgctgtag

SEQ ID NO: 21883 - DNA, 2385 bp, synthetic construct
  misc_feature 1..2385: note = Description of Artificial Sequence: Synthetic coding sequence
  source 1..2385: mol_type = other DNA
atggccggctggatccaggcccagcagctgcagggagatgccctgcggcagatgcaggtgctgtatggccagcacttccccatcgaggtgcgccactacctggcccagtggattgagagccagccctgggatgccatcgacctggacaacccccaggaccgggcccaggccacccagctgctggagggcctggtgcaggagctgcagaagaaggccgagcaccaggtgggggaggatggcttcctgctgaagatcaagctgggccactacgccacccagctgcagaagacctatgaccgctgccccctggagctggtgcgctgcatccgccacatcctgtacaatgagcagaggctggtgcgggaggccaacaactgcagcagccctgctggcatcctggtggatgccatgagccagaagcacctgcagatcaaccagacctttgaggagctgcggctggtgacccaggacacagaaaatgagctgaagaagctgcagcagacccaggagtacttcatcatccagtaccaggagagcctgcgcatccaggcccagtttgcccagctggcccagctgagcccccaggagcggctgagccgggagacagccctgcagcagaagcaggtgtccctggaggcctggctgcagcgggaggcccagaccctgcagcagtacagagtggagctggccgagaagcaccagaagaccctgcagctgctgaggaagcagcagaccatcatcctggatgatgagctgatccagtggaagaggcggcagcagctggccggaaatggaggccccccagagggcagcctggatgtgctgcagagctggtgtgagaagctggccgagatcatctggcagaaccggcagcagatccggcgggcagagcacctgtgccagcagctgcccatccctggccctgtggaggagatgctggccgaggtgaatgccaccatcacagacatcatcagcgccctggtgaccagcaccttcatcatcgagaagcagcccccccaggtgctgaagacccagaccaagtttgctgccaccgtgcggctgctggtgggcggcaagctgaatgtgcacatgaaccccccccaggtgaaggccaccatcatcagcgagcagcaggccaagagcctgctgaagaatgaaaacaccagaaatgaatgttctggagagatcctgaacaactgctgcgtgatggagtaccaccaggccaccggcaccctgagcgcccacttcaggaacatgagcctgaagaggatcaagagagctgacagaagaggagctgagagcgtgacagaggagaagttcaccgtgctgtttgagagccagttctctgtgggcagcaatgagctggtgttccaggtgaagaccctgagcctgcctgtggtggtgattgtgcacggcagccaggaccacaatgccacagccaccgtgctgtgggacaatgcctttgctgagcccggccgggtgccctttgctgtgcctgacaaggtgctgtggccccagctgtgtgaggccctgaacatgaagttcaaggccgaggtgcagagcaacagaggcctgaccaaggagaacctggtgttcctggcccagaagctgttcaacaacagcagcagccacctggaggactacagcggcctgtctgtgtcctggagccagttcaaccgggagaacctgcccggctggaactacaccttctggcagtggtttgatggagtgatggaggtgctgaagaagcaccacaagccccactggaatgatggagccatcctgggctttgtgaacaagcagcaggcccatgacctgctgatcaacaagccagatggcaccttcctgctgcgcttcagtgacagcgagatcggcggcatcaccatcgcctggaagtttgacagccctgagaggaacctgtggaacctgaagcccttcaccacccgggacttcagcatccgcagcctggccgaccggctgggggacctgagctacctgatctacgtgtttcctgaccggcccaaggatgaggtgttcagcaagtactacacccctgtgctggccaaggctgtggatggctacgtgaagccccagatcaagcaggtggtgcctgagtttgtgaatgccagcgcagatgctgggggcagcagcgccacctacatggaccaggcccccagccctgctgtgtgcccccaggccccctacaacatgtacccccagaacccagaccacgtgctggaccaggatggagaatttgacctggatgagaccatggatgtggcccggcacgtggaggagctgctgcggcggcccatggacagcctggacagccggctgagccccccagctggcctcttcaccagcgcccggggcagcctgtcctag

SEQ ID NO: 21884 - DNA, 378 bp, synthetic construct
  misc_feature 1..378: note = Description of Artificial Sequence: Synthetic coding sequence
  source 1..378: mol_type = other DNA
atggccggctggatccaggcccagcagctgcagggagatgccctgcggcagatgcaggtgctgtatggccagcacttccccatcgaggtgcgccactacctggcccagtggattgagagccagccctgggatgccatcgacctggacaacccccaggaccgggcccaggccacccagctgctggagggcctggtgcaggagctgcagaagaaggccgagcaccaggtgggggaggatggcttcctgctgaagatcaagctgggccactacgccacccagctgcagaagacctatgaccgctgccccctggagctggtgcgctgcatccgccacatcctgtacaatgagcagaggctggtgcgggaggccaacaactag

SEQ ID NO: 21885 - DNA, 2376 bp, synthetic construct
  misc_feature 1..2376: note = Description of Artificial Sequence: Synthetic coding sequence
  source 1..2376: mol_type = other DNA
atggccggctggatccaggcccagcagctgcagggagatgccctgcggcagatgcaggtgctgtatggccagcacttccccatcgaggtgcgccactacctggcccagtggattgagagccagccctgggatgccatcgacctggacaacccccaggaccgggcccaggccacccagctgctggagggcctggtgcaggagctgcagaagaaggccgagcaccaggtgggggaggatggcttcctgctgaagatcaagctgggccactacgccacccagctgcagaagacctatgaccgctgccccctggagctggtgcgctgcatccgccacatcctgtacaatgagcagaggctggtgcgggaggccaacaactgcagcagccctgctggcatcctggtggatgccatgagccagaagcacctgcagatcaaccagacctttgaggagctgcggctggtgacccaggacacagaaaatgagctgaagaagctgcagcagacccaggagtacttcatcatccagtaccaggagagcctgcgcatccaggcccagtttgcccagctggcccagctgagcccccaggagcggctgagccgggagacagccctgcagcagaagcaggtgtccctggaggcctggctgcagcgggaggcccagaccctgcagcagtacagagtggagctggccgagaagcaccagaagaccctgcagctgctgaggaagcagcagaccatcatcctggatgatgagctgatccagtggaagaggcggcagcagctggccggaaatggaggccccccagagggcagcctggatgtgctgcagagctggtgtgagaagctggccgagatcatctggcagaaccggcagcagatccggcgggcagagcacctgtgccagcagctgcccatccctggccctgtggaggagatgctggccgaggtgaatgccaccatcacagacatcatcagcgccctggtgaccagcaccttcatcatcgagaagcagcccccccaggtgctgaagacccagaccaagtttgctgccaccgtgcggctgctggtgggcggcaagctgaatgtgcacatgaaccccccccaggtgaaggccaccatcatcagcgagcagcaggccaagagcctgctgaagaatgaaaacaccagaaatgaatgttctggagagatcctgaacaactgctgcgtgatggagtaccaccaggccaccggcaccctgagcgcccacttcaggaacatgagcctgaagaggatcaagagagctgacagaagaggagctgagagcgtgacagaggagaagttcaccgtgctgtttgagagccagttctctgtgggcagcaatgagctggtgttccaggtgaagaccctgagcctgcctgtggtggtgattgtgcacggcagccaggaccacaatgccacagccaccgtgctgtgggacaatgcctttgctgagcccggccgggtgccctttgctgtgcctgacaaggtgctgtggccccagctgtgtgaggccctgaacatgaagttcaaggccgaggtgcagagcaacagaggcctgaccaaggagaacctggtgttcctggcccagaagctgttcaacaacagcagcagccacctggaggactacagcggcctgtctgtgtcctggagccagttcaaccgggagaacctgcccggctggaactacaccttctggcagtggtttgatggagtgatggaggtgctgaagaagcaccacaagccccactggaatgatggcggctttgtgaacaagcagcaggcccatgacctgctgatcaacaagccagatggcaccttcctgctgcgcttcagtgacagcgagattggaggcatcaccatcgcctggaagtttgacagccctgagaggaacctgtggaacctgaagcccttcaccacccgggacttcagcatccgcagcctggccgaccggctgggggacctgagctacctgatctacgtgtttcctgaccggcccaaggatgaggtgttcagcaagtactacacccctgtgctggccaaggctgtggatggctacgtgaagccccagatcaagcaggtggtgcctgagtttgtgaatgccagcgcagatgctgggggcagcagcgccacctacatggaccaggcccccagccctgctgtgtgcccccaggccccctacaacatgtacccccagaacccagaccacgtgctggaccaggatggagaatttgacctggatgagaccatggatgtggcccggcacgtggaggagctgctgcggcggcccatggacagcctggacagccggctgagccccccagctggcctcttcaccagcgcccggggcagcctgtcctag

SEQ ID NO: 21886 - DNA, 2298 bp, synthetic construct
  misc_feature 1..2298: note = Description of Artificial Sequence: Synthetic coding sequence
  source 1..2298: mol_type = other DNA
acagccatggccggctggatccaggcccagcagctgcagggagatgccctgcggcagatgcaggtgctgtatggccagcacttccccatcgaggtgcgccactacctggcccagtggattgagagccagccctgggatgccatcgacctggacaacccccaggaccgggcccaggccacccagctgctggagggcctggtgcaggagctgcagaagaaggccgagcaccaggtgggggaggatggcttcctgctgaagatcaagctgggccactacgccacccagctgcagaagacctatgaccgctgccccctggagctggtgcgctgcatccgccacatcctgtacaatgagcagaggctggtgcgggaggccaacaactgcagcagccctgctggcatcctggtggatgccatgagccagaagcacctgcagatcaaccagacctttgaggagctgcggctggtgacccaggacacagaaaatgagctgaagaagctgcagcagacccaggagtacttcatcatccagtaccaggagagcctgcgcatccaggcccagtttgcccagctggcccagctgagcccccaggagcggctgagccgggagacagccctgcagcagaagcaggtgtccctggaggcctggctgcagcgggaggcccagaccctgcagcagtacagagtggagctggccgagaagcaccagaagaccctgcagctgctgaggaagcagcagaccatcatcctggatgatgagctgatccagtggaagaggcggcagcagctggccggaaatggaggccccccagagggcagcctggatgtgctgcagagctggtgtgagaagctggccgagatcatctggcagaaccggcagcagatccggcgggcagagcacctgtgccagcagctgcccatccctggccctgtggaggagatgctggccgaggtgaatgccaccatcacagacatcatcagcgccctggtgaccagcaccttcatcatcgagaagcagcccccccaggtgctgaagacccagaccaagtttgctgccaccgtgcggctgctggtgggcggcaagctgaatgtgcacatgaaccccccccaggtgaaggccaccatcatcagcgagcagcaggccaagagcctgctgaagaatgaaaacaccagaaatgaatgttctggagagatcctgaacaactgctgcgtgatggagtaccaccaggccaccggcaccctgagcgcccacttcaggaacatgagcctgaagaggatcaagagagctgacagaagaggagctgagagcgtgacagaggagaagttcaccgtgctgtttgagagccagttctctgtgggcagcaatgagctggtgttccaggtgaagggccgggtgccctttgctgtgcctgacaaggtgctgtggccccagctgtgtgaggccctgaacatgaagttcaaggccgaggtgcagagcaacagaggcctgaccaaggagaacctggtgttcctggcccagaagctgttcaacaacagcagcagccacctggaggactacagcggcctgtctgtgtcctggagccagttcaaccgggagaacctgcccggctggaactacaccttctggcagtggtttgatggagtgatggaggtgctgaagaagcaccacaagccccactggaatgatggagccatcctgggctttgtgaacaagcagcaggcccatgacctgctgatcaacaagccagatggcaccttcctgctgcgcttcagtgacagcgagattggaggcatcaccatcgcctggaagtttgacagccctgagaggaacctgtggaacctgaagcccttcaccacccgggacttcagcatccgcagcctggccgaccggctgggggacctgagctacctgatctacgtgtttcctgaccggcccaaggatgaggtgttcagcaagtactacacccctgtgctggccaaggctgtggatggctacgtgaagccccagatcaagcaggtggtgcctgagtttgtgaatgccagcgcagatgctgggggcagcagcgccacctacatggaccaggcccccagccctgctgtgtgcccccaggccccctacaacatgtacccccagaacccagaccacgtgctggaccaggatggagaatttgacctggatgagaccatggatgtggcccggcacgtggaggagctgctgcggcggcccatggacagcctggacagccggctgagccccccagctggcctcttcaccagcgcccggggcagcctgtcctag

SEQ ID NO: 21887 - DNA, 2295 bp, synthetic construct
  misc_feature 1..2295: note = Description of Artificial Sequence: Synthetic coding sequence
  source 1..2295: mol_type = other DNA
atggccggctggatccaggcccagcagctgcagggagatgccctgcggcagatgcaggtgctgtatggccagcacttccccatcgaggtgcgccactacctggcccagtggattgagagccagccctgggatgccatcgacctggacaacccccaggaccgggcccaggccacccagctgctggagggcctggtgcaggagctgcagaagaaggccgagcaccaggtgggggaggatggcttcctgctgaagatcaagctgggccactacgccacccagctgcagtgcagcagccctgctggcatcctggtggatgccatgagccagaagcacctgcagatcaaccagacctttgaggagctgcggctggtgacccaggacacagaaaatgagctgaagaagctgcagcagacccaggagtacttcatcatccagtaccaggagagcctgcgcatccaggcccagtttgcccagctggcccagctgagcccccaggagcggctgagccgggagacagccctgcagcagaagcaggtgtccctggaggcctggctgcagcgggaggcccagaccctgcagcagtacagagtggagctggccgagaagcaccagaagaccctgcagctgctgaggaagcagcagaccatcatcctggatgatgagctgatccagtggaagaggcggcagcagctggccggaaatggaggccccccagagggcagcctggatgtgctgcagagctggtgtgagaagctggccgagatcatctggcagaaccggcagcagatccggcgggcagagcacctgtgccagcagctgcccatccctggccctgtggaggagatgctggccgaggtgaatgccaccatcacagacatcatcagcgccctggtgaccagcaccttcatcatcgagaagcagcccccccaggtgctgaagacccagaccaagtttgctgccaccgtgcggctgctggtgggcggcaagctgaatgtgcacatgaaccccccccaggtgaaggccaccatcatcagcgagcagcaggccaagagcctgctgaagaatgaaaacaccagaaatgaatgttctggagagatcctgaacaactgctgcgtgatggagtaccaccaggccaccggcaccctgagcgcccacttcaggaacatgagcctgaagaggatcaagagagctgacagaagaggagctgagagcgtgacagaggagaagttcaccgtgctgtttgagagccagttctctgtgggcagcaatgagctggtgttccaggtgaagaccctgagcctgcctgtggtggtgattgtgcacggcagccaggaccacaatgccacagccaccgtgctgtgggacaatgcctttgctgagcccggccgggtgccctttgctgtgcctgacaaggtgctgtggccccagctgtgtgaggccctgaacatgaagttcaaggccgaggtgcagagcaacagaggcctgaccaaggagaacctggtgttcctggcccagaagctgttcaacaacagcagcagccacctggaggactacagcggcctgtctgtgtcctggagccagttcaaccgggagaacctgcccggctggaactacaccttctggcagtggtttgatggagtgatggaggtgctgaagaagcaccacaagccccactggaatgatggagccatcctgggctttgtgaacaagcagcaggcccatgacctgctgatcaacaagccagatggcaccttcctgctgcgcttcagtgacagcgagatcggcggcatcaccatcgcctggaagtttgacagccctgagaggaacctgtggaacctgaagcccttcaccacccgggacttcagcatccgcagcctggccgaccggctgggggacctgagctacctgatctacgtgtttcctgaccggcccaaggatgaggtgttcagcaagtactacacccctgtgctggccaaggctgtggatggctacgtgaagccccagatcaagcaggtggtgcctgagtttgtgaatgccagcgcagatgctgggggcagcagcgccacctacatggaccaggcccccagccctgctgtgtgcccccaggccccctacaacatgtacccccagaacccagaccacgtgctggaccaggatggagaatttgacctggatgagaccatggatgtggcccggcacgtggaggagctgctgcggcggcccatggacagcctggacagccggctgagccccccagctggcctcttcaccagcgcccggggcagcctgtcctag

SEQ ID NO: 21888 - DNA, 2295 bp, synthetic construct; identical to SEQ ID NO: 21887
  misc_feature 1..2295: note = Description of Artificial Sequence: Synthetic coding sequence
  source 1..2295: mol_type = other DNA

SEQ ID NO: 21889 - DNA, 2364 bp, synthetic construct
  misc_feature 1..2364: note = Description of Artificial Sequence: Synthetic coding sequence
  source 1..2364: mol_type = other DNA
atggctgtgtggatccaggcccagcagctgcagggcgaggccctgcaccagatgcaggccctgtatggccagcacttccccatcgaggtgcgccactacctgagccagtggattgagagccaggcctgggacagcgtggacctggacaacccccaggagaacatcaaggccacccagctgctggagggcctggtgcaggagctgcagaagaaggccgagcaccaggtgggggaggatggcttcctgctgaagatcaagctgggccactacgccacccagctgcagaacacctatgaccgctgccccatggagctggtgcgctgcatccgccacatcctgtacaatgagcagaggctggtgcgggaggccaacaacggcagcagccctgctggcagcctggctgatgccatgagccagaagcacctgcagatcaaccagacctttgaggagctgcggctggtgacccaggacacagaaaatgagctgaagaagctgcagcagacccaggagtacttcatcatccagtaccaggagagcctgcgcatccaggcccagtttggccccctggcccagctgagcccccaggagcggctgagccgggagacagccctgcagcagaagcaggtgtccctggaggcctggctgcagcgggaggcccagaccctgcagcagtacagagtggagctggccgagaagcaccagaagaccctgcagctgctgaggaagcagcagaccatcatcctggatgatgagctgatccagtggaagaggcggcagcagctggccggaaatggaggccccccagagggcagcctggatgtgctgcagagctggtgtgagaagctggccgagatcatctggcagaaccggcagcagatccggcgggcagagcacctgtgccagcagctgcccatccctggccctgtggaggagatgctggccgaggtgaatgccaccatcacagacatcatcagcgccctggtgaccagcaccttcatcatcgagaagcagcccccccaggtgctgaagacccagaccaagtttgctgccaccgtgcggctgctggtgggcggcaagctgaatgtgcacatgaaccccccccaggtgaaggccaccatcatcagcgagcagcaggccaagagcctgctgaagaatgaaaacaccagaaatgactacagcggggagatcctgaacaactgctgcgtgatggagtaccaccaggccaccggcaccctgagcgcccacttcaggaacatgagcctgaagaggatcaagagaagtgacagaagaggagctgagagcgtgacagaggagaagttcaccatcctgtttgagagccagttctctgtgggcggcaatgagctggtgttccaggtgaagaccctgagcctgcctgtggtggtgattgtgcacggcagccaggacaacaatgccacagccaccgtgctgtgggacaatgcctttgctgagcccggccgggtgccctttgctgtgcctgacaaggtgctgtggccccagctgtgtgaggccctgaacatgaagttcaaggccgaggtgcagagcaacagaggcctgaccaaggagaacctggtgttcctggcccagaagctgttcaacaacagcagcagccacctggaggactacagcggcctgtctgtgtcctggagccagttcaaccgggagaacctgcccggcaggaactacaccttctggcagtggtttgatggagtgatggaggtgctgaagaagcacctgaagccccactggaatgatggagccatcctgggctttgtgaacaagcagcaggcccatgacctgctgatcaacaagccagatggcaccttcctgctgcgcttcagtgacagcgagatcggcggcatcaccatcgcctggaagtttgacagccaggagaggatgttctggaacctgatgcccttcaccacccgggacttcagcatccgcagcctggccgaccggctgggggacctgaactacctgatctacgtgtttcctgaccggcccaaggatgaggtgtacagcaagtactacacccctgtgccctgtgagagcgccacagccaaggctgtggatggctacgtgaagccccagatcaagcaggtggtgcctgagtttgtgaatgccagcgcagatgctgggggcggcagcgccacctacatggaccaggcccccagccctgctgtgtgcccccaggcccactacaacatgtacccccagaacccagattctgtgctggacacagatggagactttgacctggaggacaccatggatgtggccaggagagtggaggagctgctgggccggcccatggacagccagtggatcccccacgcccagagctag

SEQ ID NO: 21890 - DNA, 471 bp, synthetic construct
  misc_feature 1..471: note = Description of Artificial Sequence: Synthetic coding sequence
  source 1..471: mol_type = other DNA
atggctgtgtggatccaggcccagcagctgcagggcgaggccctgcaccagatgcaggccctgtatggccagcacttccccatcgaggtgcgccactacctgagccagtggattgagagccaggcctgggacagcgtggacctggacaacccccaggagaacatcaaggccacccagctgctggagggcctggtgcaggagctgcagaagaaggccgagcaccaggtgggggaggatggcttcctgctgaagatcaagctgggccactacgccacccagctgcagaacacctatgaccgctgccccatggagctggtgcgctgcatccgccacatcctgtacaatgagcagaggctggtgcgggaggccaacaacggcagcagccctgctggcagcctggctgatgccatgagccagaagcacctgcagatcaaccagacctttgaggagctgcggctggtgacccagtag

SEQ ID NO: 21891 - DNA, 534 bp, synthetic construct
  misc_feature 1..534: note = Description of Artificial Sequence: Synthetic coding sequence
  source 1..534: mol_type = other DNA
atgccccaggccttcctgctgggcagcatccacgagcctgctggggccctgatggagccccagccctgccccggcagcctggccgagagcttcctggaggaggagctgcggctgaatgctgagctgagccagctgcagttcagcgagcctgtgggcatcatctacaaccctgtggagtatgcctgggagccccacaggaactacgtgacccgctactgccagggccccaaggaggtgctcttcctgggcatgaaccctggccccttcggcatggcccagacaggagtgccctttggagaggtgtccatggtgcgggactggctgggcatcgtgggccctgtgctgaccccaccccaggagcaccccaagaggcctgtgctgggcctggagtgcccccagagcgagggcccccggcagagcatgggccacgagatcaagtctgagctgctgatgggcggctgctcctggatccggggcaagatccagtgtgacagagtgcaggtgagaagacctggcttcagcagccagctgtag

SEQ ID NO: 21892 - DNA, 813 bp, synthetic construct
  misc_feature 1..813: note = Description of Artificial Sequence: Synthetic coding sequence
  source 1..813: mol_type = other DNA
atgccccaggccttcctgctgggcagcatccacgagcctgctggggccctgatggagccccagccctgccccggcagcctggccgagagcttcctggaggaggagctgcggctgaatgctgagctgagccagctgcagttcagcgagcctgtgggcatcatctacaaccctgtggagtatgcctgggagccccacaggaactacgtgacccgctactgccagggccccaaggaggtgctcttcctgggcatgaaccctggccccttcggcatggcccagacaggagtgccctttggagaggtgtccatggtgcgggactggctgggcatcgtgggccctgtgctgaccccaccccaggagcaccccaagaggcctgtgctgggcctggagtgcccccagagcgaggtgtctggggcccgcttctggggcttcttcaggaacctgtgtggccagcctgaggtgttcttccaccactgctttgtgcacaacctgtgccccctgctcttcctggcccccagcggcaggaacctgaccccagctgagctgcctgccaagcagcgggagcagctgctgggcatctgtgatgctgccctgtgccggcaggtgcagctgctgggcgtgcggctggtggtgggcgtgggccgcctggccgagcagagggcccggcgggccctggccggcctgatgcctgaggtgcaggtggagggcctgctgcaccccagccccaggaacccccaggccaacaagggctgggaggccgtggccaaggagcggctgaatgagctgggcctgctgcccctgctgctgaagtag

SEQ ID NO: 21893 - DNA, 813 bp, synthetic construct; identical to SEQ ID NO: 21892
  misc_feature 1..813: note = Description of Artificial Sequence: Synthetic coding sequence
  source 1..813: mol_type = other DNA

SEQ ID NO: 21894 - DNA, 249 bp, synthetic construct
  misc_feature 1..249: note = Description of Artificial Sequence: Synthetic coding sequence
  source 1..249: mol_type = other DNA
atgccccaggccttcctgctgggcagcatccacgagcctgctggggccctgatggagccccagccctgccccggcagcctggccgagagcttcctggaggaggagctgcggctgaatgctgagctgagccagctgcagttcagcgagcctgtgggcatcatctacaaccctgtggagtatgcctgggagccccacaggaactacgtgacccgctactgccagggccccaaggaggtgctcttcctgtag

SEQ ID NO: 21895 - DNA, 519 bp, synthetic construct
  misc_feature 1..519: note = Description of Artificial Sequence: Synthetic coding sequence
  source 1..519: mol_type = other DNA
atgccccaggccttcctgctgggcagcatccacgagcctgctggggccctgatggagccccagccctgccccggcagcctggccgagagcttcctggaggaggagctgcggctgaatgctgagctgagccagctgcagttcagcgagcctgtgggcatcatctacaaccctgtggagtatgcctgggagccccacaggaactacgtgacccgctactgccagggccccaaggaggtgctcttcctgggcatgaaccctggccccttcggcatggcccagacaggagtgccctttggagaggtgtccatggtgcgggactggctgggcatcgtgggccctgtgctgaccccaccccaggagcaccccaagaggcctgtgctgggcctggagtgcccccagagcgaggtgtctggggcccgcttctggggcttcttcaggaacctgtgtggccagcctgaggtgttcttccaccactgctttgtgcacaacctgtgccccctgctcttcctggccccctag

SEQ ID NO: 21896 - DNA, 291 bp, synthetic construct
  misc_feature 1..291: note = Description of Artificial Sequence: Synthetic coding sequence
  source 1..291: mol_type = other DNA
atgccccaggccttcctgctgggcagcatccacgagcctgctggggccctgatggagccccagccctgccccggcagcctggccgagagcttcctggaggaggagctgcggctgaatgctgagctgagccagctgcagttcagcgagcctgtgggcatcatctacaaccctgtggagtatgcctgggagccccacaggaactacgtgacccgctactgccagggccccaaggaggtgctcttcctgggcatgaaccctggccccttcggcatggcccagacaggagtgtag

SEQ ID NO: 21897 - DNA, 273 bp, synthetic construct
  misc_feature 1..273: note = Description of Artificial Sequence: Synthetic coding sequence
  source 1..273: mol_type = other DNA
atgccccaggccttcctgctgggcagcatccacgagcctgctggggccctgatggagccccagccctgccccggcagcctggccgagagcttcctggaggaggagctgcggctgaatgctgagctgagccagctgcagttcagcgagcctgtgggcatcatctacaaccctgtggagtatgcctgggagccccacaggaactacgtgacccgctactgccagggccccaaggaggtgctcttcctgggcatgaaccctggcccctttggatag

SEQ ID NO: 21898 - DNA, 534 bp, synthetic construct; identical to SEQ ID NO: 21891
  misc_feature 1..534: note = Description of Artificial Sequence: Synthetic coding sequence
  source 1..534: mol_type = other DNA

SEQ ID NO: 21899 - DNA, 327 bp, synthetic construct
  misc_feature 1..327: note = Description of Artificial Sequence: Synthetic coding sequence
  source 1..327: mol_type = other DNA
atgccccaggccttcctgctgggcagcatccacgagcctgctggggccctgatggagccccagccctgccccggcagcctggccgagagcttcctggaggaggagctgcggctgaatgctgagctgagccagctgcagttcagcgagcctgtgggcatcatctacaaccctgtggagtatgcctgggagccccacaggaactacgtgacccgctactgccagggccccaaggaggtgctcttcctgggcatgaaccctggccccttcggcatggcccagacaggagtgccctttggagaggtgtccatggtgcgggactggctgtag

SEQ ID NO: 21900 - DNA, 813 bp, synthetic construct; identical to SEQ ID NO: 21892
  misc_feature 1..813: note = Description of Artificial Sequence: Synthetic coding sequence
  source 1..813: mol_type = other DNA

SEQ ID NO: 21901 - DNA, 534 bp, synthetic construct; identical to SEQ ID NO: 21891
  misc_feature 1..534: note = Description of Artificial Sequence: Synthetic coding sequence
  source 1..534: mol_type = other DNA

SEQ ID NO: 21902 - DNA, 534 bp, synthetic construct; identical to SEQ ID NO: 21891
  misc_feature 1..534: note = Description of Artificial Sequence: Synthetic coding sequence
  source 1..534: mol_type = other DNA

SEQ ID NO: 21903 - DNA, 1170 bp, synthetic construct
  misc_feature 1..1170: note = Description of Artificial Sequence: Synthetic coding sequence
  source 1..1170: mol_type = other DNA
atggccgagccagaccccagccaccccctggagacccaggccggcaaggtgcaggaggcccaggacagcgacagcgacagcgagggcggggccgccggcggggaggccgacatggacttcctgaggaacctcttcagccagaccctgagcctgggcagccagaaggagcggctgctggatgagctgaccctggagggcgtggcccgctacatgcagagcgagcgctgcagaagagtcatctgcctggtgggcgccggcatcagcaccagcgctggcatcccagacttccgcagccccagcacaggcctgtatgacaacctggagaagtaccacctgccctacccagaggccatctttgagatctcctacttcaagaagcaccctgagcccttctttgccctggccaaggagctgtacccaggccagttcaagcccaccatctgccactacttcatgaggctgctgaaggacaagggcctgctgctgcgctgctacacccagaacatcgacaccctggagagaattgctggcctggagcaggaggacctggtggaggcccacggcaccttctacaccagccactgtgtgtctgccagctgcagacatgagtaccccctgtcctggatgaaggagaagatcttcagcgaggtgacccccaagtgtgaggactgccagagcctggtgaagccagacatcgtgttctttggagagagcctgcctgcccgcttcttcagctgcatgcagagcgacttcctgaaggtggacctgctgctggtgatgggcaccagcctgcaggtgcagccctttgccagcctcatcagcaaggcccccctgagcaccccccggctgctgatcaacaaggagaaggccggccagagcgaccccttcctgggcatgatcatgggcctgggcggcggcatggactttgacagcaagaaggcctacagagatgtggcctggctgggagaatgtgaccagggctgcctggccctggccgagctgctgggctggaagaaggagctggaggacctggtgcggcgggagcacgccagcattgatgcccagagcggggccggcgtgcccaaccccagcaccagcgccagccccaagaagagccccccaccagccaaggatgaggcccggaccacagagcgggagaagccccagtag

SEQ ID NO: 21904 - DNA, 816 bp, synthetic construct
  misc_feature 1..816: note = Description of Artificial Sequence: Synthetic coding sequence
  source 1..816: mol_type = other DNA
atggccgagccagaccccagccaccccctggagacccaggccggcaaggtgcaggaggcccaggacagcgacagcgacagcgagggcggggccgccggcggggaggccgacatggacttcctgaggaacctcttcagccagaccctgagcctgggcagccagaaggagcggctgctggatgagctgaccctggagggcgtggcccgctacatgcagagcgagcgctgcagaagagtcatctgcctggtgggcgccggcatcagcaccagcgctggcatcccagacttccgcagccccagcacaggcctgtatgacaacctggagaagtaccacctgccctacccagaggccatctttgagatctcctacttcaagaagcaccctgagcccttctttgccctggccaaggagctgtacccaggccagttcaagcccaccatctgccactacttcatgaggctgctgaaggacaagggcctgctgctgcgctgctacacccagaacatcgacaccctggagagaattgctggcctggagcaggaggacctggtggaggcccacggcaccttctacaccagccactgtgtgtctgccagctgcagacatgagtaccccctgtcctggatgaaggagaagatcttcagcgaggtgacccccaagtgtgaggactgccagagcctggtgaagccagacatcgtgttctttggagagagcctgcctgcccgcttcttcagctgcatgcagagcgacttcctgaaggtggacctgctgctggtgatgggcaccagcctgcagggccggggcctggccggctag

SEQ ID NO: 21905 - DNA, 393 bp, synthetic construct
  misc_feature 1..393: note = Description of Artificial Sequence: Synthetic coding sequence
  source 1..393: mol_type = other DNA
atggacttcctgaggaacctcttcagccagaccctgagcctgggcagccagaaggagcggctgctggatgagctgaccctggagggcgtggcccgctacatgcagagcgagcgctgccggcgggtcatctgcctggtgggcgccggcatcagcaccagcgctggcatcccagacttccgcagccccagcacaggcctgtatgacaacctggagaagtaccacctgccctacccagaggccatctttgagatctcctacttcaagaagcaccctgagcccttctttgccctggccaaggagctgtacccaggccagttcaagcccaccatctgccactacttcatgaggctgctgaaggacaagggcctgctgctgcgctgctacacccagtag

SEQ ID NO: 21906 - DNA, 1059 bp, synthetic construct
  misc_feature 1..1059: note = Description of Artificial Sequence: Synthetic coding sequence
  source 1..1059: mol_type = other DNA
atggacttcctgaggaacctcttcagccagaccctgagcctgggcagccagaaggagcggctgctggatgagctgaccctggagggcgtggcccgctacatgcagagcgagcgctgccggcgggtcatctgcctggtgggcgccggcatcagcaccagcgctggcatcccagacttccgcagccccagcacaggcctgtatgacaacctggagaagtaccacctgccctacccagaggccatctttgagatctcctacttcaagaagcaccctgagcccttctttgccctggccaaggagctgtacccaggccagttcaagcccaccatctgccactacttcatgaggctgctgaaggacaagggcctgctgctgcgctgctacacccagaacatcgacaccctggagagaattgctggcctggagcaggaggacctggtggaggcccacggcaccttctacaccagccactgtgtgtctgccagctgcagacatgagtaccccctgtcctggatgaaggagaagatcttcagcgaggtgacccccaagtgtgaggactgccagagcctggtgaagccagacatcgtgttcttcggggagagcctgcctgcccgcttcttcagctgcatgcagagcgacttcctgaaggtggacctgctgctggtgatgggcaccagcctgcaggtgcagccctttgccagcctcatcagcaaggcccccctgagcaccccccggctgctgatcaacaaggagaaggccggccagagcgaccccttcctgggcatgatcatgggcctgggcggcggcatggactttgacagcaagaaggcctacagagatgtggcctggctgggggagtgtgaccagggctgcctggccctggccgagctgctgggctggaagaaggagctggaggacctggtgagaagagagcacgccagcattgatgcccagagcggggccggcgtgcccaaccccagcaccagcgccagccccaagaagagccccccaccagccaaggatgaggcccggaccacagagcgggagaagccccagtag

SEQ ID NO: 21907 - DNA, 510 bp, synthetic construct
  misc_feature 1..510: note = Description of Artificial Sequence: Synthetic coding sequence
  source 1..510: mol_type = other DNA
atggacttcctgaggaacctcttcagccagaccctgagcctgggcagccagaaggagcggctgctggatgagctgaccctggagggcgtggcccgctacatgcagagcgagcgctgccggcgggtcatctgcctggtgggcgccggcatcagcaccagcgctggcatcccagacttccgcagccccagcacaggcctgtatgacaacctggagaagtaccacctgccctacccagaggccatctttgagatctcctacttcaagaagcaccctgagcccttctttgccctggccaaggagctgtacccaggccagttcaagcccaccatctgccactacttcatgaggctgctgaaggacaagggcctgctgctgcgctgctacacccagaacatcgacaccctggagagaattgctggcctggagcaggaggacctggtggaggcccacggcaccttctacaccagccactgtgtgtctgccagctgcagacatgagtaccccctgtag

SEQ ID NO: 21908 - DNA, 714 bp, synthetic construct
  misc_feature 1..714: note = Description of Artificial Sequence: Synthetic coding sequence
  source 1..714: mol_type = other DNA
atggacttcctgaggaacctcttcagccagaccctgagcctgggcagccagaaggagcggctgctggatgagctgaccctggagggcgtggcccgctacatgcagagcgagcgctgccggcgggtcatctgcctggtgggcgccggcatcagcaccagcgctggcatcccagacttccgcagccccagcacaggcctgtatgacaacctggagaagtaccacctgccctacccagaggccatctttgagatctcctacttcaagaagcaccctgagcccttctttgccctggccaaggagctgtacccaggccagttcaagcccaccatctgccactacttcatgaggctgctgaaggacaagggcctgctgctgcgctgctacacccagaacatcgacaccctggagagaattgctggcctggagcaggaggacctggtggaggcccacggcaccttctacaccagccactgtgtgtctgccagctgcagacatgagtaccccctgtcctggatgaaggagaagatcttcagcgaggtgacccccaagtgtgaggactgccagagcctggtgaagccagacatcgtgttcttcggggagagcctgcctgcccgcttcttcagctgcatgcagagcgacttcctgaaggtggacctgctgctggtgatgggcaccagcctgcaggtgcagccctttgccagcctcatctcctag

SEQ ID NO: 21909 - DNA, 237 bp, synthetic construct
  misc_feature 1..237: note = Description of Artificial Sequence: Synthetic coding sequence
  source 1..237: mol_type = other DNA
atggacttcctgaggaacctcttcagccagaccctgagcctgggcagccagaaggagcggctgctggatgagctgaccctggagggcgtggcccgctacatgcagagcgagcgctgccggcgggtcatctgcctggtgggcgccggcatcagcaccagcgctggcatcccagacttccgcagccccagcacaggcctgtatgacaacctggagaagtaccacctgccctacccctag

SEQ ID NO: 21910 - DNA, 222 bp, synthetic construct
  misc_feature 1..222: note = Description of Artificial Sequence: Synthetic coding sequence
  source 1..222: mol_type = other DNA
atggacttcctgaggaacctcttcagccagaccctgagcctgggcagccagaaggagcggctgctggatgagctgaccctggagggcgtggcccgctacatgcagagcgagcgctgccggcgggtcatctgcctggtgggcgccggcatcagcaccagcgctggcatcccagacttccgcagccccagcacaggcctgtatgacaacctggagaagtactag

SEQ ID NO: 21911 - DNA, 1170 bp, synthetic construct
  misc_feature 1..1170: note = Description of Artificial Sequence: Synthetic coding sequence
  source 1..1170: mol_type = other DNA
atgtctgatgaagctgaggacagcgacagcgacagcgagggcggcgctgctggaggagaggccgacatggacttcctgaggaacctcttcagccagaccctgagcctgggcagccagaaggagcggctgctggatgagctgaccctggagggcgtggcccgctacatgcagagcgagcgctgccggcgggtcatctgcctggtgggcgccggcatcagcaccagcgctggcatcccagacttccgcagccccagcacaggcctgtatgacaacctggagaagtaccacctgccctacccagaggccatctttgagatctcctacttcaagaagcaccctgagcccttctttgccctggccaaggagctgtacccaggccagttcaagcccaccatctgccactacttcatgaggctgctgaaggacaagggcctgctgctgcgctgctacacccagaacatcgacaccctggagagaattgctggcctggagcaggaggacctggtggaggcccacggcaccttctacaccagccactgtgtgtctgccagctgcagacatgagtaccccctgtcctggatgaaggagaagatcttcagcgaggtgacccccaagtgtgaggactgccagagcctggtgaagccagacatcgtgttcttcggggagagcctgcctgcccgcttcttcagctgcatgcagagcgacttcctgaaggtggacctgctgctggtgatgggcaccagcctgcaggtgcagccctttgccagcctcatcagcaaggcccccctgagcaccccccggctgctgatcaacaaggagaaggccggccagagcgaccccttcctgggcatgatcatgggcctgggcggcggcatggactttgacagcaagaaggcctacagagatgtggcctggctgggggagtgtgaccagggctgcctggccctggccgagctgctgggctggaagaaggagctggaggacctggtgagaagagagcacgccagcattgatgcccagggcggcggcggcccccagccccagcacttctccttcccccaggaggtgcctgccacctgccagggccggggccaggacaaccgggagggggagacccctgtgacagctgccagccccaggagagatgctgagctgctgcgggacagctag

SEQ ID NO: 21912 - DNA, 1227 bp, synthetic construct
  misc_feature 1..1227: note = Description of Artificial Sequence: Synthetic coding sequence
  source 1..1227: mol_type = other DNA
atggctgaaaatggagacaatgagaagatggccgccctggaggccaagatctgccaccagatcgagtactactttggagacttcaacctgccccgggacaagttcctgaaggagcagatcaagctggatgagggctgggtgcccctggagatcatgatcaagttcaaccggctgaaccggctgaccacagacttcaacgtcatcgtggaggccctgagcaagagcaaggccgagctgatggagatcagcgaggacaagaccaagatccgccgcagccccagcaagcccctgcctgaggtgacagatgagtacaagaatgatgtgaagaacagatctgtgtacatcaagggcttccccacagatgccaccctggatgacatcaaggagtggctggaggacaagggccaggtgctgaacatccagatgaggaggaccctgcacaaggccttcaagggcagcatctttgtggtgtttgacagcattgaaagtgccaagaagtttgtggagaccccaggccagaagtacaaggagacagacctgctgatcctcttcaaggatgactactttgccaagaagaatgaggagaggaagcagaacaaggtggaggccaagctgcgggccaagcaggagcaggaggccaagcagaagctggaggaggatgctgagatgaagagcctggaggagaagattggctgcctgctgaagttcagcggggacctggatgaccagacctgccgggaggacctgcacatcctcttcagcaaccacggggagatcaagtggattgactttgtgcggggggccaaggagggcatcatcctcttcaaggagaaggccaaggaggccctgggcaaggccaaggatgccaacaatggaaacctgcagctgaggaacaaggaggtgacctgggaggtgctggagggggaggtggagaaggaggccctgaagaagatcatcgaggaccagcaggagagcctgaacaagtggaagagcaagggccgccgcttcaagggcaaaggaaaaggaaacaaggccgcccagcccggcagcggcaagggcaaggtgcagttccagggcaagaagaccaagtttgccagtgatgatgaacatgatgaacatgatgaaaatggagccactggacctgtgaagagggcccgggaggagacagacaaggaggagcccgccagcaagcagcagaagacagaaaatggagctggggaccagtag

SEQ ID NO: 21913 - DNA, 1086 bp, synthetic construct
  misc_feature 1..1086: note = Description of Artificial Sequence: Synthetic coding sequence
  source 1..1086: mol_type = other DNA
atggctgaaaatggagacaatgagaagatggccgccctggaggccaagatctgccaccagatcgagtactactttggagacttcaacctgccccgggacaagttcctgaaggagcagatcaagctggatgagggctgggtgcccctggagatcatgatcaagttcaaccggctgaaccggctgaccacagacttcaacgtcatcgtggaggccctgagcaagagcaaggccgagctgatggagatcagcgaggacaagaccaagatccgccgcagccccagcaagcccctgcctgaggtgacagatgagtacaagaatgatgtgaagaacagatctgtgtacatcaagggcttccccacagatgccaccctggatgacatcaaggagtggctggaggacaagggccaggtgctgaacatccagatgaggaggaccctgcacaaggccttcaagggcagcatctttgtggtgtttgacagcattgaaagtgccaagaagtttgtggagaccccaggccagaagtacaaggagacagacctgctgatcctcttcaaggatgactactttgccaagaagaatgaggagaggaagcagaacaaggtggaggccaagctgcgggccaagcaggagcaggaggccaagcagaagctggaggaggatgctgagatgaagagcctggaggagaagattggctgcctgctgaagttcagcggggacctggatgaccagacctgccgggaggacctgcacatcctcttcagcaaccacggggagatcaagtggattgactttgtgcggggggccaaggagggcatcatcctcttcaaggagaaggccaaggaggccctgggcaaggccaaggatgccaacaatggaaacctgcagctgaggaacaaggaggtgacctgggaggtgctggagggggaggtggagaaggaggccctgaagaagatcatcgaggaccagcaggagagcctgaacaagtggaagagcaagggccctgtgaagagggcccgggaggagacagacaaggaggagcccgccagcaagcagcagaagacagaaaatggagctggggaccagtag

SEQ ID NO: 21914 - DNA, 1227 bp, synthetic construct; identical to SEQ ID NO: 21912
  misc_feature 1..1227: note = Description of Artificial Sequence: Synthetic coding sequence
  source 1..1227: mol_type = other DNA

SEQ ID NO: 21915 - DNA, 405 bp, synthetic construct
  misc_feature 1..405: note = Description of Artificial Sequence: Synthetic coding sequence
  source 1..405: mol_type = other DNA
atggctgaaaatggagacaatgagaagatggccgccctggaggccaagatctgccaccagatcgagtactactttggagacttcaacctgccccgggacaagttcctgaaggagcagatcaagctggatgagggctgggtgcccctggagatcatgatcaagttcaaccggctgaaccggctgaccacagacttcaacgtcatcgtggaggccctgagcaagagcaaggccgagctgatggagatcagcgaggacaagaccaagatccgccgcagccccagcaagcccctgcctgaggtgacagatgagtacaagaatgatgtgaagaacagatctgtgtacatcagccaccctgtggcccacgtgggcgtgcagtggtgtgaccacggccccctgcagagctag

SEQ ID NO: 21916 - DNA, 363 bp, synthetic construct
  misc_feature 1..363: note = Description of Artificial Sequence: Synthetic coding sequence
  source 1..363: mol_type = other DNA
atgatcaagttcaaccggctgaaccggctgaccacagacttcaacgtgattgtggaggccctgagcaagagcaaggccgagctgatggagatcagcgaggacaagaccaagatcagaagaagccccagcaagcccctgcctgaggtgacagatgagtacaagaatgatgtgaagaacagatctgtgtacatcaagggcttccccacagatgccaccctggatgacatcaaggagtggctggaggacaagggccaggtgctgaacatccagatgaggaggaccctgcacaaggccttcaagggcagcatctttgtggtgtttgacagcattgagagcgccaagaagtttgtggagaccccctag

SEQ ID NO: 21917 - DNA, 555 bp, synthetic construct
  misc_feature 1..555: note = Description of Artificial Sequence: Synthetic coding sequence
  source 1..555: mol_type = other DNA
atggctgaaaatggagacaatgagaagatggccgccctggaggccaagatctgccaccagatcgagtactactttggagacttcaacctgccccgggacaagttcctgaaggagcagatcaagctggatgagggctgggtgcccctggagatcatgatcaagttcaaccggctgaaccggctgaccacagacttcaacgtcatcgtggaggccctgagcaagagcaaggccgagctgatggagatcagcgaggacaagaccaagatccgccgcagccccagcaagcccctgcctgaggtgacagatgagtacaagaatgatgtgaagaacagatctgtgtacatcaagggcttccccacagatgccaccctggatgacatcaaggagtggctggaggacaagggccaggtgctgaacatccagatgaggaggaccctgcacaaggccttcaagggcagcatctttgtggtgtttgacagcattgaaagtgccaagaagtttgtggagaccccaggccagaagtacaaggagacagacctgctgatcctcttctag

SEQ ID NO: 21918 - DNA, 252 bp, synthetic construct
  misc_feature 1..252: note = Description of Artificial Sequence: Synthetic coding sequence
  source 1..252: mol_type = other DNA
atgaggaggaccctgcacaaggccttcaagggcagcatctttgtggtgtttgacagcattgagagcgccaagaagtttgtggagaccccaggccagaagtacaaggagacagacctgctgatcctcttcaaggatgactactttgccaagaagaatgaggagaggaagcagaacaaggtggaggccaagctgcgggccaagcaggagcaggaggccaagcagaagctggaggaggatgctgagatgaagtag

SEQ ID NO: 21919 - DNA, 5505 bp, synthetic construct
  misc_feature 1..5505: note = Description of Artificial Sequence: Synthetic coding sequence
  source 1..5505: mol_type = other DNA
atgaagctgtctgtgaatgaggcccagctgggcttctacctgggcagcctgagccacctgagcgcctgccccggcatcgaccccaggagcagcgaggaccagcctgagagcctgaagacaggccagatgatggatgaaagtgatgaggacttcaaggagctgtgtgccagcttcttccagagggtgaagaagcacggcatcaaggaggtgtctggagagaggaagacccagaaggccgccagcaatggcacccagatccgcagcaagctgaagaggaccaagcagacagccaccaagaccaagaccctgcagggccctgctgagaagaagcccccatctggcagccaggcccccaggaccaagaagcagagggtgaccaagtggcaggccagcgagcccgcccacagcgtgaatggagagggcggcgtgctggccagcgccccagacccccctgtgctgcgggagacagcccagaacacccagacaggcaaccagcaggagcccagccccaacctgagccgggagaagaccagagaaaatgtgcccaacagcgacagccagcccccacccagctgcctgaccacagctgtgcccagccccagcaagcccaggacagcccagctggtgctgcagaggatgcagcagttcaagagagctgaccctgagcggctgcggcatgccagcgaggagtgcagcctggaggccgcccgggaggagaatgtgcccaaggacccccaggaggagatgatggctggaaatgtgtatggcctgggccccccagcccctgagagtgatgctgctgtggccctgaccctgcagcaggagtttgcccgggtgggcgccagcgcccatgatgacagcctggaggagaagggcctcttcttctgccagatctgccagaagaacctgagcgccatgaatgtgacccggcgggagcagcacgtgaaccgctgcctggatgaggccgagaagaccctgcggcccagcgtgccccagatcccagaatgtcccatctgtgggaagcccttcctgaccctgaagagcaggaccagccacctgaagcagtgtgctgtgaagatggaggtgggcccccagctgctgctgcaggccgtgcggctgcagacagcccagcctgagggcagcagcagcccccccatgttctccttcagtgaccacagccggggcctgaagaggcggggccccaccagcaagaaggagcccaggaagaggaggaaggtggatgaggcccccagcgaggacctgctggtggccatggccctgagccgctctgagatggagcccggggctgctgtgcctgccctgcggctggagagcgccttcagcgagcgcatccggcctgaggccgagaacaagagcaggaagaagaagccccctgtgagcccccccctgctgctggtgcaggacagcgagaccaccggccggcagatcgaggacagagtggccctgctgctgtctgaggaggtggagctgagcagcaccccacccctgcctgccagccgcatcctgaaggagggctgggagcgggccggccagtgccccccacctcctgagaggaagcagagcttcctgtgggagggcagcgccctgactggagcctgggccatggaggacttctacacagcccggctggtgccccccctggtgccccagaggcctgcccagggcctgatgcaggagcctgtgccccccctggtgcccccagagcacagcgagctgtctgagcggcgcagccctgccctgcacggcacccccacagctggctgcggcagccggggccccagccccagcgccagccagcgggagcaccaggccctgcaggacctggtggacctggcccgggagggcctgagcgccagcccctggccaggcagcggcggcctggccggcagcgagggcacagctggcctggatgtggtgcctgggggcctgcccctgactggatttgtggtgcccagccaggacaagcacccagacagaggaggccgcaccctgctgagcctgggcctgctggtggccgactttggagccatggtgaacaacccccacctgagtgatgtgcagttccagacagattctggagaggtgctgtatgcccacaagtttgtgctgtatgcccgctgccccctgctgatccagtatgtgaacaatgaaggcttctctgctgtggaggatggagtgctgacccagagggtgctgctgggagatgtgtccacagaagctgcccggaccttcctgcactacctgtacacagctgacaccggcctgcccccaggcctgagcagcgagctgagcagcctggcccacagatttggagtgtctgagctggtgcacctgtgtgagcaggtgcccatcgccacagattctgagggcaagccctgggaggagaaggaggccgagaactgtgagagcagagctgagaacttccaggagctgctgcgctccatgtgggcagatgaggaggaggaggccgagaccctgctgaagagcaaggaccacgaggaggaccaggagaatgtgaatgaagctgagatggaggagatctatgaatttgctgccacccagaggaagctgctgcaggaggagagagctgctggagctggagaagatgctgactggctggagggcggcagccctgtgtctggccagctgctggccggcgtgcaggtgcagaagcagtgggacaaggtggaggagatggagcccctggagcccggcagagatgaggccgccaccacctgggagaagatgggccagtgtgccctgcccccaccccagggccagcacagcggggcccggggagctgaggcccctgagcaggaggcccctgaggaggccctgggccacagcagctgcagcagccccagccgggactgccaggccgagaggaaggagggcagcctgccccacagtgatgatgctggggactatgagcagctgttcagcagcacccagggcgagatcagcgagcccagccagatcaccagcgagcctgaggagcagagcggggctgtgcgggagcggggcctggaggtgagccaccggctggccccctggcaggccagccccccccacccctgccgcttcctgctgggccccccccagggcggcagcccccggggcagccaccacaccagcggcagcagcctgagcacccccaggagcagaggaggcaccagccaggtgggcagccccaccctgctgagccctgctgtgcccagcaagcagaagagggacaggagcatcctgaccctgagcaaggagcccggccaccagaagggcaaggagaggagatctgtgctggagtgcaggaacaagggcgtgctgatgtttcctgagaagagccccagcattgacctgacccagagcaacccagaccacagcagcagccgcagccagaagagcagcagcaagctgaatgaggaggatgaagtcatcctgctgctggacagtgatgaggagctggagctggagcagaccaagatgaagagcatcagcagtgaccccctggaggagaagaaggccctggagatcagccccaggagctgtgagctgttcagcatcattgatgtggatgctgaccaggagcccagccagagccccccaagaagtgaggccgtgctgcagcaggaggatgagggcgccctgcctgagaacagaggcagcctgggcagaagaggagccccctggctgttctgtgaccgggagagcagccccagcgaggccagcaccacagacacctcctggctggtgcctgccacccccctggccagccgcagccgggactgcagcagccagacccagatcagcagcctgcggagcggcctggccgtgcaggccgtgacccagcacaccccccgggcctctgtgggcaaccgggagggcaatgaggtggcccagaagttcagcgtcatccggccccagaccccaccaccccagacccccagcagctgcctgacccctgtgtccccaggcaccagtgatggccggcggcagggccacaggagccccagccggccccaccctgggggccacccccacagcagccccctggccccccaccccatcagcggggaccgggcccacttcagccgccgcttcctgaagcacagccccccaggccccagcttcctgaaccagaccccagctggggaggtggtggaggtgggggacagtgatgatgagcaggaggtggccagccaccaggccaacagaagcccccccctggacagcgacccccccatccccattgatgactgctgctggcacatggagcccctgagccccatccccatcgaccactggaacctggagaggacaggccccctgagcaccagcagccccagcaggaggatgaatgaagctgctgacagccgggactgccgcagccctggcctgctggacaccacccccatccggggcagctgcaccacccagaggaagctgcaggagaagagcagtggagctggcagcctgggcaacagccggcccagcttcctgaacagcgccctgtgggatgtgtgggatggagaggagcagaggcctcctgagaccccacctccagcccagatgcccagcgctggaggagcccagaagccagagggcctggagacccccaagggggccaacaggaagaagaacctgccccccaaggtgcccatcacccccatgccccagtacagcatcatggagacccctgtgctgaagaaggagctggacagatttggagtgcggcccctgcccaagaggcagatggtgctgaagctgaaggagatcttccagtacacccaccagaccctggacagcgacagtgaagatgagagccagagcagccagcccctgctgcaggccccccactgccagaccctggccagccagacctacaagcccagcagagctggggtgcacgcccagcaggaggccaccactggacctggggcccaccggcccaagggccctgccaagaccaagggccccaggcaccagaggaagcaccacgagagcatcaccccacccagccgcagccccaccaaggaggcccctcctggcctgaatgatgatgcccagatcccagccagccaggagagcgtggccacctctgtggatggcagtgacagcagcctgagcagccagagcagcagcagctgtgaatttggagctgcctttgagagcgctggggaggaggagggggagggggaggtgtctgccagccaggccgctgtgcaggccgctgacacagatgaggccctgcgctgctacatccgcagcaagccagccctgtaccagaaggtgctgctgtaccagccctttgagctgcgggagctgcaggccgagctgcggcagaatggcctgcgggtgagcagccggcggctgctggacttcctggacacccactgcatcaccttcaccacagctgccacccggcgggagaagctgcagggcagaagacggcagccccggggcaagaagaaggtggagagaaattag

SEQ ID NO: 21920 - DNA, 1404 bp, synthetic construct
  misc_feature 1..1404: note = Description of Artificial Sequence: Synthetic coding sequence
  source 1..1404: mol_type = other DNA
atgagcagcatcctgcccttcaccccacctgtggtgaagaggctgctgggctggaagaagtctgctgggggcagcggcggggccggcggcggggagcagaatggccaggaggagaagtggtgtgagaaggctgtgaagagcctggtgaagaagctgaagaagacaggccgcctggatgagctggagaaggccatcaccacccagaactgcaacaccaagtgtgtgaccatccccagcacctgcagcgagatctggggcctgagcacccccaacaccatcgaccagtgggacaccaccggcctgtacagcttcagcgagcagaccaggagcctggatggccgcctgcaggtgagccacaggaagggcctgccccacgtgatctactgccgcctgtggcgctggccagacctgcacagccaccacgagctgaaggccatcgagaactgtgaatatgccttcaacctgaagaaggatgaggtgtgtgtgaacccctaccactaccagagggtggagacccctgtgctgccccctgtgctggtgcccaggcacacagagatcctgacagagctgccccccctggatgactacacccacagcatccctgagaacaccaacttccctgctggcatcgagccccagagcaactacatccctgagaccccacctcctggctacatcagtgaagatggagagaccagtgaccagcagctgaaccagagcatggacaccggcagccctgctgagctgagccccaccaccctgagccctgtgaaccacagcctggacctgcagcctgtgacctacagcgagcccgccttctggtgcagcatcgcctactatgagctgaaccagagggtgggggagaccttccacgccagccagcccagcctgactgtggatggcttcacagaccccagcaacagcgagcgcttctgcctgggcctgctgagcaatgtgaacagaaatgccaccgtggagatgaccaggaggcacatcggccggggcgtgcggctgtactacatcggcggggaggtgtttgctgagtgcctgagtgacagcgccatctttgtgcagagccccaactgcaaccagagatatggctggcacccagccaccgtgtgcaagatccccccaggctgcaacctgaagatcttcaacaaccaggagtttgctgccctgctggcccagagcgtgaaccagggctttgaggccgtgtaccagctgaccaggatgtgcaccatccgcatgagctttgtgaagggctggggcgctgagtaccgccggcagacagtgaccagcaccccctgctggattgagctgcacctgaatggccccctgcagtggctggacaaggtgctgacccagatgggcagccccagcgtgcgctgcagctccatgtcctag

SEQ ID NO: 21921 - DNA, 1314 bp, synthetic construct
  misc_feature 1..1314: note = Description of Artificial Sequence: Synthetic coding sequence
  source 1..1314: mol_type = other DNA
atgagcagcatcctgcccttcaccccacctgtggtgaagaggctgctgggctggaagaagtctgctgggggcagcggcggggccggcggcggggagcagaatggccaggaggagaagtggtgtgagaaggctgtgaagagcctggtgaagaagctgaagaagacaggccgcctggatgagctggagaaggccatcaccacccagaactgcaacaccaagtgtgtgaccatccccaggagcctggatggccgcctgcaggtgagccacaggaagggcctgccccacgtgatctactgccgcctgtggcgctggccagacctgcacagccaccacgagctgaaggccatcgagaactgtgaatatgccttcaacctgaagaaggatgaggtgtgtgtgaacccctaccactaccagagggtggagacccctgtgctgccccctgtgctggtgcccaggcacacagagatcctgacagagctgccccccctggatgactacacccacagcatccctgagaacaccaacttccctgctggcatcgagccccagagcaactacatccctgagaccccacctcctggctacatcagtgaagatggagagaccagtgaccagcagctgaaccagagcatggacaccggcagccctgctgagctgagccccaccaccctgagccctgtgaaccacagcctggacctgcagcctgtgacctacagcgagcccgccttctggtgcagcatcgcctactatgagctgaaccagagggtgggggagaccttccacgccagccagcccagcctgactgtggatggcttcacagaccccagcaacagcgagcgcttctgcctgggcctgctgagcaatgtgaacagaaatgccaccgtggagatgaccaggaggcacatcggccggggcgtgcggctgtactacatcggcggggaggtgtttgctgagtgcctgagtgacagcgccatctttgtgcagagccccaactgcaaccagagatatggctggcacccagccaccgtgtgcaagatccccccaggctgcaacctgaagatcttcaacaaccaggagtttgctgccctgctggcccagagcgtgaaccagggctttgaggccgtgtaccagctgaccaggatgtgcaccatccgcatgagctttgtgaagggctggggcgctgagtaccgccggcagacagtgaccagcaccccctgctggattgagctgcacctgaatggccccctgcagtggctggacaaggtgctgacccagatgggcagccccagcgtgcgctgcagctccatgtcctag

SEQ ID NO: 21922 - DNA, 1404 bp, synthetic construct; identical to SEQ ID NO: 21920
  misc_feature 1..1404: note = Description of Artificial Sequence: Synthetic coding sequence
  source 1..1404: mol_type = other DNA

SEQ ID NO: 21923 - DNA, 1278 bp, synthetic construct
  misc_feature 1..1278: note = Description of Artificial Sequence: Synthetic coding sequence
  source 1..1278: mol_type = other DNA
atgagcagcatcctgcccttcaccccacccatcgtgaagaggctgctgggctggaagaagggggagcagaatggccaggaggagaagtggtgtgagaaggctgtgaagagcctggtgaagaagctgaagaagacaggccagctggatgagctggagaaggccatcaccacccagaatgtgaacaccaagtgcatcaccatccccaggagcctggatggccgcctgcaggtgagccacaggaagggcctgccccacgtgatctactgccgcctgtggcgctggccagacctgcacagccaccacgagctgcgggccatggagctgtgtgaatttgccttcaacatgaagaaggatgaggtgtgtgtgaacccctaccactaccagagggtggagacccctgtgctgccccctgtgctggtgcccaggcacacagagatcccagctgagttcccccccctggatgactacagccacagcatccctgagaacaccaacttccctgctggcatcgagccccagagcaacatccctgagaccccacctcctggctacctgtctgaagatggagagaccagtgaccaccagatgaaccacagcatggatgctggcagccccaacctgagccccaaccccatgagccctgcccacaacaacctggacctgcagcctgtgacctactgtgagcccgccttctggtgcagcatctcctactatgagctgaaccagagggtgggggagaccttccacgccagccagcccagcatgacagtggatggcttcacagaccccagcaacagcgagcgcttctgcctgggcctgctgagcaatgtgaacagaaatgctgctgtggagctgaccaggaggcacatcggccggggcgtgcggctgtactacatcggcggggaggtgtttgctgagtgcctgagtgacagcgccatctttgtgcagagccccaactgcaaccagagatatggctggcacccagccaccgtgtgcaagatccccccaggctgcaacctgaagatcttcaacaaccaggagtttgctgccctgctggcccagagcgtgaaccagggctttgaggccgtgtaccagctgaccaggatgtgcaccatccgcatgagctttgtgaagggctggggcgctgagtaccgccggcagacagtgaccagcaccccctgctggattgagctgcacctgaatggccccctgcagtggctggacaaggtgctgacccagatgggcagccccagcatccgctgcagctctgtgtcctag

SEQ ID NO: 21924 - DNA, 1146 bp, synthetic construct
  misc_feature 1..1146: note = Description of Artificial Sequence: Synthetic coding sequence
  source 1..1146: mol_type = other DNA
atgagctgcctgcacccccggcagacctggaagggagctgccctggtgcacaggaaggcctggtggatgggccgcagcctggatggccgcctgcaggtgagccacaggaagggcctgccccacgtgatctactgccgcctgtggcgctggccagacctgcacagccaccacgagctgcgggccatggagctgtgtgaatttgccttcaacatgaagaaggatgaggtgtgtgtgaacccctaccactaccagagggtggagacccctgtgctgccccctgtgctggtgcccaggcacacagagatcccagctgagttcccccccctggatgactacagccacagcatccctgagaacaccaacttccctgctggcatcgagccccagagcaacatccctgagaccccacctcctggctacctgtctgaagatggagagaccagtgaccaccagatgaaccacagcatggatgctggcagccccaacctgagccccaaccccatgagccctgcccacaacaacctggacctgcagcctgtgacctactgtgagcccgccttctggtgcagcatctcctactatgagctgaaccagagggtgggggagaccttccacgccagccagcccagcatgacagtggatggcttcacagaccccagcaacagcgagcgcttctgcctgggcctgctgagcaatgtgaacagaaatgctgctgtggagctgaccaggaggcacatcggccggggcgtgcggctgtactacatcggcggggaggtgtttgctgagtgcctgagtgacagcgccatctttgtgcagagccccaactgcaaccagagatatggctggcacccagccaccgtgtgcaagatccccccaggctgcaacctgaagatcttcaacaaccaggagtttgctgccctgctggcccagagcgtgaaccagggctttgaggccgtgtaccagctgaccaggatgtgcaccatccgcatgagctttgtgaagggctggggcgctgagtaccgccggcagacagtgaccagcaccccctgctggattgagctgcacctgaatggccccctgcagtggctggacaaggtgctgacccagatgggcagccccagcatccgctgcagctctgtgtcctag

SEQ ID NO: 21925 - DNA, 1278 bp, synthetic construct; identical to SEQ ID NO: 21923
  misc_feature 1..1278: note = Description of Artificial Sequence: Synthetic coding sequence
  source 1..1278: mol_type = other DNA

SEQ ID NO: 21926 - DNA, 693 bp, synthetic construct
  misc_feature 1..693: note = Description of Artificial Sequence: Synthetic coding sequence
  source 1..693: mol_type = other DNA
atgaaccacagcatggatgctggcagccccaacctgagccccaaccccatgagccctgcccacaacaacctggacctgcagcctgtgacctactgtgagcccgccttctggtgcagcatctcctactatgagctgaaccagagggtgggggagaccttccacgccagccagcccagcatgacagtggatggcttcacagaccccagcaacagcgagcgcttctgcctgggcctgctgagcaatgtgaacagaaatgctgctgtggagctgacccggcggcacatcggccggggcgtgcggctgtactacatcggcggggaggtgtttgctgaatgtctgagtgacagcgccatctttgtgcagagccccaactgcaaccagagatatggctggcacccagccaccgtgtgcaagatccccccaggctgcaacctgaagatcttcaacaaccaggagtttgctgccctgctggcccagagcgtgaaccagggctttgaagctgtgtaccagctgaccaggatgtgcaccatccgcatgagctttgtgaagggctggggcgctgagtaccgccggcagacagtgaccagcaccccctgctggattgagctgcacctgaatggccccctgcagtggctggacaaggtgctgacccagatgggcagccccagcatccgctgcagctctgtgtcctag

SEQ ID NO: 21927 - DNA, 963 bp, synthetic construct
  misc_feature 1..963: note = Description of Artificial Sequence: Synthetic coding sequence
  source 1..963: mol_type = other DNA
atggagctgtgtgaatttgccttcaacatgaagaaggatgaggtgtgtgtgaacccctaccactaccagagggtggagacccctgtgctgccccctgtgctggtgcccaggcacacagagatcccagctgagttcccccccctggatgactacagccacagcatccctgagaacaccaacttccctgctggcatcgagccccagagcaacatccctgagaccccacctcctggctacctgtctgaagatggagagaccagtgaccaccagatgaaccacagcatggatgctggcagccccaacctgagccccaaccccatgagccctgcccacaacaacctggacctgcagcctgtgacctactgtgagcccgccttctggtgcagcatctcctactatgagctgaaccagagggtgggggagaccttccacgccagccagcccagcatgacagtggatggcttcacagaccccagcaacagcgagcgcttctgcctgggcctgctgagcaatgtgaacagaaatgctgctgtggagctgacccggcggcacatcggccggggcgtgcggctgtactacatcggcggggaggtgtttgctgaatgtctgagtgacagcgccatctttgtgcagagccccaactgcaaccagagatatggctggcacccagccaccgtgtgcaagatccccccaggctgcaacctgaagatcttcaacaaccaggagtttgctgccctgctggcccagagcgtgaaccagggctttgaagctgtgtaccagctgaccaggatgtgcaccatccgcatgagctttgtgaagggctggggcgctgagtaccgccggcagacagtgaccagcaccccctgctggattgagctgcacctgaatggccccctgcagtggctggacaaggtgctgacccagatgggcagccccagcatccgctgcagctctgtgtcctag

SEQ ID NO: 21928 - DNA, 1281 bp, synthetic construct
  misc_feature 1..1281: note = Description of Artificial Sequence: Synthetic coding sequence
  source 1..1281: mol_type = other DNA
atgttccgcaccaagaggtctgccctggtgcggcggctgtggaggagccgggcccctggaggagaagatgaggaggagggcgctgggggcggcggcggcggcggggagctgcggggggagggcgccacagacagccgggcccacggggccggcggcggcggccctggccgggccggctgctgcctgggcaaggctgtgcggggggccaagggccaccaccacccccaccccccagctgctggggccggggctgctggaggagctgaggccgacctgaaggccctgacccacagcgtgctgaagaagctgaaggagcggcagctggagctgctgctgcaggccgtggagagcagaggaggcaccaggacagcctgcctgctgctgcccggccgcctggactgccgcctgggccctggggccccagctggggcccagcctgcccagccccccagcagctacagcctgcccctgctgctgtgcaaggtgttccgctggccagacctgcggcacagcagcgaggtgaagaggctgtgctgctgtgagagctatggcaagatcaaccctgagctggtgtgctgcaacccccaccacctgagccggctgtgtgagctggagagccccccaccaccctacagccgctaccccatggacttcctgaagcccacagctgactgcccagatgctgtgcccagcagcgctgagactggaggcaccaactacctggcccctgggggcctgagtgacagccagctgctgctggagcccggggacaggagccactggtgtgtggtggcctactgggaggagaagaccagggtgggccgcctgtactgtgtgcaggagcccagcctggacatcttctatgacctgccccagggcaatggcttctgcctgggccagctgaacagcgacaacaagagccagctggtgcagaaggtgcgcagcaagattggctgcggcatccagctgacccgggaggtggatggagtgtgggtgtacaacagaagcagctaccccatcttcatcaagagcgccaccctggacaacccagacagcaggaccctgctggtgcacaaggtgtttcctggcttcagcatcaaggcctttgattatgagaaggcctacagcctgcagaggcccaatgaccacgagttcatgcagcagccctggacaggcttcaccgtgcagatcagctttgtgaagggctggggccagtgctacacccggcagttcatcagcagctgcccctgctggctggaggtgatcttcaacagcaggtag

SEQ ID NO: 21929 - DNA, 636 bp, synthetic construct
  misc_feature 1..636: note = Description of Artificial Sequence: Synthetic coding sequence
  source 1..636: mol_type = other DNA
atggacttcctgaagcccacagctgactgcccagatgctgtgcccagcagcgctgagaccggcggcaccaactacctggcccctgggggcctgagtgacagccagctgctgctggagcccggggacaggagccactggtgtgtggtggcctactgggaggagaagaccagggtgggccgcctgtactgtgtgcaggagcccagcctggacatcttctatgacctgccccagggcaatggcttctgcctgggccagctgaacagcgacaacaagagccagctggtgcagaaggtgcgcagcaagattggctgcggcatccagctgacccgggaggtggatggagtgtgggtgtacaacagaagcagctaccccatcttcatcaagagcgccaccctggacaacccagacagcaggaccctgctggtgcacaaggtgtttcctggcttcagcatcaaggcctttgattatgagaaggcctacagcctgcagaggcccaatgaccacgagttcatgcagcagccctggacaggcttcaccgtgcagatcagctttgtgaagggctggggccagtgctacacccggcagttcatcagcagctgcccctgctggctggaggtgatcttcaacagcaggtag

SEQ ID NO: 21930 - DNA, 636 bp, synthetic construct; identical to SEQ ID NO: 21929
  misc_feature 1..636: note = Description of Artificial Sequence: Synthetic coding sequence
  source 1..636: mol_type = other DNA

SEQ ID NO: 21931 - DNA, 270 bp, synthetic construct
  misc_feature 1..270: note = Description of Artificial Sequence: Synthetic coding sequence
  source 1..270: mol_type = other DNA
atgaacagccagcagcagaagcagccctgcaccccaccaccccagccccagcagcagcaggtgaagcagccctgccagcccccaccccaggagccctgcatccccaagaccaaggagccctgccaccccaaggtgcctgagccctgccaccccaaggtgcctgagccctgccagcccaaggtgcctgagccctgccagcccaaggtgcctgagccctgccccagcacagtgaccccagccccagcccagcagaagaccaagcagaagtag

SEQ ID NO: 21932 - DNA, 270 bp, synthetic construct; identical to SEQ ID NO: 21931
  misc_feature 1..270: note = Description of Artificial Sequence: Synthetic coding sequence
  source 1..270: mol_type = other DNA

SEQ ID NO: 21933 - DNA, 4260 bp, synthetic construct
  misc_feature 1..4260: note = Description of Artificial Sequence: Synthetic coding sequence
  source 1..4260: mol_type = other DNA
atggccgagggcctggagcgggtgcgcatcagcgccagcgagctgcggggcatcctggccaccctggccccccaggccggcagccgggagaacatgaaggagctgaaggaggcccggcccaggaaggacaacagaagaccagacctggagatctacaagccaggcctgagccggctgaggaacaagcccaagatcaaggagcccccaggcagcgaggagttcaaggatgagatcgtgaatgaccgggactgcagcgctgtggagaatggcacccagcctgtgaaggatgtgtgcaaggagctgaacaaccaggagcagaatggccccatcgaccctgagaacaacagaggccaggagagcttccccaggacagctggccaggaggacaggagcctgaagatcatcaagaggaccaagaagccagacctgcagatctaccagcccggccggcggctgcagacagtgtccaaggagagcgccagccgggtggaggaggaggaggtgctgaaccaggtggagcagctgcgggtggaggaggatgaatgtagaggaaatgtggccaaggaggaggtggccaacaagccagacagagctgagattgagaagagccctgggggcggccgggtgggcgccgccaagggggagaagggcaagaggatgggcaagggggagggcgtgcgggagacccatgatgatcctgcccggggccggcccggcagcgccaagcgctacagcagaagtgacaagagaagaaaccgctaccgcaccaggagcaccagcagcgctggcagcaacaacagcgctgagggcgccggcctgacagacaatggctgcagaagaagacggcaggacaggaccaaggagcggccccggctgaagaagcaggtgtctgtgagcagcacagacagcctggatgaggacagaattgatgagccagatggcctgggcccccggcgcagcagcgagaggaagaggcacctggagaggaactggagcggccgcggggagggggagcagaagaacagcgccaaggagtaccggggcaccctgcgggtgacctttgatgctgaggccatgaacaaggagagccccatggtgcgcagcgccagagatgacatggaccggggcaagccagacaagggcctgagcagcggcggcaaaggaagtgagaagcaggagagcaagaaccccaagcaggagctgcggggccggggccggggcatcctgatcctgcctgcccacaccaccctgtctgtgaacagcgctggcagccctgagagcgcccccctgggcccccggctgctgtttggcagcggcagcaagggcagccgctcctggggccggggcggcaccacccggcggctgtgggaccccaacaacccagaccagaagccagccctgaagacccagaccccccagctgcacttcctggacacagatgatgaggtgagccccacctcctggggagacagccggcaggcccaggccagctactacaagttccagaacagcgacaacccctactactaccccaggaccccaggccctgccagccagtacccctacacaggctacaaccccctgcagtaccctgtgggccccaccaacggggtgtacccaggcccctactacccaggctaccccaccccatctggccagtatgtgtgcagccccctgcccaccagcaccatgagccctgaggaggtggagcagcacatgaggaacctgcagcagcaggagctgcaccggctgctgcgggtggccgacaaccaggagctgcagctgagcaacctgctgagccgggaccgcatcagccctgagggcctggagaagatggcccagctgcgggcagagctgctgcagctgtatgagcgctgcatcctgctggacatcgagttcagtgacaaccagaatgtggaccagatcctgtggaagaatgccttctaccaggtgattgagaagttccggcagctggtgaaggaccccaacgtggagaaccctgagcagatccggaaccggctgctggagctgctggatgagggcagtgacttctttgacagcctgctgcagaagctgcaggtgacctacaagttcaagctggaggactacatggatggcctggccatccgcagcaagcccctgaggaagacagtgaagtatgccctgatcagcgcccagcgctgcatgatctgccagggcgacatcgcccgctaccgggagcaggccagtgacacagccaactacggcaaggcccgctcctggtacctgaaggcccagcacatcgcccccaagaatggccggccctacaaccagctggccctgctggccgtgtacaccaggaggaagctggatgctgtgtactactacatgaggagcctggccgccagcaaccccatcctgacagccaaggagagcctgatgagcctgtttgaggagaccaagaggaaggccgagcagatggagaagaagcagcacgaggagtttgacctgagcccagaccagtggaggaagggcaagaagagcaccttcagacatgtgggagatgacaccacccggctggagatctggatccaccccagccaccccaggagcagccagggcacagagagcggcaaggacagcgagcaggagaatggcctgggcagcctgagccccagcgacctgaacaagcgcttcatcctgtccttcctgcacgcccacggcaagctgttcaccagaattggcatggagaccttccctgctgtggccgagaaggtgctgaaggagttccaggtgctgctgcagcacagccccagccccatcggcagcaccaggatgctgcagctgatgaccatcaacatgtttgctgtgcacaacagccagctgaaggactgcttcagcgaggagtgccgcagcgtcatccaggagcaggccgccgccctgggcctggccatgttcagcctgctggtgcggcgctgcacctgcctgctgaaggagagcgccaaggcccagctgagcagccctgaggaccaggatgaccaggatgacatcaaggtgagcagctttgtgcctgacctgaaggagctgctgcccagcgtgaaggtgtggagcgactggatgctgggctacccagacacctggaaccccccacccaccagcctggacctgcccagccacgtggccgtggatgtgtggagcaccctggccgacttctgcaacatcctgacagctgtgaaccagagcgaggtgcccctgtacaaggaccctgatgatgacctgaccctgctgatcctggaggaggaccggctgctgagcggctttgtgcccctgctggccgccccccaggacccctgctacgtggagaagaccagtgacaaggtgattgctgctgactgcaagagggtgacagtgctgaagtacttcctggaggccctgtgtggccaggaggagcccctgctggccttcaagggcggcaagtatgtgtctgtggcccctgtgcctgacaccatgggcaaggagatgggcagccaggagggcacccggctggaggatgaggaggaggatgtggtgattgaagattttgaagaagattctgaggccgagggcagcggaggagaagatgacatccgggagctgcgggccaagaagctggccctggccaggaagattgctgagcagcagaggcggcaggagaagatccaggccgtgctggaggaccacagccagatgaggcagatggagctggagatccggcccctcttcctggtgcctgacaccaacggcttcatcgaccacctggccagcctggcccggctgctggagagcaggaagtacatcctggtggtgcccctcatcgtcatcaatgagctggatggcctggccaagggccaggagacagaccaccgggccggcggctacgcccgggtggtgcaggagaaggccaggaagagcattgagttcctggagcagagatttgagagccgggacagctgcctgcgggccctgaccagcagaggaaatgagctggagagcatcgccttccgctctgaggacatcaccggccagctgggcaacaatgatgacctgatcctgagctgctgcctgcactactgcaaggacaaggccaaggacttcatgcctgccagcaaggaggagcccatccggctgctgcgggaggtggtgctgctgacagatgacaggaacctgcgggtgaaggccctgaccagaaatgtgcctgtgcgggacatcccagccttcctgacctgggcccaggtgggctag

SEQ ID NO: 21934 - DNA, 993 bp, synthetic construct
  misc_feature 1..993: note = Description of Artificial Sequence: Synthetic coding sequence
  source 1..993: mol_type = other DNA
atgaggttccggctgtgccaccagaggggctgctgcccccatgaaagagagaacacctgcacctgcaagatgatcatcagcagcctgcaggtgattgctgctgactgcaagagggtgacagtgctgaagtacttcctggaggccctgtgtggccaggaggagcccctgctggccttcaagggcggcaagtatgtgtctgtggcccctgtgcctgacaccatgggcaaggagatgggcagccaggagggcacccggctggaggatgaggaggaggatgtggtgattgaggactttgaggaggacagcgaggccgagggcagcggcggggaggatgacatccgggagctgcgggccaagaagctggccctggccaggaagattgctgagcagcagaggcggcaggagaagatccaggccgtgctggaggaccacagccagatgaggcagatggagctggagatccggcccctcttcctggtgcctgacaccaacggcttcatcgaccacctggccagcctggcccggctgctggagagcaggaagtacatcctggtggtgcccctgattgtcatcaatgagctggatggcctggccaagggccaggagacagaccacagagctgggggctacgcccgggtggtgcaggagaaggccaggaagagcattgagttcctggagcagagatttgagagccgggacagctgcctgcgggccctgaccagcagaggaaatgagctggagagcatcgccttccgctctgaggacatcaccggccagctgggcaacaatgatgacctgatcctgagctgctgcctgcactactgcaaggacaaggccaaggacttcatgcctgccagcaaggaggagcccatccggctgctgcgggaggtggtgctgctgacagatgacaggaacctgcgggtgaaggccctgaccagaaatgtgcctgtgcgggacatcccagccttcctgacctgggcccaggtgggctag

SEQ ID NO: 21935 - DNA, 1536 bp, synthetic construct
  misc_feature 1..1536: note = Description of Artificial Sequence: Synthetic coding sequence
  source 1..1536: mol_type = other DNA
atggagaccttccctgctgtggccgagaaggtgctgaaggagttccaggtgctgctgcagcacagccccagccccatcggcagcaccaggatgctgcagctgatgaccatcaacatgtttgctgtgcacaacagccagctgaaggactgcttcagcgaggagtgccgcagcgtcatccaggagcaggccgccgccctgggcctggccatgttcagcctgctggtgcggcgctgcacctgcctgctgaaggagagcgccaaggcccagctgagcagccctgaggaccaggatgaccaggatgacatcaaggtgagcagctttgtgcctgacctgaaggagctgctgcccagcgtgaaggtgtggagcgactggatgctgggctacccagacacctggaaccccccacccaccagcctggacctgcccagccacgtggccgtggatgtgtggagcaccctggccgacttctgcaacatcctgacagctgtgaaccagagcgaggtgcccctgtacaaggaccctgatgatgacctgaccctgctgatcctggaggaggaccggctgctgagcggctttgtgcccctgctggccgccccccaggacccctgctacgtggagaagaccagtgacaaggtgattgctgctgactgcaagagggtgacagtgctgaagtacttcctggaggccctgtgtggccaggaggagcccctgctggccttcaagggcggcaagtatgtgtctgtggcccctgtgcctgacaccatgggcaaggagatgggcagccaggagggcacccggctggaggatgaggaggaggatgtggtgattgaagattttgaagaagattctgaggccgagggcagcggaggagaagatgacatccgggagctgcgggccaagaagctggccctggccaggaagattgctgagcagcagaggcggcaggagaagatccaggccgtgctggaggaccacagccagatgaggcagatggagctggagatccggcccctcttcctggtgcctgacaccaacggcttcatcgaccacctggccagcctggcccggctgctggagagcaggaagtacatcctggtggtgcccctcatcgtcatcaatgagctggatggcctggccaagggccaggagacagaccaccgggccggcggctacgcccgggtggtgcaggagaaggccaggaagagcattgagttcctggagcagagatttgagagccgggacagctgcctgcgggccctgaccagcagaggaaatgagctggagagcatcgccttccgctctgaggacatcaccggccagctgggcaacaatgatgacctgatcctgagctgctgcctgcactactgcaaggacaaggccaaggacttcatgcctgccagcaaggaggagcccatccggctgctgcgggaggtggtgctgctgacagatgacaggaacctgcgggtgaaggccctgaccagaaatgtgcctgtgcgggacatcccagccttcctgacctgggcccaggtgggctag

SEQ ID NO: 21936 - DNA, 4167 bp, synthetic construct
  misc_feature 1..4167: note = Description of Artificial Sequence: Synthetic coding sequence
  source 1..4167: mol_type = other DNA
atgaaggagctgaaggaggcccggcccaggaaggacaacagaagaccagacctggagatctacaagccaggcctgagccggctgaggaacaagcccaagatcaaggagcccccaggcagcgaggagttcaaggatgaaattgtgaatgaccgggactgcagcgctgtggagaatggcacccagcctgtgaaggatgtgtgcaaggagctgaacaaccaggagcagaatggccccattgatcctgagaacaacagaggccaggagagcttccccaggacagctggccaggaggacaggagcctgaagatcatcaagaggaccaagaagccagacctgcagatctaccagcctggaagaaggctgcagacagtgtccaaggagagcgccagccgggtggaggaggaggaggtgctgaaccaggtggagcagctgcgggtggaggaggatgagtgcagaggaaatgtggccaaggaggaggtggccaacaagccagacagagctgagattgagaagagccctgggggcggccgggtgggcgccgccaagggggagaagggcaagaggatgggcaaaggagagggcgtgcgggagacccatgatgatcctgcccggggccggcccggcagcgccaagcgctacagcagaagtgacaagagaagaaaccgctaccgcaccaggagcaccagcagcgctggcagcaacaacagcgctgagggcgccggcctgacagacaatggctgcagaagaagacggcaggacaggaccaaggagcggccccggctgaagaagcaggtgtctgtgagcagcacagacagcctggatgaagatagaattgatgagccagatggcctgggccccaggaggagcagcgagaggaagaggcacctggagaggaactggagcggccgcggggagggggagcagaagaacagcgccaaggagtaccggggcaccctgcgggtgacctttgatgctgaggccatgaacaaggagagccccatggtgcgcagcgccagagatgacatggaccggggcaagccagacaagggcctgagcagcggcggcaagggcagcgagaagcaggagagcaagaaccccaagcaggagctgcggggccggggccggggcatcctgatcctgcctgcccacaccaccctgtctgtgaacagcgctggcagccctgagagcgcccccctgggcccccggctgctgtttggaagtggcagcaagggcagccgctcctggggccggggcggcaccacccggcggctgtgggaccccaacaacccagaccagaagccagccctgaagacccagaccccccagctgcacttcctggacacagatgatgaggtgagccccacctcctggggagacagccggcaggcccaggccagctactacaagttccagaacagcgacaacccctactactaccccaggaccccaggccctgccagccagtacccctacacaggctacaaccccctgcagtaccctgtgggccccaccaatggagtgtacccaggcccctactacccaggctaccccacccccagcggccagtatgtgtgcagccccctgcccaccagcaccatgagccctgaggaggtggagcagcacatgaggaacctgcagcagcaggagctgcaccggctgctgcgggtggccgacaaccaggagctgcagctgagcaacctgctgagccgggaccgcatcagccctgagggcctggagaagatggcccagctgcgggcagagctgctgcagctgtatgagcgctgcatcctgctggacatcgagttcagtgacaaccagaatgtggaccagatcctgtggaagaatgccttctaccaggtgattgagaagttccggcagctggtgaaggaccccaacgtggagaaccctgagcagatccggaaccggctgctggagctgctggatgagggcagtgacttctttgacagcctgctgcagaagctgcaggtgacctacaagttcaagctggaggactacatggatggcctggccatccgcagcaagcccctgaggaagacagtgaagtatgccctgatcagcgcccagcgctgcatgatctgccagggcgacatcgcccgctaccgggagcaggccagtgacacagccaactacggcaaggcccgctcctggtacctgaaggcccagcacatcgcccccaagaatggccggccctacaaccagctggccctgctggccgtgtacaccaggaggaagctggatgctgtgtactactacatgaggagcctggccgccagcaaccccatcctgacagccaaggagagcctgatgagcctgtttgaggagaccaagaggaaggccgagcagatggagaagaagcagcacgaggagtttgacctgagcccagaccagtggaggaagggcaagaagagcaccttccgccacgtgggagatgacaccacccggctggagatctggatccaccccagccaccccaggagcagccagggcacagaaagtggcaaggacagcgagcaggagaatggcctgggcagcctgagccccagcgacctgaacaagcgcttcatcctgtccttcctgcacgcccacggcaagctgttcacccgcatcggcatggagaccttccctgctgtggccgagaaggtgctgaaggagttccaggtgctgctgcagcacagccccagccccatcggcagcaccaggatgctgcagctgatgaccatcaacatgtttgctgtgcacaacagccagctgaaggactgcttctctgaagaatgtcgcagcgtcatccaggagcaggccgccgccctgggcctggccatgttcagcctgctggtgcggcgctgcacctgcctgctgaaggagagcgccaaggcccagctgagcagccctgaggaccaggatgaccaggatgacatcaaggtgtcctcctttgtgcctgacctgaaggagctgctgcccagcgtgaaggtgtggagcgactggatgctgggctacccagacacctggaaccccccacccaccagcctggacctgcccagccacgtggccgtggatgtgtggagcaccctggccgacttctgcaacatcctgacagctgtgaaccagagcgaggtgcccctgtacaaggaccctgatgatgacctgaccctgctgatcctggaggaggaccggctgctgagcggctttgtgcccctgctggccgccccccaggacccctgctacgtggagaagaccagtgacaaggtgattgctgctgactgcaagagggtgacagtgctgaagtacttcctggaggccctgtgtggccaggaggagcccctgctggccttcaagggcggcaagtatgtgtctgtggcccctgtgcctgacaccatgggcaaggagatgggcagccaggagggcacccggctggaggatgaggaggaggatgtggtgattgaggactttgaggaggacagcgaggccgagggcagcggcggggaggatgacatccgggagctgcgggccaagaagctggccctggccaggaagattgctgagcagcagaggcggcaggagaagatccaggccgtgctggaggaccacagccagatgaggcagatggagctggagatccggcccctcttcctggtgcctgacaccaacggcttcatcgaccacctggccagcctggcccggctgctggagagcaggaagtacatcctggtggtgcccctgattgtcatcaatgagctggatggcctggccaagggccaggagacagaccacagagctgggggctacgcccgggtggtgcaggagaaggccaggaagagcattgagttcctggagcagagatttgagagccgggacagctgcctgcgggccctgaccagcagaggaaatgagctggagagcatcgccttccgctctgaggacatcaccggccagctgggcaacaatgatgacctgatcctgagctgctgcctgcactactgcaaggacaaggccaaggacttcatgcctgccagcaaggaggagcccatccggctgctgcgggaggtggtgctgctgacagatgacaggaacctgcgggtgaaggccctgaccagaaatgtgcctgtgcgggacatcccagccttcctgacctgggcccaggtgggctag

SEQ ID NO: 21937 - DNA, 2364 bp, synthetic construct
  misc_feature 1..2364: note = Description of Artificial Sequence: Synthetic coding sequence
  source 1..2364: mol_type = other DNA
atggctgctgcccggcctgcccggggccctgagctgcccctgctgggcctgctgctgctgctgctgctgggggaccccggccgcggggccgccagcagtggaaatgccactggacctggccccaggtctgctgggggcagcgccaggagatctgctgctgtgactggacctcctccacccctgagccactgcggccgggccgccccctgtgagcccctgcgctacaacgtgtgcctgggctctgtgctgccctatggagccaccagcaccctgctggccggggacagcgacagccaggaggaggcccacggcaagctggtgctgtggagcggcctgagaaatgccccccgctgctgggccgtcatccagcccctgctgtgtgctgtgtacatgcccaagtgtgaaaatgacagagtggagctgcccagcaggaccctgtgccaggccacccggggcccctgtgccatcgtggagcgggagcggggctggccagacttcctgcgctgcaccccagaccgcttccctgagggctgcaccaatgaggtgcagaacatcaagttcaacagcagcggccagtgtgaggtgcccctggtgaggacagacaaccccaagtcctggtatgaagatgtggagggctgcggcatccagtgccagaaccccctcttcacagaagctgagcaccaggacatgcacagctacatcgccgcctttggagctgtgacaggcctgtgcaccctcttcaccctggccacctttgtggccgactggaggaacagcaaccgctacccagctgtgatcctcttctacgtgaatgcctgcttctttgtgggcagcatcggctggctggcccagttcatggatggagcccggcgggagatcgtgtgcagagcagatggcaccatgaggctgggggagcccaccagcaatgagaccctgagctgtgtgatcatcttcgtcatcgtgtactatgccctgatggccggcgtggtgtggtttgtggtgctgacctacgcctggcacaccagcttcaaggccctgggcaccacctaccagcccctgagcggcaagaccagctacttccacctgctgacctggagcctgccctttgtgctgactgtggccatcctggccgtggcccaggtggatggagacagcgtgtctggcatctgctttgtgggctacaagaactaccgctacagagctggctttgtgctggcccccatcggcctggtgctgattgtgggcggctacttcctgatccggggcgtgatgaccctcttcagcatcaagagcaaccaccctggcctgctgtctgagaaggccgccagcaagatcaatgagaccatgctgcggctgggcatcttcggcttcctggccttcggctttgtgctgatcaccttcagctgccacttctatgacttcttcaaccaggccgagtgggagaggagcttccgggactatgtgctgtgccaggccaacgtgaccatcggcctgcccaccaagcagcccatcccagactgtgagatcaagaaccggcccagcctgctggtggagaagatcaacctgtttgccatgtttggcaccggcatcgccatgagcacctgggtgtggaccaaggccaccctgctgatctggaggaggacctggtgccgcctgaccggccagagtgatgatgagcccaagaggatcaagaagagcaagatgattgccaaggccttcagcaagagacatgagctgctgcagaaccctggccaggagctgtccttctccatgcacacagtgtcccatgatggccctgtggccggcctggcctttgacctgaatgagcccagcgcagatgtgagcagcgcctgggcccagcacgtgaccaagatggtggcccggcggggggccatcctgccccaggacatctctgtgacccctgtggccacccctgtgcccccagaggagcaggccaacctgtggctggtggaggccgagatcagccctgagctgcagaagaggctgggcaggaagaagaagaggaggaagaggaagaaggaggtgtgccccctggcccctcctcctgagctgcaccccccagccccagcccccagcaccatcccccggctgccccagctgccccggcagaagtgcctggtggccgccggggcctggggcgctggggacagctgccggcagggcgcctggaccctggtgagcaaccccttctgcccagagcccagccccccccaggaccccttcctgcccagcgccccagcccctgtggcctgggcccacggccggcggcagggcctgggccccatccacagcaggaccaacctgatggacacagagctgatggatgctgacagcgacttctag

SEQ ID NO: 21938 - DNA, 231 bp, synthetic construct
  misc_feature 1..231: note = Description of Artificial Sequence: Synthetic coding sequence
  source 1..231: mol_type = other DNA
atgtctgaccaggacagcagcgagatccacttcaaggtgaagatgaccacccacctgaagaagctgaaggagagctactgccagaggcagggcgtgcccatgaacagcctgcgcttcctgtttgagggccagagaattgctgacaaccacacccccaaggagctgggcatggaggaggaggatgtgattgaggtgtaccaggagcagacaggaggccacagcacagtgtag

SEQ ID NO: 21939 - DNA, 306 bp, synthetic construct
  misc_feature 1..306: note = Description of Artificial Sequence: Synthetic coding sequence
  source 1..306: mol_type = other DNA
atgtctgaccaggaggccaagcccagcacagaggacctgggggacaagaaggagggggagtacatcaagctgaaggtgattggccaggacagcagcgagatccacttcaaggtgaagatgaccacccacctgaagaagctgaaggagagctactgccagaggcagggcgtgcccatgaacagcctgcgcttcctgtttgagggccagagaattgctgacaaccacacccccaaggagctgggcatggaggaggaggatgtgattgaggtgtaccaggagcagacaggaggccacagcacagtgtag

SEQ ID NO: 21940 - DNA, 306 bp, synthetic construct; identical to SEQ ID NO: 21939
  misc_feature 1..306: note = Description of Artificial Sequence: Synthetic coding sequence
  source 1..306: mol_type = other DNA

SEQ ID NO: 21941 - DNA, 189 bp, synthetic construct
  misc_feature 1..189: note = Description of Artificial Sequence: Synthetic coding sequence
  source 1..189: mol_type = other DNA
atgaccacccacctgaagaagctgaaggagagctactgccagaggcagggcgtgcccatgaacagcctgcgcttcctgtttgagggccagagaattgctgacaaccacacccccaaggagctgggcatggaggaggaggatgtgattgaggtgtaccaggagcagacaggaggccacagcacagtgtag

SEQ ID NO: 21942 - DNA, 189 bp, synthetic construct; identical to SEQ ID NO: 21941
  misc_feature 1..189: note = Description of Artificial Sequence: Synthetic coding sequence
  source 1..189: mol_type = other DNA

SEQ ID NO: 21943 - DNA, 795 bp, synthetic construct
  misc_feature 1..795: note = Description of Artificial Sequence: Synthetic coding sequence
  source 1..795: mol_type = other DNA
atgcccaggagcttcctggtgaggaagcccagcgaccccaacaggaagcccaactacagcgagctgcaggacagcaaccctgagttcaccttccagcagccctatgaccaggcccacctgctggccgccatccccccacctgagatcctgaaccccacagccagcctgcccatgctgatctgggacagcgtgctggccccccaggcccagcccatcgcctgggccagcctgcggctgcaggagagcccccgggtggccgagctgaccagcctgagtgatgaggacagcggcaagggcagccagccccccagcccccccagccctgcccccagcagcttcagcagcacctctgtgagcagcctggaggccgaggcctatgctgccttccctggcctgggccaggtgcccaagcagctggcccagctgtctgaggccaaggacctgcaggccaggaaggccttcaactgcaagtactgcaacaaggagtacctgagcctgggcgccctgaagatgcacatccgcagccacaccctgccctgtgtgtgtggcacctgtgggaaggccttcagccggccctggctgctgcagggccacgtgaggacccacactggagagaagcccttcagctgcccccactgcagccgggcctttgctgacaggagcaacctgcgggcccacctgcagacccacagtgatgtgaagaagtaccagtgccaggcctgtgcccggaccttcagcaggatgagcctgctgcacaagcaccaggagagcggctgcagcggctgccccaggtag

SEQ ID NO: 21944 - DNA, 807 bp, synthetic construct
  misc_feature 1..807: note = Description of Artificial Sequence: Synthetic coding sequence
  source 1..807: mol_type = other DNA
atgcccaggagcttcctggtgaagaagcacttcaatgccagcaagaagcccaactacagcgagctggacacccacacagtcatcatcagcccctacctgtatgagagctacagcatgcctgtgatcccccagcctgagatcctgagcagcggggcctacagccccatcaccgtgtggaccacagctgcccccttccacgcccagctgcccaacggcctgagccccctgagcggctacagcagcagcctgggccgggtgagccccccaccacccagcgacaccagcagcaaggaccacagcggcagcgagagccccatcagtgatgaggaggagcggctgcagagcaagctgagtgacccccacgccattgaagctgagaagttccagtgcaacctgtgcaacaagacctacagcaccttcagcggcctggccaagcacaagcagctgcactgtgatgcccagagcaggaagagcttcagctgcaagtactgtgacaaggagtatgtgtccctgggcgccctgaagatgcacatccgcacccacaccctgccctgtgtgtgcaagatctgtgggaaggccttcagccggccctggctgctgcagggccacatccgcacccacactggagagaagcccttcagctgcccccactgcaacagagcctttgctgacaggagcaacctgcgggcccacctgcagacccacagtgatgtgaagaagtaccagtgcaagaactgcagcaagaccttcagcaggatgagcctgctgcacaagcatgaggagagcggctgctgcgtggcccactag

SEQ ID NO: 21945 - DNA, 807 bp, synthetic construct; identical to SEQ ID NO: 21944
  misc_feature 1..807: note = Description of Artificial Sequence: Synthetic coding sequence
  source 1..807: mol_type = other DNA

SEQ ID NO: 21946 - DNA, 879 bp, synthetic construct
  misc_feature 1..879: note = Description of Artificial Sequence: Synthetic coding sequence
  source 1..879: mol_type = other DNA
atgcccaggagcttcctggtgaagacccacagcagccaccgggtgcccaactacagaaggctggagacccagcgggagatcaacggggcctgcagcgcctgtggcggcctggtggtgcccctgctgccccgggacaaggaggcccccagcgtgcctggggacctgccccagccctgggacaggagcagcgctgtggcctgcatcagcctgcccctgctgccccgcatcgaggaggccctgggcgccagcggcctggatgccctggaggtgtctgaggtggacccccgggccagccgggccgccatcgtgcccctgaaggacagcctgaaccacctgaacctgccccccctgctggtgctgcccacccgctggagccccaccctgggccctgacagacatggagcccctgagaagctgctgggcgctgagaggatgccccgggcccctgggggctttgagtgcttccactgccacaagccctaccacaccctggccggcctggcccggcaccggcagctgcactgccacctgcaggtgggccgggtcttcacctgcaagtactgtgacaaggagtacaccagcctgggcgccctgaagatgcacatccgcacccacaccctgccctgcacctgcaagatctgtgggaaggccttcagccggccctggctgctgcagggccacgtgaggacccacactggagagaagccctatgcctgcagccactgcagccgggcctttgctgacaggagcaacctgcgggcccacctgcagacccacagtgatgccaagaagtaccgctgccgccgctgcaccaagaccttcagcaggatgagcctgctggcccggcatgaggagagcggctgctgccccggcccctag

SEQ ID NO: 21947 - DNA, 1398 bp, synthetic construct
  misc_feature 1..1398: note = Description of Artificial Sequence: Synthetic coding sequence
  source 1..1398: mol_type = other DNA
atgggcggcgctgtggtggatgagggccccactggagtgaaggccccagatggcggctggggctgggccgtgctgtttggctgctttgtgatcaccggcttctcctatgccttccccaaggctgtgtctgtgttcttcaaggagctgatccaggagtttggaattggctacagcgacacagcctggatcagcagcatcctgctggccatgctgtatggcaccggccccctgtgcagcgtgtgtgtgaacagatttggctgcaggcctgtgatgctggtgggcggcctgtttgccagcctgggcatggtggccgccagcttctgccgcagcatcatccaggtgtacctgaccaccggggtcatcaccggcctgggcctggccctgaacttccagcccagcctcatcatgctgaaccgctacttcagcaagaggcggcccatggccaacggcctggccgccgccggcagccctgtgttcctgtgtgccctgagccccctgggccagctgctgcaggacagatatggctggaggggcggcttcctgatcctgggcggcctgctgctgaactgctgcgtgtgtgccgccctgatgaggcccctggtggtgacagcccagcccggcagcggccccccccggcccagccggcggctgctggacctgtctgtgttccgggaccggggctttgtgctgtatgctgtggccgcctctgtgatggtgctgggcctgtttgtgccccctgtgtttgtggtgtcctatgccaaggacctgggcgtgcctgacaccaaggccgccttcctgctgaccatcctgggcttcatcgacatctttgcccggcctgctgctggctttgtggccggcctgggcaaggtgcggccctacagcgtgtacctgttctccttctccatgttcttcaacggcctggccgacctggccggcagcacagctggggactatggaggcctggtggtgttctgcatcttcttcggcatctcctatggcatggtgggcgccctgcagtttgaggtgctgatggccatcgtgggcacccacaagttcagcagcgccatcggcctggtgctgctgatggaggccgtggccgtgctggtgggccccccatctgggggcaagctgctggatgccacccacgtgtacatgtatgtgttcatcctggccggggctgaggtgctgaccagcagcctcatcctgctgctgggcaacttcttctgcatcaggaagaagcccaaggagccccagcctgaggtggccgctgctgaggaggagaagctgcacaagcccccagctgacagcggcgtggacctgcgggaggtggagcacttcctgaaggccgagcctgagaagaatggagaggtggtgcacaccccagagacctctgtgtag

SEQ ID NO: 21948 - DNA, 1398 bp, synthetic construct; identical to SEQ ID NO: 21947
  misc_feature 1..1398: note = Description of Artificial Sequence: Synthetic coding sequence
  source 1..1398: mol_type = other DNA

SEQ ID NO: 21949 - DNA, 1398 bp, synthetic construct; identical to SEQ ID NO: 21947
  misc_feature 1..1398: note = Description of Artificial Sequence: Synthetic coding sequence
  source 1..1398: mol_type = other DNA

SEQ ID NO: 21950 - DNA, 1398 bp, synthetic construct; identical to SEQ ID NO: 21947
  misc_feature 1..1398: note = Description of Artificial Sequence: Synthetic coding sequence
  source 1..1398: mol_type = other DNA

SEQ ID NO: 21951 - DNA, 1470 bp, synthetic construct
  misc_feature 1..1470: note = Description of Artificial Sequence: Synthetic coding sequence
  source 1..1470: mol_type = other DNA
atggtgcccagcagccctgctgtggagaagcaggtgcctgtggagcccggccctgaccctgagctgcgctcctggaggcacctggtgtgctacctgtgcttctacggcttcatggcccagatccggcctggagagagcttcatcaccccctacctgctgggccctgacaagaacttcacccgggagcaggtgaccaatgagatcacccctgtgctgagctacagctacctggccgtgctggtgcctgtgttcctgctgacagactacctgcgctacacccctgtgctgctgctgcagggcctgagctttgtgtctgtgtggctgctgctgctgctgggccacagcgtggcccacatgcagctgatggagctgttctacagcgtgaccatggccgcccgcatcgcctacagcagctacatcttcagcctggtgcggcctgcccgctaccagagggtggccggctacagcagagctgctgtgctgctgggcgtcttcaccagctctgtgctgggccagctgctggtgacagtgggccgggtgtccttcagcaccctgaactacatcagcctggccttcctgaccttctctgtggtgctggccctcttcctgaagaggcccaagaggagcctcttcttcaacagagatgaccggggccgctgtgagaccagcgccagcgagctggagaggatgaaccctggccctgggggcaagctgggccacgccctgcgggtggcctgtggggacagcgtgctggccaggatgctgcgggagctgggggacagcctgcggcggccccagctgcggctgtggagcctgtggtgggtgttcaacagcgctggctactacctggtggtgtactacgtgcacatcctgtggaatgaggtggaccccaccaccaacagcgcccgggtgtacaacggggctgctgatgctgccagcaccctgctgggcgccatcaccagctttgctgctggctttgtgaagatccgctgggcccgctggagcaagctgctgattgctggggtgacagccacccaggccggcctggtgttcctgctggcccacaccaggcaccccagcagcatctggctgtgctatgctgcctttgtgctcttccggggcagctaccagttcctggtgcccatcgccaccttccagatcgccagcagcctgagcaaggagctgtgtgccctggtgtttggagtgaacaccttctttgccaccatcgtgaagaccatcatcaccttcatcgtgtctgatgtgcggggcctgggcctgcctgtgaggaagcagaatgaggagctgcacgtggccagcctgagcctgtggaagagccacctgcggctggccgctgacaccctgagcagcgagggcagcagcggcagcggccccaggtcctggttcctgagccccaccctgcgggccgccctgcacggccctgtgtgccccagcgaggtgtgccccagctag

SEQ ID NO: 21952 - DNA, 1776 bp, synthetic construct
  misc_feature 1..1776: note = Description of Artificial Sequence: Synthetic coding sequence
  source 1..1776: mol_type = other DNA
atggtgcccagcagccctgctgtggagaagcaggtgcctgtggagcccggccctgaccctgagctgcgctcctggaggcacctggtgtgctacctgtgcttctacggcttcatggcccagatccggcctggagagagcttcatcaccccctacctgctgggccctgacaagaacttcacccgggagcaggtgaccaatgagatcacccctgtgctgagctacagctacctggccgtgctggtgcctgtgttcctgctgacagactacctgcgctacacccctgtgctgctgctgcagggcctgagctttgtgtctgtgtggctgctgctgctgctgggccacagcgtggcccacatgcagctgatggagctgttctacagcgtgaccatggccgcccgcatcgcctacagcagctacatcttcagcctggtgcggcctgcccgctaccagagggtggccggctacagcagagctgctgtgctgctgggcgtcttcaccagctctgtgctgggccagctgctggtgacagtgggccgggtgtccttcagcaccctgaactacatcagcctggccttcctgaccttctctgtggtgctggccctcttcctgaagaggcccaagaggagcctcttcttcaacagagatgaccggggccgctgtgagaccagcgccagcgagctggagaggatgaaccctggccctgggggcaagctgggccacgccctgcgggtggcctgtggggacagcgtgctggccaggatgctgcgggagctgggggacagcctgcggcggccccagctgcggctgtggagcctgtggtgggtgttcaacagcgctggctactacctggtggtgtactacgtgcacatcctgtggaatgaggtggaccccaccaccaacagcgcccgggtgtacaacggggctgctgatgctgccagcaccctgctgggcgccatcaccagctttgctgctggctttgtgaagatccgctgggcccgctggagcaagctgctgattgctggggtgacagccacccaggccggcctggtgttcctgctggcccacaccaggcaccccagcagcatctggctgtgctatgctgcctttgtgctcttccggggcagctaccagttcctggtgcccatcgccaccttccagatcgccagcagcctgagcaaggagctgtgtgccctggtgtttggagtgaacaccttctttgccaccatcgtgaagaccatcatcaccttcatcgtgtctgatgtgcggggcctgggcctgcctgtgaggaagcagttccagctgtacagcgtgtacttcctgatcctgagcatcatctacttcctgggcgccatgctggatggcctgcggcactgccagaggggccaccacccccggcagcccccagcccagggcctgcggtctgctgctgaggagaaggccgcccaggccctgtctgtgcaggacaagggcctgggcggcctgcagcctgcccagagcccccccctgagccctgaggacagcctgggcgctgtgggccctgccagcctggagcagaggcagagcgacccctacctggcccaggccccagccccccaggccgctgagttcctgagccctgtgaccacccccagcccctgcaccctgtgcagcgcccaggccagcggccctgaggccgcagatgagacctgcccccagctggccgtgcaccccccaggagtgtccaagctgggcctgcagtgcctgcccagtgatggagtgcagaatgtgaaccagtag

SEQ ID NO: 21953 - DNA, 846 bp, synthetic construct
  misc_feature 1..846: note = Description of Artificial Sequence: Synthetic coding sequence
  source 1..846: mol_type = other DNA
atgctgcgggagctgggggacagcctgcggcggccccagctgcggctgtggagcctgtggtgggtgttcaacagcgctggctactacctggtggtgtactacgtgcacatcctgtggaatgaggtggaccccaccaccaacagcgcccgggtgtacaatggagctgctgatgctgccagcaccctgctgggcgccatcaccagctttgctgctggctttgtgaagatccgctgggcccgctggagcaagctgctgattgctggggtgacagccacccaggccggcctggtgttcctgctggcccacaccaggcaccccagcagcatctggctgtgctacgccgcctttgtgctcttccggggcagctaccagttcctggtgcccatcgccaccttccagatcgccagcagcctgagcaaggagctgtgtgccctggtgtttggagtgaacaccttctttgccaccatcgtgaagaccatcatcaccttcatcgtgtctgatgtgcggggcctgggcctgcctgtgaggaagcaggccctgaggatgagccggccccggctgggcctgtgcctgcccggccccttccccccccagagcgctgccccagcccgggccggcatggccgccagcagcgcagaagatcctggcagcgagcggggcccctggaggagagctggcaccgtggccgcccggggggaccccggcggggagcggggcccctggaggcgggagggcaccctggccgcccggggggaccctggaggagagcggggcccctggtggagggagggcaccctggccgccaagcccaggatgcagtgggtgacccgggccacagccccctag

SEQ ID NO: 21954 - DNA, 810 bp, synthetic construct
  misc_feature 1..810: note = Description of Artificial Sequence: Synthetic coding sequence
  source 1..810: mol_type = other DNA
tgactgcggctgtggagcctgtggtgggtgttcaacagcgctggctactacctggtggtgtactacgtgcacatcctgtggaatgaggtggaccccaccaccaacagcgcccgggtgtacaatggagctgctgatgctgccagcaccctgctgggcgccatcaccagctttgctgctggctttgtgaagatccgctgggcccgctggagcaagctgctgattgctggggtgacagccacccaggccggcctggtgttcctgctggcccacaccaggcaccccagcagcatctggctgtgctacgccgcctttgtgctcttccggggcagctaccagttcctggtgcccatcgccaccttccagatcgccagcagcctgagcaaggagctgtgtgccctggtgtttggagtgaacaccttctttgccaccatcgtgaagaccatcatcaccttcatcgtgtctgatgtgcggggcctgggcctgcctgtgaggaagcaggccctgaggatgagccggccccggctgggcctgtgcctgcccggccccttccccccccagagcgctgccccagcccgggccggcatggccgccagcagcgcagaagatcctggcagcgagcggggcccctggaggagagctggcaccgtggccgcccggggggaccccggcggggagcggggcccctggaggcgggagggcaccctggccgcccggggggaccctggaggagagcggggcccctggtggagggagggcaccctggccgccaagcccaggatgcagtgggtgacccgggccacagccccctag

SEQ ID NO: 21955 - DNA, 549 bp, synthetic construct
  misc_feature 1..549: note = Description of Artificial Sequence: Synthetic coding sequence
  source 1..549: mol_type = other DNA
atggtgcccagcagccctgctgtggagaagcaggtgcctgtggagcccggccctgaccctgagctgcgctcctggaggcacctggtgtgctacctgtgcttctacggcttcatggcccagatccggcctggagagagcttcatcaccccctacctgctgggccctgacaagaacttcacccgggagcaggtgaccaatgagatcacccctgtgctgagctacagctacctggccgtgctggtgcctgtgttcctgctgacagactacctgcgctacacccctgtgctgctgctgcagggcctgagctttgtgtctgtgtggctgctgctgctgctgggccacagcgtggcccacatgcagctgatggagctgttctacagcgtgaccatggccgcccgcatcgcctacagcagctacatcttcagcctggtgcggcctgcccgctaccagagggtggccggctacagcagagctgctgtgctgctgggcgtcttcaccagctctgtgctgggccagctgctggtgacagtgggccgggtgtccttctag

SEQ ID NO: 21956 - DNA, 465 bp, synthetic construct
  misc_feature 1..465: note = Description of Artificial Sequence: Synthetic coding sequence
  source 1..465: mol_type = other DNA
atggtgcccagcagccctgctgtggagaagcaggtgcctgtggagcccggccctgaccctgagctgcgctcctggaggcacctggtgtgctacctgtgcttctacggcttcatggcccagatccggcctggagagagcttcatcaccccctacctgctgggccctgacaagaacttcacccgggagcaggtgaccaatgagatcacccctgtgctgagctacagctacctggccgtgctggtgcctgtgttcctgctgacagactacctgcgctacacccctgtgctgctgctgcagggcctgagctttgtgtctgtgtggctgctgctgctgctgggccacagcgtggcccacatgcagctgatggagctgttctacagcgtgaccatggccgcccgcatcgcctacagcagctacatcttcagcctggtgcggcctgcccgctaccagagggtggccggctag

SEQ ID NO: 21957 - DNA, 1656 bp, synthetic construct
  misc_feature 1..1656: note = Description of Artificial Sequence: Synthetic coding sequence
  source 1..1656: mol_type = other DNA
atgaggccccagcctgctgagcccgcccctgggggcagaggaaatgaggcctgcagcatccacagcgaggtgaccaatgagatcacccctgtgctgagctacagctacctggccgtgctggtgcctgtgttcctgctgacagactacctgcgctacacccctgtgctgctgctgcagggcctgagctttgtgtctgtgtggctgctgctgctgctgggccacagcgtggcccacatgcagctgatggagctgttctacagcgtgaccatggccgcccgcatcgcctacagcagctacatcttcagcctggtgcggcctgcccgctaccagagggtggccggctacagcagagctgctgtgctgctgggcgtcttcaccagctctgtgctgggccagctgctggtgacagtgggccgggtgtccttcagcaccctgaactacatcagcctggccttcctgaccttctctgtggtgctggccctcttcctgaagaggcccaagaggagcctcttcttcaacagagatgaccggggccgctgtgagaccagcgccagcgagctggagaggatgaaccctggccctgggggcaagctgggccacgccctgcgggtggcctgtggggacagcgtgctggccaggatgctgcgggagctgggggacagcctgcggcggccccagctgcggctgtggagcctgtggtgggtgttcaacagcgctggctactacctggtggtgtactacgtgcacatcctgtggaatgaggtggaccccaccaccaacagcgcccgggtgtacaacggggctgctgatgctgccagcaccctgctgggcgccatcaccagctttgctgctggctttgtgaagatccgctgggcccgctggagcaagctgctgattgctggggtgacagccacccaggccggcctggtgttcctgctggcccacaccaggcaccccagcagcatctggctgtgctatgctgcctttgtgctcttccggggcagctaccagttcctggtgcccatcgccaccttccagatcgccagcagcctgagcaaggagctgtgtgccctggtgtttggagtgaacaccttctttgccaccatcgtgaagaccatcatcaccttcatcgtgtctgatgtgcggggcctgggcctgcctgtgaggaagcagttccagctgtacagcgtgtacttcctgatcctgagcatcatctacttcctgggcgccatgctggatggcctgcggcactgccagaggggccaccacccccggcagcccccagcccagggcctgcggtctgctgctgaggagaaggccgcccaggccctgtctgtgcaggacaagggcctgggcggcctgcagcctgcccagagcccccccctgagccctgaggacagcctgggcgctgtgggccctgccagcctggagcagaggcagagcgacccctacctggcccaggccccagccccccaggccgctgagttcctgagccctgtgaccacccccagcccctgcaccctgtgcagcgcccaggccagcggccctgaggccgcagatgagacctgcccccagctggccgtgcaccccccaggagtgtccaagctgggcctgcagtgcctgcccagtgatggagtgcagaatgtgaaccagtag

SEQ ID NO: 21958 - DNA, 186 bp, synthetic construct
  misc_feature 1..186: note = Description of Artificial Sequence: Synthetic coding sequence
  source 1..186: mol_type = other DNA
atggtgcccagcagccctgctgtggagaagcaggtgcctgtggagcccggccctgaccctgagctgcgctcctggaggcacctggtgtgctacctgtgcttctacggcttcatggcccagatccggcctggagagagcttcatcaccccctacctgctgggccctgacaagaacttcaccaggtag

SEQ ID NO: 21959 - DNA, 705 bp, synthetic construct
  misc_feature 1..705: note = Description of Artificial Sequence: Synthetic coding sequence
  source 1..705: mol_type = other DNA
atggagcccagcagcaagaagctgaccggccgcctgatgctggccgtgggcggcgctgtgctgggcagcctgcagtttggctacaacacaggagtcatcaatgccccccagaaggtgattgaggagttctacaaccagacctgggtgcaccgctacggggagagcatcctgcccaccaccctgaccaccctgtggagcctgtctgtggccatcttctctgtgggcggcatgattggcagcttctctgtgggcctgtttgtgaaccgcttcggcagaagaaattccatgctgatgatgaacctgctggcctttgtgtctgctgtgctgatgggcttcagcaagctgggcaagagctttgagatgctgatcctgggccgcttcatcattggagtgtactgcggcctgaccactggatttgtgcccatgtatgtgggggaggtgagccccacagccctgcggggggccctgggcaccctgcaccagctgggcatcgtggtgggcatcctgattgcccaggtgtcctggggccgcatctacctgcctggaacagccccagcccacagcttcagcggcagccgcatctgtgcccagcagggccgggtgtccctgccccccagcccccacagcctggccgaggacaactacggcacccaggtgcagaggacccagcaccacggcctgcctgtggacagcaagatgacctag

SEQ ID NO: 21960 - DNA, 1377 bp, synthetic construct
  misc_feature 1..1377: note = Description of Artificial Sequence: Synthetic coding sequence
  source 1..1377: mol_type = other DNA
atggagcccagcagcaagaagctgaccggccgcctgatgctggccgtgggcggcgctgtgctgggcagcctgcagtttggctacaacacaggagtcatcaatgccccccagaaggtgattgaggagttctacaaccagacctgggtgcaccgctacggggagagcatcctgcccaccaccctgaccaccctgtggagcctgtctgtggccatcttctctgtgggcggcatgattggcagcttctctgtgggcctgtttgtgaaccgcttcggcagaagaaattccatgctgatgatgaacctgctggcctttgtgtctgctgtgctgatgggcttcagcaagctgggcaagagctttgagatgctgatcctgggccgcttcatcattggagtgtactgcggcctgaccactggatttgtgcccatgtatgtgggggaggtgagccccacagccctgcggggggccctgggcaccctgcaccagctgggcatcgtggtgggcatcctgattgcccaggtgtttggcctggacagcatcatgggcaacaaggacctgtggcccctgctgctgagcatcatcttcatcccagccctgctgcagtgcatcgtgctgcccttctgcccagagagcccccgcttcctgctgatcaacagaaatgaagaaaatagagccaagtctgtgctgaagaagctgcggggcacagcagatgtgacccatgacctgcaggagatgaaggaggagagccggcagatgatgagggagaagaaggtgaccatcctggagctgttccgcagccctgcctaccggcagcccatcctgattgctgtggtgctgcagctgagccagcagctgagcggcatcaatgctgtgttctactacagcaccagcatctttgagaaggccggcgtgcagcagcctgtgtatgccaccatcggcagcggcatcgtgaacacagccttcaccgtggtgtccctgtttgtggtggagagagctggaagaaggaccctgcacctgattggcctggccggcatggccggctgtgccatcctgatgaccatcgccctggccctgctggagcagctgccctggatgagctacctgagcatcgtggccatctttggatttgtggccttctttgaggtgggccctggccccatcccctggttcatcgtggccgagctgttcagccagggccccaggcctgctgccatcgctgtggccggcttcagcaactggaccagcaacttcatcgtgggcatgtgcttccagtatgtggagcagctgtgtggcccctacgtgttcatcatcttcaccgtgctgctggtgctcttcttcatcttcaccctgaatggctccatgcctgagggcggggactag

SEQ ID NO: 21961 - DNA, 1305 bp, synthetic construct
  misc_feature 1..1305: note = Description of Artificial Sequence: Synthetic coding sequence
  source 1..1305: mol_type = other DNA
atggagcccagcagcaagaagctgaccggccgcctgatgctggccgtgggcggcgctgtgctgggcagcctgcagtttggctacaacacaggagtcatcaatgccccccagaaggtgattgaggagttctacaaccagacctgggtgcaccgctacggggagagcatcctgcccaccaccctgaccaccctgtggagcctgtctgtggccatcttctctgtgggcggcatgattggcagcttctctgtgggcctgtttgtgaaccgcttcggcagaagaaattccatgctgatgatgaacctgctggcctttgtgcccatgtatgtgggggaggtgagccccacagccctgcggggggccctgggcaccctgcaccagctgggcatcgtggtgggcatcatcatcttcatcccagccctgctgcagtgcatcgtgctgcccttctgcccagagagcccccgcttcctgctgatcaacagaaatgaagaaaatagagccaagtctgtgctgaagaagctgcggggcacagcagatgtgacccatgacctgcaggagatgaaggaggagagccggcagatgatgagggagaagaaggtgaccatcctggagctgttccgcagccctgcctaccggcagcccatcctgattgctgtggtgctgcagctgagccagcagctgagcggcatcaatgctgtgttctactacagcaccagcatctttgagaaggccggcgtgcagcagcctgtgtatgccaccatcggcagcggcatcgtgaacacagccttcaccgtggtgtccctgtttgtggtggagagagctggaagaaggaccctgcacctgattggcctggccggcatggccggctgtgccatcctgatgaccatcgccctggccctgctggagcagctgccctggatgagctacctgagcatcgtggccatctttggatttgtggccttctttgaggtgggccctggccccatcccctggttcatcgtggccgagctgttcagccagggccccaggcctgctgccatcgctgtggccggcttcagcaactggaccagcaacttcatcgtgggcatgtgcttccagtatgtggagcagctgtgtggcccctacgtgttcatcatcttcaccgtgctgctggtgctcttcttcatcttcacctacttcaaggtgcctgagaccaagggccgcacctttgatgaaattgccagcggcttccggcagggcggggccagccagagcgacaagaccccagaggagctgttccaccccctgggcgctgacagccaggtgtag

SEQ ID NO: 21962 - DNA, 528 bp, synthetic construct
  misc_feature 1..528: note = Description of Artificial Sequence: Synthetic coding sequence
  source 1..528: mol_type = other DNA
atggagcccagcagcaagaagctgaccggccgcctgatgctggccgtgggcggcgctgtgctgggcagcctgcagtttggctacaacacaggagtcatcaatgccccccagaaggtgattgaggagttctacaaccagacctgggtgcaccgctacggggagagcatcctgcccaccaccctgaccaccctgtggagcctgtctgtggccatcttctctgtgggcggcatgattggcagcttctctgtgggcctgtttgtgaaccgcttcggcagaagaaattccatgctgatgatgaacctgctggcctttgtgtctgctgtgctgatgggcttcagcaagctgggcaaccccaagctggagaccacagacacccccctgcccaagaagttccccttccggccccaggccaggaaggtgacagctgtgcagtgccccttctgcctgagcatctgccccctgcacagcctgctgatcctgggccccaccagcacagccacagaagctgggaagggccacaacgtgtag

SEQ ID NO: 21963 - DNA, 1479 bp, synthetic construct
  misc_feature 1..1479: note = Description of Artificial Sequence: Synthetic coding sequence
  source 1..1479: mol_type = other DNA
atggagcccagcagcaagaagctgaccggccgcctgatgctggccgtgggcggcgctgtgctgggcagcctgcagtttggctacaacacaggagtcatcaatgccccccagaaggtgattgaggagttctacaaccagacctgggtgcaccgctacggggagagcatcctgcccaccaccctgaccaccctgtggagcctgtctgtggccatcttctctgtgggcggcatgattggcagcttctctgtgggcctgtttgtgaaccgcttcggcagaagaaattccatgctgatgatgaacctgctggcctttgtgtctgctgtgctgatgggcttcagcaagctgggcaagagctttgagatgctgatcctgggccgcttcatcattggagtgtactgcggcctgaccactggatttgtgcccatgtatgtgggggaggtgagccccacagccctgcggggggccctgggcaccctgcaccagctgggcatcgtggtgggcatcctgattgcccaggtgtttggcctggacagcatcatgggcaacaaggacctgtggcccctgctgctgagcatcatcttcatcccagccctgctgcagtgcatcgtgctgcccttctgcccagagagcccccgcttcctgctgatcaacagaaatgaagaaaatagagccaagtctgtgctgaagaagctgcggggcacagcagatgtgacccatgacctgcaggagatgaaggaggagagccggcagatgatgagggagaagaaggtgaccatcctggagctgttccgcagccctgcctaccggcagcccatcctgattgctgtggtgctgcagctgagccagcagctgagcggcatcaatgctgtgttctactacagcaccagcatctttgagaaggccggcgtgcagcagcctgtgtatgccaccatcggcagcggcatcgtgaacacagccttcaccgtggtgtccctgtttgtggtggagagagctggaagaaggaccctgcacctgattggcctggccggcatggccggctgtgccatcctgatgaccatcgccctggccctgctggagcagctgccctggatgagctacctgagcatcgtggccatctttggatttgtggccttctttgaggtgggccctggccccatcccctggttcatcgtggccgagctgttcagccagggccccaggcctgctgccatcgctgtggccggcttcagcaactggaccagcaacttcatcgtgggcatgtgcttccagtatgtggagcagctgtgtggcccctacgtgttcatcatcttcaccgtgctgctggtgctcttcttcatcttcacctacttcaaggtgcctgagaccaagggccgcacctttgatgaaattgccagcggcttccggcagggcggggccagccagagcgacaagaccccagaggagctgttccaccccctgggcgctgacagccaggtgtag

SEQ ID NO: 21964 - DNA, 753 bp, synthetic construct
  misc_feature 1..753: note = Description of Artificial Sequence: Synthetic coding sequence
  source 1..753: mol_type = other DNA
atgctgatgatgaacctgctggcctttgtgtctgctgtgctgatgggcttcagcaagctgggcaagagctttgagatgctgatcctgggccgcttcatcatcggcgtgtactgcggcctgaccaccggctttgtgcccatgtatgtgggggaggtgagccccacagccctgcggggggccctgggcaccctgcaccagctgggcatcgtggtgggcatcctgattgcccaggtgtttggcctggacagcatcatgggcaacaaggacctgtggcccctgctgctgagcatcatcttcatcccagccctgctgcagtgcatcgtgctgcccttctgcccagagagcccccgcttcctgctgatcaacagaaatgaggagaacagagccaagtctgtgctgaagaagctgcggggcacagcagatgtgacccatgacctgcaggagatgaaggaggagagccggcagatgatgagggagaagaaggtgaccatcctggagctgttccgcagccctgcctaccggcagcccatcctgattgctgtggtgctgcagctgagccagcagctgagcggcatcaatgctgtgttctactacagcaccagcatctttgagaaggccggcgtgcagcagcctgtgtatgccaccatcggcagcggcatcgtgaacacagccttcaccgtggtgtctgtgtccctgtgcctgctggcccccccagccaagccccagggcggcggcagcgccatcttcccctag
